United States Patent Application Publication US 2005/0153317 A1 - sequence listing, part 5

SEQ ID NO: 18510 - DNA, 600 bp, Chicken  19866894227442_3
agagaagaccttggattcggtgctgtgctacgaccgcctgtaagtgtctgggtgcaggtgtggggcaggaggtggtcagcaggggaacatggggcagccgccgtgcaaagtgaatccarctccccagcaaatcaatggagcataatagtgacagggctygagctctgcacacagaccctgggactcaggctgtgctgtggggctctgagctgctctctccagcagcatcgcttgttgtaactgaagctcccaaggtggaaatcgaaatgggggtattaaattacaaaggagtgatctcgrcagatgctcacgtgggacctgttcagaggagaaaggggaggaaaagcttttccttctgctgctgcccgttggtttgaggtctcacggggagtgcctttggacaggaaagtttgttttgaaagtattcagctgtggcactgaatggcccaccctgatggatatcaggtataatatccaattatttttgcacaatgggctctgaaccaggttatgtcatgagctgtatttagaggcaccgtcctggtctgctcgtgggaggcagaaatatccaaaggctgctcctctctgccctaaagaggc

SEQ ID NO: 18511 - DNA, 600 bp, Chicken  19866894227444_1
gcacagaaaatttcacagggatttcatccaccttctagcactgctctgcttctcttgcccctagagtcagcctgctggtccttagatgggagagcatacacttaagaaccaggtaattcactgattcatatcttgaaggttagctagagctgagtgtcatctgtatgtctgtggtgttgcttcatctatggctagcatgtagcatcaacatgtagctgatttagattcccaataagtattattttcacagcatcaataaccctcattagagataggagacaggtcacaggcaaacgcagraaacagatgaaatagcaaggtgccctcagggctgggttaaggaaaatctttaatatagatttgctgttgctagtaattccatgtaggaagtagataagagtaattcaaagacactgtcggacagttgcaccataatgtagttgctttagaaagaacaaaaacataaaatatttctaattcttgttattcaatattttgcatacctgtatcaattcttttctgaaaactgtgtcattccctctcatctctctttcttatatctaattattctcatcatccacccctgaactgggattagga

SEQ ID NO: 18512 - DNA, 599 bp, Chicken  19866894227447_1
  misc_feature (1)..(19): n is any nucleotide
nnnnnnnnnnnnnnnnnnnattttctgaggagctgctgaagttttgtcccaatgaatggaggaaagtgggatcgtgttgggatgctgcacttcattctctgctctggagatgctttccccacaaatgcatgtacagcacagcttggagcccagctttgtgaggttgcttgaagttggccttacttgagccaggccaaagcagtggtgtctgcagcatgctttacaatggtgctggcagatgtaacttagtttttcacacatgagcaaaaccattttcttcaggctgatgtttttttctcygctgtacctttgttttcagcctctgtctcctcatcttcctcacttcctggtctttcctcactcactttctgtaygcccattcagtcatgtatgtgtctgcttctgtgcattatctgcagtagtaaaatatgctgctcttgtgttcctgaaatatttcctgctaagtacastaacggtttgacagcagtagtgctttcagtaatagaattgaaatgtttcagctgttgaagttgcaaaggctgtaattctgaagctcaggaatgataacactcataaacagatttcattttgataaaaga

SEQ ID NO: 18513 - DNA, 600 bp, Chicken  19866894227447_2
tgttgggatgctgcacttcattctctgctctggagatgctttccccacaaatgcatgtacagcacagcttggagcccagctttgtgaggttgcttgaagttggccttacttgagccaggccaaagcagtggtgtctgcagcatgctttacaatggtgctggcagatgtaacttagtttttcacacatgagcaaaaccattttcttcaggctgatgtttttttctcygctgtacctttgttttcagcctctgtctcctcatcttcctcacttcctggtctttcctcactcactttctgtaygcccattcagtcatgtatgtgtctgcttctgtgcattatctgcagtagtaaaatatgctgctcttgtgttcctgaaatatttcctgctaagtacastaacggtttgacagcagtagtgctttcagtaatagaattgaaatgtttcagctgttgaagttgcaaaggctgtaattctgaagctcaggaatgataacactcataaacagatttcattttgataaaagaaggaatgacagatgcgtaagaacggattttgtgaggtcactccttgctctgaagcagaaacaaatattctgaaat

SEQ ID NO: 18514 - DNA, 600 bp, Chicken  19866894227447_3
aagttggccttacttgagccaggccaaagcagtggtgtctgcagcatgctttacaatggtgctggcagatgtaacttagtttttcacacatgagcaaaaccattttcttcaggctgatgtttttttctcygctgtacctttgttttcagcctctgtctcctcatcttcctcacttcctggtctttcctcactcactttctgtaygcccattcagtcatgtatgtgtctgcttctgtgcattatctgcagtagtaaaatatgctgctcttgtgttcctgaaatatttcctgctaagtacastaacggtttgacagcagtagtgctttcagtaatagaattgaaatgtttcagctgttgaagttgcaaaggctgtaattctgaagctcaggaatgataacactcataaacagatttcattttgataaaagaaggaatgacagatgcgtaagaacggattttgtgaggtcactccttgctctgaagcagaaacaaatattctgaaattatatctgacagacattagtctgatccggtcttaaaaacctccaaagaggggaataccacacctctttactgctctatttatagctggtacatagc

SEQ ID NO: 18515 - DNA, 600 bp, Chicken  19866894227449_1
agacagtatgaaaatcactgtatgaatatcaatttctaaaggaaacagcacaccatcatcagggtttcagggaaacttaagaacgttgtgtgaaaatgagccctaagttccaaaacagaaaacagaaaagaaaaaaaaaaaaccaacaaaactgtctcagggaaaaaataaattcttaaaactcctcatttttaaaaccagttacatcatttctactatacaatattgaatgcttatgcagtggcaactctgcaaggtaggaggctgagaaattgcaaagaaaattggcactttagcatraggacagattctgatgccattcacacatacrtgcacaactaccacaatgcagaattacaccattcattttaagagtgcttcttgggatacagctgcacacaaaagatatcagaatcaagccctctataccccacrtatgtcactataattattgcagcaatacacagaagtccaaacaactgcagagctggaaatgggcttaatcatttattctgttcagcaaaacaaatgggccttctgtgcattttcactgaacgcttgtaataactacacccagaatcattcctctgatgctcttac

SEQ ID NO: 18516 - DNA, 600 bp, Chicken  19866894227449_2
atttctaaaggaaacagcacaccatcatcagggtttcagggaaacttaagaacgttgtgtgaaaatgagccctaagttccaaaacagaaaacagaaaagaaaaaaaaaaaaccaacaaaactgtctcagggaaaaaataaattcttaaaactcctcatttttaaaaccagttacatcatttctactatacaatattgaatgcttatgcagtggcaactctgcaaggtaggaggctgagaaattgcaaagaaaattggcactttagcatraggacagattctgatgccattcacacatacrtgcacaactaccacaatgcagaattacaccattcattttaagagtgcttcttgggatacagctgcacacaaaagatatcagaatcaagccctctataccccacrtatgtcactataattattgcagcaatacacagaagtccaaacaactgcagagctggaaatgggcttaatcatttattctgttcagcaaaacaaatgggccttctgtgcattttcactgaacgcttgtaataactacacccagaatcattcctctgatgctcttactccttgcccagccctagagcctctttaacat

SEQ ID NO: 18517 - DNA, 600 bp, Chicken  19866894227449_3
aaaaaaaccaacaaaactgtctcagggaaaaaataaattcttaaaactcctcatttttaaaaccagttacatcatttctactatacaatattgaatgcttatgcagtggcaactctgcaaggtaggaggctgagaaattgcaaagaaaattggcactttagcatraggacagattctgatgccattcacacatacrtgcacaactaccacaatgcagaattacaccattcattttaagagtgcttcttgggatacagctgcacacaaaagatatcagaatcaagccctctataccccacrtatgtcactataattattgcagcaatacacagaagtccaaacaactgcagagctggaaatgggcttaatcatttattctgttcagcaaaacaaatgggccttctgtgcattttcactgaacgcttgtaataactacacccagaatcattcctctgatgctcttactccttgcccagccctagagcctctttaacatctttgctttatagaaccatcttttggggaaaatctcaggctctttgcttcctcagcttttgcaagctctgctgcccagcaggcacgctgctgctgtcccactac

SEQ ID NO: 18518 - DNA, 600 bp, Chicken  19866894227450_1
atacatccagcatgaatacacaaaaattgttatgagtaaaataccttcacaaatggctgctaaattctcgtcgcatctgtcaaatctcctaaactctttaaagaatacagctacaccctcgccgtgtttatgaaactgaacagttatgtaacctgtgctatacaacaggtggagatttagaagacaagagtccatagaagaacaaatagatctcattaaatgctggttttcttccctgctagaaagctattgtttctaagctgagccctcagtatagcacatgagattatacaggttacmtcactggataatcactgaaattcttaaatcatgttgcccttagaattcatgcacttctgtgccaaactaactgcctcttgaggcagctggtccaatmtrtatctctggaatagatrgccttgcagcacatgctggaagaggcattagcaggatggttcagtgcgcatgagggaaagcaagctggattcacatggcagggaaaggaaaggaaacacatacactaatmtgtatggctgcttcctccaatctttcagagaagatattttctgaaagcttgattccaaaacaccaggacatgaa

SEQ ID NO: 18519 - DNA, 600 bp, Chicken  19866894227450_2
ttaaagaatacagctacaccctcgccgtgtttatgaaactgaacagttatgtaacctgtgctatacaacaggtggagatttagaagacaagagtccatagaagaacaaatagatctcattaaatgctggttttcttccctgctagaaagctattgtttctaagctgagccctcagtatagcacatgagattatacaggttacmtcactggataatcactgaaattcttaaatcatgttgcccttagaattcatgcacttctgtgccaaactaactgcctcttgaggcagctggtccaatmtrtatctctggaatagatrgccttgcagcacatgctggaagaggcattagcaggatggttcagtgcgcatgagggaaagcaagctggattcacatggcagggaaaggaaaggaaacacatacactaatmtgtatggctgcttcctccaatctttcagagaagatattttctgaaagcttgattccaaaacaccaggacatgaacacttgaaaagaagacttttcaagaagagaactttccactgttattactgtctatacwatgtcagtactgggaatataacagaaatcacagtggttg

SEQ ID NO: 18520 - DNA, 600 bp, Chicken  19866894227450_3
aaagaatacagctacaccctcgccgtgtttatgaaactgaacagttatgtaacctgtgctatacaacaggtggagatttagaagacaagagtccatagaagaacaaatagatctcattaaatgctggttttcttccctgctagaaagctattgtttctaagctgagccctcagtatagcacatgagattatacaggttacmtcactggataatcactgaaattcttaaatcatgttgcccttagaattcatgcacttctgtgccaaactaactgcctcttgaggcagctggtccaatmtrtatctctggaatagatrgccttgcagcacatgctggaagaggcattagcaggatggttcagtgcgcatgagggaaagcaagctggattcacatggcagggaaaggaaaggaaacacatacactaatmtgtatggctgcttcctccaatctttcagagaagatattttctgaaagcttgattccaaaacaccaggacatgaacacttgaaaagaagacttttcaagaagagaactttccactgttattactgtctatacwatgtcagtactgggaatataacagaaatcacagtggttgaa

SEQ ID NO: 18521 - DNA, 600 bp, Chicken  19866894227450_4
cctcgccgtgtttatgaaactgaacagttatgtaacctgtgctatacaacaggtggagatttagaagacaagagtccatagaagaacaaatagatctcattaaatgctggttttcttccctgctagaaagctattgtttctaagctgagccctcagtatagcacatgagattatacaggttacmtcactggataatcactgaaattcttaaatcatgttgcccttagaattcatgcacttctgtgccaaactaactgcctcttgaggcagctggtccaatmtrtatctctggaatagatrgccttgcagcacatgctggaagaggcattagcaggatggttcagtgcgcatgagggaaagcaagctggattcacatggcagggaaaggaaaggaaacacatacactaatmtgtatggctgcttcctccaatctttcagagaagatattttctgaaagcttgattccaaaacaccaggacatgaacacttgaaaagaagacttttcaagaagagaactttccactgttattactgtctatacwatgtcagtactgggaatataacagaaatcacagtggttgaaaaacaagccattccaac

SEQ ID NO: 18522 - DNA, 600 bp, Chicken  19866894227450_5
ttttcttccctgctagaaagctattgtttctaagctgagccctcagtatagcacatgagattatacaggttacmtcactggataatcactgaaattcttaaatcatgttgcccttagaattcatgcacttctgtgccaaactaactgcctcttgaggcagctggtccaatmtrtatctctggaatagatrgccttgcagcacatgctggaagaggcattagcaggatggttcagtgcgcatgagggaaagcaagctggattcacatggcagggaaaggaaaggaaacacatacactaatmtgtatggctgcttcctccaatctttcagagaagatattttctgaaagcttgattccaaaacaccaggacatgaacacttgaaaagaagacttttcaagaagagaactttccactgttattactgtctatacwatgtcagtactgggaatataacagaaatcacagtggttgaaaaacaagccattccaactttgttttatctcttgggggtattataatttatagaagtgagttatttttcctcagaggagaaatacgaacagcaacaaaaatactaaataaagtacgttgtgataatac

SEQ ID NO: 18523 - DNA, 600 bp, Chicken  19866894227450_6
gtgccaaactaactgcctcttgaggcagctggtccaatmtrtatctctggaatagatrgccttgcagcacatgctggaagaggcattagcaggatggttcagtgcgcatgagggaaagcaagctggattcacatggcagggaaaggaaaggaaacacatacactaatmtgtatggctgcttcctccaatctttcagagaagatattttctgaaagcttgattccaaaacaccaggacatgaacacttgaaaagaagacttttcaagaagagaactttccactgttattactgtctatacwatgtcagtactgggaatataacagaaatcacagtggttgaaaaacaagccattccaactttgttttatctcttgggggtattataatttatagaagtgagttatttttcctcagaggagaaatacgaacagcaacaaaaatactaaataaagtacgttgtgataatacagcaaatggcaacagtacctgaacaaataaaacatacaattgcatgttcctgttttatggaataaaacacctccaatatacgacaagagtgcctaaattgcattcctgtaggctcagaaggttgcagcctga

SEQ ID NO: 18524 - DNA, 600 bp, Chicken  19866894227452_1
gaacacaaacagaaagcaaactatgtgagaaatatgggtgattatatgtggactttgtgagaaaagtatgtttgaaaactaaaatgcttggcattggttgtacgtgtgtgtacaagaagttacccttctcggatatgaatgctgtactctagggccaaattgtgtacactgtacagtttttttatattgacatttatttcattctcaatataaaagtatttggaataaggtcataacctggaacctggaatttttgatctgtagttccctaaaattttttaagtgaaggtttgattcccrtttcattaatttaaaacgaatggcatcaggttattttattttacagagctaaaggtgtatctcagatacccgtaagcacccatatgccagtagctgagaacacctgggttttggaggggggaggataaatagcagacatcagaaggaatgacacacagtgtaactttacttcattttagtgggggagctttgactatgtgaagcagtaagattttttgtttcatcttggtagattcttgagtcttatggccgttctgtactccaggggctttatatactctgtgtataaatgccacatat

SEQ ID NO: 18525 - DNA, 600 bp, Chicken  19866894227458_1
cttgtgttggtaggagcaggcttggcaccactacacaagacatgagctgaatttcacagtcatgaagaggtatattagttcctttctcagtcagcgctgcatttctgctaagaggaggttccggagaagaaagggactggaatccaacaaatctaaatctgtgaactcgaaggtgaaaaaatccccaaacataagtgaagatgaggctctttcaagcaacctaagtgtcccacccaggtcttgctaattacgcatttcacctcttagcgtgctctgcatggcttcaccttgcttgcagaytgcaccctcctgcaggctaggcgtgtgctgaagcactgccagcaatgctgccttctgcctcagggctggggtgaaggcagtgtgtggttatttctggtttgccagcccagaagcaaacctccacaccgcgtgcacattttgcttcagcagaccgaagtgccggtggctggttgctctcttgagccaggtatgaagtacaattctgccactaaatagattttccttttgttgtcacattaatttgcagctcattaatagtgacagcagtgaggtactgcactgaagcagatttgcatattc

SEQ ID NO: 18526 - DNA, 599 bp, Chicken  19866894227469_1
  misc_feature (1)..(42): n is any nucleotide
nnnnnnnnnnnnnnnnnnnnnnnnnnnnnnnnnnnnnnnnnngggaaaaaaaattgagtaagcttaaattttctgaatacttaggggagaaaaagataccagggtaatgttgtcctttccatttatgccaatgtgagtctgaacaacttgtactgcagtcagtgaagttcactgttcagagcatatgcttgggggaattcaaactgaaatcataattctaccagcaaatttcacagggtgcactgtttccaagagctccaatatctgaacctgaccctgaatgtatatattgcacatgtrccycagctggaattgggacccctgtacagcaataggtactgtgcgtgtgctcagacatgaaggaatgagatgagagtagaggtttagctgcctgcgtgtgattctagatagaggaaggaatggaaaccagatctgatgtgtgtttaagtgataagccacacagtcttgcctaagagggatataacttgcaaattcayggactgagttggggtttggaatgggcttgaaatgaagtaatggtgacaggttttttgctggagtgtctaggggggsagtgagaaatactgtgcttaggggat

SEQ ID NO: 18527 - DNA, 599 bp, Chicken  19866894227469_2
  misc_feature (1)..(39): n is any nucleotide
nnnnnnnnnnnnnnnnnnnnnnnnnnnnnnnnnnnnnnngggaaaaaaaattgagtaagcttaaattttctgaatacttaggggagaaaaagataccagggtaatgttgtcctttccatttatgccaatgtgagtctgaacaacttgtactgcagtcagtgaagttcactgttcagagcatatgcttgggggaattcaaactgaaatcataattctaccagcaaatttcacagggtgcactgtttccaagagctccaatatctgaacctgaccctgaatgtatatattgcacatgtrccycagctggaattgggacccctgtacagcaataggtactgtgcgtgtgctcagacatgaaggaatgagatgagagtagaggtttagctgcctgcgtgtgattctagatagaggaaggaatggaaaccagatctgatgtgtgtttaagtgataagccacacagtcttgcctaagagggatataacttgcaaattcayggactgagttggggtttggaatgggcttgaaatgaagtaatggtgacaggttttttgctggagtgtctaggggggsagtgagaaatactgtgcttaggggatgcr

SEQ ID NO: 18528 - DNA, 600 bp, Chicken  19866894227469_3
ttcaaactgaaatcataattctaccagcaaatttcacagggtgcactgtttccaagagctccaatatctgaacctgaccctgaatgtatatattgcacatgtrccycagctggaattgggacccctgtacagcaataggtactgtgcgtgtgctcagacatgaaggaatgagatgagagtagaggtttagctgcctgcgtgtgattctagatagaggaaggaatggaaaccagatctgatgtgtgtttaagtgataagccacacagtcttgcctaagagggatataacttgcaaattcayggactgagttggggtttggaatgggcttgaaatgaagtaatggtgacaggttttttgctggagtgtctaggggggsagtgagaaatactgtgcttaggggatgcrtagagatatgattccttttgaaaggatgtgtggtcacatcagggaggtggcaggagggagattttagcacttggtaagcagccacatcataatcctagaagatcacttccttagaattttttatccctgcatttagtgaacagggtgtttaaaaaaaaaaaaaaagctgagcaatgaactgtgctggaacatgca

SEQ ID NO: 18529 - DNA, 600 bp, Chicken  19866894227469_4
ccaagagctccaatatctgaacctgaccctgaatgtatatattgcacatgtrccycagctggaattgggacccctgtacagcaataggtactgtgcgtgtgctcagacatgaaggaatgagatgagagtagaggtttagctgcctgcgtgtgattctagatagaggaaggaatggaaaccagatctgatgtgtgtttaagtgataagccacacagtcttgcctaagagggatataacttgcaaattcayggactgagttggggtttggaatgggcttgaaatgaagtaatggtgacaggytttttgctggagtgtctaggggggsagtgagaaatactgtgcttaggggatgcrtagagatatgattccttttgaaaggatgtgtggtcacatcagggaggtggcaggagggagattttagcacttggtaagcagccacatcataatcctagaagatcacttccttagaattttttatccctgcatttagtgaacagggtgtttaaaaaaaaaaaaaaagctgagcaatgaactgtgctggaacatgcatattcttcagtggaatcagaaggtgaaactgtccttcagaagaagaggttc

SEQ ID NO: 18530 - DNA, 600 bp, Chicken  19866894227469_5
accctgaatgtatatattgcacatgtrccycagctggaattgggacccctgtacagcaataggtactgtgcgtgtgctcagacatgaaggaatgagatgagagtagaggtttagctgcctgcgtgtgattctagatagaggaaggaatggaaaccagatctgatgtgtgtttaagtgataagccacacagtcttgcctaagagggatataacttgcaaattcayggactgagttggggtttggaatgggcttgaaatgaagtaatggtgacaggttttttgctggagtgtctaggggggsagtgagaaatactgtgcttaggggatgcrtagagatatgattccttttgaaaggatgtgtggtcacatcagggaggtggcaggagggagattttagcacttggtaagcagccacatcataatcctagaagatcacttccttagaattttttatccctgcatttagtgaacagggtgtttaaaaaaaaaaaaaaagctgagcaatgaactgtgctggaacatgcatattcttcagtggaatcagaaggtgaaactgtccttcagaagaagaggttctgagatgggtaaaacttacggtcgg

SEQ ID NO: 18531 - DNA, 600 bp, Chicken  19866894227469_6
ycagctggaattgggacccctgtacagcaataggtactgtgcgtgtgctcagacatgaaggaatgagatgagagtagaggtttagctgcctgcgtgtgattctagatagaggaaggaatggaaaccagatctgatgtgtgtttaagtgataagccacacagtcttgcctaagagggatataacttgcaaattcayggactgagttggggtttggaatgggcttgaaatgaagtaatggtgacaggttttttgctggagtgtctaggggggsagtgagaaatactgtgcttaggggatgcrtagagatatgattccttttgaaaggatgtgtggtcacatcagggaggtggcaggagggagattttagcacttggtaagcagccacatcataatcctagaagatcacttccttagaattttttatccctgcatttagtgaacagggtgtttaaaaaaaaaaaaaaagctgagcaatgaactgtgctggaacatgcatattcttcagtggaatcagaaggtgaaactgtccttcagaagaagaggttctgagatgggtaaaacttacggtcgggacccaaagtttggagattgtaatgatag

SEQ ID NO: 18532 - DNA, 600 bp, Chicken  19866894227470_1
tgctcagaaaattaaatttcatgaagttcgttcttatagattgaacactttgtgctaaacaaatggttatagtctttctggtgctttcaataaattagaacgagatgttcaagccaatattgagctgacacaaattagatttaccaagcaaaattttccagaaatatcatcttgttgaacaagtactgtattttgcacctgttagaaaatgtttattgctttatttcattagcatgtcctgtcaagctttaattttaaattgcttagcagaagaaaaaaaaaaaagcattttgctaaaaraactaacttttaatgataagaaacatcagcccacatggaataaagtaccagcgtgtctttagggtatatttttttgttcgtagcttgacaaacagattttccaaatgattcagatagctgaaatacacaaacctaccactggactctattttaatacaacttgtcaagactgaatcattttcattaaaataataacaataasctattttaagctacattgatttttcagttcctgtctgctttgacaagaatttcctaacacaaggtgtggcttttgctaacgttcatttgaaggaaagc

SEQ ID NO: 18533 - DNA, 600 bp, Chicken  19866894227470_2
tagaaaatgtttattgctttatttcattagcatgtcctgtcaagctttaattttaaattgcttagcagaagaaaaaaaaaaaagcattttgctaaaaraactaacttttaatgataagaaacatcagcccacatggaataaagtaccagcgtgtctttagggtatatttttttgttcgtagcttgacaaacagattttccaaatgattcagatagctgaaatacacaaacctaccactggactctattttaatacaacttgtcaagactgaatcattttcattaaaataataacaataasctattttaagctacattgatttttcagttcctgtctgctttgacaagaatttcctaacacaaggtgtggcttttgctaacgttcatttgaaggaaagctaaaagcagaagaattaaaatatatttgtttacactgttgctatatgtctttgctaaaaggtccatctgtccataatgtcccctaagagaagggaaatacagttctccagaaactgctgttgacttcagtaatttctaccagctgaaagtgtggcccctctgtttaaatgtggaaaaaaaggaaaaaaatatatcaaaaaat

SEQ ID NO: 18534 - DNA, 600 bp, Chicken  19866894227472_1
attgctggttaaattctgctctctatgttttgctaaaattttattctttgtacactactgctaaatattctttgattttactgttacagagggcagaatctggtcttccctctggttgtgcatgctgctttctgtctttcatgctattctcttttctgctgagttacctgttgttaacagcacaaatgatcaaaaacatgtccttgctaaagtcagacaacaagctgtttatgactctaaaataaagaagccttctggttatttggctcaattggagccatatggactatctacctcctmagagcaagtgacaatgagttgaagaaagagactccctccctgaaacactaaacagaaagtgttgatctaattgacagagagaagatctgggaggttaaaagaaacagaatctgatacagccactgcttaaaatgctctgtaaatctaggcttaagcaaagrgtaagaagctcaaaggagaaatgaaattattttaaactatattatgaaaattgcaaaaacgcttcaattgtgtgaacctttgtatagaggtgtatgccagagtagtttcctgttgcatagtacaaatcatttcagaaaa

SEQ ID NO: 18535 - DNA, 600 bp, Chicken  19866894227472_2
agttacctgttgttaacagcacaaatgatcaaaaacatgtccttgctaaagtcagacaacaagctgtttatgactctaaaataaagaagccttctggttatttggctcaattggagccatatggactatctacctcctmagagcaagtgacaatgagttgaagaaagagactccctccctgaaacactaaacagaaagtgttgatctaattgacagagagaagatctgggaggttaaaagaaacagaatctgatacagccactgcttaaaatgctctgtaaatctaggcttaagcaaagrgtaagaagctcaaaggagaaatgaaattattttaaactatattatgaaaattgcaaaaacgcttcaattgtgtgaacctttgtatagaggtgtatgccagagtagtttcctgttgcatagtacaaatcatttcagaaaaaaatgcaagagcatttcagtgagtacaggtaagccttgaattacagtagagaaggttagtgtcatcagcatatctgcagcaattgcagaagaaccttgctgatacacaagatgaggccattcactcatggagttgaactcaaggtactgcacacattatca

SEQ ID NO: 18536 - DNA, 600 bp, Chicken  19866894227476_1
cgagccctgcagctctgggggaagggctggccctgcagctcttgttatctttggatgggaaggcagagacaggcagacacggttaacgcctcggatatatccagatctaaccactgtcctaccaaggaagttagaaaacagaaaaacatcacacagggcatttcaaacaagaagatgaaaggccagctggatttattaccggcgtccgcagcctcttggatgcagcccacttgatgatgctgactgggagctgagcagccttgggatgcctgggagctgagcagcaccaaacctcctccwggagggtcaccgcttccagcgaggcctctgccgttgtgtcatggacccaatggtcctggttcaggttgggtatttgggatgagttctccccccaaaagagcagaggtgtgctggcactactgcacacggagtggggcagtcaccatccctggaggtgtccaagagccatggagacgtggcaytgaggtacacaggcagtgggcatggaggggatgggttgggcttggggatcttggaggtcttttccaacctgaatgattccgtgattctaacacaggggggttgtattaattgctgtgc

SEQ ID NO: 18537 - DNA, 498 bp, Chicken  19866894227476_2
ccagctggatttattaccggcgtccgcagcctcttggatgcagcccacttgatgatgctgactgggagctgagcagccttgggatgcctgggagctgagcagcaccaaacctcctccwggagggtcaccgcttccagcgaggcctctgccgttgtgtcatggacccaatggtcctggttcaggttgggtatttgggatgagttctccccccaaaagagcagaggtgtgctggcactactgcacacggagtggggcagtcaccatccctggaggtgtccaagagccatggagacgtggcaytgaggtacacaggcagtgggcatggaggggatgggttgggcttggggatcttggaggtcttttccaacctgaatgattccgtgattctaacacaggggggttgtattaattgctgtgctgaaaactcagagggagcgtgctgagcttcaaagacccatttacttcccccagaacaagagacaaaagtccttcggtctg

SEQ ID NO: 18538 - DNA, 600 bp, Chicken  19866894227486_1
aagggactggggaatgcacaccaggcatgcacaaagcgtgatatgagatgctgtggcacaccagggcagcctacaccttacctcctgtccaattagacattgtgtctttgtgttttaaagtacccacagttagataaatacacctgcttctattcagtacctccttcaaatggctgccctacctccacagctacagcacttctagctgccactctcagaagtccccaggacagcccataggtcctcattcagtctctctcccatgggctgacagccccttgttgaagaagcaggtagcaytggtacagctttgctctccatcagcagcagatgtacacacaacagtcaggtggaccacaaaggtggaatcaaaggagcaaagttctcttttgcctgctctgtgttcagtagggtaaggagatcttctatttggaggagctgcttgtggaccatggttcttgaaggagttgctctgagtctttcactctttcttccycaattcccactatttcagtagcatttccagtttctgtactgctctccccatrttctgagatcatcccagtattttgttttaggagtaaagccacggagtaatgc

SEQ ID NO: 18539 - DNA, 600 bp, Chicken  19866894227486_2
cacttctagctgccactctcagaagtccccaggacagcccataggtcctcattcagtctctctcccatgggctgacagccccttgttgaagaagcaggtagcaytggtacagctttgctctccatcagcagcagatgtacacacaacagtcaggtggaccacaaaggtggaatcaaaggagcaaagttctcttttgcctgctctgtgttcagtagggtaaggagatcttctatttggaggagctgcttgtggaccatggttcttgaaggagttgctctgagtctttcactctttcttccycaattcccactatttcagtagcatttccagtttctgtactgctctccccatrttctgagatcatcccagtattttgttttaggagtaaagccacggagtaatgcactttaccttgatgtttttaataagtcacacaccatcacacacatttkctgcaaaatgttttaaacctgatgcagtcacactgttaaaatacactcacgttctgctttgggtggaagtcagcatctctgaagtttttatgtctgttagactcctacctggctgtggagccaaggaaaacaaagcccttataccagt

SEQ ID NO: 18540 - DNA, 600 bp, Chicken  19866894227486_3
tcagtctctctcccatgggctgacagccccttgttgaagaagcaggtagcaytggtacagctttgctctccatcagcagcagatgtacacacaacagtcaggtggaccacaaaggtggaatcaaaggagcaaagttctcttttgcctgctctgtgttcagtagggtaaggagatcttctatttggaggagctgcttgtggaccatggttcttgaaggagttgctctgagtctttcactctttcttccycaattcccactatttcagtagcatttccagtttctgtactgctctccccatrttctgagatcatcccagtattttgttttaggagtaaagccacggagtaatgcactttaccttgatgtttttaataagtcacacaccatcacacacatttkctgcaaaatgttttaaacctgatgcagtcacactgttaaaatacactcacgttctgctttgggtggaagtcagcatctctgaagtttttatgtctgttagactcctacctggctgtggagccaaggaaaacaaagcccttataccagtgtggtttggcagaaccccaagctgcctgctgtgatgtgctcgtaccaaccca

SEQ ID NO: 18541 - DNA, 600 bp, Chicken  19866894227486_4
ggtggaccacaaaggtggaatcaaaggagcaaagttctcttttgcctgctctgtgttcagtagggtaaggagatcttctatttggaggagctgcttgtggaccatggttcttgaaggagttgctctgagtctttcactctttcttccycaattcccactatttcagtagcatttccagtttctgtactgctctccccatrttctgagatcatcccagtattttgttttaggagtaaagccacggagtaatgcactttaccttgatgtttttaataagtcacacaccatcacacacatttkctgcaaaatgttttaaacctgatgcagtcacactgttaaaatacactcacgttctgctttgggtggaagtcagcatctctgaagtttttatgtctgttagactcctacctggctgtggagccaaggaaaacaaagcccttataccagtgtggtttggcagaaccccaagctgcctgctgtgatgtgctcgtaccaacccaaagaagtcacagtgcagaaaagcagattcgcctgcttgcagctcatcgcacatttctatctccaggagaaagctaaaggtcagtttaggcaccaatttca

SEQ ID NO: 18542 - DNA, 600 bp, Chicken  19866894227493_1
tgtcagaaagtgacttgggggaaaacaaaaaaatctcactgacaatcaagggaatttctgtttaagtcgaaggcctgtgcaccaaggtcacatttgatcttgcaatataaataaagaaaccctaatgaagtgtgtacagagcctgggaaagacaagcaggggcatgtcaaatcccaaataaacacaccaatgtgacttaagacatgcctggagaaaagtttattattttatttctacccctgtatatatttgatgccagtaaaaactgctgcatcacaagctcttaatttagtccacttwagacacaaggggacctcggatggttgatcctaaacacgcttgcactaagyaactcaaatgagctggcagaaaacacatctcaaactcagctaaatgcttggtatgcacgagcgaaacgagttgtacctggttcagacctgaatccttgctacagcagtaaatcgcattatcagcatacaaagtgaagtcacttgatcatatcaaacctgaataaaccccattgtggctttgctataatccccttatgagaactccgtgcatcattatttacccaactgttatgtgggtggaaacaggaga

SEQ ID NO: 18543 - DNA, 600 bp, Chicken  19866894227493_2
ggaatttctgtttaagtcgaaggcctgtgcaccaaggtcacatttgatcttgcaatataaataaagaaaccctaatgaagtgtgtacagagcctgggaaagacaagcaggggcatgtcaaatcccaaataaacacaccaatgtgacttaagacatgcctggagaaaagtttattattttatttctacccctgtatatatttgatgccagtaaaaactgctgcatcacaagctcttaatttagtccacttwagacacaaggggacctcggatggttgatcctaaacacgcttgcactaagyaactcaaatgagctggcagaaaacacatctcaaactcagctaaatgcttggtatgcacgagcgaaacgagttgtacctggttcagacctgaatccttgctacagcagtaaatcgcattatcagcatacaaagtgaagtcacttgatcatatcaaacctgaataaaccccattgtggctttgctataatccccttatgagaactccgtgcatcattatttacccaactgttatgtgggtggaaacaggagatgcacacatttttgccagaggtgaacaacttttcccaagccaataagttg

SEQ ID NO: 18544 - DNA, 600 bp, Chicken  19866894227496_1
tgggctctgtgcaagcagtctggctcacagacctttgcccgtatgctgtgatgtgactcttgcacctctgaagatttgcacttgctttacatcccattgcagactagcttggcttgtgctgactttaattgttaccctttacatgctcagctgcagcctatgctgttgccttaagtaattttggctggtttatttcacttctcaccctgctttaagacttactgcttgaatgaagattgtatcaaagatcctgtcatcccatcagctgctagcatcacattgctcttaatttttccattygtaaaggaggtgtacatagactcccaaactcctgtcacaggaccttgtagatgctaaaaactgacttgatttcaaaaaggaaccagacacattcacagaaggaaaaaaaatccaccgttgcacacaatgcatggcctccttttcaggaaatccttggtctgcaaattgagctggctgagaaagtaatctggagtcgaatcactacaggcttgtccagctcttctcttcctcaggcttctgccacagctctgtgccagacaggattcaggggaagatgggccacgttggagcttaaggact

SEQ ID NO: 18545 - DNA, 600 bp, Chicken  19866894227499_1
gtttgtgtttgaaagtagctgaagtgatagactgaacttggaagctgcagcactgtgaaaaatggcacattagccatcagtgttttcgcggaggcgtagtaaaggggaacctctttgtgctccagtgggaaaggagagatcttgttatttccttatgatgctgccaaaggggaatccctctgttttttcttcttcctgacggaaatgaactaggactgattgtttcgaccccgccaaggagggaattgaccttcctgcttgtttgccaagaaaataatttgttttctttatttcagagcyttttcttttctttgtaaagcattagtaaccccttaatggaaggcttatcgcactttgatttccatgctaataagtatcagtttctggatatatatccaccatttagcccagagtgttagagatattcagactatcttcatatgagctaaacttgaaaagtttgaatttgctttctggggatcctaaattccagaagtaacagctcttttttctgaaatagaggttcattagattaacccaagtgtagcaagaaaattattgccagtttatgagggctcatttctcatcagccctgtactt

SEQ ID NO: 18546 - DNA, 600 bp, Chicken  19866894227504_1
gagaacagtacattgccattagggtttaatcttttacaggtgaatgtgcaccagccctgagtgcagttatatgcaagatgggtgaagataacgctcactactaccaaagtccaggaggggctttacatgcagggtatccccagtcaattactcttggttttacagtaactaggttggcaaacatgctatacatgactggcgtccagatatcgcgctgtaaatgctggagtagcctcatacatggaaaaaatatgttcacttttgaagggatgaggtgtgtgttggacagggggagcacamtgatactgtaccagcactgtgcaagacctctgtaactagaaaaaaggtgtttttcctctatgctgggcagtgcaagcctggtgagcgtgaatgaatttctttgaatatctccaatgtaacaggtgcatccacagcgagtccttgacgtttccctcttttttgcattcctccacactgcagccctctggctgagcatcttgcagtccctcatgcattctttcctcgagtacctgacccctttggaagttagttgtttacaagggaaatcaaagtgagtggccaagggcgctrtgaggaggc

SEQ ID NO: 18547 - DNA, 600 bp, Chicken  19866894227504_2
ggagcacamtgatactgtaccagcactgtgcaagacctctgtaactagaaaaaaggtgtttttcctctatgctgggcagtgcaagcctggtgagcgtgaatgaatttctttgaatatctccaatgtaacaggtgcatccacagcgagtccttgacgtttccctcttttttgcattcctccacactgcagccctctggctgagcatcttgcagtccctcatgcattctttcctcgagtacctgacccctttggaagttagttgtttacaagggaaatcaaagtgagtggccaagggcgctrtgaggaggcgcacagcgtgcagagggctgggcgaagagctgaggttagcactttctccaccatctggtcttcctctcacctataagttatttgtatgcagagttggcttcccgcactgattggcactgcacaagtcaggataatgtcacggttgcccacgaagccatgccagcatgagagcacaaccttgccagcacaacggcattgattagtgcagaggaactagggcaatccaattataaccacaaatgccattggctttctcaaattcttactcgaataactgtggactttctgctg

SEQ ID NO: 18548 - DNA, 600 bp, Chicken  19866894227512_1
cccaaacgggaccacccaaagcagaagaaaccccatggagaagggtcctgggaggatgctggtgtgagaaccaggcataaagcaggaactcatcacagtgcagggcaggagggacaaaacacccacgggaggaccacgaaaatcaggattaactcaatagctctgcgctgcgtcctgcccgggaactcagcaggatgtggtccagctgtacacaaacacagcatgcagaaaacccagcagctgccagcgggagatgctgctccttcagccccagcgtggccatggggtggctgtgggagmactgctgtcaccgagtccaggggctcctgcagccccagtcccactcttggtcccactctcggtcccggtcccctcctcagccaagcagggacagagaagaggagatgcaatggattttggtggagggaggtctgttcaagggcatccctgcacccctggaaaggtgaggggaagctgggggtgctttcatccattaaattcagcctggcctcagaatgcagcactgcaggtggggatgaggagagtttgtgggaccgggttggaccaggaaggactaactggggaaagcactgggacccc

SEQ ID NO: 18549 - DNA, 576 bp, Chicken  19866894227512_2
gggcactgtccctctctgagagctgaggaacaaaagctgtgggctgggacacgtccccatcacccccatcacctccagcgcgagcatcggctcagccccgacgtgatggggcagcccggtccggtgccgggtaaatcccggcgggggtcccagtccggtcccggggcctcaactgggagtcagagggaccgggagggacagccggggcagtgcgcctcccgagtgctgccttcgggccgatggtaaccacccccccaccatcccgctgtcccgccgtcggggatgcacggagccgagcgwggagccgcatcgggagsgtcgtggcatccctggaggtcccggtccgcccttacctgagcaccggagcgattccccgccgtcacccgctcatggtggctgcagccccgggacggcaccgggagcggcaccggcagcgctcagctccgctctcggggcggttttgagagctccgcgctgcccgcggctcctgcagtgccgccgttcccccgcgactcctcctccggggggaggtgaccgatcccggctcctcccgctgccccacggggcccccgacgg

SEQ ID NO: 18550 - DNA, 559 bp, Chicken  19866894227512_3
gagagctgaggaacaaaagctgtgggctgggacacgtccccatcacccccatcacctccagcgcgagcatcggctcagccccgacgtgatggggcagcccggtccggtgccgggtaaatcccggcgggggtcccagtccggtcccggggcctcaactgggagtcagagggaccgggagggacagccggggcagtgcgcctcccgagtgctgccttcgggccgatggtaaccacccccccaccatcccgctgtcccgccgtcggggatgcacggagccgagcgwggagccgcatcgggagsgtcgtggcatccctggaggtcccggtccgcccttacctgagcaccggagcgattccccgccgtcacccgctcatggtggctgcagccccgggacggcaccgggagcggcaccggcagcgctcagctccgctctcggggcggttttgagagctccgcgctgcccgcggctcctgcagtgccgccgttcccccgcgactcctcctccggggggaggtgaccgatcccggctcctcccgctgccccacggggcccccgacgg

SEQ ID NO: 18551 - DNA, 600 bp, Chicken  19866894227515_1
gaattctgaaagcttttgagctgatcttttttggggtagaatttgctgccacagatggtcgcaggttttctgtggacttctagtttgctgtgaaagtaacagcaagtcataggattaaaataaaaacatatctttcagctgctgtcttatagctaacttctagttagctttgccagttttattatggacttgctgtttgctgtcagatctcctgcaccagagatgcagttgtttgtcaaaaatggctgctttctttgatttctgtagtggtcaccccttttagctaaaccaagtctgctyaattccaggccaatatgttttatcctctgttctgtgtgactttaaacaaattaattagtttcagctagtgcatataagaggaagaaaaattctcagacatccaccagcccwccacatatgcacaggcaggcacacatwttgtgaatgttgtgtaccgtcttctagaatctggagactgtttactctttgtgaatgaaacagaataaataatagtggctagatagctgaccaagaaaaggaaagtcttaagtgctgtgaccacaggttggtttgttgttgtgccatagacttaaggagaaa

SEQ ID NO: 18552 - DNA, 600 bp, Chicken  19866894227515_2
ggattaaaataaaaacatatctttcagctgctgtcttatagctaacttctagttagctttgccagttttattatggacttgctgtttgctgtcagatctcctgcaccagagatgcagttgtttgtcaaaaatggctgctttctttgatttctgtagtggtcaccccttttagctaaaccaagtctgctyaattccaggccaatatgttttatcctctgttctgtgtgactttaaacaaattaattagtttcagctagtgcatataagaggaagaaaaattctcagacatccaccagcccwccacatatgcacaggcaggcacacatwttgtgaatgttgtgtaccgtcttctagaatctggagactgtttactctttgtgaatgaaacagaataaataatagtggctagatagctgaccaagaaaaggaaagtcttaagtgctgtgaccacaggttggtttgttgttgtgccatagacttaaggagaaatagttccaytgtaatttattttcgaatcaaaggttgaaattcttccttccaattcttcctccttttcaggagacatctactgcgtgcagccagagggcttttgagaacacc

SEQ ID NO: 18553 - DNA, 600 bp, Chicken  19866894227515_3
ctgctgtcttatagctaacttctagttagctttgccagttttattatggacttgctgtttgctgtcagatctcctgcaccagagatgcagttgtttgtcaaaaatggctgctttctttgatttctgtagtggtcaccccttttagctaaaccaagtctgctyaattccaggccaatatgttttatcctctgttctgtgtgactttaaacaaattaattagtttcagctagtgcatataagaggaagaaaaattctcagacatccaccagcccwccacatatgcacaggcaggcacacatwttgtgaatgttgtgtaccgtcttctagaatctggagactgtttactctttgtgaatgaaacagaataaataatagtggctagatagctgaccaagaaaaggaaagtcttaagtgctgtgaccacaggttggtttgttgttgtgccatagacttaaggagaaatagttccaytgtaatttattttcgaatcaaaggttgaaattcttccttccaattcttcctccttttcaggagacatctactgcgtgcagccagagggcttttgagaacacctgcagctgctgacaacttcagctgggc

SEQ ID NO: 18554 - DNA, 600 bp, Chicken  19866894227515_4
ccaatatgttttatcctctgttctgtgtgactttaaacaaattaattagtttcagctagtgcatataagaggaagaaaaattctcagacatccaccagcccwccacatatgcacaggcaggcacacatwttgtgaatgttgtgtaccgtcttctagaatctggagactgtttactctttgtgaatgaaacagaataaataatagtggctagatagctgaccaagaaaaggaaagtcttaagtgctgtgaccacaggttggtttgttgttgtgccatagacttaaggagaaatagttccaytgtaatttattttcgaatcaaaggttgaaattcttccttccaattcttcctccttttcaggagacatctactgcgtgcagccagagggcttttgagaacacctgcagctgctgacaacttcagctgggcttcagagtgtttctgagcatcaggtctggcagtctcaatctgctggtaggcgtgtctgctggattctgcagagcttttgctagtggcagtctctgcaaggcaatctctctgcttcttcctccatgccctcccagacccttagggtatgcttccaaattgtatttggcaagc

SEQ ID NO: 18555 - DNA, 600 bp, Chicken  19866894227526_1
atgaagaaggaattctttatgtgcataactttttcactcagaattgttatgcagtatgtctcagaaacttggaataccaaggagtgggcataaaatttgaatacacatttgaaattgtttattctgttaataaataatgggaaaatattgcttttctcttaagacagtaatgattaatctgttatcgctcttttctgaattcacaactaaaaaatgcagcattattttattgatgttcttcttccacatttctattcaagttagctttgcatgtgttttcaaaatatgcatataaaataygcatataaatacttttggatgcacgaagatgcaatttacagtacacaaatagmaaaagatttttgtatcttaataaaagtggcattcagattgttccttttttatagcagaggattagcatgtacctgtgtgttcttttttgtttaatgttttttcttcctaagtgaagaaatttagaatagaatagagctattgttctgtttcaaaagaacaagaactgacaaaacagatggcatttagttttttctatttcaaaaggtactgcttaatacatctgggtaagaaatggaaatatgtcag

SEQ ID NO: 18556 - DNA, 600 bp, Chicken  19866894227526_2
gtatgtctcagaaacttggaataccaaggagtgggcataaaatttgaatacacatttgaaattgtttattctgttaataaataatgggaaaatattgcttttctcttaagacagtaatgattaatctgttatcgctcttttctgaattcacaactaaaaaatgcagcattattttattgatgttcttcttccacatttctattcaagttagctttgcatgtgttttcaaaatatgcatataaaataygcatataaatacttttggatgcacgaagatgcaatttacagtacacaaatagmaaaagatttttgtatcttaataaaagtggcattcagattgttccttttttatagcagaggattagcatgtacctgtgtgttcttttttgtttaatgttttttcttcctaagtgaagaaatttagaatagaatagagctattgttctgtttcaaaagaacaagaactgacaaaacagatggcatttagttttttctatttcaaaaggtactgcttaatacatctgggtaagaaatggaaatatgtcaggactttcccttaaagttttctggaagaactgtttgtagatgggtactccattc

SEQ ID NO: 18557 - DNA, 600 bp, Chicken  19866894227535_1
gcattctttaaaattgactctcttcctttcctttacatatgtctttaaagtgaatactgagaaaaaaaagaaaaggaagtgttatttgacacatcatcattttctagtgaaaggaatacctttccttcatgaaagcatcccagaaacaaagcacctagaatgtacttgcttattattactttccatcagccagactgactcatgtttcatatttgctatgtcatttactgctatatttagttagttggataaatcgatgaaatattcacaagaacatatcaccagatgttttctacatayttaagtgctgaaagcaaaaaaaaaaaattatctttatttgtaaacatgccttatattttaattaatattgataataaatttgatcatgctttttcaaagctggttgaagatgactctaaataaaggtaaagagaacttggactcagaagcatggtgttgtctacatgatttgctctgcctgaattataacacaaattctttatgtttcccttatgtttctttctacagggttattcttcacctttgtattgctttgaattatttactctttatcattttctagtccttcaaactgtggac

SEQ ID NO: 18558 - DNA, 600 bp, Chicken  19866894227553_1
gttacaaactgctcaaattacatgcactcacatagaatgaattagctgaaaggtttatttcctgacagatacaactacaggatatagatgactcatgacctccaaatgtgttagtttatatttgttctttagtagaaacaaaagaaagaaaaactggagagggtaaagaactgtattgtatgatgctgtactttggtgccttgcaaaatgaaaatctaatttttgagaattttttttgtagtttctcagtgacatagtttcaaaaagcttttgttcacagaaatttttgtttggtggggyagagactgtcattgaaaacagagcagacctcacattgcagagtggragtaaagatgattgtctttgctaacattaattttctattagcaagaagtagaaagaaacaaaccacaatgtaatagatgattccctgtaacatctagacacacgttagtattcagctatatgaaaytgcaaggaagatcagaagaaatggtagcaatggtaatgggaggacagttggactagatgatcttgtaggtcctttccaaccttgtgattctatgataaagtgttcagtcctcgttcatatgacaggtg

SEQ ID NO: 18559 - DNA, 600 bp, Chicken  19866894227553_2
tgaaaggtttatttcctgacagatacaactacaggatatagatgactcatgacctccaaatgtgttagtttatatttgttctttagtagaaacaaaagaaagaaaaactggagagggtaaagaactgtattgtatgatgctgtactttggtgccttgcaaaatgaaaatctaatttttgagaattttttttgtagtttctcagtgacatagtttcaaaaagcttttgttcacagaaatttttgtttggtggggaagagactgtcattgaaaacagagcagacctcacattgcagagtggragtaaagatgattgtctttgctaacattaattttctattagcaagaagtagaaagaaacaaaccacaatgtaatagatgattccctgtaacatctagacacacgttagtattcagctatatgaaaytgcaaggaagatcagaagaaatggtagcaatggtaatgggaggacagttggactagatgatcttgtaggtcctttccaaccttgtgattctatgataaagtgttcagtcctcgttcatatgacaggtgggccttctgcatactagtgaatgtcccacatatgcagtgggatact

SEQ ID NO: 18560 - DNA, 530 bp, Chicken  19866894227553_3
gtattgtatgatgctgtactttggtgccttgcaaaatgaaaatctaatttttgagaattttttttgtagtttctcagtgacatagtttcaaaaagcttttgttcacagaaatttttgtttggtggggaagagactgtcattgaaaacagagcagacctcacattgcagagtggragtaaagatgattgtctttgctaacattaattttctattagcaagaagtagaaagaaacaaaccacaatgtaatagatgattccctgtaacatctagacacacgttagtattcagctatatgaaaytgcaaggaagatcagaagaaatggtagcaatggtaatgggaggacagttggactagatgatcttgtaggtcctttccaaccttgtgattctatgataaagtgttcagtcctcgttcatatgacaggtgggccttctgcatactagtgaatgtcccacatatgcagtgggatactaccttgtcataaaatttctaagaaaagctcctcatctttgaggacagaagttttat

SEQ ID NO: 18561 - DNA, 600 bp, Chicken  19866894227555_1
tcagcattccacctagcttgttcggacttcatgagaaatgagatctgtctgctgcagaagagagacgcataaatggtttgtgctgatgtctgagttacttcttcaggttgagcttattagctagtgttccaccctgcagaactcatcttccatccttggaggatactgggatggcagaatgcatcctgtaccacaccaatctataaataagccaccagaacaacaggcagcagaacaatttctgcaagacatttatgtcctaagctcttggccaacttctttcctaagttgccacattcyccagcctgtctgaatcccatctacagcttcaagagtttccatctcatcttgtgctcagaccatgaataactgccttgttatrtatatgcacgatggaagggtggggtggaaaaaactctggtaggagcctgtcttgagcttgcagtaaatccttacccaacagaaacatcaatgagatttggcagctgtgrggagaacttctggaaaatggtttcagattcctaggaagtgagggaggaatttggtaatgggtggggacattttttcattccctcaccatttcttgtcagagaaagggaa

SEQ ID NO: 18562 - DNA, 600 bp, Chicken  19866894227555_2
ctgatgtctgagttacttcttcaggttgagcttattagctagtgttccaccctgcagaactcatcttccatccttggaggatactgggatggcagaatgcatcctgtaccacaccaatctataaataagccaccagaacaacaggcagcagaacaatttctgcaagacatttatgtcctaagctcttggccaacttctttcctaagttgccacattcyccagcctgtctgaatcccatctacagcttcaagagtttccatctcatcttgtgctcagaccatgaataactgccttgttatrtatatgcacgatggaagggtggggtggaaaaaactctggtaggagcctgtcttgagcttgcagtaaatccttacccaacagaaacatcaatgagatttggcagctgtgrggagaacttctggaaaatggtttcagattcctaggaagtgagggaggaatttggtaatgggtggggacattttttcattccctcaccatttcttgtcagagaaagggaagatctaattcctccttactcacaaaaggaaatcctctgtatgtggaaacaatattctctgcacatagtctacaattgtacca

SEQ ID NO: 18563 - DNA, 600 bp, Chicken  19866894227555_3
cacaccaatctataaataagccaccagaacaacaggcagcagaacaatttctgcaagacatttatgtcctaagctcttggccaacttctttcctaagttgccacattcyccagcctgtctgaatcccatctacagcttcaagagtttccatctcatcttgtgctcagaccatgaataactgccttgttatrtatatgcacgatggaagggtggggtggaaaaaactctggtaggagcctgtcttgagcttgcagtaaatccttacccaacagaaacatcaatgagatttggcagctgtgrggagaacttctggaaaatggtttcagattcctaggaagtgagggaggaatttggtaatgggtggggacattttttcattccctcaccatttcttgtcagagaaagggaagatctaattcctccttactcacaaaaggaaatcctctgtatgtggaaacaatattctctgcacatagtctacaattgtaccatcattagagaagtcacaggaagaacctggagtagtgtgataccagatctgtcattctccaacagctctggtagctatggaagtcttggaacaccaggcagagtaaggta

SEQ ID NO: 18564 - DNA, 600 bp, Chicken  19866894227558_1
gttcggtaatcttcttggtgtaccttcagatttaaatacttggccaaaacctttacaaaaggagaacattcatacaaatcagttttttctttaattttttttttcctcctctttttctgtggtgtggcattatggcaaattgtttgctcatagtgttagttattggctctcacaactacattatgaacttcctgttaatactctccaaactgtgttacaatttttaaaattgatgggctggcattagaacagatctgttttctttgctgtttttcttaccttgtgagtgtttaaaacttygttttcacttcttatagcrgtaagtcatccttttgcatgagggaacttgggtggaggggagcagtgctggtagccttgttcaaagcagtggtgttctgttctcagaagatctgtgtgcctcacttggctttgtctgctgctactccacttgcctcattccctagcttaggaggaagatggaggcatgacttgcccagtccaggctgccagccacagggcttctgtggggaactgacaaacaccaactctcgctggtgtgtgctgtcagtacaagctgactgaaaggaccaagtgtcagag

SEQ ID NO: 18565 - DNA, 600 bp, Chicken  19866894227558_2
gtaccttcagatttaaatacttggccaaaacctttacaaaaggagaacattcatacaaatcagttttttctttaattttttttttcctcctctttttctgtggtgtggcattatggcaaattgtttgctcatagtgttagttattggctctcacaactacattatgaacttcctgttaatactctccaaactgtgttacaatttttaaaattgatgggctggcattagaacagatctgttttctttgctgtttttcttaccttgtgagtgtttaaaacttygttttcacttcttatagcrgtaagtcatccttttgcatgagggaacttgggtggaggggagcagtgctggtagccttgttcaaagcagtggtgttctgttctcagaagatctgtgtgcctcacttggctttgtctgctgctactccacttgcctcattccctagcttaggaggaagatggaggcatgacttgcccagtccaggctgccagccacagggcttctgtggggaactgacaaacaccaactctcgctggtgtgtgctgtcagtacaagctgactgaaaggaccaagtgtcagagcaggagcatatgaatcaga

SEQ ID NO: 18566 - DNA, 600 bp, Chicken  19866894227558_3
tgagggaacttgggtggaggggagcagtgctggtagccttgttcaaagcagtggtgttctgttctcagaagatctgtgtgcctcacttggctttgtctgctgctactccacttgcctcattccctagcttaggaggaagatggaggcatgacttgcccagtccaggctgccagccacagggcttctgtggggaactgacaaacaccaactctcgctggtgtgtgctgtcagtacaagctgactgaaaggaccaagtgtcagagcaggagcatatgaatcagaaagactgggaataaacastcatgtaagaactactgagcacagacatcaaaaagcattcaccttcttgttagttcttatgcacatgtggctgttactgcttgtaggtggaaggtttctaccctggtttccatctgcttcctgatttccaaatgatttcccttctccattgctacgaaaagggtggtccttctgccccacagtttcaaaatgctgtgtcttcctaaagttatagagcaagacttaaaatgattggtaaagacaccacctaggtatcctgcagctgcttgtacagactctgtgtctgagcacagaatttga

SEQ ID NO: 18567 - DNA, 600 bp, Chicken  19866894227567_1
tcacaaatggcagatacctcataaatctacccatttggggcttcaaatcttccagaataaaaagtcccccaaaagaagccttcatttccacacgctgagcacgcatctctatgtgaagcatagctaaaatgtgtaactgatgtaaatcactctttatatatcaagttccagattttctgaaagtgttttaggatgtaaaagggacagctgaaaaggcctaaatggtagtgttggccattgctaaccttagggattgctttgtaattatacagcttaactacgtgtggttgtatttaaccwttttttttttccaacagggaacagaagggtaaacattctatgtattttcccatcagtgtgtctcagctgtgcttaactgtgacaacctgagcagctgaaacattaatttagccttatatatgttcaattcagtttgattcatgcaaatacttctgtttgctctaaagagaactgaaaatactgttttctcacaagcagtaattggatggtaatgctatttcatcattgagctcaggaagctacaacatcccacagtaagattcataaatgtttcacagatctggcatcagacatcttttg

SEQ ID NO: 18568 - DNA, 600 bp, Chicken  19866894227569_1
gatgattcagataaaatctaataaaattatttcattacttctgtttggaaagtgcatgtgcattctctgctgaaatttttgtccctctgtacatactccttcacaaaggaaagcattacctggatttgaatttcctcttccctgaggaagataagaaaagcaaggaatgttatttagagaaatgaaagaacatctaaagctccagctttcttttaaaattcgggtaagatttttgggtggtccaaagctcttatggtcaaagaggatgagaaacagtaggagaacatacatctgaacatytgaattgaagaaacagatttcatatgctaatcacaccagtgacagccttgtcacatttgatagttctccacataaaatcagagttgtgaatgaaaataaacttcttgctttggtaaaactgcatggacctctagatgaaatctaattaggatctagcagaaagagtaaaatactgatttctggtagggaagagccaagacttatatgtaagcataatgcatttcagaaygaatgtgacagatatatatggttagctttattatctaagagaaactgtagagtgcaggtcaacctgttctg

SEQ ID NO: 18569 - DNA, 600 bp, Chicken  19866894227569_2
tttttgggtggtccaaagctcttatggtcaaagaggatgagaaacagtaggagaacatacatctgaacatytgaattgaagaaacagatttcatatgctaatcacaccagtgacagccttgtcacatttgatagttctccacataaaatcagagttgtgaatgaaaataaacttcttgctttggtaaaactgcatggacctctagatgaaatctaattaggatctagcagaaagagtaaaatactgatttctggtagggaagagccaagacttatatgtaagcataatgcatttcagaaygaatgtgacagatatatatggttagctttattatctaagagaaactgtagagtgcaggtcaacctgttctggaagacagaattgatcagcattcttgttccatagcttgccttttaactggcaagcaattttttttgttggtggtctaaaggctccgcatagaccaggtgatgttctgagaagtgaaaaacaatgcatgttcaagaggccaaggacataaaaatatacatgaaatttgggtagtctttcagttggtgtaccctaatatgtgaatcctctctgagacactggctattcaac

SEQ ID NO: 18570 - DNA, 600 bp, Chicken  19866894227573_1
tgtaaatgctggggctagcagatacaaaactgtgcagaaatatagtagttagaaactaagaaaataatgtaaagatacatacaggaataatttcactaaggaaccagatcacatgaaggtgatctctgggtacaacgggagaaaacagtgttaaaatccatgacatttcctctcagatttgctcactgtaatcttacagagaattttgctatccatgtctctttggggcttcattttacacagcaccacataaaatttaggatgacatgaagtgctgccattgagattaggcagaacttsctcccagtgggcacaccttattrcatacctgtgaataaactcrcaaagaagaagggagcagatttgttgaccatcacatagtgcaactcccagcaggtctacataccttaataatgtttaatgttgcagatagagattcagccaagactcctttatgggtgcaactttaggtactgcctcagaaaaacatataaacatatgctctagttaaagtaaattggagaatatgcttaagtttttgctgaatagaggatgaatacaagcacacacttaaagttaagtgtttgctccagcattttg

SEQ ID NO: 18571 - DNA, 600 bp, Chicken  19866894227573_2
acaaaactgtgcagaaatatagtagttagaaactaagaaaataatgtaaagatacatacaggaataatttcactaaggaaccagatcacatgaaggtgatctctgggtacaacgggagaaaacagtgttaaaatccatgacatttcctctcagatttgctcactgtaatcttacagagaattttgctatccatgtctctttggggcttcattttacacagcaccacataaaatttaggatgacatgaagtgctgccattgagattaggcagaacttsctcccagtgggcacaccttattrcatacctgtgaataaactcrcaaagaagaagggagcagatttgttgaccatcacatagtgcaactcccagcaggtctacataccttaataatgtttaatgttgcagatagagattcagccaagactcctttatgggtgcaactttaggtactgcctcagaaaaacatataaacatatgctctagttaaagtaaattggagaatatgcttaagtttttgctgaatagaggatgaatacaagcacacacttaaagttaagtgtttgctccagcattttgttgtataaagggccacagaagtg

SEQ ID NO: 18572 - DNA, 600 bp, Chicken  19866894227573_3
agtagttagaaactaagaaaataatgtaaagatacatacaggaataatttcactaaggaaccagatcacatgaaggtgatctctgggtacaacgggagaaaacagtgttaaaatccatgacatttcctctcagatttgctcactgtaatcttacagagaattttgctatccatgtctctttggggcttcattttacacagcaccacataaaatttaggatgacatgaagtgctgccattgagattaggcagaacttsctcccagtgggcacaccttattrcatacctgtgaataaactcrcaaagaagaagggagcagatttgttgaccatcacatagtgcaactcccagcaggtctacataccttaataatgtttaatgttgcagatagagattcagccaagactcctttatgggtgcaactttaggtactgcctcagaaaaacatataaacatatgctctagttaaagtaaattggagaatatgcttaagtttttgctgaatagaggatgaatacaagcacacacttaaagttaagtgtttgctccagcattttgttgtataaagggccacagaagtgaaagccctgacctactcatc

SEQ ID NO: 18573 - DNA, 599 bp, Chicken  19866894227575_1
  misc_feature (1)..(77): n is any nucleotide
nnnnnnnnnnnnnnnnnnnnnnnnnnnnnnnnnnnnnnnnnnnnnnnnnnnnnnnnnnnnnnnnnnnnnnnnnnnnntgaactgtagccttgaaataagctatcttctccaatacctaattagcagtcatgtttggagatcatttctactagttctcacatctctgaatcaattcctcagctttgccatcttcttcaccgcacatcagacatttaccatctctctacaggctcttcacaactaagttcaatccctacagttatctcctatttggtttcaagaagctgactccaatcagcyttattggataycctccattttcaaacatactttaccctctcaggagagcttttctgaatcattcaagaaactccttcattattctccagattgctccaaaaaccattcctttgatgtgtcattagattgatgatacactaaagccacaatctatcacattgaacaactctcgtatgtggtgattaatttaagcttaactttgcatccttggtattctgcaaagataaagtgacaaagacaagctggatttatgttcacaataaataaatcatcaattccacacttggtatacttttgta

SEQ ID NO: 18574 - DNA, 599 bp, Chicken  19866894227575_2
  misc_feature (1)..(66): n is any nucleotide
nnnnnnnnnnnnnnnnnnnnnnnnnnnnnnnnnnnnnnnnnnnnnnnnnnnnnnnnnnnnnnnnnntgaactgtagccttgaaataagctatcttctccaatacctaattagcagtcatgtttggagatcatttctactagttctcacatctctgaatcaattcctcagctttgccatcttcttcaccgcacatcagacatttaccatctctctacaggctcttcacaactaagttcaatccctacagttatctcctatttggtttcaagaagctgactccaatcagcyttattggataycctccattttcaaacatactttaccctctcaggagagcttttctgaatcattcaagaaactccttcattattctccagattgctccaaaaaccattcctttgatgtgtcattagattgatgatacactaaagccacaatctatcacattgaacaactctcgtatgtggtgattaatttaagcttaactttgcatccttggtattctgcaaagataaagtgacaaagacaagctggatttatgttcacaataaataaatcatcaattccacacttggtatacttttgtatactccttgtg

SEQ ID NO: 18575 - DNA, 600 bp, Chicken  19866894227577_1
aaactgctttgggtcaaatttgttcctctgaatgacttatctctgttttttatcagtcacgagttggttgaacttaacagccttgtacagattcgtattcagaatctgataatcattttcccttttcacatggggacaagctagctctgtgtgtgcttatgtgaaataaaattactttgtaaaatgaaactggcatgagagaagtgaagttaaactagtcacttgttactgctgacttgagtccaatgaaatataggataataggtcatcttttcaactaggcctattgtatggtcaaakagaataattaggatagataatctagatttaaagtgctacttgcttgtcaagttgtgttgactacatctctctccctgctttctttgctatactgagtgtactgaggatttcccattggcttattgagtgagataaatagttgggagttgccagtcttcagccccatgttctagaaagcatttcttatgctcccaaaggacacccctggtgtcctatcctttccttttggtcttgctgttgtgggtttcagaggcagaaaaaacaatttctttttaattctacttctgtaggaaagttgtt

SEQ ID NO: 18576 - DNA, 599 bp, Chicken  19866894227578_1
  misc_feature (1)..(58): n is any nucleotide
nnnnnnnnnnnnnnnnnnnnnnnnnnnnnnnnnnnnnnnnnnnnnnnnnnnnnnnnnnttttctggagaggatgctgaggtacagaggctaacttggcaaggtgctgtacaaatgcatgttgggtaaggaatttaatcatgaatctccagcatcaaggaaggagcttggcccagcacttcatctctcagcaaaaatgcaacatacataaataaaaatgagtgaatctaaaagagtaaggaaaaatgtttccctgtccccatgcctgcacacttatgctctctgcagagaattttgaagcracagtyctcagctcaggcaacagcgaggcagtcctcagaatgccttgcaggctgaactgttcaaaccactgcttcgttaacactttatcttgagtaattttgttttctgttgtggttccatctgaagcaaggtatgtaacaaggctctcagtatgaggatgactgggaaaggctcccaggctatgggataggcattggcatgtctcagtgtctcctggttgcacaccacaagtttagtcctccttctcaggcagacaagctctagctgtaatcaattcttccaaatattgttagccttt

SEQ ID NO: 18577 - DNA, 599 bp, Chicken  19866894227578_2
  misc_feature (1)..(52): n is any nucleotide
nnnnnnnnnnnnnnnnnnnnnnnnnnnnnnnnnnnnnnnnnnnnnnnnnnnnttttctggagaggatgctgaggtacagaggctaacttggcaaggtgctgtacaaatgcatgttgggtaaggaatttaatcatgaatctccagcatcaaggaaggagcttggcccagcacttcatctctcagcaaaaatgcaacatacataaataaaaatgagtgaatctaaaagagtaaggaaaaatgtttccctgtccccatgcctgcacacttatgctctctgcagagaattttgaagcracagtyctcagctcaggcaacagcgaggcagtcctcagaatgccttgcaggctgaactgttcaaaccactgcttcgttaacactttatcttgagtaattttgttttctgttgtggttccatctgaagcaaggtatgtaacaaggctctcagtatgaggatgactgggaaaggctcccaggctatgggataggcattggcatgtctcagtgtctcctggttgcacaccacaagtttagtcctccttctcaggcagacaagctctagctgtaatcaattcttccaaatattgttagcctttctccct

SEQ ID NO: 18578 - DNA, 600 bp, Chicken  19866894227584_1
tggcaataagctaagagcagaaatgttgtggtacaagttgtgtaaaaactattcatgaaaatacataattttacagtgattctctggagacttttaattcagtcaaccactgctttacttcttcatgtaactcacctggcatgctcagagttagattacccaccattctgagacttttaaagaagtgactggctgttttgcagcatactgggaagcagctgattgatgacatgttatcatggtactgatgttcaaattatgattagcctacgtgctattttacatcttgtaaaagtcccrtcttactatgccaggttaagctatctaaatataataatttaaaggaaactattaaaataatcatcatgatattgtttgtcgttaagacaaacgatactcttttttttttctgaaggagtaagcatgtactaaactcaggatgcagaggaacaggtcacttaacatttcccaaagaaacttctgaaagcatatattcgaaaaccaaccagccaacgtgagaaaacatatctactcatccacttgctgctactaatcattctgcactctccaactttctctcccccttactgtgtactccag

SEQ ID NO: 18579 - DNA, 600 bp, Chicken  19866894227588_1
tttctcattgccattagtgtaagcataaaggtgactacagacaatagtagatctgtgataaatttttatccatttgaaataaatcagctgataaagtgacgtaacacggctagcagcttttaaggaactccctgggctatgccaggggctgtgccatgccagctcctagcatggggtagcaggaaggatgtgctcagtgcagcgctgcactgcagcagcccccatcccccagcaggcagtctcagagctagctcctggatttccccacaacactgggggatgaattccagaaggacccaytgtgtgcgttttgctttcagagagagaaagcaagaaaatgctttaccttcacattgtgagcaacagcctgaaaaggctttcctagtcattgggagtgcctagtcaagagactgagttgatataattaatcctaaaagcacctctgaggctgagcaccgactttggtaaggtctgtgataatgtgaaaaatgtgaaggctttacccctgccttttgatcagtggggcaggtctcaggccagctgcccatccttctgtttctgcaggtcaacaaacccaagtacctaccattcagcactgct

SEQ ID NO: 18580 - DNA, 600 bp, Chicken  19866894227595_1
gcaagaaatttcccttaaacttttttttttcaggatctctacacacgaaagcaacagataaggaagctgcccaatcacttcattaatcctataaaccaaacacactctgtagatcaggaccaccattgctcttcatcttttccctttcacacgatcttttctgtgtatatcttatcagccttttgctccatgcccagcaaccatccaccttccactccttctccctttatgccgagaccagggcatctccacaatagctttcctattcccaaggattctttaatgatctccgtgtcttayccaggcatgcttttcccatgtaaggtcatcagttttatcacatgcagtttttctcatgacctctgctcaccctctgcatcaaggtactcctctgtaattcccagacttatagcatctgagacatcygatttttccttcttaaataaataaataaaaaggacttatttcaagtttttgcatgtagcgctacagggagggtgggcgagaaggtaggaggactctgctaaagggcattacgtgctgctcccaaacaaaacctttgatcaacaatttgaagctaatctgaagctaaaactggct

SEQ ID NO: 18581 - DNA, 600 bp, Chicken  19866894227595_2
tgctcttcatcttttccctttcacacgatcttttctgtgtatatcttatcagccttttgctccatgcccagcaaccatccaccttccactccttctccctttatgccgagaccagggcatctccacaatagctttcctattcccaaggattctttaatgatctccgtgtcttayccaggcatgcttttcccatgtaaggtcatcagttttatcacatgcagtttttctcatgacctctgctcaccctctgcatcaaggtactcctctgtaattcccagacttatagcatctgagacatcygatttttccttcttaaataaataaataaaaaggacttatttcaagtttttgcatgtagcgctacagggagggtgggcgagaaggtaggaggactctgctaaagggcattacgtgctgctcccaaacaaaacctttgatcaacaatttgaagctaatctgaagctaaaactggctgcaccattgaaacgggcataaggagacttcaatttcaatcactgtgctccttcactaacaccaaatatattctttactactttgctttttttgatattaggaacactggaactgatcaaatacaga

SEQ ID NO: 18582 - DNA, 600 bp, Chicken  19866894227600_1
gacagtgtaatacactgtataagcacttatttttgttattttaagtcagataagaagaaagatctgaatataaggtgctcttagaattatgtaaaggcgagtgcctgttcaggctgtcagctgccttgcaggtttcaacccataaataaagattacagaaattcagattaaatacacaaaacgtattgatagcacagctaggtagcttatggattcattctctaaaactttttctggtgcatttaaaccactgaacttctaactgtatactgaagagaaacctgaagaaagatctgaacwaaagaggaaaatcacagactcattcctgtattacaaaggagataagagaagttttttgtgttgcttaactgttttctctccagctgtttttttttttttttttaagaaggtataaataaggaagtggatcaargtatggatctcagtaaaacattgctacagtagtctgaatttcatatttttgtaacaagtgcttttacttcatctgaaggaattattgctaatggctccgagatacaatatattttcttattgattttgaggattcttttcagcagatctgtgtataattttaatatt

SEQ ID NO: 18583 - DNA, 600 bp, Chicken  19866894227600_2
ttcaacccataaataaagattacagaaattcagattaaatacacaaaacgtattgatagcacagctaggtagcttatggattcattctctaaaactttttctggtgcatttaaaccactgaacttctaactgtatactgaagagaaacctgaagaaagatctgaacwaaagaggaaaatcacagactcattcctgtattacaaaggagataagagaagttttttgtgttgcttaactgttttctctccagctgtttttttttttttttttaagaaggtataaataaggaagtggatcaargtatggatctcagtaaaacattgctacagtagtctgaatttcatatttttgtaacaagtgcttttacttcatctgaaggaattattgctaatggctccgagatacaatatattttcttattgattttgaggattcttttcagcagatctgtgtataattttaatatttactacatatatgacatctttgctgccaacctaccccagtgggaaacattgtgattatgacttatgtctgcttttgtctaatgccacatcttttagtaaaataaattttgatcgtttttgttaccatgatgtg

SEQ ID NO: 18584 - DNA, 600 bp, Chicken  19866894227608_1
actgaatcacttgggatatttttttgaagtccacttcattacctcgattgatgatagatatctaatccaaactcattctcaaagcattttcagtgcttcagaattcagacgagattcctcagagctctgtatgcttggttcaaaaacctccgaagatgagaatctacaggcattttgggaagcctttttcaattatcttcagaatttatccttcttatattttgtcagaaactctttcatgtcaatttgtgatcattgtcacattcttttgctgtgcaccctagtagagaatgtccatcytctccgtaattccctcataactaccagggagttgatgttaggtttgctgcagtgatcttttcctaagatgaacaagttcagctccatccgaaactcatcacagggtaaaacttccaacacttacggcgttggttgccttctgctcaacttgattcagctgttcagtctttctttttatgggggcctaaaattggatggaacgttctggatgtggtctaaaatatgcagaagaaagcagaataattgctcctctcatctactgactatgcttctgttaatatagcccagcatgctgtccca

SEQ ID NO: 18585 - DNA, 600 bp, Chicken  19866894227609_1
catttactccacccagctgggtaatttctcccctccatacttttcagaagggaaatatgtgaaaatatgaattaattcatgtgcagtttccttgtggattagggcctttggcttctgcagtcattcctctgcaaatgccttacaagattatcctggattcaatattctgaacaaataaacacctacaagcaggaatacacatttcagtttttaattaaaaggccattttgaatgactgtatgtgatttattatagtcagtcatgttgtctcttgaaagattgttttcatgtttttctctycctttwttttccctttctacttgctcttcaagctattctgtcttgattggtatgtatgagtgtctacacaacaaaggatgagagacagagatgctggatgtgaaatccaattgcaaacagaattgtcatcttgtatgccatcttaaatctgcttctattagsggacctgaaaagaagtgtagataatgatacacctgtctacactagagctatgacgcatccttctgatgcactgttaytgggcaagatgkgccccagatcacattaactgagacaattccatcactcttagatccttat

SEQ ID NO: 18586 - DNA, 600 bp, Chicken  19866894227609_2
ctccacccagctgggtaatttctcccctccatacttttcagaagggaaatatgtgaaaatatgaattaattcatgtgcagtttccttgtggattagggcctttggcttctgcagtcattcctctgcaaatgccttacaagattatcctggattcaatattctgaacaaataaacacctacaagcaggaatacacatttcagtttttaattaaaaggccattttgaatgactgtatgtgatttattatagtcagtcatgttgtctcttgaaagattgttttcatgtttttctctycctttwttttccctttctacttgctcttcaagctattctgtcttgattggtatgtatgagtgtctacacaacaaaggatgagagacagagatgctggatgtgaaatccaattgcaaacagaattgtcatcttgtatgccatcttaaatctgcttctattagsggacctgaaaagaagtgtagataatgatacacctgtctacactagagctatgacgcatccttctgatgcactgttaytgggcaagatgkgccccagatcacattaactgagacaattccatcactcttagatccttatacacct

SEQ ID NO: 18587 - DNA, 600 bp, Chicken  19866894227609_3
tattctgaacaaataaacacctacaagcaggaatacacatttcagtttttaattaaaaggccattttgaatgactgtatgtgatttattatagtcagtcatgttgtctcttgaaagattgttttcatgtttttctctycctttwttttccctttctacttgctcttcaagctattctgtcttgattggtatgtatgagtgtctacacaacaaaggatgagagacagagatgctggatgtgaaatccaattgcaaacagaattgtcatcttgtatgccatcttaaatctgcttctattagsggacctgaaaagaagtgtagataatgatacacctgtctacactagagctatgacgcatccttctgatgcactgttaytgggcaagatgkgccccagatcacattaactgagacaattccatcactcttagatccttatacacctctctgttcttgactggtaatcatttgggtaggaatcactgatacaagaaaagtctccttgtttttgacacctttgaaactgcaagcagatggacagttattgagtatcactgaaaacagacctaagaaaatattgaattgcttgcatgaaacagga

SEQ ID NO: 18588 - DNA, 593 bp, Chicken  19866894227609_4
atgtgatttattatagtcagtcatgttgtctcttgaaagattgttttcatgtttttctctycctttwttttccctttctacttgctcttcaagctattctgtcttgattggtatgtatgagtgtctacacaacaaaggatgagagacagagatgctggatgtgaaatccaattgcaaacagaattgtcatcttgtatgccatcttaaatctgcttctattagsggacctgaaaagaagtgtagataatgatacacctgtctacactagagctatgacgcatccttctgatgcactgttaytgggcaagatgkgccccagatcacattaactgagacaattccatcactcttagatccttatacacctctctgttcttgactggtaatcatttgggtaggaatcactgatacaagaaaagtctccttgtttttgacacctttgaaactgcaagcagatggacagttattgagtatcactgaaaacagacctaagaaaatattgaattgcttgcatgaaacaggaaaacccatgccagacaatatgcattttttcaagttcatagagattaaaatagcaatagtaaataaaaata

SEQ ID NO: 18589 - DNA, 581 bp, Chicken  19866894227609_5
atagtcagtcatgttgtctcttgaaagattgttttcatgtttttctctycctttwttttccctttctacttgctcttcaagctattctgtcttgattggtatgtatgagtgtctacacaacaaaggatgagagacagagatgctggatgtgaaatccaattgcaaacagaattgtcatcttgtatgccatcttaaatctgcttctattagsggacctgaaaagaagtgtagataatgatacacctgtctacactagagctatgacgcatccttctgatgcactgttaytgggcaagatgkgccccagatcacattaactgagacaattccatcactcttagatccttatacacctctctgttcttgactggtaatcatttgggtaggaatcactgatacaagaaaagtctccttgtttttgacacctttgaaactgcaagcagatggacagttattgagtatcactgaaaacagacctaagaaaatattgaattgcttgcatgaaacaggaaaacccatgccagacaatatgcattttttcaagttcatagagattaaaatagcaatagtaaataaaaata

SEQ ID NO: 18590 - DNA, 563 bp, Chicken  19866894227611_1
  misc_feature (1)..(99): n is any nucleotide
nnnnnnnnnnnnnnnnnnnnnnnnnnnnnnnnnnnnnnnnnnnnnnnnnnnnnnnnnnnnnnnnnnnnnnnnnnnnnnnnnnnnnnnnnnnnnnnnnnnttttatggatcgcatcaccttgcacctgcttctcgccgccctgtgactcacgggctgaaggcgggacggtgacgcgggcaccgtggggtgagctcggggtgcccgtgccccgtaggccgacggaggccgtgggcacgggagcacggctggtgccgcacggtggaaacgcaccgcagccttcctcctttgcttcccagcagygctgcccgcggccggggcgaggtgtagggcggcggcgctccgtgggcgcgacttgactttccctgccttacatcacggctccggcaggacctgttctccctgcgacgcgtcagaggcagtggcagcatcgcccacgggcacagccccgcagccgcctcccctccgggggacggggggggggtctccatcccgatgtccccactttggaggccgtgtcatccgtcagctttaggtttcttgagtcttcccgtttgctgtcggtt

SEQ ID NO: 18591 - DNA, 600 bp, Chicken  19866894227612_1
ttattctgatttgtttttatagcctgttttatcagcttacacagacccagagagtgctttcttcctcaacccacatatgtttgttcactggtgaatgacacaaggataccgtaactggaagcatttagcagatctctgtggcacgggactgctgtcttgattgccttgtcatcctgactcccagatgttctgctgtcctgtttaatcagtgtcattttagtctccttcatttctccaagacctcccccacattttggggataggcactgtgacaacaggcaataataatggcttggctgrgatggatacttccctagtgggaatggttggcctttcattctctgcttctgaactagtctctcartgctgaatgcattataacacttatttaatgagcaatctcttctcagctctcccaaggacttaatagcagaagctgtagcaagatctcctatcatcatccttttttgtttcaaaggcattgctgaacatactccagttctttacgtagtattgttgcagctaaatccaagttatatgcaaaagcagaagaagaaatactgcaggagttctacctctttaacacttttccttcaattt

SEQ ID NO: 18592 - DNA, 600 bp, Chicken  19866894227612_2
ctcaacccacatatgtttgttcactggtgaatgacacaaggataccgtaactggaagcatttagcagatctctgtggcacgggactgctgtcttgattgccttgtcatcctgactcccagatgttctgctgtcctgtttaatcagtgtcattttagtctccttcatttctccaagacctcccccacattttggggataggcactgtgacaacaggcaataataatggcttggctgrgatggatacttccctagtgggaatggttggcctttcattctctgcttctgaactagtctctcartgctgaatgcattataacacttatttaatgagcaatctcttctcagctctcccaaggacttaatagcagaagctgtagcaagatctcctatcatcatccttttttgtttcaaaggcattgctgaacatactccagttctttacgtagtattgttgcagctaaatccaagttatatgcaaaagcagaagaagaaatactgcaggagttctacctctttaacacttttccttcaattttattatgcagttcagtcactggaaacccactgaggcatggaatgcactaggctattctagtcct

SEQ ID NO: 18593 - DNA, 600 bp, Chicken  19866894227619_1
ggcaatcagcacctaaagtaaaatggcttcaagcgattgtgcagaagtgacagctgtagagccagaggaacaaacataaaactgtcaaaaccaaagtaccaatgtgagaggaagagccatgtttatatttgacagtttagagacttgataggatgaaataaaaatagtatttttgcagttgtcttagcaaacctgtttaacactgggaaatgcatgtggggagaaagaattaagcagtatttgtgttggttactatctaaataacagcactacagaagcctaggaagaaactgacatttygttggacatagtgatcttccagatcaccaacacgagcagcaaaagaataaatgaaattaaggacagcaagaaacaatctgccctcaaaagaaaggaaagcaagaaagctaaatccttcagacttccacatcaccattctattctcccttcttttatgcctctttccacctcttcatcacctctctgccttaaatcactcccactcctcatcctcacttctttttttcctgtacctccaacatttcattaagtgtctgactataaagaagcaaaaaggaggcaggaagagcacatgtggtg

SEQ ID NO: 18594 - DNA, 600 bp, Chicken  19866894227620_1
gcatcagactcagctcccgtggcactgccgggccgggctcgtgccagcaactgcgtggccgaggagttctcctgtgatgacgggggctgtgtcagtgccgagctggtctgcgacttcgccaaggcgtgtgctgatggctccgatgagaaccactgtggtgagagccagcagtagatgtggggcacctggctcaccctgcctgcagccccagggcgtcctggaagcaccgtgctgtgtctatactgagctatgggtgttgcaggaaccaccacctttgaggaaggggccgggggctggcaygacaccagcgtgggccagctgcgctgggctgtgcagagggccaccgagcccacggccactgcccttgtgggagcaggtgaggccattcccaccacccagacagtgctccttggtccccaggattacaggagcccaggaggcacagagctgctcctgcttgggmggagggatgtccccgtgggagggctgggggagatgggagcagrgcgcttctcctgggggtgctgcgtggggctctgcccccacctctcaggccgtttccttgcccaggggctttcttggcccttcagagaggagaag

SEQ ID NO: 18595 - DNA, 600 bp, Chicken  19866894227620_2
gccagcagtagatgtggggcacctggctcaccctgcctgcagccccagggcgtcctggaagcaccgtgctgtgtctatactgagctatgggtgttgcaggaaccaccacctttgaggaaggggccgggggctggcaygacaccagcgtgggccagctgcgctgggctgtgcagagggccaccgagcccacggccactgcccttgtgggagcaggtgaggccattcccaccacccagacagtgctccttggtccccaggattacaggagcccaggaggcacagagctgctcctgcttgggmggagggatgtccccgtgggagggctgggggagatgggagcagrgcgcttctcctgggggtgctgcgtggggctctgcccccacctctcaggccgtttccttgcccaggggctttcttggcccttcagagaggagaaggacaaatggtggctcccgccaaggcccgcacgcctctgctgggtccctccggcctggcctgcgccatggagatgagctaccgcctgcacagcggcgcccaaggtatcccagcccggctgcgccctgccagccctgtggctgcaggctgggtgttgctgggcag

SEQ ID NO: 18596 - DNA, 600 bp, Chicken  19866894227620_3
cccagggcgtcctggaagcaccgtgctgtgtctatactgagctatgggtgttgcaggaaccaccacctttgaggaaggggccgggggctggcaygacaccagcgtgggccagctgcgctgggctgtgcagagggccaccgagcccacggccactgcccttgtgggagcaggtgaggccattcccaccacccagacagtgctccttggtccccaggattacaggagcccaggaggcacagagctgctcctgcttgggmggagggatgtccccgtgggagggctgggggagatgggagcagrgcgcttctcctgggggtgctgcgtggggctctgcccccacctctcaggccgtttccttgcccaggggctttcttggcccttcagagaggagaaggacaaatggtggctcccgccaaggcccgcacgcctctgctgggtccctccggcctggcctgcgccatggagatgagctaccgcctgcacagcggcgcccaaggtatcccagcccggctgcgccctgccagccctgtggctgcaggctgggtgttgctgggcagtgctgcccgggtaccccgcaccatctctcatgctcaggtttcc

SEQ ID NO: 18597 - DNA, 600 bp, Chicken  19866894227629_1
gggtgaccatgagttgtcagggacacagagaggctgcatgagttttaggtcaggctcactgtgacactcttgggtatctacctggttttacctgaaacagttaaccatttagaatacgtgcccttgagtacgtgacttgaaagcgttagcagaactgcaggatgcatacatgtttttaatataaggtttattcactaagcactaagtgaattctcagtcaaagctgttttgcatgcactgcagtcctgtgactgagacatgcatgtgtgcatgcctcacatgcaaaaaacaaaaaaatgygcraagtgattttacttctggtagtgcatatactatgtaccaaggagatcattttggtaaaattgccattttctgcctagaagaaatgaattagcaagtttgactatctcttcttgataacattttaaactgtacatgttaaatcctgggatttaatgctattagtataatgtaaccctcttttatattttactttctgtagcttcttatctatcagtgtaatttacttaacagagcttgtaagtttggcagtaatatcaactccgtctagctaaataagaaggcatctgttagaactat

SEQ ID NO: 18598 - DNA, 600 bp, Chicken  19866894227629_2
tgaccatgagttgtcagggacacagagaggctgcatgagttttaggtcaggctcactgtgacactcttgggtatctacctggttttacctgaaacagttaaccatttagaatacgtgcccttgagtacgtgacttgaaagcgttagcagaactgcaggatgcatacatgtttttaatataaggtttattcactaagcactaagtgaattctcagtcaaagctgttttgcatgcactgcagtcctgtgactgagacatgcatgtgtgcatgcctcacatgcaaaaaacaaaaaaatgygcraagtgattttacttctggtagtgcatatactatgtaccaaggagatcattttggtaaaattgccattttctgcctagaagaaatgaattagcaagtttgactatctcttcttgataacattttaaactgtacatgttaaatcctgggatttaatgctattagtataatgtaaccctcttttatattttactttctgtagcttcttatctatcagtgtaatttacttaacagagcttgtaagtttggcagtaatatcaactccgtctagctaaataagaaggcatctgttagaactatgag

SEQ ID NO: 18599 - DNA, 600 bp, Chicken  19866894227632_1
ctaagtcagggatatgctcttccagacagacataaaccccccttggaatttttggggtcatcaaaagcagtactgcactgttcgagagaagcttgctctataaaatcaacttttcttcccttcagtttacctccaaaggttcagagttacctcctacctacttctacattaacaaatttatgcctacacaaatgaaagttcaacttgatgcaaaaacagtgagtgatccagtcattgcagcacagcaagccatttctacaggtatctgcattaatgatgcttgtttgcttattaatttasatccaagatattcatatcattcactctgtacattcaggacctccctctgatatcacagaattgtagaaaggcttgggttggaagggacatcaaagatcatccagttccaactccctgcaatggacaggrttgccaaccactaaatcaggcaccagatgaggcccagcaagcctggtcacgaacacctccagtgatggggcatccatgacttctctgggcaggctgttccagcacctcagcactctcttcagtgaaaaacttccccaacatctaatctaaatctcccctcttttagattaa

SEQ ID NO: 18600 - DNA, 600 bp, Chicken  19866894227632_2
cctccaaaggttcagagttacctcctacctacttctacattaacaaatttatgcctacacaaatgaaagttcaacttgatgcaaaaacagtgagtgatccagtcattgcagcacagcaagccatttctacaggtatctgcattaatgatgcttgtttgcttattaatttasatccaagatattcatatcattcactctgtacattcaggacctccctctgatatcacagaattgtagaaaggcttgggttggaagggacatcaaagatcatccagttccaactccctgcaatggacaggrttgccaaccactaaatcaggcaccagatgaggcccagcaagcctggtcacgaacacctccagtgatggggcatccatgacttctctgggcaggctgttccagcacctcagcactctcttcagtgaaaaacttccccaacatctaatctaaatctcccctcttttagattaaaacaatttccccttgtcctatcactatctactcatgtaaaaagttagtttccctcctgattagaaattccctttaagtactggaaggctccgatgaggtctcccctgagtcttctcttctccaggctga

SEQ ID NO: 18601 - DNA, 519 bp, Chicken  19866894227638_1
gcagtgtggtctctcggatgtgcagtattgttctggcagtcattcttgtttcattctgtgcatgactgagggtatgaattaactattaactctgacatcattgtgatttggagaaaaaatagtcatgaatagttcttgactatatcaaagtatgatattattcatgtaatcctgttgtgaaagtgacaaaactacagccttttttacagttgtttgtgtgacatgagccaacttggcttctggctgcaaagccttaaaatacaaggaagaaagaaagaaagaaaggaaaagaatgggctwattatcttgttatcaggctcttcctctagaagtagctcctcacttggtttgagagagaccagcttctgcaattcaaagcctgaacacttcatctgaatctgatgctgcaactgggcaggattctcagctatgcgtgctgatggtactgtgcagataaggcaatatgtggacaagatctggttaggtttggaggtgaacaagattaggaagaaaattagt

SEQ ID NO: 18602 - DNA, 600 bp, Chicken  19866894227640_1
aatggcttgttggaagggtcctcaaggatcttcaagttccaatcctcttgttgtaggcagggctgacaactgcgagatcaggtactagaccaggatcccatccagcctgaccttaaacaactccagggaaaggacatccaaaacctctctaggcagcctgctccagcacctcaccaccctcttccctctcttcttcttttaggaatacagttttctttggtttcctttaccttatttaattaaattctattcaaatattccactgtttcagaatgaaaaattttcaaaatatattttatyaaatcttctcttcaactgaccccccctgtttttatttgtttgaaaagtgaaatgttttctaaatgttttcccattattctcttcatgaggtaactacttcatatgtctcaaggtatttttcttaatttactgtatgccaagtactgtgtctcaaaaattactcaagccagaaattcttacagcggtctggcagaatactccagtacagagtactcctaaggacagtttaccctcttataaaatatttttcagctagatgagataaatatccttttgaaatgggtttcccccccccctccc

SEQ ID NO: 18603 - DNA, 600 bp, Chicken  19866894227641_1
tccgttttatgtctcagatgctaatgaatgagtatatataatatataatcagccacgcagaattccgcttaccgaggacgagtacatatttttgacgggtaagtgaattgtgccaggtctggtagatttcgacgagttttactatatacatatatgtataatatacatgtatatggcctatatatatgtatataaactaatggcgttgtatcgatgtgcagcagtgacttgttaacctgaccttagtgatgacccatcttgtgagccgttgcaagagtgaatgtaaaaatagttgtggcrtttttcaaaggtcgcctctcgatgcagccgcgtccatcttgcttctgaaatatacttcttgtataaacactgtacattataattgtaatatgtactattatgcagcttcttttacctttaaactgttaagttgaccggtgtcccttcctgcacgaggtagggggacgtgtataataccgaacatttgagaggaatcggatgtttgctgtaacctgtcaccctgtcctgtaaaaaccgacgctacgcgaaccagactcgaattaaaggtttattagggtttttttttacacgcgtctcccg

SEQ ID NO: 18604 - DNA, 600 bp, Chicken  19866894227649_1
agataaggatcaggaagagactctgtaaagactctatactaacaaaaataacttctgacaatagaagtcaattttccatgctacacagctaagaaaagcatggcaatttcaggttgttcagaccagcaaaactcttaagatgaattttaaaaactcttttttcctttgatagctagaatggaaatcgattgctatgtactgtcatcatattttacctgccacaagaagacaaagcagatgataatccgaataggagcaagccacgttccattaaaatagataatgagatccattagcttytggacatcaacagataccagattaacaatttcacctactgttactgctttccttgatgcatttgacatggttaggatctaaacagggtagagaaggaagtataagtcagacaacagctttgatccaaaaatcaaagaactttcttttccttataaagamaamaaaaggtcaaatcctagatactgaaaatgtgctgatgcctgaaatatgtgacttcacttgaggatgaaaaatttactccctttcccaactataatctacagcataacaaagcttctctttccttttcttgtccttccc

SEQ ID NO: 18605 - DNA, 600 bp, Chicken  19866894227649_2
tttcctttgatagctagaatggaaatcgattgctatgtactgtcatcatattttacctgccacaagaagacaaagcagatgataatccgaataggagcaagccacgttccattaaaatagataatgagatccattagcttytggacatcaacagataccagattaacaatttcacctactgttactgctttccttgatgcatttgacatggttaggatctaaacagggtagagaaggaagtataagtcagacaacagctttgatccaaaaatcaaagaactttcttttccttataaagamaamaaaaggtcaaatcctagatactgaaaatgtgctgatgcctgaaatatgtgacttcacttgaggatgaaaaatttactccctttcccaactataatctacagcataacaaagcttctctttccttttcttgtccttcccttcacagataagatctgaaaaaaaaacccagtaaaatacctcacacactgttcagagataaatatagcacagaattacattctagaagtaaatctctaataacatattccctgatattgttgagaacaatgtaacaacatcacaattactaaggttagg

SEQ ID NO: 18606 - DNA, 600 bp, Chicken  19866894227649_3
cctttgatagctagaatggaaatcgattgctatgtactgtcatcatattttacctgccacaagaagacaaagcagatgataatccgaataggagcaagccacgttccattaaaatagataatgagatccattagcttytggacatcaacagataccagattaacaatttcacctactgttactgctttccttgatgcatttgacatggttaggatctaaacagggtagagaaggaagtataagtcagacaacagctttgatccaaaaatcaaagaactttcttttccttataaagamaamaaaaggtcaaatcctagatactgaaaatgtgctgatgcctgaaatatgtgacttcacttgaggatgaaaaatttactccctttcccaactataatctacagcataacaaagcttctctttccttttcttgtccttcccttcacagataagatctgaaaaaaaaacccagtaaaatacctcacacactgttcagagataaatatagcacagaattacattctagaagtaaatctctaataacatattccctgatattgttgagaacaatgtaacaacatcacaattactaaggttaggcta

SEQ ID NO: 18607 - DNA, 600 bp, Chicken  19866894227655_1
acatttcttctcagaaggagtggtgatgcagtggcacaggctgcccaggggggtggtggaggcgccgtccctggaggtgttcagtaactgaggccgtggcactgagggacgtggattagtgggcatgggttgacagttggactcagtgatcttagtggtcttttccagccttaattattctacgactttggcagatgctgtagtgacatgtgactttcctctggttcttgtgggacaacctgcactgcaggaagggagaaatttggccttggtcgccagctatagactttaaccatgttrcatccccaaatcattaaggccctgctggtaccaagctaacaagtagtgtgacagtctgcaaagctgcttgtgctgagccacatagggttggatacagggctgcagaccaagtcaggccaggcaacagggacattatacccaatgacagttttcaaagtaatgcaaaaaatrggtttttatgtttttaacagaatttaaaaagaaaaagcagtctacctctgaagggaaatacttgagcagaatatttgagcacagacaccaaacaactgttctatttaacgtggtgctgatattcagtct

SEQ ID NO: 18608 - DNA, 600 bp, Chicken  19866894227655_2
taattattctacgactttggcagatgctgtagtgacatgtgactttcctctggttcttgtgggacaacctgcactgcaggaagggagaaatttggccttggtcgccagctatagactttaaccatgttrcatccccaaatcattaaggccctgctggtaccaagctaacaagtagtgtgacagtctgcaaagctgcttgtgctgagccacatagggttggatacagggctgcagaccaagtcaggccaggcaacagggacattatacccaatgacagttttcaaagtaatgcaaaaaatrggtttttatgtttttaacagaatttaaaaagaaaaagcagtctacctctgaagggaaatacttgagcagaatatttgagcacagacaccaaacaactgttctatttaacgtggtgctgatattcagtctcttttctgtagtgctcctgctttcctcatgcctctcatcatcttattctagcaaamcaaacagaccaaatccactcactgcaacatggaggccaagccagagacagtaagtgaagaagtcagcctggtgtatctcaaaggtgagctcacacaccytggctttatgagctgc

SEQ ID NO: 18609 - DNA, 600 bp, Chicken  19866894227655_3
tgcaaagctgcttgtgctgagccacatagggttggatacagggctgcagaccaagtcaggccaggcaacagggacattatacccaatgacagttttcaaagtaatgcaaaaaatrggtttttatgtttttaacagaatttaaaaagaaaaagcagtctacctctgaagggaaatacttgagcagaatatttgagcacagacaccaaacaactgttctatttaacgtggtgctgatattcagtctcttttctgtagtgctcctgctttcctcatgcctctcatcatcttattctagcaaamcaaacagaccaaatccactcactgcaacatggaggccaagccagagacagtaagtgaagaagtcagcctggtgtatctcaaaggtgagctcacacaccytggctttatgagctgctgttgctgcatatctgctctcagttaaattgacttctctgatttaaacctgctcaactagttttgtgtgctatttgttaaaatacagtaatttaatcttaattaactataaacttcaacagctacgtttctaccaacatgttagcatatatmcatgtacataggttttccactctgtgtttcatc

SEQ ID NO: 18610 - DNA, 585 bp, Chicken  19866894227655_4
agtaatgcaaaaaatrggtttttatgtttttaacagaatttaaaaagaaaaagcagtctacctctgaagggaaatacttgagcagaatatttgagcacagacaccaaacaactgttctatttaacgtggtgctgatattcagtctcttttctgtagtgctcctgctttcctcatgcctctcatcatcttattctagcaaamcaaacagaccaaatccactcactgcaacatggaggccaagccagagacagtaagtgaagaagtcagcctggtgtatctcaaaggtgagctcacacaccytggctttatgagctgctgttgctgcatatctgctctcagttaaattgacttctctgatttaaacctgctcaactagttttgtgtgctatttgttaaaatacagtaatttaatcttaattaactataaacttcaacagctacgtttctaccaacatgttagcatatatmcatgtacataggttttccactctgtgtttcatcaagatgaagtgtttaaagaggaatgctggcaagaagcaaacaaaagaaaatataggcagactcaatcaaatggggccacccaaa

SEQ ID NO: 18611 - DNA, 417 bp, Chicken  19866894227655_5
cctcatgcctctcatcatcttattctagcaaamcaaacagaccaaatccactcactgcaacatggaggccaagccagagacagtaagtgaagaagtcagcctggtgtatctcaaaggtgagctcacacaccytggctttatgagctgctgttgctgcatatctgctctcagttaaattgacttctctgatttaaacctgctcaactagttttgtgtgctatttgttaaaatacagtaatttaatcttaattaactataaacttcaacagctacgtttctaccaacatgttagcatatatmcatgtacataggttttccactctgtgtttcatcaagatgaagtgtttaaagaggaatgctggcaagaagcaaacaaaagaaaatataggcagactcaatcaaatggggccacccaaa

SEQ ID NO: 18612 - DNA, 599 bp, Chicken  19866894227662_1
  misc_feature (1)..(22): n is any nucleotide
nnnnnnnnnnnnnnnnnnnnnnctgctttcttctctcactgtgacctcccttacttattaatagactgttggtacattttttttttttagccagcaaccagtggagtgtggtgtatggagtgggggaaaccatggtgtcaagcagtcagagggtacaacttaatggaaaccttcacttttatcaaatgacacacaatgacctcttcccagaaggtgatctgctgtcctcatctcatgaccaggtcttgctctgcaagctgaggactgtgagttagttaactaataggatatggccactcraaatgcctacagattacctgctactccaaaaggaaatgggtcacctatgacctgtgtcataccaggtcatccagaaagatgaatttaatactctgtggagggggagaggggagtctcatgcaacacttgtcctccttatattgggttctgcccactttgtctgtctctgcctttctcttctgtacatttacgtactgtaaaccactgagcctcatgcaggcttgaagctgagcagttcggaggcagaaactgaccaactctatattgctggaaggaaaaaactacatccgaattcaagc

SEQ ID NO: 18613 - DNA, 600 bp, Chicken  19866894227671_1
tgtccagggttataccacaaaaaccaagcaagaggtgtgttctgttgagccctttttacagtcaaatattaaaacttctttcaagggtttttattcggctgttggtttacaaatagtttcttgaactcttactcctgtgttaataaaaaaggtgctgacctttttggtgtcttgcagcagtaaaacataatacatttgaatatatacagtgaaaggcattcaaggaggagaaccaactcttaaacaaaactgtgcctgtaaattagtatgttttctgaagattttacttgagtatattaytaaattaacagrgtaaactatgataataatatgtactattataagtaaaatgccttgagcttgtcttaacatactgattcctgaggattgccaggaatcttactaaaaggagcagctcttcagagcattgcttgaaagcacgctgtagctttggaagaaaaatcttgcagcagttctgcaccctcatgcatctctgctgatttcttattatattttccaaacaatatagtacataaaagtaataattacaatagagaaatatgacatgggaagaaaaatgtacttctggcatatactttg

SEQ ID NO: 18614 - DNA, 600 bp, Chicken  19866894227671_2
taccacaaaaaccaagcaagaggtgtgttctgttgagccctttttacagtcaaatattaaaacttctttcaagggtttttattcggctgttggtttacaaatagtttcttgaactcttactcctgtgttaataaaaaaggtgctgacctttttggtgtcttgcagcagtaaaacataatacatttgaatatatacagtgaaaggcattcaaggaggagaaccaactcttaaacaaaactgtgcctgtaaattagtatgttttctgaagattttacttgagtatattaytaaattaacagrgtaaactatgataataatatgtactattataagtaaaatgccttgagcttgtcttaacatactgattcctgaggattgccaggaatcttactaaaaggagcagctcttcagagcattgcttgaaagcacgctgtagctttggaagaaaaatcttgcagcagttctgcaccctcatgcatctctgctgatttcttattatattttccaaacaatatagtacataaaagtaataattacaatagagaaatatgacatgggaagaaaaatgtacttctggcatatactttgagaacttgtgat

SEQ ID NO: 18615 - DNA, 600 bp, Chicken  19866894227674_1
ttgaagctaagactgaaaggaaggagagccaagaccacaccaaccaatggccataaagagaagatgaataagatgtccatcttcattcagaggacaagtcatcacttctgcatctattgctgctagaggagtgagtttaaaatacacaggacttatggcagttgtcacagatatgtatagatgttaatttccttcttgtggatacctctgaaagaagtgctgagatgtcaccccagagactccttaagaagtcttgccctctcctggaaggatgcctcattcctggcattaaacaaggaytgggcttacatctagaagatgaagtcagaacaagcacatgactttttttttccttgataatatcacaatgaaagggggctgagagctgcaggcaggctgctctccttctgccatagcagcttgatcattctgacccaacaagtgtgtggctggcatctaactgctcctctgggtctgggaagaacagactgaattgtctgttagtgttaccaggcagactgatgatgcctgggtcagactttttacccaaaaaaatggcagcaagacaggaaaaacgcatgtaagtgttgtcacagctgt

SEQ ID NO: 18616 - DNA, 600 bp, Chicken  19866894227676_1
gcatcagctaaatattaagtatctaacagcaaactgcatgtcctacaacaggaaagtatttcagcaaaatattaaatgtttacctcctcatcacttagctgcaagacagtacatacaaggcagttagtactcaccaatcatggactacagcattaagataagaactcacacagtctcctagatgttaatttttgtaatttaacatttaacttctgatttctagttgtgaatacgagtaacagcaatttaaaattataaagctatctacagacgttccttttgacttgttttttcaaatcwggtatgtggagcaggagaacatttaaaacagcctttctcactaacaagcttaacatcaastgctcccagcatcccccggatttcagctctggggctaattaaagaggtaactatggcagtttatcctgaggattgttttgttttaaacaagcagtaaacacaacagtctgcttttatatgttctgaatcaggcactattatttaaccaacctggaaataatcaagaaaaccacctcattagaatctctcctcaagatgtaatttgaagttaacagtgagcattgcttaatgaatatagca

SEQ ID NO: 18617 - DNA, 600 bp, Chicken  19866894227676_2
tcagcaaaatattaaatgtttacctcctcatcacttagctgcaagacagtacatacaaggcagttagtactcaccaatcatggactacagcattaagataagaactcacacagtctcctagatgttaatttttgtaatttaacatttaacttctgatttctagttgtgaatacgagtaacagcaatttaaaattataaagctatctacagacgttccttttgacttgttttttcaaatcwggtatgtggagcaggagaacatttaaaacagcctttctcactaacaagcttaacatcaastgctcccagcatcccccggatttcagctctggggctaattaaagaggtaactatggcagtttatcctgaggattgttttgttttaaacaagcagtaaacacaacagtctgcttttatatgttctgaatcaggcactattatttaaccaacctggaaataatcaagaaaaccacctcattagaatctctcctcaagatgtaatttgaagttaacagtgagcattgcttaatgaatatagcaattctacttaatggaaggctttcagccaaactaatgattttaaacatgtcctgaacttac

SEQ ID NO: 18618 - DNA, 473 bp, Chicken  19866894227683_1
cagtcaaacaaacttcattttaaacacatcttgaatgtctcttgatttgatgaaccccagttaacaacttatgtgaaacacttttaagcaagtatgtctcacatgactggcacaatgagaaactgtgcttgcagagaacatgtacagacttgtttactaacacatcaggatgtgacctgttcagatagctgaagtactcttcctagaatcagtataacctgcaccagaatcacacttgtacgacatgtcagatacacacctgatactatcagtttaactacttgagaagggagctcacarcggtgtaaaagaatgcctccttatttcctatttcctatgaaatgcagagcaaacctttctagattagatggactgctctgaaatctcaatccaactggaaaagcctgactgaaatttaacctttgcatataattcacaccttaacagagcaaacaaaaaaacgaaactccaag

SEQ ID NO: 18619 - DNA, 600 bp, Chicken  19866894227684_1
aatacagcatggtgcctaagtgttcagtacagacatcaaagtttttgttgatgtctgaatcagtacacttcgttcaaatagtaacaataacattaaaaataataataataatattgccatggaataaacccatgctatgcaatgtagttataaatcaccacccagtacagactgttatcaagatgaatggacagaatgtccatgtattggcattcattctcattagcaacaaaggccttgatcagaattacccttattactgaaaggcctacaacaatgacagaatacgtgtcagaagcygtaaacacatttcaagtggcaggacagcccttgaatacaagagccaaaggctaaaagaatgattagatcagatgagtttgctcacaactcaccatttaatgcaaacgctactttatacacgaggccagccttgggtatcccactgccctgggcaaactagaagagatggcccctgtctccctagcccactagtctttctcatcatgtgttttttttttttctttcttttctttactttcaaattttttatttagcttgccgtattgagatcaaatcttttaagaaatatgttttaaaagc

SEQ ID NO: 18620 - DNA, 600 bp, Chicken  19866894227684_2
ttgggtatcccactgccctgggcaaactagaagagatggcccctgtctccctagcccactagtctttctcatcatgtgttttttttttttctttcttttctttactttcaaattttttatttagcttgccgtattgagatcaaatcttttaagaaatatgttttaaaagcttgatactttacctgacctttctgttgaatcatctttctttttatatttcttagagtcctttccttttctgttaataacgtatttcatcacacgtctcatatctcatatttcccttcagatttattctcrtgaagaattaaatgtttctatctttctgaattttgccagaaatctccatcttctgactccctctgtttgttgctctccacataaaaattgatatggtcgtggccctcagaatgccagctatcctcccatattctattttgcaaatccacaagtgaatgtagacctgacaaattccaactctaccatctccctaacacatggtcagagttttctgagaaacatgcaaacacagttactgttcccttcatcccactgtgtatcatgtctgtttattctttttaggaaactcttagataaatc

SEQ ID NO: 18621 - DNA, 599 bp, Chicken  19866894227685_1
  misc_feature (1)..(14): n is any nucleotide
nnnnnnnnnnnnnntgaaatttaagaagaaaatgtttctattagtgaaatttctttttttgtttttgaagcaccctgttatctaaagaatctctttgtaagatttttgtaaagattttgttttacaagattttatttgaaattgttttttgcaagattgttatatttctgtatgaatgtattttttattggaataacataaaaagaaattcttatcagcatcacgtgtctggcttcatccttctcctccctggaggcatgcacaccaaacaatgccaaatgctgtgttgacgctttctcyttagtcatctgatcgcatgtacaaacatctttgagtcaggtcgccttgcagaagacaagctcctgcgagaaagtaacttgatcagtagaaacacagtgttcttccatatctgaacagccattgttgattcaacttttgtcttagcagaataaatagttaacagggttcttactgcaagaccactccttggttctgaatcattggctctggagaggtgaatgcgcacagaacaacttctgcttgtgggaaatgatattctgtgagcatttacagtgaaggaaacaagcagtagatgcctg

SEQ ID NO: 18622 - DNA, 600 bp, Chicken  19866894227697_1
aatactgaaataataatacattccagcaaacatttttaaaatcattttttagtaatcattttcattgaaaaagcatgatgtagtggaataaaaagaatactcaccaggccgatattcaccacttcactgcacaaaataaaagaaaatcggtgcagttttagaccagtgaaaagttctcaagaaatgtacctgcaagactgatttgggaactcacccctgcagaaggcaagacaacttctgtcataaactattaccgtcctcctgagaagctcagtcccttgctcctaccagctctggggrctttctgaaaggaaatggctgcgggaccgtgcttgtagatacagttccttggttcgttttatagccagtgagtacctgctcagggtgaagctcccatttctagctgctgaacaagagcaggcctttcttttcctgtcaacttcctagtagccacaggggaaaaaaagaagtatgttctcgtttcagcatccctcgctcctcttgcttttctgaagaggaaacaagcaagctatttctgttactcatcctttcctccagcttccttctttcaggatctttatcacttgtgaatcattccag

SEQ ID NO: 18623 - DNA, 599 bp, Chicken  19866894227700_1
  misc_feature (1)..(52): n is any nucleotide
nnnnnnnnnnnnnnnnnnnnnnnnnnnnnnnnnnnnnnnnnnnnnnnnnnnnaaaatatttattaatacatctttttgtttgtttgttttctaacgtgtcagtaggcaaaagcagagtttttgcttaagaaatctgaaatagcacatctgaaaatgttctccttaatgtttctattaaccttttagtgtatgcagaagaactgtgtctgtgaaatgggaataaaaggagataaaggtgatcctgtaagtatgcattcatgtgaaaaaccttgagagtttgcattttaatcattgtaatcrgtgttgtactgtattatarttggttaatgtgtttataaatcaagatattttctgtgcatacatggtaaaagagaagtgaggtatcataatatgtcactgacatctctgtaaaggctgctgccattttaagagatcaaacaaaaaatctgtctgtaatcacatactgtcttggacatatctttatattactaggtaagygccatggttaaataggtgcatgattttgaagctcaaatcaaaatgttatccttgaaacctgcaataaggaagcaaaggtctgttagacaaaggtttatttc

SEQ ID NO: 18624 - DNA, 599 bp, Chicken  19866894227700_2
  misc_feature (1)..(33): n is any nucleotide
nnnnnnnnnnnnnnnnnnnnnnnnnnnnnnnnnaaaatatttattaatacatctttttgtttgtttgttttctaacgtgtcagtaggcaaaagcagagtttttgcttaagaaatctgaaatagcacatctgaaaatgttctccttaatgtttctattaaccttttagtgtatgcagaagaactgtgtctgtgaaatgggaataaaaggagataaaggtgatcctgtaagtatgcattcatgtgaaaaaccttgagagtttgcattttaatcattgtaatcrgtgttgtactgtattatarttggttaatgtgtttataaatcaagatattttctgtgcatacatggtaaaagagaagtgaggtatcataatatgtcactgacatctctgtaaaggctgctgccattttaagagatcaaacaaaaaatctgtctgtaatcacatactgtcttggacatatctttatattactaggtaagygccatggttaaataggtgcatgattttgaagctcaaatcaaaatgttatccttgaaacctgcaataaggaagcaaaggtctgttagacaaaggtttatttctaccagaaaatgatgactt

SEQ ID NO: 18625 - DNA, 600 bp, Chicken  19866894227700_3
aactgtgtctgtgaaatgggaataaaaggagataaaggtgatcctgtaagtatgcattcatgtgaaaaaccttgagagtttgcattttaatcattgtaatcrgtgttgtactgtattatarttggttaatgtgtttataaatcaagatattttctgtgcatacatggtaaaagagaagtgaggtatcataatatgtcactgacatctctgtaaaggctgctgccattttaagagatcaaacaaaaaatctgtctgtaatcacatactgtcttggacatatctttatattactaggtaagygccatggttaaataggtgcatgattttgaagctcaaatcaaaatgttatccttgaaacctgcaataaggaagcaaaggtctgttagacaaaggtttatttctaccagaaaatgatgacttacgtgaagaaagttctaaaactcttcctctaccattctcttgtaacacttcagaacataacagcttcttggcccaggcaaagaacagagttcatgacctctgaactcttttatatctttaataggtctcccagagacagacaaggtacatatgaaagtttttgcctttctccctagacay

SEQ ID NO: 18626 - DNA, 600 bp, Chicken  19866894227700_4
gccatggttaaataggtgcatgattttgaagctcaaatcaaaatgttatccttgaaacctgcaataaggaagcaaaggtctgttagacaaaggtttatttctaccagaaaatgatgacttacgtgaagaaagttctaaaactcttcctctaccattctcttgtaacacttcagaacataacagcttcttggcccaggcaaagaacagagttcatgacctctgaactcttttatatctttaataggtctcccagagacagacaaggtacatatgaaagtttttgcctttctccctagacaytgagcaactgatcaaatgttttaagactccattttagggtcacttctctttaattttttttgtaaatgacttggatgtaggactagaagttgttctgaacaagtctgattctgatactgacttgggaggagctgttgactctgtcaagggtggggaggccttgcagagagatctgggctaattaaggagcygggcaatcaccaaccacccaaagactaacaagagcaagtgccaaattctgcacctgggatggggcagcccttgctatatatacaggggatgagacactggagaacagcc

SEQ ID NO: 18627 - DNA, 600 bp, Chicken  19866894227700_5
cccaggcaaagaacagagttcatgacctctgaactcttttatatctttaataggtctcccagagacagacaaggtacatatgaaagtttttgcctttctccctagacaytgagcaactgatcaaatgttttaagactccattttagggtcacttctctttaattttttttgtaaatgacttggatgtaggactagaagttgttctgaacaagtctgattctgatactgacttgggaggagctgttgactctgtcaagggtggggaggccttgcagagagatctgggctaattaaggagcygggcaatcaccaaccacccaaagactaacaagagcaagtgccaaattctgcacctgggatggggcagcccttgctatatatacaggggatgagacactggagaacagccccagagaaagggatctgggggtctcgtttaacagtaagttgaatgtgacccagcagtgtgccctggcagccaaaagggccaaccataccctggggggcaccaggtccagcactgcctttgggtgaggaaaatgatcgttctgttctatgctgcatgtggccccacctcaagtactgtgtgaggtttggagc

SEQ ID NO: 18628 - DNA, 600 bp, Chicken  19866894227704_1
tgatgtggggagagctttggcccgtgatgcctgtggggcgtcagagctgcttggcagcgttcggctcccaggagagctgaagctcgggacgtggcttgaacagcagggccgtgagcccctggattgctgcaggggatgcatggggtcagtccatgggtcagctgtgtgctttgagagtcttttaaatcctcgggcgtgttttggttgaaaaggagaggggctttggggagctgagctgccaaaggacctgaggatgttttcctggtatttgtctaagcctaatcgccactttgctgatgmagggagggaaggaaacattcactcctgagctgggtgtttgcctggggctggctaagcagagggctgctggccaagccctgccgggagctgaacatggggatcgggacaggatgcctgcagggacacagcactggggacactgcacgtggggatgtggagcctgaggggctgcagcagcgcctgtgatgagtgctcggcacctgctgcttgctgatgtgcatcctcctttgctggagcagctgtttttgtgggtgaaatcaaaagagagaaaatctgagattttggctgtgaaggttgagt

SEQ ID NO: 18629 - DNA, 455 bp, Chicken  19866894227712_1
ctcattcacagaaacataccatcttacatttagtgtaagacatgataatcaccctaactctaacctgcctctcctgtcagccattttctcttgagatgaagtctatagacacaggttgaatagcctcccatcttctgctgtgctggaacagagaacttgcacagcagtatgtttaagaaagtaaagctgagagtctggttgggcctgaaactgctgcaaaaaggacacattaatctgcaataggacaggagtactgcaagtggtaagtgagaaaaattctgcaaactcaagtaattcaamtcctaggatgagactgaactttcagtgccctcatgtgcagagccacaaaaacatatgtggttgcttccagcttctgaactagcccatggtaccagatgatggggttaagatgaagagctgtatttcctgcactatcctgcttcctcctcataaat

SEQ ID NO: 18630 - DNA, 600 bp, Chicken  19866894227715_1
caaccgtgtcctttggtgggtgggtcccgggcccaaggcccagaaccatacaaaatatggctctctgaggtcagcagtggggaaggacatggctcaggctgtgcgtaagctgtggcaaagcttcggggtttgacagccatgggctgcacccagcatcgaagtggaaaacagagctctggactgggaaggctgcagcagtggctgcaggaggggaagagaagaagcccgtgctggagcagaggtgctggagccaggcaggatgctttgtccctgcatggcttgctgcccccaggaccctgyggtgtgtggggtgggtttgttcccaccgggacacagagaagcaaggcacagagcagttcatggggccagagccaggacatacctcctccagctggctgtgcacgtgctggacgatcagatcaatggccaccgtgtttccactccctggagtgagccaaaagcagaagagaaacggtgaggtgtggccacagagccgacctccctgccctgctgcaggacccagaacctgctctgcttaaaccccaagcagttggtgattgcccagctctccaatctgcctacatctctcagcaaggcctc

SEQ ID NO: 18631 - DNA, 600 bp, Chicken  19866894227715_2
acgtgctggacgatcagatcaatggccaccgtgtttccactccctggagtgagccaaaagcagaagagaaacggtgaggtgtggccacagagccgacctccctgccctgctgcaggacccagaacctgctctgcttaaaccccaagcagttggtgattgcccagctctccaatctgcctacatctctcagcaaggcctctccgcccttaatggggtcaacagctccttctgtttagtgctgtccctggaggagttccagagctgtggagatgtggcactgagggacacatcaataggcayggcggggygggsttggactcgaggatctgagaggtctttcccaacatgaatgatcccatggttgccagcaagcttgctcacgacttctagccctacatccaagtcaccgatgararcacrgacctaaaacggagccctgacagaaccccattcagcacgaggagcacggggccgtacctcggggcacgacgatgtctgccagccgcatggtgggctggatgtactggtcgaaggcgggcttcacaaacttgttgtactgcttgatgactccctcgatgtcgcggccgcgctcactgatgt

SEQ ID NO: 18632 - DNA, 600 bp, Chicken  19866894227715_3
gacgatcagatcaatggccaccgtgtttccactccctggagtgagccaaaagcagaagagaaacggtgaggtgtggccacagagccgacctccctgccctgctgcaggacccagaacctgctctgcttaaaccccaagcagttggtgattgcccagctctccaatctgcctacatctctcagcaaggcctctccgcccttaatggggtcaacagctccttctgtttagtgctgtccctggaggagttccagagctgtggagatgtggcactgagggacacatcaataggcayggcggggygggsttggactcgaggatctgagaggtctttcccaacatgaatgatcccatggttgccagcaagcttgctcacgacttctagccctacatccaagtcaccgatgararcacrgacctaaaacggagccctgacagaaccccattcagcacgaggagcacggggccgtacctcggggcacgacgatgtctgccagccgcatggtgggctggatgtactggtcgaaggcgggcttcacaaacttgttgtactgcttgatgactccctcgatgtcgcggccgcgctcactgatgtccctgcgc

SEQ ID NO: 18633 - DNA, 600 bp, Chicken  19866894227715_4
atcagatcaatggccaccgtgtttccactccctggagtgagccaaaagcagaagagaaacggtgaggtgtggccacagagccgacctccctgccctgctgcaggacccagaacctgctctgcttaaaccccaagcagttggtgattgcccagctctccaatctgcctacatctctcagcaaggcctctccgcccttaatggggtcaacagctccttctgtttagtgctgtccctggaggagttccagagctgtggagatgtggcactgagggacacatcaataggcayggcggggygggsttggactcgaggatctgagaggtctttcccaacatgaatgatcccatggttgccagcaagcttgctcacgacttctagccctacatccaagtcaccgatgararcacrgacctaaaacggagccctgacagaaccccattcagcacgaggagcacggggccgtacctcggggcacgacgatgtctgccagccgcatggtgggctggatgtactggtcgaaggcgggcttcacaaacttgttgtactgcttgatgactccctcgatgtcgcggccgcgctcactgatgtccctgcgcaggc

SEQ ID NO: 18634 - DNA, 600 bp, Chicken  19866894227715_5
ggacccagaacctgctctgcttaaaccccaagcagttggtgattgcccagctctccaatctgcctacatctctcagcaaggcctctccgcccttaatggggtcaacagctccttctgtttagtgctgtccctggaggagttccagagctgtggagatgtggcactgagggacacatcaataggcayggcggggygggsttggactcgaggatctgagaggtctttcccaacatgaatgatcccatggttgccagcaagcttgctcacgacttctagccctacatccaagtcaccgatgararcacrgacctaaaacggagccctgacagaaccccattcagcacgaggagcacggggccgtacctcggggcacgacgatgtctgccagccgcatggtgggctggatgtactggtcgaaggcgggcttcacaaacttgttgtactgcttgatgactccctcgatgtcgcggccgcgctcactgatgtccctgcgcaggcggcgcaccaagccggatgtccgagtccgtgtccacaaagatcttcaggtcgaggagctggaaggagagcagcgggaacaaagcacaccggctgaagctccag

SEQ ID NO: 18635 - DNA, 600 bp, Chicken  19866894227715_6
acccagaacctgctctgcttaaaccccaagcagttggtgattgcccagctctccaatctgcctacatctctcagcaaggcctctccgcccttaatggggtcaacagctccttctgtttagtgctgtccctggaggagttccagagctgtggagatgtggcactgagggacacatcaataggcayggcggggygggsttggactcgaggatctgagaggtctttcccaacatgaatgatcccatggttgccagcaagcttgctcacgacttctagccctacatccaagtcaccgatgararcacrgacctaaaacggagccctgacagaaccccattcagcacgaggagcacggggccgtacctcggggcacgacgatgtctgccagccgcatggtgggctggatgtactggtcgaaggcgggcttcacaaacttgttgtactgcttgatgactccctcgatgtcgcggccgcgctcactgatgtccctgcgcaggcggcgcaccaagccggatgtccgagtccgtgtccacaaagatcttcaggtcgaggagctggaaggagagcagcgggaacaaagcacaccggctgaagctccagca

SEQ ID NO: 18636 - DNA, 600 bp, Chicken  19866894227715_7
agaacctgctctgcttaaaccccaagcagttggtgattgcccagctctccaatctgcctacatctctcagcaaggcctctccgcccttaatggggtcaacagctccttctgtttagtgctgtccctggaggagttccagagctgtggagatgtggcactgagggacacatcaataggcayggcggggygggsttggactcgaggatctgagaggtctttcccaacatgaatgatcccatggttgccagcaagcttgctcacgacttctagccctacatccaagtcaccgatgararcacrgacctaaaacggagccctgacagaaccccattcagcacgaggagcacggggccgtacctcggggcacgacgatgtctgccagccgcatggtgggctggatgtactggtcgaaggcgggcttcacaaacttgttgtactgcttgatgactccctcgatgtcgcggccgcgctcactgatgtccctgcgcaggcggcgcaccaagccggatgtccgagtccgtgtccacaaagatcttcaggtcgaggagctggaaggagagcagcgggaacaaagcacaccggctgaagctccagcagctg

SEQ ID NO: 18637 - DNA, 600 bp, Chicken  19866894227717_1
tttagtgtcaatgaatgtcctcatgtttgcactgtgttggagctctaaaaaacaagggaataatattccatagcctttcaaagcaaagacctaggagctgatgattacaaagatgaaggtttaaatatgggaaatattagagaatatcagaaggacaggtaacatatccttatttagaaactaattcttcacgtttgtaaaagtggtcatcactctgccatgagtatatttaatagcttctttttttctgtatctctgaaaaatataattgcagtattatggtttgtaagacttcgtgayactggtagatgcttttccattttaaagatgtgaacagcagaaatcaagttagaggctctattaaatggcaaagaatgtgaaaaggcaaatcaggccttgccaaagatgaaagcatttacctcctaaaattctgtttagccagctgtaagtctacaggtgtctccatccatcagacatttccctgtttgaatgacaaggcatacttacaaaacgtgcggaaactacccccattaatagtttagcatttcttgcatctaaaaataatgaggaaacaaaaaggaacagttattctgctcaaaa

SEQ ID NO: 18638 - DNA, 600 bp, Chicken  19866894227723_1
gttatttttgcactcttttctttgcaggaagggtgttttattaccttaagtctctgattgaaagcatcaaacagcagtttgattccatcctgagtcaggttaaggatgaggtcgtggctaagaggtgactgcaaaacaagaaaagctgttaggcctgtaatttcaaggcttctccgttcagatataaaaatcagcatacgactgggttaccatggaaaaaacaaaactgcctcagaagacaagtgtgttcaatgaatacgtataatgcaaatacatttggccaaagcttccgatgccttyagttttcttacagcaacaaagagggtcactgaatcttgcgagaactcccagaaaggcatcggtccattaagttgagagggaaaacaagcatcctcagaaatgaacacatcaagcttagtgccacacacagacatcacacagggcagtctgccacaatcctggcacacagaaataacagcacatctcacatcttgcatcacaacaacaacatcacttgaaaggacggcaaaagggctctccacttcagaaagccaggagtgtcacaattttcttcaggcctgaaaaggaaggcttcagact

SEQ ID NO: 18639 - DNA, 600 bp, Chicken  19866894227738_1
agcatagcacaagtggtgtgcagccagcgggagtttctgatctctgagcagccttacaggctttgagagctgactcctggctgcgtgcgttggttacctggtttcacggaggtcactccttctccaatgctctccacaatcccagctccttcgtggcctaggatgactgggaaatctacgtcaggaaagttaccttctagaacatgttcatctgtgtggcagatccccgtggccaccatctgttggagtggagagagtggatgagccgttgaaacagcctggttttttgaaagccagttkgtggcagcagtgttttgtgggtgcccccacagttggtgctaccaccttgtgctggtgcctctgtgctccggccaggcacaagtcctctgctcatgctgaatgctttgtatggctttcctctgtgcactgctgcagggctttgggatttgttgttgtcacgtctctggctttctggcttttgggaatgggtattcctgagtgactgtcagacacagtgtggtgtaatttagcagtgagcaaagtgctacgctttgcagttgttatttgatattttggtggagactgttttctcttctgttt

SEQ ID NO: 18640 - DNA, 553 bp, Chicken  19866894227740_1
tgcatctctcattagtgctgtgcactgcatagggatgaccaagggacagcgtggattacaccctcattgggttcagtaggatgcatgttgctgcattttatcactgtgctcctgagtttcatagctatcgtacatgggagcctggtaagaatggaattggggtgacgggtttattttcaatggtcagtggttctcaggtggaaaacctgcaatctttgattcctatagttttttctctcttttttgtctttcttcttctttttgttcatgtcacgcttcctcaactcctccctgatgctsttttgaaagaatggaaaatggtatggaaaagggagcagccctgatctgggctgagccacatgttaggatgaccagaagccaagcacaaaccttggtgatcaggaagatcctgtcctgcagcatttgaacataatgtgcagagctgagtgctaggaagagggtccactgcccacaccgtgccagacaaacagtacgtccacaggaacagcaatttacacagtggggaaaataaaaaagtaaaatgtgcttttac

SEQ ID NO: 18641 - DNA, 600 bp, Chicken  19866894227743_1
ccagaagccaagcacaaaccttggtgatcaggaagatcctgtcctgcagcatctgaacataatgtgcagagctgagtgctaggaagagggtccactgcccacaccgtgccagacaaacagtacgtccacaggaacagcaatttacacagtggggaaaataaaaaagtaaaatgtgcttttaccttgacacgcacttcacgtgcccttggaggtgcaacctctatctcctcaacagagagtgatttgcccgctgcccaggcaactgcagctctgcatcggataacctggaagaatggaagyggtgaggctgtgtgagcaggtgtgcctttgagaaagagtacttgattaaaaacaggtaagcggatggtttgttgccctctgtcaatagcacagctccaaggaagtactaaacggtaattctgccctcgcccgtgcccttccaatgaccggttcagcatcctgttcttttaatgggatccggcggtctcccacttgcaagctgttcccgaggagagcagaggagaggcccgaggcacttctggaaggaaactgaatcgcacaccgcgttcctggagaaggagtctggagsagaggagcagc

SEQ ID NO: 18642 - DNA, 600 bp, Chicken  19866894227743_2
agaatggaagyggtgaggctgtgtgagcaggtgtgcctttgagaaagagtacttgattaaaaacaggtaagcggatggtttgttgccctctgtcaatagcacagctccaaggaagtactaaacggtaattctgccctcgcccgtgcccttccaatgaccggttcagcatcctgttcttttaatgggatccggcggtctcccacttgcaagctgttcccgaggagagcagaggagaggcccgaggcacttctggaaggaaactgaatcgcacaccgcgttcctggagaaggagtctggagsagaggagcagctggcaaccaggtagcattcatagcaaaacagccactcagttttcagtgggagaaagctgctaaaagcccccggtgctgggaaagctactgcctcacgcagatactgacgtgctgcagctatatgagagcagaggcttgtgtaactcaragaggtttggstgwgacaggggagtcagggaaaggatggtctgcagcccacgcrtgctggctgagccattcgcagggtatgtgtgtgggagggggggaaggaaaaaaaggcaacaaggcatccttacttttccagaagtgg

SEQ ID NO: 18643 - DNA, 600 bp, Chicken  19866894227743_3
ggttcagcatcctgttcttttaatgggatccggcggtctcccacttgcaagctgttcccgaggagagcagaggagaggcccgaggcacttctggaaggaaactgaatcgcacaccgcgttcctggagaaggagtctggagsagaggagcagctggcaaccaggtagcattcatagcaaaacagccactcagttttcagtgggagaaagctgctaaaagcccccggtgctgggaaagctactgcctcacgcagatactgacgtgctgcagctatatgagagcagaggcttgtgtaactcaragaggtttggstgwgacaggggagtcagggaaaggatggtctgcagcccacgcrtgctggctgagccattcgcagggtatgtgtgtgggagggggggaaggaaaaaaaggcaacaaggcatccttacttttccagaagtggccatgtggtctgagaggagctgtctccagcagtggtggagggtggaggcttggtgctgcctgtctgtctggagccgtgtcttgcgtggaacccctgagtgcagctgggcaccgctggctgcaggtgaaggtayggccggggcatgctgggagtcctggc

SEQ ID NO: 18644 - DNA, 600 bp, Chicken  19866894227743_4
ctgttcttttaatgggatccggcggtctcccacttgcaagctgttcccgaggagagcagaggagaggcccgaggcacttctggaaggaaactgaatcgcacaccgcgttcctggagaaggagtctggagsagaggagcagctggcaaccaggtagcattcatagcaaaacagccactcagttttcagtgggagaaagctgctaaaagcccccggtgctgggaaagctactgcctcacgcagatactgacgtgctgcagctatatgagagcagaggcttgtgtaactcaragaggtttggstgwgacaggggagtcagggaaaggatggtctgcagcccacgcrtgctggctgagccattcgcagggtatgtgtgtgggagggggggaaggaaaaaaaggcaacaaggcatccttacttttccagaagtggccatgtggtctgagaggagctgtctccagcagtggtggagggtggaggcttggtgctgcctgtctgtctggagccgtgtcttgcgtggaacccctgagtgcagctgggcaccgctggctgcaggtgaaggtayggccggggcatgctgggagtcctggcggagggccaga

SEQ ID NO: 18645 - DNA, 600 bp, Chicken  19866894227743_5
ttcttttaatgggatccggcggtctcccacttgcaagctgttcccgaggagagcagaggagaggcccgaggcacttctggaaggaaactgaatcgcacaccgcgttcctggagaaggagtctggagsagaggagcagctggcaaccaggtagcattcatagcaaaacagccactcagttttcagtgggagaaagctgctaaaagcccccggtgctgggaaagctactgcctcacgcagatactgacgtgctgcagctatatgagagcagaggcttgtgtaactcaragaggtttggstgwgacaggggagtcagggaaaggatggtctgcagcccacgcrtgctggctgagccattcgcagggtatgtgtgtgggagggggggaaggaaaaaaaggcaacaaggcatccttacttttccagaagtggccatgtggtctgagaggagctgtctccagcagtggtggagggtggaggcttggtgctgcctgtctgtctggagccgtgtcttgcgtggaacccctgagtgcagctgggcaccgctggctgcaggtgaaggtayggccggggcatgctgggagtcctggcggagggccagagga

SEQ ID NO: 18646 - DNA, 600 bp, Chicken  19866894227743_6
ttcccgaggagagcagaggagaggcccgaggcacttctggaaggaaactgaatcgcacaccgcgttcctggagaaggagtctggagsagaggagcagctggcaaccaggtagcattcatagcaaaacagccactcagttttcagtgggagaaagctgctaaaagcccccggtgctgggaaagctactgcctcacgcagatactgacgtgctgcagctatatgagagcagaggcttgtgtaactcaragaggtttggstgwgacaggggagtcagggaaaggatggtctgcagcccacgcrtgctggctgagccattcgcagggtatgtgtgtgggagggggggaaggaaaaaaaggcaacaaggcatccttacttttccagaagtggccatgtggtctgagaggagctgtctccagcagtggtggagggtggaggcttggtgctgcctgtctgtctggagccgtgtcttgcgtggaacccctgagtgcagctgggcaccgctggctgcaggtgaaggtayggccggggcatgctgggagtcctggcggagggccagaggaagctcagaagagggtgggagaggtggtccccctgcagaca

SEQ ID NO: 18647 - DNA, 600 bp, Chicken  19866894227743_7
tgagagcagaggcttgtgtaactcaragaggtttggstgwgacaggggagtcagggaaaggatggtctgcagcccacgcrtgctggctgagccattcgcagggtatgtgtgtgggagggggggaaggaaaaaaaggcaacaaggcatccttacttttccagaagtggccatgtggtctgagaggagctgtctccagcagtggtggagggtggaggcttggtgctgcctgtctgtctggagccgtgtcttgcgtggaacccctgagtgcagctgggcaccgctggctgcaggtgaaggtayggccggggcatgctgggagtcctggcggagggccagaggaagctcagaagagggtgggagaggtggtccccctgcagacagggttgggtgctgtgggcgtagtgagcagagagggggtgggtagcagcagggaggtaccgatggttggcagctatgctctgtggggaataagcagaagtcctgcaggaaggcttttattggtggctctgccttttggggagacccccatggcctcagaaaggaacatcagagctcagagagactttttctctgcagttgctggtggatgagctgaaggga

SEQ ID NO: 18648 - DNA, 599 bp, Chicken  19866894227748_1
  misc_feature (1)..(18): n is any nucleotide
nnnnnnnnnnnnnnnnnnaattgtttcctgaatgattccagtagttttgctgcaacactcttgtctgggaagagactctttccagactgatgattaactgcatgaagagattaactgttttgtatttttcttccacactgatttttttttttaataagcagcttatttctgaccctattatttaagtgatgtgtaatgcatttaattcttattacctctatccatttttacagctactaggttttctgtaacggcttgtacttggagaatctctttcaaaatcggtgagcagggtgctcytgtgctggactatgaggagtaactttctacgagttttggaactgtgctgatatggcacttggcaagctttacctgggagcatctcgtgcagagaacatgaagagcatatcagaggttagaggataaagaaaagcagaaatatttgctcttctccagatgcctgtgactcacatggtaagaaaaagattgagcagcaatgttttcagaataatgttttacagcttcaaaaggtggaagcaaaaggaaaatgagcaggatgtgagcagagatgaatctcttcatcatttggagaataatgt

SEQ ID NO: 18649 - DNA, 600 bp, Chicken  19866894227748_2
ctgtgctgatatggcacttggcaagctttacctgggagcatctcgtgcagagaacatgaagagcatatcagaggttagaggataaagaaaagcagaaatatttgctcttctccagatgcctgtgactcacatggtaagaaaaagattgagcagcaatgttttcagaataatgttttacagcttcaaaaggtggaagcaaaaggaaaatgagcaggatgtgagcagagatgaatctcttcatcatttggagaataatgtattgcattaactttgccagttccagaggctgccatgtgctgmttggattctgctgttagagcagcttagatgttctcagatgtacttagatctaagtagtatgtgtccatgtcatgggccctacagtactgtgaggacagagtttggttagcaggttttcacataaatcccagggatttccatgttgtctcagctctgtacttaagtcaascatcgagttcacgagttagatatagataatayattgcttgcatgtcactgatcttcctatgctcattccttctatggacagatttaccttttgtttcctttttttttttttcctagcaggtagtctaaagt

SEQ ID NO: 18650 - DNA, 600 bp, Chicken  19866894227748_3
atgttttacagcttcaaaaggtggaagcaaaaggaaaatgagcaggatgtgagcagagatgaatctcttcatcatttggagaataatgtattgcattaactttgccagttccagaggctgccatgtgctgmttggattctgctgttagagcagcttagatgttctcagatgtacttagatctaagtagtatgtgtccatgtcatgggccctacagtactgtgaggacagagtttggttagcaggttttcacataaatcccagggatttccatgttgtctcagctctgtacttaagtcaascatcgagttcacgagttagatatagataatayattgcttgcatgtcactgatcttcctatgctcattccttctatggacagatttaccttttgtttcctttttttttttttcctagcaggtagtctaaagtagttccagttctgagagaatttgtcccagatcatccccctgatatgggcagggttccaaccccctgatatgggcagggttgccaactgctagatcaagcactagatcaggttgcccaggaccccatccagcctggtcatcagtggggtatgtggagtaactcagggggt

SEQ ID NO: 18651 - DNA, 600 bp, Chicken  19866894227748_4
ggaaaatgagcaggatgtgagcagagatgaatctcttcatcatttggagaataatgtattgcattaactttgccagttccagaggctgccatgtgctgmttggattctgctgttagagcagcttagatgttctcagatgtacttagatctaagtagtatgtgtccatgtcatgggccctacagtactgtgaggacagagtttggttagcaggttttcacataaatcccagggatttccatgttgtctcagctctgtacttaagtcaascatcgagttcacgagttagatatagataatayattgcttgcatgtcactgatcttcctatgctcattccttctatggacagatttaccttttgtttcctttttttttttttcctagcaggtagtctaaagtagttccagttctgagagaatttgtcccagatcatccccctgatatgggcagggttccaaccccctgatatgggcagggttgccaactgctagatcaagcactagatcaggttgcccaggaccccatccagcctggtcatcagtggggtatgtggagtaactcagggggttgtgtacctcacacagactcaaagatgtatat

SEQ ID NO: 18652 - DNA, 595 bp, Chicken  19866894227752_1
tgtgcatgaggcatctgtaaggacagtccgagttctttgggagcttacctgagcatttcttcaatctcgagttgcttgaattcatttctaagtgtgattttttttttcagtgaatttctgtgtgcaaaatgtttggagtttaaacaaaattcatgtatctgcaattttgctatttactcttaagttgttggtatacattcctaatcttagatcaattttaatatatttgtatttttggtacagaaaacattacgcacagatgaaatcagcatgcgactgttaagccttctcaggaaaaarcatcctactaagatcaaattctgaggagaaataggaagtgtttaagattttatgyttttagaawtacttacttgacacgttttatcaaatcactttcttaggaaaycttctgtttcggttttacatgcagatttttttcccccatacaaaagcaccrtctctgctggttatttccatgcccagaatgttataaccatttatgaaattctgtcttctaaaataaaatgcattttctttcccaggcctggacgataacatacccttaacacctgtgaaaaaatctatgggattttag

SEQ ID NO: 18653 - DNA, 540 bp, Chicken  19866894227752_2
tttcttcaatctcgagttgcttgaattcatttctaagtgtgattttttttttcagtgaatttctgtgtgcaaaatgtttggagtttaaacaaaattcatgtatctgcaattttgctatttactcttaagttgttggtatacattcctaatcttagatcaattttaatatatttgtatttttggtacagaaaacattacgcacagatgaaatcagcatgcgactgttaagccttctcaggaaaaarcatcctactaagatcaaattctgaggagaaataggaagtgtttaagattttatgyttttagaawtacttacttgacacgttttatcaaatcactttcttaggaaaycttctgtttcggttttacatgcagatttttttcccccatacaaaagcaccrtctctgctggttatttccatgcccagaatgttataaccatttatgaaattctgtcttctaaaataaaatgcattttctttcccaggcctggacgataacatacccttaacacctgtgaaaaaatctatgggattttag

SEQ ID NO: 18654 - DNA, 531 bp, Chicken  19866894227752_3
tctcgagttgcttgaattcatttctaagtgtgattttttttttcagtgaatttctgtgtgcaaaatgtttggagtttaaacaaaattcatgtatctgcaattttgctatttactcttaagttgttggtatacattcctaatcttagatcaattttaatatatttgtatttttggtacagaaaacattacgcacagatgaaatcagcatgcgactgttaagccttctcaggaaaaarcatcctactaagatcaaattctgaggagaaataggaagtgtttaagattttatgyttttagaawtacttacttgacacgttttatcaaatcactttcttaggaaaycttctgtttcggttttacatgcagatttttttcccccatacaaaagcaccrtctctgctggttatttccatgcccagaatgttataaccatttatgaaattctgtcttctaaaataaaatgcattttctttcccaggcctggacgataacatacccttaacacctgtgaaaaaatctatgggattttag

SEQ ID NO: 18655 - DNA, 489 bp, Chicken  19866894227752_4
tcagtgaatttctgtgtgcaaaatgtttggagtttaaacaaaattcatgtatctgcaattttgctatttactcttaagttgttggtatacattcctaatcttagatcaattttaatatatttgtatttttggtacagaaaacattacgcacagatgaaatcagcatgcgactgttaagccttctcaggaaaaarcatcctactaagatcaaattctgaggagaaataggaagtgtttaagattttatgyttttagaawtacttacttgacacgttttatcaaatcactttcttaggaaaycttctgtttcggttttacatgcagatttttttcccccatacaaaagcaccrtctctgctggttatttccatgcccagaatgttataaccatttatgaaattctgtcttctaaaataaaatgcattttctttcccaggcctggacgataacatacccttaacacctgtgaaaaaatctatgggattttag

SEQ ID NO: 18656 - DNA, 438 bp, Chicken  19866894227752_5
tctgcaattttgctatttactcttaagttgttggtatacattcctaatcttagatcaattttaatatatttgtatttttggtacagaaaacattacgcacagatgaaatcagcatgcgactgttaagccttctcaggaaaaarcatcctactaagatcaaattctgaggagaaataggaagtgtttaagattttatgyttttagaawtacttacttgacacgttttatcaaatcactttcttaggaaaycttctgtttcggttttacatgcagatttttttcccccatacaaaagcaccrtctctgctggttatttccatgcccagaatgttataaccatttatgaaattctgtcttctaaaataaaatgcattttctttcccaggcctggacgataacatacccttaacacctgtgaaaaaatctatgggattttag

SEQ ID NO: 18657 - DNA, 600 bp, Chicken  19866894227754_1
ctttctgttccactggctccacactactctcccttttttcagtgctttgttcacgtgctgtcactctcctgattcctttttaaagctttccttttgcaaatacctttataaacctgcagacagcaattcagacttaacaggtgagcagtgccatcgtgctgctctccctttccccagctccttgtgccctgcgcttgttccacctttctctctgtgttggtgctctggattgaggtgcttctgctcagttgagcctctgaggtgatgtaccaataatcactcacaaatcattttgaacaygccatgtataggagctaatatgtcaaaggaattggaygtagcagtgaaacagagcttttatctttcccacattcccattcaaaacctacttactgtcactcccgtcccacttaccttatgtgytgggcasgtaagtccagcagcacccactgaaatctgattgtccccagcaggacccagcagtgtgtgatcatggatatcagcagcctggcaaactgggagggcagctgcagccccagacagccatgctgatgctggtgagacctttgctttttctgttttttcctggtaaattccact

SEQ ID NO: 18658 - DNA, 600 bp, Chicken  19866894227754_2
ttcagtgctttgttcacgtgctgtcactctcctgattcctttttaaagctttccttttgcaaatacctttataaacctgcagacagcaattcagacttaacaggtgagcagtgccatcgtgctgctctccctttccccagctccttgtgccctgcgcttgttccacctttctctctgtgttggtgctctggattgaggtgcttctgctcagttgagcctctgaggtgatgtaccaataatcactcacaaatcattttgaacaygccatgtataggagctaatatgtcaaaggaattggaygtagcagtgaaacagagcttttatctttcccacattcccattcaaaacctacttactgtcactcccgtcccacttaccttatgtgytgggcasgtaagtccagcagcacccactgaaatctgattgtccccagcaggacccagcagtgtgtgatcatggatatcagcagcctggcaaactgggagggcagctgcagccccagacagccatgctgatgctggtgagacctttgctttttctgttttttcctggtaaattccactcggatttggctgctgtgatttgttgcagcctttgcaa

SEQ ID NO: 18659 - DNA, 600 bp, Chicken  19866894227754_3
caattcagacttaacaggtgagcagtgccatcgtgctgctctccctttccccagctccttgtgccctgcgcttgttccacctttctctctgtgttggtgctctggattgaggtgcttctgctcagttgagcctctgaggtgatgtaccaataatcactcacaaatcattttgaacaygccatgtataggagctaatatgtcaaaggaattggaygtagcagtgaaacagagcttttatctttcccacattcccattcaaaacctacttactgtcactcccgtcccacttaccttatgtgytgggcasgtaagtccagcagcacccactgaaatctgattgtccccagcaggacccagcagtgtgtgatcatggatatcagcagcctggcaaactgggagggcagctgcagccccagacagccatgctgatgctggtgagacctttgctttttctgttttttcctggtaaattccactcggatttggctgctgtgatttgttgcagcctttgcaagccaacagaggaatccctgatatcttgcaaagctctgcacctccaaatccgacgacagcyctacactgtctgcctggtgattcctt

SEQ ID NO: 18660 - DNA, 600 bp, Chicken  19866894227754_4
gacttaacaggtgagcagtgccatcgtgctgctctccctttccccagctccttgtgccctgcgcttgttccacctttctctctgtgttggtgctctggattgaggtgcttctgctcagttgagcctctgaggtgatgtaccaataatcactcacaaatcattttgaacaygccatgtataggagctaatatgtcaaaggaattggaygtagcagtgaaacagagcttttatctttcccacattcccattcaaaacctacttactgtcactcccgtcccacttaccttatgtgytgggcasgtaagtccagcagcacccactgaaatctgattgtccccagcaggacccagcagtgtgtgatcatggatatcagcagcctggcaaactgggagggcagctgcagccccagacagccatgctgatgctggtgagacctttgctttttctgttttttcctggtaaattccactcggatttggctgctgtgatttgttgcagcctttgcaagccaacagaggaatccctgatatcttgcaaagctctgcacctccaaatccgacgacagcyctacactgtctgcctggtgattccttgcatttc

SEQ ID NO: 18661 - DNA, 600 bp, Chicken  19866894227754_5
actcccgtcccacttaccttatgtgytgggcasgtaagtccagcagcacccactgaaatctgattgtccccagcaggacccagcagtgtgtgatcatggatatcagcagcctggcaaactgggagggcagctgcagccccagacagccatgctgatgctggtgagacctttgctttttctgttttttcctggtaaattccactcggatttggctgctgtgatttgttgcagcctttgcaagccaacagaggaatccctgatatcttgcaaagctctgcacctccaaatccgacgacagcyctacactgtctgcctggtgattccttgcatttctgagacagaagcctgtcagtggaatcggggcacggatgactcggttactggttcatcagcagtttaattatgcagcattaaaattcagagtgcttctttttgaaagacctactccagctgaagcagatgggcctgctcaaagctgtagcgttttgcaaccaacagccattcacctgtycacacacagatgtgtatcaggtgtgttacctgcagtgataacactgtaggacaactgcaattgtcaccaaagcacccctttggtgtgtg

SEQ ID NO: 18662 - DNA, 600 bp, Chicken  19866894227754_6
gctgctgtgatttgttgcagcctttgcaagccaacagaggaatccctgatatcttgcaaagctctgcacctccaaatccgacgacagcyctacactgtctgcctggtgattccttgcatttctgagacagaagcctgtcagtggaatcggggcacggatgactcggttactggttcatcagcagtttaattatgcagcattaaaattcagagtgcttctttttgaaagacctactccagctgaagcagatgggcctgctcaaagctgtagcgttttgcaaccaacagccattcacctgtycacacacagatgtgtatcaggtgtgttacctgcagtgataacactgtaggacaactgcaattgtcaccaaagcacccctttggtgtgtgagaagtggctgaaggagctggaattgttcagtctgcagaagaggaggctcaggggagacctcattgctccctataacttcctgaagggaggttgtggtgaggtgggggttggcctctgctcccatgtaagtggtgataggatgagagagaatggcctcaagttgtgccaggggaggttcaggctggatatgaggaagaatttcttctctga

SEQ ID NO: 18663 - DNA, 600 bp, Chicken  19866894227757_1
ttcgcagggagcctttgaagtcagcctgagctccaagccatcccctaattgcttctcctttatcagacagattttcaatgaacttcacagaaggcgtttgaggccagagcggccccatcggctgccaagtgaccggtgctgggtgagccctgttttttaaatgtaaagatgtttctttatgtttgggtagggacgggctgcggtcaccgggacctgaggaagcggcaggcagcctccgtgcattgggatagcacagctcaggtgggtgaaagcgaacgcagcgcggggagcctcgagcasggagcagagctggtgggcgtcctcgtggagccgtgagcgctggggagaaaaaggcaacaggagagcagccgcagggctcgcagcgctgcctgcccgctgtaaggcccggcacggacactgcgtggcactcttctccgcagcacagcgcccggagcccgcgggcggccccgtccccgccggctccacggccgccccgcggctccccagccccgctcgctccgtcgggtccggagctccttccaggcaccgcgcggagcaycgcgctccaacctgcagcctcccgagcagcgccgggttcat

SEQ ID NO: 18664 - DNA, 600 bp, Chicken  19866894227757_2
aggtgggtgaaagcgaacgcagcgcggggagcctcgagcasggagcagagctggtgggcgtcctcgtggagccgtgagcgctggggagaaaaaggcaacaggagagcagccgcagggctcgcagcgctgcctgcccgctgtaaggcccggcacggacactgcgtggcactcttctccgcagcacagcgcccggagcccgcgggcggccccgtccccgccggctccacggccgccccgcggctccccagccccgctcgctccgtcgggtccggagctccttccaggcaccgcgcggagcaycgcgctccaacctgcagcctcccgagcagcgccgggttcatcctcagaagacgcgtgtcgggatgtgccatcccccaaagcaggtgccagcaccgctcgcagctcggggctgcagctcccgtggaaagaattgttgccagggtttcagcggtgactcacagcctccgagacaggatcccttgttagcagggggctgtctggggaacgctcgccccgcgttgccaggcgcctcgaccagagggacctgcacctcctcccgctgcttccatttgttttccgaaacacggtccgggtgtacgt

SEQ ID NO: 18665 - DNA, 600 bp, Chicken  19866894227768_1
tttcattctttgattctgttatgtacatgtaagtaggtctttatgttgcttggtggttgctatatgtaatctaaatgcacaggtgtttttccttttctctttttattatttttttccattcttgagaaaatgatgtggtatagaccacaataaaatgtacaaaaccccagaaggaaggccaattcttcagaaatgccagtaattgcagagcagatagcacagcatgcaaacaattctgtcaatttcagccacttgccagtctttggggcccttcacagtgaaattcagtctttcaggctrtgtagaatagtctgaaataaacttttctcttcagatgataacaggtcttcctttcatccagccatttttgtttggaccttagagrataacctcgctatcatctgtctccttaatctggatttcttccttttctaaaaatacactatagctactacactgtgtaccataacagcctcagccaagcactgcttatagatcagaaatcctagcctgtagcaaatacaagtgaaaaaatgcactgyttttacattccgttttggtgagcaattcagaagagasggagtgggagaaagtcatgat

SEQ ID NO: 18666 - DNA, 600 bp, Chicken  19866894227768_2
tttttccttttctctttttattatttttttccattcttgagaaaatgatgtggtatagaccacaataaaatgtacaaaaccccagaaggaaggccaattcttcagaaatgccagtaattgcagagcagatagcacagcatgcaaacaattctgtcaatttcagccacttgccagtctttggggcccttcacagtgaaattcagtctttcaggctrtgtagaatagtctgaaataaacttttctcttcagatgataacaggtcttcctttcatccagccatttttgtttggaccttagagrataacctcgctatcatctgtctccttaatctggatttcttccttttctaaaaatacactatagctactacactgtgtaccataacagcctcagccaagcactgcttatagatcagaaatcctagcctgtagcaaatacaagtgaaaaaatgcactgyttttacattccgttttggtgagcaattcagaagagasggagtgggagaaagtcatgatttccttttcttctcctcccccacatttgttctagccatagaagatattctgagatagagtagttcgcatttggagcaaagcatgg

SEQ ID NO: 18667 - DNA, 568 bp, Chicken  19866894227768_3
tttcagccacttgccagtctttggggcccttcacagtgaaattcagtctttcaggctrtgtagaatagtctgaaataaacttttctcttcagatgataacaggtcttcctttcatccagccatttttgtttggaccttagagrataacctcgctatcatctgtctccttaatctggatttcttccttttctaaaaatacactatagctactacactgtgtaccataacagcctcagccaagcactgcttatagatcagaaatcctagcctgtagcaaatacaagtgaaaaaatgcactgyttttacattccgttttggtgagcaattcagaagagasggagtgggagaaagtcatgatttccttttcttctcctcccccacatttgttctagccatagaagatattctgagatagagtagttcgcatttggagcaaagcatggcctctttttttttttttttttctttttttaatagagttgtttatggaaaccaatcaagcaaggatgggcggttataaagctactatgggattcagctgcacagacagcttccaaaaagttttcag

SEQ ID NO: 18668 - DNA, 531 bp, Chicken  19866894227768_4
gaaattcagtctttcaggctrtgtagaatagtctgaaataaacttttctcttcagatgataacaggtcttcctttcatccagccatttttgtttggaccttagagrataacctcgctatcatctgtctccttaatctggatttcttccttttctaaaaatacactatagctactacactgtgtaccataacagcctcagccaagcactgcttatagatcagaaatcctagcctgtagcaaatacaagtgaaaaaatgcactgyttttacattccgttttggtgagcaattcagaagagasggagtgggagaaagtcatgatttccttttcttctcctcccccacatttgttctagccatagaagatattctgagatagagtagttcgcatttggagcaaagcatggcctctttttttttttttttttctttttttaatagagttgtttatggaaaccaatcaagcaaggatgggcggttataaagctactatgggattcagctgcacagacagcttccaaaaagttttcag

SEQ ID NO: 18669 - DNA, 600 bp, Chicken  19866894227771_1
tactcaattttgttttccccaactttacgatcatatattgactttagtgctacttggaactttatttgatgtagtaagtacgcagcttctccagtgtgcagtgtggtttatacaatgcaatgtcaatgttttgtattttctacgatcgtttcacttcagtgattgaagtagatggtttctttttcatttttagtgctaaacagttaaaagcttctcacagcttgtatgttatttgctgtatatttaaaaaatatgcctatttcttagttcttagcaccatcttggctattaagtggctgrgtggatttctgggtgagcaactggtgcatacttccctactagtagtgatgtggtgggaggacaatgtgtaagtcagtaagattgcagcagatcaaatccatgtccatccytcttactacattgctggtcaataatctattgatttgggttggctaacttgaatgggtgaggttggctgtacagttactacttctgcaattggttctgatagaaaagttagcgctggatttctaaatgtaatggctgtaactcagcttggagttctgacaagctttggtaaatttttgaaacttaaagcaa

SEQ ID NO: 18670 - DNA, 600 bp, Chicken  19866894227771_2
tacaatgcaatgtcaatgttttgtattttctacgatcgtttcacttcagtgattgaagtagatggtttctttttcatttttagtgctaaacagttaaaagcttctcacagcttgtatgttatttgctgtatatttaaaaaatatgcctatttcttagttcttagcaccatcttggctattaagtggctgrgtggatttctgggtgagcaactggtgcatacttccctactagtagtgatgtggtgggaggacaatgtgtaagtcagtaagattgcagcagatcaaatccatgtccatccytcttactacattgctggtcaataatctattgatttgggttggctaacttgaatgggtgaggttggctgtacagttactacttctgcaattggttctgatagaaaagttagcgctggatttctaaatgtaatggctgtaactcagcttggagttctgacaagctttggtaaatttttgaaacttaaagcaaattaaatgtcaggttattttaagagttgcaagctcaataagaaccagcaataaaggaagaattgttacagagtgttctacttcagtatcatctgggaagctggtagagct

SEQ ID NO: 18671 - DNA, 600 bp, Chicken  19866894227771_3
agctttgcccaatactcagccaggggaagaaagtttcatgaagtactgaaacttcaggttaagtaattttgtcttttcagatgtgccttccttaacaattgcatggtgttctgtttgtatttttcagatgctgtaccactttttctgagactgctgcattcacctcaccaaaatgtttgtgaacaagctgtgtgggctttaggcaatatcataggtttgtgttactcctgccactaaaaattgctgagttccttttgaaaatgaatgaataaactaggtagcattttgtatcagaacttwgagatgttcagctgtaagatagtaagcagcctttattggcagtcactctgtttttaactcctgttttctctgtcatgcatctagggtgtacaccccaaagcatatgcatacgtgctttctttgcagatacaggaaaaagggaattactgtcaaacaggcatgcrtgtagattgttaaaatgaaaacgattttgcattgggttttgaaatatggcctgagcttacacgtgttatattgaattgtagataagttgtgatcattcagactttgactttttttgtgtgcaggctttagccagtg

SEQ ID NO: 18672 - DNA, 600 bp, Chicken  19866894227771_4
tcaccaaaatgtttgtgaacaagctgtgtgggctttaggcaatatcataggtttgtgttactcctgccactaaaaattgctgagttccttttgaaaatgaatgaataaactaggtagcattttgtatcagaacttwgagatgttcagctgtaagatagtaagcagcctttattggcagtcactctgtttttaactcctgttttctctgtcatgcatctagggtgtacaccccaaagcatatgcatacgtgctttctttgcagatacaggaaaaagggaattactgtcaaacaggcatgcrtgtagattgttaaaatgaaaacgattttgcattgggttttgaaatatggcctgagcttacacgtgttatattgaattgtagataagttgtgatcattcagactttgactttttttgtgtgcaggctttagccagtgcttgtagatggtatacaatccagatgacagttgtagtgtttgaagtcatgatttctgacatactgaggtttcctccatctgacattttataaatgccaggtcttaagaagcaagccaatgaaaagcttggttttgtaactgcctgaaatatactgtgtgcttgt

SEQ ID NO: 18673 - DNA, 599 bp, Chicken  19866894227773_1
  misc_feature (1)..(59): n is any nucleotide
nnnnnnnnnnnnnnnnnnnnnnnnnnnnnnnnnnnnnnnnnnnnnnnnnnnnnnnnnnntcaccaaaacctggtgggatgattcccacaactggaatgcagctattgatggctaggacagcgatgcaaaatagaatgggatgtaaaatagaatgggatgtaaaatgtatgggatgtaaaatagaacatcctgggtttgcacacgacatgaaggaggaactggaggttggagatgagatggatcaagatggtttggggagggatgtgtgaaaaaaacagagggaaaaatggataaaagggrgaagttgtacatatgtaagttgctggtcactgtgcttgtctgtccatgctttgcacatggtgcaggctgttctgtgttctcatcagacttgatttctaaccrtttccctggaagtcacgtaagaaatccacgtgtgtgcatatgtgtaagtgcatgtgccgaagtggcagcaaggctcagtctcgctcccagctgcacaggggaaagcagccccttaatgccagcatgtatgcgaggctgagtgctggctgctgtgagtctgttcactctgtgtccatgagtgtgacagggacagagct

SEQ ID NO: 18674 - DNA, 600 bp, Chicken  19866894227773_2
tattgatggctaggacagcgatgcaaaatagaatgggatgtaaaatagaatgggatgtaaaatgtatgggatgtaaaatagaacatcctgggtttgcacacgacatgaaggaggaactggaggttggagatgagatggatcaagatggtttggggagggatgtgtgaaaaaaacagagggaaaaatggataaaagggrgaagttgtacatatgtaagttgctggtcactgtgcttgtctgtccatgctttgcacatggtgcaggctgttctgtgttctcatcagacttgatttctaaccrtttccctggaagtcacgtaagaaatccacgtgtgtgcatatgtgtaagtgcatgtgccgaagtggcagcaaggctcagtctcgctcccagctgcacaggggaaagcagccccttaatgccagcatgtatgcgaggctgagtgctggctgctgtgagtctgttcactctgtgtccatgagtgtgacagggacagagctgagctgttgctagaagcactccaaagtctacacacaccatctgaaatggaggaaggcttagatacaggctgtcagacttcaaagaaatcctgcttcaactcac

SEQ ID NO: 18675 - DNA, 534 bp, Chicken  19866894227773_3
gcatatgtgtaagtgcatgtgccgaagtggcagcaaggctcagtctcgctcccagctgcacaggggaaagcagccccttaatgccagcatgtatgcgaggctgagtgctggctgctgtgagtctgttcactctgtgtccatgagtgtgacagggacagagctgagctgttgctagaagcactccaaagtctacacacaccatctgaaatggaggaaggcttagatacaggctgtcagacttcaaagaaatcctgcttcaactcacctggaaaacatagttccacatagtaaagctgtaawccctgctgaagccgcttcacaagaaagaggaaaaaaaggaaagccataaaataagtcagcatgctattgctcagtactgcatattggctttctttgcagaaaaaacacgtttgtgatcagtagctttgaattctatttttgcctaggtcctaaggccccttcacttgacagataactaagatcacatttttggactgaaaccatgagaaaaagtcattaatagcttgcaacact

SEQ ID NO: 18676 - DNA, 599 bp, Chicken  19866894227778_1
  misc_feature (1)..(24): n is any nucleotide
nnnnnnnnnnnnnnnnnnnnnnnntgtagttaaaattgcaactggaagcagtataacttgatgatacaggcaatccatattttggtccattttcaccactactctgcaaactagactgatagtctcataaagctggaaggcactgttagattcttcttcttaaacctgccccatgggcactgtagtgggactgtgggcaaggatgctgaagggtgtacgggactaggaacatttagaagtatcggtttcaggagaaagaaacgaaaaaggaagcaatgttcctcactgactgagtcttaytgatgttctcagtatttcacatgcttggatagaggctagatcttgtgaagaagtgcaaaatygcctggacagccaaaattatctttagaatacaattagagttgttcatgtcatgaacttgccagggcagggagctcttgtagtcatgttatagagcttggctttattctgtttatcctcacttttcttgcacagtttgctaatagttctaatagctatatacattgattacatgttctcatatatatatactgtatatatgttatatataaagtggttaagtactcctgaaaaggctg

SEQ ID NO: 18677 - DNA, 600 bp, Chicken  19866894227778_2
gatacaggcaatccatattttggtccattttcaccactactctgcaaactagactgatagtctcataaagctggaaggcactgttagattcttcttcttaaacctgccccatgggcactgtagtgggactgtgggcaaggatgctgaagggtgtacgggactaggaacatttagaagtatcggtttcaggagaaagaaacgaaaaaggaagcaatgttcctcactgactgagtcttaytgatgttctcagtatttcacatgcttggatagaggctagatcttgtgaagaagtgcaaaatygcctggacagccaaaattatctttagaatacaattagagttgttcatgtcatgaacttgccagggcagggagctcttgtagtcatgttatagagcttggctttattctgtttatcctcacttttcttgcacagtttgctaatagttctaatagctatatacattgattacatgttctcatatatatatactgtatatatgttatatataaagtggttaagtactcctgaaaaggctgctcttcatattgcttaagtactaaggcagcagtcttgacctcagaaatctcacatagccttac

SEQ ID NO: 18678 - DNA, 600 bp, Chicken  19866894227780_1
gtacttacatgacagacgtcattttgtcaaactgcccctctgctgccatctgtcacacggcaacgaaatataaaggaatattgatgggaaggtttaacctcttctgccatgccaccaatatcctattctaacatcatggaccaacataataaaataggaggcaatactttcagagcaaccctaatgcaacacacactcttatcttcctgcagcagagtgaaaatacctgagaaagaaatctgatatcttccaaagcactgaagtagaacagcaaccatgacttaatgtagttttattccsacaattgaggttggaaggtcctgtgggggattatctatttcaacccttctgctcaagcaggtgcagccagagcagggtgcccaggaccatgtccaggtggcttttgcaaacagccaagaaggagactccacagcctctctgggcttcctatgctagtcctcagtcaccatcagatgcagaaggaacctcccatgctctagcttgtgcctgctgccttttggtccatcaccaagaaactggaaagagcctgactccattatcctcccttcaggtatttatagacgttgataagattcccct

SEQ ID NO: 18679 - DNA, 600 bp, Chicken  19866894227781_1
ttgcattagcaagacttcttgagtttgtgcccttagctatggggctgaagtggatgtttttaggaactgacttttagggctagaggagcattgggggttcctgtgccctgacctcatgaaagaaccttgtttggggctcctttttaggagtgtaaattgcttgctgggctgactctgccccatcctctttggggagcaggaactggaggctgtgcaacctctgggatgcctagctggaggttgagggtgatgctccctgtgggctcccattctgggcaggcagactcctctgcacatggwgacactgtggtggtttgtcttgcttgcattttttttccatcctctgaagcccatggaaatagtgctgggtcctcgtcttttgtctttcaagtgcatatgcaatacatttcagttttcctatccaggctgttcgttgcagtctcttcagctttccaaaacagcagtactgtgggaagcagcagagaagggttgaataacagtatacatctccttatactgcaaagattctcccygtaaaatctagacaccctgaatgagacctgatctcttgtttacaagactttgtgaggacaagaagaa

SEQ ID NO: 18680 - DNA, 600 bp, Chicken  19866894227781_2
ctggaggttgagggtgatgctccctgtgggctcccattctgggcaggcagactcctctgcacatggwgacactgtggtggtttgtcttgcttgcattttttttccatcctctgaagcccatggaaatagtgctgggtcctcgtcttttgtctttcaagtgcatatgcaatacatttcagttttcctatccaggctgttcgttgcagtctcttcagctttccaaaacagcagtactgtgggaagcagcagagaagggttgaataacagtatacatctccttatactgcaaagattctcccygtaaaatctagacaccctgaatgagacctgatctcttgtttacaagactttgtgaggacaagaagaaatcataaattgagagctcgattacatcgtgttgcttcggattggtggtgttttatagctccatgatgcaggcgcattgtaagtgatatgagacaaagagaaactcctgggcaggaggaaatgggcttgttaagcacgactggtgtgtgcagaatggagtgtgtgcagaacaattgaccaaacagaggtcttttttcaaagggaggagagaacagcacagggagatatagctct

SEQ ID NO: 18681 - DNA, 600 bp, Chicken  19866894227786_1
tgctgcccctgtcggataaccacactcacatctccataccaggtgggtgactgctgggccggctgcaagggatcgaggttgaagaatgggctcagctcagaagagtgatgttctaacagcagctatggggttacaaagccaagagacagacgcacaggttgttccaaaaataatacctatggtgtgtgctaccaggtacttacacttggaattctgacagcctacaataactgcttccctgacaatgttcccttcatttgtaagtgtcacatttaaggaaagtaaaagcattttaatgcracagaaaaacttggcatrggagctaattactttaatttgatattttttttggctcatctgcatacttgacaattatttatgacttatattggtaattagagtctgagtcttgcactgaaatattgcaaatagctttgaagactttcgctgatccttctaactttcttttagagaagatgaatttattagtagataatatgtaaaatatttgtacttctgaccttttgtaaaacattcttcctgcattttaaatgatcagttggcagcatcrctctcctcaawatgaagcgagacgctgta

SEQ ID NO: 18682 - DNA, 600 bp, Chicken  19866894227786_2
accacactcacatctccataccaggtgggtgactgctgggccggctgcaagggatcgaggttgaagaatgggctcagctcagaagagtgatgttctaacagcagctatggggttacaaagccaagagacagacgcacaggttgttccaaaaataatacctatggtgtgtgctaccaggtacttacacttggaattctgacagcctacaataactgcttccctgacaatgttcccttcatttgtaagtgtcacatttaaggaaagtaaaagcattttaatgcracagaaaaacttggcatrggagctaattactttaatttgatattttttttggctcatctgcatacttgacaattatttatgacttatattggtaattagagtctgagtcttgcactgaaatattgcaaatagctttgaagactttcgctgatccttctaactttcttttagagaagatgaatttattagtagataatatgtaaaatatttgtacttctgaccttttgtaaaacattcttcctgcattttaaatgatcagttggcagcatcrctctcctcaawatgaagcgagacgctgtaaataagatcctgaattaa

SEQ ID NO: 18683 - DNA, 600 bp, Chicken  19866894227786_3
tttaaggaaagtaaaagcattttaatgcracagaaaaacttggcatrggagctaattactttaatttgatattttttttggctcatctgcatacttgacaattatttatgacttatattggtaattagagtctgagtcttgcactgaaatattgcaaatagctttgaagactttcgctgatccttctaactttcttttagagaagatgaatttattagtagataatatgtaaaatatttgtacttctgaccttttgtaaaacattcttcctgcattttaaatgatcagttggcagcatcrctctcctcaawatgaagcgagacgctgtaaataagatcctgaattaagcagcatattaaatctacgtmttcagtggcaacccttgatggtcctcatatatcacgaggactctgttggttctgctacattcagctatgccatacaacatggtgaattatctttttttttttttttaaacactgaactttacagcttctggacaatttgaacatcattcttctgctcttgacaaaggatattaagttagcaggttagtgcatgatttcttttctttttggtggctgcgtatgagaaaggaac

SEQ ID NO: 18684 - DNA, 600 bp, Chicken  19866894227786_4
taaaagcattttaatgcracagaaaaacttggcatrggagctaattactttaatttgatattttttttggctcatctgcatacttgacaattatttatgacttatattggtaattagagtctgagtcttgcactgaaatattgcaaatagctttgaagactttcgctgatccttctaactttcttttagagaagatgaatttattagtagataatatgtaaaatatttgtacttctgaccttttgtaaaacattcttcctgcattttaaatgatcagttggcagcatcrctctcctcaawatgaagcgagacgctgtaaataagatcctgaattaagcagcatattaaatctacgtmttcagtggcaacccttgatggtcctcatatatcacgaggactctgttggttctgctacattcagctatgccatacaacatggtgaattatctttttttttttttttaaacactgaactttacagcttctggacaatttgaacatcattcttctgctcttgacaaaggatattaagttagcaggttagtgcatgatttcttttctttttggtggctgcgtatgagaaaggaactcttttttttt

SEQ ID NO: 18685 - DNA, 588 bp, Chicken  19866894227786_5
atattttttttggctcatctgcatacttgacaattatttatgacttatattggtaattagagtctgagtcttgcactgaaatattgcaaatagctttgaagactttcgctgatccttctaactttcttttagagaagatgaatttattagtagataatatgtaaaatatttgtacttctgaccttttgtaaaacattcttcctgcattttaaatgatcagttggcagcatcrctctcctcaawatgaagcgagacgctgtaaataagatcctgaattaagcagcatattaaatctacgtmttcagtggcaacccttgatggtcctcatatatcacgaggactctgttggttctgctacattcagctatgccatacaacatggtgaattatctttttttttttttttaaacactgaactttacagcttctggacaatttgaacatcattcttctgctcttgacaaaggatattaagttagcaggttagtgcatgatttcttttctttttggtggctgcgtatgagaaaggaactctttttttttgctggaggatctgacaagttttgaacaaatcctccggtggggaag

SEQ ID NO: 18686 - DNA, 600 bp, Chicken  19866894227787_1
tcttcagagggaagcagtcagaacaaccgaaaatctgtagtgctggagatttcgtggacatgagataacttcaagattgtgcaagattagtttgtcttgcatatttgtccatgcaatattgtttattatctaaataagaataaagaaatgttgacaagagaagtttgtttcctgccataccgatcctttgccagtcatgttgtgaaatgtctgcatttttaggtctcatagctaaattagtggcaacaaaatgatgaagagctgttttagaccttgctgtaagatttgccttagttacartgagctttaactgtatcaatgtcttctacaaggctacacctacaactgtaatactgttaaaactcttggagtccatcactcttaattaaccatttgttaatgcagtctgatccttagtagttcatacattacctgtatatatagctctagtacagaagcttgcaaagcatttaagtagtcttaactttacaatgtatacagctatrgtacctatatagaatgtacacacttgttttgatacatactatgatgactttgcaattacctataatatcctttgtatactgtatgctcttttta

SEQ ID NO: 18687 - DNA, 600 bp, Chicken  19866894227787_2
atgtctgcatttttaggtctcatagctaaattagtggcaacaaaatgatgaagagctgttttagaccttgctgtaagatttgccttagttacartgagctttaactgtatcaatgtcttctacaaggctacacctacaactgtaatactgttaaaactcttggagtccatcactcttaattaaccatttgttaatgcagtctgatccttagtagttcatacattacctgtatatatagctctagtacagaagcttgcaaagcatttaagtagtcttaactttacaatgtatacagctatrgtacctatatagaatgtacacacttgttttgatacatactatgatgactttgcaattacctataatatcctttgtatactgtatgctctttttaattgtcccagtaacgtgttgattcagctactagataaacccaaggagagcagcagcaagccacgtaagaaatcataagtagaaattcaggaccaataaccaaatgcaccatgtagtttgtggtttgcttttctccctaaggaaggaaagggtgggcagagaggagagtacaacgattggaaggcacgaggagggacacgctatgga

SEQ ID NO: 18688 - DNA, 600 bp, Chicken  19866894227793_1
gattctatgataattttaggagaaataaggaggacactttcagatacagctgatagccttcactttcagatagacttcaccaggatggcaaaagcagctccagcttcctcttgaattttacttttcctggaaaaatatcttatattgttggccagtcttcctgccccatgaaaggggacctggttgggaaaagtcagcgtctcccttattcctctaaggattattactggaggaaggatatgacaggaaaaccctgggttcccatagagcaaattcatcatctctaaaattggtcctggrtgttccttcaccaggcctcctcctgttaaatgaaaactaatggaagaatgctaagatgggcatccttmttttgaattgayagctgacrgagatttagattcttatcaccttagaatytctaggatggagaaaaatgctattaggaaagttggagaactaaagctatatatatttggagatgaaaaatatgtttgtaattaagagataaatgaatgttggaagaactgatgatgctagaaatggtagtagagttctgggaatgggatactgaaccatctgggggacctgggaccagggtga

SEQ ID NO: 18689 - DNA, 600 bp, Chicken  19866894227793_2
gatagacttcaccaggatggcaaaagcagctccagcttcctcttgaattttacttttcctggaaaaatatcttatattgttggccagtcttcctgccccatgaaaggggacctggttgggaaaagtcagcgtctcccttattcctctaaggattattactggaggaaggatatgacaggaaaaccctgggttcccatagagcaaattcatcatctctaaaattggtcctggrtgttccttcaccaggcctcctcctgttaaatgaaaactaatggaagaatgctaagatgggcatccttmttttgaattgayagctgacrgagatttagattcttatcaccttagaatytctaggatggagaaaaatgctattaggaaagttggagaactaaagctatatatatttggagatgaaaaatatgtttgtaattaagagataaatgaatgttggaagaactgatgatgctagaaatggtagtagagttctgggaatgggatactgaaccatctgggggacctgggaccagggtgaccctctaggggaccaggtgctctggggctgaaaattgatgggaagcttgaagatagatcaacttcata

SEQ ID NO: 18690 - DNA, 600 bp, Chicken  19866894227793_3
caggatggcaaaagcagctccagcttcctcttgaattttacttttcctggaaaaatatcttatattgttggccagtcttcctgccccatgaaaggggacctggttgggaaaagtcagcgtctcccttattcctctaaggattattactggaggaaggatatgacaggaaaaccctgggttcccatagagcaaattcatcatctctaaaattggtcctggrtgttccttcaccaggcctcctcctgttaaatgaaaactaatggaagaatgctaagatgggcatccttmttttgaattgayagctgacrgagatttagattcttatcaccttagaatytctaggatggagaaaaatgctattaggaaagttggagaactaaagctatatatatttggagatgaaaaatatgtttgtaattaagagataaatgaatgttggaagaactgatgatgctagaaatggtagtagagttctgggaatgggatactgaaccatctgggggacctgggaccagggtgaccctctaggggaccaggtgctctggggctgaaaattgatgggaagcttgaagatagatcaacttcatatagttattttta

SEQ ID NO: 18691 - DNA, 600 bp, Chicken  19866894227793_4
caaaagcagctccagcttcctcttgaattttacttttcctggaaaaatatcttatattgttggccagtcttcctgccccatgaaaggggacctggttgggaaaagtcagcgtctcccttattcctctaaggattattactggaggaaggatatgacaggaaaaccctgggttcccatagagcaaattcatcatctctaaaattggtcctggrtgttccttcaccaggcctcctcctgttaaatgaaaactaatggaagaatgctaagatgggcatccttmttttgaattgayagctgacrgagatttagattcttatcaccttagaatytctaggatggagaaaaatgctattaggaaagttggagaactaaagctatatatatttggagatgaaaaatatgtttgtaattaagagataaatgaatgttggaagaactgatgatgctagaaatggtagtagagttctgggaatgggatactgaaccatctgggggacctgggaccagggtgaccctctaggggaccaggtgctctggggctgaaaattgatgggaagcttgaagatagatcaacttcatatagttatttttaaagtagcg

SEQ ID NO: 18692 - DNA, 600 bp, Chicken  19866894227793_5
ttacttttcctggaaaaatatcttatattgttggccagtcttcctgccccatgaaaggggacctggttgggaaaagtcagcgtctcccttattcctctaaggattattactggaggaaggatatgacaggaaaaccctgggttcccatagagcaaattcatcatctctaaaattggtcctggrtgttccttcaccaggcctcctcctgttaaatgaaaactaatggaagaatgctaagatgggcatccttmttttgaattgayagctgacrgagatttagattcttatcaccttagaatytctaggatggagaaaaatgctattaggaaagttggagaactaaagctatatatatttggagatgaaaaatatgtttgtaattaagagataaatgaatgttggaagaactgatgatgctagaaatggtagtagagttctgggaatgggatactgaaccatctgggggacctgggaccagggtgaccctctaggggaccaggtgctctggggctgaaaattgatgggaagcttgaagatagatcaacttcatatagttatttttaaagtagcgagctgaaatatactcttattttttgaata

SEQ ID NO: 18693 - DNA, 600 bp, Chicken  19866894227793_6
tgaatgttggaagaactgatgatgctagaaatggtagtagagttctgggaatgggatactgaaccatctgggggacctgggaccagggtgaccctctaggggaccaggtgctctggggctgaaaattgatgggaagcttgaagatagatcaacttcatatagttatttttaaagtagcgagctgaaatatactcttattttttgaataaatcttatgattttgcataccagggttgcaattattgattctttgtaactgtcaacactgcatgcagtacataaacacaaatgtgatatagytttttgtatgtgaggaaggaagaacaytaaaacgtctcccagagcatttacaacacttmtgaattatttttttccactctcccggaaactaagtttatgaagaagaatagtccatcaaaaaacattttcaggaaaactccaccaaaagcttgagctggttaagggattttctgttcttgccaatcaaataaaatgtacttgttcaatttactatgctgcttctgttttcccgtctcttcagcctggagctcattgttgcactgccatgatcaaagatgaaaatacacacctacatggctc

SEQ ID NO: 18694 - DNA, 600 bp, Chicken  19866894227793_7
gaaatggtagtagagttctgggaatgggatactgaaccatctgggggacctgggaccagggtgaccctctaggggaccaggtgctctggggctgaaaattgatgggaagcttgaagatagatcaacttcatatagttatttttaaagtagcgagctgaaatatactcttattttttgaataaatcttatgattttgcataccagggttgcaattattgattctttgtaactgtcaacactgcatgcagtacataaacacaaatgtgatatagytttttgtatgtgaggaaggaagaacaytaaaacgtctcccagagcatttacaacacttmtgaattatttttttccactctcccggaaactaagtttatgaagaagaatagtccatcaaaaaacattttcaggaaaactccaccaaaagcttgagctggttaagggattttctgttcttgccaatcaaataaaatgtacttgttcaatttactatgctgcttctgttttcccgtctcttcagcctggagctcattgttgcactgccatgatcaaagatgaaaatacacacctacatggctcttctgtgctttccagcatcacacacca

SEQ ID NO: 18695 - DNA, 600 bp, Chicken  19866894227793_8
tgaaccatctgggggacctgggaccagggtgaccctctaggggaccaggtgctctggggctgaaaattgatgggaagcttgaagatagatcaacttcatatagttatttttaaagtagcgagctgaaatatactcttattttttgaataaatcttatgattttgcataccagggttgcaattattgattctttgtaactgtcaacactgcatgcagtacataaacacaaatgtgatatagytttttgtatgtgaggaaggaagaacaytaaaacgtctcccagagcatttacaacacttmtgaattatttttttccactctcccggaaactaagtttatgaagaagaatagtccatcaaaaaacattttcaggaaaactccaccaaaagcttgagctggttaagggattttctgttcttgccaatcaaataaaatgtacttgttcaatttactatgctgcttctgttttcccgtctcttcagcctggagctcattgttgcactgccatgatcaaagatgaaaatacacacctacatggctcttctgtgctttccagcatcacacaccaatgtcctcccacagtggcttgttctcccacac

SEQ ID NO: 18696 - DNA, 600 bp, Chicken  19866894227796_1
agggacaccttctaaaacgtttgctccatgcacccaactgctaatgagtgctcagagggctggtggtgatactgctagtttggtacagaccactgcgcaatatctttctaccatgcctaccatcagttctgggtgtgaattcataccagaaataagtggttgtattgaaaaagaagtaacaaaggactcctttaacacagaactgacgacagagatggtggtaaagtcacaatccctggaggtgttcaagaaacatgtaaacgtgtcactgagggacgtgagttagtgggcacagtgggratgggttgatagttggacctggtgaccttagcgattgtttccaaccttaatgagtctagaggtgcatggaaactcagtggtatttgagcagttttatgccttgcccacttcttgtcccacacgctttctgtctctccacccctggccctgttggctttgaagaagctgacactgaactcagtgtaactccttggctacgcaaaatgagcagcacctgagccatcctcaggacaggaccatgacctccacagcattacaactgcacctgtgaaatcccggtcctttcactgaataatccgt

SEQ ID NO: 18697 - DNA, 600 bp, Chicken  19866894227806_1
agtttcttttcaaggatatagatgaggttttctgtccctatcagaaaataggtgttcttaaaggtcctcctcctgtttgtggtgctgtatagtatgagatctcataggatgcatctttccttcggttgttgagtgttgatgactccaggtatgagcagaaccaggttttcattccacatttatgagcaaatcttaaaatacagagcgaccaaaagttttaaagctgcattctcgttccagatctttcttgtgcttttagcagacttcttaccatgtgaaagcagcaggttgacaaatgcmcgtagtactccatgactactgctggagcccatctggtgtacctgagctgtkactttgctcattgcagttgtgaaattgggcagttttctgggtattaatgagagcagcagcctgcctggccagtgcttgggttctccctgcatggaaaggaattttgctgaagctgctgtgtactgcacatcttaatctgcaaagcaaaggaaaaaggaataaatgttccaaggcgttgagtactcttcagcactcccttatgtaagtggatattgcatgtggtatttgctttggaaaattagctataaa

SEQ ID NO: 18698 - DNA, 600 bp, Chicken  19866894227806_2
gtgttcttaaaggtcctcctcctgtttgtggtgctgtatagtatgagatctcataggatgcatctttccttcggttgttgagtgttgatgactccaggtatgagcagaaccaggttttcattccacatttatgagcaaatcttaaaatacagagcgaccaaaagttttaaagctgcattctcgttccagatctttcttgtgcttttagcagacttcttaccatgtgaaagcagcaggttgacaaatgcmcgtagtactccatgactactgctggagcccatctggtgtacctgagctgtkactttgctcattgcagttgtgaaattgggcagttttctgggtattaatgagagcagcagcctgcctggccagtgcttgggttctccctgcatggaaaggaattttgctgaagctgctgtgtactgcacatcttaatctgcaaagcaaaggaaaaaggaataaatgttccaaggcgttgagtactcttcagcactcccttatgtaagtggatattgcatgtggtatttgctttggaaaattagctataaatgttcttaaccgatatccagatttgaagatgtttgtggttgacttgttgca

SEQ ID NO: 18699 - DNA, 600 bp, Chicken  19866894227809_1
actgcagccccatgcgcagcacaaaaatagccgtgcaggcactccagcaatgcgcagagctgggggcaggctgggcggtgctgcagctgcacgagggggaactcctgctggataaagttcagcctctcagacccggggagtggggaccctaatggctgcaaaatgcctttcgtttggaatataaaacaaaagcattgcgccacctggcttggtcggatgctgcacagtcctgcatttgcccaattccctgcagatctgacccaaacaaaggactcagcagctgaaaccaaggaactcaaytgcaaggcagctagagcagctggaaaaccctccttgggtttacccatcgttaaacaagtgtcagccagggaaaaggagcccaggctcacrmcagcatagcagaaggttgtctggtggaaacaacagagctccatccaaaggatggccctgcttgctcagcttaatcggaaaacaagctcggacaaaactcccaggtggaataagcacttctgagtgcttatcttgattcttctgttccgtatgcccgcacctgaccrcrcctgcctaacagactgcacctccccgggcctccgagctcag

SEQ ID NO: 18700 - DNA, 600 bp, Chicken  19866894227809_2
acgagggggaactcctgctggataaagttcagcctctcagacccggggagtggggaccctaatggctgcaaaatgcctttcgtttggaatataaaacaaaagcattgcgccacctggcttggtcggatgctgcacagtcctgcatttgcccaattccctgcagatctgacccaaacaaaggactcagcagctgaaaccaaggaactcaaytgcaaggcagctagagcagctggaaaaccctccttgggtttacccatcgttaaacaagtgtcagccagggaaaaggagcccaggctcacrmcagcatagcagaaggttgtctggtggaaacaacagagctccatccaaaggatggccctgcttgctcagcttaatcggaaaacaagctcggacaaaactcccaggtggaataagcacttctgagtgcttatcttgattcttctgttccgtatgcccgcacctgaccrcrcctgcctaacagactgcacctccccgggcctccgagctcaggcagaacctcatcactctgagcagtgctctgaatgcacagacctgagcaaacccccaggtttccagcaacgccctccattaaccccgctg

SEQ ID NO: 18701 - DNA, 600 bp, Chicken  19866894227809_3
cgagggggaactcctgctggataaagttcagcctctcagacccggggagtggggaccctaatggctgcaaaatgcctttcgtttggaatataaaacaaaagcattgcgccacctggcttggtcggatgctgcacagtcctgcatttgcccaattccctgcagatctgacccaaacaaaggactcagcagctgaaaccaaggaactcaaytgcaaggcagctagagcagctggaaaaccctccttgggtttacccatcgttaaacaagtgtcagccagggaaaaggagcccaggctcacrmcagcatagcagaaggttgtctggtggaaacaacagagctccatccaaaggatggccctgcttgctcagcttaatcggaaaacaagctcggacaaaactcccaggtggaataagcacttctgagtgcttatcttgattcttctgttccgtatgcccgcacctgaccrcrcctgcctaacagactgcacctccccgggcctccgagctcaggcagaacctcatcactctgagcagtgctctgaatgcacagacctgagcaaacccccaggtttccagcaacgccctccattaaccccgctgt

SEQ ID NO: 18702 - DNA, 471 bp, Chicken  19866894227809_4
gacccaaacaaaggactcagcagctgaaaccaaggaactcaaytgcaaggcagctagagcagctggaaaaccctccttgggtttacccatcgttaaacaagtgtcagccagggaaaaggagcccaggctcacrmcagcatagcagaaggttgtctggtggaaacaacagagctccatccaaaggatggccctgcttgctcagcttaatcggaaaacaagctcggacaaaactcccaggtggaataagcacttctgagtgcttatcttgattcttctgttccgtatgcccgcacctgaccrcrcctgcctaacagactgcacctccccgggcctccgagctcaggcagaacctcatcactctgagcagtgctctgaatgcacagacctgagcaaacccccaggtttccagcaacgccctccattaaccccgctgtagctgctcagtgccataatgcgcgttgcttccaggaa

SEQ ID NO: 18703 - DNA, 469 bp, Chicken  19866894227809_5
cccaaacaaaggactcagcagctgaaaccaaggaactcaaytgcaaggcagctagagcagctggaaaaccctccttgggtttacccatcgttaaacaagtgtcagccagggaaaaggagcccaggctcacrmcagcatagcagaaggttgtctggtggaaacaacagagctccatccaaaggatggccctgcttgctcagcttaatcggaaaacaagctcggacaaaactcccaggtggaataagcacttctgagtgcttatcttgattcttctgttccgtatgcccgcacctgaccrcrcctgcctaacagactgcacctccccgggcctccgagctcaggcagaacctcatcactctgagcagtgctctgaatgcacagacctgagcaaacccccaggtttccagcaacgccctccattaaccccgctgtagctgctcagtgccataatgcgcgttgcttccaggaa

SEQ ID NO: 18704 - DNA, 600 bp, Chicken  19866894227818_1
tcacgtggcctgtatcacaatgaagaatagcctaggaagttatttaatagacaaagaaaatactttagtgggagagaattgaagtgcttggcccatttaggtgaccaggaagagattcatgggttgctttctgagttcccatgccctgtctgtccttctgagaagagctctggctgttaacccagcagaggaggtgcaggaaggacgtgcaaatggagaaatcccaatttggggcacaaattccccacaaggagaaggagggtaatgaagtgtcaaaacaaagcaccatgtgtaaccacrcatctgcctgtgccttcatgtcaagtctggatgccttttctggaagatctatgtgaagcagaaggaatggggtttaatgaaggggcagctaggtgaaatgtgaggaccactgctatataaaagtacagattatatctaaagctgtatcaaggatcttatgacatgccctgtttccagctgtgtcaggaattcctttatgttatgcaattgtgtgcatttcagattttggaagccttctcttttctgagccagacggcctgaagacttccaagggtttattcatttatttattttactttt

SEQ ID NO: 18705 - DNA, 600 bp, Chicken  19866894227820_1
cttgtttttctcctggtgattgattggctttagggtaggaaacaggaacttacttattcataactcaaacagaaaccactgaagatgcagagctgccatcgtttggttcagtgtccaataacctgtagtaaaatgactgtactgcagatttgcagtcatatggaacagtagttggtaaaatagtggctacatattaatacattttgctggactgtcttcctgtttgggaagggcttgcttcttaacagcatggcaaaagagcagacatcagtagactgagactatcagtcttgcttatgyctaccttgggcatgtttctgtcagatgcagtttcagcagctgtgtggccaggtttgaacagtgttgatgaaatattccccctgtctagcaggagcagctgtctgctcatcctctaggtcattctcaagtgacagtcacagttctgggactgtgaagcaagaaggtagctgtcacagtttagataaagtgcaccagtgactgtaaaaagcaggctctgtcttggrcacttgcatcttcttcctgcttgcttaaaaatgcagcagtagggcttctgtgctgtgatgctggtggagctcaaac

SEQ ID NO: 18706 - DNA, 600 bp, Chicken  19866894227820_2
tgggaagggcttgcttcttaacagcatggcaaaagagcagacatcagtagactgagactatcagtcttgcttatgyctaccttgggcatgtttctgtcagatgcagtttcagcagctgtgtggccaggtttgaacagtgttgatgaaatattccccctgtctagcaggagcagctgtctgctcatcctctaggtcattctcaagtgacagtcacagttctgggactgtgaagcaagaaggtagctgtcacagtttagataaagtgcaccagtgactgtaaaaagcaggctctgtcttggrcacttgcatcttcttcctgcttgcttaaaaatgcagcagtagggcttctgtgctgtgatgctggtggagctcaaacagctcaatagaaacagtataatttactcaggtataaacgtattgcattgtaaaagttgtttgcaagctgctccacagacagagcttctggagaactatgtcatgctgtgctactgaggggctcacctgggtgttctttgtgaatggaccttgtggaaggaagggtaaggcaggaaaaacttgagtctggtaacaaggagtctctctgatgtgctgtttaggagt

SEQ ID NO: 18707 - DNA, 599 bp, Chicken  19866894227827_1
  misc_feature (1)..(93): n is any nucleotide
nnnnnnnnnnnnnnnnnnnnnnnnnnnnnnnnnnnnnnnnnnnnnnnnnnnnnnnnnnnnnnnnnnnnnnnnnnnnnnnnnnnnnnnnnnnnncccgccacaggcagggccactaacctccacatttaatactagaccaggctgcccagggccccatccagcctcccttgaacaccttcagggacagggcatccgcagcctctctgggcagcctgttccagcacctcaccgctctcatagtaaagaactcggctttgaactccactgtacgccagtgcaggcctgcagcctctgggccartgtgttaggaattaatggagatcgctgtatgcagaagatacgcaggtatttgtgaccaaattgctgccactaagttggagacaaatgtgacactgactcaaagagacatctcgctgagtgcaaggagcagagtgtcactcctgccatccacctctgcttcctggcacttgtggcagacagcaagaaatcacagccatatctgcttatgtagtacttagcgatcagttaaaaatttaggacataattcagcctttaagatggatgatagaacgtctgaacaatgaagccttgtggtgaag

SEQ ID NO: 18708 - DNA, 600 bp, Chicken  19866894227829_1
ggaatgctttagaagcttccttgtggggagcaacttctcaatatgtttctgggagtgagtatcacaatactttctactgatgtactgaaggatctgaatgaaaaatgcatttggagtaaaaacttgaaaatgttgatctgctgtgcttttggtctcatatgtcaaaagtgtgctatgttaaataacttttcagtgttatttctggattatggttttcactttctgctagcaatgttaaaatagattcacatacaaattttattaaaaaaaaagcaagtgtgggtcattgctctaaagttkcaatcatttgcttaataattctgtgttggttttttttcrcaggacttcaagaatatattgaagctgtttcatttcagtattttatcaaaacccgatctttaattagtattgaagagatcaacaaacaactagtatttacagcagaagacagagaagaaacaacaaacatggtaaaagtttttcttttctcatgtaacatatatctttatggaatggtaatgcagtgaccgagcttaggcatatttttggcatttgattaaataagtccaggtaatagaatggtattagatatacatgtgg

SEQ ID NO: 18709 - DNA, 600 bp, Chicken  19866894227829_2
aatatgtttctgggagtgagtatcacaatactttctactgatgtactgaaggatctgaatgaaaaatgcatttggagtaaaaacttgaaaatgttgatctgctgtgcttttggtctcatatgtcaaaagtgtgctatgttaaataacttttcagtgttatttctggattatggttttcactttctgctagcaatgttaaaatagattcacatacaaattttattaaaaaaaaagcaagtgtgggtcattgctctaaagttkcaatcatttgcttaataattctgtgttggttttttttcrcaggacttcaagaatatattgaagctgtttcatttcagtattttatcaaaacccgatctttaattagtattgaagagatcaacaaacaactagtatttacagcagaagacagagaagaaacaacaaacatggtaaaagtttttcttttctcatgtaacatatatctttatggaatggtaatgcagtgaccgagcttaggcatatttttggcatttgattaaataagtccaggtaatagaatggtattagatatacatgtgggctttgactcagtcattcaaaatgtgctttttattctga

SEQ ID NO: 18710 - DNA, 600 bp, Chicken  19866894227848_1
ggttttgtttcctattgtctctttttttctttgtttgtattttaaatcaaacttcaaagtaacagcctaacttaagatgattataccttgcagtatatgccccatgacttcgtcttgtcccatctgtcagctttcaatgtagcttctgcacctggaagctgaaggggggagggggggatgggcagaacagacaatgcgtgccatagaataattaattgtggtgataaggattttcagcaacttggagaaagaatcctttccctcacagttttctaaccacttttggctttcatgttagcytctcattctttgtgtgtacaaacatgcacacacataggtatgtgtgcatattaagcacattgttctatgtaaagagggaggttctttctgtcaacatagcaagaagagctcagaagcactttgtcaacttacataagctattaagctatccacagctgacgtctttgaggtcatcttctgtagccagaataaatttctctttagcagtacagatggatactaggaaagctagcagatgcattgtagctaatcaaacagaggctcagcagggtaactaaaatctctgttagaattcatatc

SEQ ID NO: 18711 - DNA, 600 bp, Chicken  19866894227851_1
atagagctcttagtatagtgatgcactagaacaggttgtgcagagaggtggtgaatgccccatccctggagacattcaaggtcaggctggagcaggctctgagcaacctgatctagctgcagatgcccctgttcattgcagggagttggactggatggcctttaaaagttccttccaactcaaatgattctatgtgattctatgaagtgtctgaagactgatatatagatatgctcaatccaagaggcagaatgctttgatattatgtggccttaagtcaggtttaagccagactaaaawaatatgcaaatacaagcctgtattttcaagcactcatttcattacttcaaactttatatccattattcattcaaaatagcaaaaattaaaatatttataaaagaagtaggtaaataaatgaaagaaaaactgtgttttacccatagytgtgctaagtttatatctgaagtatctttgctgcttttcctttttcagctcacttgctcactctcttctgaaacattaatagtccggatttcaagctttgcctatgccttttgcctttgttgagtctgttcagaagactgcacaaagagaact

SEQ ID NO: 18712 - DNA, 600 bp, Chicken  19866894227851_2
ggactggatggcctttaaaagttccttccaactcaaatgattctatgtgattctatgaagtgtctgaagactgatatatagatatgctcaatccaagaggcagaatgctttgatattatgtggccttaagtcaggtttaagccagactaaaawaatatgcaaatacaagcctgtattttcaagcactcatttcattacttcaaactttatatccattattcattcaaaatagcaaaaattaaaatatttataaaagaagtaggtaaataaatgaaagaaaaactgtgttttacccatagytgtgctaagtttatatctgaagtatctttgctgcttttcctttttcagctcacttgctcactctcttctgaaacattaatagtccggatttcaagctttgcctatgccttttgcctttgttgagtctgttcagaagactgcacaaagagaacttgctgctaggaaacagcacttccaaaaaagcattctcaggtagatttagataactcctctctcctgattctccctagattctctcctccataactgcccactttctccattcagataaaggttgtttcccttcctttagcacacaaa

SEQ ID NO: 18713 - DNA, 600 bp, Chicken  19866894227851_3
aatcatgtccctgagcaccacatccaaatggctcttaaacacatccagggatggtgactcaaccacctccctggggagcctattccagtgcttaacaaccctttctgtaaagaagtgtttcccgatatccaacctaaacttcctctggtgcaacttgaggctatttcccattgtcctgccaccagtgagaagagagcaaccccgctctcgctgtaagcacctttcagatactggaagagaacaataaggtctcccctcagcctccttttccccagactaaacagccccagttccctcagyctctcctcatagggcatattctccaagcctttcacaagccttgttgcctttctttggacctgctccagcacctcaatgtcctttctgtactgaggtgcccaaaactgtacacagtacatgaggtgaggcctcaccagtgccgartacaggggcaggattacttccctagtcctgctcaccataccattcctgatagaagccaggatgccattggccttcttagccacctgggcacactgctggctcatattcagccaactgtctatcagtacaccaaggtccctttccatcaggcagctt

SEQ ID NO: 18714 - DNA, 600 bp, Chicken  19866894227851_4
ctggtgcaacttgaggctatttcccattgtcctgccaccagtgagaagagagcaaccccgctctcgctgtaagcacctttcagatactggaagagaacaataaggtctcccctcagcctccttttccccagactaaacagccccagttccctcagyctctcctcatagggcatattctccaagcctttcacaagccttgttgcctttctttggacctgctccagcacctcaatgtcctttctgtactgaggtgcccaaaactgtacacagtacatgaggtgaggcctcaccagtgccgartacaggggcaggattacttccctagtcctgctcaccataccattcctgatagaagccaggatgccattggccttcttagccacctgggcacactgctggctcatattcagccaactgtctatcagtacaccaaggtccctttccatcaggcagctttccagccactcttccccaagcctatagggttgcctggggtttgttgtgaccaaaatgcaggacctgacacatggccctgttgaaactcatcgttaaccttggcccatcgatccagtctatccaggtccccctgtagtgcctttc

SEQ ID NO: 18715 - DNA, 600 bp, Chicken  19866894227858_1
ttcacgtgcctggtataggaatgatttctgctgttgacttgtgaataaagcaaacacgcaagcatacactatatctcccccttacccatcgtccctcaaattttgagcccttctgacaggaaaagataaatgccaactctggtttcacatctaccgacgagcaatggcattgtgtgggagttaatgctggcagaatttttgaccagagttaggcccggtaaaggctcttcagattcatttttctcattctcatgcacaggaatgcttctatagaggatgttgtaataagggtgtgacacrcaggaatgtaaggaaaaaaataactgctttattttctggcatagaagagtgtgggtaactcttgggtaagagttaaaaaagttaatgctcttttctgatactagaggtggagaaaactgttttgggggatctttccaacttcagaagaagcccctggctctctagtgggaaatttgacttgctgccatgaaagcatgttccacattacagcagctgccttttagagagatgaaataaatgttcaccccacacagagctgggaacttcaataggaagtgggagcatagcaagaactgacag

SEQ ID NO: 18716 - DNA, 599 bp, Chicken  19866894227860_1
  misc_feature (1)..(29): n is any nucleotide
nnnnnnnnnnnnnnnnnnnnnnnnnnnnnacccttaatccagccatcaacctgggctactgagtcccaccacttaccatgtccctcagtgctacatccacacatctcttaaacacctccaaggatggggacaccacccatttccctggtcagcctgttccagtgcctgatcaacctcttcatgaagagattcttccttatgtccaatttaagcctcctcttgagcagaaagtacaatagattcttgaaaaagtctgtctccatttctcatacctccaccgccattaataaaggctgatgrctgcgaggttagcaagacagagctggtgctacagaggtggggaagctacagaaccaatggatctaatgagtaatgagccactagatgagctcagccatcttgtgaatcttcccttgacttttgccactgttacttctaactaataatttttcagcattcagtttacacgatgaaatgctagaaaggtgaatatacaacagtacacatcaaagtcagatcccaaagtttcagaagggctgctgaatatatatactattacaaaccttaggtatttgataggaaactttcatagcatcata

SEQ ID NO: 18717 - DNA, 600 bp, Chicken  19866894227860_2
gtaatgagccactagatgagctcagccatcttgtgaatcttcccttgacttttgccactgttacttctaactaataatttttcagcattcagtttacacgatgaaatgctagaaaggtgaatatacaacagtacacatcaaagtcagatcccaaagtttcagaagggctgctgaatatatatactattacaaaccttaggtatttgataggaaactttcatagcatcatagaattgcctgggttgaaaagaaccataatgatcattgagtttcaatccccctgctatgtgcagggtcgcyaaccaccagaccacrctgcccagagccacatccagcctggccttgaatgcctccagaatgcctgtctttaaactcttgcttttcaagttgaatgatgagacagaatttcactgagagatctgaaattgttttcttctagagatgtagagggaaaagggaccactccttgatcatacccgtggatcccacattagcacgtgttaacaaacatgatgaagttcgaagacgttcctcaaattccaagtcccatatccctcctgatcacatggctcaatggtctgggaccgggctataagagaa

SEQ ID NO: 18718 - DNA, 600 bp, Chicken  19866894227860_3
atgagctcagccatcttgtgaatcttcccttgacttttgccactgttacttctaactaataatttttcagcattcagtttacacgatgaaatgctagaaaggtgaatatacaacagtacacatcaaagtcagatcccaaagtttcagaagggctgctgaatatatatactattacaaaccttaggtatttgataggaaactttcatagcatcatagaattgcctgggttgaaaagaaccataatgatcattgagtttcaatccccctgctatgtgcagggtcgcyaaccaccagaccacrctgcccagagccacatccagcctggccttgaatgcctccagaatgcctgtctttaaactcttgcttttcaagttgaatgatgagacagaatttcactgagagatctgaaattgttttcttctagagatgtagagggaaaagggaccactccttgatcatacccgtggatcccacattagcacgtgttaacaaacatgatgaagttcgaagacgttcctcaaattccaagtcccatatccctcctgatcacatggctcaatggtctgggaccgggctataagagaaaacagaatttgtgag

SEQ ID NO: 18719 - DNA, 600 bp, Chicken  19866894227863_1
accccttacttgcacaaccagcttttataacaaatatgtcaccctgaagcttagtgaagtgttccctgcaggtgacaagtgcctgttaaagttattttacagtagtaattctttaagttaaaaaaaaaaaaaaaagattctgaattaatccagaagtcagattctttagtcttgtatgtataaagagtataaattgaaacacttaatgcaattcaaaggttgcttcaaggaattatctactgagattattaaaaaaaaaaatcaggtcagtacttgctgaaatgatcaaaaaggatatcwtgtctcctggccttttactgttctgaagagaaatggaacagcatcaaaaagaagaaaaaagcataaggggcactaggcatcagagatgtttctaagctgattattcagactctggcattagcagttgattgacataacaggcagcaaagcagaatcactgggaaaatatggttgaaggcttttgtgcagcacaaaacagatgtgtgtcacctgtaattggcttgtaacagcataaatggcttagatactacatttgctgaatatatatttgtctgcttggtgaaataccaccaaggcatt

SEQ ID NO: 18720 - DNA, 600 bp, Chicken  19866894227864_1
caagcccccgaaggatttatggcttgtttcaggtacaaacagaatctaagttaggttttctgaggatttactagctttaaggttagaatgaagcagaacctgtgcagtcctgtggaaagtaaatccaggtaccacccatcccaaagccctcttcttcctgggaagcctctggctgctgcagtcgcactctgctgtgatcacaggcacgcagatcctcccagagatgttgcagatctccaggtggtgacatcagttccttccttgggtgaaaaggtgagtctgcacactgggaaaaaacawatggtgtgaggttaggatgggtctggggggatacctgctctgcagrgggagatcagcttgccaagcctcatgaggatgatgcggagctgagcaaagaaagctgtcctgcttctgagctggtgcctggagggatcctagggcaccttgcgctgctctgaaagggctgcaggaaaaggccaattctttctaagagcagctcccatcttctgttcttgctgctcattgcctctcgtggctcatatcacgacaagagctcatcacttagcagcagcgcctgccttcagcactgcgaaccatcga

SEQ ID NO: 18721 - DNA, 600 bp, Chicken  19866894227864_2
taagttaggttttctgaggatttactagctttaaggttagaatgaagcagaacctgtgcagtcctgtggaaagtaaatccaggtaccacccatcccaaagccctcttcttcctgggaagcctctggctgctgcagtcgcactctgctgtgatcacaggcacgcagatcctcccagagatgttgcagatctccaggtggtgacatcagttccttccttgggtgaaaaggtgagtctgcacactgggaaaaaacawatggtgtgaggttaggatgggtctggggggatacctgctctgcagrgggagatcagcttgccaagcctcatgaggatgatgcggagctgagcaaagaaagctgtcctgcttctgagctggtgcctggagggatcctagggcaccttgcgctgctctgaaagggctgcaggaaaaggccaattctttctaagagcagctcccatcttctgttcttgctgctcattgcctctcgtggctcatatcacgacaagagctcatcacttagcagcagcgcctgccttcagcactgcgaaccatcgatctgccctcctcatccctggaatgagaacgtctccagcaatcagag

SEQ ID NO: 18722 - DNA, 600 bp, Chicken  19866894227864_3
accttgcgctgctctgaaagggctgcaggaaaaggccaattctttctaagagcagctcccatcttctgttcttgctgctcattgcctctcgtggctcatatcacgacaagagctcatcacttagcagcagcgcctgccttcagcactgcgaaccatcgatctgccctcctcatccctggaatgagaacgtctccagcaatcagagaatgtctcaaaatgggaactggggctttattggctttgtggctctcagcttcatgttttctaggttttctgcgacagaaagagtatagaaatgtycctctcatttttaatgaaagctgagataatctgcgtcacaggagactgagcactgcaaaaggtttccaaaggatgtaaggaggtaccacctaacacactgcggccacgagcaaccgcttgtctgagataactcacagcaactgattattacaacttacttaaatattcagtaaccaaaaaatgtgtaaactatttctgtgcataagctccacaaattgcatgatccctgcttccctctgaaatctctttcttcccactgagtctgctatttccctaccattcgactcgctgggtcttctt

SEQ ID NO: 18723 - DNA, 600 bp, Chicken  19866894227880_1
ttccaggaatgaacagtagattaataaggattacagggctccagcagggagagaagcaaaggcccaatggcatccacgtgtagaatttcctaattctccttaaaaaacaattttgtggttagccatgtttcccgtgtattattccttcagtatttgcttaaagtgcctaaggtgtaattgcataatgagcaattacggaattctcaggtgccgcctattatgtgtgccttttacttaagtgtgtgcaatattcctggaataaacgttgtgcagacttctggcaacttcccttagtcctaytcacctccccaccccccagctactggccttcatttatctttgcagaagacttgtaattaagtgcagtagttctttacagctctataggatgttcacrtccgaagtgtaagtcggcaccagctgtcaatcctggaattcmctgaaacactttctgagatgcagttacatgagctgtccttgaaatttaaagaaaccatctttataattagtttcttgttaatagcatgctgcttaaacaccgtaagatgtcatctggaacaagctgctgcttaaactggagtagtctctgcagaagtggat

SEQ ID NO: 18724 - DNA, 600 bp, Chicken  19866894227880_2
ccttaaaaaacaattttgtggttagccatgtttcccgtgtattattccttcagtatttgcttaaagtgcctaaggtgtaattgcataatgagcaattacggaattctcaggtgccgcctattatgtgtgccttttacttaagtgtgtgcaatattcctggaataaacgttgtgcagacttctggcaacttcccttagtcctaytcacctccccaccccccagctactggccttcatttatctttgcagaagacttgtaattaagtgcagtagttctttacagctctataggatgttcacrtccgaagtgtaagtcggcaccagctgtcaatcctggaattcmctgaaacactttctgagatgcagttacatgagctgtccttgaaatttaaagaaaccatctttataattagtttcttgttaatagcatgctgcttaaacaccgtaagatgtcatctggaacaagctgctgcttaaactggagtagtctctgcagaagtggatcgtacagaaaagttagcaatcgagtttaaggctgtgctttctgtacaagtctgactgtacctcacacatcacttcgttttttgagccacttggcaaa

SEQ ID NO: 18725 - DNA, 600 bp, Chicken  19866894227880_3
tattccttcagtatttgcttaaagtgcctaaggtgtaattgcataatgagcaattacggaattctcaggtgccgcctattatgtgtgccttttacttaagtgtgtgcaatattcctggaataaacgttgtgcagacttctggcaacttcccttagtcctaytcacctccccaccccccagctactggccttcatttatctttgcagaagacttgtaattaagtgcagtagttctttacagctctataggatgttcacrtccgaagtgtaagtcggcaccagctgtcaatcctggaattcmctgaaacactttctgagatgcagttacatgagctgtccttgaaatttaaagaaaccatctttataattagtttcttgttaatagcatgctgcttaaacaccgtaagatgtcatctggaacaagctgctgcttaaactggagtagtctctgcagaagtggatcgtacagaaaagttagcaatcgagtttaaggctgtgctttctgtacaagtctgactgtacctcacacatcacttcgttttttgagccacttggcaaaaaaaacccaacaatatttatagataagaagttctgatacata

SEQ ID NO: 18726 - DNA, 600 bp, Chicken  19866894227901_1
caatgtttccagatatcctggacaccacatggatgttactaaaagcagggaggaccaaagtgtctatcactgacaaactatattactatatatactatatatattgattgtttcttatgcaacttaattgtttacagttttcacatcaacttaaacactctttagttatctgaatgtatgtatgtaggcattattattactttccttttctgaaggaaacataaaagtacattcataaaatcatcaaggctacagacccaagcactcaaaacccaggaaataccaaaataaagttggcamagcaaaagaaaatatttttctcttgatttcattcccagaagcaatgaaaccatttttttgtttaatctttccaaaccaattcatctgaagcagacattcagcatggaaagtttcagcccaaacagttcaaattcggccaacttagacaccactgaaaacagggtcttataacgggaaacgtgaggcaagcttaattacaggcagcactaccaccatcacttacaaatacatttaggattaaaatttcatcctgactttgccttgtctatttatctatatactatatagaaggaatacaaa

SEQ ID NO: 18727 - DNA, 600 bp, Chicken  19866894227901_2
aacagttcaaattcggccaacttagacaccactgaaaacagggtcttataacgggaaacgtgaggcaagcttaattacaggcagcactaccaccatcacttacaaatacatttaggattaaaatttcatcctgactttgccttgtctatttatctatatactatatagaaggaatacaaactccttccatgcctgcctttcttactgtgttgtaggtcccgggtctttggcacacttgatcaaaactacaacacagctactaacatcaggcgtcagaaagagaagtcattactcaaaacracaatctcagatgcatgacacaaagaggaagccacaagttttcagagggtctcaatactcacagaagtttctacaagttccarttctttgcatatctcaattaaatgttaactgctctgctgaaattagcaggtctgcttgatgattactgcctggcatttcattaggaaattaactacattcaaaacatactgcttgctgtgctgctgtccagtgctgccatcgaatgccctgcattctcgctggcccagcttcctgcgcaggcttctgctgcacacacactgcattcagttcctattt

SEQ ID NO: 18728 - DNA, 594 bp, Chicken  19866894227901_3
gcactaccaccatcacttacaaatacatttaggattaaaatttcatcctgactttgccttgtctatttatctatatactatatagaaggaatacaaactccttccatgcctgcctttcttactgtgttgtaggtcccgggtctttggcacacttgatcaaaactacaacacagctactaacatcaggcgtcagaaagagaagtcattactcaaaacracaatctcagatgcatgacacaaagaggaagccacaagttttcagagggtctcaatactcacagaagtttctacaagttccarttctttgcatatctcaattaaatgttaactgctctgctgaaattagcaggtctgcttgatgattactgcctggcatttcattaggaaattaactacattcaaaacatactgcttgctgtgctgctgtccagtgctgccatcgaatgccctgcattctcgctggcccagcttcctgcgcaggcttctgctgcacacacactgcattcagttcctattttggatgcagtctataaatgtaaacactagtttacactggactgacagccaggtamggaatcacaatcttcaatcaat

SEQ ID NO: 18729 - DNA, 322 bp, Chicken  19866894227901_4
tactcacagaagtttctacaagttccarttctttgcatatctcaattaaatgttaactgctctgctgaaattagcaggtctgcttgatgattactgcctggcatttcattaggaaattaactacattcaaaacatactgcttgctgtgctgctgtccagtgctgccatcgaatgccctgcattctcgctggcccagcttcctgcgcaggcttctgctgcacacacactgcattcagttcctattttggatgcagtctataaatgtaaacactagtttacactggactgacagccaggtamggaatcacaatcttcaatcaat

SEQ ID NO: 18730 - DNA, 600 bp, Chicken  19866894227904_1
gttttattactacacatcataaataacagtcaggaagacagcagaaaattactgacttctttaattgttttctttctcagcagcgtgtacctacacacaccggcatacaaatgcagccacagtgactacagcagggcaccttactggcttgagctttaacataccactaatatttgcaggattcacagttaaactattttcattttcagaaaaaatccgtcacgttggccatctatggaaggacaacagcagaggaacacgcaagattcctgaaatggtattctgagatcatggtcttcrtatgaatacgtgagtcaaatccctttgtacaatcaaggtgcgtctgtacatagaacactgaatgtgggatttwcagatgaagggggaattaccaacaatatatttatttccccctaatgaagcttttctaatgaaatttaatactgccaaggttgcgagatatttgaaacaggagcccagttcaaatctttcagccaaatgctggtgatagcattagcgaggcgtgggaatcaagtctttacgtagtgctgtacaagaaaatgagctgaggggagcgggctgaacaaagcaaagcaaaat

SEQ ID NO: 18731 - DNA, 600 bp, Chicken  19866894227904_2
ttctcagcagcgtgtacctacacacaccggcatacaaatgcagccacagtgactacagcagggcaccttactggcttgagctttaacataccactaatatttgcaggattcacagttaaactattttcattttcagaaaaaatccgtcacgttggccatctatggaaggacaacagcagaggaacacgcaagattcctgaaatggtattctgagatcatggtcttcrtatgaatacgtgagtcaaatccctttgtacaatcaaggtgcgtctgtacatagaacactgaatgtgggatttwcagatgaagggggaattaccaacaatatatttatttccccctaatgaagcttttctaatgaaatttaatactgccaaggttgcgagatatttgaaacaggagcccagttcaaatctttcagccaaatgctggtgatagcattagcgaggcgtgggaatcaagtctttacgtagtgctgtacaagaaaatgagctgaggggagcgggctgaacaaagcaaagcaaaataaaacgatggcctaaaaccaaaggagtacacrcttgttattaggccaaatgttttgacctgctggctggggac

SEQ ID NO: 18732 - DNA, 600 bp, Chicken  19866894227904_3
tcaaggtgcgtctgtacatagaacactgaatgtgggatttwcagatgaagggggaattaccaacaatatatttatttccccctaatgaagcttttctaatgaaatttaatactgccaaggttgcgagatatttgaaacaggagcccagttcaaatctttcagccaaatgctggtgatagcattagcgaggcgtgggaatcaagtctttacgtagtgctgtacaagaaaatgagctgaggggagcgggctgaacaaagcaaagcaaaataaaacgatggcctaaaaccaaaggagtacacrcttgttattaggccaaatgttttgacctgctggctggggacatagaagagacagagacacgagaattcgctggacaatttgactcaaaaacttaatttaattttgcatcacacaggaagttttttctttctttctttcyttttaaagatgcaaattagagtaattgcatcaagttattagctgtagcatcattgcaagtgagttttcagcatatattttaaaaggttttggaatgttcccaaagctgcaagcgctaagtattttcaggttatttgtacggtaagcctttcctatttacgt

SEQ ID NO: 18733 - DNA, 503 bp, Chicken  19866894227904_4
ggagcccagttcaaatctttcagccaaatgctggtgatagcattagcgaggcgtgggaatcaagtctttacgtagtgctgtacaagaaaatgagctgaggggagcgggctgaacaaagcaaagcaaaataaaacgatggcctaaaaccaaaggagtacacrcttgttattaggccaaatgttttgacctgctggctggggacatagaagagacagagacacgagaattcgctggacaatttgactcaaaaacttaatttaattttgcatcacacaggaagttttttctttctttctttcyttttaaagatgcaaattagagtaattgcatcaagttattagctgtagcatcattgcaagtgagttttcagcatatattttaaaaggttttggaatgttcccaaagctgcaagcgctaagtattttcaggttatttgtacggtaagcctttcctatttacgtatgaaatatctgagcccataatatttgagccttaagtttcaa

SEQ ID NO: 18734 - DNA, 600 bp, Chicken  19866894227906_1
ctctaagaggcttgccacatacccttcagattcacatgttggagttggtaaatattattgtcattatgcagaggaacgagctgaggcaggggttgttatttgtaggagcctaaattggagtggctgagctgaaagcagaaggcaagctgagtggcctagggccttaaatacaactccacactgagcaaaacaaaacatcttgcatgatgcctatcaactgtgccaccctctccacgtggaagcagcctgaatccagatggggatggaggcatttgtaaagtctttcagccagaagccagsaggggacagaggtcagcccagagaggagagcccattktaagtacatgagccttcggatcccaggtatgccaaaggtaggtgagtgagcacatgctgtgtgtgagaatgrggcaagagcatcctaatgcagtgacttttgatctgattttagatagtttgctatttaaaagtagcagcattgatcgatagcctttattatgscaagaggtggaggggacattgtccagcatctactcagaatcccattttacagcagcccagggttggctttgcaacccaaatgcccaaagattgtgcccc

SEQ ID NO: 18735 - DNA, 600 bp, Chicken  19866894227906_2
gttggagttggtaaatattattgtcattatgcagaggaacgagctgaggcaggggttgttatttgtaggagcctaaattggagtggctgagctgaaagcagaaggcaagctgagtggcctagggccttaaatacaactccacactgagcaaaacaaaacatcttgcatgatgcctatcaactgtgccaccctctccacgtggaagcagcctgaatccagatggggatggaggcatttgtaaagtctttcagccagaagccagsaggggacagaggtcagcccagagaggagagcccattktaagtacatgagccttcggatcccaggtatgccaaaggtaggtgagtgagcacatgctgtgtgtgagaatgrggcaagagcatcctaatgcagtgacttttgatctgattttagatagtttgctatttaaaagtagcagcattgatcgatagcctttattatgscaagaggtggaggggacattgtccagcatctactcagaatcccattttacagcagcccagggttggctttgcaacccaaatgcccaaagattgtgcccctgcacattaggtgagggatggaggatgtgtgcttgca

SEQ ID NO: 18736 - DNA, 600 bp, Chicken  19866894227906_3
ctaaattggagtggctgagctgaaagcagaaggcaagctgagtggcctagggccttaaatacaactccacactgagcaaaacaaaacatcttgcatgatgcctatcaactgtgccaccctctccacgtggaagcagcctgaatccagatggggatggaggcatttgtaaagtctttcagccagaagccagsaggggacagaggtcagcccagagaggagagcccattktaagtacatgagccttcggatcccaggtatgccaaaggtaggtgagtgagcacatgctgtgtgtgagaatgrggcaagagcatcctaatgcagtgacttttgatctgattttagatagtttgctatttaaaagtagcagcattgatcgatagcctttattatgscaagaggtggaggggacattgtccagcatctactcagaatcccattttacagcagcccagggttggctttgcaacccaaatgcccaaagattgtgcccctgcacattaggtgagggatggaggatgtgtgcttgcaactgatggtgcttaatgatgtgccatttgcagtagctgcttaacaggatgcacgctcccctttattagaggc

SEQ ID NO: 18737 - DNA, 600 bp, Chicken  19866894227906_4
gcatgatgcctatcaactgtgccaccctctccacgtggaagcagcctgaatccagatggggatggaggcatttgtaaagtctttcagccagaagccagsaggggacagaggtcagcccagagaggagagcccattktaagtacatgagccttcggatcccaggtatgccaaaggtaggtgagtgagcacatgctgtgtgtgagaatgrggcaagagcatcctaatgcagtgacttttgatctgattttagatagtttgctatttaaaagtagcagcattgatcgatagcctttattatgscaagaggtggaggggacattgtccagcatctactcagaatcccattttacagcagcccagggttggctttgcaacccaaatgcccaaagattgtgcccctgcacattaggtgagggatggaggatgtgtgcttgcaactgatggtgcttaatgatgtgccatttgcagtagctgcttaacaggatgcacgctcccctttattagaggcaattaagtgttttatgtatattacagtgctacaacagatccatactgcttagactctttctttcaggctccctctgagctccttaggtcgtg

SEQ ID NO: 18738 - DNA, 599 bp, Chicken  19866894227910_1
  misc_feature (1)..(34): n is any nucleotide
nnnnnnnnnnnnnnnnnnnnnnnnnnnnnnnnnntgggtcattcattgtcactgtgatatcagccccgagagcaggaggtgacccagcagcaccccggggggggggggggtgatgtttgggtagcagtggcagagcaggttgtggaagtgacactgagcaaggagacgtggttcagtggtcatggcagggatgggttgatggttggtctagatggtcttagaggtcttttccaatcttaatggtcctatgaaaggagaaggaggtctcaaaagtaggttatggggtaaatagctctttgkggataagcacgtgcctctcgttgcttctggagtagggattcagttggttcagtgtggggttggcagcctatgggtggttgtggggtcagggctgcagagcccccgcatgttgggatgtggccccattctgtaccaggagcaccacggacacgcagaccccgcagctgagatgctcccagtgtttgaagcactgggaggggatttctctctgtggcagcaccagtgcaaagcacccggaccttgccatgagcctgcaaaccagcactgccaactccatgcaggggctgtgcaaaggaata

SEQ ID NO: 18739 - DNA, 600 bp, Chicken  19866894227910_2
tcagtgtggggttggcagcctatgggtggttgtggggtcagggctgcagagcccccgcatgttgggatgtggccccattctgtaccaggagcaccacggacacgcagaccccgcagctgagatgctcccagtgtttgaagcactgggaggggatttctctctgtggcagcaccagtgcaaagcacccggaccttgccatgagcctgcaaaccagcactgccaactccatgcaggggctgtgcaaaggaatacaggaattgctgcaacacacaccattatgagccttgctttaggtgccarctgagtgcactgctttgatggctataaatgcaactatgtgcatatataaaagcgttgcaggtccttccgaggtgcccaaacagctgctgggttctgcacctgtaacacttggttgtggtgtgtgattcctgccctcttgcactcacggtttgggttcacattctgcctgattgcttttccttctccatccaaaagctgaaaacctccaaacgctgcatgcagggctccatcccctgcatggcactgggggggaggtgggagcggggtgggatgggagcgtggaaaagcgaaacaaaaccc

SEQ ID NO: 18740 - DNA, 600 bp, Chicken  19866894227912_1
tggcaatgcatccagtctgtgccatgttttctacactacgcttgggatgcaaacaggcactttggcaggaagacctgaattgcttactgcgtgcattctgccatctatttttgcccagcaagggcagcatgcccagcctacagtacacaggtcatgtcatctctggagtgcttcctggggcaggacttctccgagcagatgagcctgccattcttagtaaaaataactttcagcaccagactcccagtttacttcctgcaattcagagacctatttccacatttcttttgttcttaaaamttctgccttagtatatcatacctaatatctatatgtaagaggcaaaatcccctcagctttatcaatccagaacagggtggtagcaaggtttctaagatgcacaaaagaaatgcactctttctgactctacttgccaaaagattacgtggcatcaatatgatctacttataagcaaagctacatgactcttataagtactaaataggacagaacagcagaaagatgcrcacttcatctcctaacctcaacaccaggcagcagctgctgcggtcctctttgaaggctctgagcaaccaatgt

SEQ ID NO: 18741 - DNA, 511 bp, Chicken  19866894227912_2
tttcagcaccagactcccagtttacttcctgcaattcagagacctatttccacatttcttttgttcttaaaamttctgccttagtatatcatacctaatatctatatgtaagaggcaaaatcccctcagctttatcaatccagaacagggtggtagcaaggtttctaagatgcacaaaagaaatgcactctttctgactctacttgccaaaagattacgtggcatcaatatgatctacttataagcaaagctacatgactcttataagtactaaataggacagaacagcagaaagatgcrcacttcatctcctaacctcaacaccaggcagcagctgctgcggtcctctttgaaggctctgagcaaccaatgttgttctacatgctycatcataatacaatacctgatttatataaggcagcttgcataaagtctgcaatgtattaaacaacttcaaagcaactacctaaagagtgataaagacagtgcaaagagaacaagcactctccat

SEQ ID NO: 18742 - DNA, 424 bp, Chicken  19866894227912_3
atcatacctaatatctatatgtaagaggcaaaatcccctcagctttatcaatccagaacagggtggtagcaaggtttctaagatgcacaaaagaaatgcactctttctgactctacttgccaaaagattacgtggcatcaatatgatctacttataagcaaagctacatgactcttataagtactaaataggacagaacagcagaaagatgcrcacttcatctcctaacctcaacaccaggcagcagctgctgcggtcctctttgaaggctctgagcaaccaatgttgttctacatgctycatcataatacaatacctgatttatataaggcagcttgcataaagtctgcaatgtattaaacaacttcaaagcaactacctaaagagtgataaagacagtgcaaagagaacaagcactctccat

SEQ ID NO: 18743 - DNA, 600 bp, Chicken  19866894227915_1
ttaggaggatctgctgtgataggtcatggggaaatgatttcagattaaaagaggggagatttagactagatatatggaagatgttttttacagtaagggtggtgaagcattggaataagttgcccagaaaggtggtagatgttccatgctggagacattcaaggtcagcctgtacaggccctgagcaccctgctccacttgtaggcatccctgttcattgaagggcaattggagtagatggcctttaagtgtcccttccaagtcaaaaaattgtatgaaaattaaatagtgttctctcargaaaatgagtccggagctggctgatcctgtgctgggagacagaccactgggtgggaagtccaacaacttatagtttcagtcccctagggatgtacttctccaagatgccctttcttcgggggcagcctttgtcctctccacatcagcttcagagtggccccccagctcctcttttaggattggctctttcttttcactgtgcatttgattatgccaacagcaactaccttcctcttaaaaatgctctgaataaaaattaagaagtggtctgcttgaagcaaaagctgtgatggttttttt

SEQ ID NO: 18744 - DNA, 600 bp, Chicken  19866894227916_1
tgtaaatggtctgaatccagttgggccacaaacatcatgagaagaaagtttctcatgccatgacaaacaatttttcccatgtagacaaggccttaattaatctttaaagtgttccagttttaattttaggtcacagctggggctggttcttacagtggctctcatccagcaaaactcttaagcatatgcctaattctaggcatttaaagtagtcttgttgactcttacaagattgctcacatgctcaaaactatgcagatgtttaaacttctgctgggtaagggcctgcctctgaactcractgtcctcctccagtcacaacaacaaggcaatggaagagaaactgctcctaaaccaaccttcaaagttttgtctgaaggcatactggaagggccagacagctggaaggctttgcattagttttttcaccacagtataaattacctccgatttgcttaatgactgtttggaatcaggatgtctcagccccaataatacaatgccccatgggcaacaatcctctttttagaagagtcatagtcaaagaacattttcagcagaataaatcacttcacacaactgcaggcgaactatgtgctg

SEQ ID NO: 18745 - DNA, 600 bp, Chicken  19866894227919_1
gacgcaggaggagctgggggcttcttgtttggtaggaagaggggatatcaaaggacaaaggactccaacctgtaagaaacccagcttctttttctgtttctttactgtctccattttcagaggtaaattgcccctggtgatttgagccataaaagcttttgagtcatcttcactatttagctgtgaaagatgagacggttccgttcaaatcgctcatctgaaggcatgctaaataattaacaatatatggtctgctgtgctatttaccatcccacagggccgctggttgtatgaccttamagcaggttgactttatgaagagtactccggagragaatctggcatggccactggcttgcacgctgacaaagcttcttaagataaggaactgtaattcaatattaggctaatcaatatatgtggttccacaggtagtttgtgctggttctattgggcctcaaataaattgagtgacttaaacaataggcagaactgcagaggaaagaaagggaatgtagcatacgtcaatgctaaagcttgaatgcattcatacgatgtagtaaactaaggtcactgcctttgttaagaaaatcttggcaa

SEQ ID NO: 18746 - DNA, 600 bp, Chicken  19866894227919_2
aggaagaggggatatcaaaggacaaaggactccaacctgtaagaaacccagcttctttttctgtttctttactgtctccattttcagaggtaaattgcccctggtgatttgagccataaaagcttttgagtcatcttcactatttagctgtgaaagatgagacggttccgttcaaatcgctcatctgaaggcatgctaaataattaacaatatatggtctgctgtgctatttaccatcccacagggccgctggttgtatgaccttamagcaggttgactttatgaagagtactccggagragaatctggcatggccactggcttgcacgctgacaaagcttcttaagataaggaactgtaattcaatattaggctaatcaatatatgtggttccacaggtagtttgtgctggttctattgggcctcaaataaattgagtgacttaaacaataggcagaactgcagaggaaagaaagggaatgtagcatacgtcaatgctaaagcttgaatgcattcatacgatgtagtaaactaaggtcactgcctttgttaagaaaatcttggcaaattacatctgctgtagaggtcaggcaattatgt

SEQ ID NO: 18747 - DNA, 600 bp, Chicken  19866894227924_1
acatgcactgcattgagacagaattagtaatgctaatagagctgtagacttactgtgaatcagtttgcctgtgtagacattcagataaaactgaattcattaggtttctctggctttgtggtgcttactttttctgatgaataaatttgcaactatttgtgtccactgagaaagagatgtaagagcaatattagatgtattacctaatagcaaagaataatcaaggacacaaatgcttgattgtgtcaacactgcaaacaagtctgacaattattcactgaatgaagacagtgaaacacytctgtgtgtaaaaataagtgtttttattctgtaaacacaaatgctatcaacgcaactcaaatacttcagagaagctctatatgacatataaataataattgcaaaattcagtgtagcaagcaaactaagaaaayaaaatagtcttagcgaataatttgttgggttttttttttttttcgacatagttcacagaggaaaagaaccaaaacagttgatatgctgttacttattctgtagctctaaacaggtttttttctttattaaatagaaatagttgagccagaatctgattttgtttct

SEQ ID NO: 18748 - DNA, 600 bp, Chicken  19866894227924_10
ttcttctgcacatttcagacaggaggagtaacaggaacatttgtgtttkcttgcttgaagacaaaaaactctttgtaaaaatataaaatctggaaacaagctggctggtgaagtttaaaatactggctgcaaatcaaacacaagaaaggtattggtgaaggccatgtcacacacaaagaagtacacagtgatattcagttttggaaccttctttaggctgttgaaacaaatcaaacttaatttagtcaaaatatcttcacaactagacagagtttggctttgtttttgctattttaaatrtaagcgggggacaaaaatgtctaaatgaagctcttcttgttttttgttcttcttttttcatacggaaractgcattttcctgaggcatgccccaaccacgtcgctcggttgcagtcttcacaaatagtatcccctctaaaaaaggaaaaaaagatccagtaatatctgtatggtcactcttgcctgtttgcscctacaaagaacagagctatagacctgtaaaactaagaattgaacaatgaattgaccttaatctgtgmgggctgaatttatcatcaccttaacttcttcagagcacat

SEQ ID NO: 18749 - DNA, 600 bp, Chicken  19866894227924_11
ctctttgtaaaaatataaaatctggaaacaagctggctggtgaagtttaaaatactggctgcaaatcaaacacaagaaaggtattggtgaaggccatgtcacacacaaagaagtacacagtgatattcagttttggaaccttctttaggctgttgaaacaaatcaaacttaatttagtcaaaatatcttcacaactagacagagtttggctttgtttttgctattttaaatrtaagcgggggacaaaaatgtctaaatgaagctcttcttgttttttgttcttcttttttcatacggaaractgcattttcctgaggcatgccccaaccacgtcgctcggttgcagtcttcacaaatagtatcccctctaaaaaaggaaaaaaagatccagtaatatctgtatggtcactcttgcctgtttgcscctacaaagaacagagctatagacctgtaaaactaagaattgaacaatgaattgaccttaatctgtgmgggctgaatttatcatcaccttaacttcttcagagcacatgcacacaccagcttttttttcttactgagttcttgcctaggctgaaattgtggcacatttttaaatct

SEQ ID NO: 18750 - DNA, 600 bp, Chicken  19866894227924_12
attcagttttggaaccttctttaggctgttgaaacaaatcaaacttaatttagtcaaaatatcttcacaactagacagagtttggctttgtttttgctattttaaatrtaagcgggggacaaaaatgtctaaatgaagctcttcttgttttttgttcttcttttttcatacggaaractgcattttcctgaggcatgccccaaccacgtcgctcggttgcagtcttcacaaatagtatcccctctaaaaaaggaaaaaaagatccagtaatatctgtatggtcactcttgcctgtttgcscctacaaagaacagagctatagacctgtaaaactaagaattgaacaatgaattgaccttaatctgtgmgggctgaatttatcatcaccttaacttcttcagagcacatgcacacaccagcttttttttcttactgagttcttgcctaggctgaaattgtggcacatttttaaatctcaatgagatgacttcaagattacaacataggtaaatatgtgacttgaaatgtcatctttactttccattaagtaagagttaaacaaaaagtttgaatggaaagtttaataacaaaagacattta

SEQ ID NO: 18751 - DNA, 600 bp, Chicken  19866894227924_13
aactagacagagtttggctttgtttttgctattttaaatrtaagcgggggacaaaaatgtctaaatgaagctcttcttgttttttgttcttcttttttcatacggaaractgcattttcctgaggcatgccccaaccacgtcgctcggttgcagtcttcacaaatagtatcccctctaaaaaaggaaaaaaagatccagtaatatctgtatggtcactcttgcctgtttgcscctacaaagaacagagctatagacctgtaaaactaagaattgaacaatgaattgaccttaatctgtgmgggctgaatttatcatcaccttaacttcttcagagcacatgcacacaccagcttttttttcttactgagttcttgcctaggctgaaattgtggcacatttttaaatctcaatgagatgacttcaagattacaacataggtaaatatgtgacttgaaatgtcatctttactttccattaagtaagagttaaacaaaaagtttgaatggaaagtttaataacaaaagacatttatgatgtttactttaattttctggaccattaagtctaaatgacatgagttattggatgctatatctggc

SEQ ID NO: 18752 - DNA, 600 bp, Chicken  19866894227924_2
tgatgaataaatttgcaactatttgtgtccactgagaaagagatgtaagagcaatattagatgtattacctaatagcaaagaataatcaaggacacaaatgcttgattgtgtcaacactgcaaacaagtctgacaattattcactgaatgaagacagtgaaacacytctgtgtgtaaaaataagtgtttttattctgtaaacacaaatgctatcaacgcaactcaaatacttcagagaagctctatatgacatataaataataattgcaaaattcagtgtagcaagcaaactaagaaaayaaaatagtcttagcgaataatttgttgggttttttttttttttcgacatagttcacagaggaaaagaaccaaaacagttgatatgctgttacttattctgtagctctaaacaggtttttttctttattaaatagaaatagttgagccagaatctgattttgtttctgttaatagtagcaatagcatgatttccatagtaaggaagcaaatctattatgctagagaacttctgtgagaacttacacgttagctgacctgtagataacagtagcattaacttttcctatctgataacattgt

SEQ ID NO: 18753 - DNA, 600 bp, Chicken  19866894227924_3
actgagaaagagatgtaagagcaatattagatgtattacctaatagcaaagaataatcaaggacacaaatgcttgattgtgtcaacactgcaaacaagtctgacaattattcactgaatgaagacagtgaaacacytctgtgtgtaaaaataagtgtttttattctgtaaacacaaatgctatcaacgcaactcaaatacttcagagaagctctatatgacatataaataataattgcaaaattcagtgtagcaagcaaactaagaaaayaaaatagtcttagcgaataatttgttgggytttttttttttttcgacatagttcacagaggaaaagaaccaaaacagttgatatgctgttacttattctgtagctctaaacaggtttttttctttattaaatagaaatagttgagccagaatctgattttgtttctgttaatagtagcaatagcatgatttccatagtaaggaagcaaatctattatgctagagaacttctgtgagaacttacacgttagctgacctgtagataacagtagcattaacttttcctatctgataacattgttttagcatgaacttcatattactttggaag

SEQ ID NO: 18754 - DNA, 600 bp, Chicken  19866894227924_4
ctgagaaagagatgtaagagcaatattagatgtattacctaatagcaaagaataatcaaggacacaaatgcttgattgtgtcaacactgcaaacaagtctgacaattattcactgaatgaagacagtgaaacacytctgtgtgtaaaaataagtgtttttattctgtaaacacaaatgctatcaacgcaactcaaatacttcagagaagctctatatgacatataaataataattgcaaaattcagtgtagcaagcaaactaagaaaayaaaatagtcttagcgaataatttgttgggtyttttttttttttcgacatagttcacagaggaaaagaaccaaaacagttgatatgctgttacttattctgtagctctaaacaggtttttttctttattaaatagaaatagttgagccagaatctgattttgtttctgttaatagtagcaatagcatgatttccatagtaaggaagcaaatctattatgctagagaacttctgtgagaacttacacgttagctgacctgtagataacagtagcattaacttttcctatctgataacattgttttagcatgaacttcatattactttggaagg

SEQ ID NO: 18755 - DNA, 600 bp, Chicken  19866894227924_5
gaacactcaaaccaattttaaggtctaaaggccttagtcattcactgatacactcaatcatgttcttcaattccaatttagtaacagatttctgtccattccatttatatgacatgctccataaattgtacaaattcagccttatagtagcagaatgcatttcctcctctgggtgcatatgtaatctcttagggaccatttacactttaaaattagtttggcacaaatgcaggtaggaaactaaacacagcaactattttctggttaattccacatgtagatattaatattgcacagcasaattgtccactcgtgggattatccaggaatgctgatccaaaactgctgctccagaaaagctgtttaggcgtaataccacatattggaaagtcctcctgacctgtattcaagtcataggagcaagaagaggtgtcaagacagtcagaagaaattgtgatgaccacgtcggctagactggcagaaaatcatttaacatctatgtccaaagcccagtcaagccctggtgctcagattctgaggggtttttcagtcacttttgcagatttactgcagcaagcctttgccagtgatgagatcaga

SEQ ID NO: 18756 - DNA, 600 bp, Chicken  19866894227924_6
tgatcaagactgtagtttatattcccacccttagaggcaattgcttagagaggtgaggaactaactctttcacaatgctcagctgggtctagtagacatcttgtccagaggaagggcttctttcttcatccaatacaccagggcctggccttgtcctgaaatggatgtgaaaagaatatttgaaattttatgctggtgaatcttggttatacacataaagtcagcccctgagccaaacataatagtgatccttagcctggccctaaccaatgcaaaaagattcctttcctacacgaaatmcagagggcaatgtgttgcataaggcctttttacactcagccattcaaaagtgccaaccattgagaagccctgtggagctgcaggactgtgacagttatgaaggaacaagcatcaaactgaatrtgttacaagcccatgaagtaatactagcagttaaggytttacagcttattgctgatcacatgcacccttcttctgcacatttcagacaggaggagtaacaggaacatttgtgtttkcttgcttgaagacaaaaaactctttgtaaaaatataaaatctggaaacaagctggctggtg

SEQ ID NO: 18757 - DNA, 600 bp, Chicken  19866894227924_7
cttcatccaatacaccagggcctggccttgtcctgaaatggatgtgaaaagaatatttgaaattttatgctggtgaatcttggttatacacataaagtcagcccctgagccaaacataatagtgatccttagcctggccctaaccaatgcaaaaagattcctttcctacacgaaatmcagagggcaatgtgttgcataaggcctttttacactcagccattcaaaagtgccaaccattgagaagccctgtggagctgcaggactgtgacagttatgaaggaacaagcatcaaactgaatrtgttacaagcccatgaagtaatactagcagttaaggytttacagcttattgctgatcacatgcacccttcttctgcacatttcagacaggaggagtaacaggaacatttgtgtttkcttgcttgaagacaaaaaactctttgtaaaaatataaaatctggaaacaagctggctggtgaagtttaaaatactggctgcaaatcaaacacaagaaaggtattggtgaaggccatgtcacacacaaagaagtacacagtgatattcagttttggaaccttctttaggctgttgaaacaaatca

SEQ ID NO: 18758 - DNA, 600 bp, Chicken  19866894227924_8
atggatgtgaaaagaatatttgaaattttatgctggtgaatcttggttatacacataaagtcagcccctgagccaaacataatagtgatccttagcctggccctaaccaatgcaaaaagattcctttcctacacgaaatmcagagggcaatgtgttgcataaggcctttttacactcagccattcaaaagtgccaaccattgagaagccctgtggagctgcaggactgtgacagttatgaaggaacaagcatcaaactgaatrtgttacaagcccatgaagtaatactagcagttaaggytttacagcttattgctgatcacatgcacccttcttctgcacatttcagacaggaggagtaacaggaacatttgtgtttkcttgcttgaagacaaaaaactctttgtaaaaatataaaatctggaaacaagctggctggtgaagtttaaaatactggctgcaaatcaaacacaagaaaggtattggtgaaggccatgtcacacacaaagaagtacacagtgatattcagttttggaaccttctttaggctgttgaaacaaatcaaacttaatttagtcaaaatatcttcacaactagacag

SEQ ID NO: 18759 - DNA, 600 bp, Chicken  19866894227924_9
taatagtgatccttagcctggccctaaccaatgcaaaaagattcctttcctacacgaaatmcagagggcaatgtgttgcataaggcctttttacactcagccattcaaaagtgccaaccattgagaagccctgtggagctgcaggactgtgacagttatgaaggaacaagcatcaaactgaatrtgttacaagcccatgaagtaatactagcagttaaggytttacagcttattgctgatcacatgcacccttcttctgcacatttcagacaggaggagtaacaggaacatttgtgtttkcttgcttgaagacaaaaaactctttgtaaaaatataaaatctggaaacaagctggctggtgaagtttaaaatactggctgcaaatcaaacacaagaaaggtattggtgaaggccatgtcacacacaaagaagtacacagtgatattcagttttggaaccttctttaggctgttgaaacaaatcaaacttaatttagtcaaaatatcttcacaactagacagagtttggctttgtttttgctattttaaatrtaagcgggggacaaaaatgtctaaatgaagctcttcttgttttttgttc

SEQ ID NO: 18760 - DNA, 599 bp, Chicken  19866894227925_1
  misc_feature (1)..(75): n is any nucleotide
nnnnnnnnnnnnnnnnnnnnnnnnnnnnnnnnnnnnnnnnnnnnnnnnnnnnnnnnnnnnnnnnnnnnnnnnnnnccaataagtgcaaatgctacgtaaaagtaatctgttgctcagtatctataactgttgaatttcaacctaagcatatggcactctgaggtgcaggtgctgttagctgcctgttatacacatgccattatgctctgctcatcctttacagctggacaggataagcactttcaactgatagactttttgaacaggagaaaggtagaacatgaacacacgtggacaacracctgtcaaagaacttctgttagtgagaggagcttcctgcttcttgatttccatacaggcttcagtgtatatgattaatatccactgataccctaacaggtatctcatggaagcaaacgtcatgtaatttaaaaagcaattatttaaatacctggcataaaatatagcctacctacaagctaccattgaactattcctggtaattagagagttccacttatctgtctcacacatttcaaaagcaaaggcctgtgaaatactttgcccatcacctacagcaagaacaggaacattgtcac

SEQ ID NO: 18761 - DNA, 600 bp, Chicken  19866894227925_2
gttagtgagaggagcttcctgcttcttgatttccatacaggcttcagtgtatatgattaatatccactgataccctaacaggtatctcatggaagcaaacgtcatgtaatttaaaaagcaattatttaaatacctggcataaaatatagcctacctacaagctaccattgaactattcctggtaattagagagttccacttatctgtctcacacatttcaaaagcaaaggcctgtgaaatactttgcccatcacctacagcaagaacaggaacattgtcactaagccctctactagatayaaaattmtttcatctgaatattgaccgtcacttgtttcacagcttaaataaaaaaagactcacatttataagactatggataacacaatatgcatctcatttgaagagttggatttctgatatgagaaataagataaaacccaaccagtcaaggacaccaaagccaaactgtggctcagcagtcatggagaaatgcttaggtgcatcagcaaattctgtgtttatggaattcagaaatggatactgmcatcaagttgcccttaagcttaaaggggactacaatttaaatcatgtttttct

SEQ ID NO: 18762 - DNA, 600 bp, Chicken  19866894227925_3
agaggagcttcctgcttcttgatttccatacaggcttcagtgtatatgattaatatccactgataccctaacaggtatctcatggaagcaaacgtcatgtaatttaaaaagcaattatttaaatacctggcataaaatatagcctacctacaagctaccattgaactattcctggtaattagagagttccacttatctgtctcacacatttcaaaagcaaaggcctgtgaaatactttgcccatcacctacagcaagaacaggaacattgtcactaagccctctactagatayaaaattmtttcatctgaatattgaccgtcacttgtttcacagcttaaataaaaaaagactcacatttataagactatggataacacaatatgcatctcatttgaagagttggatttctgatatgagaaataagataaaacccaaccagtcaaggacaccaaagccaaactgtggctcagcagtcatggagaaatgcttaggtgcatcagcaaattctgtgtttatggaattcagaaatggatactgmcatcaagttgcccttaagcttaaaggggactacaatttaaatcatgtttttctataaaaa

SEQ ID NO: 18763 - DNA, 600 bp, Chicken  19866894227925_4
ccatcacctacagcaagaacaggaacattgtcactaagccctctactagatayaaaattmtttcatctgaatattgaccgtcacttgtttcacagcttaaataaaaaaagactcacatttataagactatggataacacaatatgcatctcatttgaagagttggatttctgatatgagaaataagataaaacccaaccagtcaaggacaccaaagccaaactgtggctcagcagtcatggagaaatgcttaggtgcatcagcaaattctgtgtttatggaattcagaaatggatactgmcatcaagttgcccttaagcttaaaggggactacaatttaaatcatgtttttctataaaaacggctattcctttttgtgtatggattttgagtcatcttgaactggtttctttatctcagagttcttcggcttaagcagctggttaagaacagtgagtgtcaacacagactgcagattaagttcctgctgagtaagccactgcccagttatttaaatctgatagagaactgtctagctgtgtgcaatcccttccttctaaaagggtcaatagctaatatcaaaattccaagtttgagtcag

SEQ ID NO: 18764 - DNA, 599 bp, Chicken  19866894227926_1
  misc_feature (1)..(53): n is any nucleotide
nnnnnnnnnnnnnnnnnnnnnnnnnnnnnnnnnnnnnnnnnnnnnnnnnnnnnctgtcctgccaaagggagaatgacctcttcctttccccagttggtactccatagagacagtaagaaccacggatactcaaacacacacaaaagcctgcggaagctgcgtacactctgccaatgaagctcaaaaaagttgcctcagtcttctaagcctctgtgaaaactaactgaaatgtgggccaaattacaaacatttcccagcgaaatgctaagggaggctagcatgacaaaactcctttggaarttagctaatataacttaaggcatttgaatgtgaagcagtacacatccacatgctaaggaaaaatatttaaggagtacagaaaaggttgcaagacaaataagtcagcgaacgttttgaaactttctaaraggctaaatgttgtcagaatacactaattcagctccaycacataagttaattgctctgcttcatcygtgatcaacatttttctgtagcaatatttatttccctgtttcctatctttgtacwtcggtgtcacagctccacatctggcagcaaaccaagagcagtaagagcac

SEQ ID NO: 18765 - DNA, 600 bp, Chicken  19866894227926_2
ctcaaacacacacaaaagcctgcggaagctgcgtacactctgccaatgaagctcaaaaaagttgcctcagtcttctaagcctctgtgaaaactaactgaaatgtgggccaaattacaaacatttcccagcgaaatgctaagggaggctagcatgacaaaactcctttggaarttagctaatataacttaaggcatttgaatgtgaagcagtacacatccacatgctaaggaaaaatatttaaggagtacagaaaaggttgcaagacaaataagtcagcgaacgttttgaaactttctaaraggctaaatgttgtcagaatacactaattcagctccaycacataagttaattgctctgcttcatcygtgatcaacatttttctgtagcaatatttatttccctgtttcctatctttgtacwtcggtgtcacagctccacatctggcagcaaaccaagagcagtaagagcacrtcgctgatgtcttcaatagcattatctagacttgctttcatctgtgtcaattctgcctgcagtcacaaaataagaagttcttcagctctggcaatttagacagaatccaggacagcctttaacttccc

SEQ ID NO: 18766 - DNA, 600 bp, Chicken  19866894227926_3
tctgccaatgaagctcaaaaaagttgcctcagtcttctaagcctctgtgaaaactaactgaaatgtgggccaaattacaaacatttcccagcgaaatgctaagggaggctagcatgacaaaactcctttggaarttagctaatataacttaaggcatttgaatgtgaagcagtacacatccacatgctaaggaaaaatatttaaggagtacagaaaaggttgcaagacaaataagtcagcgaacgttttgaaactttctaaraggctaaatgttgtcagaatacactaattcagctccaycacataagttaattgctctgcttcatcygtgatcaacatttttctgtagcaatatttatttccctgtttcctatctttgtacwtcggtgtcacagctccacatctggcagcaaaccaagagcagtaagagcacrtcgctgatgtcttcaatagcattatctagacttgctttcatctgtgtcaattctgcctgcagtcacaaaataagaagttcttcagctctggcaatttagacagaatccaggacagcctttaacttcccaacgtaaagcaaaacttctctaaaatcactccaattaa

SEQ ID NO: 18767 - DNA, 600 bp, Chicken  19866894227926_4
tcagtcttctaagcctctgtgaaaactaactgaaatgtgggccaaattacaaacatttcccagcgaaatgctaagggaggctagcatgacaaaactcctttggaarttagctaatataacttaaggcatttgaatgtgaagcagtacacatccacatgctaaggaaaaatatttaaggagtacagaaaaggttgcaagacaaataagtcagcgaacgttttgaaactttctaaraggctaaatgttgtcagaatacactaattcagctccaycacataagttaattgctctgcttcatcygtgatcaacatttttctgtagcaatatttatttccctgtttcctatctttgtacwtcggtgtcacagctccacatctggcagcaaaccaagagcagtaagagcacrtcgctgatgtcttcaatagcattatctagacttgctttcatctgtgtcaattctgcctgcagtcacaaaataagaagttcttcagctctggcaatttagacagaatccaggacagcctttaacttcccaacgtaaagcaaaacttctctaaaatcactccaattaaaggacaagtaataaccattaataagtta

SEQ ID NO: 18768 - DNA, 600 bp, Chicken  19866894227926_5
tttcccagcgaaatgctaagggaggctagcatgacaaaactcctttggaarttagctaatataacttaaggcatttgaatgtgaagcagtacacatccacatgctaaggaaaaatatttaaggagtacagaaaaggttgcaagacaaataagtcagcgaacgttttgaaactttctaaraggctaaatgttgtcagaatacactaattcagctccaycacataagttaattgctctgcttcatcygtgatcaacatttttctgtagcaatatttatttccctgtttcctatctttgtacwtcggtgtcacagctccacatctggcagcaaaccaagagcagtaagagcacrtcgctgatgtcttcaatagcattatctagacttgctttcatctgtgtcaattctgcctgcagtcacaaaataagaagttcttcagctctggcaatttagacagaatccaggacagcctttaacttcccaacgtaaagcaaaacttctctaaaatcactccaattaaaggacaagtaataaccattaataagttatattttgcaccgaggtttataaaatgttaacaaacaactagctgcttttacaaac

SEQ ID NO: 18769 - DNA, 600 bp, Chicken  19866894227926_6
ttagctaatataacttaaggcatttgaatgtgaagcagtacacatccacatgctaaggaaaaatatttaaggagtacagaaaaggttgcaagacaaataagtcagcgaacgttttgaaactttctaaraggctaaatgttgtcagaatacactaattcagctccaycacataagttaattgctctgcttcatcygtgatcaacatttttctgtagcaatatttatttccctgtttcctatctttgtacwtcggtgtcacagctccacatctggcagcaaaccaagagcagtaagagcacrtcgctgatgtcttcaatagcattatctagacttgctttcatctgtgtcaattctgcctgcagtcacaaaataagaagttcttcagctctggcaatttagacagaatccaggacagcctttaacttcccaacgtaaagcaaaacttctctaaaatcactccaattaaaggacaagtaataaccattaataagttatattttgcaccgaggtttataaaatgttaacaaacaactagctgcttttacaaacaaatgtgagtggtatttgttgttaatgaccgtcagcaaatccaagtgacat

SEQ ID NO: 18770 - DNA, 499 bp, Chicken  19866894227935_1
gtcagcctgcaattttccagatctgaaaggagtgcagcaagtgttcagaaaaaatacatgagactggaattttgatcaagttcccttgtactcattcatatgctgtgtgtataccttcccattggcacaaattgcctttggaaatcacgcagagctttgaaatgtcctaatacaaattagaggagagttagtaatttcatgtaaattagtagggagagaaagtggacctgcctggttgttctttcaaatcaaatgccagcattgaaataccctctatgtaatatccaatatccatctacrtgcatgcatcacttcctctgaaagttcgtccatgttcacttatgactcattgattttccttctcttcaatacctctttatttgtttaactgcttctactttccccctctatacgtttttctttgcaaacagttcttgtgtctttgtgttcctcttgctccagttcagccaaaccacaagaaccaatggtacaagtgcag

SEQ ID NO: 18771 - DNA, 405 bp, Chicken  19866894227937_1
accctgtggcagagagcagcatcccagcactccctgagccccagcagattggagcacctgcccaaagctttcagcatcccagaacagactgagccaggaaaacattcactttggtttacccgctttgactctctggtattaatctgttaatgaatgtcaggaatgcaccgcttgctgcagaacacagaccccaacctgcagccatggcgaatggaactccagcaaaatgctttcagttggggcaggagcaccgcagccaacaaagggctgagtcacagtcaggccatgctgagctccggmccaggtgtggctcagtgcggtgcagatggagaactccctccaggttttgcttttggatgcaggtggcagagcagggcatggtccaggctgcctgcagggaggtgg

SEQ ID NO: 18772 - DNA, 599 bp, Chicken  19866894227939_1
  misc_feature (1)..(152): n is any nucleotide
nnnnnnnnnnnnnnnnnnnnnnnnnnnnnnnnnnnnnnnnnnnnnnnnnnnnnnnnnnnnnnnnnnnnnnnnnnnnnnnnnnnnnnnnnnnnnnnnnnnnnnnnnnnnnnnnnnnnnnnnnnnnnnnnnnnnnnnnnnnnnnnnnnnnnnnncatccatccggtgtgcagtgctccagttggggctttgcaagggcacgtaagcactcttgtcaagtttgtccaggtcattttggagggcataacttccttcattaaaaatgaatgtcagccctacagctcctctgctagagcacctgtrcctccttgtggacagcagggccaggtgctgcagagctgcaggtgctcctgcacaagagctgtctggctgtggcctcttttgaggtccttcccttcagggaaggattgcacaaagcatgtcataccaagagcggtgctcccaaagtgcctcagcttctccagctgtctggtctggatcctaccatcaccaaggctcaaggaacctctgggcaccycatgctatcagctgtctctctaattctcaaatccacatagatccattacgctgatccacattcaactcgatcgctgatgctcatg

SEQ ID NO: 18773 - DNA, 600 bp, Chicken  19866894227939_2
agtttgtccaggtcattttggagggcataacttccttcattaaaaatgaatgtcagccctacagctcctctgctagagcacctgtrcctccttgtggacagcagggccaggtgctgcagagctgcaggtgctcctgcacaagagctgtctggctgtggcctcttttgaggtccttcccttcagggaaggattgcacaaagcatgtcataccaagagcggtgctcccaaagtgcctcagcttctccagctgtctggtctggatcctaccatcaccaaggctcaaggaacctctgggcaccycatgctatcagctgtctctctaattctcaaatccacatagatccattacgctgatccacattcaactcgatcgctgatgctcatggatgagcagtcaaacccccttgaccggggctggtgggaatgtggagatgatttccttgcattactcacttcccaagaacacttcccatacaacwgttgctcataatttccwtttttgtttgtcactttttcaatgtcaatgccattcagcctcacaccctgcagcctggagagatttcaacwtttatttcctttagagtcttgctagggtaggag

SEQ ID NO: 18774 - DNA, 600 bp, Chicken  19866894227939_3
tcagggaaggattgcacaaagcatgtcataccaagagcggtgctcccaaagtgcctcagcttctccagctgtctggtctggatcctaccatcaccaaggctcaaggaacctctgggcaccycatgctatcagctgtctctctaattctcaaatccacatagatccattacgctgatccacattcaactcgatcgctgatgctcatggatgagcagtcaaacccccttgaccggggctggtgggaatgtggagatgatttccttgcattactcacttcccaagaacacttcccatacaacwgttgctcataatttccwtttttgtttgtcactttttcaatgtcaatgccattcagcctcacaccctgcagcctggagagatttcaacwtttatttcctttagagtcttgctagggtaggaggaagcaggaagaagcagcctggaaaatgattagatctcacacaatttaactttatttttaaactttactgcaaaggacagatcctgtttccagtaaggctggtgcttgcgcacgttgacgcactctgtgttctgaagccagcagcatcaccctgctttgctcccgtagaactatggcca

SEQ ID NO: 18775 - DNA, 600 bp, Chicken  19866894227939_4
aaagcatgtcataccaagagcggtgctcccaaagtgcctcagcttctccagctgtctggtctggatcctaccatcaccaaggctcaaggaacctctgggcaccycatgctatcagctgtctctctaattctcaaatccacatagatccattacgctgatccacattcaactcgatcgctgatgctcatggatgagcagtcaaacccccttgaccggggctggtgggaatgtggagatgatttccttgcattactcacttcccaagaacacttcccatacaacwgttgctcataatttccwtttttgtttgtcactttttcaatgtcaatgccattcagcctcacaccctgcagcctggagagatttcaacwtttatttcctttagagtcttgctagggtaggaggaagcaggaagaagcagcctggaaaatgattagatctcacacaatttaactttatttttaaactttactgcaaaggacagatcctgtttccagtaaggctggtgcttgcgcacgttgacgcactctgtgttctgaagccagcagcatcaccctgctttgctcccgtagaactatggccagaacggggctgcagggc

SEQ ID NO: 18776 - DNA, 600 bp, Chicken  19866894227939_5
catcaccaaggctcaaggaacctctgggcaccycatgctatcagctgtctctctaattctcaaatccacatagatccattacgctgatccacattcaactcgatcgctgatgctcatggatgagcagtcaaacccccttgaccggggctggtgggaatgtggagatgatttccttgcattactcacttcccaagaacacttcccatacaacwgttgctcataatttccwtttttgtttgtcactttttcaatgtcaatgccattcagcctcacaccctgcagcctggagagatttcaacwtttatttcctttagagtcttgctagggtaggaggaagcaggaagaagcagcctggaaaatgattagatctcacacaatttaactttatttttaaactttactgcaaaggacagatcctgtttccagtaaggctggtgcttgcgcacgttgacgcactctgtgttctgaagccagcagcatcaccctgctttgctcccgtagaactatggccagaacggggctgcagggctcagcttatggccttcatctgtcataactcaaccaaaacataccaacggtgatcaccttcctaccataccc

SEQ ID NO: 18777 - DNA, 600 bp, Chicken  19866894227945_1
gcccagtgcccagaagggaagcagctgtgggtacgctggggttgctgcagggaggaatgatgcaggatgggccattccttgtgaatacccacacgtacttcttccccaagtggcgggctacatctgcttttttaaagccatccaggttgtagagccgcttggccaggcgtttggcagcctccagatcagccttgtgcccattggagagcgtgtcggtgctgcccagggccagttgctccatgctgtccatctccgagtccgagtcagaaaccagctggctcagggggtgctcgctgcaaytggaagggacacaccrcgttagtttgcccacaggtcccctgcttgctcagcctctcaggggatgcaggtcctcaccctgcttcgggggccagcagctctgctgggccatactggttagaggtgctcaggggtcagggctaagtgctaagggaaggcttggagatgtggctggaagagaggtaggtgacgggaccgaggctctcaaagccacgtccgaaccggccctgctcagacaggacagctgttgggaagtcccccaccctgagcctgcgagacttcgtgtgtgggctcgggctctgc

SEQ ID NO: 18778 - DNA, 600 bp, Chicken  19866894227945_2
ggaagcagctgtgggtacgctggggttgctgcagggaggaatgatgcaggatgggccattccttgtgaatacccacacgtacttcttccccaagtggcgggctacatctgcttttttaaagccatccaggttgtagagccgcttggccaggcgtttggcagcctccagatcagccttgtgcccattggagagcgtgtcggtgctgcccagggccagttgctccatgctgtccatctccgagtccgagtcagaaaccagctggctcagggggtgctcgctgcaaytggaagggacacaccrcgttagtttgcccacaggtcccctgcttgctcagcctctcaggggatgcaggtcctcaccctgcttcgggggccagcagctctgctgggccatactggttagaggtgctcaggggtcagggctaagtgctaagggaaggcttggagatgtggctggaagagaggtaggtgacgggaccgaggctctcaaagccacgtccgaaccggccctgctcagacaggacagctgttgggaagtcccccaccctgagcctgcgagacttcgtgtgtgggctcgggctctgccaaggccggctgcagc

SEQ ID NO: 18779 - DNA, 600 bp, Chicken  19866894227950_1
aaaattgtcttaggagattctgagacacagtatgccatacgaacttgcatagaattaagacaaattcggtttgcaaaattactcaacatatattagaagatgtcttattatttttttataaactctcagttattattgcacatgacaggtcagagaataacatcattccttcaagctgcagataatcaggtaaaataatgacttcattttcagattctataggaaaccttcctagcatgtaggtctaataattttctggcacactagaactctagggaattagatgggctttatttcttscctgtggtcattttacctgatagggattatcaaatttaatactttgtcacttagccttcagtggttactcagtcacagctaaggccaccaatgcttggcaaatacatgaaaggaaaatgtaaaaaggagctcctgttctttgcatttaaactcttgtagaaggtaagaaaccataaaacaaacaaacaaacaaaaaaacatccctggatgctctcctgcttacagagtttggagaagtttatacaattctcaacaaacaaaccatacctgtaataaaaagacccacacagtatctacaag

SEQ ID NO: 18780 - DNA, 600 bp, Chicken  19866894227961_1
gtggggtccgcctgccggctgcaataccttcacaccaataaagtgcaggtgctggggggattgcatgcgcttatctgcacgcttcaatagcactgagatcgtgcttcctggtgcctggccccctcccggctcacacgtggtgggaaaaaagcttggaaaaggctgagcttggacacaaaagcctcttggtgaggatcccctttcctggtgacagtgggcatctggttcctatagcacagggaccccatgtgctgcctgaccccacggtgcaggttagtgcagccccactggagggagagkggctgtgtctggagctgggccgatgacagcagctttcaggcagctcagccggcccctgstgtgtctgggagggatggagccaggacaggagctacggtaacctgaggctrctcagagtgagaggctctgggggggagcatgagactgctggaaccacatcattccatgtaggcaaatggtacccaccggcagcccatggtgggcccaaaagctttggctggataacaagagggctcatgttggagggaggtggagagcatcccaggtgtccacagtgcagggtagccaatggtcgaaaac

SEQ ID NO: 18781 - DNA, 558 bp, Chicken  19866894227961_2
attgcatgcgcttatctgcacgcttcaatagcactgagatcgtgcttcctggtgcctggccccctcccggctcacacgtggtgggaaaaaagcttggaaaaggctgagcttggacacaaaagcctcttggtgaggatcccctttcctggtgacagtgggcatctggttcctatagcacagggaccccatgtgctgcctgaccccacggtgcaggttagtgcagccccactggagggagagkggctgtgtctggagctgggccgatgacagcagctttcaggcagctcagccggcccctgstgtgtctgggagggatggagccaggacaggagctacggtaacctgaggctrctcagagtgagaggctctgggggggagcatgagactgctggaaccacatcattccatgtaggcaaatggtacccaccggcagcccatggtgggcccaaaagctttggctggataacaagagggctcatgttggagggaggtggagagcatcccaggtgtccacagtgcagggtagccaatggtcgaaaacagcatgagtgtataaaa

SEQ ID NO: 18782 - DNA, 507 bp, Chicken  19866894227961_3
gtgcctggccccctcccggctcacacgtggtgggaaaaaagcttggaaaaggctgagcttggacacaaaagcctcttggtgaggatcccctttcctggtgacagtgggcatctggttcctatagcacagggaccccatgtgctgcctgaccccacggtgcaggttagtgcagccccactggagggagagkggctgtgtctggagctgggccgatgacagcagctttcaggcagctcagccggcccctgstgtgtctgggagggatggagccaggacaggagctacggtaacctgaggctrctcagagtgagaggctctgggggggagcatgagactgctggaaccacatcattccatgtaggcaaatggtacccaccggcagcccatggtgggcccaaaagctttggctggataacaagagggctcatgttggagggaggtggagagcatcccaggtgtccacagtgcagggtagccaatggtcgaaaacagcatgagtgtataaaa

SEQ ID NO: 18783 - DNA, 599 bp, Chicken  19866894227965_1
  misc_feature (1)..(77): n is any nucleotide
nnnnnnnnnnnnnnnnnnnnnnnnnnnnnnnnnnnnnnnnnnnnnnnnnnnnnnnnnnnnnnnnnnnnnnnnnnnnntcccttaaaattcgaactcatcttgcatcatttcagcattttcctcgtcaaatgcctgagtttttagaattgaatcagctgggaaaatgcaatgttgtctgcttcctaggtcatctctgctttgcaaattttaagtcactactgttttgctgaattcctaatagtgaattttggttgtgaaagtgaaggcacataatccatagaaatatatggaacctttgtktttttttaaatttttatttatactagataaarttctcaatgtttcacagagtatttatgggatgttctcttacattttacatggaagaataacataacttcaaaatagcttggaatataagattatttttaaatgaccaccctcaagaattgcttagacaaaatatgtaagaacttattcacttaaaacaatgtatttgtagaatttcccaaactttctttggattgtaagaaaaagaacaccaccagattttacatacatttgtttatgcttgaagatgtctgcttgaagagcaagtg

SEQ ID NO: 18784 - DNA, 599 bp, Chicken  19866894227965_2
  misc_feature (1)..(45): n is any nucleotide
nnnnnnnnnnnnnnnnnnnnnnnnnnnnnnnnnnnnnnnnnnnnntcccttaaaattcgaactcatcttgcatcatttcagcattttcctcgtcaaatgcctgagtttttagaattgaatcagctgggaaaatgcaatgttgtctgcttcctaggtcatctctgctttgcaaattttaagtcactactgttttgctgaattcctaatagtgaattttggttgtgaaagtgaaggcacataatccatagaaatatatggaacctttgtktttttttaaatttttatttatactagataaarttctcaatgtttcacagagtatttatgggatgttctcttacattttacatggaagaataacataacttcaaaatagcttggaatataagattatttttaaatgaccaccctcaagaattgcttagacaaaatatgtaagaacttattcacttaaaacaatgtatttgtagaatttcccaaactttctttggattgtaagaaaaagaacaccaccagattttacatacatttgtttatgcttgaagatgtctgcttgaagagcaagtgatactttgtgatttacaaaaccagctttttct

SEQ ID NO: 18785 - DNA, 600 bp, Chicken  19866894227966_1
gatacaaacaatcctagaaaaaaaaagttctcgacataaaatctagagctcaccttttcaggctaattcctaccgatagccaggacaaatatggttaaaactaagactctcttaacctccaggactgggttgttgagcttcaaaccacttatcagctttctgcttcagattaccacactggcatcgtcaggaaataaaatgttattaatgctccagaaaagcatcacagtgttagacaaagaacagagggcaatcagacaaaaggaagctatgacaaagattaatacatcatcttacgcrtaactcaatgaaaaggaatggtgggatttttcccattctccagagagaacactaagggtggatctaaagaaaactgaaatagtctataaatgctaaggcagccagccatttcaagatcactgyaagtaattaatgtgcagactgcctccgaaagtggtggtcctatccagctgaaaacctgcttccccaagtcattttgcagtcagatcagtyccctgatccaattcaatccagatctgcaggagtgctcatacaaagactacacaactggcttgcttaaagacaggactgtttaaagca

SEQ ID NO: 18786 - DNA, 600 bp, Chicken  19866894227966_2
actgggttgttgagcttcaaaccacttatcagctttctgcttcagattaccacactggcatcgtcaggaaataaaatgttattaatgctccagaaaagcatcacagtgttagacaaagaacagagggcaatcagacaaaaggaagctatgacaaagattaatacatcatcttacgcrtaactcaatgaaaaggaatggtgggatttttcccattctccagagagaacactaagggtggatctaaagaaaactgaaatagtctataaatgctaaggcagccagccatttcaagatcactgyaagtaattaatgtgcagactgcctccgaaagtggtggtcctatccagctgaaaacctgcttccccaagtcattttgcagtcagatcagtyccctgatccaattcaatccagatctgcaggagtgctcatacaaagactacacaactggcttgcttaaagacaggactgtttaaagcactcataaaaattcagcctaagatttagagcaaacaacacgaaacaatactgttgttcaaaccataacttctgcaacaagacttttataaaaacctgcatcatttgaacttccaacaggaaaag

SEQ ID NO: 18787 - DNA, 600 bp, Chicken  19866894227966_3
cagaaaagcatcacagtgttagacaaagaacagagggcaatcagacaaaaggaagctatgacaaagattaatacatcatcttacgcrtaactcaatgaaaaggaatggtgggatttttcccattctccagagagaacactaagggtggatctaaagaaaactgaaatagtctataaatgctaaggcagccagccatttcaagatcactgyaagtaattaatgtgcagactgcctccgaaagtggtggtcctatccagctgaaaacctgcttccccaagtcattttgcagtcagatcagtyccctgatccaattcaatccagatctgcaggagtgctcatacaaagactacacaactggcttgcttaaagacaggactgtttaaagcactcataaaaattcagcctaagatttagagcaaacaacacgaaacaatactgttgttcaaaccataacttctgcaacaagacttttataaaaacctgcatcatttgaacttccaacaggaaaagaaaagctgtttcggcacacagacagcagagcatgagaacaagttggccaggaataaaataagtctgggtgtttaaaggtttctgaccgtc

SEQ ID NO: 18788 - DNA, 600 bp, Chicken  19866894227971_1
cgcggacacagctgcctggaaaccttgtcagcaagatttatgctatatttggtaatgggacaaggctgaccccaaacttctaactcaagccaaagggcagccttatgctcacagctggtgggaaaaggcactgttttgcaatccagattcctggtgaagcagcacagcctggagaagctctaaaaaacgaagttcacagacactgctgggcaagggaaagccaaagcttgctactcccaacctaagccacatctgtttcttaagaaagctccctgccctacatatgtccatccaaagatrggctgttacacaaataagttgccttgagttaggaagagacttagcaaagagacgcacagcactgaaaacagcagttaaaacctcatctgctaaagatggcaagtttgatgttgtagtggttatccagagtataattacatatttacaacgaagagttactatgaataaataccaacagactccttgcttgaaggatgctctctacccactagactgcagtcacactctcttgcctccctttcagcaagaagtgttgccgatagcactgaacaaaaacagagatttgtatacaggtgcaaa

SEQ ID NO: 18789 - DNA, 600 bp, Chicken  19866894227977_1
ttctctccctctgcccgtctgccataagtaagggataatggaacaggagaatcaggccctgtgggcaggcaagcagggataaattggaggtgacagtgtgtgtatgaaatatggatttgtgcataatggacgtatgtgtaacatagcatgcttcagtgcaaagtgaggggtagacatgggctcacagaggtgttgcacagtgaagcagacatctatatgcagaattgattgctcatatctcagcatgtcagccagtgtcctgtctgtaagtggaagcaaggcgttaggtattagtaagargasctcatgtatatgtgtatattttaacaagttgagcacgtgtaacttgcaaaacaggtgttatgtggaggcatgtccttagctctggaaggaggatgactgtatgagcatgtrtttgtaggacttaacttcctcagcccttgacctcgcttgataagatgcaggcagctctgcagaatgcrgagactcatcttccagaatctatctgtagtgtcgcaagtcttctgttgtccagaccctcttggggtaaggcttccacttcagtcatgtaccttgttcttccatcatgaactcctgcat

SEQ ID NO: 18790 - DNA, 600 bp, Chicken  19866894227977_2
tctccctctgcccgtctgccataagtaagggataatggaacaggagaatcaggccctgtgggcaggcaagcagggataaattggaggtgacagtgtgtgtatgaaatatggatttgtgcataatggacgtatgtgtaacatagcatgcttcagtgcaaagtgaggggtagacatgggctcacagaggtgttgcacagtgaagcagacatctatatgcagaattgattgctcatatctcagcatgtcagccagtgtcctgtctgtaagtggaagcaaggcgttaggtattagtaagargasctcatgtatatgtgtatattttaacaagttgagcacgtgtaacttgcaaaacaggtgttatgtggaggcatgtccttagctctggaaggaggatgactgtatgagcatgtrtttgtaggacttaacttcctcagcccttgacctcgcttgataagatgcaggcagctctgcagaatgcrgagactcatcttccagaatctatctgtagtgtcgcaagtcttctgttgtccagaccctcttggggtaaggcttccacttcagtcatgtaccttgttcttccatcatgaactcctgcatgta

SEQ ID NO: 18791 - DNA, 600 bp, Chicken  19866894227977_3
atttgtgcataatggacgtatgtgtaacatagcatgcttcagtgcaaagtgaggggtagacatgggctcacagaggtgttgcacagtgaagcagacatctatatgcagaattgattgctcatatctcagcatgtcagccagtgtcctgtctgtaagtggaagcaaggcgttaggtattagtaagargasctcatgtatatgtgtatattttaacaagttgagcacgtgtaacttgcaaaacaggtgttatgtggaggcatgtccttagctctggaaggaggatgactgtatgagcatgtrtttgtaggacttaacttcctcagcccttgacctcgcttgataagatgcaggcagctctgcagaatgcrgagactcatcttccagaatctatctgtagtgtcgcaagtcttctgttgtccagaccctcttggggtaaggcttccacttcagtcatgtaccttgttcttccatcatgaactcctgcatgtagtctctgaaagagayggatggagtttagctcaggggcagcagctgggcttatctcaggtgccgtaggtgggtagaagacacaactggtgagcccctggctatcttgagaac

SEQ ID NO: 18792 - DNA, 600 bp, Chicken  19866894227977_4
cacagaggtgttgcacagtgaagcagacatctatatgcagaattgattgctcatatctcagcatgtcagccagtgtcctgtctgtaagtggaagcaaggcgttaggtattagtaagargasctcatgtatatgtgtatattttaacaagttgagcacgtgtaacttgcaaaacaggtgttatgtggaggcatgtccttagctctggaaggaggatgactgtatgagcatgtrtttgtaggacttaacttcctcagcccttgacctcgcttgataagatgcaggcagctctgcagaatgcrgagactcatcttccagaatctatctgtagtgtcgcaagtcttctgttgtccagaccctcttggggtaaggcttccacttcagtcatgtaccttgttcttccatcatgaactcctgcatgtagtctctgaaagagayggatggagtttagctcaggggcagcagctgggcttatctcaggtgccgtaggtgggtagaagacacaactggtgagcccctggctatcttgagaactcttgttggaacaggcagagagtaaggatttcaaggccaatctgataatctgcctgatcggagaggtg

SEQ ID NO: 18793 - DNA, 600 bp, Chicken  19866894227977_5
atattttaacaagttgagcacgtgtaacttgcaaaacaggtgttatgtggaggcatgtccttagctctggaaggaggatgactgtatgagcatgtrtttgtaggacttaacttcctcagcccttgacctcgcttgataagatgcaggcagctctgcagaatgcrgagactcatcttccagaatctatctgtagtgtcgcaagtcttctgttgtccagaccctcttggggtaaggcttccacttcagtcatgtaccttgttcttccatcatgaactcctgcatgtagtctctgaaagagayggatggagtttagctcaggggcagcagctgggcttatctcaggtgccgtaggtgggtagaagacacaactggtgagcccctggctatcttgagaactcttgttggaacaggcagagagtaaggatttcaaggccaatctgataatctgcctgatcggagaggtgttttctgctatgtaaaaaataaaataagaattttaaattggaacataaaccgcttgtactcttaccttgatcttatcagttcttcagaacatcctctgcttgaacagtggccagatccctggaatgacttccctga

SEQ ID NO: 18794 - DNA, 600 bp, Chicken  19866894227985_1
gcagccaaagactttgccgctctgctgttattgctgtgctttccatcatgttatagcattgcaggtacagtgagcccttcctctgtccacctgggaaagctgtaagttgtctctaccttttctcatccccaagcagtactgtgagctgagggccatgcagggggggtcccatgtcccctctggtccccctgtctcatttcactctgagagccctcactacattttgcatttagagtgacttcccaccccccccactccagtttgctgtttgcctgaaatggtctgaaatgtaatagcccwagacaatcatcagcatgaaatatctcctacataaaatatgcagcagctattcaggaacgaagatggagtggaacgagggctgccagataaagatttagaggcgctgccgtgctcctataggttgtttactgaagatattttctcctaagccccagttttaagactgcctttcaaaagagggcaccaaataaaatttagcaaggagctttaacaattcaagctaccatgygctgagctttttgttgcccttatgggaatggaacctcatttcaaaggaccttgactttcctctgatagtgc

SEQ ID NO: 18795 - DNA, 422 bp, Chicken  19866894227985_2
ttagagtgacttcccaccccccccactccagtttgctgtttgcctgaaatggtctgaaatgtaatagcccwagacaatcatcagcatgaaatatctcctacataaaatatgcagcagctattcaggaacgaagatggagtggaacgagggctgccagataaagatttagaggcgctgccgtgctcctataggttgtttactgaagatattttctcctaagccccagttttaagactgcctttcaaaagagggcaccaaataaaatttagcaaggagctttaacaattcaagctaccatgygctgagctttttgttgcccttatgggaatggaacctcatttcaaaggaccttgactttcctctgatagtgcagggaggaagtggcactgccagcgctatttttgcaccgagacactgattgg

SEQ ID NO: 18796 - DNA, 600 bp, Chicken  19866894227989_1
tccatagaaggtgcaggattaaattcctctttttcacagattatgttggataattctggtatttttatttgatgcaaaatcattcttatttcatttgcatccctgataggttattaagaaaattctacaaagcagtcgaagtgagcaaggcttagtggtagtaatgaggtttagcttctaatcaatcaataactacatttgtccagcaggtccatactgaaggagaattgtgactagatctggaaggaaaaagcattcagatcctctgagataagaagaaaggttgaagattaagtcctrtactgaggtatgccaaacgtaatttggacgctgagcaagtcactgtcaagttgatttctatcaccttctgcccccgtcccaactcctatcttgaacattcgttatgcatacttgacgtttatgaagttgttggtgctgggagaagggcttggcaggactgggtttttaactagaagtcgtctgttacaaattagcaagtgtcctattcttgttaggaacctgcacattcacacagcacagatgtttaaagctgtctaaaccaagtctgtgacgctcaagtgtgtcattaacaaaggtaag

SEQ ID NO: 18797 - DNA, 600 bp, Chicken  19866894227992_1
tcaattagattttattatatcgtgtcatcttgcattccaacatcatagttagtaaaataagttctccttcttagatcattgccactgctccattttttttttcaggaagccagggtggggggtggccgcgagcctactacccccctgtcacgggcacagatttatctagataactccgtgacagttcagctgttgtacaagctggagaacttaaggaaacttgaagtgttgctgatctcatcagaaagaaggaaaaaaacagaaaaaagcagtttttattgtcataatgccttataataytgtattttcaaataacgaagttggtacattatgtgactgatctgagttcatagacatttttaaactttgcagcagtgaagggttcacagcagtgttgaataaagttgcatcttgtagccatatttagtcacttattaacatgtggcctcatttacyagtgtactaagcactatcaagtcctattatctytgcaatgacttgtggatgctcttatatgtctggaaaactaggtcatttttatactattaattaactaaggatgagtgtgcagctttaaacacagaagttggatgacttaat

SEQ ID NO: 18798 - DNA, 600 bp, Chicken  19866894227992_2
cagatttatctagataactccgtgacagttcagctgttgtacaagctggagaacttaaggaaacttgaagtgttgctgatctcatcagaaagaaggaaaaaaacagaaaaaagcagtttttattgtcataatgccttataataytgtattttcaaataacgaagttggtacattatgtgactgatctgagttcatagacatttttaaactttgcagcagtgaagggttcacagcagtgttgaataaagttgcatcttgtagccatatttagtcacttattaacatgtggcctcatttacyagtgtactaagcactatcaagtcctattatctytgcaatgacttgtggatgctcttatatgtctggaaaactaggtcatttttatactattaattaactaaggatgagtgtgcagctttaaacacagaagttggatgacttaattcaagcctggattacatcagtcccctagtaattttcatcccaggcaataacatgaatcttacaagaaggggttgcaggtgctaatgcatagcccacattcctcatacgtaggctaaattttatttgccattgtaactaaggagaggcattctctct

SEQ ID NO: 18799 - DNA, 600 bp, Chicken  19866894227992_3
ctgttgtacaagctggagaacttaaggaaacttgaagtgttgctgatctcatcagaaagaaggaaaaaaacagaaaaaagcagtttttattgtcataatgccttataataytgtattttcaaataacgaagttggtacattatgtgactgatctgagttcatagacatttttaaactttgcagcagtgaagggttcacagcagtgttgaataaagttgcatcttgtagccatatttagtcacttattaacatgtggcctcatttacyagtgtactaagcactatcaagtcctattatctytgcaatgacttgtggatgctcttatatgtctggaaaactaggtcatttttatactattaattaactaaggatgagtgtgcagctttaaacacagaagttggatgacttaattcaagcctggattacatcagtcccctagtaattttcatcccaggcaataacatgaatcttacaagaaggggttgcaggtgctaatgcatagcccacattcctcatacgtaggctaaattttatttgccattgtaactaaggagaggcattctctctcagcttctcagaattcatttgtgggaaatgaaa

SEQ ID NO: 18800 - DNA, 600 bp, Chicken  19866894227992_4
attacatcagtcccctagtaattttcatcccaggcaataacatgaatcttacaagaaggggttgcaggtgctaatgcatagcccacattcctcatacgtaggctaaattttatttgccattgtaactaaggagaggcattctctctcagcttctcagaattcatttgtgggaaatgaaatgtacagttagaacaaaaataactaaaaatgcatgatactgcaaagtacccatacttcaccctatctgaaactttcctgaggatctggaaaagtctaggcagtccaacagaggttcttctyaagtatctctgccattaagcattgcttcttctgtacaatataggaaaagatgtgttttctttaactgtttatgtcccaaaaaattgatgtatttacaagtcaaaaataaaccaatgaaatctgcatggaatcccacagcaaatgcagctttacaaacttcaatttctagatgtcaagcagaatcatttatcggaagggtgtcagaggaccaaggcaataataataataataaaaaaaaatagtgtctgcattccctcctcaaaaatagctgtatttagcaagaatagaaggggaacaacc

SEQ ID NO: 18801 - DNA, 599 bp, Chicken  19866894227999_1
  misc_feature (1)..(84): n is any nucleotide
nnnnnnnnnnnnnnnnnnnnnnnnnnnnnnnnnnnnnnnnnnnnnnnnnnnnnnnnnnnnnnnnnnnnnnnnnnnnnnnnnnnnctgcccaggcctcatcccacctggccttgaatgcctcacaaggatgaggcacccacagcttctacaggcaacctgttccagtaacttactacactcttagtggtcaggcagtggttccccctaacatctaacttaaatctctcttcttttaggtaaaaaatgttccccctggccctatcacttttagactatgtaaaaaacaataaataaataatwaaaaaatgcctccatcttgcttataagctccctttaaatactgaaaagatatctacaagaaagatatatttcttacaaatgataatagattgggtagtctatttgaaaaacttagcaaagyataattccaccacttttcagcagtgtttcatttgcataaaggcagaacagtctgatcctgatgtatgctgagcacatctgttaaggttctgaaggcagtcaattacaatcagcccacctgccaaagccattcttagttctggtgttcaaaattttggcacaggtcatgtgaatgcctt

SEQ ID NO: 18802 - DNA, 600 bp, Chicken  19866894227999_2
acaaggatgaggcacccacagcttctacaggcaacctgttccagtaacttactacactcttagtggtcaggcagtggttccccctaacatctaacttaaatctctcttcttttaggtaaaaaatgttccccctggccctatcacttttagactatgtaaaaaacaataaataaataatwaaaaaatgcctccatcttgcttataagctccctttaaatactgaaaagatatctacaagaaagatatatttcttacaaatgataatagattgggtagtctatttgaaaaacttagcaaagyataattccaccacttttcagcagtgtttcatttgcataaaggcagaacagtctgatcctgatgtatgctgagcacatctgttaaggttctgaaggcagtcaattacaatcagcccacctgccaaagccattcttagttctggtgttcaaaattttggcacaggtcatgtgaatgccttcttccagcccagctggggagtacttgaactcattattacaccacagctatgcaaaggtgtttcagcatagtcacaataactacataacgtacagctctgtgtggtagttgtatttgcccaga

SEQ ID NO: 18803 - DNA, 599 bp, Chicken  19866894228002_1
  misc_feature (1)..(48): n is any nucleotide
nnnnnnnnnnnnnnnnnnnnnnnnnnnnnnnnnnnnnnnnnnnnnnnnttctctactgaaatttcttctaaagctttgggtgcttttaatctcagattaatagcatgtgatacctcccctatttgcatccttttgtttgtaaacctttcttaattaaaggtactatatttgctattctttgattacagagtgcaatctttgataagaaatacttaaaatgtcaggtgtctgttctccaaaacttctgtaatagaggcatcccttctcatatgaatggatcaaaatcattatctctgctcyactctactctacactactctactccacgctactctacagtactctactctacactactctactctatgctactctgccctaccctatgctaycgtatccttgcagtactttgtttggaaaggctaamcaggctaaattttttaacatctcctagttttgatgcatagctcttgacactaacagtgaagaattattcgcagatctttaatcacgtgcaactaggaaatactgcttttgatacaactaatgtcttagcagctaacataaaacagttcaatttgcattctacatatgccaga

SEQ ID NO: 18804 - DNA, 600 bp, Chicken  19866894228002_2
cagattaatagcatgtgatacctcccctatttgcatccttttgtttgtaaacctttcttaattaaaggtactatatttgctattctttgattacagagtgcaatctttgataagaaatacttaaaatgtcaggtgtctgttctccaaaacttctgtaatagaggcatcccttctcatatgaatggatcaaaatcattatctctgctcyactctactctacactactctactccacgctactctacagtactctactctacactactctactctatgctactctgccctaccctatgctaycgtatccttgcagtactttgtttggaaaggctaamcaggctaaattttttaacatctcctagttttgatgcatagctcttgacactaacagtgaagaattattcgcagatctttaatcacgtgcaactaggaaatactgcttttgatacaactaatgtcttagcagctaacataaaacagttcaatttgcattctacatatgccagaaaattcatgttgcccctctccttggctcagtggcatttctattggtatttttgttgcattattttatctgcagcaaagaacaaacactaccct

SEQ ID NO: 18805 - DNA, 600 bp, Chicken  19866894228002_3
tccttttgtttgtaaacctttcttaattaaaggtactatatttgctattctttgattacagagtgcaatctttgataagaaatacttaaaatgtcaggtgtctgttctccaaaacttctgtaatagaggcatcccttctcatatgaatggatcaaaatcattatctctgctcyactctactctacactactctactccacgctactctacagtactctactctacactactctactctatgctactctgccctaccctatgctaycgtatccttgcagtactttgtttggaaaggctaamcaggctaaattttttaacatctcctagttttgatgcatagctcttgacactaacagtgaagaattattcgcagatctttaatcacgtgcaactaggaaatactgcttttgatacaactaatgtcttagcagctaacataaaacagttcaatttgcattctacatatgccagaaaattcatgttgcccctctccttggctcagtggcatttctattggtatttttgttgcattattttatctgcagcaaagaacaaacactacccttgctgtgctcagttctcaggaggccccaaccacta

SEQ ID NO: 18806 - DNA, 600 bp, Chicken  19866894228006_1
tcttttggactatttattcctcttgttcctctacacttgggtaaggcacgtgagtaaagcagaggatcacagcatggcttgggttggaagagtccttaaaggttgtaaaaccgttgaaatggtttgggttggaactccccttaaagatcacaggacttgggtttgggttggaagggtacttaaagatcagagaaacatggaatgggttgaggaggtcctggaagatcacacagccatggaacgatgtgagtttgagttggaaaggtccttaaagatcacagaaccacggaatcacaacayggttgggctggaagggacctgagagccccctgcagtgggttgggtgccccccaccagctcaggccactcagggccccatccacagcctcgggcacctcccaggatgggacaccacagctcctctgggcgatgtcaagtcccgagcactgtgtttggggtcgaagcagtagagacactacaggaaaaccatcagatttccctttcacggccgatcctcaacaaaccaccaccgttaaatcccattaaaccactgctatttctgctgaaggaggagcccccgcgggccccttccagccccgg

SEQ ID NO: 18807 - DNA, 599 bp, Chicken  19866894228018_1
  misc_feature (1)..(50): n is any nucleotide
nnnnnnnnnnnnnnnnnnnnnnnnnnnnnnnnnnnnnnnnnnnnnnnnnntttggaaaacaagcttcctttctccactcaaaccatgcctgctctctctgccaccgtgttgggcaatattttccaggctgctatgaggttttcacaacagcatccgtgtacctgcagccccagccctgacccggccatgaacactcacagcccccgcaggatccggccccacatagcactccatgcagctgcacccggacccagcatttgctctgaagctgacttttaaggatgtgaaagtcagagcacrcccggggtccggcaccgctgcggacacagcgctctgtgagttactgtgtaatgaaggctgggtcataaattaaaccacattaccccccgcgaccattcgcagctcctgttcttcctggtggacggaggcggggaggctgcaggggcagcagtgcggaacggagagcggggatggggtcatggcacagcgtgtgccgccttccttccaccccatcacccagcagagtgctgtggggtgcagcagggatggagaaggtggggctctgccatggggctccgctgtgagcatccccagcactg

SEQ ID NO: 18808 - DNA, 600 bp, Chicken  19866894228023_1
aatcagggcagaactgatcaagtgctactttccacttggacttaaaccagatgccataaagatatgaattgcatgaaatgtaattccgggcctctagctcctagtgatcatcctatatgtaattaatgtcttctttctaaaaaagaagtgtatttaaagtatttaaagcagttttgtttttgtttttctggtagcttctatctatgtatatcctttggaatactcatttgggctttttaatttactatgaggatctatggagatttatagaaataaatcttacagatctgagcagaacaragcacagcatcccccattggtttttttggctgttttctttaaatatcttctttaattaaggaaaaaaaaaaaaaaaaaaagaaatgacaatcttcctccataaccaaaccaaacactttaaaagccccatttgttccccattttgagctggtctcgcttcccccgtggttaatcacattcattccactgacctaatggaactgggacaaaccccagatcagcaatcgtggagctggcggtacgtcaatcttttattattgggagagccttttctttttctctctttcttttttaaattat

SEQ ID NO: 18809 - DNA, 600 bp, Chicken  19866894228026_1
aagtatcaatttatctccccaaagcctctcagaaacggaagtcggtgcggttatgtacagaagagagtgtgtatgtggtttttaatagcatgggccacatctctaatccataccattttgtgagctgcctcttcacccattcacacgatgtggcattcccatggcaactactgtagctgccagtatggaaaaatactagtggtatatttaatgcactttcacttcagcaataggcacatcatgccttctgggagcaacatataggcaaagcagaagtaggagctgcagaacatacaagcycctgcttggaaggaaaacgcagaarcacctggaaatgctctgaactcaccagcaggtttcctgagtcctttatgctgtaaggtcatgaaaaatatcactaatggatgttttctggaaagagagacttgaggataattacaggcttggtatgagtattcacatgcattggccaaggagggctgctttctgacagcataagggctccattggagaaactcttcccagcctggaaagttcctgtccttgctgctctctgtggcagttactccatgcaaagtggggttgggacacaagtctccc

SEQ ID NO: 18810 - DNA, 600 bp, Chicken  19866894228026_2
ctctcagaaacggaagtcggtgcggttatgtacagaagagagtgtgtatgtggtttttaatagcatgggccacatctctaatccataccattttgtgagctgcctcttcacccattcacacgatgtggcattcccatggcaactactgtagctgccagtatggaaaaatactagtggtatatttaatgcactttcacttcagcaataggcacatcatgccttctgggagcaacatataggcaaagcagaagtaggagctgcagaacatacaagcycctgcttggaaggaaaacgcagaarcacctggaaatgctctgaactcaccagcaggtttcctgagtcctttatgctgtaaggtcatgaaaaatatcactaatggatgttttctggaaagagagacttgaggataattacaggcttggtatgagtattcacatgcattggccaaggagggctgctttctgacagcataagggctccattggagaaactcttcccagcctggaaagttcctgtccttgctgctctctgtggcagttactccatgcaaagtggggttgggacacaagtctcccaaagcatggagcagggtgaacatcc

SEQ ID NO: 18811 - DNA, 600 bp, Chicken  19866894228027_1
gaagctatatccacgaacttagtctgttccaccaaagagcttcaaaaatgaggtctgcatgttacattttgtaagtcagtaatgctccttttttcactcttcctcaaatctgaatcaattggttgtacctacagcaccacatgcactcatgccccgctgtgcacgcagtagaggatgtggctattcttttacatcacagccagcctttctggatttcctatttgcatggtcacacctgatgtttatctgaattgttgatcagccttaggagtttgccctgtttttgctgctttttctttyttctttttcccagttaatttagtaattccacgaacaatagatctcagaaatgctttgtcagatctgagacccacaactggagaggagagcctcaccattctcagtgcttgaatattataggtcatccgcctgtccatacagaacctttttgccttcagctgtcacagagatggaagctttattctgctgtgtgagttgtatgcagatgtggcctttagtagagagattcagatgttctcttcagcattaaggtctgtccataagttaaagagggagacatggttttggatgaaaacattc

SEQ ID NO: 18812 - DNA, 600 bp, Chicken  19866894228030_1
ctactccgaccaagcattatgcccagctatacaagttacattgacagcacagccttcgtgcaaataaaaagaaatctttatttcttcatactactggccaaactgtcttgtaagacgcccttgtcaaattaggcatggaatacagcagaagatactagtaaaatcagtcagaaaatatgttgctactgaaggtttcataactacttcactgttttctacaagattccttgaaaatatcaaactggcaatttacaggctttatttatttttttatttttattttatttatttatttatttwtttwtttwaagaatcagtacctagccatgtaaatctatgagatactggaattatcttcataaaacatatttgcaaacacccctgcaatatttcccaatcagttactctttcacgcttgccataaaaatgccatatcagctttctaaacagacagggaagaaagcaattaatactttaaagaaatatctgatgatgaaaatttaaacatctgttgataagtggctggtagaaagttgggggttttgtttggttaattttgtacttgtagatcaaataaataatcaatgcagtatcatttta

SEQ ID NO: 18813 - DNA, 600 bp, Chicken  19866894228030_2
tccgaccaagcattatgcccagctatacaagttacattgacagcacagccttcgtgcaaataaaaagaaatctttatttcttcatactactggccaaactgtcttgtaagacgcccttgtcaaattaggcatggaatacagcagaagatactagtaaaatcagtcagaaaatatgttgctactgaaggtttcataactacttcactgttttctacaagattccttgaaaatatcaaactggcaatttacaggctttatttatttttttatttttattttatttatttatttatttwtttwtttwaagaatcagtacctagccatgtaaatctatgagatactggaattatcttcataaaacatatttgcaaacacccctgcaatatttcccaatcagttactctttcacgcttgccataaaaatgccatatcagctttctaaacagacagggaagaaagcaattaatactttaaagaaatatctgatgatgaaaatttaaacatctgttgataagtggctggtagaaagttgggggttttgtttggttaattttgtacttgtagatcaaataaataatcaatgcagtatcattttagtac

SEQ ID NO: 18814 - DNA, 600 bp, Chicken  19866894228030_3
accaagcattatgcccagctatacaagttacattgacagcacagccttcgtgcaaataaaaagaaatctttatttcttcatactactggccaaactgtcttgtaagacgcccttgtcaaattaggcatggaatacagcagaagatactagtaaaatcagtcagaaaatatgttgctactgaaggtttcataactacttcactgttttctacaagattccttgaaaatatcaaactggcaatttacaggctttatttatttttttatttttattttatttatttatttatttwtttwtttwaagaatcagtacctagccatgtaaatctatgagatactggaattatcttcataaaacatatttgcaaacacccctgcaatatttcccaatcagttactctttcacgcttgccataaaaatgccatatcagctttctaaacagacagggaagaaagcaattaatactttaaagaaatatctgatgatgaaaatttaaacatctgttgataagtggctggtagaaagttgggggttttgtttggttaattttgtacttgtagatcaaataaataatcaatgcagtatcattttagtacattt

SEQ ID NO: 18815 - DNA, 600 bp, Chicken  19866894228034_1
cttcagcagatgaagaatccaagctattttttatatatatgtcaagtgtgcttttgctgaagtagagttaaaagatgtcaataattgctaagcactacaaacagaccaaaagattaaaacaaagactttaaccacctagtaaacatcatgcaagatgatgtaacatacatctcatcagctggtagaaatattttgcaaagaaattagagacaggctctttttaaagtgtgtcaacatgaactttcttatctcttgccatccgataagaaaatacattcctctaacagttgaacaagcctsygaaattgcacaaactggagttcagctcctccctgaagtaactaaattaggaccttagcttcacttcagcatcaatgtagaattaaagtgttcawtaaagagtagctttatatctcttaattgctcagtcttgttgacagraaatgtgtatatgaacacaaaatatattcttcaattttctagcatgtcatacttggaggcataagtcatcagactacaactcatgtttctattgaatgtgtagtgagccttgcaacaagttgttagcactctgagctctctggaaaaatgagattgttt

SEQ ID NO: 18816 - DNA, 600 bp, Chicken  19866894228034_2
ttcagcagatgaagaatccaagctattttttatatatatgtcaagtgtgcttttgctgaagtagagttaaaagatgtcaataattgctaagcactacaaacagaccaaaagattaaaacaaagactttaaccacctagtaaacatcatgcaagatgatgtaacatacatctcatcagctggtagaaatattttgcaaagaaattagagacaggctctttttaaagtgtgtcaacatgaactttcttatctcttgccatccgataagaaaatacattcctctaacagttgaacaagcctsygaaattgcacaaactggagttcagctcctccctgaagtaactaaattaggaccttagcttcacttcagcatcaatgtagaattaaagtgttcawtaaagagtagctttatatctcttaattgctcagtcttgttgacagraaatgtgtatatgaacacaaaatatattcttcaattttctagcatgtcatacttggaggcataagtcatcagactacaactcatgtttctattgaatgtgtagtgagccttgcaacaagttgttagcactctgagctctctggaaaaatgagattgtttt

SEQ ID NO: 18817 - DNA, 600 bp, Chicken  19866894228034_3
tacaaacagaccaaaagattaaaacaaagactttaaccacctagtaaacatcatgcaagatgatgtaacatacatctcatcagctggtagaaatattttgcaaagaaattagagacaggctctttttaaagtgtgtcaacatgaactttcttatctcttgccatccgataagaaaatacattcctctaacagttgaacaagcctsygaaattgcacaaactggagttcagctcctccctgaagtaactaaattaggaccttagcttcacttcagcatcaatgtagaattaaagtgttcawtaaagagtagctttatatctcttaattgctcagtcttgttgacagraaatgtgtatatgaacacaaaatatattcttcaattttctagcatgtcatacttggaggcataagtcatcagactacaactcatgtttctattgaatgtgtagtgagccttgcaacaagttgttagcactctgagctctctggaaaaatgagattgttttatactgtttatcataaagcaaatgacaacaataatgcttatcctaatggaactttggaaaatcccaaatcatgagtaactgtggagagggcaga

SEQ ID NO: 18818 - DNA, 600 bp, Chicken  19866894228034_4
aacatcatgcaagatgatgtaacatacatctcatcagctggtagaaatattttgcaaagaaattagagacaggctctttttaaagtgtgtcaacatgaactttcttatctcttgccatccgataagaaaatacattcctctaacagttgaacaagcctsygaaattgcacaaactggagttcagctcctccctgaagtaactaaattaggaccttagcttcacttcagcatcaatgtagaattaaagtgttcawtaaagagtagctttatatctcttaattgctcagtcttgttgacagraaatgtgtatatgaacacaaaatatattcttcaattttctagcatgtcatacttggaggcataagtcatcagactacaactcatgtttctattgaatgtgtagtgagccttgcaacaagttgttagcactctgagctctctggaaaaatgagattgttttatactgtttatcataaagcaaatgacaacaataatgcttatcctaatggaactttggaaaatcccaaatcatgagtaactgtggagagggcagagggagatgcacgatgaagccttccactgccagatcagcattctcag

SEQ ID NO: 18819 - DNA, 600 bp, Chicken  19866894228051_1
tacttactggaaatttccctcttgctagaaattcctgaggagtggaggggagggaagcgccgcttactgtaagcagcttgggtagaaaaatagcattgtgcttcacatcatttccacattatgctaatgcacatctgttgaatgtctccttcccattatgaattccagcaggtcttttctagtaagtgggaattacttccattcactgtttttccttgggttgtttctttaattgctaagcgttcagtggccgtggagatgcttgggctcgcagccctgcccaaggtcccatatctgcayggagggctgcgctgggaaagccaccaggtgagagtctctgggcacggagcaaggcaagaggctgggatgggtgaggctgaacaaaacaaacccaggattgcccaaacccctctgagacccaatgatgtatgtggctgckgtgtgagtgtggccgtgtgcgtgttagcacagggcttaacctcaaggatggcatgggatttgctggtgacacgatgcatgggaaggcctggagcctatagggagcacggggctgacacgagggctcagaattaaaagtttttgttaattaaaatcgaggag

SEQ ID NO: 18820 - DNA, 600 bp, Chicken  19866894228051_2
gaatgtctccttcccattatgaattccagcaggtcttttctagtaagtgggaattacttccattcactgtttttccttgggttgtttctttaattgctaagcgttcagtggccgtggagatgcttgggctcgcagccctgcccaaggtcccatatctgcayggagggctgcgctgggaaagccaccaggtgagagtctctgggcacggagcaaggcaagaggctgggatgggtgaggctgaacaaaacaaacccaggattgcccaaacccctctgagacccaatgatgtatgtggctgckgtgtgagtgtggccgtgtgcgtgttagcacagggcttaacctcaaggatggcatgggatttgctggtgacacgatgcatgggaaggcctggagcctatagggagcacggggctgacacgagggctcagaattaaaagtttttgttaattaaaatcgaggagccctaatcctgtgcagagagatgcgggacgggcgcagctcctgcattgcagctggcaccgcgggacagcagagcttcattaaagccaatataaatggaaagaggatttggacacacagaggcgacagataagcagtgac

SEQ ID NO: 18821 - DNA, 599 bp, Chicken  19866894228056_1
  misc_feature (1)..(212): n is any nucleotide
nnnnnnnnnnnnnnnnnnnnnnnnnnnnnnnnnnnnnnnnnnnnnnnnnnnnnnnnnnnnnnnnnnnnnnnnnnnnnnnnnnnnnnnnnnnnnnnnnnnnnnnnnnnnnnnnnnnnnnnnnnnnnnnnnnnnnnnnnnnnnnnnnnnnnnnnnnnnnnnnnnnnnnnnnnnnnnnnnnnnnnnnnnnnnnnnnnnnnnnnnnnnnnnnnnnntagtggaaataaagattattaatttaacaaaagtgtacccgggacaacgcggtagaaagtgaatgatttctttgcttatgttttccgktttttctgtttagccagttacgttgtttaaaggttagtttgtttgctgttaagttaataatagccttctgttgctggactgtggggactagatgagctcaggtaccaaagaaatttagtgattgctgtattcagtattgacaagtgacttggcatgtaggtcccgcagtagggagatgcccactccagatgagtagccagcaaagtggttcctcatgtgaccttcctgcccagtgacaagacagtccaggtggatgcctctagacttggcgcaatggtcttatattgattaagtggaag

SEQ ID NO: 18822 - DNA, 600 bp, Chicken  19866894228060_1
tgaggtagtgttgtattcatctggagttaataaactgttagaaaattcaatcatgtcatcatctatggaggactaccctcggtgaaacaaaactaaagaagccccaccaccaatctgcatttaactgttctttagattgtgaactgcaagagagctttccaccccccaataaaaacaccaatacttgcctaaaacgccctatttctttaaattagcaactcacgttttgctcattttcctttactcctgcagtagcataagctgtgctttaaaagcagcaatgaagaaacttgattaaawttccatttgaacagaagccacagctcagtggaagcctctcgaatagcctacacagacatctcagaagcccaggttggaggagcgactcagctactttagccagctgcagagcatgctgttggacacgctatttattcccaactactctaacgagccatgctacacagtttagctgggagagacatactaaaggcagcaagcattctwaatgcaacaatttgagctcaaattgtattttctctcaagtacgtatttagccttatagtcctcggagggattttcgtgtctcatgcaaaactg

SEQ ID NO: 18823 - DNA, 600 bp, Chicken  19866894228060_2
taaattagcaactcacgttttgctcattttcctttactcctgcagtagcataagctgtgctttaaaagcagcaatgaagaaacttgattaaawttccatttgaacagaagccacagctcagtggaagcctctcgaatagcctacacagacatctcagaagcccaggttggaggagcgactcagctactttagccagctgcagagcatgctgttggacacgctatttattcccaactactctaacgagccatgctacacagtttagctgggagagacatactaaaggcagcaagcattctwaatgcaacaatttgagctcaaattgtattttctctcaagtacgtatttagccttatagtcctcggagggattttcgtgtctcatgcaaaactgaattacatgctacgcatttctacgcaacatcgtgaacttgaatgacagctcrtttaaactcttccacatcgattctatggctgagttgcagaccgtagagacagaagtcatggagtatgagaccggttctgaaagcgggcaagcgggcaaagggaaggtgaaaagctttgcaaaccttccaaacttgtccttgctgggaaagcattg

SEQ ID NO: 18824 - DNA, 595 bp, Chicken  19866894228060_3
cagacatctcagaagcccaggttggaggagcgactcagctactttagccagctgcagagcatgctgttggacacgctatttattcccaactactctaacgagccatgctacacagtttagctgggagagacatactaaaggcagcaagcattctwaatgcaacaatttgagctcaaattgtattttctctcaagtacgtatttagccttatagtcctcggagggattttcgtgtctcatgcaaaactgaattacatgctacgcatttctacgcaacatcgtgaacttgaatgacagctcrtttaaactcttccacatcgattctatggctgagttgcagaccgtagagacagaagtcatggagtatgagaccggttctgaaagcgggcaagcgggcaaagggaaggtgaaaagctttgcaaaccttccaaacttgtccttgctgggaaagcattgcaatagaaagagagaaaaattacatataaacaaatcactcaaattccgcaacacgttacatttaagtgagctaatacactattacctacatccaacagaacattatggccatctgttactgcagacagcacactttctag

SEQ ID NO: 18825 - DNA, 600 bp, Chicken  19866894228067_1
agctccagaagaaacacacctcagtctgaacacactgatgtgaccgctggggctggaggaagtgctgctccacatctgtggcaatgtgactcaggcaggtggctctgctggctccatggatttaggaggtcaggctgaagagtgctctacagactgatggaaacctctgattaaaccaacactcttgcacttgaaatatggtcaatgccaaccttagggctagtaattttgatattagtgcagcatcctctgccttacagatatacggatgaacatttacaaaaagcaacctttgacttygtttgtgaaccactcctgacttctcctggattggagaagggaccttctctaccacaaaatggcagcaaggatgaaggctgccctccatctgatctggcttggatcgctccccaccatgttacacagctaggtcaaacctcctggtggcaatttcattcctcatcaaacatgggctccccctacattttttaaaatgagaggactaggggatgcttgtctgtgcttaagggatctagaagtgaggttcatggtttctcattttgatggcaaattcttctaactatggtatgtatctctctc

SEQ ID NO: 18826 - DNA, 600 bp, Chicken  19866894228067_2
tggcaatttcattcctcatcaaacatgggctccccctacattttttaaaatgagaggactaggggatgcttgtctgtgcttaagggatctagaagtgaggttcatggtttctcattttgatggcaaattcttctaactatggtatgtatctctctcatatcctttattgtggttttccctaaatgatttataactgaaactcccataaaccatgacatttatgtgaagatgtgagaggatcagatgggtatgcaggtcatgctgacaggggatgccaaggaaggaaaacaaacatcacamygtagagaaacatcacaaaatgtgtatttaaaaagacccaagtatttcagaaaacaacaccattctttataaacaagagcatgttctgattttccttctttaaaaaaatctgtccaagccatattcatcatcaaacttctctggtgaggccagtagtacctaaataggctgtgaaaaaatacacagtctgttccgatgcagtggaagaactgcaggcattttgcctctctacagctgtcctaatagacattggtgtttcacttagtgcaaactaacgaccgtagaatctcaccatctaaa

SEQ ID NO: 18827 - DNA, 600 bp, Chicken  19866894228067_3
ggcaatttcattcctcatcaaacatgggctccccctacattttttaaaatgagaggactaggggatgcttgtctgtgcttaagggatctagaagtgaggttcatggtttctcattttgatggcaaattcttctaactatggtatgtatctctctcatatcctttattgtggttttccctaaatgatttataactgaaactcccataaaccatgacatttatgtgaagatgtgagaggatcagatgggtatgcaggtcatgctgacaggggatgccaaggaaggaaaacaaacatcacamygtagagaaacatcacaaaatgtgtatttaaaaagacccaagtatttcagaaaacaacaccattctttataaacaagagcatgttctgattttccttctttaaaaaaatctgtccaagccatattcatcatcaaacttctctggtgaggccagtagtacctaaataggctgtgaaaaaatacacagtctgttccgatgcagtggaagaactgcaggcattttgcctctctacagctgtcctaatagacattggtgtttcacttagtgcaaactaacgaccgtagaatctcaccatctaaaa

SEQ ID NO: 18828 - DNA, 600 bp, Chicken  19866894228069_1
atttatagataaaattctgtgtaccagtctccaaataaaacaaagactgagaatatgaaagagacaaagttactgggttttattgtaacatattttcagctactcctttttattttaaggatataaattgcagaaactaagtgaagatggagaaaatcctttcacttataataatttgcatttcaatattaactacttttgccttcctctcccagtctctgacaaattccttgctgcagttctcacatgaaaagtcctgaaaagcaaagcaaacatctgaacactgttgaattaaaagaytgaagtaatacaacactattcaggttaacataaatgtaaagaaccagttataatctgatttaattacatgactagagactttctgtcagtggagtaaatttctgatttacaaagaaggcctggatgcattggaacatttatacttcttttttttttcccatggtcayggttttagagaatgaacttctgaccataaggaggcatacaaggaaacgaacaggttccactgtccatcactgcagagcggagctattctctgcttgtgagttgagctcagaattyacttgctgctaagcctgg

SEQ ID NO: 18829 - DNA, 600 bp, Chicken  19866894228069_2
ataataatttgcatttcaatattaactacttttgccttcctctcccagtctctgacaaattccttgctgcagttctcacatgaaaagtcctgaaaagcaaagcaaacatctgaacactgttgaattaaaagaytgaagtaatacaacactattcaggttaacataaatgtaaagaaccagttataatctgatttaattacatgactagagactttctgtcagtggagtaaatttctgatttacaaagaaggcctggatgcattggaacatttatacttcttttttttttcccatggtcayggttttagagaatgaacttctgaccataaggaggcatacaaggaaacgaacaggttccactgtccatcactgcagagcggagctattctctgcttgtgagttgagctcagaattyacttgctgctaagcctggtgaaaataagtggaaattctattaagtctcttgctctccacttcttttggatcagaatctcattactttaaagtactgttactgaaacagtttggcatcaaatgcctgaaatgtgtccttatttcttgaaattagtactaattctagcggtagttgaaagtaatttt

SEQ ID NO: 18830 - DNA, 600 bp, Chicken  19866894228069_3
actgttgaattaaaagaytgaagtaatacaacactattcaggttaacataaatgtaaagaaccagttataatctgatttaattacatgactagagactttctgtcagtggagtaaatttctgatttacaaagaaggcctggatgcattggaacatttatacttcttttttttttcccatggtcayggttttagagaatgaacttctgaccataaggaggcatacaaggaaacgaacaggttccactgtccatcactgcagagcggagctattctctgcttgtgagttgagctcagaattyacttgctgctaagcctggtgaaaataagtggaaattctattaagtctcttgctctccacttcttttggatcagaatctcattactttaaagtactgttactgaaacagtttggcatcaaatgcctgaaatgtgtccttatttcttgaaattagtactaattctagcggtagttgaaagtaattttaggagtgtgaactggtgcactgagattataaattggcactgcagatgttcttttcaattcatgaaagccagtggaagttttatctggctgaggacttagtgcccagcgtgtcagg

SEQ ID NO: 18831 - DNA, 510 bp, Chicken  19866894228069_4
tctcttgctctccacttcttttggatcagaatctcattactttaaagtactgttactgaaacagtttggcatcaaatgcctgaaatgtgtccttatttcttgaaattagtactaattctagcggtagttgaaagtaattttaggagtgtgaactggtgcactgagattataaattggcactgcagatgttcttttcaattcatgaaagccagtggaagttttatctggctgaggacttagtgcccagcgtgtcagggcctcatcctggctttgctcatatgcacattttgtgaattcttyttatgagttgccatagagcatgtatgaataccttttttctttcttgaggatggaagaaacctttcaaacacggttagcaggccatacattttccaagtacttcatgacgtctaactttaatatcaaaaaaaaattatgtggtaatttgcatgaagtcagaactgatgaactttagatttcttagccctgccataaaggaagcagtcaggt

SEQ ID NO: 18832 - DNA, 600 bp, Chicken  19866894228072_1
ttgacgttactggaagtctgaatctagatacagtggttggcctctccaaagctaatgcagtcatggtctaagctgaccgcatggaagagaagctttccaccaaagactcccatccgtcaggctggagcaaggtcgcaacctcaggtaggaaatggcagattcctcttggaaacccacaggagaagtgcaggaactttgggaaggctctttccctatgtccacaaatgtctattgtatagacagaagatcgtttctgaagcaacattaagaaaaaggctttcttttgggttgtttcagctrgaatcttcctkaaatcctttcttccttcccactgcaccctcagtaaatctccatggaagcatttcagagacatacttgacataatctcaccagcatagcacagctacagcacctcaaagtaatgagaaacagcttaaaaatactgaaatgttcttttgttttttgtgtgttttttacaatagcagttatttatcccacacaagctgtctccagccctcacctttcctatgccacccagcacagacttcatgggagctaatagaagagccagcaggctcatgtgcagggcctccaggcaag

SEQ ID NO: 18833 - DNA, 600 bp, Chicken  19866894228072_2
ggaagtctgaatctagatacagtggttggcctctccaaagctaatgcagtcatggtctaagctgaccgcatggaagagaagctttccaccaaagactcccatccgtcaggctggagcaaggtcgcaacctcaggtaggaaatggcagattcctcttggaaacccacaggagaagtgcaggaactttgggaaggctctttccctatgtccacaaatgtctattgtatagacagaagatcgtttctgaagcaacattaagaaaaaggctttcttttgggttgtttcagctrgaatcttcctkaaatcctttcttccttcccactgcaccctcagtaaatctccatggaagcatttcagagacatacttgacataatctcaccagcatagcacagctacagcacctcaaagtaatgagaaacagcttaaaaatactgaaatgttcttttgttttttgtgtgttttttacaatagcagttatttatcccacacaagctgtctccagccctcacctttcctatgccacccagcacagacttcatgggagctaatagaagagccagcaggctcatgtgcagggcctccaggcaagtgccaaatacc

SEQ ID NO: 18834 - DNA, 600 bp, Chicken  19866894228074_1
gcaaattacacgatattaaatcaaacttgcctcttcctaaaaatagctctcctcccagcggtacaaagaacgagcagagggttttccagcagtcccagcacctcgcctgccctctgggtgccccgtggggcccaacaggaggtggaggctgtgtcccaccagccccggagcaggaccctcagcctgagtgcccccaccttccctaagggtctgcctgctcctgcagtgcgcagcccagaggccccaccggcactgaatggggtggacatcactcctgtcccactgcagcaaacaaacccsgaccgagtcaacctcaaagcgctttccgcaggcaccagagctccctttgggtcccagcaccccgcagcactgaggggatgtrcacggctgcaccgacctgaagcccctcacagccatgggcaggggtagagagcagcactttgccaagagatgcttcgccctcgctgagcgctgcatttggaggggcagtcacctgccgtcgctctctcattgccatcactttttcccccaaatactctctcagagcagcctggagctctgctcggacaccaccgcagagtccatctggtggaggagccc

SEQ ID NO: 18835 - DNA, 600 bp, Chicken  19866894228074_2
tttccagcagtcccagcacctcgcctgccctctgggtgccccgtggggcccaacaggaggtggaggctgtgtcccaccagccccggagcaggaccctcagcctgagtgcccccaccttccctaagggtctgcctgctcctgcagtgcgcagcccagaggccccaccggcactgaatggggtggacatcactcctgtcccactgcagcaaacaaacccsgaccgagtcaacctcaaagcgctttccgcaggcaccagagctccctttgggtcccagcaccccgcagcactgaggggatgtrcacggctgcaccgacctgaagcccctcacagccatgggcaggggtagagagcagcactttgccaagagatgcttcgccctcgctgagcgctgcatttggaggggcagtcacctgccgtcgctctctcattgccatcactttttcccccaaatactctctcagagcagcctggagctctgctcggacaccaccgcagagtccatctggtggaggagccccagcccgaggcagcagcatcctgcacgcatgaagccacgagagtgggacagccccaggaaccccgcagcagccagtccccag

SEQ ID NO: 18836 - DNA, 599 bp, Chicken  19866894228077_1
  misc_feature (1)..(183): n is any nucleotide
nnnnnnnnnnnnnnnnnnnnnnnnnnnnnnnnnnnnnnnnnnnnnnnnnnnnnnnnnnnnnnnnnnnnnnnnnnnnnnnnnnnnnnnnnnnnnnnnnnnnnnnnnnnnnnnnnnnnnnnnnnnnnnnnnnnnnnnnnnnnnnnnnnnnnnnnnnnnnnnnnnnnnnnnnnnnnnnnnnnnnnnatttgaaaaaatggcagccagtagatgactgttggtaatagatttttttcctatgttatgctacttggagaacccaggctgaacataggaggagacactgtgctgcaaacttggttwggtgatggttgaaacayggctgatgaatctttgggtaaatckcctgttcatgaactctaataatggcaatatattatggatctcacttacagttcctgcatgcawgtgcaagaatacatacacaccatcttagctgaactgaattgttagtgaagtcatctccagcggtgctattcttttcttattactcttttgaaactcaaacctgcagttgtttataactcactgatgagactacaagttcattgtctctcccaagactggtaaggttgtatccctttccctctagctttggctta

SEQ ID NO: 18837 - DNA, 599 bp, Chicken  19866894228077_2
  misc_feature (1)..(166): n is any nucleotide
nnnnnnnnnnnnnnnnnnnnnnnnnnnnnnnnnnnnnnnnnnnnnnnnnnnnnnnnnnnnnnnnnnnnnnnnnnnnnnnnnnnnnnnnnnnnnnnnnnnnnnnnnnnnnnnnnnnnnnnnnnnnnnnnnnnnnnnnnnnnnnnnnnnnnnnnnnnnnnnnnnnnnnatttgaaaaaatggcagccagtagatgactgttggtaatagatttttttcctatgttatgctacttggagaacccaggctgaacataggaggagacactgtgctgcaaacttggttwggtgatggttgaaacayggctgatgaatctttgggtaaatckcctgttcatgaactctaataatggcaatatattatggatctcacttacagttcctgcatgcawgtgcaagaatacatacacaccatcttagctgaactgaattgttagtgaagtcatctccagcggtgctattcttttcttattactcttttgaaactcaaacctgcagttgtttataactcactgatgagactacaagttcattgtctctcccaagactggtaaggttgtatccctttccctctagctttggcttaactccactcatgtaaac

SEQ ID NO: 18838 - DNA, 599 bp, Chicken  19866894228077_3
  misc_feature (1)..(141): n is any nucleotide
nnnnnnnnnnnnnnnnnnnnnnnnnnnnnnnnnnnnnnnnnnnnnnnnnnnnnnnnnnnnnnnnnnnnnnnnnnnnnnnnnnnnnnnnnnnnnnnnnnnnnnnnnnnnnnnnnnnnnnnnnnnnnnnnnnnnnnnnnnnnnatttgaaaaaatggcagccagtagatgactgttggtaatagatttttttcctatgttatgctacttggagaacccaggctgaacataggaggagacactgtgctgcaaacttggttwggtgatggttgaaacayggctgatgaatctttgggtaaatckcctgttcatgaactctaataatggcaatatattatggatctcacttacagttcctgcatgcawgtgcaagaatacatacacaccatcttagctgaactgaattgttagtgaagtcatctccagcggtgctattcttttcttattactcttttgaaactcaaacctgcagttgtttataactcactgatgagactacaagttcattgtctctcccaagactggtaaggttgtatccctttccctctagctttggcttaactccactcatgtaaactttatgtacccatcctttttgtgtg

SEQ ID NO: 18839 - DNA, 599 bp, Chicken  19866894228077_4
  misc_feature (1)..(78): n is any nucleotide
nnnnnnnnnnnnnnnnnnnnnnnnnnnnnnnnnnnnnnnnnnnnnnnnnnnnnnnnnnnnnnnnnnnnnnnnnnnnnnatttgaaaaaatggcagccagtagatgactgttggtaatagatttttttcctatgttatgctacttggagaacccaggctgaacataggaggagacactgtgctgcaaacttggttwggtgatggttgaaacayggctgatgaatctttgggtaaatckcctgttcatgaactctaataatggcaatatattatggatctcacttacagttcctgcatgcawgtgcaagaatacatacacaccatcttagctgaactgaattgttagtgaagtcatctccagcggtgctattcttttcttattactcttttgaaactcaaacctgcagttgtttataactcactgatgagactacaagttcattgtctctcccaagactggtaaggttgtatccctttccctctagctttggcttaactccactcatgtaaactttatgtacccatcctttttgtgtgggagcagaaattttggtgcatatcagtgccttatttgctccgctatagtcacgtgtttgcagc

SEQ ID NO: 18840 - DNA, 600 bp, Chicken  19866894228084_1
agctcaagccattccaaatccattgcaaacaagactcagttaaagccaagtaacagcccagcagcacacgctcggacagtttctccagtccctccccctctagccaaggccagcagcccactgtgttaacttatccctcccacagtgaccacaaccacattttcactatcataaggaaacctcatttcagagttcaaaaatccctttttccattttccatttgatggtccaacctgaatctaaaaccattcatcaaaagtctgacgcacaaacacagcagtaagcgtgaaaaagataaamagtccttgggctgagtatcatcagaaaggaaaggtttgggagttcagacttcagctagaggttacaccacatgcagaagtccaccatggtacttcagcaagatgctcaggagttaagagaattcaggaactcaagagtttcaagaagatattaagttcctcattactgtcccacataaaataggtttaacaacagaatagttatctacgatcaaaacacatcgttattagagcaaaagcagagatctgagacttgcaaaagcaaccaaatgaaggtgaggaagagcaatacaagaacagc

SEQ ID NO: 18841 - DNA, 600 bp, Chicken  19866894228087_1
taagatgaatgctcttcacagagtttgactttgccaccccctctgtcttcacgcatctattacaccttactgtggaaattaatctctctaaaatccccccacagtaagagacaagtagctccagtaaaccattcagagggaaataggttaactgctagtaacttgggtgacttagggaacgaatcttgtcccttggttctaagataggctatcagcctttaaagctgacatatatcacaccaggatggctttgtgagagatctggcagtttcagattggaaggtgccctcaccttaaatkacatttcaacctatatattgaagagttacttacatttcacgcagcctatgtcatctttggatttctgcccacagcacttgcatttctacttctctgttttcagagagcgtttgaaaaccaaagtcaaagcgtgggtgaaggcaccatatgcaaaccaaggtgtttttacttgatcttaatgtgtgacaataatgattcatgagttcttcagccttcttgaattggctgaagaccaagttttgccatgtgttaaggttcataaatctttatgctctgaaacattttttttttcatgtttcc

SEQ ID NO: 18842 - DNA, 599 bp, Chicken  19866894228089_1
  misc_feature (1)..(53): n is any nucleotide
nnnnnnnnnnnnnnnnnnnnnnnnnnnnnnnnnnnnnnnnnnnnnnnnnnnnntaaccaacaagcatatttgggtcccattattgttttctgcatatacactggtgtaattttatccttgtcttcttggtttatatgtgggggattcttacctggcttagaagatcatatgttccagtgctcaggatgtgacatttcagcacggtgattctagtaaaaagccctgtgggataattcagagcaggaaaaagaggcctggggagtatttttgtgaagaagtacggtcagaaggatatttagytgccaagtaccctgtgtaaagggatcagatcagaaccagcagactggggagagagctgatgggtgaaactccagcaccrccttgcacgacagtccagggaggcttcctatgcagctcctggccaggctgggctctgatggattcgtggcccaaattgcygcctctgtttatctctgtgagtgtggtacaaatcctagttattaaaaatcaagaacagaaaatccaattctaaatgtaatatcagtgcaggtccaattgtgagtaggtgaaataaactaacttcagacaccaatggacag

SEQ ID NO: 18843 - DNA, 600 bp, Chicken  19866894228089_2
ttattgttttctgcatatacactggtgtaattttatccttgtcttcttggtttatatgtgggggattcttacctggcttagaagatcatatgttccagtgctcaggatgtgacatttcagcacggtgattctagtaaaaagccctgtgggataattcagagcaggaaaaagaggcctggggagtatttttgtgaagaagtacggtcagaaggatatttagytgccaagtaccctgtgtaaagggatcagatcagaaccagcagactggggagagagctgatgggtgaaactccagcaccrccttgcacgacagtccagggaggcttcctatgcagctcctggccaggctgggctctgatggattcgtggcccaaattgcygcctctgtttatctctgtgagtgtggtacaaatcctagttattaaaaatcaagaacagaaaatccaattctaaatgtaatatcagtgcaggtccaattgtgagtaggtgaaataaactaacttcagacaccaatggacagttgactgctgcacagtaacacaacacaatttagtacaattttccacagttgacatatgttgatcaatatagggctcagaa

SEQ ID NO: 18844 - DNA, 600 bp, Chicken  19866894228089_3
gaagatcatatgttccagtgctcaggatgtgacatttcagcacggtgattctagtaaaaagccctgtgggataattcagagcaggaaaaagaggcctggggagtatttttgtgaagaagtacggtcagaaggatatttagytgccaagtaccctgtgtaaagggatcagatcagaaccagcagactggggagagagctgatgggtgaaactccagcaccrccttgcacgacagtccagggaggcttcctatgcagctcctggccaggctgggctctgatggattcgtggcccaaattgcygcctctgtttatctctgtgagtgtggtacaaatcctagttattaaaaatcaagaacagaaaatccaattctaaatgtaatatcagtgcaggtccaattgtgagtaggtgaaataaactaacttcagacaccaatggacagttgactgctgcacagtaacacaacacaatttagtacaattttccacagttgacatatgttgatcaatatagggctcagaatttaacaggcatagaatttcaattaaactgaattacagaagagtatagtcatcaccatgctagaaaagaggtgttttagc

SEQ ID NO: 18845 - DNA, 599 bp, Chicken  19866894228108_1
  misc_feature (1)..(102): n is any nucleotide
nnnnnnnnnnnnnnnnnnnnnnnnnnnnnnnnnnnnnnnnnnnnnnnnnnnnnnnnnnnnnnnnnnnnnnnnnnnnnnnnnnnnnnnnnnnnnnnnnnnnnntgagcacccgcgaggcagtagaggagccccagggacggcacgaggcgaataaaacctcgggttttcggcattaaaatgggacgcgaggagtggataatgggatgaagcaaatcttaattgcttctgctccttgcctgtatcctttataccggagcgccgtgctgtggggtgctgttttcctgctttaagccatatcgytatttcttgcgttaatctgcagtgctctgtgtggtctgtgaggctcctcagacgccccttccataggggaagtgcacgaggcctcaggttgaggtgggaggaaatgaagggtgaggacacggggcctgcaggcaccatggaatcatagggcagcccgggctggaaggggcccataaggatcactgtgtgcaactcctggcatcgctgggtcccaaccgcccctcagacccggctgtgggcaaaatggggtacacccaagaaacatccttcagaaagcagaatagggaattgaaagggag

SEQ ID NO: 18846 - DNA, 600 bp, Chicken  19866894228109_1
acgagtaatgtcgtttcagtcataggaaatggtgcaatttctcctccttcccttcttttagttactaccgtgaatcaatttgtcatctggccgaggatctggcagaataattagctgtgctttcctgagcagctctgtcaggatgaagacttggccaggcagccggcgtgatgtcagtaggtgcagcgccgctaccacccatcgcttcaccatagcaagctcttccgatccgtattattaatatctgcccttttgaggtgggggaggaagagaaaagatattccgatcctaaaaaaagawgagaaggaagttgctcattgcggagccggagtgcggagctttcctgaagctctgcagaggaaccatctgactgggatgataaaaggcacggagccgcatcctggggtgctgtgggatgtggaggctgcgaccagccggccctgtgacctcctgctgggagccgcctggcgggaccctccccggaaggcacgtcttcagttctgctgccttcttctcccccctyttattttgtctccgcatttctcatgttgttgttatgtcttcttttttttttttactgagtagccctgcccgttggcc

SEQ ID NO: 18847 - DNA, 600 bp, Chicken  19866894228109_2
tccgatccgtattattaatatctgcccttttgaggtgggggaggaagagaaaagatattccgatcctaaaaaaagawgagaaggaagttgctcattgcggagccggagtgcggagctttcctgaagctctgcagaggaaccatctgactgggatgataaaaggcacggagccgcatcctggggtgctgtgggatgtggaggctgcgaccagccggccctgtgacctcctgctgggagccgcctggcgggaccctccccggaaggcacgtcttcagttctgctgccttcttctcccccctyttattttgtctccgcatttctcatgttgttgttatgtcttcttttttttttttactgagtagccctgcccgttggccacccccttgttctgagacagacatggcctccatctacctggtggccccatctgctacagctgccccacagccagcggtataaatgcaagagttgggcattttttgctgcaagctcagctgtttcattgctccaaactttgcaaattccttgcagcttttgctgtgaccctcacgcagaattccttaatgaactcttttgggcagctcctactttgctcccact

SEQ ID NO: 18848 - DNA, 600 bp, Chicken  19866894228110_1
gaggctctttttcagcaagggtgttcccatgaaatgtggctacatgcctgacttttcctcacagttaatgcagggtgactgtcaccaactgctgccatatgacccatattagctcagaggggtcccacttgtgttcccctcagccaatccattgcaaaacgtacaggtggagcagtgagagattgaacccaagacttgaaattcatgacccttaagctgctattgcaaatctgggaattacagttctgtctttctctctctgaattcatcaaaagacacaacagagataaagggctttawatagtgcaccacctgttgaaggtaaaggcttgggttggaagggaccttaatgccactcacctctaacatcctgtgtgggtcccatccaacctggccttgatcacctycacagatggggcacccacagcttctctgggcagcagtgccagtkcctcactgtcctctgaataaagaatctgctcctgatacctaatctaaatcttccccttttttttttggtttagatccattccccctcatcctatcactatcaggacacattaaaagtctccatcctgattgtaagttccctgtaagtac

SEQ ID NO: 18849 - DNA, 600 bp, Chicken  19866894228110_2
attagctcagaggggtcccacttgtgttcccctcagccaatccattgcaaaacgtacaggtggagcagtgagagattgaacccaagacttgaaattcatgacccttaagctgctattgcaaatctgggaattacagttctgtctttctctctctgaattcatcaaaagacacaacagagataaagggctttawatagtgcaccacctgttgaaggtaaaggcttgggttggaagggaccttaatgccactcacctctaacatcctgtgtgggtcccatccaacctggccttgatcacctycacagatggggcacccacagcttctctgggcagcagtgccagtkcctcactgtcctctgaataaagaatctgctcctgatacctaatctaaatcttccccttttttttttggtttagatccattccccctcatcctatcactatcaggacacattaaaagtctccatcctgattgtaagttccctgtaagtactggaaaacagcatctgagacacacaccacactgtgactcctgacacctggcacaggcaggactgctttgacctgcccttgaaaatggaaacgccaaatatagatatt

SEQ ID NO: 18850 - DNA, 581 bp, Chicken  19866894228110_3
ttgcaaaacgtacaggtggagcagtgagagattgaacccaagacttgaaattcatgacccttaagctgctattgcaaatctgggaattacagttctgtctttctctctctgaattcatcaaaagacacaacagagataaagggctttawatagtgcaccacctgttgaaggtaaaggcttgggttggaagggaccttaatgccactcacctctaacatcctgtgtgggtcccatccaacctggccttgatcacctycacagatggggcacccacagcttctctgggcagcagtgccagtkcctcactgtcctctgaataaagaatctgctcctgatacctaatctaaatcttccccttttttttttggtttagatccattccccctcatcctatcactatcaggacacattaaaagtctccatcctgattgtaagttccctgtaagtactggaaaacagcatctgagacacacaccacactgtgactcctgacacctggcacaggcaggactgctttgacctgcccttgaaaatggaaacgccaaatatagatatttttggtgccagcagctgcaggctga

SEQ ID NO: 18851 - DNA, 565 bp, Chicken  19866894228124_1
tcaaagtaaataagattttcacatttctgaaggtcacagtagtcagacagacttagaaagaatatatatatttttctttccttatttctatgtgttctttgctgtttaattacctgttgaagataccagacatagttaaaaaacagtaggttttaaagaaacatgaggctcattgctacaagcttcctgctctgccatgggaagctcagtcactggaaatgcagcactgtatctctactcacataacaaagcatcgcagaggacatttacacgaaggctgagggcagtaagctctcgtgmagaatggagccatttaactaacctaaaagaacctgtttctggccatctgtgggaccctaataatagacttctgcttttatactcctaatyttcagcaaaatgagctagatgctttcaagtgcaggcagttgcactcgaatcgggcttaccatttttgtgtctactaaaggggactaataataaaggtgtcaaagcatgctgataaagacatttttttggattaaaaatgacagctgcatgggaaccttttgggaagtcttaatgg

SEQ ID NO: 18852 - DNA, 475 bp, Chicken  19866894228124_2
tgtgttctttgctgtttaattacctgttgaagataccagacatagttaaaaaacagtaggttttaaagaaacatgaggctcattgctacaagcttcctgctctgccatgggaagctcagtcactggaaatgcagcactgtatctctactcacataacaaagcatcgcagaggacatttacacgaaggctgagggcagtaagctctcgtgmagaatggagccatttaactaacctaaaagaacctgtttctggccatctgtgggaccctaataatagacttctgcttttatactcctaatyttcagcaaaatgagctagatgctttcaagtgcaggcagttgcactcgaatcgggcttaccatttttgtgtctactaaaggggactaataataaaggtgtcaaagcatgctgataaagacatttttttggattaaaaatgacagctgcatgggaaccttttgggaagtcttaatgg

SEQ ID NO: 18853 - DNA, 600 bp, Chicken  19866894228127_1
ggcaggatgctgaatacctatgtttccgaggggtgtacatcctgaagagcttctgtttattactacaaagcttactaggagtgaggggagatagaggaccatgttactaagcattccactgctaggtgaggggttaggctttccacctcaagtcagattcttcatcactggcaattcctttctcataaagtgcatgcagagataataatttacattatttccacttttagaagaaaactatgatttagtagatgaagagaattccagaatataattcacatgcttctatcagagtacagmtgacttttttaccctaagctcctatgcttgcaactcttcatataaagactcactatttacaaagctaaatgaagtctacacctgacaggtgaaattcattctttacagatgccaaaagtatgtcctacacacagcataggactgtttatgttctgaagatgctataagactccttggtcttgacctcattccttgcataggaagtatttcagctgcagtgtataactgaatagaaataaatactatttatgctcagtgtgtatttacagatatagataatttaaagctttctaaacagct

SEQ ID NO: 18854 - DNA, 600 bp, Chicken  19866894228128_1
gagctcagatgtcccacttaaggagtccaaattaaagacaaaacccaaatgcatatttaaccaataaagaagactattgaaatgctttggtgactgtgtaggcatctaggtttagctggtcttggaacagttgacctcagtgattcacatctcaccctttcaaacacagaaatatttcatttattctcccagtttctagatcgcccttctgtcttatttcccttgaactccagaggcctacttcatcctttatgcaaggcccttcgggataacagagttacagcccaggctactcagacrcttcttgtttttactgcatttgcatatttgcatttgtcttggttattcaaaataataggaaaaaaagaaaaagaaaaaagagagaactgcttgatcgatgaacctcatcacaatcatagagacttggtattgtggctccctcccaccacacgtttacagtaagctggatcctttccccatagcttccccggaacaagctaaggtagctgctgtcattgtgtccctgcttccttcctcctccatctcacactttgctggtagcaaaatagaaaagggtaagaggtggggagctctggattt

SEQ ID NO: 18855 - DNA, 393 bp, Chicken  19866894228128_2
actgcatttgcatatttgcatttgtcttggttattcaaaataataggaaaaaaagaaaaagaaaaaagagagaactgcttgatcgatgaacctcatcacaatcatagagacttggtattgtggctccctcccaccacacgtttacagtaagctggatcctttccccatagcttccccggaacaagctaaggtagctgctgtcattgtgtccctgcttccttcctcctccatctcacactttgctggtagcaaaatagaaaagggtaagaggtggggagctctggatttgaacccgcgatyatctacactgcttaattttcctcttgttttggcgctgcaccgaagcacttccattagctctctttgcaagacaactggccctcaagctgtaag

SEQ ID NO: 18856 - DNA, 599 bp, Chicken  19866894228137_1
  misc_feature (1)..(1): n is any nucleotide
ngcataaatctgattaatacagtacaatcaaaagcttcataaactaacagagcacattttccttatagctgtactcaaaaagtatttactttcttctttcagacttccccacagctggacattttaggttatggtacaatgtttttgacatggcaacaaggattgcatttttttcaataactagctggtcattcttctctgtttcagatgttacctccatttagagatgtcagaggtactcagggattagcttgctgataaaaatccatactgttttgagctagctcctctccaagtctmgctgaagttccaagttgttttctgagttaggtgtctgatctctgctgtaagaaatccaaggaatgtcagaagaatggaaggaaatcaatcaatygattggttgctcttgcactcctggatggtacggaagaccaacaaaacaaagcttggtccttctcaaatacaagccctgtgaggctgactgtgaactctgccgtgccacaacatsgcaggctgatcagtggatgaatgagaagacaataattttctcattaggcttgtcagcagtgccctgtccagaaacagcattctttaaaaat

SEQ ID NO: 18857 - DNA, 600 bp, Chicken  19866894228137_2
tctttcagacttccccacagctggacattttaggttatggtacaatgtttttgacatggcaacaaggattgcatttttttcaataactagctggtcattcttctctgtttcagatgttacctccatttagagatgtcagaggtactcagggattagcttgctgataaaaatccatactgttttgagctagctcctctccaagtctmgctgaagttccaagttgttttctgagttaggtgtctgatctctgctgtaagaaatccaaggaatgtcagaagaatggaaggaaatcaatcaatygattggttgctcttgcactcctggatggtacggaagaccaacaaaacaaagcttggtccttctcaaatacaagccctgtgaggctgactgtgaactctgccgtgccacaacatsgcaggctgatcagtggatgaatgagaagacaataattttctcattaggcttgtcagcagtgccctgtccagaaacagcattctttaaaaatgatcagtgggtattcaagaataatgaagctaggagtaatgcttatcatacattaactgaaaggatgcttttccatacttgcaatgctttgttcag

SEQ ID NO: 18858 - DNA, 600 bp, Chicken  19866894228137_3
tgttacctccatttagagatgtcagaggtactcagggattagcttgctgataaaaatccatactgttttgagctagctcctctccaagtctmgctgaagttccaagttgttttctgagttaggtgtctgatctctgctgtaagaaatccaaggaatgtcagaagaatggaaggaaatcaatcaatygattggttgctcttgcactcctggatggtacggaagaccaacaaaacaaagcttggtccttctcaaatacaagccctgtgaggctgactgtgaactctgccgtgccacaacatsgcaggctgatcagtggatgaatgagaagacaataattttctcattaggcttgtcagcagtgccctgtccagaaacagcattctttaaaaatgatcagtgggtattcaagaataatgaagctaggagtaatgcttatcatacattaactgaaaggatgcttttccatacttgcaatgctttgttcagccatccccacatatattgcttatttagaatgaaagatttttgacacctgaatgtgctttgcatgactctgggaactgcacagatggttaccttgcaaaaagcctatataagaga

SEQ ID NO: 18859 - DNA, 600 bp, Chicken  19866894228142_1
ttgctttgatttctactgccatgctgaggaatttttatctttacattttacatgttgggttttactgctactattcgataccctgacgacataactttcacaaaaagactgaagttaatctcacatttttgaaaactgctacatttcttaagctatttctttggcaattgaggcagtagcctggaactgagcagtttgagttcatagaggcttatatgactgtcttcttcagtagaagcctcatggctgtgcaagcttctagttctgttttctgctttcagtccagaaatgtgtcagcaraacacagtcggccatggacgggctggctcagaattgttcatgttctgcaaatacaaccttgaatctgtcccaagtgtctcccagttcaatcctgatcacttttctctcaaccaacataaattgagctccttgtatgtatctatgccaaaaaatgagctatagttacagaagcaaaagattcgtgaaaacagtgaaaagaacaaaatttcaaaaatgaaataaaatcagtcttacttgcctttcttctacttccagattaacatgctaaccatcatctagaagacaatgcatcaagtcaat

SEQ ID NO: 18860 - DNA, 600 bp, Chicken  19866894228151_1
taactttcacatgattgttaaatgtgtgctcctcagcttgggcttaagctgttcaacagtgagatggggatggatgctctgctgtgttgccttcacagacagatttggctgaactgtttggtccttttagctcttacctagcagtacttgttcacgctgctgtctagttttgaagccctaatgcctatttttattgtattcttaacaccatacttccagttggggtgaagtacttggtttgtcagggcaacactgttaagggttggggttctttctacaggcattcctgctgcctccacrgtgtttcccagtcaggaagggcagttttcctgccatagcrtggtagacttggagtgttgtgaggaattctttggctctcacacctggcatggactcgcascacactagctctggcactcacgcttctatgcagtgacttctctgcagtccttgagcttggtgtcttcatttaggtggcactgagcatcgagggagctgccagaatggaggactgagtgctccttccttctgctcagggctgtttcctgttcctgttcctatcccagctgtgttggctcgggaagcggcagtgtgtgctgc

SEQ ID NO: 18861 - DNA, 600 bp, Chicken  19866894228151_2
ggcttaagctgttcaacagtgagatggggatggatgctctgctgtgttgccttcacagacagatttggctgaactgtttggtccttttagctcttacctagcagtacttgttcacgctgctgtctagttttgaagccctaatgcctatttttattgtattcttaacaccatacttccagttggggtgaagtacttggtttgtcagggcaacactgttaagggttggggttctttctacaggcattcctgctgcctccacrgtgtttcccagtcaggaagggcagttttcctgccatagcrtggtagacttggagtgttgtgaggaattctttggctctcacacctggcatggactcgcascacactagctctggcactcacgcttctatgcagtgacttctctgcagtccttgagcttggtgtcttcatttaggtggcactgagcatcgagggagctgccagaatggaggactgagtgctccttccttctgctcagggctgtttcctgttcctgttcctatcccagctgtgttggctcgggaagcggcagtgtgtgctgccagcttgaactttctctgcttgctgatacagctctgagca

SEQ ID NO: 18862 - DNA, 600 bp, Chicken  19866894228151_3
agatttggctgaactgtttggtccttttagctcttacctagcagtacttgttcacgctgctgtctagttttgaagccctaatgcctatttttattgtattcttaacaccatacttccagttggggtgaagtacttggtttgtcagggcaacactgttaagggttggggttctttctacaggcattcctgctgcctccacrgtgtttcccagtcaggaagggcagttttcctgccatagcrtggtagacttggagtgttgtgaggaattctttggctctcacacctggcatggactcgcascacactagctctggcactcacgcttctatgcagtgacttctctgcagtccttgagcttggtgtcttcatttaggtggcactgagcatcgagggagctgccagaatggaggactgagtgctccttccttctgctcagggctgtttcctgttcctgttcctatcccagctgtgttggctcgggaagcggcagtgtgtgctgccagcttgaactttctctgcttgctgatacagctctgagcagcaatgttattcaccccattgctacctgcagttgaatcatctttgtgttactgttgttct

SEQ ID NO: 18863 - DNA, 600 bp, Chicken  19866894228153_1
gtacgtgtgattgcacagggcaactgactctttccaaagaagaaactccttgaacatattcttattatctctgatgttcccattgcttgcatggacctcatccatcttcttgcactgactctccgattctgccactgaaagagcagtacaaggtcagagcttgacagaggatcttgacagttatcttcttacagtctgaccatctatggtttgtccacagatccttcaaaataccccctgaagatcatcttaattgtgtcttctgcatgggcagccactgaactctttgaggacttcacrgtgaagagtgtaatctcaagttcaggaagttgcctaacagagtcccttggcttgatgagaaaagagaaaacaaaaataataatgagtcattaaaggcaatcaaaaattaattctgcaataaatatatatgcaatctgtcccctgtactcctgtgtgtttacttatatttataagatttgctttatgaatgatttgccattaatggagaaaagagagattaagaaacaaaagctgtagcttcaatccatcattagggaattaatcaattggctgcctgcgcagacagctatttagatctgt

SEQ ID NO: 18864 - DNA, 600 bp, Chicken  19866894228159_1
tgagcattttgttgactggcattatttatctgcaagtgcagatagtgctgtgactcagtgtctttttcagtcttcacttgcgtaatctgttagcccctcatggaaaacaaaacaaaacaaaacaaaaacaccaaagcaccaaaagaaaagttgttattcaatattaatacctttgagcctctaagttctgggttaaaaaaatatgaggccacgtgcagtgaatgatggttccatatgaattggtctgcctgttttaaatatgttcagaaatattgatgggtttattttgtactgacaagytttttctggtacttttagtcctttcgtagcagcagaacgatgtcatgaagctagctctgtgttcaatcttaaggctgtttcaaagcaagtggcacaaatgccagcaaattatcagcataaattttgtactgaacatctatcaacaatagtcatggcactgtgatctaattgtgtagcagcaaagaagggtgtgggggatttctttggtggatgcaggattctatggagattctgaaaaaggagatactgtttagatttcagacatagcagtaatgtatgacaaaatcacgtaaagacaag

SEQ ID NO: 18865 - DNA, 599 bp, Chicken  19866894228161_1
  misc_feature (1)..(53): n is any nucleotide
nnnnnnnnnnnnnnnnnnnnnnnnnnnnnnnnnnnnnnnnnnnnnnnnnnnnntatattactcaccatgtaaatatttgcataacattcagatgctccatgcatatgtgtgagcaaaaatctggtcctgaaatcattcgtattttaaggaaacttctcccaaatattctaatgtaatttccaggcagtataaatgctaactatattgggcagctttcccagcctaagagaaaaaataagtgtttcttcattgagcctatgtgattccttaatgttgatttcattttctctggtagtccayagttttcctctctgttggcctcagctcctgagcctcctcttgtccatctcaactgtggaaggggaaacagttttccaagaaaacatatgtatttcagagcaacttcatttactttcaagatacaggctgaartacrtatatctgtcttctttccattacttcagagacttccacatccttaaagacctaaacatatgatctgtacttctctgymatttcttaacacagttatgttaagacactcaaattagaagggaagaagggagggaaaatggaaaggtgcatagaagtcaaggact

SEQ ID NO: 18866 - DNA, 600 bp, Chicken  19866894228161_2
tcattcgtattttaaggaaacttctcccaaatattctaatgtaatttccaggcagtataaatgctaactatattgggcagctttcccagcctaagagaaaaaataagtgtttcttcattgagcctatgtgattccttaatgttgatttcattttctctggtagtccayagttttcctctctgttggcctcagctcctgagcctcctcttgtccatctcaactgtggaaggggaaacagttttccaagaaaacatatgtatttcagagcaacttcatttactttcaagatacaggctgaartacrtatatctgtcttctttccattacttcagagacttccacatccttaaagacctaaacatatgatctgtacttctctgymatttcttaacacagttatgttaagacactcaaattagaagggaagaagggagggaaaatggaaaggtgcatagaagtcaaggacttggactatatatccatggctgaatgcacattgttcaaatactgcttgcagctcttttaccatcaaattgtagtttttctgggatttttagttttacaagaatatagtcatttcatggaattgataggcattag

SEQ ID NO: 18867 - DNA, 600 bp, Chicken  19866894228161_3
tcgtattttaaggaaacttctcccaaatattctaatgtaatttccaggcagtataaatgctaactatattgggcagctttcccagcctaagagaaaaaataagtgtttcttcattgagcctatgtgattccttaatgttgatttcattttctctggtagtccayagttttcctctctgttggcctcagctcctgagcctcctcttgtccatctcaactgtggaaggggaaacagttttccaagaaaacatatgtatttcagagcaacttcatttactttcaagatacaggctgaartacrtatatctgtcttctttccattacttcagagacttccacatccttaaagacctaaacatatgatctgtacttctctgymatttcttaacacagttatgttaagacactcaaattagaagggaagaagggagggaaaatggaaaggtgcatagaagtcaaggacttggactatatatccatggctgaatgcacattgttcaaatactgcttgcagctcttttaccatcaaattgtagtttttctgggatttttagttttacaagaatatagtcatttcatggaattgataggcattagcatg

SEQ ID NO: 18868 - DNA, 600 bp, Chicken  19866894228161_4
tttcccagcctaagagaaaaaataagtgtttcttcattgagcctatgtgattccttaatgttgatttcattttctctggtagtccayagttttcctctctgttggcctcagctcctgagcctcctcttgtccatctcaactgtggaaggggaaacagttttccaagaaaacatatgtatttcagagcaacttcatttactttcaagatacaggctgaartacrtatatctgtcttctttccattacttcagagacttccacatccttaaagacctaaacatatgatctgtacttctctgymatttcttaacacagttatgttaagacactcaaattagaagggaagaagggagggaaaatggaaaggtgcatagaagtcaaggacttggactatatatccatggctgaatgcacattgttcaaatactgcttgcagctcttttaccatcaaattgtagtttttctgggatttttagttttacaagaatatagtcatttcatggaattgataggcattagcatgataccatgagcatttctgtctatcwtatttattctcattccctaactgcagctgattttaacacagatatttcaggt

SEQ ID NO: 18869 - DNA, 600 bp, Chicken  19866894228161_5
ttcccagcctaagagaaaaaataagtgtttcttcattgagcctatgtgattccttaatgttgatttcattttctctggtagtccayagttttcctctctgttggcctcagctcctgagcctcctcttgtccatctcaactgtggaaggggaaacagttttccaagaaaacatatgtatttcagagcaacttcatttactttcaagatacaggctgaartacrtatatctgtcttctttccattacttcagagacttccacatccttaaagacctaaacatatgatctgtacttctctgymatttcttaacacagttatgttaagacactcaaattagaagggaagaagggagggaaaatggaaaggtgcatagaagtcaaggacttggactatatatccatggctgaatgcacattgttcaaatactgcttgcagctcttttaccatcaaattgtagtttttctgggatttttagttttacaagaatatagtcatttcatggaattgataggcattagcatgataccatgagcatttctgtctatcwtatttattctcattccctaactgcagctgattttaacacagatatttcaggta

SEQ ID NO: 18870 - DNA, 594 bp, Chicken  19866894228161_6
cagagacttccacatccttaaagacctaaacatatgatctgtacttctctgymatttcttaacacagttatgttaagacactcaaattagaagggaagaagggagggaaaatggaaaggtgcatagaagtcaaggacttggactatatatccatggctgaatgcacattgttcaaatactgcttgcagctcttttaccatcaaattgtagtttttctgggatttttagttttacaagaatatagtcatttcatggaattgataggcattagcatgataccatgagcatttctgtctatcwtatttattctcattccctaactgcagctgattttaacacagatatttcaggtagcagagcaaagtctgcttagcagtaagaattgtaatatatcagaaggcacatataaacacaatctacaactgctcttgctattgtttgaactcaaatagcctctaatggctattacatttctagtatcctccttgtattctttgttgtataaacattcaaaaagaatttatattctatgtaaagatcacagattgctatacaggaatagaaggtaaaataagcactagaagcaaaacaaat

SEQ ID NO: 18871 - DNA, 600 bp, Chicken  19866894228168_1
ggagtaagtgcaagttaaagatcagattatattctgggaataggagacacagaacctttgttaaggttctagtgtgtttaaaattctatgagctgaaagaacaatattgattgttacaaaacagaaaattacttctattatttcgtgaagagagatttagctttacaacactgctttgcttttgttagttgaaaaataatattaatacttataacacaaagtaaacatgaactttgtttttggtaatacttttaaactgctttaaatcatacagaaaaaatatataaatatataaaaatrataaagtatatgaatatttatatacacaatacataaaaaatagcaacattgtacatcctacaactaatactgatatcactgttctcatcttagttatctcatctaggtatttatggttatattttctagaacagattgtcaagcaaaataatggaatagcaccggaaaaggcctggaaaactttactgctcagcagcattgctggttattattctaagagcaatttcaaattttgtagttttgtgatatttatcagtttacttcctttaatgcttaataagaggacaatgaatagtgaag

SEQ ID NO: 18872 - DNA, 600 bp, Chicken  19866894228174_1
tgtgttattgcccatatatataagctaattcttccatgtctcatttgtctaacagcatggaaactgccagcattctaagagctgctatcaggtaacttgcaatgacattagccagaccatacaaacagtgaacaggctctagtgactgtttttgaacctgatcctatgagatgctgcatgctttttctctgcatagcctttgagatggctagacacaaacagactcccacagacctctgtactaagagcagctatgcagtgtactgcaaggagagagctctgagaagtgtcaactggacygacctgacatttcagtttatcccttgccagtgcagaggactctttccctgcattaatcttcttattcttttctgtcaaatctcaattagccaggtgagaaaactgctgcataatacctagctttaactttcagggctgttttcctgacacatccagggtcacagcatcatggaggaactccacgcaagagctccygttgcaaaacgctaacagaaaacagtcacagcaagggatggacagaatggatctgaacaacagagatgctctgacttctcaaaaacacttatgcatgtacttaac

SEQ ID NO: 18873 - DNA, 600 bp, Chicken  19866894228174_2
gcctttgagatggctagacacaaacagactcccacagacctctgtactaagagcagctatgcagtgtactgcaaggagagagctctgagaagtgtcaactggacygacctgacatttcagtttatcccttgccagtgcagaggactctttccctgcattaatcttcttattcttttctgtcaaatctcaattagccaggtgagaaaactgctgcataatacctagctttaactttcagggctgttttcctgacacatccagggtcacagcatcatggaggaactccacgcaagagctccygttgcaaaacgctaacagaaaacagtcacagcaagggatggacagaatggatctgaacaacagagatgctctgacttctcaaaaacacttatgcatgtacttaactcattacaaggaattccattattttctaggggcccagaagatgcatatcagatagactggcagcacagaaaaaaaccactaaaacttacagtgaacatttttacagaacaggggtctgaaccaagtgcccccaagaacagaatcgctacttctaccacacacccatgtgcccttacacaaacatttcctcccctt

SEQ ID NO: 18874 - DNA, 599 bp, Chicken  19866894228175_1
  misc_feature (1)..(34): n is any nucleotide
nnnnnnnnnnnnnnnnnnnnnnnnnnnnnnnnnnaatgtcgtgctcctttctttgtcttttgtctgctcagatctgtggttaggtgtccatgacagctgcatagttcagcgacacacagataaaaagaagctctctccaaagcaaagtcttttctttgttgaaattcatttagctatccctgctcacaacaaagacttggtaagctttagcaagacttattttttattttgctacagtgcatgctactatacagtgaagtatatcttcaggaccaaaagggatgtttattgaggtctaascatatttcctttaatgtggctcctttgtatacatacctacttattcctgtcatctttatctgttccctgtgcatgggaagggaatgtgcacttctctccttttacaggtcgggaattttaaatgctctggaatagctaatgactttgttctgctgctcacatgaaaagcttttttttttttttttgccttgattttagcctttttttttttttaataggagatgctcattctagtaaaaatgtcaaagaatggaaacatttttcttttgtgcagattcattagtgagcctcccagttaa

SEQ ID NO: 18875 - DNA, 599 bp, Chicken  19866894228177_1
  misc_feature (1)..(223): n is any nucleotide
nnnnnnnnnnnnnnnnnnnnnnnnnnnnnnnnnnnnnnnnnnnnnnnnnnnnnnnnnnnnnnnnnnnnnnnnnnnnnnnnnnnnnnnnnnnnnnnnnnnnnnnnnnnnnnnnnnnnnnnnnnnnnnnnnnnnnnnnnnnnnnnnnnnnnnnnnnnnnnnnnnnnnnnnnnnnnnnnnnnnnnnnnnnnnnnnnnnnnnnnnnnnnnnnnnnnnnnnnnnnnnntcccatcaattccacattaagagcaaacaacgggagaggcaagaaccaaagtgcaacaggtctggaattgccacagytgttgcccagcacctggaagaactgctgagcagaaatctgaggcttcccatggtcacatcctttcccttctgccttcaagacacctccctcctttgtggcacctcagggatgaatgcttcagaaccactgcaattcccaacaccaagggacacacaggtgctggttgacaccttccagataactgcacagccctgtcctgactgcggcttcctcctccacccctgagcctccagaagggaggttgggacaccaggcctgaggtctcctatcactsycagagagagcttccagtacagaa

SEQ ID NO: 18876 - DNA, 600 bp, Chicken  19866894228177_2
gcaacaggtctggaattgccacagytgttgcccagcacctggaagaactgctgagcagaaatctgaggcttcccatggtcacatcctttcccttctgccttcaagacacctccctcctttgtggcacctcagggatgaatgcttcagaaccactgcaattcccaacaccaagggacacacaggtgctggttgacaccttccagataactgcacagccctgtcctgactgcggcttcctcctccacccctgagcctccagaagggaggttgggacaccaggcctgaggtctcctatcactsycagagagagcttccagtacagaaaatacctctgtgatggaaggatctggcttctgcacagcagcrcattcacccagaagcatcagaaaaacacctactgagttcacaccacctgcttcctcccagcatagacaagctatgctgcatctattcacacttgcttatgtaaatgattatcaagctacatcagagagacattgtgttatcaaatacagcctggggaaggcaggacacgtcaggtcaatgaagccttaattcaactactagtcacacacacacagagctcataactacactgtg

SEQ ID NO: 18877 - DNA, 600 bp, Chicken  19866894228177_3
caacaggtctggaattgccacagytgttgcccagcacctggaagaactgctgagcagaaatctgaggcttcccatggtcacatcctttcccttctgccttcaagacacctccctcctttgtggcacctcagggatgaatgcttcagaaccactgcaattcccaacaccaagggacacacaggtgctggttgacaccttccagataactgcacagccctgtcctgactgcggcttcctcctccacccctgagcctccagaagggaggttgggacaccaggcctgaggtctcctatcactsycagagagagcttccagtacagaaaatacctctgtgatggaaggatctggcttctgcacagcagcrcattcacccagaagcatcagaaaaacacctactgagttcacaccacctgcttcctcccagcatagacaagctatgctgcatctattcacacttgcttatgtaaatgattatcaagctacatcagagagacattgtgttatcaaatacagcctggggaaggcaggacacgtcaggtcaatgaagccttaattcaactactagtcacacacacacagagctcataactacactgtgt

SEQ ID NO: 18878 - DNA, 600 bp, Chicken  19866894228177_4
ggcttcccatggtcacatcctttcccttctgccttcaagacacctccctcctttgtggcacctcagggatgaatgcttcagaaccactgcaattcccaacaccaagggacacacaggtgctggttgacaccttccagataactgcacagccctgtcctgactgcggcttcctcctccacccctgagcctccagaagggaggttgggacaccaggcctgaggtctcctatcactsycagagagagcttccagtacagaaaatacctctgtgatggaaggatctggcttctgcacagcagcrcattcacccagaagcatcagaaaaacacctactgagttcacaccacctgcttcctcccagcatagacaagctatgctgcatctattcacacttgcttatgtaaatgattatcaagctacatcagagagacattgtgttatcaaatacagcctggggaaggcaggacacgtcaggtcaatgaagccttaattcaactactagtcacacacacacagagctcataactacactgtgttatttgcagaatgctctatgcacttcgtgtattgagcacgggacagctcttgtaggggtaaaact

SEQ ID NO: 18879 - DNA, 599 bp, Chicken  19866894228181_1
  misc_feature (1)..(269): n is any nucleotide
nnnnnnnnnnnnnnnnnnnnnnnnnnnnnnnnnnnnnnnnnnnnnnnnnnnnnnnnnnnnnnnnnnnnnnnnnnnnnnnnnnnnnnnnnnnnnnnnnnnnnnnnnnnnnnnnnnnnnnnnnnnnnnnnnnnnnnnnnnnnnnnnnnnnnnnnnnnnnnnnnnnnnnnnnnnnnnnnnnnnnnnnnnnnnnnnnnnnnnnnnnnnnnnnnnnnnnnnnnnnnnnnnnnnnnnnnnnnnnnnnnnnnnnnnnnnnnnnnnnnnnnnnnnnnaaccatgacctgaaaatacagagatctctaygaaataaattcctgcaggctcccttgggatatggwagagaacatgcttgattaagctggtgctaacctttcacaatcacacttctctgatatttattccttgaaataatgaaaagggacatgtcagctgtgggaaagctatagwgtactccattgcttgctgctgtccttttctaacttgagtgttcttctcctagagcaaacttaaaaagtaagccctccatttgttctttttgttgacctttattgtttagtggctctccatttgcacagctaaatgacatgttaataaattttcca

SEQ ID NO: 18880 - DNA, 599 bp, Chicken  19866894228181_2
  misc_feature (1)..(234): n is any nucleotide
nnnnnnnnnnnnnnnnnnnnnnnnnnnnnnnnnnnnnnnnnnnnnnnnnnnnnnnnnnnnnnnnnnnnnnnnnnnnnnnnnnnnnnnnnnnnnnnnnnnnnnnnnnnnnnnnnnnnnnnnnnnnnnnnnnnnnnnnnnnnnnnnnnnnnnnnnnnnnnnnnnnnnnnnnnnnnnnnnnnnnnnnnnnnnnnnnnnnnnnnnnnnnnnnnnnnnnnnnnnnnnnnnnnnnnnnnnaaccatgacctgaaaatacagagatctctaygaaataaattcctgcaggctcccttgggatatggwagagaacatgcttgattaagctggtgctaacctttcacaatcacacttctctgatatttattccttgaaataatgaaaagggacatgtcagctgtgggaaagctatagwgtactccattgcttgctgctgtccttttctaacttgagtgttcttctcctagagcaaacttaaaaagtaagccctccatttgttctttttgttgacctttattgtttagtggctctccatttgcacagctaaatgacatgttaataaattttccatcctttttttagctctgtcaaagggccttcatctt

SEQ ID NO: 18881 - DNA, 599 bp, Chicken  19866894228181_3
  misc_feature (1)..(125): n is any nucleotide
nnnnnnnnnnnnnnnnnnnnnnnnnnnnnnnnnnnnnnnnnnnnnnnnnnnnnnnnnnnnnnnnnnnnnnnnnnnnnnnnnnnnnnnnnnnnnnnnnnnnnnnnnnnnnnnnnnnnnnnnnnnnnaaccatgacctgaaaatacagagatctctaygaaataaattcctgcaggctcccttgggatatggwagagaacatgcttgattaagctggtgctaacctttcacaatcacacttctctgatatttattccttgaaataatgaaaagggacatgtcagctgtgggaaagctatagwgtactccattgcttgctgctgtccttttctaacttgagtgttcttctcctagagcaaacttaaaaagtaagccctccatttgttctttttgttgacctttattgtttagtggctctccatttgcacagctaaatgacatgttaataaattttccatcctttttttagctctgtcaaagggccttcatcttctcagtaaccaatagtagaacacaagatctttacaggtgcacgaaggcagatttggaggatataaaatccatccttttctgtagagcctctgctctgctgaatgttttg

SEQ ID NO: 18882 - DNA, 600 bp, Chicken  19866894228191_1
gactgtgggaaaaaaaaaggtttgtatgtatgagggagatcaaacagaacctgcaggatctagagacagatggaattcaaggaaaagcaggcagtggggaagtttgaacagtgaattaaaggcttttctgttagctttttatttcccattgtacttaaagttttaagtttctggtgtgtttcagtgttaaaaaactgtcttcagaataaaaatcaggagacaaagggaagagagagggagaggtatctgagagacgcctgtgcagaagttgtagctcaatgtaatatccaataagccttyggaaaagtgctgtgmaragagagaaaaactaaggrgaagcatcatcataaggagaatttgtgcttcacatactgcaaaacctttaacttccctaaaaaaagttaaaaaaaaaaaaagaggcacgggtctccgttacatttattttcttccctagggaacatcagttcattccaaagtggaggcgatgtccgagatgaggatacaagatatgatttagtagcttagcagttagtaatggtgataggaggacggttggactagatgatcttgtaggttcgttccaaccttgtgactctgtga

SEQ ID NO: 18883 - DNA, 600 bp, Chicken  19866894228191_2
aaaggtttgtatgtatgagggagatcaaacagaacctgcaggatctagagacagatggaattcaaggaaaagcaggcagtggggaagtttgaacagtgaattaaaggcttttctgttagctttttatttcccattgtacttaaagttttaagtttctggtgtgtttcagtgttaaaaaactgtcttcagaataaaaatcaggagacaaagggaagagagagggagaggtatctgagagacgcctgtgcagaagttgtagctcaatgtaatatccaataagccttyggaaaagtgctgtgmaragagagaaaaactaaggrgaagcatcatcataaggagaatttgtgcttcacatactgcaaaacctttaacttccctaaaaaaagttaaaaaaaaaaaaagaggcacgggtctccgttacatttattttcttccctagggaacatcagttcattccaaagtggaggcgatgtccgagatgaggatacaagatatgatttagtagcttagcagttagtaatggtgataggaggacggttggactagatgatcttgtaggttcgttccaaccttgtgactctgtgattctatgcaaagatg

SEQ ID NO: 18884 - DNA, 600 bp, Chicken  19866894228191_3
aggtttgtatgtatgagggagatcaaacagaacctgcaggatctagagacagatggaattcaaggaaaagcaggcagtggggaagtttgaacagtgaattaaaggcttttctgttagctttttatttcccattgtacttaaagttttaagtttctggtgtgtttcagtgttaaaaaactgtcttcagaataaaaatcaggagacaaagggaagagagagggagaggtatctgagagacgcctgtgcagaagttgtagctcaatgtaatatccaataagccttyggaaaagtgctgtgmaragagagaaaaactaaggrgaagcatcatcataaggagaatttgtgcttcacatactgcaaaacctttaacttccctaaaaaaagttaaaaaaaaaaaaagaggcacgggtctccgttacatttattttcttccctagggaacatcagttcattccaaagtggaggcgatgtccgagatgaggatacaagatatgatttagtagcttagcagttagtaatggtgataggaggacggttggactagatgatcttgtaggttcgttccaaccttgtgactctgtgattctatgcaaagatgcc

SEQ ID NO: 18885 - DNA, 600 bp, Chicken  19866894228191_4
gagatcaaacagaacctgcaggatctagagacagatggaattcaaggaaaagcaggcagtggggaagtttgaacagtgaattaaaggcttttctgttagctttttatttcccattgtacttaaagttttaagtttctggtgtgtttcagtgttaaaaaactgtcttcagaataaaaatcaggagacaaagggaagagagagggagaggtatctgagagacgcctgtgcagaagttgtagctcaatgtaatatccaataagccttyggaaaagtgctgtgmaragagagaaaaactaaggrgaagcatcatcataaggagaatttgtgcttcacatactgcaaaacctttaacttccctaaaaaaagttaaaaaaaaaaaaagaggcacgggtctccgttacatttattttcttccctagggaacatcagttcattccaaagtggaggcgatgtccgagatgaggatacaagatatgatttagtagcttagcagttagtaatggtgataggaggacggttggactagatgatcttgtaggttcgttccaaccttgtgactctgtgattctatgcaaagatgccacagagaaaaggaaatta

SEQ ID NO: 18886 - DNA, 600 bp, Chicken  19866894228193_1
ttcagtaactgcaattataaatcacttcaaataaaaggcagaatacgtagaaactccttaaataaatgcaatcacttacgtcttccaattcagttgctgcaatggaagttacgtatccagcaaacctgctgtcgctgccgccataaatctcttgatcataatatccggtggagtcgaggcctactccttgtgcttcatcgagggcaggctttttgccttgaatttctcggatctgtgcttcgatatctaggggaaacatacccaaacactcagctctttcttaacgtacacaaaatgcartgcttgtatcatcatgctcagcaaaccacccagtttcaragaccatctctaactaattaactaaacgtaatcatcacatgaaactatamaacaacgatgtatagaaagcagctttcctttaagctgtaatattacccaggacagactaamccagctgtattaaggcccgaagcaaaccattcaaaactattcacagtaacgcatctcatcttccaaagagatggcggggaaagcaattacagcacaacagtatttctcaayacwacatggcacaggkctttctcaattaatgtacttttc

SEQ ID NO: 18887 - DNA, 600 bp, Chicken  19866894228193_2
agaatacgtagaaactccttaaataaatgcaatcacttacgtcttccaattcagttgctgcaatggaagttacgtatccagcaaacctgctgtcgctgccgccataaatctcttgatcataatatccggtggagtcgaggcctactccttgtgcttcatcgagggcaggctttttgccttgaatttctcggatctgtgcttcgatatctaggggaaacatacccaaacactcagctctttcttaacgtacacaaaatgcartgcttgtatcatcatgctcagcaaaccacccagtttcaragaccatctctaactaattaactaaacgtaatcatcacatgaaactatamaacaacgatgtatagaaagcagctttcctttaagctgtaatattacccaggacagactaamccagctgtattaaggcccgaagcaaaccattcaaaactattcacagtaacgcatctcatcttccaaagagatggcggggaaagcaattacagcacaacagtatttctcaayacwacatggcacaggkctttctcaattaatgtacttttctcattaaaagtggctttcgagatattatcaccaattaat

SEQ ID NO: 18888 - DNA, 600 bp, Chicken  19866894228193_3
tcagttgctgcaatggaagttacgtatccagcaaacctgctgtcgctgccgccataaatctcttgatcataatatccggtggagtcgaggcctactccttgtgcttcatcgagggcaggctttttgccttgaatttctcggatctgtgcttcgatatctaggggaaacatacccaaacactcagctctttcttaacgtacacaaaatgcartgcttgtatcatcatgctcagcaaaccacccagtttcaragaccatctctaactaattaactaaacgtaatcatcacatgaaactatamaacaacgatgtatagaaagcagctttcctttaagctgtaatattacccaggacagactaamccagctgtattaaggcccgaagcaaaccattcaaaactattcacagtaacgcatctcatcttccaaagagatggcggggaaagcaattacagcacaacagtatttctcaayacwacatggcacaggkctttctcaattaatgtacttttctcattaaaagtggctttcgagatattatcaccaattaataaactgattttactaatttaaagaaacccgtttaaaggaggtagcgcgtg

SEQ ID NO: 18889 - DNA, 600 bp, Chicken  19866894228193_4
cttgatcataatatccggtggagtcgaggcctactccttgtgcttcatcgagggcaggctttttgccttgaatttctcggatctgtgcttcgatatctaggggaaacatacccaaacactcagctctttcttaacgtacacaaaatgcartgcttgtatcatcatgctcagcaaaccacccagtttcaragaccatctctaactaattaactaaacgtaatcatcacatgaaactatamaacaacgatgtatagaaagcagctttcctttaagctgtaatattacccaggacagactaamccagctgtattaaggcccgaagcaaaccattcaaaactattcacagtaacgcatctcatcttccaaagagatggcggggaaagcaattacagcacaacagtatttctcaayacwacatggcacaggkctttctcaattaatgtacttttctcattaaaagtggctttcgagatattatcaccaattaataaactgattttactaatttaaagaaacccgtttaaaggaggtagcgcgtgagtagccacagctgggaacattccatagcacaacaccttattcaagaacaaaatacctact

SEQ ID NO: 18890 - DNA, 553 bp, Chicken  19866894228193_5
ccaaacactcagctctttcttaacgtacacaaaatgcartgcttgtatcatcatgctcagcaaaccacccagtttcaragaccatctctaactaattaactaaacgtaatcatcacatgaaactatamaacaacgatgtatagaaagcagctttcctttaagctgtaatattacccaggacagactaamccagctgtattaaggcccgaagcaaaccattcaaaactattcacagtaacgcatctcatcttccaaagagatggcggggaaagcaattacagcacaacagtatttctcaayacwacatggcacaggkctttctcaattaatgtacttttctcattaaaagtggctttcgagatattatcaccaattaataaactgattttactaatttaaagaaacccgtttaaaggaggtagcgcgtgagtagccacagctgggaacattccatagcacaacaccttattcaagaacaaaatacctactatactgcaaagctgtattacctttgaacaaacaaaacaacctgacaggccactgcagaacaaga

SEQ ID NO: 18891 - DNA, 550 bp, Chicken  19866894228193_6
aacactcagctctttcttaacgtacacaaaatgcartgcttgtatcatcatgctcagcaaaccacccagtttcaragaccatctctaactaattaactaaacgtaatcatcacatgaaactatamaacaacgatgtatagaaagcagctttcctttaagctgtaatattacccaggacagactaamccagctgtattaaggcccgaagcaaaccattcaaaactattcacagtaacgcatctcatcttccaaagagatggcggggaaagcaattacagcacaacagtatttctcaayacwacatggcacaggkctttctcaattaatgtacttttctcattaaaagtggctttcgagatattatcaccaattaataaactgattttactaatttaaagaaacccgtttaaaggaggtagcgcgtgagtagccacagctgggaacattccatagcacaacaccttattcaagaacaaaatacctactatactgcaaagctgtattacctttgaacaaacaaaacaacctgacaggccactgcagaacaaga

SEQ ID NO: 18892 - DNA, 537 bp, Chicken  19866894228193_7
ttcttaacgtacacaaaatgcartgcttgtatcatcatgctcagcaaaccacccagtttcaragaccatctctaactaattaactaaacgtaatcatcacatgaaactatamaacaacgatgtatagaaagcagctttcctttaagctgtaatattacccaggacagactaamccagctgtattaaggcccgaagcaaaccattcaaaactattcacagtaacgcatctcatcttccaaagagatggcggggaaagcaattacagcacaacagtatttctcaayacwacatggcacaggkctttctcaattaatgtacttttctcattaaaagtggctttcgagatattatcaccaattaataaactgattttactaatttaaagaaacccgtttaaaggaggtagcgcgtgagtagccacagctgggaacattccatagcacaacaccttattcaagaacaaaatacctactatactgcaaagctgtattacctttgaacaaacaaaacaacctgacaggccactgcagaacaaga

SEQ ID NO: 18893 - DNA, 599 bp, Chicken  19866894228199_1
  misc_feature (1)..(134): n is any nucleotide
nnnnnnnnnnnnnnnnnnnnnnnnnnnnnnnnnnnnnnnnnnnnnnnnnnnnnnnnnnnnnnnnnnnnnnnnnnnnnnnnnnnnnnnnnnnnnnnnnnnnnnnnnnnnnnnnnnnnnnnnnnnnnnnnnnnnnntgtccagaactggacacagcactgcaggtgtggcctcaccaatgctgaacagacagttaggattacctcccctgacctgctggcaatatttgcctaatgcagctaaggacaccattagcatcctttgtgacaagagctcatcggtagctcatgtttgacttggtgrtcaaagtctacttctgggacaactatgtatgtgaataggtgtgttgagtacaaagatctcataccttttatatctgcttgaaaccatcctggaggagtcctgaaagaaagagaaagcaaaaactcattagtaacattytattttttgtatttccgtaatactttatcaccccatagaaaatgaaccttacagttaagaggaggcccaagcctgaaacagctgctgtacaactcaattttgcactgttttgctgtcaggacagacagaatactaggattactgtcactgtactatggctt

SEQ ID NO: 18894 - DNA, 600 bp, Chicken  19866894228199_2
cagaactggacacagcactgcaggtgtggcctcaccaatgctgaacagacagttaggattacctcccctgacctgctggcaatatttgcctaatgcagctaaggacaccattagcatcctttgtgacaagagctcatcggtagctcatgtttgacttggtgrtcaaagtctacttctgggacaactatgtatgtgaataggtgtgttgagtacaaagatctcataccttttatatctgcttgaaaccatcctggaggagtcctgaaagaaagagaaagcaaaaactcattagtaacattytattttttgtatttccgtaatactttatcaccccatagaaaatgaaccttacagttaagaggaggcccaagcctgaaacagctgctgtacaactcaattttgcactgttttgctgtcaggacagacagaatactaggattactgtcactgtactatggcttttcaacacsagctctgaagccttaatgacaatttctggttattttttaaaatgtgatgcacttaccatgctctgcagtgtcccaggtattaccgtaacagtgtacattgtaactataactactatttgaaaacatttgt

SEQ ID NO: 18895 - DNA, 600 bp, Chicken  19866894228199_3
tacttctgggacaactatgtatgtgaataggtgtgttgagtacaaagatctcataccttttatatctgcttgaaaccatcctggaggagtcctgaaagaaagagaaagcaaaaactcattagtaacattytattttttgtatttccgtaatactttatcaccccatagaaaatgaaccttacagttaagaggaggcccaagcctgaaacagctgctgtacaactcaattttgcactgttttgctgtcaggacagacagaatactaggattactgtcactgtactatggcttttcaacacsagctctgaagccttaatgacaatttctggttattttttaaaatgtgatgcacttaccatgctctgcagtgtcccaggtattaccgtaacagtgtacattgtaactataactactatttgaaaacatttgtgcattttggtacctgttaattagctatttgttaatttctttgtccagaagtaacagatcaaaactgctctgattctcctggcaccactgctgtccttctgaacagaagaagctggcaaggaggacagggttgggacccaaaccaagttactgcattaccagctgggtggg

SEQ ID NO: 18896 - DNA, 600 bp, Chicken  19866894228199_4
taatttctttgtccagaagtaacagatcaaaactgctctgattctcctggcaccactgctgtccttctgaacagaagaagctggcaaggaggacagggttgggacccaaaccaagttactgcattaccagctgggtgggtggtgactatctacaggtacgccctttgtcatgctaacccaggtactgcaacctggctcacctcagattcactgaagtggtattctcctggcatttgctgtaaaaaaaagtaggctagaagtcttgacacgtctgttttgtgcactcaaatgtacaaatamgaaatagaaaagctgaagcaatgtattttcatcataatgctacacttgtagtttcagtaactgcctgatcacatacaaaattaagacatgtttcagctggttaaaagatagctcagatgagacagtaaatccacaaacattttttaggatgttgtaagaaggacgtgaaccaattgttttattagtcatacacaaaactctccccagcaccagtaaatattaggtaaaaagtcagaaaacaatatttaagtagttcatgaactgaacaattgcccttactgggaaaaaaaataagcagag

SEQ ID NO: 18897 - DNA, 600 bp, Chicken  19866894228214_1
tttagtgttagatcagtgcacatgcagagcatttagtctaccaaaatactgataagcagagaactagattaatgcagtgaacacccagggccagttccaaacctcactcaaactctgctgataccagtaggtcataatcctcccacttggacagtgaagctattataccacagcaagacaaacagatacagatcagaaggtataggcacatcaggtctctttttagatttagagagctttatttccatctcattttgatatttttttctttgaagattttcctggtggaacatgtgggtwacagaaaactgactgatataaactctttggtgcagtcactaccacagatgatcctagatgtgcacaggctttcctaacattgtacagcttctaaaatttttctagacatcagagacatagaagatctactaagtgatccagcccctttcccagtctcatttataagctgaatttctctctgcttcattcaatctggttttaaactgtctcaagcaaagtggcttcctctacttcctgcaagagacagttcagtgctctaatagatcttgctgacaggatgtttcccctgatattctgcat

SEQ ID NO: 18898 - DNA, 599 bp, Chicken  19866894228219_1
  misc_feature (1)..(14): n is any nucleotide
nnnnnnnnnnnnnntaataaaataagggaaataaagtggaataatatggctggtctaacttgatcttactgcttagagacgttcgtagatctttcctgtaatgtaaattaaataatgctaataatcgaggactataaaagtgcataaaggagagcagttcacacatcagtgttctgtgaagtgcacatcagctccaagttgctatttaaagagcaaaattagaaatactacctcagttgaattaattgaaagtctctataaatcagtgtagcataaaatttgtttttacttccttaaatkataggttttatgcatgaaawgtgagcacatcacagaagtttggtcaatgaagttgtcctgcagtattaggaaattgagatactttacaactaaaggaaagtgcatgtaaaaggcgtgaaacttcagtgtataaaagggaagggatgactcttgcaaacttatcagaactggcgaattactctacccctggcacactgagcttgcgtgaccagtgatgagtaaagctttttgaaattggaaataataaaacccattcccattcctgcgtgggtcacaagaaattgaacacattagacgct

SEQ ID NO: 18899 - DNA, 600 bp, Chicken  19866894228219_2
aataagggaaataaagtggaataatatggctggtctaacttgatcttactgcttagagacgttcgtagatctttcctgtaatgtaaattaaataatgctaataatcgaggactataaaagtgcataaaggagagcagttcacacatcagtgttctgtgaagtgcacatcagctccaagttgctatttaaagagcaaaattagaaatactacctcagttgaattaattgaaagtctctataaatcagtgtagcataaaatttgtttttacttccttaaatkataggttttatgcatgaaawgtgagcacatcacagaagtttggtcaatgaagttgtcctgcagtattaggaaattgagatactttacaactaaaggaaagtgcatgtaaaaggcgtgaaacttcagtgtataaaagggaagggatgactcttgcaaacttatcagaactggcgaattactctacccctggcacactgagcttgcgtgaccagtgatgagtaaagctttttgaaattggaaataataaaacccattcccattcctgcgtgggtcacaagaaattgaacacattagacgcttaaacacagcagaaagttgtc

SEQ ID NO: 18900 - DNA, 600 bp, Chicken  19866894228221_1
aggattcaacctaattatccccagtcataagttcagtaaccttaaagcactctttaacatagagagccacgccaccaccccctccttcttgcctgtccttcctgaagagtttgtaaccatccattgcagcactccagtcatggaagtggtcccaccacgtttccgtaatggcaactaggtcatagattgcctgccgcacaatggcttctaactcttcttgtttgttgctcatgctgtgtgcattggtatagacacactttagctgggcctctcgcctcacccctaatcccattattgctyccccaggatcatctctagcaggcctggttttatccccttcccccctcatatctagtttaaagacctctctacaaagcccaccagctcctgggcaaggatccatttccccttttgagacaggcgatacccatctgcagacctcaggccaggtgccaagtagaccacctcatgatcaaagaacctgaggttcttgggtttgcaccagcctctcagccatgtgtttatgcgatgggttttcctggtcattgcattgtctttccctgccactgtaggaaaacctgcaaatactacttgtatgcc

SEQ ID NO: 18901 - DNA, 600 bp, Chicken  19866894228222_1
ttttttatttgcactgaagggagcaaactttccatatgcagaagaaaaagaagcaaagggattcagaatctgcagcaacggcattaacacaattactcagatgcccatgcacccagccaccgctatactgacagctataccttggtaaggaaggaagaagcagcctgaatatggcaagcaagagtttctgggctgattatctgggaaatttgatgagtgaagcaaatcctaaaatgtgctttctttcctcattccttttttttttgtgaccatgaagaccatggatatcttgtgatgctmcattccccttgggctgctttttccagcatatggggctctgtgccctggggctcgcaacatttctgaccatgcaagcaataaagtttctcagccctctgctattagggacagaytactacagcacattttcctcacctttcaaaaggatgttaaaactcttggcagtcagtattgggagagtcagtgcagtcggttctcctgctgttttacaaatccattaatgcttcatagtaaatccagcagtgttcaaatccctgtacacaaccaactttcaagagcaagaggatgaagtaagatctg

SEQ ID NO: 18902 - DNA, 600 bp, Chicken  19866894228222_2
cagccaccgctatactgacagctataccttggtaaggaaggaagaagcagcctgaatatggcaagcaagagtttctgggctgattatctgggaaatttgatgagtgaagcaaatcctaaaatgtgctttctttcctcattccttttttttttgtgaccatgaagaccatggatatcttgtgatgctmcattccccttgggctgctttttccagcatatggggctctgtgccctggggctcgcaacatttctgaccatgcaagcaataaagtttctcagccctctgctattagggacagaytactacagcacattttcctcacctttcaaaaggatgttaaaactcttggcagtcagtattgggagagtcagtgcagtcggttctcctgctgttttacaaatccattaatgcttcatagtaaatccagcagtgttcaaatccctgtacacaaccaactttcaagagcaagaggatgaagtaagatctgttaccgagactgcatttactaaacagaatatgaggtactttgccaaaaagcgggaaaaataagcaaaataagtaccaaaaacgttagctggattttgttctgaattacactta

SEQ ID NO: 18903 - DNA, 599 bp, Chicken  19866894228225_1
  misc_feature (1)..(180): n is any nucleotide
nnnnnnnnnnnnnnnnnnnnnnnnnnnnnnnnnnnnnnnnnnnnnnnnnnnnnnnnnnnnnnnnnnnnnnnnnnnnnnnnnnnnnnnnnnnnnnnnnnnnnnnnnnnnnnnnnnnnnnnnnnnnnnnnnnnnnnnnnnnnnnnnnnnnnnnnnnnnnnnnnnnnnnnnnnnnnnnnnnnntgcaaagttttaatcattcccagaagggatcgcagtggtaagtatagtagcactgggatcccacaaaaccagatcctctttcctcttcatgaggtataaggagaatttaccctgttaagwaaagctgacagctctagttctttcttagtgaacacctgcattttcagtcttcccattctctatcccacaggtgatcgtttatatcccttccacagatcattattactgtgattagcctatgtaatcttagctgaaagatcttctgcttacttcccctgtgactacagtttagatttcttaagttgtgactgtgctctgggaaggctctatggtaaggacagtgcagtaggaatggaattgggcctggtcttgccatcacaatataaggagaggaactgkgatgcaacaactgtagttac

SEQ ID NO: 18904 - DNA, 600 bp, Chicken  19866894228225_2
ggagaatttaccctgttaagwaaagctgacagctctagttctttcttagtgaacacctgcattttcagtcttcccattctctatcccacaggtgatcgtttatatcccttccacagatcattattactgtgattagcctatgtaatcttagctgaaagatcttctgcttacttcccctgtgactacagtttagatttcttaagttgtgactgtgctctgggaaggctctatggtaaggacagtgcagtaggaatggaattgggcctggtcttgccatcacaatataaggagaggaactgkgatgcaacaactgtagttactcttctggtcatgcagaggaacccaggagagtgaacacaggatgggacagtcatgcatggtctgagaagggccttctacagaagggaatctcttttaaaaagggaaaatgagggaataccagcactaatgtgcacctggcaatggggctggggagggctacggtgttggggtgcaggaggactgctctgctgcgccgcccagagaccctcctctgtgggtgtcattgctgagacctcacagcttttggagtattttcataatgttacagcttctgaattc

SEQ ID NO: 18905 - DNA, 600 bp, Chicken  19866894228225_3
tgaattcatgtgatcccattaaaaatacagtttctgttcaagaatgaaaagacatttctagctcttgggcttgaaaatgtcaactcaaaaacagaaggctaataaaaataaacattttgctattttttggaagaaaaacgaacatgattatagggaggctttttttagtgtgtttttgaatattttcaggacagagaacaactttctgtgcatttgggtaaacattgcaggatctttctaagatactgcactttctgtagggttgccatggtacagacatacaggcagggaagcaaaggrcatcagaccctaattgcacaatgccctgctccactgtactctcctgcagctgcacagtgcgggtatttcctgcacaaaggagcacatggaagctttaaatgttttaaaaaatggaaaatagagtgagatggggagagtgagctgagtgtatatggaaggatgtcaggccaaaagtgaactgatgtacaccgagcactgttgcagaaagtcaggatgcactggcatacatggtgtgactactgaacagcacagaacaattaattcccagttccttaacaagtttttgctcttggtggcagg

SEQ ID NO: 18906 - DNA, 600 bp, Chicken  19866894228226_1
gaggtgaagtagaaggcaggcaacagactactgaggaggcaaaggtaagcagctggaggaaaataagagaagaaaagtggttgtggaacacgttggccctttgagtggggcagcaggctcacataggaattcagtgctcaatgacttccttgtcttggtcttcacaaataaaatttcacagtcctttgttttctgaaacagggttcagggaggagagaagtgagtggaagagaactgaatcagggatcttctcagaagtcttgaactggtcccaggaccagacaggaggcatctggaggrtactgacaagtatgactaatgttaccacaaggctcttgcccatcatcttcgcaaaattgtgtcaactagkctaggtccctagtaactgaggaaaggtgaaggttgtcttcattttcgaaaagagctggagggaaggttgggggctgttcaatcagcatccctgtaaaaacaatgaagcaattcctgtgcacaatagctcctatttaagtattgtgtacactaagattggctaatcagttatgtttgcatccacatcatcatacttaagaaattgcagctcaaagtctctaaatagcttat

SEQ ID NO: 18907 - DNA, 600 bp, Chicken  19866894228226_2
agaaaagtggttgtggaacacgttggccctttgagtggggcagcaggctcacataggaattcagtgctcaatgacttccttgtcttggtcttcacaaataaaatttcacagtcctttgttttctgaaacagggttcagggaggagagaagtgagtggaagagaactgaatcagggatcttctcagaagtcttgaactggtcccaggaccagacaggaggcatctggaggrtactgacaagtatgactaatgttaccacaaggctcttgcccatcatcttcgcaaaattgtgtcaactagkctaggtccctagtaactgaggaaaggtgaaggttgtcttcattttcgaaaagagctggagggaaggttgggggctgttcaatcagcatccctgtaaaaacaatgaagcaattcctgtgcacaatagctcctatttaagtattgtgtacactaagattggctaatcagttatgtttgcatccacatcatcatacttaagaaattgcagctcaaagtctctaaatagcttatagcattcagcaaggaggtaggaagtggatgccaccatccaggcagtacttctcaggaagggtttgcctcc

SEQ ID NO: 18908 - DNA, 600 bp, Chicken  19866894228230_1
taaatgacaaaggtcaatgttatgtttgtcacattcaggtaaaatgtgctgtatttttttttttttttttctgctgtcaagaaaagagtgtgggatcatctttttgtgtatgtgagtgctgaaaattactactttgtatacagagagaataattcttgatgttccaagagacaggatacagaattactggtaacttccacttgccctggcagcatgcaaagtaaaacagagtatatatatttgtttaaagtacctgaaaataacttcagaaattccaagttgtgttttctttgtttctcycccaagatctgacaaggccagcatatcatggctttgcaaattgttttctagtaaagtatacatatatccatatatakagatggatagatatmgttgaggcagtgaaagaaaaaatattgcaaatttagaactacacccataattgaagtagaagtacytctgagagattactgttgacagatcacagagtgatyttacatcaaataaacaaagttgtcaaagggcaggtagagaacctgtgggtggtagcatcaaatattagtttttaacaagattagattcacactggtagagtggaaa

SEQ ID NO: 18909 - DNA, 600 bp, Chicken  19866894228230_10
aagtctctgctttctttccactttctcctatcactcagcccacaggccttaaattagtgcttatacagggacatggcttatggtgaagaagctctttactatggttatagtgacagttgcaagaaaatgtttatgtccaccacgggwgattctgggaaataattgatgatttgccatcaatcaaaccaacttacttacatggttatagaaagttgaagtcagtagcagccagagataaaagtgtttcatggtcttttacacatgtctgacrgctgaattttaccgctcacagatgctaarttatacaggatttgtctatttacttatttatgtattttctagcatttaactcagctgcacaagttttaaagatagtagttcaaaggtttaattctctattatcctgaattgtgggtattcttaagtgaagaaagtgttgtattctgatctagaagctatttgtaattaccttccactgttgtgaatacaaattaaaagcctcttttttgatgtttacagcctgttggttatagattagagatataaaaaagtcattcaccttaacaaagaaactcagagcacttttagtgacaagaaaag

SEQ ID NO: 18910 - DNA, 600 bp, Chicken  19866894228230_2
caagaaaagagtgtgggatcatctttttgtgtatgtgagtgctgaaaattactactttgtatacagagagaataattcttgatgttccaagagacaggatacagaattactggtaacttccacttgccctggcagcatgcaaagtaaaacagagtatatatatttgtttaaagtacctgaaaataacttcagaaattccaagttgtgttttctttgtttctcycccaagatctgacaaggccagcatatcatggctttgcaaattgttttctagtaaagtatacatatatccatatatakagatggatagatatmgttgaggcagtgaaagaaaaaatattgcaaatttagaactacacccataattgaagtagaagtacytctgagagattactgttgacagatcacagagtgatyttacatcaaataaacaaagttgtcaaagggcaggtagagaacctgtgggtggtagcatcaaatattagtttttaacaagattagattcacactggtagagtggaaaatcctgttctgacagtcctaggcacaaatgcactggccagatgatagctataccctgttcatcaccatttgcatycc

SEQ ID NO: 18911 - DNA, 600 bp, Chicken  19866894228230_3
ggatcatctttttgtgtatgtgagtgctgaaaattactactttgtatacagagagaataattcttgatgttccaagagacaggatacagaattactggtaacttccacttgccctggcagcatgcaaagtaaaacagagtatatatatttgtttaaagtacctgaaaataacttcagaaattccaagttgtgttttctttgtttctcycccaagatctgacaaggccagcatatcatggctttgcaaattgttttctagtaaagtatacatatatccatatatakagatggatagatatmgttgaggcagtgaaagaaaaaatattgcaaatttagaactacacccataattgaagtagaagtacytctgagagattactgttgacagatcacagagtgatyttacatcaaataaacaaagttgtcaaagggcaggtagagaacctgtgggtggtagcatcaaatattagtttttaacaagattagattcacactggtagagtggaaaatcctgttctgacagtcctaggcacaaatgcactggccagatgatagctataccctgttcatcaccatttgcatycctggaatagtcataag

SEQ ID NO: 18912 - DNA, 600 bp, Chicken  19866894228230_4
atgttccaagagacaggatacagaattactggtaacttccacttgccctggcagcatgcaaagtaaaacagagtatatatatttgtttaaagtacctgaaaataacttcagaaattccaagttgtgttttctttgtttctcycccaagatctgacaaggccagcatatcatggctttgcaaattgttttctagtaaagtatacatatatccatatatakagatggatagatatmgttgaggcagtgaaagaaaaaatattgcaaatttagaactacacccataattgaagtagaagtacytctgagagattactgttgacagatcacagagtgatyttacatcaaataaacaaagttgtcaaagggcaggtagagaacctgtgggtggtagcatcaaatattagtttttaacaagattagattcacactggtagagtggaaaatcctgttctgacagtcctaggcacaaatgcactggccagatgatagctataccctgttcatcaccatttgcatycctggaatagtcataagatccaagagagcttgcacaaacttattatccagatcacagctgcatctacaaacaggctgatctaa

SEQ ID NO: 18913 - DNA, 600 bp, Chicken  19866894228230_5
ttccacttgccctggcagcatgcaaagtaaaacagagtatatatatttgtttaaagtacctgaaaataacttcagaaattccaagttgtgttttctttgtttctcycccaagatctgacaaggccagcatatcatggctttgcaaattgttttctagtaaagtatacatatatccatatatakagatggatagatatmgttgaggcagtgaaagaaaaaatattgcaaatttagaactacacccataattgaagtagaagtacytctgagagattactgttgacagatcacagagtgatyttacatcaaataaacaaagttgtcaaagggcaggtagagaacctgtgggtggtagcatcaaatattagtttttaacaagattagattcacactggtagagtggaaaatcctgttctgacagtcctaggcacaaatgcactggccagatgatagctataccctgttcatcaccatttgcatycctggaatagtcataagatccaagagagcttgcacaaacttattatccagatcacagctgcatctacaaacaggctgatctaaaacctaacagttgcaaaatgtgtctctacaaagttc

SEQ ID NO: 18914 - DNA, 600 bp, Chicken  19866894228230_6
akagatggatagatatmgttgaggcagtgaaagaaaaaatattgcaaatttagaactacacccataattgaagtagaagtacytctgagagattactgttgacagatcacagagtgatyttacatcaaataaacaaagttgtcaaagggcaggtagagaacctgtgggtggtagcatcaaatattagtttttaacaagattagattcacactggtagagtggaaaatcctgttctgacagtcctaggcacaaatgcactggccagatgatagctataccctgttcatcaccatttgcatycctggaatagtcataagatccaagagagcttgcacaaacttattatccagatcacagctgcatctacaaacaggctgatctaaaacctaacagttgcaaaatgtgtctctacaaagttccaaactgaaaactcggaacgtgactgcactcttggagagtaaagaatgattaaagctttcccatatagagcacacagggacaatcacattcccgctttggtgtctgcaatgttcagaaagagggaacagctggaatcaccagaagtcattcaggctggatggggctttggmcacctgatgg

SEQ ID NO: 18915 - DNA, 600 bp, Chicken  19866894228230_7
catttgcatycctggaatagtcataagatccaagagagcttgcacaaacttattatccagatcacagctgcatctacaaacaggctgatctaaaacctaacagttgcaaaatgtgtctctacaaagttccaaactgaaaactcggaacgtgactgcactcttggagagtaaagaatgattaaagctttcccatatagagcacacagggacaatcacattcccgctttggtgtctgcaatgttcagaaagagggaacagctggaatcaccagaagtcattcaggctggatggggctttggmcacctgatggagctgtaggtgtccctgttcatttcagaggagttggactagatggtctttaactgtcccttcagaataaaatgatcatagtagtccaaatagcaactgaacatggggctcctaagcttccaatacaatgaggaaaagcctgggctctgttatcatctgtttccttggcactacgtacactggaagcctctgatgcccagattttccagggacattccacctggcaaactctcttaagagctacaaactgagtctcttttccaggacagcctgctctcagggctgaacctg

SEQ ID NO: 18916 - DNA, 600 bp, Chicken  19866894228230_8
tacaacctaattgatgtactcaactgctgttttctgaaaaagatttcttccatttgagtattttcattcctttcagcttttcagagtgtttgcaatcacatcagtattactgaattttatcaagctcttaactcccaagttaatctcatacgaaagtctctgctttctttccactttctcctatcactcagcccacaggccttaaattagtgcttatacagggacatggcttatggtgaagaagctctttactatggttatagtgacagttgcaagaaaatgtttatgtccaccacgggwgattctgggaaataattgatgatttgccatcaatcaaaccaacttacttacatggttatagaaagttgaagtcagtagcagccagagataaaagtgtttcatggtcttttacacatgtctgacrgctgaattttaccgctcacagatgctaarttatacaggatttgtctatttacttatttatgtattttctagcatttaactcagctgcacaagttttaaagatagtagttcaaaggtttaattctctattatcctgaattgtgggtattcttaagtgaagaaagtgttgtattctga

SEQ ID NO: 18917 - DNA, 600 bp, Chicken  19866894228230_9
ctcttaactcccaagttaatctcatacgaaagtctctgctttctttccactttctcctatcactcagcccacaggccttaaattagtgcttatacagggacatggcttatggtgaagaagctctttactatggttatagtgacagttgcaagaaaatgtttatgtccaccacgggwgattctgggaaataattgatgatttgccatcaatcaaaccaacttacttacatggttatagaaagttgaagtcagtagcagccagagataaaagtgtttcatggtcttttacacatgtctgacrgctgaattttaccgctcacagatgctaarttatacaggatttgtctatttacttatttatgtattttctagcatttaactcagctgcacaagttttaaagatagtagttcaaaggtttaattctctattatcctgaattgtgggtattcttaagtgaagaaagtgttgtattctgatctagaagctatttgtaattaccttccactgttgtgaatacaaattaaaagcctcttttttgatgtttacagcctgttggttatagattagagatataaaaaagtcattcaccttaacaaagaa

SEQ ID NO: 18918 - DNA, 600 bp, Chicken  19866894228235_1
actcttagaatcctctcacttgccctgtgctgcgccagccctgatatgtaggactacagctgtctaaagagcaggaaggacagggacactgagtgtcccgctccaggcctgcagatgggaccctggaccctgtctctctggaagcttcatgctgccattcatctgacttgcctccttccagcactgtgtgcccaggcatcgctgtgcatgtggcggcgtgccaacagccattcctggctctcagtcagtgatgtgctagggtgatgaatggcagagggaacagcattactttgctgagcktgtgaagaacatttcacacccaggcaacactgagcgaatctgttctgctgggacagcatctgaccccacacatctttccctcgcaggctgtgctggtgccaatgcatgcagccttgtgggagaaggcacaagggtgctctgcatcctcaagagatctgtgtccaatggggactggcagctctgggagctaaggcaggcaggcaagctgctgaaaatgacattgcctgtgacaaatatattactgatttcttcatctgtcatagagcagtgcctcgaccatctgctgtcacttagcacttg

SEQ ID NO: 18919 - DNA, 599 bp, Chicken  19866894228239_1
  misc_feature (1)..(80): n is any nucleotide
nnnnnnnnnnnnnnnnnnnnnnnnnnnnnnnnnnnnnnnnnnnnnnnnnnnnnnnnnnnnnnnnnnnnnnnnnnnnnnnnagctggtcattgtttccatgtcagctgagatccactcatactgagagaattcacaacctttgttggcttgctttgtacggtcggagtagtgaaggatgacaagagtgagcgagcggatgtcagacctgggtcttagtggtgcttaaatcaaatagggcgtagtggcacacagcttcttcaaagcctccaggttgtaatgagccataggggctgcctgcasctctgccctgcrcagagtgggatgtaggctgcctggctgrggatgcagkctcagagctgggtgcaggattgggtaggctctgcatggagcataggcatcctgccctgggcagtgtgggtatgggaggtgattcatgggagyrgagatgtggcggggagggctggagggaggcagagatccagtgtggggaatgcagtcgagggccgaattgtggtttgggyacaggctgcaggaagcaggcttgggatctcgcttgggagggtgggagcagggggagaagagtgtgactaggggtggga

SEQ ID NO: 18920 - DNA, 599 bp, Chicken  19866894228239_2
  misc_feature (1)..(68): n is any nucleotide
nnnnnnnnnnnnnnnnnnnnnnnnnnnnnnnnnnnnnnnnnnnnnnnnnnnnnnnnnnnnnnnnnnnnagctggtcattgtttccatgtcagctgagatccactcatactgagagaattcacaacctttgttggcttgctttgtacggtcggagtagtgaaggatgacaagagtgagcgagcggatgtcagacctgggtcttagtggtgcttaaatcaaatagggcgtagtggcacacagcttcttcaaagcctccaggttgtaatgagccataggggctgcctgcasctctgccctgcrcagagtgggatgtaggctgcctggctgrggatgcagkctcagagctgggtgcaggattgggtaggctctgcatggagcataggcatcctgccctgggcagtgtgggtatgggaggtgattcatgggagyrgagatgtggcggggagggctggagggaggcagagatccagtgtggggaatgcagtcgagggccgaattgtggtttgggyacaggctgcaggaagcaggcttgggatctcgcttgggagggtgggagcagggggagaagagtgtgactaggggtgggagtccctgccagt

SEQ ID NO: 18921 - DNA, 599 bp, Chicken  19866894228239_3
  misc_feature (1)..(40): n is any nucleotide
nnnnnnnnnnnnnnnnnnnnnnnnnnnnnnnnnnnnnnnnagctggtcattgtttccatgtcagctgagatccactcatactgagagaattcacaacctttgttggcttgctttgtacggtcggagtagtgaaggatgacaagagtgagcgagcggatgtcagacctgggtcttagtggtgcttaaatcaaatagggcgtagtggcacacagcttcttcaaagcctccaggttgtaatgagccataggggctgcctgcasctctgccctgcrcagagtgggatgtaggctgcctggctgrggatgcagkctcagagctgggtgcaggattgggtaggctctgcatggagcataggcatcctgccctgggcagtgtgggtatgggaggtgattcatgggagyrgagatgtggcggggagggctggagggaggcagagatccagtgtggggaatgcagtcgagggccgaattgtggtttgggyacaggctgcaggaagcaggcttgggatctcgcttgggagggtgggagcagggggagaagagtgtgactaggggtgggagtccctgccagtggcacccagctgtgtgcagcaggaaggc

SEQ ID NO: 18922 - DNA, 599 bp, Chicken  19866894228239_4
  misc_feature (1)..(31): n is any nucleotide
nnnnnnnnnnnnnnnnnnnnnnnnnnnnnnnagctggtcattgtttccatgtcagctgagatccactcatactgagagaattcacaacctttgttggcttgctttgtacggtcggagtagtgaaggatgacaagagtgagcgagcggatgtcagacctgggtcttagtggtgcttaaatcaaatagggcgtagtggcacacagcttcttcaaagcctccaggttgtaatgagccataggggctgcctgcasctctgccctgcrcagagtgggatgtaggctgcctggctgrggatgcagkctcagagctgggtgcaggattgggtaggctctgcatggagcataggcatcctgccctgggcagtgtgggtatgggaggtgattcatgggagyrgagatgtggcggggagggctggagggaggcagagatccagtgtggggaatgcagtcgagggccgaattgtggtttgggyacaggctgcaggaagcaggcttgggatctcgcttgggagggtgggagcagggggagaagagtgtgactaggggtgggagtccctgccagtggcacccagctgtgtgcagcaggaaggcagctgcctt

SEQ ID NO: 18923 - DNA, 600 bp, Chicken  19866894228239_5
gttggcttgctttgtacggtcggagtagtgaaggatgacaagagtgagcgagcggatgtcagacctgggtcttagtggtgcttaaatcaaatagggcgtagtggcacacagcttcttcaaagcctccaggttgtaatgagccataggggctgcctgcasctctgccctgcrcagagtgggatgtaggctgcctggctgrggatgcagkctcagagctgggtgcaggattgggtaggctctgcatggagcataggcatcctgccctgggcagtgtgggtatgggaggtgattcatgggagyrgagatgtggcggggagggctggagggaggcagagatccagtgtggggaatgcagtcgagggccgaattgtggtttgggyacaggctgcaggaagcaggcttgggatctcgcttgggagggtgggagcagggggagaagagtgtgactaggggtgggagtccctgccagtggcacccagctgtgtgcagcaggaaggcagctgcctttgagaccccttgttttatgctttttttctctggggtggggctggtgagtgtgtgtttgtgtgtacagaaaaccttcacgtgcaacctgctgca

SEQ ID NO: 18924 - DNA, 600 bp, Chicken  19866894228239_6
ttggcttgctttgtacggtcggagtagtgaaggatgacaagagtgagcgagcggatgtcagacctgggtcttagtggtgcttaaatcaaatagggcgtagtggcacacagcttcttcaaagcctccaggttgtaatgagccataggggctgcctgcasctctgccctgcrcagagtgggatgtaggctgcctggctgrggatgcagkctcagagctgggtgcaggattgggtaggctctgcatggagcataggcatcctgccctgggcagtgtgggtatgggaggtgattcatgggagyrgagatgtggcggggagggctggagggaggcagagatccagtgtggggaatgcagtcgagggccgaattgtggtttgggyacaggctgcaggaagcaggcttgggatctcgcttgggagggtgggagcagggggagaagagtgtgactaggggtgggagtccctgccagtggcacccagctgtgtgcagcaggaaggcagctgcctttgagaccccttgttttatgctttttttctctggggtggggctggtgagtgtgtgtttgtgtgtacagaaaaccttcacgtgcaacctgctgcag

SEQ ID NO: 18925 - DNA, 564 bp, Chicken  19866894228239_7
cttaaatcaaatagggcgtagtggcacacagcttcttcaaagcctccaggttgtaatgagccataggggctgcctgcasctctgccctgcrcagagtgggatgtaggctgcctggctgrggatgcagkctcagagctgggtgcaggattgggtaggctctgcatggagcataggcatcctgccctgggcagtgtgggtatgggaggtgattcatgggagyrgagatgtggcggggagggctggagggaggcagagatccagtgtggggaatgcagtcgagggccgaattgtggtttgggyacaggctgcaggaagcaggcttgggatctcgcttgggagggtgggagcagggggagaagagtgtgactaggggtgggagtccctgccagtggcacccagctgtgtgcagcaggaaggcagctgcctttgagaccccttgttttatgctttttttctctggggtggggctggtgagtgtgtgtttgtgtgtacagaaaaccttcacgtgcaacctgctgcagagaagacagatgtttctcccatatgagggaagctgtcagataa

SEQ ID NO: 18926 - DNA, 600 bp, Chicken  19866894228241_1
agaaactagtttattgcttttaaatgcttcaattgctgctgtgattcatcaatagaagagcgggctacagcatgcagggaggtttgtttggccagctgtgagcctgagcaagtccagactcatgtaaccagtcatcactttctcactgttaatatatccacacaaagctttctgttgttgttcttgggaagagtggatgaggatggagggagtatatggatgaaatatagttccaggacagaaagtgtcatttgatcagcatgtgaagaggcatgggagaagaacatttgcagtgtgctwtcttatacggagattgctaaatcctgactgcttgaatattccggacatacttaagaggttgcaaattgataattaacttttgtgtccaacattccagggctgaaatcttgtttccaagcttattcattcaggatggctgaagtgtggccattaaaaaagacacatttattctttttatctagtttttctgtctctttgtatttcaaaaacgttaaagaaaactacatctcattttctaagcaaaacagtaaatcatagttatttcaattttaactttaataaaaattatgcttggtatct

SEQ ID NO: 18927 - DNA, 600 bp, Chicken  19866894228250_1
gactttgaactagttttatgttttctgtgcccagggtaaatatgtacaggtggaaaaaaacaacagtctgcttgtctgaagttcaggttcatatgtcaggggatgtggtcgttacgtaaatcacggatgttttgtgtaacttactttcttcatatcgaggacagtaagttctagaaggaaagatgatctggctgtactgttgggggtacaaaaggcccattcttgttgtaggctaatgatatggttggctttatctaaataaaacagattgcagtttcctctgtatgaagtacttggatmcagcgaaaatcaagtagaacccatcagaaagtgaaaacagctggactgaaaactgaaaataaattactgatctttgggaccagtaagggaaaaaaagtattttacatcttttttttttaaagcagtttgtgggaaagctaagctagatgctgcttgtcaagttaaagtgatggtttggaatgtttctgtgttcagaagctatgtcctgctgtggctggttgttaggatgttgattcaatagcaaccaaaaagcagtcactggagtttgattgtgtaagcgttataatggtagaagtgaat

SEQ ID NO: 18928 - DNA, 600 bp, Chicken  19866894228250_2
taggatgttgattcaatagcaaccaaaaagcagtcactggagtttgattgtgtaagcgttataatggtagaagtgaatgagggttcaaaccccctagagagtgcagatggtgtctgagaaaatgttggaacaaaatgtttccttgttacatcatgatctgccctcttgagtgagtctggctgctgaagggagcagaagattattagaagaaataaatgctggagacatatcagagacctgctagagtgtatgtggggaggtgaggagttccagttttagcttgatatgactgcagtggaragaatttataaatgtggaggaggtggacttcctttggtaagcagtgactcagactgacacacatgagatgccagtaggttgactctaggaactgtccaagtggggtggtgtgacattcacaatgcttgttagaatgcaacaaactcagtggaattcattgtgagcttggcarcccgtcgagtggacagaggggatcctgtctcacagggtcagttgctgtccaggcagagtcaggaagtgtggttgcagagtccttgcagaggatcgggtgagactggcactctcctgctcacttataag

SEQ ID NO: 18929 - DNA, 600 bp, Chicken  19866894228250_3
agtctggctgctgaagggagcagaagattattagaagaaataaatgctggagacatatcagagacctgctagagtgtatgtggggaggtgaggagttccagttttagcttgatatgactgcagtggaragaatttataaatgtggaggaggtggacttcctttggtaagcagtgactcagactgacacacatgagatgccagtaggttgactctaggaactgtccaagtggggtggtgtgacattcacaatgcttgttagaatgcaacaaactcagtggaattcattgtgagcttggcarcccgtcgagtggacagaggggatcctgtctcacagggtcagttgctgtccaggcagagtcaggaagtgtggttgcagagtccttgcagaggatcgggtgagactggcactctcctgctcacttataagcctctttggtcctacacagccaccttaatccatcgctatccattccattaaacaaagggcatctccttactcttacatacatacaaaagattgtctcaagtgactgtttcygtatctgcaggaacagtttcaaaagtatcttgtctcagtgttgttggccagttctgcagtg

SEQ ID NO: 18930 - DNA, 549 bp, Chicken  19866894228250_4
gacattcacaatgcttgttagaatgcaacaaactcagtggaattcattgtgagcttggcarcccgtcgagtggacagaggggatcctgtctcacagggtcagttgctgtccaggcagagtcaggaagtgtggttgcagagtccttgcagaggatcgggtgagactggcactctcctgctcacttataagcctctttggtcctacacagccaccttaatccatcgctatccattccattaaacaaagggcatctccttactcttacatacatacaaaagattgtctcaagtgactgtttcygtatctgcaggaacagtttcaaaagtatcttgtctcagtgttgttggccagttctgcagtgagatctgcctgcaggaggcttcctaggtttcccacatggggatctaatacacaggtaaggcgaaggctttgttgtgcagttgctggggaccttttcttgaggtaatccattatttcagatcagccatttatctcatagtcattgtcagatcaggaactaaagactgaagtgctgtgggcatgaatgat

SEQ ID NO: 18931 - DNA, 600 bp, Chicken  19866894228251_1
cgctgctttcattgtatcaccaggagcgtatgtttccccattcagtgtacatgggcactgttcaaggtgaacacatgtgcgattctttgagatatcatcaagaacagttcctgccagagaagacaaaaaatcagaggtatattttagtatatttacttagcactaataaattacacgccttccaaaacttgatgtcgtcaagaaaggttcctgctaaagataaaaatgttggatgagaatgtttttttaattacagtttttctaagcatgttagcttgaactattttaaagaagttttasaaaattcttctaatattgcagaacttctcagaggtatactgccttttcctggtgctctgaaaggatagatgcctgtttagaaaaggaaatgaattaaatcttactcaatttgcattatagtacagaaatataagaaagcagcctataattatcccatcacatgctacagtattgtgaggaaaatgctttctcaactaccttctagcaaatagtaaccaagggtctttaatgatagtgactatttaagactctggttatattttgttacatgagaaatggcagttctagcagcacaatgcc

SEQ ID NO: 18932 - DNA, 600 bp, Chicken  19866894228253_1
acaatacacgtatacgtactgaattactacaggaatgaatacaagttccctagtttgccatttaaatatttagactttcttttctgcagttaaatcaccaggacagcccatgcaagtggtgtatgtgccgtcccacctctatcacatggttttcgaacttttcaaggtctgttgaattaccattacacaattcttttacagaatttgtttgtttagtaagattgtatttgtttgactttctgaaccaattgtagatagcaacatgtttttgcaaatgcaagcttttaacattttaatggkgggaaaatacctaaaagctgtattactacttagacaaataatagctgcatagaaagtgaacatctttctcctttgcctaacaactgaaaacctctgacatcttgagtagacaaaaaaaaagggtcttaaagtgtatactataaagtatattttcgtcccaattctgaaatatgtgataaaattaacttactttcttaagttgatgtttgttttaaaataataaacaaagaggtaagaataggctttaagttctcatacttgaaaattgcagaatgcaatgagagccaccatggaacataa

SEQ ID NO: 18933 - DNA, 599 bp, Chicken  19866894228256_1
  misc_feature (1)..(75): n is any nucleotide
nnnnnnnnnnnnnnnnnnnnnnnnnnnnnnnnnnnnnnnnnnnnnnnnnnnnnnnnnnnnnnnnnnnnnnnnnnncagcagtcatatgagagatgccagtgagttgtcactgctggcacgacaaaaaagcatttggctgagtcataactcccagttctcaaaccaggcatctatttttcacatcctgattcctgttcagaactggaagtgactgcataagagaccgcagtcaagcaaaaacatccagactggtaatgacttgtaactactctgagatggatgggcagatttgtggaaaasaaaaaattctactatgttgttgtttattcttaattttgcttcttcatttttaacttcagactgacactggactggaaggaacattttgggtcatataacagctgtttaagcccaaaggagatacagattagctgttctacactactcaaaacacagtatgctctcagggtccttcagaaaatgtatgcaccttgatayggtacatgaaacagtccctcaaaggagatagcatttctgtgcagagccctgtgtgcaggcacaggctttgctgtacacagggaggcactggaacaaggaca

SEQ ID NO: 18934 - DNA, 600 bp, Chicken  19866894228256_2
gaactggaagtgactgcataagagaccgcagtcaagcaaaaacatccagactggtaatgacttgtaactactctgagatggatgggcagatttgtggaaaasaaaaaattctactatgttgttgtttattcttaattttgcttcttcatttttaacttcagactgacactggactggaaggaacattttgggtcatataacagctgtttaagcccaaaggagatacagattagctgttctacactactcaaaacacagtatgctctcagggtccttcagaaaatgtatgcaccttgatayggtacatgaaacagtccctcaaaggagatagcatttctgtgcagagccctgtgtgcaggcacaggctttgctgtacacagggaggcactggaacaaggacatgccagtagcttctcatcaggcactggatgtgtcgctgccaccatccagggagcatggtgaggcctgccccagagaaacctcacagccctgcaatccttctcactggaaaaacagctcagagggacagccagaacaaatcatgtgtagccatggtgactaaatccagctggtatgtatcgaaggactcgtcccctatyc

SEQ ID NO: 18935 - DNA, 587 bp, Chicken  19866894228256_3
yggtacatgaaacagtccctcaaaggagatagcatttctgtgcagagccctgtgtgcaggcacaggctttgctgtacacagggaggcactggaacaaggacatgccagtagcttctcatcaggcactggatgtgtcgctgccaccatccagggagcatggtgaggcctgccccagagaaacctcacagccctgcaatccttctcactggaaaaacagctcagagggacagccagaacaaatcatgtgtagccatggtgactaaatccagctggtatgtatcgaaggactcgtcccctatyccctacacataaaagcacacagcccgtgtaatacatttgacacccccagctattcctgtccttatgattttatccttcccatcctaaattgctttgctcctcatgtagcctttcgttacttaattaacatttagtctttccagaggagtgcctcggttatcctctgtacaaggcaagggatggcaaagggacagggcattaggaaggtgttccaataaggaagattaaaatttaaatctgaatgctgttcagcgagttaaaggaataaaagcaaagaattcaccctg

SEQ ID NO: 18936 - DNA, 599 bp, Chicken  19866894228259_1
  misc_feature (1)..(263): n is any nucleotide
nnnnnnnnnnnnnnnnnnnnnnnnnnnnnnnnnnnnnnnnnnnnnnnnnnnnnnnnnnnnnnnnnnnnnnnnnnnnnnnnnnnnnnnnnnnnnnnnnnnnnnnnnnnnnnnnnnnnnnnnnnnnnnnnnnnnnnnnnnnnnnnnnnnnnnnnnnnnnnnnnnnnnnnnnnnnnnnnnnnnnnnnnnnnnnnnnnnnnnnnnnnnnnnnnnnnnnnnnnnnnnnnnnnnnnnnnnnnnnnnnnnnnnnnnnnnnnnnnnnnnnncagtgcggtggctaccagccagcggagaggggtgggwagagagcaggaggagtagaagtgagaacttgtaggcggacagtacgaggagtgagggggaggagcaggggaacacatggcaagaaggcactccattagtacctccccacaagcagacctatgcccagccaggttctgagctatgaaagccagccccccccacacacatacacttgccctcttcttcctctacctaagtttttatttctgggcgtgatgttacgtggtatgtggtatttctttggccagtttgagtcagttgtcctgttctgtatgcactccagccttctcgctgggggt

SEQ ID NO: 18937 - DNA, 600 bp, Chicken  19866894228261_1
ccctttacgtgggtctgattgctctgtgttccatgctgggaggaggtggggattggatgcctcaaaccacatttgaatttctaccgtaggaaaccagggaaagtttgaacacgcctttctgcctgctgctctgaaacagtttgggaactgctgactctaagggcacatagagaaagatcagtgggtgagatgctaatcacaaaaaaataagtccaaactttacaaagttgaattgttgacctggaaaacaggctcagattaagaaatgtcaagttggtttgatgtccaaaaagcaaaagrataagaaaatggggatatttagcggtagcacagacagactggaagcagattactttggacatcttttgacatgtgctgtcagtgtgatatcacaagatgcaagatgcgcattgcttcaatgagagcagatttactgtgggatgagtggcagatatttatgtttatatatgacttaggaactgatgtgtaaaactttgaatggtctgtgcaagccacatgaaggggagagtggtggtcaaaatctgtatcttcagtcagtctctgatttttttttttctttaattactggtaatgtaggtt

SEQ ID NO: 18938 - DNA, 600 bp, Chicken  19866894228268_1
tgcatcattgccaccacataaacaagcacaattgtctgcttttgcaaatagggactaaagcagagtgattaatgtaaatgagaccacacatgagctttgattgcttgcagcttagctgttttgacttatttgagatgattaccccaacagataaaggtattttagctagcagagtgagcagaaactgtgaactttagaagctacaactaatgtaaatagagggaagtaaaatactctgtgctcaaagtgcatagtgacaaggatgctgaaagactgagattgcaagtatctcaacctgtrcatcagaattgacaaatctgagttcagctttagtctctctcaggttctcatgtggcaagtggtattgttaacaagagacagtttttgacaatactgcagaaatggtaaattccctgtgttttaaagatgtgatagcaagaccaccaatcaaatgatcgtaaagaaatgacagcaactgatacacacagcatctgtggtaacaacaaaactatgaacttgtagatattgacgaattaccagccattctgcgtggcaactgaggcaggggatgcaaatgatacctaggactgtgttgtgtgc

SEQ ID NO: 18939 - DNA, 600 bp, Chicken  19866894228272_1
cttcagacatatatggaacagagcagtttttccattttcttctctagctgtgatggtactattgttttgtatttcttacatttctttcccctgaattgtgactttggcactgcagacattcctaatgatcacgagctctgtcctgcaaaactttgcacacctgccaggaatgatttatagctgaggaggcaagagaaagctgaacaggaaaacactgtaaaccactcctctggacatgatttggatgctggggcagatacacaagctttactcttctcccactgtgtctctgcccacagyacattgctagcagccccttcgtattgcaaaataagagtgttaattgtctagttggagatgaacaactttattaatcttatgtgatacgactgtgctggcagggtgaagaacagttgaagaattagaagctaaggctgcgcagtaaagcaaataatgtctaacatgagcatataagaatcttgtattttatgtaacagaggatatataggagaaattctgttccctttcaaagttagcatttgtgagaaagagaggaactatgtgatcaataaacaaagatagtatattccagtgtaattt

SEQ ID NO: 18940 - DNA, 600 bp, Chicken  19866894228277_1
ggcacagcctgaccatgaagatcaaatggaaccccaacgatgccaagagttttgtttccctgtcctaagaaaagctaataaaccacagattttaaggcagcggtgttacaaaaccttgcttccttcagatgttattgtttgcttggtaaacgaaaagaaaacaaagaatggtggatttcaaaacatacatttcttcaaaggaagcttttttcagagtgactgccaaactctgcataaaaatcttattcatacccactgattccagtgatccttttcagcttagaaaatgtgtaatactckcaattcatttattttcctaataaaagtagggctgttctggaaattgggtcaaggcgatcgcgtaaacctgcgctcccgggagttacagtagtaccttcactgcggtttcatgtcaccaaacagaggaaatactttgttttctgacctctgtaccaaaattccaatgtggaatgtgaagatgtttacacactgtgagcatgattttcatacagggggctcacgtatcgagcgcgctgctccaaacctttaatattgagatcctgttcagctgcggcattttgcatctcagtgttgtagaca

SEQ ID NO: 18941 - DNA, 600 bp, Chicken  19866894228277_2
tctaaagctgcattaaataaaccattcttcaagattttcattgtttgtcctttctataaatgttctcatatatttttaaccaaaaaaaaaagcttaagaaataaaacattttcactacttttacagtagttgttgcaccgcacaacacaacagttgaaaggcactggaactaacaggacaccccaagcttcaaggctctatgctgtgaagaggttcagctttgtctccccacattgctaacagtttttcaggaactgtgttttctgatccacccaaggagtcatctcttacgttgtgcayacttgtttttaacgaagcattctggtttttagacaatttgaacatttctcataaagtgataccacaaaggcaacattgggatcagcttccttgtattttctggctgatattgctctctcctgggtcattcattcatcgtagtctcatggaatgaacacaatgtggggtgggatgttatccacaacaggatgactaagttaatttgtaaaaggttggggtttgggaagtggatgtccaaagctagtcaatatcctgcgggtcaatccaaacttaaactcagtattcaagctgcgagcccat

SEQ ID NO: 18942 - DNA, 600 bp, Chicken  19866894228294_1
tccttgcctttgcacgttcatttatcataagcacacagaaaagaagggcaaagtgttcagatgaccaaagatgcgcctgcagtttactgctgtatacatcttacattataatgcagttttgaatgaaacatctcaagtgtttaaccacatttgaaactgaggcaactataatatgtaaacactaattaaatattttcacctgtgctaacatgtgaaacagaggagaaaagctgaaagtatatggctaaaaataaatgtaaacatcagtacctttaacaaagaatgatgctttgagtctaytcttcrccatctgctacatacactttgcttcttccgttccttcaccttttacaagattaaatattttattttaaacaaattctaactaaataaactctccattatacactgtcttcaattttaaaaaatgcagttaaaaaatacagaaacaaatccagtgggagggctgtgcctgaggttctaagattctgtccttaatgraaaagctttactcaaagggtggttcattctttgggataaatggcagaactcccatctggttgccatactgcagcaatttggcagaagggataacggatg

SEQ ID NO: 18943 - DNA, 600 bp, Chicken  19866894228294_2
cctttgcacgttcatttatcataagcacacagaaaagaagggcaaagtgttcagatgaccaaagatgcgcctgcagtttactgctgtatacatcttacattataatgcagttttgaatgaaacatctcaagtgtttaaccacatttgaaactgaggcaactataatatgtaaacactaattaaatattttcacctgtgctaacatgtgaaacagaggagaaaagctgaaagtatatggctaaaaataaatgtaaacatcagtacctttaacaaagaatgatgctttgagtctaytcttcrccatctgctacatacactttgcttcttccgttccttcaccttttacaagattaaatattttattttaaacaaattctaactaaataaactctccattatacactgtcttcaattttaaaaaatgcagttaaaaaatacagaaacaaatccagtgggagggctgtgcctgaggttctaagattctgtccttaatgraaaagctttactcaaagggtggttcattctttgggataaatggcagaactcccatctggttgccatactgcagcaatttggcagaagggataacggatgtcagga

SEQ ID NO: 18944 - DNA, 600 bp, Chicken  19866894228294_3
gtgctaacatgtgaaacagaggagaaaagctgaaagtatatggctaaaaataaatgtaaacatcagtacctttaacaaagaatgatgctttgagtctaytcttcrccatctgctacatacactttgcttcttccgttccttcaccttttacaagattaaatattttattttaaacaaattctaactaaataaactctccattatacactgtcttcaattttaaaaaatgcagttaaaaaatacagaaacaaatccagtgggagggctgtgcctgaggttctaagattctgtccttaatgraaaagctttactcaaagggtggttcattctttgggataaatggcagaactcccatctggttgccatactgcagcaatttggcagaagggataacggatgtcaggactccaaactgctcccacactcttttccctgtctctacagggagctgcactgttaatgggtgcaagatgtacattcctgcaatactgaaggctgtsagcatgtgcaggaaattaggggtggcaaggcttttacaactaaaggaactgcttaaaattctgttaatattcaactaatgtggattttcctcccttccct

SEQ ID NO: 18945 - DNA, 600 bp, Chicken  19866894228294_4
ttatacactgtcttcaattttaaaaaatgcagttaaaaaatacagaaacaaatccagtgggagggctgtgcctgaggttctaagattctgtccttaatgraaaagctttactcaaagggtggttcattctttgggataaatggcagaactcccatctggttgccatactgcagcaatttggcagaagggataacggatgtcaggactccaaactgctcccacactcttttccctgtctctacagggagctgcactgttaatgggtgcaagatgtacattcctgcaatactgaaggctgtsagcatgtgcaggaaattaggggtggcaaggcttttacaactaaaggaactgcttaaaattctgttaatattcaactaatgtggattttcctcccttccctctctagtaaggcatctgtcttccttctcatcctctcaaagcagccttgaaatggcttgaagctggcaayggtctagcaaagctcatggagtgagccataattgttccccggaccctggggaaagtgccagtcagacacagcgcaaagcaagctaaatcacaactcaaaatcaagctgcttcattgcacagaagcagacaa

SEQ ID NO: 18946 - DNA, 552 bp, Chicken  19866894228294_5
gcagcaatttggcagaagggataacggatgtcaggactccaaactgctcccacactcttttccctgtctctacagggagctgcactgttaatgggtgcaagatgtacattcctgcaatactgaaggctgtsagcatgtgcaggaaattaggggtggcaaggcttttacaactaaaggaactgcttaaaattctgttaatattcaactaatgtggattttcctcccttccctctctagtaaggcatctgtcttccttctcatcctctcaaagcagccttgaaatggcttgaagctggcaayggtctagcaaagctcatggagtgagccataattgttccccggaccctggggaaagtgccagtcagacacagcgcaaagcaagctaaatcacaactcaaaatcaagctgcttcattgcacagaagcagacaatgtgtgcatgagctgagacaaacctgtgggtcttacacaactgtgttgtataagaaatgaaaattgcttgagtgtatgctttgtctcatgcaaatgagaattgcaccaaacaaacctagaa

SEQ ID NO: 18947 - DNA, 599 bp, Chicken  19866894228296_1
  misc_feature (1)..(193): n is any nucleotide
nnnnnnnnnnnnnnnnnnnnnnnnnnnnnnnnnnnnnnnnnnnnnnnnnnnnnnnnnnnnnnnnnnnnnnnnnnnnnnnnnnnnnnnnnnnnnnnnnnnnnnnnnnnnnnnnnnnnnnnnnnnnnnnnnnnnnnnnnnnnnnnnnnnnnnnnnnnnnnnnnnnnnnnnnnnnnnnnnnnnnnnnnnnnnnnnnataacgatagccaaaaaaaaggcacagttcagcctgacaccaacccttgcagaacaagatcaggattgaaatcagattccttcaaaattaaatgagaaagaagagargatttgttaaaatacaacacctggcacatctttggtatcagtaacatttttggtattgtgctgtgttcctttcagatacacagttggaaaatgaaggaaagcatgtctgataagtatttgcttttaaaaaacttttactataaccactatgctttacatagttgcgtatctcttttctatgtctagaaaacaaactgttttgcatgactttttatacagtctgacctgttcaaacacagttctcagctgttctgtatttttactttcactttagataaagtgtaaataaattagattct

SEQ ID NO: 18948 - DNA, 600 bp, Chicken  19866894228304_1
gttcttgcatggtatccatcatctaatcaagaagtacaggaatttcaggttgagtaccaatagcagggaaagtaaatgaaattcacatggcaataattggtttaaaaaaaaactgtggaatttggaaattcttgtcctatcccattctttacatacaaagcttcccactgaaaactcatccataagagaatacaagtatactttaaagacaaaaatcatacaataaatttgttgcaagcattgtaattaatgattgatctaaagtaccgtaagtttacagtgtcagtttatttctataarcttgtttgctaactaagcaggcacaggtatgctgccatttcgtttgtttatacattatttataaacagctttagaactcttgcggtaaaagctacaaccaataatcccaacaaagtagcagtcatcagcagtcagcaggtagccttagaatacaagcagtggcatggagttgtttaaagctctcttctaccaccttccgcagttatcttaaatgtaaatgacagcctccccagtgactgctgcaaggtttcaattttttaattcctttatgtaatgccaaaaagtaaagatctaggcctt

SEQ ID NO: 18949 - DNA, 600 bp, Chicken  19866894228304_2
ggtaaaagctacaaccaataatcccaacaaagtagcagtcatcagcagtcagcaggtagccttagaatacaagcagtggcatggagttgtttaaagctctcttctaccaccttccgcagttatcttaaatgtaaatgacagcctccccagtgactgctgcaaggtttcaattttttaattcctttatgtaatgccaaaaagtaaagatctaggccttctacaaacagaaggaaaataaacaacaacaacacaaacaccacaaagcaaaagaaaacaaaagcttcatgcttcttaaagagygtccctggagaattttgctttccgaactgcctcctttcatataaarcaattcaaataatactgaatctacattaactgtcgataattgtgaaattgcttagaaacttgttaaaaaaaaactacaaaacaacaaagtttatttgatgtagtttacactttacagacaattcctttctcgaccttactcagcttgatgttaccatctaatcactagaatgagattcacgttaccttaggtcagtattttgctttgtcatgggcctcagggctaatttttaagttcagtaaggaaaaagtaaa

SEQ ID NO: 18950 - DNA, 600 bp, Chicken  19866894228304_3
agtcagcaggtagccttagaatacaagcagtggcatggagttgtttaaagctctcttctaccaccttccgcagttatcttaaatgtaaatgacagcctccccagtgactgctgcaaggtttcaattttttaattcctttatgtaatgccaaaaagtaaagatctaggccttctacaaacagaaggaaaataaacaacaacaacacaaacaccacaaagcaaaagaaaacaaaagcttcatgcttcttaaagagygtccctggagaattttgctttccgaactgcctcctttcatataaarcaattcaaataatactgaatctacattaactgtcgataattgtgaaattgcttagaaacttgttaaaaaaaaactacaaaacaacaaagtttatttgatgtagtttacactttacagacaattcctttctcgaccttactcagcttgatgttaccatctaatcactagaatgagattcacgttaccttaggtcagtattttgctttgtcatgggcctcagggctaatttttaagttcagtaaggaaaaagtaaacctcaggatgtgcccagttcactactacatggggacattccagcag

SEQ ID NO: 18951 - DNA, 600 bp, Chicken  19866894228304_4
ttccgcagttatcttaaatgtaaatgacagcctccccagtgactgctgcaaggtttcaattttttaattcctttatgtaatgccaaaaagtaaagatctaggccttctacaaacagaaggaaaataaacaacaacaacacaaacaccacaaagcaaaagaaaacaaaagcttcatgcttcttaaagagygtccctggagaattttgctttccgaactgcctcctttcatataaarcaattcaaataatactgaatctacattaactgtcgataattgtgaaattgcttagaaacttgttraaaaaaaactacaaaacaacaaagtttatttgatgtagtttacactttacagacaattcctttctcgaccttactcagcttgatgttaccatctaatcactagaatgagattcacgttaccttaggtcagtattttgctttgtcatgggcctcagggctaatttttaagttcagtaaggaaaaagtaaacctcaggatgtgcccagttcactactacatggggacattccagcagcttgcaaactcagaccataattgcaaataatctttttcagaaccatataacatacaaagtaaaat

SEQ ID NO: 18952 - DNA, 600 bp, Chicken  19866894228304_5
tccgcagttatcttaaatgtaaatgacagcctccccagtgactgctgcaaggtttcaattttttaattcctttatgtaatgccaaaaagtaaagatctaggccttctacaaacagaaggaaaataaacaacaacaacacaaacaccacaaagcaaaagaaaacaaaagcttcatgcttcttaaagagygtccctggagaattttgctttccgaactgcctcctttcatataaarcaattcaaataatactgaatctacattaactgtcgataattgtgaaattgcttagaaacttgttaraaaaaaactacaaaacaacaaagtttatttgatgtagtttacactttacagacaattcctttctcgaccttactcagcttgatgttaccatctaatcactagaatgagattcacgttaccttaggtcagtattttgctttgtcatgggcctcagggctaatttttaagttcagtaaggaaaaagtaaacctcaggatgtgcccagttcactactacatggggacattccagcagcttgcaaactcagaccataattgcaaataatctttttcagaaccatataacatacaaagtaaaata

SEQ ID NO: 18953 - DNA, 600 bp, Chicken  19866894228305_1
atagctattgagttgatttttgtaaccagttgcgtaaggcaaatggagggccaggaaaattaggtgaggaatgattttctcaactgatcttgtaattaagaaaaagtgagaagcagtaaataccaccaaagttctcatgtagacttagcaatgttttacattctatcacacttattcccattctgtctctttgagcaggcagctgctagacttaactacagtaagataatgtcagaaaacagaagcaaaatattttgatctggggactgcagagctgtgggtggtgcaaactgtggcctygttgtagatcggagacaaaccaaaagaactttcagaagaagtgagaagctaaactacgctgttaccaaattaatgtgctatccttatttaagtcaatgggagttcaacatagtctcaagtggagttagaatttccttctatactttctggttaacagaaaaaaaactcaaatcacgtgccatacgtttttggggactagaggtttatataattggtatatcccacatagccacaccctagctttctattaggatgagacttaggcattcattcagttctccactctttggcatgtttaaa

SEQ ID NO: 18954 - DNA, 600 bp, Chicken  19866894228315_1
acagacagcttctaaatgtaaactttagtaatttggtgttaaggaggggaagaatattgtttctaatgagaagactttacgacctggcctctgtacatgtgggaaagaagcacaggaatgcagtttaaaataagatgacaacagcacaaatggctataaattatctgcaaatatgcatagattagaggttagagatcaacgagaggacaaaggctcttcggtatcccagaaaaaaatggtccactgggccacaggttatctaagatgataccaaaggataatactaaaactcatgctaartttaacaggcctccttaatttttattagtgttttatgctttttttttcagcatctcatttgtaagatcctattgttcggttctccctagcacaaaatgagttatggtttttgtttgcccactgaaagctcaccgtctcataaacctctcaagtgctctcagatcctgctcaccaagattcggctcagttactgtcctagttattattttattctgttttaatttaccaccatgtctgaaaacatgtttaataatgagggtgaacatgtttgattgtttgttcacagttagggcagaacag

SEQ ID NO: 18955 - DNA, 600 bp, Chicken  19866894228318_1
tttaaaagagcatccacataaaaatatatgatagatacctacagttaatcagatgaatctcattctcagtttatgaatactgaaatagttgtgtaagaattgttttagtgtgtggcctttattttatttcagcttattagacttaaccttgcttgtaagtaagacacacaggatcactcagtccaatcatccacacatcaccaatagttctcattaaaccatgtccctcaacacaatgtccaaatgttccttgaacaccttaagggtcggtgactccaccacctccctgggcagcccatkccagtgcctgaccaccctttcagagaagtagtatttcctaacgtccagcctgaaccttccctggcacagcttgaagccgttccccctattcctcatcctatcaccagttacatgagagaagaggctgacccccagctcactacaacctcccttcaggtagttacagagagcaataaggtctgccctgagcctcctcttctctagactgaacaatcccagctccttcagccactctactggcaacactgtttctaatgcaagctgggatgccaatggccttcttggccacctgggcacact

SEQ ID NO: 18956 - DNA, 599 bp, Chicken  19866894228325_1
  misc_feature (1)..(54): n is any nucleotide
nnnnnnnnnnnnnnnnnnnnnnnnnnnnnnnnnnnnnnnnnnnnnnnnnnnnnncttgtgaaatgcagagaagtaaagaacttgccagatatttgcttttgttcatatctgctgagcacagaaagtgtagctctataaaactatagtcttaaggaaaaaaaaaaaaaagctaaaatgtgctcagctagcacctccaatgagatcacacaagcagaaaaataatcctcatttacaatccaaacatgtgaaagaatggaaaacatgttttatggaaaactatcttactggaatttaagaagwgttcctttgtgtggacaacaaatagtttttcatagcttgctgctttaaatgactgcgtttctttccaataatgtcatgttcrtaaagtgcaaaactaactcttctgtcagagcagtggcaaaagggaatgggaaataactrcactataaggctatctctgatctcctagaagaagtggcaggatattgcaagccttttttgttagtgtattatgatatwaaaaaaaaaaccaaaaactttttatgtatttttctgacttttctcagtgtggggtcaataaattttctgtaaaaacattt

SEQ ID NO: 18957 - DNA, 600 bp, Chicken  19866894228325_2
tgccagatatttgcttttgttcatatctgctgagcacagaaagtgtagctctataaaactatagtcttaaggaaaaaaaaaaaaaagctaaaatgtgctcagctagcacctccaatgagatcacacaagcagaaaaataatcctcatttacaatccaaacatgtgaaagaatggaaaacatgttttatggaaaactatcttactggaatttaagaagwgttcctttgtgtggacaacaaatagtttttcatagcttgctgctttaaatgactgcgtttctttccaataatgtcatgttcrtaaagtgcaaaactaactcttctgtcagagcagtggcaaaagggaatgggaaataactrcactataaggctatctctgatctcctagaagaagtggcaggatattgcaagccttttttgttagtgtattatgatatwaaaaaaaaaaccaaaaactttttatgtatttttctgacttttctcagtgtggggtcaataaattttctgtaaaaacatttaaacagaaaaaaaagtcatggcactaatgcagtaatattaatttattggtgttttcatatttccgtgacagttagggggaaaa

SEQ ID NO: 18958 - DNA, 600 bp, Chicken  19866894228325_3
tatagtcttaaggaaaaaaaaaaaaaagctaaaatgtgctcagctagcacctccaatgagatcacacaagcagaaaaataatcctcatttacaatccaaacatgtgaaagaatggaaaacatgttttatggaaaactatcttactggaatttaagaagwgttcctttgtgtggacaacaaatagtttttcatagcttgctgctttaaatgactgcgtttctttccaataatgtcatgttcrtaaagtgcaaaactaactcttctgtcagagcagtggcaaaagggaatgggaaataactrcactataaggctatctctgatctcctagaagaagtggcaggatattgcaagccttttttgttagtgtattatgatatwaaaaaaaaaaccaaaaactttttatgtatttttctgacttttctcagtgtggggtcaataaattttctgtaaaaacatttaaacagaaaaaaaagtcatggcactaatgcagtaatattaatttattggtgttttcatatttccgtgacagttagggggaaaaactgtgcctacatacttcattttcatgtctcacgcacctgaccactccactcactcctt

SEQ ID NO: 18959 - DNA, 600 bp, Chicken  19866894228325_4
taatcctcatttacaatccaaacatgtgaaagaatggaaaacatgttttatggaaaactatcttactggaatttaagaagwgttcctttgtgtggacaacaaatagtttttcatagcttgctgctttaaatgactgcgtttctttccaataatgtcatgttcrtaaagtgcaaaactaactcttctgtcagagcagtggcaaaagggaatgggaaataactrcactataaggctatctctgatctcctagaagaagtggcaggatattgcaagccttttttgttagtgtattatgatatwaaaaaaaaaaccaaaaactttttatgtatttttctgacttttctcagtgtggggtcaataaattttctgtaaaaacatttaaacagaaaaaaaagtcatggcactaatgcagtaatattaatttattggtgttttcatatttccgtgacagttagggggaaaaactgtgcctacatacttcattttcatgtctcacgcacctgaccactccactcactccttccctatagtcactaagccagtacaagtaacatgcaacacttaagagcttaaaacataaattcagttgatgggtttttt

SEQ ID NO: 18960 - DNA, 600 bp, Chicken  19866894228326_1
agtgaattgtggctctgagttcagtgcttccaaagaaatgttcgtgtccatgacaggaaccaacaaggaaagcttcccagttccttcaatgggagtacctgagaggggacacacagaggggccacagggagctcagagaggagcagccccacaaagctgctcagaaggaaagtggcaaagcttgcttggggctggggaaggcttaatgtaacattctggggaaagtagttggaaatatcacggtaattttcccagcttggcaggcttttgagctttaacagattcccagaagagtgaagyagatcttgggtgtaaggaagtgataagcagtgatgctagattccttgatttttagatccagcagagctcgttgaagctgtctgctctcacytctgtgcacaacacagacctgcagtgtcctgctgttgcaggttctgtaccaagcacgtaatgccatttgtgctagaacatttcacaaagacacaatcttgatttaataactacatgggatagagaacatagtaccttcccattaagtattcctgagtcactcatcacttccaaacaccgcatctgggaacgctcctctcctcactggtg

SEQ ID NO: 18961 - DNA, 600 bp, Chicken  19866894228326_2
ggagtacctgagaggggacacacagaggggccacagggagctcagagaggagcagccccacaaagctgctcagaaggaaagtggcaaagcttgcttggggctggggaaggcttaatgtaacattctggggaaagtagttggaaatatcacggtaattttcccagcttggcaggcttttgagctttaacagattcccagaagagtgaagyagatcttgggtgtaaggaagtgataagcagtgatgctagattccttgatttttagatccagcagagctcgttgaagctgtctgctctcacytctgtgcacaacacagacctgcagtgtcctgctgttgcaggttctgtaccaagcacgtaatgccatttgtgctagaacatttcacaaagacacaatcttgatttaataactacatgggatagagaacatagtaccttcccattaagtattcctgagtcactcatcacttccaaacaccgcatctgggaacgctcctctcctcactggtgctgctgtgtgagtcccagtgtggacccctggaggtgggtcaggatgctgcttggtgtgctccacttctggtggggggttcaaaagtggggc

SEQ ID NO: 18962 - DNA, 599 bp, Chicken  19866894228328_1
  misc_feature (1)..(70): n is any nucleotide
nnnnnnnnnnnnnnnnnnnnnnnnnnnnnnnnnnnnnnnnnnnnnnnnnnnnnnnnnnnnnnnnnnnnnngtgaaattattccaggacataagggagtggaatgcatattgttagcgccaaaatactctgaatagcacatgtttttatggaaatgttcacaaagaacaataccgctggggtactgaacattcctgaggtgtcgctaacctccgttatgcttgcttctgacaggtctggcaggtcagactccagtggagcaggcattggctgatgccattgtggacaccattgatgatttyatgatgctgttcccctgggcagagaaaaatcaggatgtgaaggtaagacagctaagctaaacaaagataacccatatgtacgtataccttagcatctccactgtggaaaaagcctcatgcaaacccctgggtccgtcatctcaactcaccccaaggtggaagacctctgtggctcttcctcccagctaagtgagttaaggtcgtccgctcccttccacctctataagatttccccccattgtgggaacaatgaggtcagcatcagccatctcaccagttcattttaaattgaagatacc

SEQ ID NO: 18963 - DNA, 600 bp, Chicken  19866894228328_2
atgtgaaggtaagacagctaagctaaacaaagataacccatatgtacgtataccttagcatctccactgtggaaaaagcctcatgcaaacccctgggtccgtcatctcaactcaccccaaggtggaagacctctgtggctcttcctcccagctaagtgagttaaggtcgtccgctcccttccacctctataagatttccccccattgtgggaacaatgaggtcagcatcagccatctcaccagttcattttaaattgaagataccatatgcatatacatcaaactgttcttcaaaggggsactctctttccagtcgcactgtaatatctgtaccctgtcacagagagctcaaatctttctgcttctgctaattcagtaggattaacagctccatcccattttctttttgtgctcctacaccttggtttcttaacatttaatataacttaagtaacttcagaaccccttggccccascaccatccagtgtggatcttctgcagacaccagtgcccatggtaatatatggctgtgatactttaacacagtcacagacaactcctagatcagttgagtttttggcatcactctgtctcccagt

SEQ ID NO: 18964 - DNA, 547 bp, Chicken  19866894228328_3
ccttccacctctataagatttccccccattgtgggaacaatgaggtcagcatcagccatctcaccagttcattttaaattgaagataccatatgcatatacatcaaactgttcttcaaaggggsactctctttccagtcgcactgtaatatctgtaccctgtcacagagagctcaaatctttctgcttctgctaattcagtaggattaacagctccatcccattttctttttgtgctcctacaccttggtttcttaacatttaatataacttaagtaacttcagaaccccttggccccascaccatccagtgtggatcttctgcagacaccagtgcccatggtaatatatggctgtgatactttaacacagtcacagacaactcctagatcagttgagtttttggcatcactctgtctcccagtacttactcattatatccttaaatgtaaacctacagagttgttactcagggggacagtgagttaatgccagcattgcagatatttcacatagttctgacctcagcagatgacacagccctttta

SEQ ID NO: 18965 - DNA, 599 bp, Chicken  19866894228329_1
  misc_feature (1)..(102): n is any nucleotide
nnnnnnnnnnnnnnnnnnnnnnnnnnnnnnnnnnnnnnnnnnnnnnnnnnnnnnnnnnnnnnnnnnnnnnnnnnnnnnnnnnnnnnnnnnnnnnnnnnnnnnaatggtgtccacaatggcatcagccatgcctgctccactggagtctgacctgccagacctgtcagaagcaagcataacggaggttagcgacacctcaggaatgttcagtaccccagcggtattgttctttgtgaacatttccataaaaacatgtgctatccagagtattttggcgctaacaatatgcattccactccsttatgtcctggaataatttcacctggctttgctttttttcccctccagcctcatatagctccctaaagcgtgaggtttttctttccatcgcctgaacgcacaacccatttaaacsttcttgtgacaatactgcttgcttttgattaatttgtcttgtctgcaaatctgttttcctcccctggtgctctctggtttgccygtggtcgtctcagtattactactttcccttgctctcttttcacagacctgtgttcaggctttcacctctgtgcagagtcagaccatcctcttattcctct

SEQ ID NO: 18966 - DNA, 600 bp, Chicken  19866894228329_2
atggcatcagccatgcctgctccactggagtctgacctgccagacctgtcagaagcaagcataacggaggttagcgacacctcaggaatgttcagtaccccagcggtattgttctttgtgaacatttccataaaaacatgtgctatccagagtattttggcgctaacaatatgcattccactccsttatgtcctggaataatttcacctggctttgctttttttcccctccagcctcatatagctccctaaagcgtgaggtttttctttccatcgcctgaacgcacaacccatttaaacsttcttgtgacaatactgcttgcttttgattaatttgtcttgtctgcaaatctgttttcctcccctggtgctctctggtttgccygtggtcgtctcagtattactactttcccttgctctcttttcacagacctgtgttcaggctttcacctctgtgcagagtcagaccatcctcttattcctctgttcttttagactcccataaatcatgtgtccttcctctgtcaagtcacttctctgacttataccttacgcatttgaaggcaatgaatatgccactccttttgggcgccatagtctg

SEQ ID NO: 18967 - DNA, 600 bp, Chicken  19866894228329_3
ggaatgttcagtaccccagcggtattgttctttgtgaacatttccataaaaacatgtgctatccagagtattttggcgctaacaatatgcattccactccsttatgtcctggaataatttcacctggctttgctttttttcccctccagcctcatatagctccctaaagcgtgaggtttttctttccatcgcctgaacgcacaacccatttaaacsttcttgtgacaatactgcttgcttttgattaatttgtcttgtctgcaaatctgttttcctcccctggtgctctctggtttgccygtggtcgtctcagtattactactttcccttgctctcttttcacagacctgtgttcaggctttcacctctgtgcagagtcagaccatcctcttattcctctgttcttttagactcccataaatcatgtgtccttcctctgtcaagtcacttctctgacttataccttacgcatttgaaggcaatgaatatgccactccttttgggcgccatagtctgtgagccttcagtaaagaactgttagtgatggacacccagaaatgccatttctttattttaaagggttactgaatattatcactg

SEQ ID NO: 18968 - DNA, 600 bp, Chicken  19866894228340_1
acagccccaggctatgattaggcacactggtcaacattcattgtagcagatataactgagatgcctaaaacagaaatccagttgctgtgcacttcctcaaaagctagaagcaagatagatgggaaccatcaacagatattttgtgagagtgcattcacactcctctttgcagatagactaacatataagaatgtgagtccacacagtctatttagagatcaaagaaaactatctgaaaggtgtttgctccaaaaatgatcatgttaagaatttgaccccatctcattcagagaagtatarcttcactgtggacgcatggagcagcctgcaattgatactggggtgccaacatgggggcagcacccaggaacccccagttgctgagccagagagctcacctctctcatattggatgatcacatggggattctgcattcctggggaatggtgctgatgacccacagctagaggaaggggagctgtgacagggaaattaaaattttcttaggatcaattattaatgtatgtttagaaatttgtaggtgcttattaacatttgctaagtatctagcattgtggtttaactgttgtattactgat

SEQ ID NO: 18969 - DNA, 421 bp, Chicken  19866894228349_1
gagctcctcttcctccttgcaggtacagaaagttgcaccagtagatcttcagaaaactgtaaatgtcttcatcccttcctatccagcaactccatgaacattacattacccctcagagcaaggtcgttgtggcaaaactggagaacagacctgtctttccagacaccattttcccctttgcatcccatggaaacaggtccacacgagctatgggctctgggaggagttgcagacagcagctgcaaaatggcaagcctgcccttttctgcagggaggtacccaaacaaaatctgttggagwgaatacttactgtatgtgtgtccttttactcttctcaagagttggtgatagtctgagctggagcatgacatggccatgttggatggggccctgggcagcctgatctggtgggtggcaacca

SEQ ID NO: 18970 - DNA, 600 bp, Chicken  19866894228354_1
tctttcactgagtctcagtctgcaggccatgaagttggcatcctcagctttttgtggctcattttggaacataaagaacaaaaatgttatatatgttttcggatactagtgtttacaatttccttgaacagagaggactttgtccttcacttccctgtataccttttgcctgatctctcagctctgttttggacctaatgctgtactaaaactgctttttgatacccagccagtttaagctgaaattaaaaaccacatctcagtaatggctctgcactgctgccttagccttttgctttycttctctctgcaaagcatggaaagcttgcaatcttgacatagacacatttgtattttcttttgttactccctctgattcactagaaaaataataaaatgcaatgcttttattattattattattagctttattagctttattaaggtcaaacactgattttgctttattgaggtcaagccatcagtcaaaatagtagttgggtgtacttgaggtatcttctatttctgttatacttgctaagtataaacttgctcagcttgcctgagcttatgcccttaggaaatgttcagtgatgcgac

SEQ ID NO: 18971 - DNA, 600 bp, Chicken  19866894228360_1
agtggctcccctgcacttatttattaaaggaatccagaaaaacagctttggtgtaatacatttacatttggtcagatttaatagaactatgtgaatctcatggaaaggatacttagcatggatttgagctagtttctgacttcctcagaaatacaaacctgagggagaagcaaggatgatagcttttccctactgctgtgctctccattttctgtgctcagtgggggccgaaacagtttccaacaaaagttaagccaaaacttgagacttcttatgagtttctgagttgcctggaaatayctctcttgttcaaaaatgtgtctgccttcgtggcctggcactgcacaaagcacaccctacaatttaagagtccccaaattcggtcttatacaattacctggggcagctcaaagctcctgctttgtctgaggttcgctgaaatggaaattgatttggcctacccaaaatccacataatgattgattcttctttatacaaagctgtgatgagagaagttataaccagtcatcataaatgtttcgagtcacttgctattacgcaccagcataattttattatctttggagttgttctccatgt

SEQ ID NO: 18972 - DNA, 600 bp, Chicken  19866894228360_2
tggcactgcacaaagcacaccctacaatttaagagtccccaaattcggtcttatacaattacctggggcagctcaaagctcctgctttgtctgaggttcgctgaaatggaaattgatttggcctacccaaaatccacataatgattgattcttctttatacaaagctgtgatgagagaagttataaccagtcatcataaatgtttcgagtcacttgctattacgcaccagcataattttattatctttggagttgttctccatgttctaaggaacatattacagcaccagtgtcatgcayagacagatgctccrttagctgccctaaatcaccatctattacaagtcttctggagagatgaagataaatgatgaatgtttctggctgcatcaaaccacagtgaaatgagcagggattagatatgatgagaggccagtggcctatcaaatatactgacctgtttctgataactgctactatggacttcttcataagcaggcaaaaataatattttaatagttaactatagagttacaaaggcttatctcccacatttaatggttattgtagatcttaggccaggagatacctgtgctcctc

SEQ ID NO: 18973 - DNA, 600 bp, Chicken  19866894228360_3
gcacaccctacaatttaagagtccccaaattcggtcttatacaattacctggggcagctcaaagctcctgctttgtctgaggttcgctgaaatggaaattgatttggcctacccaaaatccacataatgattgattcttctttatacaaagctgtgatgagagaagttataaccagtcatcataaatgtttcgagtcacttgctattacgcaccagcataattttattatctttggagttgttctccatgttctaaggaacatattacagcaccagtgtcatgcayagacagatgctccrttagctgccctaaatcaccatctattacaagtcttctggagagatgaagataaatgatgaatgtttctggctgcatcaaaccacagtgaaatgagcagggattagatatgatgagaggccagtggcctatcaaatatactgacctgtttctgataactgctactatggacttcttcataagcaggcaaaaataatattttaatagttaactatagagttacaaaggcttatctcccacatttaatggttattgtagatcttaggccaggagatacctgtgctcctccctaatttaaggtt

SEQ ID NO: 18974 - DNA, 599 bp, Chicken  19866894228362_1
  misc_feature (1)..(168): n is any nucleotide
nnnnnnnnnnnnnnnnnnnnnnnnnnnnnnnnnnnnnnnnnnnnnnnnnnnnnnnnnnnnnnnnnnnnnnnnnnnnnnnnnnnnnnnnnnnnnnnnnnnnnnnnnnnnnnnnnnnnnnnnnnnnnnnnnnnnnnnnnnnnnnnnnnnnnnnnnnnnnnnnnnnnnnnnctgcaatgctgctgaattttagcagctttatttaactcttctcatctagcttgcgtgtatttcatggtttggagtctgttccactaagcgatagattgtcatcttctccaggacccttgaggaggaagttcrtgttgttagaggatggttgttttcttatagtgagttgcccaaatttcaggaagtgttcataggagaagatgtactaaagaatcactgacacactgcattttctaaatgtttyatgtatataaattttatttgcttgcttttggaagaagtcatatcaaattctgctctatttaaactgataaaagacagaagagaaaatacttatctatgtaggaagaggcattattgaaaagtataagaaggcttaaatcgagaactgagaagacagcgatatacagtctttattccctctttgaaaa

SEQ ID NO: 18975 - DNA, 599 bp, Chicken  19866894228362_2
  misc_feature (1)..(56): n is any nucleotide
nnnnnnnnnnnnnnnnnnnnnnnnnnnnnnnnnnnnnnnnnnnnnnnnnnnnnnnnctgcaatgctgctgaattttagcagctttatttaactcttctcatctagcttgcgtgtatttcatggtttggagtctgttccactaagcgatagattgtcatcttctccaggacccttgaggaggaagttcrtgttgttagaggatggttgttttcttatagtgagttgcccaaatttcaggaagtgttcataggagaagatgtactaaagaatcactgacacactgcattttctaaatgtttyatgtatataaattttatttgcttgcttttggaagaagtcatatcaaattctgctctatttaaactgataaaagacagaagagaaaatacttatctatgtaggaagaggcattattgaaaagtataagaaggcttaaatcgagaactgagaagacagcgatatacagtctttattccctctttgaaaatgttgcatacactcaaggaatttttttttattagaacctaaaagtgactttgcctgctgtgacagagggaggagcatgagatgcaggaacatctgttttaggaaatgtgaat

SEQ ID NO: 18976 - DNA, 600 bp, Chicken  19866894228366_1
cagaggcaaaattcactcaaaagcggaaggttaatgcaaggagaataattaatctaatcatggcttgagaaatacagataaaaatgagtggtggctttctgcacagggataaatttcatccagggatataaaatctggacaggtctccttggggacatttggggctaagtggatgtgaggcagctctggccggaaagccaaattgcaccatttgtgtggcgtggggaaaaccaatgagatctgtcctacagtggtccagcctcctgtgcaggtgtattgcttccaaacagtgtatagcayatttcaagacattgcaggtggatgaaattccagtttctcagcatacactcaagtaggtgtaccacactaccatacagatacaccagaagtgagcactgctcatactatcttgagcacattgcacaagggcacaacatgagattgtcctgtgtagcatcttaactgtaggacagaaataattcttcagcagaaggagttactcaaagggaactaaagagcagctcagctgtgaaataaaccctgaggcaactttgaaaccagtcaaaaagaaaaagtaaaggatctagccataatggcaac

SEQ ID NO: 18977 - DNA, 600 bp, Chicken  19866894228366_2
cttgagcacattgcacaagggcacaacatgagattgtcctgtgtagcatcttaactgtaggacagaaataattcttcagcagaaggagttactcaaagggaactaaagagcagctcagctgtgaaataaaccctgaggcaactttgaaaccagtcaaaaagaaaaagtaaaggatctagccataatggcaacacaggcacagatgcccctgttgtgtttcagttccaggcattgcgaatgatggtttaattgctgggcctctgtgtttgtgcttcatccactacaaagaagaaaataagrgggaatataaatataggaacagacatgctggttatagctaagctgtactgaaatgccatttacaacccaatgactttataatgggcacatctgcccacctcacaaatccactaaaaaaatgaacaggatttgtagcattcrctgagaaagtttcagcttcagaatagtagaaggtgttgaatgctggagttttgaagcttagctgcacaggtcctgatgttcttggtttctccttgtggtctgtggatgtgtaccaaatcctgacctcagcaggcacattttcacttgccttctttctgc

SEQ ID NO: 18978 - DNA, 600 bp, Chicken  19866894228366_3
ctttgaaaccagtcaaaaagaaaaagtaaaggatctagccataatggcaacacaggcacagatgcccctgttgtgtttcagttccaggcattgcgaatgatggtttaattgctgggcctctgtgtttgtgcttcatccactacaaagaagaaaataagrgggaatataaatataggaacagacatgctggttatagctaagctgtactgaaatgccatttacaacccaatgactttataatgggcacatctgcccacctcacaaatccactaaaaaaatgaacaggatttgtagcattcrctgagaaagtttcagcttcagaatagtagaaggtgttgaatgctggagttttgaagcttagctgcacaggtcctgatgttcttggtttctccttgtggtctgtggatgtgtaccaaatcctgacctcagcaggcacattttcacttgccttctttctgcacccgtactgagatgtttcttcccctgctactgaaagctgacttttaatctgctatggtctccttgtgtaaatcaagccacctttaaactaaatgcacttgactaaacagacatttccatgaacttctcatccattttttt

SEQ ID NO: 18979 - DNA, 600 bp, Chicken  19866894228366_4
cattcrctgagaaagtttcagcttcagaatagtagaaggtgttgaatgctggagttttgaagcttagctgcacaggtcctgatgttcttggtttctccttgtggtctgtggatgtgtaccaaatcctgacctcagcaggcacattttcacttgccttctttctgcacccgtactgagatgtttcttcccctgctactgaaagctgacttttaatctgctatggtctccttgtgtaaatcaagccacctttaaactaaatgcacttgactaaacagacatttccatgaacttctcatccartttttttttttactagctctgatgtttttcacactgcagcccccaaaagatgagaaatattcaccgcaaaactttacacagattrtatcacattggcttgtaatttagggctgaatgtggtctaagctttccacatttgatgaagttaacatacatcttgagcctcttacttcagtgtgaacagtttgcactctcagaaaaggtgagaaattcctcagtataggagtcttgtctgtaatatgaacatgaccagttcttgccttgggatatggtcattcagctgtcccacagctacttagt

SEQ ID NO: 18980 - DNA, 600 bp, Chicken  19866894228366_5
tcttggtttctccttgtggtctgtggatgtgtaccaaatcctgacctcagcaggcacattttcacttgccttctttctgcacccgtactgagatgtttcttcccctgctactgaaagctgacttttaatctgctatggtctccttgtgtaaatcaagccacctttaaactaaatgcacttgactaaacagacatttccatgaacttctcatccattttttttttttactagctctgatgtttttcacactgcagcccccaaaagatgagaaatattcaccgcaaaactttacacagattrtatcacattggcttgtaatttagggctgaatgtggtctaagctttccacatttgatgaagttaacatacatcttgagcctcttacttcagtgtgaacagtttgcactctcagaaaaggtgagaaattcctcagtataggagtcttgtctgtaatatgaacatgaccagttcttgccttgggatatggtcattcagctgtcccacagctacttagttcagcctaacccctaaaacaatcctactgttctttggcagttccacctacctgctgctccccgtttctgtgtctctaaattagaa

SEQ ID NO: 18981 - DNA, 600 bp, Chicken  19866894228367_1
tcttttcttttagacagagaaaaggccacaagcagaaccaggggctgcagttgaaagcacagtatgataattctttagctttggacactcctctccttcaaaggaaaatggttttgtatatagtgtattttttcactttttggcaacttttgtatgacttcaataaagattgtaagcaaaggttccttgttctgactctgtttctctctcaggctcctttctccctcctctcctgctgcaggttctgcccttagctgcagcctttcttttctacacagagctgaagaagggttgggctgrggcaagaggaggcagtataagccctgggcctgtagtaggatgtagggaaggcaaggctgttagtatccctctggtcatttactgtggtgtagtaccttccctgcccctgtgtgctgcagtggtgtgataagagcttatgtggctcctacagaaggctctggtccctgtgtgctctctccctgcactcctagcttgctatggctgaactgcattttgcaaagttggtgctggttctgtcatctgccctcagagccgtagtagagctctattgtaggatgtgcaggatgtgattgcaaacat

SEQ ID NO: 18982 - DNA, 599 bp, Chicken  19866894228378_1
  misc_feature (1)..(16): n is any nucleotide
nnnnnnnnnnnnnnnncctggctgagtcagtggggatatacaggtgtgcaaatagcccggtggctccgtgtccccacagcctgggatgggcgcagaggggaatgcagggacttcctgcagcaaacatcactcctgcaccctcagctcaccgtgaggacatgcacacagagggggaccgttgctctacggggcactatgattcggttggagctgtgatgctccaccaggtgttgctttcccgtgtcactggaaagccctcagctgccaccccactgtctgcaggggatgggtcacatcgckggggcagcacccccagagctcagcaccaatgggggctggggcacaggatgcccactgtgagtccacccatsagagccacccctgtccccacggcagtgccacccattgcccagcactcccctgaagctggatgggaggtttctgttaatcagctccaaactattaagccrttggccaaagtgctctcctgctcctttagcaaggaattaggcctctataaaatcaaacagcatgaatcttaaagatttacacggtgctttttaagcagttttcagtatatttcaatagttaataaaact

SEQ ID NO: 18983 - DNA, 600 bp, Chicken  19866894228378_2
ccccacagcctgggatgggcgcagaggggaatgcagggacttcctgcagcaaacatcactcctgcaccctcagctcaccgtgaggacatgcacacagagggggaccgttgctctacggggcactatgattcggttggagctgtgatgctccaccaggtgttgctttcccgtgtcactggaaagccctcagctgccaccccactgtctgcaggggatgggtcacatcgckggggcagcacccccagagctcagcaccaatgggggctggggcacaggatgcccactgtgagtccacccatsagagccacccctgtccccacggcagtgccacccattgcccagcactcccctgaagctggatgggaggtttctgttaatcagctccaaactattaagccrttggccaaagtgctctcctgctcctttagcaaggaattaggcctctataaaatcaaacagcatgaatcttaaagatttacacggtgctttttaagcagttttcagtatatttcaatagttaataaaactaaatgctgctttgtgtaaaaggtaatagattacaatcgggtgtgttttactagcactcagtgtgttcgtcta

SEQ ID NO: 18984 - DNA, 600 bp, Chicken  19866894228378_3
ggggaccgttgctctacggggcactatgattcggttggagctgtgatgctccaccaggtgttgctttcccgtgtcactggaaagccctcagctgccaccccactgtctgcaggggatgggtcacatcgckggggcagcacccccagagctcagcaccaatgggggctggggcacaggatgcccactgtgagtccacccatsagagccacccctgtccccacggcagtgccacccattgcccagcactcccctgaagctggatgggaggtttctgttaatcagctccaaactattaagccrttggccaaagtgctctcctgctcctttagcaaggaattaggcctctataaaatcaaacagcatgaatcttaaagatttacacggtgctttttaagcagttttcagtatatttcaatagttaataaaactaaatgctgctttgtgtaaaaggtaatagattacaatcgggtgtgttttactagcactcagtgtgttcgtctaacacctcatacgttagagctggaatctatgaaaagcactttgtggagattaaaagcagatttatcacagatgtgcctcaacattatgcttggcctgaac

SEQ ID NO: 18985 - DNA, 600 bp, Chicken  19866894228379_1
ctgagcacagttctgcccagtgccctgactgctcacatcaggtgtctcgtggtggcattcagcttttgttccactttcactttctgggagaggctctgggcagatcttgcagaaagcagctctgattttgcttctgtcagtgtgtgaaatctgctgtccaaggcattttgagcttttgtaataacaaattcagttccttttcttctaattttcatttgcttggacttcagtatttttcatagcctttctacactggtgttccttgtgaactttgagctaaaccaaagaagcacaccacartttccatctaaccagttttaggcacagatacattcgtaggatcatagaattgtttgagttggaagggacccttaaaggctgtctagtccaactcccctgcaatgaacagggacgcccacaggtagatcagggtgctcagagcttctccagcctgaccttgggtgtctccagggatggggcatccacaacctctctgggcaacctgtgccagtgcctcatcacccttattgttaagaacttcttccttagatgcaatctaaatctctyctcttgtagcttgaaaccatttccccttgtcct

SEQ ID NO: 18986 - DNA, 559 bp, Chicken  19866894228379_2
aactttgagctaaaccaaagaagcacaccacartttccatctaaccagttttaggcacagatacattcgtaggatcatagaattgtttgagttggaagggacccttaaaggctgtctagtccaactcccctgcaatgaacagggacgcccacaggtagatcagggtgctcagagcttctccagcctgaccttgggtgtctccagggatggggcatccacaacctctctgggcaacctgtgccagtgcctcatcacccttattgttaagaacttcttccttagatgcaatctaaatctctyctcttgtagcttgaaaccatttccccttgtcctatcaaaacataccctgctaaagatagaatcatagaataattcccacaggaaaagttgtgaaagcaatataatcttccagaaaaaaaaaagaaaaaaagaaaaaggagggaaaaaggagatattttccatcttctcttaaaattgcaattaaagcatttagtgtacgtttcaaaatttccaaacctccaagcagccatgctgatcactcactctgcagcttattcag

SEQ ID NO: 18987 - DNA, 600 bp, Chicken  19866894228380_1
gcagtgaagcagagagtaaaggaagaaagatctatctccagacagatcagtatttacctctgaagtgaatacttctgttaagagttcaggctttatgtccagatgccttttggaggtgttagttctgtagcatgtggagtctgaactaacatgctatgaccacaaggctgtgtgaagagagaggaagcaataggcagagggtgatttgtggaagtggtagtgctaaggagcagtcagataaacactgtttctggcttaaaccttattctgtcactgggaggaagcgactgcacagttagstaatacataagctgccttttgcctttcctgaaaattcaatgtgatgaccatttgttgtttggaacagtgtgcaaagagatgtatattttttgcaaagggatcaagagcaacagagcttctgatgagggcaaatgcaaaaagatcgtttatgactttccttttcagtttaactaaaattaatctttcaaaatacattaaagataaaaatgtaaaatgtacattctttttgaaggaactacagttgttcttcattctgttttctcttagagatgcatctgaaatgcttcttcaattgacaga

SEQ ID NO: 18988 - DNA, 482 bp, Chicken  19866894228380_2
ttaaatttcttttttaataggtaatttactgctatcagtatcttccaagccaaatatttttattttactgtatttcagtttttaacatctttgtcctgtaagattttagtcatcttttccttgggatcccagtactagcaacaggagcttactgtaatacaggtttcactgtgtttctgttaggcctaagaagcttcttcaggaaataaagcagaaacagtaattggtaacttgtaagctgatatttgttttctaggcactactcaaaataataacataagaactgaaacaacttgaaarggccgggttcagactctgctgtatgaagtactgaaacacaaataacctgtaatttctatttttagcttctgaaaagagaagagtcatattttggcagtggggtgcactagattaatttttccattctcaaatgtgagtaacccaagtttccattttgtactcctttaaaacaagctccaaca

SEQ ID NO: 18989 - DNA, 600 bp, Chicken  19866894228383_1
ttccatatctttcaataaaagtttctaataatgaaacattgatgtctttcaaggttcacctggtgccccagatcctcccgagatcatcggtgtcagcaaagacaccatcacaatatcctggaaaacacctcggagagctggcagctcccgaatttcgggatacatcgttcagaaacgcaagatgggcagcatgacctgggtgccagtcaacagtgtgcccgtagcaggtgggtagcttacttaaacccggaacaagtttgaaaggcttgagaaaagactgagagctcagctgtgttgggktcagaaggtaacgtacactattatatccatcaggtgcaggttagaacctgttttctgatatagaagagattaggattatcctaaaaggaaaagcagtgttatcctttttgtagcttgatagctctcaaagaatatttttttggaagagaatacaatgaacacacctctgaagtatgcatattttaggataagagaagacaagggagcttgggacagcatttgtactttactcctgagaattcagtctactgttctgcaaggagtaaagrtacaacattgtctcactgttttctgcctggg

SEQ ID NO: 18990 - DNA, 496 bp, Chicken  19866894228383_2
agaaaagactgagagctcagctgtgttgggktcagaaggtaacgtacactattatatccatcaggtgcaggttagaacctgttttctgatatagaagagattaggattatcctaaaaggaaaagcagtgttatcctttttgtagcttgatagctctcaaagaatatttttttggaagagaatacaatgaacacacctctgaagtatgcatattttaggataagagaagacaagggagcttgggacagcatttgtactttactcctgagaattcagtctactgttctgcaaggagtaaagrtacaacattgtctcactgttttctgcctggggaactgttcactcaagccagcatgctcgttttctttctgcagacaagaagctgaaaataaccgatctcaagaaaggtctgcagtatgaagttttgtgtggcagctgtcaatgcttctggcataaggagatatgagtgcaccgtcacaatctgtctttgctcggga

SEQ ID NO: 18991 - DNA, 600 bp, Chicken  19866894228391_1
ctgtttagctcactgggcacacatgcaatagacatttgaacgctgattccctgccagcaaacaggcagaagcgcaatactgcattagtaccctaaaacattaactttcctttcagactcagagccacacaggagaacacagggaagtctcctaccaccatctacctaaagagaacaaggttacaaaggcagaggatgcccatttgctttgttacagtgcacagcactttgcagggaacatgaccgtggagcaatcacagcgctgctgcttgccatctattcctacttggccctcccatcmtaaaacttaacctttcctctttcaaaaatgcgtaactcaaaacactgagctttttcataccctttgcatgctctggatggggcctcccaaatctctgacatatagcgtctagttgtaaaagcgttgttgtgaggcaagcaaaccatgacccccttactctactgcattccattctgatgggagagccaaaatccagaccatggaaaagaagttatccccagtaagatgaaggaaggtttccctctagaaagctcagccctgattcttgaggaaaccaaccttcctgccatcctccaaact

SEQ ID NO: 18992 - DNA, 600 bp, Chicken  19866894228392_1
tttcatgtttaatttgaagcctgtcacagaactgatgtgtttgaagtgacacattcagctgtgaagctgaagtcaaaagtgtgcatgtgtaataaaaaatgattctgtggtttttactgcatcagaatccaacaatttactttctgttaggctcagacccgcttttaccttttcgttacctcctctctgctttgcaagtctctcaagacctaatggtatacaaactcagttaaggtggggtattccaatggtacagtacttcaattacagaaaaataatgtgggaaatacatgggaaagraastaatagtaaaggtttggtccttctcattgtaaaccagtgatttagcatttcaggagctttgctgtcatagcagggggaggattggaaaggcagtaatgacgatgtactttacaatactggaaggtagagaaagattctgttgatctctgcttgagacctatagagttaatcctttgctacttattaatgtgagctgttacctagagatgatgattttcttgctaactgaatgtagatttaaatagcatgtggcaaaagccaaaaatgatgtggcagattgctctcwaatatattaag

SEQ ID NO: 18993 - DNA, 600 bp, Chicken  19866894228392_2
catgtttaatttgaagcctgtcacagaactgatgtgtttgaagtgacacattcagctgtgaagctgaagtcaaaagtgtgcatgtgtaataaaaaatgattctgtggtttttactgcatcagaatccaacaatttactttctgttaggctcagacccgcttttaccttttcgttacctcctctctgctttgcaagtctctcaagacctaatggtatacaaactcagttaaggtggggtattccaatggtacagtacttcaattacagaaaaataatgtgggaaatacatgggaaagraastaatagtaaaggtttggtccttctcattgtaaaccagtgatttagcatttcaggagctttgctgtcatagcagggggaggattggaaaggcagtaatgacgatgtactttacaatactggaaggtagagaaagattctgttgatctctgcttgagacctatagagttaatcctttgctacttattaatgtgagctgttacctagagatgatgattttcttgctaactgaatgtagatttaaatagcatgtggcaaaagccaaaaatgatgtggcagattgctctcwaatatattaagctt

SEQ ID NO: 18994 - DNA, 600 bp, Chicken  19866894228392_3
catgggaaagraastaatagtaaaggtttggtccttctcattgtaaaccagtgatttagcatttcaggagctttgctgtcatagcagggggaggattggaaaggcagtaatgacgatgtactttacaatactggaaggtagagaaagattctgttgatctctgcttgagacctatagagttaatcctttgctacttattaatgtgagctgttacctagagatgatgattttcttgctaactgaatgtagatttaaatagcatgtggcaaaagccaaaaatgatgtggcagattgctctcwaatatattaagcttcacagcgtgcttagaagtaataatacacttactatagttgatatgtttatggatgcattctgtccatccctgatgggatgacatagtctatattctagacatagtatatattctatacttaaaacagacagaagtatcttatatttaacacttcctggttttatgtttttgagtcttgatctgcattgtgccattggtttccaagcagttcttaaatatgtcatctgatgtgatgtgttgcatcttcaaagaggatttgacatggtgtatgatctacactttaaga

SEQ ID NO: 18995 - DNA, 600 bp, Chicken  19866894228393_1
gtgtgtcagccacctctcccagctttgtatcttcagaaaacttgctgagggttcattctatcccctcatccaggtcactgatgaagatgttgaataagagcaaacccagcactgacaactggggaacatggctagttacaggcctcaaactagactctgcaccactgatcacagccctctgagcattcccagtcagccagttcttaatttacctcactgtccactcatctagctcacacttcataagtttacctagaaggatgttataggagacagtgtctatatttccttgttcctagwctgaaaattgtattggttggcaacatctgcttactttcaaagattgtgccatcaaggaggatggacctattctgtttgtctttgtaaagaatattgtagatggtagcacaggtagctggaatgagwagtagcaagcaagcaccagctcaggttagaaagtctacagtttaaaatggcatgagcaactagatgctcctgaggctgatgacctaaggggatcaagaagaagggaaaagagggagaggaaatttttagaaagttgtctcatggacacagtagagaaagaccaatattattgta

SEQ ID NO: 18996 - DNA, 600 bp, Chicken  19866894228393_2
catggctagttacaggcctcaaactagactctgcaccactgatcacagccctctgagcattcccagtcagccagttcttaatttacctcactgtccactcatctagctcacacttcataagtttacctagaaggatgttataggagacagtgtctatatttccttgttcctagwctgaaaattgtattggttggcaacatctgcttactttcaaagattgtgccatcaaggaggatggacctattctgtttgtctttgtaaagaatattgtagatggtagcacaggtagctggaatgagwagtagcaagcaagcaccagctcaggttagaaagtctacagtttaaaatggcatgagcaactagatgctcctgaggctgatgacctaaggggatcaagaagaagggaaaagagggagaggaaatttttagaaagttgtctcatggacacagtagagaaagaccaatattattgtaacttactgtgtaattactcttcactaggtatacatatggagcacagctgtagttaatctctctgtcaccaacaccaagcaactcattccattaagttgtagatatactaagacatcttaacttttg

SEQ ID NO: 18997 - DNA, 600 bp, Chicken  19866894228398_1
accagttccagatatcagcaaaagtagaagtcccttctcccttatgtagacaaaaagttggaaggaactgagtttgcttagtctggagaagaggaggctcacgagagaccttattgttctctccagcttgtgaaaagaggttgcagcaaggtgggattggccttttctcccatataacagtgataggatgagagggaatgacatcaagttgcactagggaggttcaggttgcatattaagaaaaatttcttctaagatgagtggtgaggtgttgggacgggctgaccagggatgtgttgragtcactgtccctggaggtgttcaaggaatgtgtagatgtggcactgagggacatggtttgcgggcatggtggtgatgtgttgatgkttggactggatgaccttagaggtcttttccaatcttgatgattctattattatatatttctcaacatgtaatgaggcagcacatctcatcagtgttttggaattgcagtatctccaktaaacgttgtgttaggtaatagagataaaattgataaaaaaatgcatgaaatgaaaatggatctggaaattttttccaactagtttagcaatactt

SEQ ID NO: 18998 - DNA, 600 bp, Chicken  19866894228398_2
gaagaggaggctcacgagagaccttattgttctctccagcttgtgaaaagaggttgcagcaaggtgggattggccttttctcccatataacagtgataggatgagagggaatgacatcaagttgcactagggaggttcaggttgcatattaagaaaaatttcttctaagatgagtggtgaggtgttgggacgggctgaccagggatgtgttgragtcactgtccctggaggtgttcaaggaatgtgtagatgtggcactgagggacatggtttgcgggcatggtggtgatgtgttgatgkttggactggatgaccttagaggtcttttccaatcttgatgattctattattatatatttctcaacatgtaatgaggcagcacatctcatcagtgttttggaattgcagtatctccaktaaacgttgtgttaggtaatagagataaaattgataaaaaaatgcatgaaatgaaaatggatctggaaattttttccaactagtttagcaatactttctgggtgggctatggcagatgatcatacccacaggcactgggaagatatcccagagttctgtctcttgaagtaaaatgcatatgtc

SEQ ID NO: 18999 - DNA, 600 bp, Chicken  19866894228398_3
caagttgcactagggaggttcaggttgcatattaagaaaaatttcttctaagatgagtggtgaggtgttgggacgggctgaccagggatgtgttgragtcactgtccctggaggtgttcaaggaatgtgtagatgtggcactgagggacatggtttgcgggcatggtggtgatgtgttgatgkttggactggatgaccttagaggtcttttccaatcttgatgattctattattatatatttctcaacatgtaatgaggcagcacatctcatcagtgttttggaattgcagtatctccaktaaacgttgtgttaggtaatagagataaaattgataaaaaaatgcatgaaatgaaaatggatctggaaattttttccaactagtttagcaatactttctgggtgggctatggcagatgatcatacccacaggcactgggaagatatcccagagttctgtctcttgaagtaaaatgcatatgtcctcattcagctggattgcaatgtatttaaattctgtatgtaccagcattattttttttagcagcgtggataaagacaatttgagattgtgtttcttccaaaatgtagccattacatc

SEQ ID NO: 19000 - DNA, 600 bp, Chicken  19866894228399_1
tccctgctcaaaccctctttgtgccccttcatggggctccgggttcaaacccgccctacagtcagatccctctctgccgttgcacaggtgagaagcagaacgctctcattctggcactcaggctgggaaccaggtaatcctataagcaagccgagccgccactttgaagctttcggagaaaacagttataatttcctaacagacttcaaaatcagggtggtaaacacgtgcccaaggcagaccgccctttgaaggataccgcagatagcatcttcctaagcagatctcgacttccttcartgcaaacagaatgctggggataagtgctgagacatgtctctaagtgaactggcattcagaggctcggctcttatctctgtcatcttgtcaatgtgataggagcgggtgagcaaagccaaggttagctaccggcccgccaacaatagcagcatgtggtgcctttcagagcgtgaatgcccgtttttttactgcaggtgctcttgtggtgcggccacaggaggaaagcaataactgacatccttttccattcaatttacagtgaaaagagcgtttgtaatttcggagttgactggctgaagc

SEQ ID NO: 19001 - DNA, 600 bp, Chicken  19866894228399_2
ctaagctccaaggggttctggcccactttcattcatatttaaatgtatgcgttcacactcgggggaacagggacaccgagaaacggttcctaatattgcaaattacagctttcctccaggtcttgtgtgctgtgcacaaagcaaaacaactgaacgcagatttgcatcagtgtcccatgaggagcgttaaaggttagaagcacaagcagctggaaaacgcataaagagcacaacacagagtacaggttcggttccttcttttcagaatattcccctcccatttgccttctgatcggcagytctgaaaggcccagaaattgctgtctacagcgcataatcctgtgcacaaacacacacaaatggcacagatcacttcagccatatctgtgaggggaaatgcaactctgaatggaaatgcctggacataggaggacaatctcacttggttttggttttcaattttcttatataggtgcttagcaacgtttccttaaaaacaggtatacaaattgagcatggcaaatacctcaggtaggcccctgtagtaaagaacactttgaacaaggaactgaaacaatgacactgaagtgaagaggggag

SEQ ID NO: 19002 - DNA, 599 bp, Chicken  19866894228401_1
  misc_feature (1)..(144): n is any nucleotide
nnnnnnnnnnnnnnnnnnnnnnnnnnnnnnnnnnnnnnnnnnnnnnnnnnnnnnnnnnnnnnnnnnnnnnnnnnnnnnnnnnnnnnnnnnnnnnnnnnnnnnnnnnnnnnnnnnnnnnnnnnnnnnnnnnnnnnnnnnnnnnnntgtgctatctcacatccaggcaggagccacctagagcagactcatgagctctcatgagccaaaagtggccctgataaatactcttaccaaacacgtttgtctgctagttaactatggctgtcttctgttgtgacagagatggccagttggacacamgctctcaggaagctctttgttttccagtamcaaggcccaagaggaggtgtgcctgcttactgggtgtttcacactggcttcattcaaagccataaatgctawggttgttctgaacaagaggattcttttctttgtgctacagcaaaccaacatcacagccttaaaatgcttccctaactctttacccgggtttctggagctgaagtaamtcttgtaactacaaagggtgggtttatcattactttcaattaataactttgtctatccttttcattgtaatttcttrttcacctcagaga

SEQ ID NO: 19003 - DNA, 599 bp, Chicken  19866894228401_2
  misc_feature (1)..(114): n is any nucleotide
nnnnnnnnnnnnnnnnnnnnnnnnnnnnnnnnnnnnnnnnnnnnnnnnnnnnnnnnnnnnnnnnnnnnnnnnnnnnnnnnnnnnnnnnnnnnnnnnnnnnnnnnnnnnnnnnnntgtgctatctcacatccaggcaggagccacctagagcagactcatgagctctcatgagccaaaagtggccctgataaatactcttaccaaacacgtttgtctgctagttaactatggctgtcttctgttgtgacagagatggccagttggacacamgctctcaggaagctctttgttttccagtamcaaggcccaagaggaggtgtgcctgcttactgggtgtttcacactggcttcattcaaagccataaatgctawggttgttctgaacaagaggattcttttctttgtgctacagcaaaccaacatcacagccttaaaatgcttccctaactctttacccgggtttctggagctgaagtaamtcttgtaactacaaagggtgggtttatcattactttcaattaataactttgtctatccttttcattgtaatttcttrttcacctcagagaactatttacatatatttacatgtacttatt

SEQ ID NO: 19004 - DNA, 599 bp, Chicken  19866894228401_3
  misc_feature (1)..(42): n is any nucleotide
nnnnnnnnnnnnnnnnnnnnnnnnnnnnnnnnnnnnnnnnnntgtgctatctcacatccaggcaggagccacctagagcagactcatgagctctcatgagccaaaagtggccctgataaatactcttaccaaacacgtttgtctgctagttaactatggctgtcttctgttgtgacagagatggccagttggacacamgctctcaggaagctctttgttttccagtamcaaggcccaagaggaggtgtgcctgcttactgggtgtttcacactggcttcattcaaagccataaatgctawggttgttctgaacaagaggattcttttctttgtgctacagcaaaccaacatcacagccttaaaatgcttccctaactctttacccgggtttctggagctgaagtaamtcttgtaactacaaagggtgggtttatcattactttcaattaataactttgtctatccttttcattgtaatttcttrttcacctcagagaactatttacatatatttacatgtacttatttatatactttaacaaatgtactcatgtgaaaacagagcatttccccgataagctcaaacctgtttccctatc

SEQ ID NO: 19005 - DNA, 600 bp, Chicken  19866894228401_4
tggccctgataaatactcttaccaaacacgtttgtctgctagttaactatggctgtcttctgttgtgacagagatggccagttggacacamgctctcaggaagctctttgttttccagtamcaaggcccaagaggaggtgtgcctgcttactgggtgtttcacactggcttcattcaaagccataaatgctawggttgttctgaacaagaggattcttttctttgtgctacagcaaaccaacatcacagccttaaaatgcttccctaactctttacccgggtttctggagctgaagtaamtcttgtaactacaaagggtgggtttatcattactttcaattaataactttgtctatccttttcattgtaatttcttrttcacctcagagaactatttacatatatttacatgtacttatttatatactttaacaaatgtactcatgtgaaaacagagcatttccccgataagctcaaacctgtttccctatcattgcacttccctttcacttcaccttttgtttcttgatatttattcctttctgaagtattccattttgctactacagacatctttctttttctgatatcccctaagtt

SEQ ID NO: 19006 - DNA, 600 bp, Chicken  19866894228401_5
ccagttggacacamgctctcaggaagctctttgttttccagtamcaaggcccaagaggaggtgtgcctgcttactgggtgtttcacactggcttcattcaaagccataaatgctawggttgttctgaacaagaggattcttttctttgtgctacagcaaaccaacatcacagccttaaaatgcttccctaactctttacccgggtttctggagctgaagtaamtcttgtaactacaaagggtgggtttatcattactttcaattaataactttgtctatccttttcattgtaatttcttrttcacctcagagaactatttacatatatttacatgtacttatttatatactttaacaaatgtactcatgtgaaaacagagcatttccccgataagctcaaacctgtttccctatcattgcacttccctttcacttcaccttttgtttcttgatatttattcctttctgaagtattccattttgctactacagacatctttctttttctgatatcccctaagttgtttaattcttctcagtaaaattcttgatgttaataagcactgyattaagctttactttaaaaaagaatagtaaaat

SEQ ID NO: 19007 - DNA, 490 bp, Chicken  19866894228401_6
aactttgtctatccttttcattgtaatttcttrttcacctcagagaactatttacatatatttacatgtacttatttatatactttaacaaatgtactcatgtgaaaacagagcatttccccgataagctcaaacctgtttccctatcattgcacttccctttcacttcaccttttgtttcttgatatttattcctttctgaagtattccattttgctactacagacatctttctttttctgatatcccctaagttgtttaattcttctcagtaaaattcttgatgttaataagcactgyattaagctttactttaaaaaagaatagtaaaatgtaacaaaaaaaacccactatagtagcactacgacaaactgaaggaagccagaagccaccgtgctctatttactgctgctacaaaaccaaaaagcattatgattcactcttgcatgtcctttcttaaacctgtaatcccatttactggaaacagtcc

SEQ ID NO: 19008 - DNA, 600 bp, Chicken  19866894228402_1
tacgtgaaagtaaccaagtagtagggtgtttctgtctacttaatatcaaaaaaaacccaaacatctgttgatgaaaaacaaacaaacacaaaaaaactaaatcccattaggtagctgagagatatgaagatatgatgtaattagaacaagcaaaaggggtcattcccagacagttgtttgtgggcaaaaattagaaagaagccttttccactgcacttattacagtaatctattcgatcagatgttatctgtgttcttagatgtgagtgagaatataacattctgcagaaagagaatacrtaattaaaaaaagtgggtgcaaacagcctccttcccagagcaaacctgacaaaggaagctgaaggcagtttgcatctgagctttccagggaattgagcaacagcttgtgcgaatgagcacagtrcctatgtcctgctcatacctgcaaaaggacatttgttaattaaataagcccccattgcacacagctctgtttgattattatcaatgtgctaattttgtcattaggaaaaataaacagcgcatctttgccacctgccaggttttactcattcagagcagccctttctggctgcattg

SEQ ID NO: 19009 - DNA, 600 bp, Chicken  19866894228402_2
tgaagatatgatgtaattagaacaagcaaaaggggtcattcccagacagttgtttgtgggcaaaaattagaaagaagccttttccactgcacttattacagtaatctattcgatcagatgttatctgtgttcttagatgtgagtgagaatataacattctgcagaaagagaatacrtaattaaaaaaagtgggtgcaaacagcctccttcccagagcaaacctgacaaaggaagctgaaggcagtttgcatctgagctttccagggaattgagcaacagcttgtgcgaatgagcacagtrcctatgtcctgctcatacctgcaaaaggacatttgttaattaaataagcccccattgcacacagctctgtttgattattatcaatgtgctaattttgtcattaggaaaaataaacagcgcatctttgccacctgccaggttttactcattcagagcagccctttctggctgcattggctgcctggcaggtgggctcccgcttggcgctgcctcctgcagcttgctctgctccaaaagcaaattggggtcacacagctgcagcaaattgagttacagttagccaataaagccctagttaaa

SEQ ID NO: 19010 - DNA, 600 bp, Chicken  19866894228402_3
agataaacccagagttagctctctcaaggcgtggggtttgttcctggatccagctctgacttctcatgtggtcccagccagggcactgcttgcttgttgtttgtgctgacacacacgcacacactgaggctctagtccatttggcttaataccgtgcaagcatccaatgaaacgattcccctgcgcagatgtgcagaggggaaaatgaagtagttgtgatctctttgctgcagtgttttgctatctctatgaatcagagtgtgtggtgtgggcaggctgtctgtgctatttgtggtgtgraacatcctgtcctacacctggcttggattgtgcccaggcaataggcactaggttttgaggcagctgcaactcttcccattgtgtgcaccactaggagttgcatgaagggctaaagtagcgtattccaagtaggcacctgaagtaatatgcttctccccctggtgaatccaaataattaacattaattagagctacgcacatgcattaagagcagactccagcactctggggaaattttattttcaattaagtgacaaaaatacttttaaaggcggatagctctgaaaacaaagggcactt

SEQ ID NO: 19011 - DNA, 600 bp, Chicken  19866894228402_4
catgcattaagagcagactccagcactctggggaaattttattttcaattaagtgacaaaaatacttttaaaggcggatagctctgaaaacaaagggcacttctgtgtgaagatacacaactttgttttaaacaagtctgctaagaaattaaaggcagaagcatcatatctgaacagcatcacccactgagcaaggccttttcacagcgttaattagccttggtgcaacttacagctcagctgcattttcaggcatctggtgatgttttttccatcgcactgcccttcaccatgaagatrccctgaatcactcactgagagtctgggaatccctcatacttgtcagtgccatgaagatatggccaaggacataggtcgtttcagctgactggcaggctaaatgcagggagatggacttttttaggtacgtgtggtattatagttgtattcccatatgctcttcaccagcaggacagtataaacatattttaatatatgaattgtcacacctsaaacttgcattgattcctttttccattactaaatcctacatttagaagccagggattgacagaacatggcagccgtgtgactttaact

SEQ ID NO: 19012 - DNA, 600 bp, Chicken  19866894228402_5
attagccttggtgcaacttacagctcagctgcattttcaggcatctggtgatgttttttccatcgcactgcccttcaccatgaagatrccctgaatcactcactgagagtctgggaatccctcatacttgtcagtgccatgaagatatggccaaggacataggtcgtttcagctgactggcaggctaaatgcagggagatggacttttttaggtacgtgtggtattatagttgtattcccatatgctcttcaccagcaggacagtataaacatattttaatatatgaattgtcacacctsaaacttgcattgattcctttttccattactaaatcctacatttagaagccagggattgacagaacatggcagccgtgtgactttaactcagttgctttgtgtttttatgttttgagtggctcttcttgtacatagtcacaatctctaagttctctgagcacctgcctgattggcaagcagggtggatgaagctcagacgatgtgcagatgtttgatatttcttgttagctttgccattcagcatgtggccccatgcattatttactatggcttcaatgatgcttttaaggcagaatctgc

SEQ ID NO: 19013 - DNA, 600 bp, Chicken  19866894228406_1
ggttaagtagggctgcgcttggcatcagttttgtggtgtgtcaaaatttaagctctttttgtgtgtgtgtgtgaatttttgttccaagctttacattcaagtgttgtattttcgttttatggagttatgtaactgatgctgtcgttggagctgaggaaaaaatggggtttatttgtagctgctgaaggtgttatttaggttacgtatttgtgaaaatgcagtcaatccttttcgtttcaaactcaggataatttctgggggtccctctgctgtacatccccagactgcacaatggccccrtcgtcccctcatygaccatcatccagccctatacgttatgcatttttcaaatcactttacatttgttctgtattgctgcgttgtgacgatccgctgatgctacgtaaccagcctgtgctggtggtttgctaacactggaaaatcaaggccaccagaaacaataattacaaattctagcacctcataaatgttaaagagcataacagcagcattcatgtggtttgcttactaagaaatccacagagaaatccatttaagcacacattgaagtctcagcgatctcatgaggacacagtgcgt

SEQ ID NO: 19014 - DNA, 600 bp, Chicken  19866894228406_2
tgcgcttggcatcagttttgtggtgtgtcaaaatttaagctctttttgtgtgtgtgtgtgaatttttgttccaagctttacattcaagtgttgtattttcgttttatggagttatgtaactgatgctgtcgttggagctgaggaaaaaatggggtttatttgtagctgctgaaggtgttatttaggttacgtatttgtgaaaatgcagtcaatccttttcgtttcaaactcaggataatttctgggggtccctctgctgtacatccccagactgcacaatggccccrtcgtcccctcatygaccatcatccagccctatacgttatgcatttttcaaatcactttacatttgttctgtattgctgcgttgtgacgatccgctgatgctacgtaaccagcctgtgctggtggtttgctaacactggaaaatcaaggccaccagaaacaataattacaaattctagcacctcataaatgttaaagagcataacagcagcattcatgtggtttgcttactaagaaatccacagagaaatccatttaagcacacattgaagtctcagcgatctcatgaggacacagtgcgtgctgcrgttgtgt

SEQ ID NO: 19015 - DNA, 600 bp, Chicken  19866894228406_3
cctcatygaccatcatccagccctatacgttatgcatttttcaaatcactttacatttgttctgtattgctgcgttgtgacgatccgctgatgctacgtaaccagcctgtgctggtggtttgctaacactggaaaatcaaggccaccagaaacaataattacaaattctagcacctcataaatgttaaagagcataacagcagcattcatgtggtttgcttactaagaaatccacagagaaatccatttaagcacacattgaagtctcagcgatctcatgaggacacagtgcgtgctgcrgttgtgtgcgtaacgggtggggtgagagcgcacgcgtcactgcgctgctgagttctgctggggggcagaggagaggcccacctccacagcttggagggggcaccaggaggtcctggttggctctctttgtgtcggtttgtttgcttgcttgttggtttttcctgagttgggcattgatatcagtaaatcactgcagtagctgtcacggggtaaaacatgtggagccaatatataacatttaattaaaaaaaacccagcagtaatttgttttgatgttgcaaatctatttggacgaattgt

SEQ ID NO: 19016 - DNA, 599 bp, Chicken  19866894228412_1
  misc_feature (1)..(114): n is any nucleotide
nnnnnnnnnnnnnnnnnnnnnnnnnnnnnnnnnnnnnnnnnnnnnnnnnnnnnnnnnnnnnnnnnnnnnnnnnnnnnnnnnnnnnnnnnnnnnnnnnnnnnnnnnnnnnnnnnnctcccaacagcaaagttggattatttcagccaccagactaagaatctactgagataagctcattccttttatgtggacgggagcaacatcccaaaccaaggctcctgctggttctttctggctcacagttgatagtaaaccaacagtgcatgatgcaaaataatttccatctctttccctccttasctttgctggctctgcaggacagcctgggacraacagcaggaaaactattacatctagcctggttttagrtcaaaagccctgtgacgtgttaaatcaacacagggaccaacatttcctcttaggcctatacagtgttaaatgcaagtcaaaagccaagtaaacctctaagctcctttatcgctagaaaaaccatcagacacaactgctggtatctcaccatctctctggcacagagtttcccaggtaaacagatccaatttactccagaaagaagaatcttaggattgctgctcagctag

SEQ ID NO: 19017 - DNA, 599 bp, Chicken  19866894228412_2
  misc_feature (1)..(83): n is any nucleotide
nnnnnnnnnnnnnnnnnnnnnnnnnnnnnnnnnnnnnnnnnnnnnnnnnnnnnnnnnnnnnnnnnnnnnnnnnnnnnnnnnnnctcccaacagcaaagttggattatttcagccaccagactaagaatctactgagataagctcattccttttatgtggacgggagcaacatcccaaaccaaggctcctgctggttctttctggctcacagttgatagtaaaccaacagtgcatgatgcaaaataatttccatctctttccctccttasctttgctggctctgcaggacagcctgggacraacagcaggaaaactattacatctagcctggttttagrtcaaaagccctgtgacgtgttaaatcaacacagggaccaacatttcctcttaggcctatacagtgttaaatgcaagtcaaaagccaagtaaacctctaagctcctttatcgctagaaaaaccatcagacacaactgctggtatctcaccatctctctggcacagagtttcccaggtaaacagatccaatttactccagaaagaagaatcttaggattgctgctcagctagcagaatatgcgggcaagcaggtactaatcca

SEQ ID NO: 19018 - DNA, 599 bp, Chicken  19866894228412_3
  misc_feature (1)..(45): n is any nucleotide
nnnnnnnnnnnnnnnnnnnnnnnnnnnnnnnnnnnnnnnnnnnnnctcccaacagcaaagttggattatttcagccaccagactaagaatctactgagataagctcattccttttatgtggacgggagcaacatcccaaaccaaggctcctgctggttctttctggctcacagttgatagtaaaccaacagtgcatgatgcaaaataatttccatctctttccctccttasctttgctggctctgcaggacagcctgggacraacagcaggaaaactattacatctagcctggttttagrtcaaaagccctgtgacgtgttaaatcaacacagggaccaacatttcctcttaggcctatacagtgttaaatgcaagtcaaaagccaagtaaacctctaagctcctttatcgctagaaaaaccatcagacacaactgctggtatctcaccatctctctggcacagagtttcccaggtaaacagatccaatttactccagaaagaagaatcttaggattgctgctcagctagcagaatatgcgggcaagcaggtactaatccagggagaaatcacagtgtcaaggtcttgaacttgagccc

SEQ ID NO: 19019 - DNA, 600 bp, Chicken  19866894228412_4
caacatttcctcttaggcctatacagtgttaaatgcaagtcaaaagccaagtaaacctctaagctcctttatcgctagaaaaaccatcagacacaactgctggtatctcaccatctctctggcacagagtttcccaggtaaacagatccaatttactccagaaagaagaatcttaggattgctgctcagctagcagaatatgcgggcaagcaggtactaatccagggagaaatcacagtgtcaaggtcttgaacttgagccccatagtgtttctcactgagcactccaccagctgatcarggacaytggctacctgtaaatctgtgctgaygacactgacccytctcccttatcatttataatctcatctgcgccagacaaaaagatgacagtgaggcgtgctgctgacccaccctgctctggtctcagctgttagccttgcaaacagcaatcactaccaccactgccatctcccttttagaaatcagtctttctctgcaggccagctgggaggaggatttcaaacagctgtctgattgatgcaacatggagcacatctctctgcccctgacctccccaatctgcagccataaagcgaag

SEQ ID NO: 19020 - DNA, 600 bp, Chicken  19866894228412_5
ttcctcttaggcctatacagtgttaaatgcaagtcaaaagccaagtaaacctctaagctcctttatcgctagaaaaaccatcagacacaactgctggtatctcaccatctctctggcacagagtttcccaggtaaacagatccaatttactccagaaagaagaatcttaggattgctgctcagctagcagaatatgcgggcaagcaggtactaatccagggagaaatcacagtgtcaaggtcttgaacttgagccccatagtgtttctcactgagcactccaccagctgatcarggacaytggctacctgtaaatctgtgctgaygacactgacccytctcccttatcatttataatctcatctgcgccagacaaaaagatgacagtgaggcgtgctgctgacccaccctgctctggtctcagctgttagccttgcaaacagcaatcactaccaccactgccatctcccttttagaaatcagtctttctctgcaggccagctgggaggaggatttcaaacagctgtctgattgatgcaacatggagcacatctctctgcccctgacctccccaatctgcagccataaagcgaagatgaaa

SEQ ID NO: 19021 - DNA, 600 bp, Chicken  19866894228412_6
aatgcaagtcaaaagccaagtaaacctctaagctcctttatcgctagaaaaaccatcagacacaactgctggtatctcaccatctctctggcacagagtttcccaggtaaacagatccaatttactccagaaagaagaatcttaggattgctgctcagctagcagaatatgcgggcaagcaggtactaatccagggagaaatcacagtgtcaaggtcttgaacttgagccccatagtgtttctcactgagcactccaccagctgatcarggacaytggctacctgtaaatctgtgctgaygacactgacccytctcccttatcatttataatctcatctgcgccagacaaaaagatgacagtgaggcgtgctgctgacccaccctgctctggtctcagctgttagccttgcaaacagcaatcactaccaccactgccatctcccttttagaaatcagtctttctctgcaggccagctgggaggaggatttcaaacagctgtctgattgatgcaacatggagcacatctctctgcccctgacctccccaatctgcagccataaagcgaagatgaaagttggacaaaaccagaaagggtagg

SEQ ID NO: 19022 - DNA, 600 bp, Chicken  19866894228412_7
aagccaagtaaacctctaagctcctttatcgctagaaaaaccatcagacacaactgctggtatctcaccatctctctggcacagagtttcccaggtaaacagatccaatttactccagaaagaagaatcttaggattgctgctcagctagcagaatatgcgggcaagcaggtactaatccagggagaaatcacagtgtcaaggtcttgaacttgagccccatagtgtttctcactgagcactccaccagctgatcarggacaytggctacctgtaaatctgtgctgaygacactgacccytctcccttatcatttataatctcatctgcgccagacaaaaagatgacagtgaggcgtgctgctgacccaccctgctctggtctcagctgttagccttgcaaacagcaatcactaccaccactgccatctcccttttagaaatcagtctttctctgcaggccagctgggaggaggatttcaaacagctgtctgattgatgcaacatggagcacatctctctgcccctgacctccccaatctgcagccataaagcgaagatgaaagttggacaaaaccagaaagggtaggaaagctttcagc

SEQ ID NO: 19023 - DNA, 599 bp, Chicken  19866894228414_1
  misc_feature (1)..(163): n is any nucleotide
nnnnnnnnnnnnnnnnnnnnnnnnnnnnnnnnnnnnnnnnnnnnnnnnnnnnnnnnnnnnnnnnnnnnnnnnnnnnnnnnnnnnnnnnnnnnnnnnnnnnnnnnnnnnnnnnnnnnnnnnnnnnnnnnnnnnnnnnnnnnnnnnnnnnnnnnnnnnnnnnnnnagctgcttcagtgagcctgttaactgcagaccaaagctggctggagcccgaagctcagaggcttcttggctgttggtggcagctgcactggaggacacatttggaggtgtagaccatcctgagctgggagccacagrgggtcattgagtccatgctctgctcacagagctgctttgtccccggatcttgtggcattgccttcgtgcttctcaaatattccaaatgtttcycacacctctctgcattcacacacgctgtatggtggccaaaacaccgctttgagtaaatcaatgctttaatcaaagsctaaaactgaactgagtgaactgactcatctcagtggcagtgattcagcccactgccagcaatgggcacaagaacttcttgctcagtgggctggatggctttcacttaccaggctctggtattcctggtt

SEQ ID NO: 19024 - DNA, 599 bp, Chicken  19866894228414_2
  misc_feature (1)..(70): n is any nucleotide
nnnnnnnnnnnnnnnnnnnnnnnnnnnnnnnnnnnnnnnnnnnnnnnnnnnnnnnnnnnnnnnnnnnnnnagctgcttcagtgagcctgttaactgcagaccaaagctggctggagcccgaagctcagaggcttcttggctgttggtggcagctgcactggaggacacatttggaggtgtagaccatcctgagctgggagccacagrgggtcattgagtccatgctctgctcacagagctgctttgtccccggatcttgtggcattgccttcgtgcttctcaaatattccaaatgtttcycacacctctctgcattcacacacgctgtatggtggccaaaacaccgctttgagtaaatcaatgctttaatcaaagsctaaaactgaactgagtgaactgactcatctcagtggcagtgattcagcccactgccagcaatgggcacaagaacttcttgctcagtgggctggatggctttcacttaccaggctctggtattcctggttttctcagcccagtctacatttttgctctttaaaagggtattacagtttgttcttgccataatgtgtttattttctcttccttctaacagatgt

SEQ ID NO: 19025 - DNA, 600 bp, Chicken  19866894228414_3
ttcagtgagcctgttaactgcagaccaaagctggctggagcccgaagctcagaggcttcttggctgttggtggcagctgcactggaggacacatttggaggtgtagaccatcctgagctgggagccacagrgggtcattgagtccatgctctgctcacagagctgctttgtccccggatcttgtggcattgccttcgtgcttctcaaatattccaaatgtttcycacacctctctgcattcacacacgctgtatggtggccaaaacaccgctttgagtaaatcaatgctttaatcaaagsctaaaactgaactgagtgaactgactcatctcagtggcagtgattcagcccactgccagcaatgggcacaagaacttcttgctcagtgggctggatggctttcacttaccaggctctggtattcctggttttctcagcccagtctacatttttgctctttaaaagggtattacagtttgttcttgccataatgtgtttattttctcttccttctaacagatgttaagcaattagaacatggcagagcaacatatttatacaaatgaaaggaagtaaggaataaatgttctgaatattata

SEQ ID NO: 19026 - DNA, 600 bp, Chicken  19866894228416_1
agacacagccctgcctgtgtgcttaatggctttttgtcaggacaagttaacacggtgtccatggagcatattatcacagccaccaaagccatgaaagcgtatgactggagacttctggacccacagaccagaggaggcgctttcccattgtggcccattgtgctgcacaacagtgctcggtgggtacagcagagctgcccagccctgcccacctccctgcagcaccaccagccttgagatttgctttcttgctagaaagcctccccaggagttggaaaccctcaatcagcaccggctgcygctgtgctcaccacaatctgtggcttggcagcactgcatgactttggacagtcttccttgccaagggacaaactaattcacacatggagttatggatgcaatcatctcctttttaaagcccatttctatccttaattgcgtgcacacaaagacatctattctctcgagcacgtcagtgatgttattaacacttaggagcacagaaatagctctctccctccccccatcaagagggacattcggtctttraatatggacacrccatttcagcctaagttcttagaaagtatctgctgaaat

SEQ ID NO: 19027 - DNA, 400 bp, Chicken  19866894228416_2
tgctagaaagcctccccaggagttggaaaccctcaatcagcaccggctgcygctgtgctcaccacaatctgtggcttggcagcactgcatgactttggacagtcttccttgccaagggacaaactaattcacacatggagttatggatgcaatcatctcctttttaaagcccatttctatccttaattgcgtgcacacaaagacatctattctctcgagcacgtcagtgatgttattaacacttaggagcacagaaatagctctctccctccccccatcaagagggacattcggtctttraatatggacacrccatttcagcctaagttcttagaaagtatctgctgaaatccaactggatgtttgttttctggtttggtttcctttgatagatctccag

SEQ ID NO: 19028 - DNA, 388 bp, Chicken  19866894228416_3
tccccaggagttggaaaccctcaatcagcaccggctgcygctgtgctcaccacaatctgtggcttggcagcactgcatgactttggacagtcttccttgccaagggacaaactaattcacacatggagttatggatgcaatcatctcctttttaaagcccatttctatccttaattgcgtgcacacaaagacatctattctctcgagcacgtcagtgatgttattaacacttaggagcacagaaatagctctctccctccccccatcaagagggacattcggtctttraatatggacacrccatttcagcctaagttcttagaaagtatctgctgaaatccaactggatgtttgttttctggtttggtttcctttgatagatctccag

SEQ ID NO: 19029 - DNA, 600 bp, Chicken  19866894228424_1
gtattgtcatgcaattagtttctattataagtaaactgaagttaaatgtgaacaccagacctccaacttagtaacatggtttgagtgaaaaggatctggttctccacataatgtctcatcaagtggtgcatattttagatatgtttaagttaaaccttttttattgttaagttcttcatatgtttggagttttggaataaatattttcttaaagagaaagcaatgactgtacaagaaaatggttccccaaaaatgagttctgagatttggggacaaaactatgagatggtaaagaaaatrgccctattgcattcatgcagtaattaaaaattgcgtgctcttgacattttgccttttattggttccttagagatatatttattataccttaagaaaatggtgtctgttctttggcagttattctccttgttttgttaatgctgagaattttcgtaggaggatggaaggtttgaaggcccaaccttggctcaggctgtcgaactgtttggaggcagacgatggagcacaaggaacacaaacacaggaactctgaccaaaagcactgagaaacctagtgtgcagagaaacaacactctggga

SEQ ID NO: 19030 - DNA, 600 bp, Chicken  19866894228426_1
ggaacagtgagacatttggtacctgaccagcatcgataggaaagactggtgggagtagggtatctttgtgttgaggagggacttagaattgtatagaaataaggaaggactatggctaagcagctctaaggtgttctataaagctgatgaatctgcttgtctgggtgagttattgccacaaattaatgtgaggtaagtgttctaaacaggagctgtgttagtggtaaagcatcggtgttgtatcatacaaactgttaaaacaattctgaagtctcagcattgatgtaatttctatactgwgtctttaagcagctctgtttctactggtgaagtaagcatttccaaaaccaaacctagtctatgagacaggaaggtttccatctgcataacctgagcctttcagcagacataaacactttgtaagaagtactgttgcaataaatgggagctagtcagaaagatatgaagcgtttattagtgttaaagatttttgtcattccttctattatattggcagttaataggaggagctaaatatgtttgttcctggtgaaacaaagctatggtggcagcacttagaaaatgcattgaaaagccctg

SEQ ID NO: 19031 - DNA, 600 bp, Chicken  19866894228426_2
atctccgtctcactctggaaataccatctgtgttcatttagttgctacagtgtgcttgctttttcctgttgcccattggtggcagtggcaactggtgaatataagccactttgggagacctctttgctcttcttttttcctcgtgttgtttatattgaaatagtagctagcttgccagtaccatctagcttatcttacgctatcccttcctccatttattttatggtggaaatgtgttgctgttgtgattttgtttccctacagatgaggtatccgttcatgtcaatgtctttaaaagcmttctggaacaacaacagcaaaaaagtactatgagatatatacatacaaaagggaaaacaactatttaatatgggatgtagttatgttatttttttattatgtagttcacacacagtgcttcccaatgtagctttagaaacaaggctttgtcyraaacagtttgacagccaaataagaagttcaattccaactctttctgtttataacttgcttttatttgttagaagaaaacaaagcattgcaggtattgatggaaaacagacagaataaatattaaataagctctcggttattgttgag

SEQ ID NO: 19032 - DNA, 600 bp, Chicken  19866894228426_3
tattgaaatagtagctagcttgccagtaccatctagcttatcttacgctatcccttcctccatttattttatggtggaaatgtgttgctgttgtgattttgtttccctacagatgaggtatccgttcatgtcaatgtctttaaaagcmttctggaacaacaacagcaaaaaagtactatgagatatatacatacaaaagggaaaacaactatttaatatgggatgtagttatgttatttttttattatgtagttcacacacagtgcttcccaatgtagctttagaaacaaggctttgtcyraaacagtttgacagccaaataagaagttcaattccaactctttctgtttataacttgcttttatttgttagaagaaaacaaagcattgcaggtattgatggaaaacagacagaataaatattaaataagctctcggttattgttgagctctgtcacttaaacagctgtatttaccctttgctttcagacagcttggtacaataggtttggtttggtaaacagtggagtgtgttggttttacatacaatctttatatgaacatcctgaactgttgtacagtaatagccgagagctggcag

SEQ ID NO: 19033 - DNA, 600 bp, Chicken  19866894228426_4
attgaaatagtagctagcttgccagtaccatctagcttatcttacgctatcccttcctccatttattttatggtggaaatgtgttgctgttgtgattttgtttccctacagatgaggtatccgttcatgtcaatgtctttaaaagcmttctggaacaacaacagcaaaaaagtactatgagatatatacatacaaaagggaaaacaactatttaatatgggatgtagttatgttatttttttattatgtagttcacacacagtgcttcccaatgtagctttagaaacaaggctttgtcyraaacagtttgacagccaaataagaagttcaattccaactctttctgtttataacttgcttttatttgttagaagaaaacaaagcattgcaggtattgatggaaaacagacagaataaatattaaataagctctcggttattgttgagctctgtcacttaaacagctgtatttaccctttgctttcagacagcttggtacaataggtttggtttggtaaacagtggagtgtgttggttttacatacaatctttatatgaacatcctgaactgttgtacagtaatagccgagagctggcaga

SEQ ID NO: 19034 - DNA, 600 bp, Chicken  19866894228427_1
aaataatcataatctgctgaaattggaaagactgatatctatctgcctattatttctacaatgaaaccaagagtggggagcagagaaaaagggctcgaagtgcttgcaagcaggccgtttgtgaggagtgtgtgtgtgtgtgtgtgtgtgtgtgacagcatgcatctgtggcaggatgagtggcagtaatggtctctgcaggcaaatctgagccaaaaagctgtaaagcacaaaacacttgatgtagttagagtcacaaagtttcattaaagaggaacaaagatttgaaggcaaaaaggratctagaaagactgtggaacaccctctgggagactattttgaaaatgactgggggaaaaaactggaaaatttcaaaatggatgggagaataaatcatggcartagtgacagcgcagctagtgcaagccttccacacaggcaagctgctctgagcatcactagcagagatgatgaggtgctttaaatttcttttaccagtcctctgtgtctgcccagccataggatgaaatcagagccactggcctcaaaaccatgccaaatggaatgggtgcttccaaacttgtcacctgttatcaggaa

SEQ ID NO: 19035 - DNA, 600 bp, Chicken  19866894228427_2
cttgcaagcaggccgtttgtgaggagtgtgtgtgtgtgtgtgtgtgtgtgtgacagcatgcatctgtggcaggatgagtggcagtaatggtctctgcaggcaaatctgagccaaaaagctgtaaagcacaaaacacttgatgtagttagagtcacaaagtttcattaaagaggaacaaagatttgaaggcaaaaaggratctagaaagactgtggaacaccctctgggagactattttgaaaatgactgggggaaaaaactggaaaatttcaaaatggatgggagaataaatcatggcartagtgacagcgcagctagtgcaagccttccacacaggcaagctgctctgagcatcactagcagagatgatgaggtgctttaaatttcttttaccagtcctctgtgtctgcccagccataggatgaaatcagagccactggcctcaaaaccatgccaaatggaatgggtgcttccaaacttgtcacctgttatcaggaaggggaggtgggactttcccaattaaagaagaagggctgcacctggagtagtcttaacttacctaatcatagaatcatagaattgctcaggttggaaaagacc

SEQ ID NO: 19036 - DNA, 600 bp, Chicken  19866894228429_1
ttgctgttctacagtgtctttctcacagccctctgatacgacatggatggtggaaccactactaacacaccttacagccgtttgccagatttcccacaaagattttttttttgacaacttctttatctccttgcttttctaggtctttctgagacctggctcaaggcacttgtctatttctctccctctccatttctcttttgtcttacttctctttcgaaatctaacttcttgattcttgattcttctccaccttacagagattcagcttccttttccctggagtttggttttgttttkttkttttttttcctttatttcaagttgtctcttctttatgagaccagacttcagtttccatgttgacaggcaggctgactctagtatttcattccttgaatttaaattcctctactgctgtaggctttcaattcttctattgattgccagagttgctctctctagtttccactgtctttccacatccttcagtcacttcttgcttttcttccttayatttcattctttcctgtcttacaagcacttgaatgaatttcagtctcctggcatgttctttattctgcttttttctctaccaag

SEQ ID NO: 19037 - DNA, 600 bp, Chicken  19866894228429_2
ctgttctacagtgtctttctcacagccctctgatacgacatggatggtggaaccactactaacacaccttacagccgtttgccagatttcccacaaagattttttttttgacaacttctttatctccttgcttttctaggtctttctgagacctggctcaaggcacttgtctatttctctccctctccatttctcttttgtcttacttctctttcgaaatctaacttcttgattcttgattcttctccaccttacagagattcagcttccttttccctggagtttggttttgttttkttkttttttttcctttatttcaagttgtctcttctttatgagaccagacttcagtttccatgttgacaggcaggctgactctagtatttcattccttgaatttaaattcctctactgctgtaggctttcaattcttctattgattgccagagttgctctctctagtttccactgtctttccacatccttcagtcacttcttgcttttcttccttayatttcattctttcctgtcttacaagcacttgaatgaatttcagtctcctggcatgttctttattctgcttttttctctaccaagarg

SEQ ID NO: 19038 - DNA, 600 bp, Chicken  19866894228429_3
tcgaaatctaacttcttgattcttgattcttctccaccttacagagattcagcttccttttccctggagtttggttttgttttkttkttttttttcctttatttcaagttgtctcttctttatgagaccagacttcagtttccatgttgacaggcaggctgactctagtatttcattccttgaatttaaattcctctactgctgtaggctttcaattcttctattgattgccagagttgctctctctagtttccactgtctttccacatccttcagtcacttcttgcttttcttccttayatttcattctttcctgtcttacaagcacttgaatgaatttcagtctcctggcatgttctttattctgcttttttctctaccaagargtgttctayccagatccctcccgcttcctttcctgtgatgttttttattgctttatatctgactgcagccagtgtgtaccctcctatcctccatatttttttctcttctggctttgttgctatcatcttgttatctggtttgcagttacaacccagtagagcaagaaaacctatgcaaggctagttcaatttcaggaagctgtgctcttcaatt

SEQ ID NO: 19039 - DNA, 600 bp, Chicken  19866894228429_4
kttttttttcctttatttcaagttgtctcttctttatgagaccagacttcagtttccatgttgacaggcaggctgactctagtatttcattccttgaatttaaattcctctactgctgtaggctttcaattcttctattgattgccagagttgctctctctagtttccactgtctttccacatccttcagtcacttcttgcttttcttccttayatttcattctttcctgtcttacaagcacttgaatgaatttcagtctcctggcatgttctttattctgcttttttctctaccaagargtgttctayccagatccctcccgcttcctttcctgtgatgttttttattgctttatatctgactgcagccagtgtgtaccctcctatcctccatatttttttctcttctggctttgttgctatcatcttgttatctggtttgcagttacaacccagtagagcaagaaaacctatgcaaggctagttcaatttcaggaagctgtgctcttcaattggaaaggaaattgaactttttcaaagcctgaagaatctccatttttatatctgaggttgatccatgccagaggtccctaaattaga

SEQ ID NO: 19040 - DNA, 600 bp, Chicken  19866894228429_5
cctttatttcaagttgtctcttctttatgagaccagacttcagtttccatgttgacaggcaggctgactctagtatttcattccttgaatttaaattcctctactgctgtaggctttcaattcttctattgattgccagagttgctctctctagtttccactgtctttccacatccttcagtcacttcttgcttttcttccttayatttcattctttcctgtcttacaagcacttgaatgaatttcagtctcctggcatgttctttattctgcttttttctctaccaagargtgttctayccagatccctcccgcttcctttcctgtgatgttttttattgctttatatctgactgcagccagtgtgtaccctcctatcctccatatttttttctcttctggctttgttgctatcatcttgttatctggtttgcagttacaacccagtagagcaagaaaacctatgcaaggctagttcaatttcaggaagctgtgctcttcaattggaaaggaaattgaactttttcaaagcctgaagaatctccatttttatatctgaggttgatccatgccagaggtccctaaattagaatccagctc

SEQ ID NO: 19041 - DNA, 599 bp, Chicken  19866894228433_1
  misc_feature (1)..(39): n is any nucleotide
nnnnnnnnnnnnnnnnnnnnnnnnnnnnnnnnnnnnnnngacttccttgcttcctttcttcctttctttttctttctcttacagcatttcctttctagaaaatactatgataccaaagtttctgaattgaaaaaaaaaaaaaagtagttttattactaaggtggtagaaactgtatgaaataatctatgagagcatagagaagcctttatgaaggatttgtgagtcatgggaaaaactgtcccacttattcagcaaatctgagagtggagaaaagacggggatccaggaggtagtcatcrggtctgtgatgctgcttgatcttctcaaaatgaaatttgatctgaagaaaaaacaaatcaataaagtacaatgagtttgtatttgtaattgtaagactcactcaatatatctgggctgcaaatcactgtgtctcagtgttctccaagttcccatttctaatacaagaaaacaatgctggtaggctaccaatgcaacattactcagcaaaggyttaggagaagaattctgaaaaggcatctttttttagttagttgcagcgtaactcctgcaacaattagttagtttattaacttgtttg

SEQ ID NO: 19042 - DNA, 600 bp, Chicken  19866894228433_2
aggatttgtgagtcatgggaaaaactgtcccacttattcagcaaatctgagagtggagaaaagacggggatccaggaggtagtcatcrggtctgtgatgctgcttgatcttctcaaaatgaaatttgatctgaagaaaaaacaaatcaataaagtacaatgagtttgtatttgtaattgtaagactcactcaatatatctgggctgcaaatcactgtgtctcagtgttctccaagttcccatttctaatacaagaaaacaatgctggtaggctaccaatgcaacattactcagcaaaggyttaggagaagaattctgaaaaggcatctttttttagttagttgcagcgtaactcctgcaacaattagttagtttattaacttgtttgtgaacaaggaaagcaatatataaacttgcaaaaattaccatcagtgtgatattttcctgtacacaggaagagaaagtagagcgcaaatcctatgtgctaattacaactcttccagaactttaattttactatgacactgcaaagctgtatttttatttctttgtcatttttatttctctcgttgtgaagattaattattgaatgtttctaaat

SEQ ID NO: 19043 - DNA, 600 bp, Chicken  19866894228434_1
attttacttacattttgcttatttatttacaacagaattaccatttttacattatttgctgtgctgagagctatcatctgtgtttttcaggaaccttctgatgcagtcaattcccttaatgtgcgcattgacattggcctagcaaatcctggcaccagtcctgtacttgatacatcttctcctgcatctgtggcctacagtgtaagtacacaacctcactgctggacaatacattgctatacacctgtgcataacatgacctacaaaatcactaaggagttacatacaggtaaaaactcrtattctagttaagtcactggactgaaagcaggcacctgcacatattctctcatttayttactaccctgataatgcaagctttgctcacccacaagcacacagcaggcaccatggcataacaagcatcttggtagagtcaagtcactgttcaygtgaatttctattgcactgcagtgtgaagtaatttaagtcagtttagcttacaataaaggagtaactgggaaatgtagattccttcagattgcatcagatttgcagtaggctagcaataccctgcctgcaccattcatacggatcagc

SEQ ID NO: 19044 - DNA, 600 bp, Chicken  19866894228434_2
gctgtgctgagagctatcatctgtgtttttcaggaaccttctgatgcagtcaattcccttaatgtgcgcattgacattggcctagcaaatcctggcaccagtcctgtacttgatacatcttctcctgcatctgtggcctacagtgtaagtacacaacctcactgctggacaatacattgctatacacctgtgcataacatgacctacaaaatcactaaggagttacatacaggtaaaaactcrtattctagttaagtcactggactgaaagcaggcacctgcacatattctctcatttayttactaccctgataatgcaagctttgctcacccacaagcacacagcaggcaccatggcataacaagcatcttggtagagtcaagtcactgttcaygtgaatttctattgcactgcagtgtgaagtaatttaagtcagtttagcttacaataaaggagtaactgggaaatgtagattccttcagattgcatcagatttgcagtaggctagcaataccctgcctgcaccattcatacggatcagctgatgtgtagtaacatggttctcagcattagcttttccatgtgtcaraattcttaat

SEQ ID NO: 19045 - DNA, 546 bp, Chicken  19866894228434_3
caccagtcctgtacttgatacatcttctcctgcatctgtggcctacagtgtaagtacacaacctcactgctggacaatacattgctatacacctgtgcataacatgacctacaaaatcactaaggagttacatacaggtaaaaactcrtattctagttaagtcactggactgaaagcaggcacctgcacatattctctcatttayttactaccctgataatgcaagctttgctcacccacaagcacacagcaggcaccatggcataacaagcatcttggtagagtcaagtcactgttcaygtgaatttctattgcactgcagtgtgaagtaatttaagtcagtttagcttacaataaaggagtaactgggaaatgtagattccttcagattgcatcagatttgcagtaggctagcaataccctgcctgcaccattcatacggatcagctgatgtgtagtaacatggttctcagcattagcttttccatgtgtcaraattcttaatgtcctttgaagggatgttctttccttctaagatgtttaaga

SEQ ID NO: 19046 - DNA, 351 bp, Chicken  19866894228434_4
tctcatttayttactaccctgataatgcaagctttgctcacccacaagcacacagcaggcaccatggcataacaagcatcttggtagagtcaagtcactgttcaygtgaatttctattgcactgcagtgtgaagtaatttaagtcagtttagcttacaataaaggagtaactgggaaatgtagattccttcagattgcatcagatttgcagtaggctagcaataccctgcctgcaccattcatacggatcagctgatgtgtagtaacatggttctcagcattagcttttccatgtgtcaraattcttaatgtcctttgaagggatgttctttccttctaagatgtttaaga

SEQ ID NO: 19047 - DNA, 600 bp, Chicken  19866894228435_1
tccttaatgttctatctttacgcttccatctgtaaggtattcacttttaactgtactatctgaggttctttcattatttatgaatatcagtgagctgagggtgtatctcagaaggagggaagggaatcgatagtctaacatttgaggtacatctttcacattcaaggttacagtgggtgacccacagcaggtgaaacacatgattaatgcctagaagcttggaacattttttattacctgagctgtcatgagaatgtgggaggtaacattacaagctagggccactcacaacatgtaacrcagatattgctgaactttggccagggaatactcaagttgacccttgaaatagcagtggctgagaaatttatgcaagagaaaaagtacaggcttctattctacaattccccatgacttctgaggccaagatctcatgggtctttagcctatgaattttctttgacaagaatcagaatactgatgctacatgtgaaaccagatgagaggtttrctgcgagtaaaaatctaagaagtctctctcaggaacatccagaatgtttcagtttacttgtctgtcacttctgaaaacatcactatttt

SEQ ID NO: 19048 - DNA, 600 bp, Chicken  19866894228435_2
tagaagcttggaacattttttattacctgagctgtcatgagaatgtgggaggtaacattacaagctagggccactcacaacatgtaacrcagatattgctgaactttggccagggaatactcaagttgacccttgaaatagcagtggctgagaaatttatgcaagagaaaaagtacaggcttctattctacaattccccatgacttctgaggccaagatctcatgggtctttagcctatgaattttctttgacaagaatcagaatactgatgctacatgtgaaaccagatgagaggtttrctgcgagtaaaaatctaagaagtctctctcaggaacatccagaatgtttcagtttacttgtctgtcacttctgaaaacatcactatttttattccttggattgtcactctgaaaatctgcagcctcacagatctgtttaaacatattacttggagacttcaagataaaaaatgtgggcctattccaatgcctttgaaagttagcacaagtttttccattaacataagtggacttcagatcaggacctaaagatactaatattcccactttttcttttcttttttccwcttagagagcctt

SEQ ID NO: 19049 - DNA, 600 bp, Chicken  19866894228435_3
agaatcagaatactgatgctacatgtgaaaccagatgagaggtttrctgcgagtaaaaatctaagaagtctctctcaggaacatccagaatgtttcagtttacttgtctgtcacttctgaaaacatcactatttttattccttggattgtcactctgaaaatctgcagcctcacagatctgtttaaacatattacttggagacttcaagataaaaaatgtgggcctattccaatgcctttgaaagttagcacaagtttttccattaacataagtggacttcagatcaggacctaaagatrctaatattcccactttttcttttcttttttccwcttagagagccttttgaagcaaacactttgacttgtgtttaatttcaaatatatgtgagtctttaagtcctgcatcttgaactcaactgtacttgctataatgtttattcgtttttatttgacggtttactgaactagtagaattgtatgtgaaaaaagagtctgtactaatagacctaaagctgattttgaattttctcagtaccagaattacaaatatgttgacacttgagattattgacagaagagggagacaagataaagttc

SEQ ID NO: 19050 - DNA, 600 bp, Chicken  19866894228435_4
gatgagaggtttrctgcgagtaaaaatctaagaagtctctctcaggaacatccagaatgtttcagtttacttgtctgtcacttctgaaaacatcactatttttattccttggattgtcactctgaaaatctgcagcctcacagatctgtttaaacatattacttggagacttcaagataaaaaatgtgggcctattccaatgcctttgaaagttagcacaagtttttccattaacataagtggacttcagatcaggacctaaagatactaatattcccactttttcttttcttttttccwcttagagagccttttgaagcaaacactttgacttgtgtttaatttcaaatatatgtgagtctttaagtcctgcatcttgaactcaactgtacttgctataatgtttattcgtttttatttgacggtttactgaactagtagaattgtatgtgaaaaaagagtctgtactaatagacctaaagctgattttgaattttctcagtaccagaattacaaatatgttgacacttgagattattgacagaagagggagacaagataaagttcaaaaatgacttaaatagtttttgacactgtccc

SEQ ID NO: 19051 - DNA, 600 bp, Chicken  19866894228440_1
gagtctctgtggatgaagcctgctctccaagttgtgttgtggtgacaaaaccccaacgatctgcagagctgcagtgtgtgaggactgagcaagggacgtgggaagcctcaaattctctctgcaacaaatgtgtgtctggtctgagcatcattatggttggagctgccaggagaaggctgagccagcagcaacaccgagccaagagcacattccccagtgacctgagtgtggttttactggtactggggcagtgagttgtgtttaatggtaattatgaaggctttcgtatttgcttctcaragtgctctgctcctcctcatcartctcacacggacacctcctgtgagcccagtttgtgcacatgcagtgggatctcttcttgccaactgttgataattcccaatctccatattgtgctctggcattatcaaggtaaaatccatgccccatcctgaacatacagcattgttgtggcgtgctgggaattgcccactgcttgtaacacctatggagaccttgcatacaaagtatcatcatggaaccaatttttactgttgaatcaaatcccatagaaactactttctaatggaaatgataatg

SEQ ID NO: 19052 - DNA, 600 bp, Chicken  19866894228440_2
tctccaagttgtgttgtggtgacaaaaccccaacgatctgcagagctgcagtgtgtgaggactgagcaagggacgtgggaagcctcaaattctctctgcaacaaatgtgtgtctggtctgagcatcattatggttggagctgccaggagaaggctgagccagcagcaacaccgagccaagagcacattccccagtgacctgagtgtggttttactggtactggggcagtgagttgtgtttaatggtaattatgaaggctttcgtatttgcttctcaragtgctctgctcctcctcatcartctcacacggacacctcctgtgagcccagtttgtgcacatgcagtgggatctcttcttgccaactgttgataattcccaatctccatattgtgctctggcattatcaaggtaaaatccatgccccatcctgaacatacagcattgttgtggcgtgctgggaattgcccactgcttgtaacacctatggagaccttgcatacaaagtatcatcatggaaccaatttttactgttgaatcaaatcccatagaaactactttctaatggaaatgataatgaaactttaattataactgtgcta

SEQ ID NO: 19053 - DNA, 599 bp, Chicken  19866894228442_1
  misc_feature (1)..(82): n is any nucleotide
nnnnnnnnnnnnnnnnnnnnnnnnnnnnnnnnnnnnnnnnnnnnnnnnnnnnnnnnnnnnnnnnnnnnnnnnnnnnnnnnnnagatatctgggtcattgaaaccccccgcatcaggacaaaagccagtgagcacaacatctcctgaagctgaagcaagaaggcctcatcaacagcctcctcctgatcaggtgacctgtagcagaccccaaccacgagatgccctttactggaccaatccttgatttttacccacaagctgtcgacatgatagtggctgttcctcagacacagctcttcgyaatctatccacttccaaacatagagggcaactctgccacccctcctaccctgtctatcccttctgaaaagcctgtagtcaagaaagatatgaataagtatataaaacatacccatgaagcaagttgaaagagtgagattgtctggaaagtcaattccagtagtttagctggagctagagagaagaggactcttttagagaagaaaagagtcaggagagttttttcagtgtgtacaaatatctgaatggagaaaatgaaaaacagtcttctgtctctttcaggatcttctctgtggtgtg

SEQ ID NO: 19054 - DNA, 599 bp, Chicken  19866894228444_1
  misc_feature (1)..(48): n is any nucleotide
nnnnnnnnnnnnnnnnnnnnnnnnnnnnnnnnnnnnnnnnnnnnnnnnatctaacatattttcacattaagaaagtattttcaagaagcattgtattgtttttatttacgaagactttttccaagaatttgtgctatctcatctgattacaatgtgaagatgatggaatatataaaggatatgatgcatcagtattttaagaaatattcagatgtagtaagggatacggtttagtggggaaatactggtggtgggtggacggttggactagatgatcttgaaggtcttttccaacttcaktgattctgtgattctttgattctgtgattctatttctgtactgccagaagtgaagaaaattagatatttgattagaataaaagcaattttgttgagcagcagtagatagaaaaagatttacataagcattcaaactgactatccaaagttgctgagatgtgcatttactacaacgtatcaaagtgtcgttgtactcatgcaaagctgtcgttttcttttttctcatttctaagggtgcaataatgaaggagcccagatctaagtccatagtatgcagtttcactcacttcctgaactac

SEQ ID NO: 19055 - DNA, 599 bp, Chicken  19866894228447_1
  misc_feature (1)..(180): n is any nucleotide
nnnnnnnnnnnnnnnnnnnnnnnnnnnnnnnnnnnnnnnnnnnnnnnnnnnnnnnnnnnnnnnnnnnnnnnnnnnnnnnnnnnnnnnnnnnnnnnnnnnnnnnnnnnnnnnnnnnnnnnnnnnnnnnnnnnnnnnnnnnnnnnnnnnnnnnnnnnnnnnnnnnnnnnnnnnnnnnnnnnnccctttgattaattcacagattgttccctcagtctatgaacaggacaggagaggcggtgtgttacatggaggtactggatcccgaagccttctcagcctactaggtcacgtcactgctgygctgggcttatccattggccatagttccttcagaagactcctactgtgtcatggagttatccatagccagagacacttcaaggtgtatgtgatcccacgtggactcatctgcgggtcacagtccctccgacttacttaggttcacagtgaagtcccagcctgtccagtagagcagcacgggaacagcagtgacatcctggccatctgccagcccaggtcatagctatagctgttttcaaattgttcctgggcacagcaaagcaatatggtgagaagtagaggaaacagcagaagaaaaa

SEQ ID NO: 19056 - DNA, 600 bp, Chicken  19866894228447_2
tagccaggcaggatcaaagaaataaagtgctacgtcttcactatcccacctcatattttcactgggagcagactgggagcattcatctgaggtgctcagctggctgcctgatcacgcatgtcatcttctgtgaaagagtaatggcaagctagtgcatgtgagcaagggagggtgagcactttgcttggcacagctgggacctgctgaggatatatgtccacgggcaaatgcagactcctctgttggcgcagggaaaatatttccagtgttccagaataaagctttcaatccttggggaamaaaaaacctcaaaattatttgcagacagtgcatgaaggagtgtcagaagtaaggaactttgcctgtcctagaattttatcatatccttcatgctgcttctcagcttcttcagaatttgtcaagcagtgttgatgctgctgaggcatgaactacggcaagcaattctatgacactatgattctatctctcttagttcagccacagccacagggatacagctcatagctgtggatttgggggtaggtttttcagaactctgaaacagaaaaaaaacctgtttgtgatatttatgctctggaa

SEQ ID NO: 19057 - DNA, 587 bp, Chicken  19866894228449_1
aagcattttaaaattatagcactttgaatgatttaccctattgtgttttttcacagtgcttcttagtcttgatttcaaggcgctaaacaagtgggatctatgtatcatcagtcaatttaacgaagcagaaacgcagcagagattttatgcaacttcccaaaggcaatgacaagctgaagcagaattgagagcatacatcacatcacccaagtttcagcttcctctgcagtatatgaagatcatttcactccttcctttacatctgagatcgtatacacatactttaaaagaaaacaactrgaattaacttttgagtaatgctctttaacgaataattttacaatttctagtcaaaaagccccctgcagcattattgagctgtgcttcgctctttgcactgttcactctgaatgtccacaattataaatcatagtgctgttgtttgactgtcagctgacttcatctttttgggtacttcagtgtttcccaccacagcacatctactccaatgccatgcaacaacagcaaaaaaatctcacagaacacacagcagggctgtcacacgttcacagcaacatcaagggaac

SEQ ID NO: 19058 - DNA, 599 bp, Chicken  19866894228455_1
  misc_feature (1)..(145): n is any nucleotide
nnnnnnnnnnnnnnnnnnnnnnnnnnnnnnnnnnnnnnnnnnnnnnnnnnnnnnnnnnnnnnnnnnnnnnnnnnnnnnnnnnnnnnnnnnnnnnnnnnnnnnnnnnnnnnnnnnnnnnnnnnnnnnnnnnnnnnnnnnnnnnnnnaagcctccaatgcaggaagcattgcatggacttgctcatctttgtggagatgaaataaaagaccttgtaccaaaaaatggtgtctgccttgctgttaagactgacaaacttaacaaaaacactgataaaattctcatcggtaaggttgagcatcsggctccctacctctttagaggctatctttaatatttctaacaaaaatatttactgtcacctagccaaattcatagctttacaaattaaaatgttcaactctacttatttcagaatggagaacctgtgcctacttctgtgtttttccagtgtctttaccaatatcagtagaagataaagtgtgttttttttctaaggacttcctccctgaagtcactcggtagacagcgacatggtaccgtttaggagcagaaaatttccctcctggaaaataactcagccattatgcaggtctaccaga

SEQ ID NO: 19059 - DNA, 600 bp, Chicken  19866894228455_2
tctttaatatttctaacaaaaatatttactgtcacctagccaaattcatagctttacaaattaaaatgttcaactctacttatttcagaatggagaacctgtgcctacttctgtgtttttccagtgtctttaccaatatcagtagaagataaagtgtgttttttttctaaggacttcctccctgaagtcactcggtagacagcgacatggtaccgtttaggagcagaaaatttccctcctggaaaataactcagccattatgcaggtctaccagagcaggacttgacactcccagtctcycaccccatttccaggcgagtgatgcacatttcagaagtatgctttctcagaatgaggactattaacagggggaaggaggaaaagttacttgcagagcatggccacctggcagggtgggtccagcagaagagatgtgtgttttggcagccagatggtggaatacgccaatcaattaaggccttttctccatgaggtatttccataccattcttaacagttgagccaactgcaatttagaaatacatctactgatcaaaayggacaaggaaactattgtgtaattactacctttgtgcagaa

SEQ ID NO: 19060 - DNA, 600 bp, Chicken  19866894228455_3
atgcaggtctaccagagcaggacttgacactcccagtctcycaccccatttccaggcgagtgatgcacatttcagaagtatgctttctcagaatgaggactattaacagggggaaggaggaaaagttacttgcagagcatggccacctggcagggtgggtccagcagaagagatgtgtgttttggcagccagatggtggaatacgccaatcaattaaggccttttctccatgaggtatttccataccattcttaacagttgagccaactgcaatttagaaatacatctactgatcaaaayggacaaggaaactattgtgtaattactacctttgtgcagaatgacttcagatttctgaacgccaaaagagaagagcaaaaggcttaatttccctgtgactattctccatgtcttcctcataaagtaagccatggaactaaatgcagaggakgccaccttcatgtaggtayggaatggaaacagatttgtacgcaggaacatactagtgctccaacgcaaaggcagagggttgatctatctgctgcagtggacatctgcagctcttgaatacacaatgataccactgtaaggacttaaaca

SEQ ID NO: 19061 - DNA, 600 bp, Chicken  19866894228455_4
agggtgggtccagcagaagagatgtgtgttttggcagccagatggtggaatacgccaatcaattaaggccttttctccatgaggtatttccataccattcttaacagttgagccaactgcaatttagaaatacatctactgatcaaaayggacaaggaaactattgtgtaattactacctttgtgcagaatgacttcagatttctgaacgccaaaagagaagagcaaaaggcttaatttccctgtgactattctccatgtcttcctcataaagtaagccatggaactaaatgcagaggakgccaccttcatgtaggtayggaatggaaacagatttgtacgcaggaacatactagtgctccaacgcaaaggcagagggttgatctatctgctgcagtggacatctgcagctcttgaatacacaatgataccactgtaaggacttaaacaaatgagtaacagtgacactatatcctggactacttgaaccttgctatggaaaaaagagaagcagtagctagayaggtggatagtatgacactttgaaagatactgcggcaaaatcaactgttgttgtcggggatttgtattttttttttcc

SEQ ID NO: 19062 - DNA, 600 bp, Chicken  19866894228455_5
agatgtgtgttttggcagccagatggtggaatacgccaatcaattaaggccttttctccatgaggtatttccataccattcttaacagttgagccaactgcaatttagaaatacatctactgatcaaaayggacaaggaaactattgtgtaattactacctttgtgcagaatgacttcagatttctgaacgccaaaagagaagagcaaaaggcttaatttccctgtgactattctccatgtcttcctcataaagtaagccatggaactaaatgcagaggakgccaccttcatgtaggtayggaatggaaacagatttgtacgcaggaacatactagtgctccaacgcaaaggcagagggttgatctatctgctgcagtggacatctgcagctcttgaatacacaatgataccactgtaaggacttaaacaaatgagtaacagtgacactatatcctggactacttgaaccttgctatggaaaaaagagaagcagtagctagayaggtggatagtatgacactttgaaagatactgcggcaaaatcaactgttgttgtcggggatttgtattttttttttccattttgaagggcttttttt

SEQ ID NO: 19063 - DNA, 600 bp, Chicken  19866894228455_6
agcaaaaggcttaatttccctgtgactattctccatgtcttcctcataaagtaagccatggaactaaatgcagaggakgccaccttcatgtaggtayggaatggaaacagatttgtacgcaggaacatactagtgctccaacgcaaaggcagagggttgatctatctgctgcagtggacatctgcagctcttgaatacacaatgataccactgtaaggacttaaacaaatgagtaacagtgacactatatcctggactacttgaaccttgctatggaaaaaagagaagcagtagctagayaggtggatagtatgacactttgaaagatactgcggcaaaatcaactgttgttgtcggggatttgtattttttttttccattttgaagggctttttttattattactatttttattactacttgtcagactgcttgtctgaaatacattacaagacttaatttttttttttttttttaaggaatacacagcatgctgggagtctgtgatcgaagacactctgcacaggccaacaatcataattatgctgtgattttatgcccagcaggaaacttctgatttgccacctaggaacaaagcta

SEQ ID NO: 19064 - DNA, 600 bp, Chicken  19866894228457_1
cacccgggggggctgtcgagttgatcagagggggggtcctcggagactccactgtcgctgacacccggggaccagctgggcgagtctgatatggagtccccagagcccagaatggagctaaggaagtcctcgccatcctgggcacgctgtagggatacagatgcctgtcaccgtcagtgctgggctcctgtaggagctgcctgtgccataggacagcactgcatggtgttcatgtaaagcagagccacccctcaaccttgagggctcaccccatcctcatgccaggtgcccggggatgtygttcccagctccacaccacggaggattccatcctggcgatcaaagaggaggtccagcaggtcgatgctgtcaaggccacccacagtagaggccatggctgcgaggagacaagttcaggccccatccccataattgtccctgtgcctctcccccaaggttcatagctctggggacgccctgatgtactgggcagcttggtgagagggagcaaggagcacagagacaggtgtgggatcacgaggatgtgtatctaagcacgtgttacatgcgtgtgtgtgcaaatgtgcgtgtgatcatgta

SEQ ID NO: 19065 - DNA, 600 bp, Chicken  19866894228458_1
tcatcaagaacagtaaaagaaatcaacggggcaaaaatgatcctgttgaagactaaacaaaagattttgcagcttcagtgctgactgccataatctctagcctgttgacttcctttcattcaaacccaataggggtttgatcaccttcaaggctcgaggggtcctcttagagctcttttggtttgtacatgggatggcagtctctagagctactgctttggcttacattggctgaagatgcatatgctgcctgtgcagagaggcccagggctgcttaatggggctcttctgcatgggaartggatgcagacacgcatttgyttcatggcaaaccacacactgtttgacttttccttcattatttgtatctcttcccatgtctgttcttgcctacgttctctagatgtggttcacatatgtgtaggattatttttaacttcagrggagctgttttgataggagtggtatttcctatgtgaacatatcttagccaaacatatctttatamtaaataaatatttgtacctctgcccacaatattccctttatctgatcaacttgctggtcttctatcacaccagacacaagatttagatagaa

SEQ ID NO: 19066 - DNA, 600 bp, Chicken  19866894228458_2
atcaacggggcaaaaatgatcctgttgaagactaaacaaaagattttgcagcttcagtgctgactgccataatctctagcctgttgacttcctttcattcaaacccaataggggtttgatcaccttcaaggctcgaggggtcctcttagagctcttttggtttgtacatgggatggcagtctctagagctactgctttggcttacattggctgaagatgcatatgctgcctgtgcagagaggcccagggctgcttaatggggctcttctgcatgggaartggatgcagacacgcatttgyttcatggcaaaccacacactgtttgacttttccttcattatttgtatctcttcccatgtctgttcttgcctacgttctctagatgtggttcacatatgtgtaggattatttttaacttcagrggagctgttttgataggagtggtatttcctatgtgaacatatcttagccaaacatatctttatamtaaataaatatttgtacctctgcccacaatattccctttatctgatcaacttgctggtcttctatcacaccagacacaagatttagatagaacagcactccataagaaaaggc

SEQ ID NO: 19067 - DNA, 600 bp, Chicken  19866894228458_3
ccttcaaggctcgaggggtcctcttagagctcttttggtttgtacatgggatggcagtctctagagctactgctttggcttacattggctgaagatgcatatgctgcctgtgcagagaggcccagggctgcttaatggggctcttctgcatgggaartggatgcagacacgcatttgyttcatggcaaaccacacactgtttgacttttccttcattatttgtatctcttcccatgtctgttcttgcctacgttctctagatgtggttcacatatgtgtaggattatttttaacttcagrggagctgttttgataggagtggtatttcctatgtgaacatatcttagccaaacatatctttatamtaaataaatatttgtacctctgcccacaatattccctttatctgatcaacttgctggtcttctatcacaccagacacaagatttagatagaacagcactccataagaaaaggcagtttgatttaataataattaaaaaaaaaaaaaaaaaagaggaagaattagatgtcaatgatatttggattttcacatcacctgcataagactttagtggcattgtttctgttggatttatt

SEQ ID NO: 19068 - DNA, 600 bp, Chicken  19866894228458_4
gctactgctttggcttacattggctgaagatgcatatgctgcctgtgcagagaggcccagggctgcttaatggggctcttctgcatgggaartggatgcagacacgcatttgyttcatggcaaaccacacactgtttgacttttccttcattatttgtatctcttcccatgtctgttcttgcctacgttctctagatgtggttcacatatgtgtaggattatttttaacttcagrggagctgttttgataggagtggtatttcctatgtgaacatatcttagccaaacatatctttatamtaaataaatatttgtacctctgcccacaatattccctttatctgatcaacttgctggtcttctatcacaccagacacaagatttagatagaacagcactccataagaaaaggcagtttgatttaataataattaaaaaaaaaaaaaaaaaagaggaagaattagatgtcaatgatatttggattttcacatcacctgcataagactttagtggcattgtttctgttggatttattaggaagatggatgcagaaataatggagaactgctggaaaggcagatgaaatgagcaaggagtaga

SEQ ID NO: 19069 - DNA, 600 bp, Chicken  19866894228459_1
tacagaaaatgaaaggatgaattccccgagcaaatgggcagtggctgcattgctctggccttagctctgcaagtgagacctgctggctcctgcttaagttacgttctctaattcatgctgtcctcattcctctgagcccatctgctggatggagatgagtcattcgataatgctttgagtaggtgatttgacaggtggctccctagaaagctgtctctgcatatgacggctctttctttgcggttcctatatgataagattacaacctgaggtcactttgaaggcattttgctagggaargagagaaaggggaaaggaagagggcagggcagaaggcagcaggagcacctctgcgtgcgtttgcacaggttcatcaatggtgcttggtctcaggagggagtggctcttcatgtaaaagagaggaacagtaaaggcaaggaagcctagcaaaacactgagggctggataccaragtgaaaacacttctrtgagcagggagatgggatgaggtgagtggcaggtggtactgtcaggtccgtatgcccagagaagtgagatgaacagcagggctgatgttaggagccagcagcagtgtctcgt

SEQ ID NO: 19070 - DNA, 600 bp, Chicken  19866894228459_2
ctttgagtaggtgatttgacaggtggctccctagaaagctgtctctgcatatgacggctctttctttgcggttcctatatgataagattacaacctgaggtcactttgaaggcattttgctagggaargagagaaaggggaaaggaagagggcagggcagaaggcagcaggagcacctctgcgtgcgtttgcacaggttcatcaatggtgcttggtctcaggagggagtggctcttcatgtaaaagagaggaacagtaaaggcaaggaagcctagcaaaacactgagggctggataccaragtgaaaacacttctrtgagcagggagatgggatgaggtgagtggcaggtggtactgtcaggtccgtatgcccagagaagtgagatgaacagcagggctgatgttaggagccagcagcagtgtctcgtgtggaggggccggggggtgagagcttctcctgctgtctgccttcctctgatctgcccttctgcagccaaaccgagtgtgagaaaaggtggggcggtgtctgtcgagtcatatcccgcttctggttttggttctgctgctaacctgttcttgacagcaggcaaatcacttcct

SEQ ID NO: 19071 - DNA, 600 bp, Chicken  19866894228459_3
tgacaggtggctccctagaaagctgtctctgcatatgacggctctttctttgcggttcctatatgataagattacaacctgaggtcactttgaaggcattttgctagggaargagagaaaggggaaaggaagagggcagggcagaaggcagcaggagcacctctgcgtgcgtttgcacaggttcatcaatggtgcttggtctcaggagggagtggctcttcatgtaaaagagaggaacagtaaaggcaaggaagcctagcaaaacactgagggctggataccaragtgaaaacacttctrtgagcagggagatgggatgaggtgagtggcaggtggtactgtcaggtccgtatgcccagagaagtgagatgaacagcagggctgatgttaggagccagcagcagtgtctcgtgtggaggggccggggggtgagagcttctcctgctgtctgccttcctctgatctgcccttctgcagccaaaccgagtgtgagaaaaggtggggcggtgtctgtcgagtcatatcccgcttctggttttggttctgctgctaacctgttcttgacagcaggcaaatcacttcctctcattctctttcctc

SEQ ID NO: 19072 - DNA, 600 bp, Chicken  19866894228476_1
cttcccgttttgccttctgcagcagagaaatactcagaagagctgctctgtactgaacgtgggaaggcaaacgtgcgcgggcacatgactgcatgtgttactcaaagtgagaggctcttcaagagaattatgcttagcagaactggtggaaacaccatttccagtttttgaaaagcttcctcaaaaaatggttttcagttcaaacctcgccaacaagtcgggtttttgttttgcttatttctgtacagctgcaatcccctgcctgcttcagaagctccgcagcaaagagcacttgggctyctgctgctgcccgggcacagagctgagggcaargtgggcttcaccccagctgcaggggctgcagaacaccaggggagcagccctcagggggaacacacagctctgctctcctgcagcaacacagaaacacttaagccccagcttaaggcagggctctgctggcttacacaccatgcgtttaatccttccattttctggcaactccaggagtatcacagctggagtgcctgaacacacagcactgctcaagtccaaggcagctctggagtgagcagaaatgctattccacaatccagccac

SEQ ID NO: 19073 - DNA, 600 bp, Chicken  19866894228476_2
tcagaagagctgctctgtactgaacgtgggaaggcaaacgtgcgcgggcacatgactgcatgtgttactcaaagtgagaggctcttcaagagaattatgcttagcagaactggtggaaacaccatttccagtttttgaaaagcttcctcaaaaaatggttttcagttcaaacctcgccaacaagtcgggtttttgttttgcttatttctgtacagctgcaatcccctgcctgcttcagaagctccgcagcaaagagcacttgggctyctgctgctgcccgggcacagagctgagggcaargtgggcttcaccccagctgcaggggctgcagaacaccaggggagcagccctcagggggaacacacagctctgctctcctgcagcaacacagaaacacttaagccccagcttaaggcagggctctgctggcttacacaccatgcgtttaatccttccattttctggcaactccaggagtatcacagctggagtgcctgaacacacagcactgctcaagtccaaggcagctctggagtgagcagaaatgctattccacaatccagccactggaacctgagtggctgatctttccaacaacac

SEQ ID NO: 19074 - DNA, 600 bp, Chicken  19866894228477_1
gtcagtccttcccctagtagtttctgatcatagaatcatagagtggtttgggttggaaggagcctttaagatcacctagttccaaccccctgctatagggagggacaccactaactaatccaataaatgaaatgtatgaccttgtttgaaaagaagattagaatatctatgttcctttaaaatcagcatctgggtaaggactgagagtgaagcccctgcctgctggaggtacagacaaatggaacggtggccaaaagcatgtctcagcaggtgggcagtgcagatgaagtcctgcatcarcttcatcatggctgcttccgtaagtgcatagactgtgtgcatgggagtgagctgcagggtttgtgttggttgagcaggagacaagagaaaggcagattcaggtctgccayagtgctgctttgtggacatcccgaaacagaatatgaggcttctagacagtcgctctaagayacccacaattattttccccagggatgaagcctaaatcaggaactctgtgattctcctgtaaggttttccttgtctgcttgtttccctccaagagttactgccttagagaagtgcaatgtgatagatcta

SEQ ID NO: 19075 - DNA, 600 bp, Chicken  19866894228477_2
ctaactaatccaataaatgaaatgtatgaccttgtttgaaaagaagattagaatatctatgttcctttaaaatcagcatctgggtaaggactgagagtgaagcccctgcctgctggaggtacagacaaatggaacggtggccaaaagcatgtctcagcaggtgggcagtgcagatgaagtcctgcatcarcttcatcatggctgcttccgtaagtgcatagactgtgtgcatgggagtgagctgcagggtttgtgttggttgagcaggagacaagagaaaggcagattcaggtctgccayagtgctgctttgtggacatcccgaaacagaatatgaggcttctagacagtcgctctaagayacccacaattattttccccagggatgaagcctaaatcaggaactctgtgattctcctgtaaggttttccttgtctgcttgtttccctccaagagttactgccttagagaagtgcaatgtgatagatctaatgtgtgggttttgtagtcttgaaggcatagaatttgctaggaaactgacctagtgtcactagctttctaaatttaatgattccatttaaaattattaccctacggtcat

SEQ ID NO: 19076 - DNA, 572 bp, Chicken  19866894228477_3
ttcctttaaaatcagcatctgggtaaggactgagagtgaagcccctgcctgctggaggtacagacaaatggaacggtggccaaaagcatgtctcagcaggtgggcagtgcagatgaagtcctgcatcarcttcatcatggctgcttccgtaagtgcatagactgtgtgcatgggagtgagctgcagggtttgtgttggttgagcaggagacaagagaaaggcagattcaggtctgccayagtgctgctttgtggacatcccgaaacagaatatgaggcttctagacagtcgctctaagayacccacaattattttccccagggatgaagcctaaatcaggaactctgtgattctcctgtaaggttttccttgtctgcttgtttccctccaagagttactgccttagagaagtgcaatgtgatagatctaatgtgtgggttttgtagtcttgaaggcatagaatttgctaggaaactgacctagtgtcactagctttctaaatttaatgattccatttaaaattattaccctacggtcattcagagctccgcagtatttccatgtcactgcag

SEQ ID NO: 19077 - DNA, 600 bp, Chicken  19866894228488_1
acttcaaacttaatgggttccaaatgttcacttcctcacttgttgcataacttctttcttttcattgtttcctgtagaatatatagaaaccaataggtaagtaatatcttgagtaatatttaactctttagaagaaaacaaatgaataggtacttatctgagtgaatagtgcttcattcaaatgtgctatagcactgaacttgctgattatcctttccttttacttgaactgtgtgactaagaggaagatcaagcacttgctcagatccatactgctcactttgctaaaggcctagctcrctgaccaaatstgctgttttgtgctttgatatggcttcaaaaaccccagatatttcccagtgcttgctattagtttaattcacaggagtctttcaaagagattttgtctggacttttttcctgaacttgggcttggattattaatcctgaagtaacctattttgtctaatatttcttctgaccaattcagttcacagaaggtactgaaggtgggattactgtcagtgtcattgatgcttctgtatgtaatggtgcagaaaaagcacctcaaagaaatctcatccctctttatcaccataa

SEQ ID NO: 19078 - DNA, 600 bp, Chicken  19866894228488_2
aatgggttccaaatgttcacttcctcacttgttgcataacttctttcttttcattgtttcctgtagaatatatagaaaccaataggtaagtaatatcttgagtaatatttaactctttagaagaaaacaaatgaataggtacttatctgagtgaatagtgcttcattcaaatgtgctatagcactgaacttgctgattatcctttccttttacttgaactgtgtgactaagaggaagatcaagcacttgctcagatccatactgctcactttgctaaaggcctagctcrctgaccaaatstgctgttttgtgctttgatatggcttcaaaaaccccagatatttcccagtgcttgctattagtttaattcacaggagtctttcaaagagattttgtctggacttttttcctgaacttgggcttggattattaatcctgaagtaacctattttgtctaatatttcttctgaccaattcagttcacagaaggtactgaaggtgggattactgtcagtgtcattgatgcttctgtatgtaatggtgcagaaaaagcacctcaaagaaatctcatccctctttatcaccataactttttatgaa

SEQ ID NO: 19079 - DNA, 599 bp, Chicken  19866894228503_1
  misc_feature (1)..(64): n is any nucleotide
nnnnnnnnnnnnnnnnnnnnnnnnnnnnnnnnnnnnnnnnnnnnnnnnnnnnnnnnnnnnnnnntaatgttgcacttcattatggatgcagcaatgactgaagaaacagaaaagaaaccatgaaaaggccacgcttcttggtagcatcctaggaattaacatgacagcattaattatttatgctgtagaatgtcttcattggcaggtggtggtgtgaagaaaggggggaggtcagaaaccacatctacttatatttttatgatgaagcagcagaaaagaatgagaagaagtaaccattaygtgtattcagaatcaaggaatggcaattgcaaattgtttattgatgggtttgcatgccccgtgtatcacaaagtactgtgaccctaaatttaaaaagtatcatgtttgagaacaacttctaagacagcaaaacaagccctaatgacctccagggaacagcttagtatttactagatagaaaaggcaggaggtggctggagtttcatggattatcctgacattgcttttgtcctttgagtacaggctgccatagtccttcaaacaggacagaacaacaccatgaagatggatcctacaaa

SEQ ID NO: 19080 - DNA, 600 bp, Chicken  19866894228503_2
gaacaacaccatgaagatggatcctacaaaatatcttatgaaatagtggtgcaaatacatacagataagtcattccatctgttaatacaacttttatttctttctttagaagggatcgttggctatgaaataaacaatttgaaatgtgacaattccaggcatgacttaaaagtgagaaaatgaaaatatacatttgtatgaatcggatacaaccttgatggatagttagttacttagatagaaaatagataacatgttaaatagatacagacaataacattttagactgtaaatggtgayaggaacattgcatctcaggggaagactgataatataataaataaaatgttataaaatacttaggacactatgatttgctgtttgtgtcacaatagcatctagtattcctaactggaagaggccacatagtagagcgttttgtgtaatacagactagaaataatctcttcatagaaaagttagatttcaacaggaaaatttttaggatagaaaacagtaggggagataagtaattacactgctgccaaattgtatgtaggttagctgtcccagtgtcagtcttgtgtgcaaatcctgtaaa

SEQ ID NO: 19081 - DNA, 600 bp, Chicken  19866894228503_3
aataaaatgttataaaatacttaggacactatgatttgctgtttgtgtcacaatagcatctagtattcctaactggaagaggccacatagtagagcgttttgtgtaatacagactagaaataatctcttcatagaaaagttagatttcaacaggaaaatttttaggatagaaaacagtaggggagataagtaattacactgctgccaaattgtatgtaggttagctgtcccagtgtcagtcttgtgtgcaaatcctgtaaaaatgttttgtgctgaaagcatgcttattcttttcttcastgacagaagaactacctatttaattatctagtagttattttctaaattttagctccaagatttgtaggaaataattgctgctatctgttgatgactattaaagtgtttgagctgggacactttgtgagattctactattcaggatcttttcraaacaaacagaaattttcacatmgttggacaattattttcagttcttgtatatagagattttgtattatcttttgagaaaaagagtgaccaagatttcactctagcacttycttcatttcatcacttccttcacccaaccaaagcttc

SEQ ID NO: 19082 - DNA, 531 bp, Chicken  19866894228503_4
ggaaaatttttaggatagaaaacagtaggggagataagtaattacactgctgccaaattgtatgtaggttagctgtcccagtgtcagtcttgtgtgcaaatcctgtaaaaatgttttgtgctgaaagcatgcttattcttttcttcastgacagaagaactacctatttaattatctagtagttattttctaaattttagctccaagatttgtaggaaataattgctgctatctgttgatgactattaaagtgtttgagctgggacactttgtgagattctactattcaggatcttttcraaacaaacagaaattttcacatmgttggacaattattttcagttcttgtatatagagattttgtattatcttttgagaaaaagagtgaccaagatttcactctagcacttycttcatttcatcacttccttcacccaaccaaagcttcattcagtggggtccagttctcacagatatgctttattggaatccaggtggtgggtccatgcttgcctctgctgcacctgaatt

SEQ ID NO: 19083 - DNA, 508 bp, Chicken  19866894228503_5
agtaggggagataagtaattacactgctgccaaattgtatgtaggttagctgtcccagtgtcagtcttgtgtgcaaatcctgtaaaaatgttttgtgctgaaagcatgcttattcttttcttcastgacagaagaactacctatttaattatctagtagttattttctaaattttagctccaagatttgtaggaaataattgctgctatctgttgatgactattaaagtgtttgagctgggacactttgtgagattctactattcaggatcttttcraaacaaacagaaattttcacatmgttggacaattattttcagttcttgtatatagagattttgtattatcttttgagaaaaagagtgaccaagatttcactctagcacttycttcatttcatcacttccttcacccaaccaaagcttcattcagtggggtccagttctcacagatatgctttattggaatccaggtggtgggtccatgcttgcctctgctgcacctgaatt

SEQ ID NO: 19084 - DNA, 420 bp, Chicken  19866894228503_6
tgttttgtgctgaaagcatgcttattcttttcttcastgacagaagaactacctatttaattatctagtagttattttctaaattttagctccaagatttgtaggaaataattgctgctatctgttgatgactattaaagtgtttgagctgggacactttgtgagattctactattcaggatcttttcraaacaaacagaaattttcacatmgttggacaattattttcagttcttgtatatagagattttgtattatcttttgagaaaaagagtgaccaagatttcactctagcacttycttcatttcatcacttccttcacccaaccaaagcttcattcagtggggtccagttctcacagatatgctttattggaatccaggtggtgggtccatgcttgcctctgctgcacctgaatt

SEQ ID NO: 19085 - DNA, 600 bp, Chicken  19866894228507_1
accaacgtgtacacaacaaccttactatcccagtacactgaataaatatgactacaggcccgaggcctcccctggaaggacctttaccaacagctgatgatggacagatcctacaggactagatcacttcctctatgaattttttttattgatttttgtggaccaaatactggcccagcctctagatgtaaatattgtacagtagggtctttttttttcctttggttaattgtatttcttgtaaacagcacatctccttacaaggacaaaaatgcgtatggaccattctgcagagctttygtggctgtttggttggagatggctctcactactgcaactgtttatggctggaagatcagcatcgctgtccagggcctatgtcaaggagctggctgtggccgtgccaccacgcagcagtacaagtgcatgtggagtgacagaggaggcagcctcctggggcraggagcatccttcctgggacaggggagcaaaagggcacaagacgacacacagcacatggaacaggccgagcgggactccatcatgccaacaacgtaaagaatgttttccttttcatttcctttttcaattttgattttt

SEQ ID NO: 19086 - DNA, 600 bp, Chicken  19866894228507_2
accaaatactggcccagcctctagatgtaaatattgtacagtagggtctttttttttcctttggttaattgtatttcttgtaaacagcacatctccttacaaggacaaaaatgcgtatggaccattctgcagagctttygtggctgtttggttggagatggctctcactactgcaactgtttatggctggaagatcagcatcgctgtccagggcctatgtcaaggagctggctgtggccgtgccaccacgcagcagtacaagtgcatgtggagtgacagaggaggcagcctcctggggcraggagcatccttcctgggacaggggagcaaaagggcacaagacgacacacagcacatggaacaggccgagcgggactccatcatgccaacaacgtaaagaatgttttccttttcatttcctttttcaattttgatttttttttactgtttctccaaaaagaaaaaaaagaaaaaaagaaaaaaaaagtgacttcaacagaatcttttcatactgcaagaaataatcgccgccgccttctttggtaatatgcaattgagctggtgagaaacaacacacaaataaagtgcattacccaaaga

SEQ ID NO: 19087 - DNA, 600 bp, Chicken  19866894228507_3
agtgagatactgaggaaagtaaatgttggaatagcatcggagacatgaacttggagtgcctaacaaacaaagatgtttatatcactggaaaaaaatatgtgatgattgctgcacaagagccataggctttttttctttcattctttcattttgtttccaagacagtgttaactctttttgttctagctttgatcctgattgtgtccgcaaggaaagacaacattggaggccatgctcttctttgtgggaaatcaccatgctttgggctaatttttactcttcttttattgttggtttttmgttcgtttacttttcaaagagtgaataattctgactttgcaggagagagtgttttgtaaggaacgtttccatagtctggcgtgacccagaaagtctgctgcacattcttatagcgtcttccagtcaatactctatgaaatagtaacacagctgagtaatgtgcattgtttgccaatatttccttaatttttctgaacaaaaccaacccaacgaacaactgctgctgcagctattgaagttaattgaggcagcagcattattaaacaatatatccagccttgaaatgtwattttgtgtatg

SEQ ID NO: 19088 - DNA, 600 bp, Chicken  19866894228507_4
tgttggtttttmgttcgtttacttttcaaagagtgaataattctgactttgcaggagagagtgttttgtaaggaacgtttccatagtctggcgtgacccagaaagtctgctgcacattcttatagcgtcttccagtcaatactctatgaaatagtaacacagctgagtaatgtgcattgtttgccaatatttccttaatttttctgaacaaaaccaacccaacgaacaactgctgctgcagctattgaagttaattgaggcagcagcattattaaacaatatatccagccttgaaatgtwattttgtgtatgtgtgtgactgtgtctatgagaactgtattagtttaatgcagaagccatgttgtctacagccagatgtttgtctgacataattgtttggcaaaaaaggaaacttattgctggtgcttaatgtacaattacatcaaatgtgttagcaacgtgaacaagtccaccactgttatcattcagtgtttctaaatatttataacgaactccctgatgctaaggattttagaatgttccaatactgagcatgagataaaagtacaccccaaaacgtgcatgagctccacgtggtcc

SEQ ID NO: 19089 - DNA, 600 bp, Chicken  19866894228507_5
tcttggtggagcgagtttggggtttccaaagcttggtggagctcttggtggagcgtcatggggtttccacagtcatgctcactgttgtgaaatttgtgccacctttgagcttccctttcagcactgacacattctgctgtcattacgcacatcacaggagtgcagctggagtttaggggatgtgagtgagtcaaatcttgcaatttttttttcattttccatttttcctttgtggttttttttcttcactttaagcgttcttccgtgcttggcttaacaaataacacaatttaaaaggawtttttttttcccctaagaaagctcccatgtagcagttgaagttacttaaatgttcagctcaccaaggtgggtcattacaaccactgcgctcagaaggtggatattttgtcagctgctggagggcagatgctctgagggtggtgcatgtggttatcatttcattgagacactcctttctcaccagccttccatatggacccagctcttttcacataatgggcagtcacagcgatggtcactcggctccattcgagcagaaagcagaagccaggagagtgcagggagaaaaagagagaaatc

SEQ ID NO: 19090 - DNA, 600 bp, Chicken  19866894228515_1
tatatttgaaactattttcaattttgctaagtagaggatgcaaccaacataagttatgctgcctggaaagattccatacttctaagaaatataaaaatactacagcagctttgaaaaacagaaccttttctgactgatcccagagattaagttctggatctagattgtctatgggccagcaaaatactgataacaaccatttcctgacagctgacttgagtctactcaaggtgccagccacaaacaagagcaggtaaggatgggaggtacttaaatctaaataaaattagactaaattgmaagatacaaagacaaacaaaatttggagatgtgagcaatgaaatgatggctccagcaatttgtctgcctgaagaaggaaaacaaargcttygattcctttygtttctgcctcatggagtgggctctggaattagggaccacttttaacaactggcataagtgaagaaaaaccctagaggctagcctagtacatttcactattcagcactgacaagcaacagcactctacaaaagtagagcatgttggtgagtgttatttccctcttcaagagctggtgagtactgttctatttgacagtc

SEQ ID NO: 19091 - DNA, 600 bp, Chicken  19866894228515_2
aaatataaaaatactacagcagctttgaaaaacagaaccttttctgactgatcccagagattaagttctggatctagattgtctatgggccagcaaaatactgataacaaccatttcctgacagctgacttgagtctactcaaggtgccagccacaaacaagagcaggtaaggatgggaggtacttaaatctaaataaaattagactaaattgmaagatacaaagacaaacaaaatttggagatgtgagcaatgaaatgatggctccagcaatttgtctgcctgaagaaggaaaacaaargcttygattcctttygtttctgcctcatggagtgggctctggaattagggaccacttttaacaactggcataagtgaagaaaaaccctagaggctagcctagtacatttcactattcagcactgacaagcaacagcactctacaaaagtagagcatgttggtgagtgttatttccctcttcaagagctggtgagtactgttctatttgacagtcttgaatggaaagaacttgtgtgcagaaatgactccttgctagcctcaaatcaagatgatgccagaagattttatcatgcttctcaa

SEQ ID NO: 19092 - DNA, 600 bp, Chicken  19866894228515_3
taaaaatactacagcagctttgaaaaacagaaccttttctgactgatcccagagattaagttctggatctagattgtctatgggccagcaaaatactgataacaaccatttcctgacagctgacttgagtctactcaaggtgccagccacaaacaagagcaggtaaggatgggaggtacttaaatctaaataaaattagactaaattgmaagatacaaagacaaacaaaatttggagatgtgagcaatgaaatgatggctccagcaatttgtctgcctgaagaaggaaaacaaargcttygattcctttygtttctgcctcatggagtgggctctggaattagggaccacttttaacaactggcataagtgaagaaaaaccctagaggctagcctagtacatttcactattcagcactgacaagcaacagcactctacaaaagtagagcatgttggtgagtgttatttccctcttcaagagctggtgagtactgttctatttgacagtcttgaatggaaagaacttgtgtgcagaaatgactccttgctagcctcaaatcaagatgatgccagaagattttatcatgcttctcaagacag

SEQ ID NO: 19093 - DNA, 600 bp, Chicken  19866894228515_4
acagcagctttgaaaaacagaaccttttctgactgatcccagagattaagttctggatctagattgtctatgggccagcaaaatactgataacaaccatttcctgacagctgacttgagtctactcaaggtgccagccacaaacaagagcaggtaaggatgggaggtacttaaatctaaataaaattagactaaattgmaagatacaaagacaaacaaaatttggagatgtgagcaatgaaatgatggctccagcaatttgtctgcctgaagaaggaaaacaaargcttygattcctttygtttctgcctcatggagtgggctctggaattagggaccacttttaacaactggcataagtgaagaaaaaccctagaggctagcctagtacatttcactattcagcactgacaagcaacagcactctacaaaagtagagcatgttggtgagtgttatttccctcttcaagagctggtgagtactgttctatttgacagtcttgaatggaaagaacttgtgtgcagaaatgactccttgctagcctcaaatcaagatgatgccagaagattttatcatgcttctcaagacagaatcacttcc

SEQ ID NO: 19094 - DNA, 600 bp, Chicken  19866894228516_1
ctctgtttgtttaccgggtggggtaatgaagggtcagagggtctccaccaaagcaagtttttaaagctaataggaaaagatatgatggacaaaatatttgataacagaagtgtggcatgagatgcgtaaataggaatcaaaatatcccccagttcatttcaagggaaaaaacagggtcatatcagcaccaggaaattgttggtacatggagaaatattaactactctcagatgcaaaaggtaaggtttgctgtgctaccacatgcacatgaggacataaaaatactgacgtcaatccacrttgacttctgtttcatattctgcccttggtccaggcttgatgcctgggatgtgagtgtatatttctcttgaaatgagctgtggagtattttcatacttcctgcgtggctccagagagcaggaggaagggcagcaatgtcaacggctacatgtgtttagctggcatgcaaccctgctgcttggtacaacggcagcatcttgatttcagtcatgtctgggactatttcagcagatattttccaggggaaaaattggccttgactaaggagacatggggacatccctacagttgcccctatac

SEQ ID NO: 19095 - DNA, 600 bp, Chicken  19866894228517_1
acagtcccttcaatagagtaattcaattatcgctcggggattcggtcttcattgaaagcaataatagcggtgtaattcgttggtaaataggtggtggaagcgaccccgctcgaaactttttttcggggagcggggttccatctccgggattcgcattgcccgtgcggggagcgggaggggggtgcgggtgggcagctcccactgccgagggccggagaggggcagccccgagcgggcggcgcggccaccaatgccccgagacggagccgggatccggcggggccgcgtccccgtgtcccsgtgttcggcttcgggacggggtccgccgggagcatccccggccgcaacgcagcccggctgggagctgcagggcaagatttgggttgtttatttgtttgtcattgtcctctcctctttcttcaaaggggttggggatggaaatagccagtggaagtttgggtggaggggagagaaaagtgtgattctggttcttggccgtgttgttggtttgttgcttttcttacaaggaaaaaaaaaaaaaggaaaagaaaaagaaaaagaaaaagggggagggggcggaggaaatataaaaaggaacaa

SEQ ID NO: 19096 - DNA, 600 bp, Chicken  19866894228520_1
gggctgtataatttctccagattaggatgtactgcatgtgtagttgtgttcacgtaaggcataaatagttcccactgcttcagaggagaggactgtcctgggagctacgggcaatcagagttttaggtcctacttttccacagacttctgtggtattttctgcacgtcatttaatttcattgtgcctaagtttcttcatctgtaaaataaatcttttgaatacaattgaatcagcttcatacagcaaattacatctgatgctgaatcatgtcctttctctctctgtctgcttatgtttaytgtgagctcctcagggcaaagactatcgcttcaagtctcatatataacaaaagtgtcttgagcaccacagaaccccattgccaggaactagaagcttactataataatggtaacaataacggaacaaatttggtcagccactcaaattaagatacagtgttcaaaccaaaggaaatctgtacttgcggcctttctcatgaataccgttggtacccaaaacggatatcctgtttgggtgcatccctggacaggcataaaacactggatatgctttagcctttggccaacaggaagaaagca

SEQ ID NO: 19097 - DNA, 600 bp, Chicken  19866894228522_1
gttagccagcatagcgctatattaacgttataaaggtatattcctttgattagttctaaattctactgccaaagtctttgttttgttttctgcaatcaactcagaaaattctcattctcttaattagaacaatgtattttcatgatcgcaggagccttgctgagttagctccagcagttctgtttgtttgctttttcttcagtccggacttttctgtttgtccttttgcttacaatcacctcaaggaaaatctcatgcaatattttcatgagtgtgagctctgctttctcatttttgccraagtatcttttactaactgacataatataagggcttacatcatgcagtggtcactgccacccttagaccgtcctttgttaatgtggcactacgcaaataagaactgtaatgctgaggttgttctacagaccaagcttttttcgtagctgatgtggtcctgtgctgacctgagaagcatttgagtgatcgttgtgagatctcatccagagctggggccacaataacgaacttgtggaggtgctttgttgtcttagatctgacagtctctcacccggcgttccagttgcactattaaaaggt

SEQ ID NO: 19098 - DNA, 600 bp, Chicken  19866894228526_1
aggaaaatactgtgttaaaaaacattacgttccaacaacacaacttttccttcttggagtccaggcaggcaccagtatgcaagaccatctggaaagaaatgtgagaacacggtacgtagcttcaggcacatggatcactgcctagtctacatgttgaacatcagaggtaacagcttctgagtctaaacaaatatcccgagacgccttgaataatgactggagttctctacaccccattcttcccaaattcccctctagggatagatccagtcaatgtccttgcaacacaccaagctcccytggagacggatcagacctacattgccagtaaygcctgtgctgtgaataagcaatcaagtttaatgacttcccatgtatattggcttcgcactaacgcaggcccacctcttcgacagaattactcctgatttgtttgcacaggtataattagggacttgcacatctgggaaaagtgttctgaaagccatcagcatcctgaatttgtactgccactgaaataaaaattcaaaagcaaaggtcatctcagataccatctcacgggctgaagtaataatatgggaaatcacagcacagctctga

SEQ ID NO: 19099 - DNA, 600 bp, Chicken  19866894228526_2
caacaacacaacttttccttcttggagtccaggcaggcaccagtatgcaagaccatctggaaagaaatgtgagaacacggtacgtagcttcaggcacatggatcactgcctagtctacatgttgaacatcagaggtaacagcttctgagtctaaacaaatatcccgagacgccttgaataatgactggagttctctacaccccattcttcccaaattcccctctagggatagatccagtcaatgtccttgcaacacaccaagctcccytggagacggatcagacctacattgccagtaaygcctgtgctgtgaataagcaatcaagtttaatgacttcccatgtatattggcttcgcactaacgcaggcccacctcttcgacagaattactcctgatttgtttgcacaggtataattagggacttgcacatctgggaaaagtgttctgaaagccatcagcatcctgaatttgtactgccactgaaataaaaattcaaaagcaaaggtcatctcagataccatctcacgggctgaagtaataatatgggaaatcacagcacagctctgaggaaaaggctgtctgactccagtgcctgcaaa

SEQ ID NO: 19100 - DNA, 600 bp, Chicken  19866894228534_1
ccaaggagataggtgcagccctctgtcatggacccaatggagcaggggacaaagacaaatttcaacatcatcctaggcaacatagacagtgggatccagtacacccttcaccaagtttgcagatgacaccaagctgagtggtgctgttgacaaactagagggaagagatgctatccagagtgacctgaacaggcttgagagatgggtccgtgacaacctcatgaagtacaacaaggcctactggaagacattgcatctaggttggagcaatcccaagcacagatacagattaggtggagmatggcttgagagaagccctgaggagaaggatttgggagtgtcggttgataaaagattcagtatgagctggcaatgtgcacttgcagcccagaaggccaatggtatcctgggttgcatcaagacaagtgtgaccccacctggagcattgtatccagttctgaagcccccaacacaagaaggatgcagagttgttggagcaggtacacaggagggccacgaaaatgatcaaggtctstactaccttctctatgaggaaaggctgagagagctggggcttttgaggctggagaaggctccgag

SEQ ID NO: 19101 - DNA, 600 bp, Chicken  19866894228534_2
gcctactggaagacattgcatctaggttggagcaatcccaagcacagatacagattaggtggagmatggcttgagagaagccctgaggagaaggatttgggagtgtcggttgataaaagattcagtatgagctggcaatgtgcacttgcagcccagaaggccaatggtatcctgggttgcatcaagacaagtgtgaccccacctggagcattgtatccagttctgaagcccccaacacaagaaggatgcagagttgttggagcaggtacacaggagggccacgaaaatgatcaaggtctstactaccttctctatgaggaaaggctgagagagctggggcttttgaggctggagaaggctccgaggagaccttacagtggcattccagtacccaaagggggcctacaggaaagctgaggaggggcttttataaggtcatgtagcaacaagatgagggaaaatggttttaaactggaagagggtagatttagactagatattaggaagaaattctttattatgagagtagggagacactggaacatgttgcccagtgaggttgtggatgccccctccctggaagcattcaaggccaggctg

SEQ ID NO: 19102 - DNA, 600 bp, Chicken  19866894228539_1
catgtctggggatctccagaggaggggtagatagggacagatgagggggtctcagaggaatggtggtggtgtttgggagtggatgggagaggatttggaggtttcaaggtgtgctaagacatttgcggggataaggaaggactttggggtaagagaagagcatttagggatttggtgtgtctgggaagcatttgggatgcaccagtgagaacttgggattgttagatttggggaagctatatggtctgcgcttagaacaggacatcagggagtcccaaacagggaatttgaggtctgtcyccttccacacaccccagaaatgagacacttggagaggctcatcagcacagtaaatcagtgctcactgtggtgtagatgacagaggactggggggcagtgggggaagtgggaggctgggagcacgggatggcagctggcatctcggcgtaggtcagatcctcgctgtccctggagggcccctggaggtagaggaggagatagaggagggggtccccaagatgagtgagctgagggtgagtctctggtgtaggtatgtgggggatgtggccatgaggaggagtctgcatttgtgattgggct

SEQ ID NO: 19103 - DNA, 600 bp, Chicken  19866894228539_2
ccatagggtctcgaggtgtttagggactggtggaacagagaggctcaattctggtgtccccatgggtcattgggtttccctgtgggtgcatttagtgcccctctaatccagttatcagtgccaatagggtctagagggggtttaaggcttggagggcatctttaggtctgggtatttaggggtatctgtgggctggggttccccatattgcaggtttgtgtttcccaagggctggatacgggtggtgctcataaatgtgagggtaagccatatgaggttgggggtcacttggggtccccwtggggaaggtttgggtttccatggagatgtgaggtgtgggtcccaagaagtgaactgggatttgggktccactgaccccgacacttacctggaattgcactgactcgggcatctcaggggygacacctgcatcaaaaagaagagggggaaggttgggagttatgtgtgggccttgagggactaccgggtatccataacagatcagtacggagtcaaagaacacaaaggggatgactggggggacctgtagggaatggaaaccattttagtccttcctcaccagcactctcatctctccat

SEQ ID NO: 19104 - DNA, 600 bp, Chicken  19866894228539_3
cattgggtttccctgtgggtgcatttagtgcccctctaatccagttatcagtgccaatagggtctagagggggtttaaggcttggagggcatctttaggtctgggtatttaggggtatctgtgggctggggttccccatattgcaggtttgtgtttcccaagggctggatacgggtggtgctcataaatgtgagggtaagccatatgaggttgggggtcacttggggtccccwtggggaaggtttgggtttccatggagatgtgaggtgtgggtcccaagaagtgaactgggatttgggktccactgaccccgacacttacctggaattgcactgactcgggcatctcaggggygacacctgcatcaaaaagaagagggggaaggttgggagttatgtgtgggccttgagggactaccgggtatccataacagatcagtacggagtcaaagaacacaaaggggatgactggggggacctgtagggaatggaaaccattttagtccttcctcaccagcactctcatctctccatgtccagaggttgcgggcatcgaggacaaagtagaggcccaggctgaagaccaagacagcagcacagc

SEQ ID NO: 19105 - DNA, 600 bp, Chicken  19866894228539_4
caatagggtctagagggggtttaaggcttggagggcatctttaggtctgggtatttaggggtatctgtgggctggggttccccatattgcaggtttgtgtttcccaagggctggatacgggtggtgctcataaatgtgagggtaagccatatgaggttgggggtcacttggggtccccwtggggaaggtttgggtttccatggagatgtgaggtgtgggtcccaagaagtgaactgggatttgggktccactgaccccgacacttacctggaattgcactgactcgggcatctcaggggygacacctgcatcaaaaagaagagggggaaggttgggagttatgtgtgggccttgagggactaccgggtatccataacagatcagtacggagtcaaagaacacaaaggggatgactggggggacctgtagggaatggaaaccattttagtccttcctcaccagcactctcatctctccatgtccagaggttgcgggcatcgaggacaaagtagaggcccaggctgaagaccaagacagcagcacagcccctcagcaccgcctccaccaggttcccatgggaccgccccttggcacctgtgg

SEQ ID NO: 19106 - DNA, 584 bp, Chicken  19866894228539_5
ccttcctcaccagcactctcatctctccatgtccagaggttgcgggcatcgaggacaaagtagaggcccaggctgaagaccaagacagcagcacagcccctcagcaccgcctccaccaggttcccatgggaccgccccttggcacctgtgggctccgagtgtttgggtgtccccatcacagggcagggatgccgtgacagttccacccatggctgacacttgggccctgcaaatgggatctctgacctaactggagttgcatgtgtgggtgtcacctccatcatcacactgtctacatgrggtgaggacacaaatgtggggccttgggaattcaggattatatgtattggtgctggcagaggccagagtcccccctcagtggatgaaggtggctgtgccccaccagtgggatcctggcacagaatacgagctgagcattcatctctatgcaggaggaatgtggcaccacaacccccattgcagcactgggtggtgacatcagtccccattcccacatgttgcctgggctcggggaaatgctgagctgaaggaagctgcagtgctgtgtgcagggaggggaagag

SEQ ID NO: 19107 - DNA, 599 bp, Chicken  19866894228543_1
  misc_feature (1)..(25): n is any nucleotide
nnnnnnnnnnnnnnnnnnnnnnnnncggccccctgccaaaacaaccccgtcccaaagaaaccagctggaggacccatgggaaaagaggggagtagcatcaaatgcaactccacgtgtggttcctgcttcttgtacgagtagagacatacgagcttcttcagctcttgggttggtagcccccgttgtaatacatgcaccaggcaaagcgcagctattgctctttgtgtggctcagttttcctgttagaaaggagacagagcatgaaggacttcccagctctcctaccagcttctgctcttygctttgatgtgatttctgcagcataagcaaggtacctcgatgccaaaaggggccatattgtccacaatgaacagattgagcgttgctgacagtgaacagttacctaattagctcaaatagggacttgcatgatggatattgtcgcactctgggaaaaaaaggaggaggaaaaaaggaggaaaaggattaagaggaagaaataatcatctyccttgtggggtcatcgcctgcgagtctctgagcttctgctgagttttgaaggttaaaacaaattgcattttcttccaatttggaaatgg

SEQ ID NO: 19108 - DNA, 600 bp, Chicken  19866894228543_2
gctattgctctttgtgtggctcagttttcctgttagaaaggagacagagcatgaaggacttcccagctctcctaccagcttctgctcttygctttgatgtgatttctgcagcataagcaaggtacctcgatgccaaaaggggccatattgtccacaatgaacagattgagcgttgctgacagtgaacagttacctaattagctcaaatagggacttgcatgatggatattgtcgcactctgggaaaaaaaggaggaggaaaaaaggaggaaaaggattaagaggaagaaataatcatctyccttgtggggtcatcgcctgcgagtctctgagcttctgctgagttttgaaggttaaaacaaattgcattttcttccaatttggaaatggcagcaagtgctcttgcttccttttgctcagcacctcgaaaagctctggtgtcactgcaggagggctgccagccaccgggccccttcagcacctcctgctccctctccttggctgttcctgcagcgttcatccagctgaaggtggaggagctgcagtggctgcagaaaccctgggagatgccctttgctccgcaggagcggctcaaggggaa

SEQ ID NO: 19109 - DNA, 599 bp, Chicken  19866894228548_1
  misc_feature (1)..(182): n is any nucleotide
nnnnnnnnnnnnnnnnnnnnnnnnnnnnnnnnnnnnnnnnnnnnnnnnnnnnnnnnnnnnnnnnnnnnnnnnnnnnnnnnnnnnnnnnnnnnnnnnnnnnnnnnnnnnnnnnnnnnnnnnnnnnnnnnnnnnnnnnnnnnnnnnnnnnnnnnnnnnnnnnnnnnnnnnnnnnnnnnnnnnnntctgaaagaattgtttaggaattattaacacagcttcattagagaggagagagcctagtggagaccaaatcctcttagggaaacttcctctccctgtcagaggattactgtgacttcsccccagcccttttggggtggaaggcagagttagggaggaacaaatgatgtaagagagaagtctgtgtgagactgcctcaaacacaatatcatattaatctgcttctccttcaagcaggaagaaatccatttggattggattatccatttggacggagttctctccattaatttctgtgcaattcaaccatgacttcacatttattttattattcccctgtagagagaaagcagaaagtgacagtacctctccaacatctcaaagcccgaatggatgctcttgctctgaaaagaaaaact

SEQ ID NO: 19110 - DNA, 600 bp, Chicken  19866894228548_2
aagtctgtgtgagactgcctcaaacacaatatcatattaatctgcttctccttcaagcaggaagaaatccatttggattggattatccatttggacggagttctctccattaatttctgtgcaattcaaccatgacttcacatttattttattattcccctgtagagagaaagcagaaagtgacagtacctctccaacatctcaaagcccgaatggatgctcttgctctgaaaagaaaaacttccatttaggttcccatattccttttctgtgactagccagaaatgtgcaaaccaagasctctcatgctccttgtgaatgattcacatttgtattatgcagccctttcaaaaccttctcaggacakcaagaaagacttctacatagtactgaaggggagaaacaaacaatatcaayacagaaactgtttttctctgctaggagtaaaacttctctcaaataacagttacgatcagctgctatacgagatagaagactcagataatgaagtcacttgttatttctgaacaggttagtcctgaaaagcttgcatttacaaatcatatccaacaccatatttatgcaggtgtgttctgctaa

SEQ ID NO: 19111 - DNA, 600 bp, Chicken  19866894228548_3
tccatttggattggattatccatttggacggagttctctccattaatttctgtgcaattcaaccatgacttcacatttattttattattcccctgtagagagaaagcagaaagtgacagtacctctccaacatctcaaagcccgaatggatgctcttgctctgaaaagaaaaacttccatttaggttcccatattccttttctgtgactagccagaaatgtgcaaaccaagasctctcatgctccttgtgaatgattcacatttgtattatgcagccctttcaaaaccttctcaggacakcaagaaagacttctacatagtactgaaggggagaaacaaacaatatcaayacagaaactgtttttctctgctaggagtaaaacttctctcaaataacagttacgatcagctgctatacgagatagaagactcagataatgaagtcacttgttatttctgaacaggttagtcctgaaaagcttgcatttacaaatcatatccaacaccatatttatgcaggtgtgttctgctaaagggtatgccctcactgaccggtagaagccaattaaactggaaaggaaaataaagcttggtgaatca

SEQ ID NO: 19112 - DNA, 600 bp, Chicken  19866894228548_4
tgtgcaattcaaccatgacttcacatttattttattattcccctgtagagagaaagcagaaagtgacagtacctctccaacatctcaaagcccgaatggatgctcttgctctgaaaagaaaaacttccatttaggttcccatattccttttctgtgactagccagaaatgtgcaaaccaagasctctcatgctccttgtgaatgattcacatttgtattatgcagccctttcaaaaccttctcaggacakcaagaaagacttctacatagtactgaaggggagaaacaaacaatatcaayacagaaactgtttttctctgctaggagtaaaacttctctcaaataacagttacgatcagctgctatacgagatagaagactcagataatgaagtcacttgttatttctgaacaggttagtcctgaaaagcttgcatttacaaatcatatccaacaccatatttatgcaggtgtgttctgctaaagggtatgccctcactgaccggtagaagccaattaaactggaaaggaaaataaagcttggtgaatcaatctttaatcttacattttcttccctttgagctttaacccaacagatggc

SEQ ID NO: 19113 - DNA, 589 bp, Chicken  19866894228552_1
gctacttcagatcccttgcatttggaaaggatgacccctatggaaatagtagctgaagattttcatcatcaatcagaaagagctccaaagaaacacatcgtgatgtgtttgcaaggctgacttactgttgttaatgctgtgatttttattttgctctggtgactgaacaccagttgaggatcagagcaaagtgaagagagaattttcaaaccaacatacagcagtttagatacctcatataatacactgtgacccaatggcaaaatatgtgcagagcttttcctgcactgagaaaggggraattggggccacagctgatacttcagcaattttcttttcctttcttaataaaaggggctcattccattatgaagaagaatttgagcagtgatgtcttttcatcttaagagtgctcaactttttacatataccctattccttcctgaactgtgaactatttcccagttagactgttcaccaggcagaagtaaatattcaaaaagacaagcaggaaatgtcacaatgaaccttgggtcaaattataaagaatctgagtgtcttgcatgctgcatttagaacttttgctatt

SEQ ID NO: 19114 - DNA, 600 bp, Chicken  19866894228559_1
gcaatgttcatatctcaacagtaggtggtcaaatcttatttagctattgtgattcttcttctgtattagcaaattcccagttctgtttgcattcctgtattgtattaaataagtaggactatttgtgtagcaggaactacctaaactaattaaaaatggaaaattcatgtcctcatggttttggtcccatatgtctattataaaatatcctagcagtattacaacaacaaaaaagtacacctaaaaagctattcactttctcaccaaatattcaaaccatttcttccaccattttggaamaggaaaaaatctttcaaaatacagctactgcaaaagtgtcctcaaagaagaamattctgatgaaaattcagtcttagcttccctttacatgccaaacaattaaataacagttctgcttaaaaaatgtgttaacataatcttaattggagaatcattctgaaggagaactattcttatactgttaatccagtgaaatagttctataatattacttggaaaagcaatgggttctaaaagctgcaaagagcatactcttaagtttttctaacaatccacaaggcatatcctcgtctttctgaa

SEQ ID NO: 19115 - DNA, 588 bp, Chicken  19866894228559_2
tcttcttctgtattagcaaattcccagttctgtttgcattcctgtattgtattaaataagtaggactatttgtgtagcaggaactacctaaactaattaaaaatggaaaattcatgtcctcatggttttggtcccatatgtctattataaaatatcctagcagtattacaacaacaaaaaagtacacctaaaaagctattcactttctcaccaaatattcaaaccatttcttccaccattttggaamaggaaaaaatctttcaaaatacagctactgcaaaagtgtcctcaaagaagaamattctgatgaaaattcagtcttagcttccctttacatgccaaacaattaaataacagttctgcttaaaaaatgtgttaacataatcttaattggagaatcattctgaaggagaactattcttatactgttaatccagtgaaatagttctataatattacttggaaaagcaatgggttctaaaagctgcaaagagcatactcttaagtttttctaacaatccacaaggcatatcctcgtctttctgaaaaggcataagggcagaaaaaagcaataaaaaggagaataaa

SEQ ID NO: 19116 - DNA, 600 bp, Chicken  19866894228562_1
ctccttcctactgttgggatatctccttatggtcattttggaaagcacagtgtagtctctggaattcttcaagctggttctggagtcatgagactttcaggattcattaagtgagcacattttatcctcatgacagcagataaaagccataaaatttgaccccagaacaatttcagaaattgaacagagaaaaaagacggtggcattagcatttcagaatgtctcattattttagttcctgacttccagtgcatgaatgcttagcagaggcaatgttatggttagtccccaggtgtttckgcttcccaactataaaacagagagtgtaaaatttgcctacttcataggggattgtcatcacaattactttaaagaatgtgaggtgttcagagagtgaggaatccaacaacctgatctagacgtgtatgaaataaagagatttacgtgaagtaactggaaccacttcttgatggggaaaaaaatcacaatctgaggaggttgttggggcactgggaaaatgagaacatctgaatgtgccattacaagactgaatattgagagatcagaaggattaaaaggaagctgtttacaagacttttt

SEQ ID NO: 19117 - DNA, 599 bp, Chicken  19866894228568_1
  misc_feature (1)..(62): n is any nucleotide
nnnnnnnnnnnnnnnnnnnnnnnnnnnnnnnnnnnnnnnnnnnnnnnnnnnnnnnnnnnnnnaatatcagttcaaaatatttcaattaaagcactgattttaatgcactgaaatagaaaggcaaaggagaatgaacaagtttgattttttcttttcatttggtagcattcaagtgctttattattacatttctaatagctttgttcccattttttcatttttgacaaattgtatatactgccaggatatttctcagtaaaatttttgtggttattcctagtgcacatctaagtacataayggaatatacacacatggaagtatctgaagaaaacaatgattatactgaaaagagtagttttatcctttttgaaatgaaatggcatgataccacatttcaggagtgtaaaaaatgcttatttcatgttcgagactgcatagcaaatatgaagattgccatatgttcgcctgttagcccagatactctccactgatttattatcaaataataataaaatgctttaagatacatgttttatatttcctgctgttataaataatgcagcattcacaactacaaattgtcatgataattttaca

SEQ ID NO: 19118 - DNA, 600 bp, Chicken  19866894228576_1
agtaaatggcacaaaaatactccgaaactccacagataagaaggcttgatcatttttgtggtaggggatgaaaggctgatttggaacctgccttgagggccacacagatgcaaaagcagctcccagctgtcagagcctcaccacgtacctctgcttgcacagatgtgacagtgatgcactttctgggtcacactgagcaaggaaggagaactcatcctgcaagctgagtcaagtttaccagccatgacttggcctgtgcttacagcacctgtctgcctgatagaagatcctacgcaatcyctcagggaatcttgcagtgtaacacgcatataagatatgggtttaccatttaagtttctttctctaggagcccctttttgctccttaatgccagttttagaccaccgatttcccatcctataatataaatattgtgcaaagaattcttgtcagtaaggacaaaaatgaaatattccataataataataatatttattattattattattattattaatggaatgtagttggggcacaaagactagttattcttcgtgtttgtatactttccccattcttagatattgtactyactggcag

SEQ ID NO: 19119 - DNA, 600 bp, Chicken  19866894228576_2
cgcaatcyctcagggaatcttgcagtgtaacacgcatataagatatgggtttaccatttaagtttctttctctaggagcccctttttgctccttaatgccagttttagaccaccgatttcccatcctataatataaatattgtgcaaagaattcttgtcagtaaggacaaaaatgaaatattccataataataataatatttattattattattattattattaatggaatgtagttggggcacaaagactagttattcttcgtgtttgtatactttccccattcttagatattgtactyactggcagcttatagtttgtttacaaatcccagcagctttttttttttctgggttacatttagatatatattttttaattaaatagattttatttcttccttttctaacagagagggctgtgaatagcttacagtccagctcttcctggggcttagttttcttagcaattcaaaaacagtaactaacatacatctcatcttaggctttctccttcagcctggcttccatccaacagctcctctgacccggtctcctttcactagttgcctttattttggctgtttcccaatttcccctat

SEQ ID NO: 19120 - DNA, 599 bp, Chicken  19866894228578_1
  misc_feature (1)..(60): n is any nucleotide
nnnnnnnnnnnnnnnnnnnnnnnnnnnnnnnnnnnnnnnnnnnnnnnnnnnnnnnnnnnntagttgttaactttgggattttcagtgtacaaagacattcagctttggagtttttttgttttgtgttttcaacttttagactcctttgagatatccagccctttccttcctttgtgcctcctctgctgtaaaccacgtactgtactcaaatgttagaagaggccttttaatgatctattgggaatgaaatgaataatttaaaatttacaatagctttaaattggttttgcttattgtagrgagtaaactacattacagaagggggatttgttctctttctgtttgctttcaatgaaataatacaaaatcctgtctcatattttctttgtgttaattgggggttttactgtttcttcctttacttacagtgatrtatgtaaaagcccttaaaatccattttcattgtgcagtggatttggtcaattgtactagaactctttctattaataagcatgtgaaaggaagagtattctgtatgtaaattaatagagytaatcagttgtcctcccattgtaatactcatgatagaattttggcag

SEQ ID NO: 19121 - DNA, 600 bp, Chicken  19866894228578_2
ttttagactcctttgagatatccagccctttccttcctttgtgcctcctctgctgtaaaccacgtactgtactcaaatgttagaagaggccttttaatgatctattgggaatgaaatgaataatttaaaatttacaatagctttaaattggttttgcttattgtagrgagtaaactacattacagaagggggatttgttctctttctgtttgctttcaatgaaataatacaaaatcctgtctcatattttctttgtgttaattgggggttttactgtttcttcctttacttacagtgatrtatgtaaaagcccttaaaatccattttcattgtgcagtggatttggtcaattgtactagaactctttctattaataagcatgtgaaaggaagagtattctgtatgtaaattaatagagytaatcagttgtcctcccattgtaatactcatgatagaattttggcagtgcttcagtaggaagtagttttatggcttctgtccaggatcacatttttgcaacctgcaaacagaggaaattgaggttatctccacatcctgttaaaatgtccaaaatgtatctgggcacctgaatattagctc

SEQ ID NO: 19122 - DNA, 519 bp, Chicken  19866894228578_3
ataatttaaaatttacaatagctttaaattggttttgcttattgtagrgagtaaactacattacagaagggggatttgttctctttctgtttgctttcaatgaaataatacaaaatcctgtctcatattttctttgtgttaattgggggttttactgtttcttcctttacttacagtgatrtatgtaaaagcccttaaaatccattttcattgtgcagtggatttggtcaattgtactagaactctttctattaataagcatgtgaaaggaagagtattctgtatgtaaattaatagagytaatcagttgtcctcccattgtaatactcatgatagaattttggcagtgcttcagtaggaagtagttttatggcttctgtccaggatcacatttttgcaacctgcaaacagaggaaattgaggttatctccacatcctgttaaaatgtccaaaatgtatctgggcacctgaatattagctcattagtgcttttgtttggatgaaatctcaaagtgggaa

SEQ ID NO: 19123 - DNA, 600 bp, Chicken  19866894228582_1
gagaatggagctttgtaaataattgtaattcctgtattttttccacatatgctgcatttcagtctgtaggtgatacagaaatcagatgcagctctgccattggcagctttctgcttcttccctcagaaccatccattcttctaattgtgtgctgcgctgcatggtgccaacataccccaacaccgtgaaaatgcaacgagagaagaaaaagcggcttccaaaattgctttttcagcaggtgttctctccattaataatgctgtgtgatgtgtctgaaatgctgaaggtttgaggcttgayggaaagctcccccaggattgggttggtcagtgtatgcaggtaggacagctgggrgagaggctgcgataaatgcaaaatccttcaagctgtaatagaaggatcttccagttacagaaccagaaagggaggcagcagctctcagaactcctggacatctggtcatgcttgctttggtggtgtatcctcrtgtaccaacccactggttcagatttgttacctgtaagatatgggtaacaaattaccattgtgctggagatggttgaatcagttgcttttatttgtacagcaatcggaaagcga

SEQ ID NO: 19124 - DNA, 600 bp, Chicken  19866894228582_2
catttcagtctgtaggtgatacagaaatcagatgcagctctgccattggcagctttctgcttcttccctcagaaccatccattcttctaattgtgtgctgcgctgcatggtgccaacataccccaacaccgtgaaaatgcaacgagagaagaaaaagcggcttccaaaattgctttttcagcaggtgttctctccattaataatgctgtgtgatgtgtctgaaatgctgaaggtttgaggcttgayggaaagctcccccaggattgggttggtcagtgtatgcaggtaggacagctgggrgagaggctgcgataaatgcaaaatccttcaagctgtaatagaaggatcttccagttacagaaccagaaagggaggcagcagctctcagaactcctggacatctggtcatgcttgctttggtggtgtatcctcrtgtaccaacccactggttcagatttgttacctgtaagatatgggtaacaaattaccattgtgctggagatggttgaatcagttgcttttatttgtacagcaatcggaaagcgagctagctttatgcttattaagtcttcatcaatggcttagtcttggcaataagcc

SEQ ID NO: 19125 - DNA, 600 bp, Chicken  19866894228582_3
aaaatgcaacgagagaagaaaaagcggcttccaaaattgctttttcagcaggtgttctctccattaataatgctgtgtgatgtgtctgaaatgctgaaggtttgaggcttgayggaaagctcccccaggattgggttggtcagtgtatgcaggtaggacagctgggrgagaggctgcgataaatgcaaaatccttcaagctgtaatagaaggatcttccagttacagaaccagaaagggaggcagcagctctcagaactcctggacatctggtcatgcttgctttggtggtgtatcctcrtgtaccaacccactggttcagatttgttacctgtaagatatgggtaacaaattaccattgtgctggagatggttgaatcagttgcttttatttgtacagcaatcggaaagcgagctagctttatgcttattaagtcttcatcaatggcttagtcttggcaataagccattaaaaaagtcccacgtcaggcaacaaggatggatacaaatagcaattagtgcttctttcatctcatctcaaaagtggggttgaatgctagaagatgagaagcaaaaaactttgcttggccggatcttggtt

SEQ ID NO: 19126 - DNA, 600 bp, Chicken  19866894228586_1
tgtatatcaattcttatgacaaaagtagataacaaccagactttattaatcatggtgaagggttcaatcttttagatatgaaaactaaggagctattctttatagcaacaatgactagtaattgttgaagacaattctgcaaaggacttaacttttctggtcacagatttccccaaaataagcctgtagtttgaatgggagtgaacatcagcaaaattctaggttggtacagatattgcatgtttgcttttaggacctacaggttctctcttctttacgtttgttactttatggtgtagrtcccatgaaagaccaattgtcatccacaaaacttttattatattctctttytctaaggaatattataagcttctttggaacaacacccatccaatcttgtttcctcactccccaaataactttctatgtctcaccttcaaaattagagtggctctgctgacatcactcatgtttaagttccatttctgaataagagcttgctgatrtgtgtaaagtgaattttgctcaatcatagcactgacattcataataccattaattcaattgaagagaatgatagctacctcaaggtattagaca

SEQ ID NO: 19127 - DNA, 600 bp, Chicken  19866894228586_2
atggtgaagggttcaatcttttagatatgaaaactaaggagctattctttatagcaacaatgactagtaattgttgaagacaattctgcaaaggacttaacttttctggtcacagatttccccaaaataagcctgtagtttgaatgggagtgaacatcagcaaaattctaggttggtacagatattgcatgtttgcttttaggacctacaggttctctcttctttacgtttgttactttatggtgtagrtcccatgaaagaccaattgtcatccacaaaacttttattatattctctttytctaaggaatattataagcttctttggaacaacacccatccaatcttgtttcctcactccccaaataactttctatgtctcaccttcaaaattagagtggctctgctgacatcactcatgtttaagttccatttctgaataagagcttgctgatrtgtgtaaagtgaattttgctcaatcatagcactgacattcataataccattaattcaattgaagagaatgatagctacctcaaggtattagacaagcagagtagaatttggcaatttgataagccagcataattgttccacatgc

SEQ ID NO: 19128 - DNA, 484 bp, Chicken  19866894228586_3
atcagcaaaattctaggttggtacagatattgcatgtttgcttttaggacctacaggttctctcttctttacgtttgttactttatggtgtagrtcccatgaaagaccaattgtcatccacaaaacttttattatattctctttytctaaggaatattataagcttctttggaacaacacccatccaatcttgtttcctcactccccaaataactttctatgtctcaccttcaaaattagagtggctctgctgacatcactcatgtttaagttccatttctgaataagagcttgctgatrtgtgtaaagtgaattttgctcaatcatagcactgacattcataataccattaattcaattgaagagaatgatagctacctcaaggtattagacaagcagagtagaatttggcaatttgataagccagcataattgttccacatgcatcaaaattaaatgtagaaagtacagaattctataaaag

SEQ ID NO: 19129 - DNA, 600 bp, Chicken  19866894228587_1
gattgtctagataatattgaagtgtgaatgactaaaatttggatattacatgcaacagaatatttcagtgccttagaaaaatctgtgtgatatcgtctaccagagcagtactctgtagatgggatagttatgggttagttactaaagtacttttttcctgagatttcccctctgccctcccaaagggccaattagcccaatttgggccaaggacttaagataacttaaaatctttcagaagggtatcatgcttggtatggccacagaagtcaatgtgagattcacttaacagtaattacrttcggtgctaaaacagggctcagatgttcatgcttctgcaaaataattgcttatgctcctttccatgttcagagtgrtacttkcactttcctaatattctgtgytcagtgatcctaaatgtcttcacactctttacagagctaaggcaaaaagcactctgtaaaacaggttaggaatcaacgtgacagcctaacacatacgaaaaagtcatccttagttgattaagaaaggttttcggrgtgtctcaagctttcccaatttattgttcartagttaggttagaagtagggaggttttaag

SEQ ID NO: 19130 - DNA, 466 bp, Chicken  19866894228587_10
tgaagtttcatattctggtgctataattaacaaatacaccatttggattaaaaaaaaaaaatgaccactgcagctctggaaaagtgagatggtatctgtgcatctcctgtctcataatcggatttattactgtgttctcctcagatgcatctgttgcttgttaggtttcagctgtccaccagacagttaaccaagcctggcttcattcgctcgattattaaatcacatattcggtgagattgttcagacaggccagaggggctttgtggagcactaacaattcagcacttttagcaggrraaaaaaaagactaagaaacgagtacttaggaataattatgctttatactaaattctctctaaaattcccttctgcgctggcaggagaaagtgatagaaatctatctgttcccaaggtgaattgcttgtggggggggggcaatgctagatggggaaggtaggagctg

SEQ ID NO: 19131 - DNA, 600 bp, Chicken  19866894228587_2
aaaatctgtgtgatatcgtctaccagagcagtactctgtagatgggatagttatgggttagttactaaagtacttttttcctgagatttcccctctgccctcccaaagggccaattagcccaatttgggccaaggacttaagataacttaaaatctttcagaagggtatcatgcttggtatggccacagaagtcaatgtgagattcacttaacagtaattacrttcggtgctaaaacagggctcagatgttcatgcttctgcaaaataattgcttatgctcctttccatgttcagagtgrtacttkcactttcctaatattctgtgytcagtgatcctaaatgtcttcacactctttacagagctaaggcaaaaagcactctgtaaaacaggttaggaatcaacgtgacagcctaacacatacgaaaaagtcatccttagttgattaagaaaggttttcggrgtgtctcaagctttcccaatttattgttcartagttaggttagaagtagggaggttttaagggatactacacatcctagagctatgttgaatttgtatcattagggattcctagaaaaacgaacatggtcggcaaaaa

SEQ ID NO: 19132 - DNA, 600 bp, Chicken  19866894228587_3
tgtgtgatatcgtctaccagagcagtactctgtagatgggatagttatgggttagttactaaagtacttttttcctgagatttcccctctgccctcccaaagggccaattagcccaatttgggccaaggacttaagataacttaaaatctttcagaagggtatcatgcttggtatggccacagaagtcaatgtgagattcacttaacagtaattacrttcggtgctaaaacagggctcagatgttcatgcttctgcaaaataattgcttatgctcctttccatgttcagagtgrtacttkcactttcctaatattctgtgytcagtgatcctaaatgtcttcacactctttacagagctaaggcaaaaagcactctgtaaaacaggttaggaatcaacgtgacagcctaacacatacgaaaaagtcatccttagttgattaagaaaggttttcggrgtgtctcaagctttcccaatttattgttcartagttaggttagaagtagggaggttttaagggatactacacatcctagagctatgttgaatttgtatcattagggattcctagaaaaacgaacatggtcggcaaaaatttgag

SEQ ID NO: 19133 - DNA, 600 bp, Chicken  19866894228587_4
gcagtactctgtagatgggatagttatgggttagttactaaagtacttttttcctgagatttcccctctgccctcccaaagggccaattagcccaatttgggccaaggacttaagataacttaaaatctttcagaagggtatcatgcttggtatggccacagaagtcaatgtgagattcacttaacagtaattacrttcggtgctaaaacagggctcagatgttcatgcttctgcaaaataattgcttatgctcctttccatgttcagagtgrtacttkcactttcctaatattctgtgytcagtgatcctaaatgtcttcacactctttacagagctaaggcaaaaagcactctgtaaaacaggttaggaatcaacgtgacagcctaacacatacgaaaaagtcatccttagttgattaagaaaggttttcggrgtgtctcaagctttcccaatttattgttcartagttaggttagaagtagggaggttttaagggatactacacatcctagagctatgttgaatttgtatcattagggattcctagaaaaacgaacatggtcggcaaaaatttgagttctatgcaattctactcttg

SEQ ID NO: 19134 - DNA, 600 bp, Chicken  19866894228587_5
agggtatcatgcttggtatggccacagaagtcaatgtgagattcacttaacagtaattacrttcggtgctaaaacagggctcagatgttcatgcttctgcaaaataattgcttatgctcctttccatgttcagagtgrtacttkcactttcctaatattctgtgytcagtgatcctaaatgtcttcacactctttacagagctaaggcaaaaagcactctgtaaaacaggttaggaatcaacgtgacagcctaacacatacgaaaaagtcatccttagttgattaagaaaggttttcggrgtgtctcaagctttcccaatttattgttcartagttaggttagaagtagggaggttttaagggatactacacatcctagagctatgttgaatttgtatcattagggattcctagaaaaacgaacatggtcggcaaaaatttgagttctatgcaattctactcttgaaaaaatggatagtgtgtattctacgacactgaagtttcatattctggtgctataattaacaaatacaccatttggattaaaaaaaaaaaatgaccactgcagctctggaaaagtgagatggtatctgtgcatct

SEQ ID NO: 19135 - DNA, 600 bp, Chicken  19866894228587_6
caatgtgagattcacttaacagtaattacrttcggtgctaaaacagggctcagatgttcatgcttctgcaaaataattgcttatgctcctttccatgttcagagtgrtacttkcactttcctaatattctgtgytcagtgatcctaaatgtcttcacactctttacagagctaaggcaaaaagcactctgtaaaacaggttaggaatcaacgtgacagcctaacacatacgaaaaagtcatccttagttgattaagaaaggttttcggrgtgtctcaagctttcccaatttattgttcartagttaggttagaagtagggaggttttaagggatactacacatcctagagctatgttgaatttgtatcattagggattcctagaaaaacgaacatggtcggcaaaaatttgagttctatgcaattctactcttgaaaaaatggatagtgtgtattctacgacactgaagtttcatattctggtgctataattaacaaatacaccatttggattaaaaaaaaaaaatgaccactgcagctctggaaaagtgagatggtatctgtgcatctcctgtctcataatcggatttattactgtgtt

SEQ ID NO: 19136 - DNA, 467 bp, Chicken  19866894228587_7
ctgaagtttcatattctggtgctataattaacaaatacaccatttggattaaaaaaaaaaaatgaccactgcagctctggaaaagtgagatggtatctgtgcatctcctgtctcataatcggatttattactgtgttctcctcagatgcatctgttgcttgttaggtttcagctgtccaccagacagttaaccaagcctggcttcattcgctcgattattaaatcacatattcggtgagattgttcagacaggccagaggggctttgtggagcactaacaattcagcacttttagcaggraaaaaaaaagactaagaaacgagtacttaggaataattatgctttatactaaattctctctaaaattcccttctgcgctggcaggagaaagtgatagaaatctatctgttcccaaggtgaattgcttgtggggggggggcaatgctagatggggaaggtaggagctg

SEQ ID NO: 19137 - DNA, 466 bp, Chicken  19866894228587_8; identical to SEQ ID NO: 19130

SEQ ID NO: 19138 - DNA, 466 bp, Chicken  19866894228587_9; identical to SEQ ID NO: 19130

SEQ ID NO: 19139 - DNA, 600 bp, Chicken  19866894228591_1
ccatgtaaattccttcctctctctctgacatggacttcgttatcatgatagaatacttagtgtcacttaactttggttgaagacttgttcactgtctcattaacaacattttgcctactcccctcagacacacattagttcttaatgtgagtcagaacagacaaattgtatctctccaaactggaatgttagaaaggtgggaaattaaagtcaatataacacagtaaagtcctgtgttttgaacatagctctctccttccttccccttcttcacttaatcctgtagacttagaaacaagyaaacatgaagatgttaacctattgcaaacactcactcattcatgtagtgacaaaatatattccagtttatccttctcccactgatggttaaactgtcccagataattccctcaagtaaaacacaaaatttactaacaattttctgattgtgactattcatgggattgcattgtgccattaacagaggaaagtttccacctaccagcagtaagattttaaccagatcttatctgaatgacgtgatataaagatttccatctctagttatgtatgtgctctgtgataatgactgatgtagaa

SEQ ID NO: 19140 - DNA, 600 bp, Chicken  19866894228591_2
ttcccgaaggagtttttccctcagcacctagttgtgaaaagtattaagcatacattacccaactgaagaccagtaccactcacagtggtattttaccatgttgtttgcgtgcatatctttgaaatcttatggccttcttttctttgaaatatctgaaaagtgatggatgttactttaatgggaatatactcagataaatttatatatgaaaatatacatgaaaaaggattcagaacacctgattataccgacagtgtaacacagaaatacaaataaaaggatgaaattcaggagttgcawccaaattatccaataacttccataaactttaggtaacatttgaagaattaaaaaagctacaaaactatctaagtttttggagagagaagagatcaaagttggaaagaatcttctagcaataaagttttttgatttgtcattttagctaattactgaacacagttttgtgagacagacctgacagacaatgctgaggttcatcagagtctggaagaagaatctggttacacattctttcagtaaactacaagcacttaagcccaggagttcagaaggagcaactggccctatcttttctgc

SEQ ID NO: 19141 - DNA, 600 bp, Chicken  19866894228603_1
gaacttgtttggatagctggggcaattgcttattcaatgcattcctctgtatccatggccagtttgcagtattctctaagatctctggtaaacttgatgaagaagtgggaatagaaacaagactgcaattcccaagtaggtcagagagggtaaaatttcaatctgcctatgctattgaaaaacgcatgaaggaacaggtcaacatttgtgaaatagaactggcaaattaagaaccaatttaataagttttttgttttgttttgtttgttgttttgttgttgttgttgttgttgtttttaygaaaaagaaatattcagaactacacttttagggaagaccacagagaattagtcttgctaataggaatctagagaaacttacatatgtactctcatcttcacccccacgtctgtgctgaaaacctactctctgagggttatctgaatactgctaacaggaaggcagctaaacatttgtcctgcaacgaggacagaaagaaaaatgaaccagggtttttcttctcctccccataaaacttgagcactcatattcagagtgaatgcagacagccctgggacttgtataaaagagtagcaattg

SEQ ID NO: 19142 - DNA, 600 bp, Chicken  19866894228604_1
aaccctgtccatggcaaggaagttggaaccaggtgatctttaaaatcccttccaacccaagccattttatgactgtatgattctatgaatacaaaaaattggcatgaagtcaaggctcagatctgtaatgatataaggaaaacttagtaattttaaacccagctttcatatgtactgttttgaaaggttttgagaaggaatttgtatttgctttctcaccctaaattctagccactgctggagagtggttggagagtctctaaccttaggctgtaagtgggatttcctacttctcccctmtctactctgcatgtttttttcctgttgtaatgcaaatctccagatccaggggaacacccyacccttcatgggaattctctcagtgaggaggtcagcttctaaaagctgcttgtgtctgccccaagaagatgcacaatacacagatgttggctgtgactgcatgttatgaatgtgtccatcatttttctgtgatcactttaagattgcctcccagtggggctgtgaacaaatgtaaatctgtgtcctttctcttttcaaagactttctcttctctttccaaatagaaactgccagaggtga

SEQ ID NO: 19143 - DNA, 600 bp, Chicken  19866894228604_2
gccattttatgactgtatgattctatgaatacaaaaaattggcatgaagtcaaggctcagatctgtaatgatataaggaaaacttagtaattttaaacccagctttcatatgtactgttttgaaaggttttgagaaggaatttgtatttgctttctcaccctaaattctagccactgctggagagtggttggagagtctctaaccttaggctgtaagtgggatttcctacttctcccctmtctactctgcatgtttttttcctgttgtaatgcaaatctccagatccaggggaacacccyacccttcatgggaattctctcagtgaggaggtcagcttctaaaagctgcttgtgtctgccccaagaagatgcacaatacacagatgttggctgtgactgcatgttatgaatgtgtccatcatttttctgtgatcactttaagattgcctcccagtggggctgtgaacaaatgtaaatctgtgtcctttctcttttcaaagactttctcttctctttccaaatagaaactgccagaggtgacaggagagtcagatgaatcctccaaggatttcacaagcataagaaaagatcctccagtgg

SEQ ID NO: 19144 - DNA, 600 bp, Chicken  19866894228604_3
gttggctgtgactgcatgttatgaatgtgtccatcatttttctgtgatcactttaagattgcctcccagtggggctgtgaacaaatgtaaatctgtgtcctttctcttttcaaagactttctcttctctttccaaatagaaactgccagaggtgacaggagagtcagatgaatcctccaaggatttcacaagcataagaaaagatcctccagtggccactggcagtgagagtgagctgccgtaaatcagcagtttagcaggcagaaggtagtctggctatggttgaggaaattagtgtgyttcctataaagaaattcacaattgacagaatgtgaaaatcttcatgtgaaataatgcaagaacagtttgagggcaatggtccaagggaaaaaaaaaaataaaaacatctgttttaaattgagaaagaagggagcactgtgctaattgagaaagcagacccagtgattttatacaatgttttggtcaggagctttctattatgcattagtttatttaaacacggcacagctgtggctctggtacatcacacacagatggcaactctttttgttaaagtgcttgatagcctcattgcttact

SEQ ID NO: 19145 - DNA, 562 bp, Chicken  19866894228613_1
gatcttcccaatgcttcagatgctgctacttagtgttctgcacttctgcggtgctgcactggtaggaaaatgggcctttcaagtatttggtgtttagaaataagtgtatttcattaagttctttcagatccctagagaaagttaactgctagcatccaatgctgtcatttttggctgcagactacagggctgtttccttatttcggtacattccaaaatcattcagtaaccacagcactactgatcattggctaccacgcagttgtcacattccctcctttataaagcattcctgagaakgcagtacaagagccacaccttaaggtggattgcatcttccgtgcataatttgtctttaaaggcaacttactcagaaaaccaatttacaatccctctcttcctcagtggaagagagatgatctgcttaatacaacaaatacaatgttaagatgttactgtgtggttagtgactgctggcaagcaaaacttccaatgtttctattcttttcctcctacactgggaacagataacactgccaatgtcttcttcagtgggcacagt

SEQ ID NO: 19146 - DNA, 600 bp, Chicken  19866894228616_1
tgcagcacaaaggtggcattaagccatttttgcattcccatccctttgcaagctgcaccttctgtgccatatctctcataaaacattgcacagaatcttttaatgtaaactgctggattggcagctctggagtctgacttttctctttgccttcaagaggcacatctgttcttttacgaatgggcttggttcccattaatgacctgatcagatgcagtcttttatgatgactggtactctagcttcctgccagatgtgtgggggtggttttttgtttttgttttgttctgatgaagggaygtgaggagtagtttacaggacatcaatwaaaaawtccttcyttttgacaatgaaatttacttttcttttaattgtccatttattgttttctcccacctgccatctccaagatcacatcaaaatggtagacgctggacatctgccagtattgcaggtgctttagctccctccttttttgtttgtagctgctgttctgcttgcacatgttatggctttataggtctttgcaggttacatataggagcagcccatgggcaaagttagatcccaaaggtggttaaataggcaggtgcaaggcac

SEQ ID NO: 19147 - DNA, 600 bp, Chicken  19866894228616_2
tttgcattcccatccctttgcaagctgcaccttctgtgccatatctctcataaaacattgcacagaatcttttaatgtaaactgctggattggcagctctggagtctgacttttctctttgccttcaagaggcacatctgttcttttacgaatgggcttggttcccattaatgacctgatcagatgcagtcttttatgatgactggtactctagcttcctgccagatgtgtgggggtggttttttgtttttgttttgttctgatgaagggaygtgaggagtagtttacaggacatcaatwaaaaawtccttcyttttgacaatgaaatttacttttcttttaattgtccatttattgttttctcccacctgccatctccaagatcacatcaaaatggtagacgctggacatctgccagtattgcaggtgctttagctccctccttttttgtttgtagctgctgttctgcttgcacatgttatggctttataggtctttgcaggttacatataggagcagcccatgggcaaagttagatcccaaaggtggttaaataggcaggtgcaaggcactgcagtgggaaatctatcatgactattc

SEQ ID NO: 19148 - DNA, 600 bp, Chicken  19866894228616_3
ttcccatccctttgcaagctgcaccttctgtgccatatctctcataaaacattgcacagaatcttttaatgtaaactgctggattggcagctctggagtctgacttttctctttgccttcaagaggcacatctgttcttttacgaatgggcttggttcccattaatgacctgatcagatgcagtcttttatgatgactggtactctagcttcctgccagatgtgtgggggtggttttttgtttttgttttgttctgatgaagggaygtgaggagtagtttacaggacatcaatwaaaaawtccttcyttttgacaatgaaatttacttttcttttaattgtccatttattgttttctcccacctgccatctccaagatcacatcaaaatggtagacgctggacatctgccagtattgcaggtgctttagctccctccttttttgtttgtagctgctgttctgcttgcacatgttatggctttataggtctttgcaggttacatataggagcagcccatgggcaaagttagatcccaaaggtggttaaataggcaggtgcaaggcactgcagtgggaaatctatcatgactattctgattt

SEQ ID NO: 19149 - DNA, 600 bp, Chicken  19866894228616_4
ccctttgcaagctgcaccttctgtgccatatctctcataaaacattgcacagaatcttttaatgtaaactgctggattggcagctctggagtctgacttttctctttgccttcaagaggcacatctgttcttttacgaatgggcttggttcccattaatgacctgatcagatgcagtcttttatgatgactggtactctagcttcctgccagatgtgtgggggtggttttttgtttttgttttgttctgatgaagggaygtgaggagtagtttacaggacatcaatwaaaaawtccttcyttttgacaatgaaatttacttttcttttaattgtccatttattgttttctcccacctgccatctccaagatcacatcaaaatggtagacgctggacatctgccagtattgcaggtgctttagctccctccttttttgtttgtagctgctgttctgcttgcacatgttatggctttataggtctttgcaggttacatataggagcagcccatgggcaaagttagatcccaaaggtggttaaataggcaggtgcaaggcactgcagtgggaaatctatcatgactattctgatttgctgttc

SEQ ID NO: 19150 - DNA, 559 bp, Chicken  19866894228623_1
atgagatggaacttgagaaaagccagacgcctaatatcagcatgaagagaacaattaaattaagatgttaagaggttagcaaaatctaatattgtgaccttctcctctgttccttggtattttggcttgccctaggcagtggctgggtgtttttgaaagttttggctgttttagatgaagaaaattccatcacttattaatgcaatacctaaatatagttacttgtacttattcactggaccaggcaggttggtgaactgcactgggtggctgaatgctgctgctgaagcaatgggcackgagggatactaagtaagtctgcctcaactcatagacaggttagactgaggtttggttgtttctgctaagctttgcagtgaattcagactcaaggaatatatatatatatatatataggatatcgtatgtcagggagagaacataaaatcaagtggcattgtgagaagattatctatagccatttggagctgaggcttagtgtcaccttggggtcactggaaatacctaccaggaagtgaaggagtggtaaaaacatcag

SEQ ID NO: 19151 - DNA, 600 bp, Chicken  19866894228635_1
ttcacttaattccctgcgtttattttttcttgcatatacaagtgtggctcacccttcacttgccctgctaagccctgtgtttgaaatgaggagtgtctgttcctgagtgctaatgaaatagtgatgaagtagaagggaagaaaggttttaacatactctttttctagaaaagtaaacatcctctggctataggaagggtaaacttcccctggaaatgtgtgtgtttatacgaacaatcttttttcttctggcatttccagatactaggctgggagatttgttcactacctctgggaaaawgactttttagtaagtggtgcaaatgcatgagattaatctttgcttggattgttttcttttcggaaagacacccccaggatttgtttccatgaacctgaaagggatttcctcctttatctctgggcattgctctgtggctccttcagctctcctgctctgaatgcatctctgaagggaacagatggaggaagtgagcgtttycccgatagccaacttgggtccaactcagctgcagctcaaatctgcaaatctgtatagcccagcatactttcccccctctctgtgaactaccagcttata

SEQ ID NO: 19152 - DNA, 600 bp, Chicken  19866894228635_2
acttcccctggaaatgtgtgtgtttatacgaacaatcttttttcttctggcatttccagatactaggctgggagatttgttcactacctctgggaaaawgactttttagtaagtggtgcaaatgcatgagattaatctttgcttggattgttttcttttcggaaagacacccccaggatttgtttccatgaacctgaaagggatttcctcctttatctctgggcattgctctgtggctccttcagctctcctgctctgaatgcatctctgaagggaacagatggaggaagtgagcgtttycccgatagccaacttgggtccaactcagctgcagctcaaatctgcaaatctgtatagcccagcatactttcccccctctctgtgaactaccagcttatattttcttcaaagagagaaatttatcagtgctatcaaactgggatgtgtggttatccaaagccacctgaagcttccaggtgggtgttaatgcatctcagttcttattgttgctcttaatactctattgaggaggggcacattgagctttgaaaaaccattaatttgcctggagtagccttcgtgtaacccggatttgttcca

SEQ ID NO: 19153 - DNA, 600 bp, Chicken  19866894228640_1
gttttaaacatagtgatgcctgctgatcatttgtacttaagatcctaaacttaatcacgatatcagtgcagatctgctgaaataaccgggcaggttttagtaggcaaactgctgccccaacaagatataacaacatagattcatactactgatcaaatgtaatatatttgatatgtagagatgaatatgttaaaagctaaaaggtatcagtcaaaaagataaagtttatctccttgaaaataaacagcagttgaaattaagtcacttaatgaaagatataaaggactgagttttattctyatctctaagtcttcagccaattcagtaaccttacattggtgacctccccctgcttacagtctctcctggttcctagtctccactacaaacacttcagaatcggccaaggcaaccactcaagcaaacatgatccagaacattccctgaggatgctgaaatgagcaaatgatacatctcctctcatttgggtactgctggagagaggttttgcaacaccatttggctacaggagctctcccagtccctgggaactgaatgtttttagagggctgtgctggaggcaacgcagcaagactaaca

SEQ ID NO: 19154 - DNA, 600 bp, Chicken  19866894228641_1
cagtgcccagaggtcataacaacttccttccatacacctgaggcacttagtaacatttcgtataaattttaagcaaaatgctttagtctgtaataaagcaagatgagggatactctagcattttatagtttcacttctattatatatgtagggcactctaaaaataatgcctcctatttatttccatggaaacaacaacagatacaaagagcacaataacactgtttgatagaattctcagctacacagtactctttttcaacatagtcaccaccattagccatgcattttcaccagcartgaactaaagccttcatgctgcactcatgaaaatctgcgtggctttccagaatgtggtttgtctttcactgctgaaatataccacccactgattgtctgtgctcaaatcttctggtacccataaacattcagcaagcatcaatgaatgtcaatgggtgtgattttcttccacatggaggaattcagtgacacacctttgcttcatacatacttccatgtcagataccattttgtcagacttcctctctactgccatctgtcatgcagcaacaaaacataatattggcaaaaaggttcatc

SEQ ID NO: 19155 - DNA, 600 bp, Chicken  19866894228641_2
cccataaacattcagcaagcatcaatgaatgtcaatgggtgtgattttcttccacatggaggaattcagtgacacacctttgcttcatacatacttccatgtcagataccattttgtcagacttcctctctactgccatctgtcatgcagcaacaaaacataatattggcaaaaaggttcatcctttactgtcatactaccaacatctgcctctgacatcgtgggacaaaatagtaaaataggaagcattacttttggagcagacttcattgtaattgttggttttgctgtctctagaaycacttacatctggatttagtagaacaatcatgcaattcattgaaggaaacatttaagaaagtttgtctgcaaatatactgccattaagggtgtacatagtgtaagcagtcacctaagctgtcactgagatatctctgatttttagttttttcttacatgtactcaagtgtttgtaaaatttggtacctcaggtgttcttgaactaacttcgtaatttcaaatgtccacaaatttactaaagaaactaaagtgatttcaatacaattaatgaagtcttcagtatcttcaggttagtttagt

SEQ ID NO: 19156 - DNA, 600 bp, Chicken  19866894228645_1
cactacctttaaccatctcttcagggaaatacagcttaccactttcactccaggacaactttttattctcaatcaaagcaaatgatgctcaattcctttatgagatgacaaaacacatgccacagccttaatcagactgacaatttggtacctgaacacaatccagtcattcctacctctctccacatgcaggaaaaagcattaaagagactatgctgtcatctcagaggggaatgatatgtgaatgtttccctaaatcttctcctatcatctcttcctatttgttcacctgtgccttgkccctcaggcttgcccataaaacctcagatttgccagggagttagtctgctagttgtttctacctgatcgatataacaaataaacattatagacagctgagacagtttgtaagctgaaaacaaaattaagctactgtactgacttgctaaatattttcacgtatggaatcttatagttgtctcttacggatgttctcatctgcttcttttcttgtaaggcttcattttaaaacctcattgttacgctttatgtaaatgtataaaaaagtatttgatggctaatccctataatggcatttat

SEQ ID NO: 19157 - DNA, 600 bp, Chicken  19866894228653_1
ctcagtgtgggtgcataggatttgatggggactgttctggctatggcagcactggacctttttgctgttgtctcctgtctggatggtctcatagcaaagctgaattcttgtttcagccttgttctagcccagccagaatcacaagatcaaaagaatcatagaatcatagaattatagaatcatagaatcatggaattatagaattatagaatcatagaatcatggaatcatagaattatagaaacacagaatcatataattacagaatgatagaatcatagagtcaccgaatcataagartcatggaatcatggaattttggaatcataaaatcacagaattacggaatcatgggatcayagagtcatggaatcatggaattatagcgtcacagaatcacagaatcaaagaacagctgaggctggaagggtgattatcaatcatccaggtccaacagccgcagtttgaatgggctcatctttctgtcccatattagagtcctttttccctttgccattaaatgtagtgactgttccaagaacattcctgaagacagagaaagttgtccctgattcaagcatttaaatgttaggattctaa

SEQ ID NO: 19158 - DNA, 600 bp, Chicken  19866894228653_2
tttgctgttgtctcctgtctggatggtctcatagcaaagctgaattcttgtttcagccttgttctagcccagccagaatcacaagatcaaaagaatcatagaatcatagaattatagaatcatagaatcatggaattatagaattatagaatcatagaatcatggaatcatagaattatagaaacacagaatcatataattacagaatgatagaatcatagagtcaccgaatcataagartcatggaatcatggaattttggaatcataaaatcacagaattacggaatcatgggatcayagagtcatggaatcatggaattatagcgtcacagaatcacagaatcaaagaacagctgaggctggaagggtgattatcaatcatccaggtccaacagccgcagtttgaatgggctcatctttctgtcccatattagagtcctttttccctttgccattaaatgtagtgactgttccaagaacattcctgaagacagagaaagttgtccctgattcaagcatttaaatgttaggattctaattctgagctgtcacattaggatccctttgtagagaaaagagacaagcaggtccctccagt

SEQ ID NO: 19159 - DNA, 600 bp, Chicken  19866894228655_1
aacctctacgtgccaccaggacacgtggtcagaccccagaactgtcagtgctataccacacgggcagactctgaagagattacggggtctcttagagccgttgatgagaagactcagactgctgctcttccctccccacccctcctgctctcccactcacagggcagcgcaggggagaccgcatttccagcaaatctacatgctgagagatgtgagagttaggatttcccgacacggtgcctgaatggttatggatggggaagacacactgccccggacagggagctgggacaggcccargctgtctgctgctcctgccaagctgaaccccagaagcacaaggtgcatatggcactgcccttcctggcaaaaagatgctctttgtgtccattcacgagccagaatgctacacaattcccaacaccgcttcctctgatgttttgctcttcctggatcatcctcaatcctaatcccaacctctactcaagctgacagctcctttcgcttggtgacacgacaggttaaaccttttacctgcaggcagacctaggctggttccaacacagcaacatctgaacaaacatacattatgaaatcaca

SEQ ID NO: 19160 - DNA, 600 bp, Chicken  19866894228657_1
cagtcaccttccttgcagcaaacattttaacttatgagcttatgagagacagtcaagaatttgcctgcagtatccagtactctctatggcattaactatggctaattcagaataaccatgcaaggctcaaaacttctccattcagccacctggtggatctgttccactcgagaagctgctttcttttaggatcctcacctgaaaggacgctcatcttctgcgcaacaactgtcagcttcccctctgagcctgtcaacaacaaacaaacaggtgacagctgacttacagacaatggccacrtgctacaccaatacacaatcttctctgaaatacaaatgctagctttgttacccctatcctggctaagcaacccttatcacgcagacaaccaaaaccaacagaaaataaaataacaaaactccctgaaagcaacaaacctttgytcacctctactgcttgatctagaatttactcaccccctaagatggcaaaaaggtgtctgctcagggattccacggctgaaggatcactacactgtcgagccaaattctttaatgcgacaactgcttcatccatgagctgcacactgttggatttcag

SEQ ID NO: 19161 - DNA, 600 bp, Chicken  19866894228657_2
agccacctggtggatctgttccactcgagaagctgctttcttttaggatcctcacctgaaaggacgctcatcttctgcgcaacaactgtcagcttcccctctgagcctgtcaacaacaaacaaacaggtgacagctgacttacagacaatggccacrtgctacaccaatacacaatcttctctgaaatacaaatgctagctttgttacccctatcctggctaagcaacccttatcacgcagacaaccaaaaccaacagaaaataaaataacaaaactccctgaaagcaacaaacctttgytcacctctactgcttgatctagaatttactcaccccctaagatggcaaaaaggtgtctgctcagggattccacggctgaaggatcactacactgtcgagccaaattctttaatgcgacaactgcttcatccatgagctgcacactgttggatttcagatgacctaaaacatgatgcacaaactaagagctccttactacaaactgcataaaatcagtgagaccaggacatatctttacatgtaaccttatatattaagttatattaccaagttttagtattgtcctcccacccaaataaa

SEQ ID NO: 19162 - DNA, 600 bp, Chicken  19866894228657_3
aaattaagcacttaccagccagtcctttcacaatgtccagagcatactggctaagatccaggttaacagacaagagcaagcaagagattgctgaagacagaagaaataatgtcccattatattgtgttaagtaagtgattttagctttttaatacatctttccacacagtacacatcaagagcagacagggccagtagggatgaaaaacaccaaaactgatggcccaatcaacagattcattcaggattattcttagcactcagctgtgaaattctatcctcagcacaaacagtagctaycacatacccagacactcggaataacaccacaaatgtcacttctccacacccagacctcagacaccagacaatcctcctgtctatgctcacaggcccacaagcgtagtccagagggatgcacacccctcacagctccagaactctgaggaactgtttgtgcactctggcagagcgatgtacagtgatgacactcactttcaattacattctcagggctccgtagcaaggatttctgcagagttggcaacagtaagtctttgaattcagcgtgagagatatatcgaagaagtggagagcagc

SEQ ID NO: 19163 - DNA, 600 bp, Chicken  19866894228657_4
tgcacgtaggacaaaagtataaacagtcctgaaggagtatgtctcaccagcacatgcttctgaggctttgtcttgctcatcaggatggtcttcacgtagaaatccagaagagcactctgaacaagcaaaaataccaatgacagccacaacacaacctacacagctctctgcacaccactggccaggctcaacacttcattccactttgctctggaagacagccctatccactaagcagaagctttgttttcatcctcacataagatagttgagcagagatcagtgctgcctgctgtacakgccagcccaacattcaaaacccactgagagccacatagcagccttcaattcctacaaccagggagaaggctgcactgttggcaatctgtgtaaaagcacagactcacakatctggtacctcctttataaacccattccactgctttacccagmtgtgcattcctactgaatcgatagataatgaaaccagataatgaaactctgcttcctcatgacaaaaagcaatgctacttattacccacttccccccccaaaaaaaggttaaaacaaaacaggaatacagcagctttaccttgtggc

SEQ ID NO: 19164 - DNA, 600 bp, Chicken  19866894228657_5
gagcactctgaacaagcaaaaataccaatgacagccacaacacaacctacacagctctctgcacaccactggccaggctcaacacttcattccactttgctctggaagacagccctatccactaagcagaagctttgttttcatcctcacataagatagttgagcagagatcagtgctgcctgctgtacakgccagcccaacattcaaaacccactgagagccacatagcagccttcaattcctacaaccagggagaaggctgcactgttggcaatctgtgtaaaagcacagactcacakatctggtacctcctttataaacccattccactgctttacccagmtgtgcattcctactgaatcgatagataatgaaaccagataatgaaactctgcttcctcatgacaaaaagcaatgctacttattacccacttccccccccaaaaaaaggttaaaacaaaacaggaatacagcagctttaccttgtggcgtttaataatatcagtctctttctgagctgtgcaaaactgcaccacaagtcccagcattgcagcatagctctggtttggttcaagaccaagaatgacagataggtactg

SEQ ID NO: 19165 - DNA, 600 bp, Chicken  19866894228657_6
acctacacagctctctgcacaccactggccaggctcaacacttcattccactttgctctggaagacagccctatccactaagcagaagctttgttttcatcctcacataagatagttgagcagagatcagtgctgcctgctgtacakgccagcccaacattcaaaacccactgagagccacatagcagccttcaattcctacaaccagggagaaggctgcactgttggcaatctgtgtaaaagcacagactcacakatctggtacctcctttataaacccattccactgctttacccagmtgtgcattcctactgaatcgatagataatgaaaccagataatgaaactctgcttcctcatgacaaaaagcaatgctacttattacccacttccccccccaaaaaaaggttaaaacaaaacaggaatacagcagctttaccttgtggcgtttaataatatcagtctctttctgagctgtgcaaaactgcaccacaagtcccagcattgcagcatagctctggtttggttcaagaccaagaatgacagataggtactgatccaccagatcttggttctgatgagggacaaagaaaaaaaaaa

SEQ ID NO: 19166 - DNA, 600 bp, Chicken  19866894228659_1
gctggcacaaacattgcagtattccagtgttgccactattgtttccaatgcattgaagctgatactcagctccacatacagttacctggttgcaatccaccaatttgcacagatgaactgatggagatgctcttcattttgttctgtgatagctgtgcatgaccacctggaatgtggcctgtctttcacatcactgtcaccactgctgaaatgcaccactcactgcctcactgtgctcacgtccactgtttggtctccataaatgttcagcaagtgtcaatgaatgtcagtgagtgccamttttttttgcactgaagaattcactgaaacacctttgcttcattgacgcttccatgtcagatgctattgtttcagactgccctgctgctgccatctgtcacactacaacaaaatttaatttaatggaatatttgtggaaggttcactctctattgccataccacaaacatctgcctctgacatcagtgttcaayaccataaaataggagtcattacttttggatcagcacttgcatatgagaagatggtattctttgtcttaaatgcattttaggcatactcctttatatagctatgtct

SEQ ID NO: 19167 - DNA, 553 bp, Chicken  19866894228659_2
tgtcaccactgctgaaatgcaccactcactgcctcactgtgctcacgtccactgtttggtctccataaatgttcagcaagtgtcaatgaatgtcagtgagtgccatttttttttgcactgaagaattcactgaaacacctttgcttcattgacgcttccatgtcagatgctattgtttcagactgccctgctgctgccatctgtcacactacaacaaaatttaatttaatggaatatttgtggaaggttcactctctattgccataccacaaacatctgcctctgacatcagtgttcaayaccataaaataggagtcattacttttggatcagcacttgcatatgagaagatggtattctttgtcttaaatgcattttaggcatactcctttatatagctatgtcttccataatgaccctgagttattgatgctgataactgctcatgaaagattgttttctccgtattcattcagatggtaactgtgaatacagggaagaagagatttcacatgatctgctcatgtgagtaaagactgtctccagtcagtca

SEQ ID NO: 19168 - DNA, 600 bp, Chicken  19866894228660_1
gcaacaacattgcaatgggagatgtatcattattctgcaattacagttaaagaaatgtgaataatgcctaagcattaaattagcaatcagtctgccagctcttgtcaagagtggtccaccagttttattatctagacactatttcaatggcttgtagcagataaggggggaaaggcatcttttttctcatgtgtgaatacaagcactgaataccccagcagatggatggaaagagggtgaaaaaacaccagtggaaatgcccctctccaacatcctttataccctctaaattagcaaaawttttcactgctttgttaattatgtgtagagcagtcatgtagtggrgacattcttctgcatttccatgcattcccctggcatctacaacacccctrtgccagccccacctttgaactggcactagtgcctactctagtcactgtttgttgtagggttttttgttgttgtttggttttagtttcacacagtttttgtagtctagttacatgtacagaaaataattgcctaaatttctttatttcatttataagtgtctacttaattgcatgttttcatttacataggatggtaatttaaaat

SEQ ID NO: 19169 - DNA, 600 bp, Chicken  19866894228660_2
gttaaagaaatgtgaataatgcctaagcattaaattagcaatcagtctgccagctcttgtcaagagtggtccaccagttttattatctagacactatttcaatggcttgtagcagataaggggggaaaggcatcttttttctcatgtgtgaatacaagcactgaataccccagcagatggatggaaagagggtgaaaaaacaccagtggaaatgcccctctccaacatcctttataccctctaaattagcaaaawttttcactgctttgttaattatgtgtagagcagtcatgtagtggrgacattcttctgcatttccatgcattcccctggcatctacaacacccctrtgccagccccacctttgaactggcactagtgcctactctagtcactgtttgttgtagggttttttgttgttgtttggttttagtttcacacagtttttgtagtctagttacatgtacagaaaataattgcctaaatttctttatttcatttataagtgtctacttaattgcatgttttcatttacataggatggtaatttaaaataactgtttaaaatgtaaagctcgttctagctctgacattaggaaa

SEQ ID NO: 19170 - DNA, 600 bp, Chicken  19866894228660_3
cagctcttgtcaagagtggtccaccagttttattatctagacactatttcaatggcttgtagcagataaggggggaaaggcatcttttttctcatgtgtgaatacaagcactgaataccccagcagatggatggaaagagggtgaaaaaacaccagtggaaatgcccctctccaacatcctttataccctctaaattagcaaaawttttcactgctttgttaattatgtgtagagcagtcatgtagtggrgacattcttctgcatttccatgcattcccctggcatctacaacacccctrtgccagccccacctttgaactggcactagtgcctactctagtcactgtttgttgtagggttttttgttgttgtttggttttagtttcacacagtttttgtagtctagttacatgtacagaaaataattgcctaaatttctttatttcatttataagtgtctacttaattgcatgttttcatttacataggatggtaatttaaaataactgtttaaaatgtaaagctcgttctagctctgacattaggaaacatttccttctgcatgtcttttcttcttttttcagattaacttgttatat

SEQ ID NO: 19171 - DNA, 600 bp, Chicken  19866894228660_4
ttttttgagaggttgtcataagtggaaagattttgtcaactattttgtcataattttcatagagattaaaaaaaaaaaaacaaccttcaggttagcatatataggtatatgttgtcatgatagcttaaactgaaaaagctattgtcagtttaagtacatgggtcaaatgcttcagtcactaaaatccataaccgatgccaatgtgatcccacaacacacttctcccaagaatggattcatgaagaaccatatcctcccgctgaacagtggaagaagcataagaagatcgaggacaagcayacatacttgtgtattacaaccatgaaaatatagttttactgaataaaatagaaatataccacttacatatacttaatttacaagtacagaactggttgcctataatcaggcaacagaccagcaaaacaaatatgtttctatttgctgtgtggtttggggtgaccccttctttttcttatggctattgtcagaaaacaaaaccaaacaaaatccttcctgtgtgagtttttatctttaagaacttgaaaattgaatgtagaatcactagaacttyataacagtttgttttgtatacacaga

SEQ ID NO: 19172 - DNA, 501 bp, Chicken  19866894228660_5
agcataagaagatcgaggacaagcayacatacttgtgtattacaaccatgaaaatatagttttactgaataaaatagaaatataccacttacatatacttaatttacaagtacagaactggttgcctataatcaggcaacagaccagcaaaacaaatatgtttctatttgctgtgtggtttggggtgaccccttctttttcttatggctattgtcagaaaacaaaaccaaacaaaatccttcctgtgtgagtttttatctttaagaacttgaaaattgaatgtagaatcactagaacttyataacagtttgttttgtatacacagatgtattattaatattttatgacatttttgttaatgctccttaggatagaagaaaaagaaaaaaggtaattaaaataaattattttagaagtatttttagttgacattcctaatggagaaaggattgactgaaatagcagcaaactattcacagaaggagaatcagaatccaggtt

SEQ ID NO: 19173 - DNA, 600 bp, Chicken  19866894228664_1
tgttcatataattctgaatttaagcctagctaactaaaatctctgtgttattacgaaatatggtaaaaaacaaacaaacaaacaaaaaaaaaacagcaagcaaaaatgctctgcttctacaggttaaagaaaaaagactattagtccttaaggatttggttctatgaaaatttaaagacttgtttaggaacctgaacatattcttactgagaactctctctatataaaaggcttccatcagcctaaatgaaactacaccatggaaatgatagaaacagaagcacaaagagtgatatctcratgttttaaaaacactccactctatggagatgctttaaaaacagccacttttgagtgtgaatgtacacataaaatcatgctcctaagagaagagctcgcttacagataggcagcagtggaagaaaagaagactggacaaagcaaagacaaaagtcagaacactcttcacttttccgtgacaagttatcagaaatacagtaagaactgccaaaatcagataaatagaatgaggaatagttgacatataaaaaaacattttgactacttgaatgccacatatcattaaatgtcattttaaag

SEQ ID NO: 19174 - DNA, 600 bp, Chicken  19866894228665_1
caggtgcttgattagaacaatgtcaaatgccaaaatagcagaataccctgagcaaatactctgagcttaaagctcttgcatgtaacactagatatttttctggatgttatccttagaccaatggtgagtcacttagtgaaacttgactcactttttgtacctttccctttcagatctatgaagaaaccttcaagaggagctgtgagaactcagcgtcgcaggcgttccaagtccccaattcttcatcctccaaaatttatccactgcagcacaaaatcacaatccacgtgcaaccaactrgtgcacaagggccagattgatgccccagctgatggcartgcatttggaatactagtcccaaaggaagctcgtgcacaygaacgatgcagtgttgcctcagacattggccagaaaagagatggagttggttctccyggagcctctgttgcacagcccacatcagtgaacacacaagagaattctcctactgccatttctttagtatccgaagcaagcctaaagactgaagagctctctgacttccgatctgtgtccaagctgaacaagaataacccatgtgcctgcgtagataaagcctgt

SEQ ID NO: 19175 - DNA, 600 bp, Chicken  19866894228665_2
cagaataccctgagcaaatactctgagcttaaagctcttgcatgtaacactagatatttttctggatgttatccttagaccaatggtgagtcacttagtgaaacttgactcactttttgtacctttccctttcagatctatgaagaaaccttcaagaggagctgtgagaactcagcgtcgcaggcgttccaagtccccaattcttcatcctccaaaatttatccactgcagcacaaaatcacaatccacgtgcaaccaactrgtgcacaagggccagattgatgccccagctgatggcartgcatttggaatactagtcccaaaggaagctcgtgcacaygaacgatgcagtgttgcctcagacattggccagaaaagagatggagttggttctccyggagcctctgttgcacagcccacatcagtgaacacacaagagaattctcctactgccatttctttagtatccgaagcaagcctaaagactgaagagctctctgacttccgatctgtgtccaagctgaacaagaataacccatgtgcctgcgtagataaagcctgtcagtgtaaacgatggcaagatatggaggtgtataaatt

SEQ ID NO: 19176 - DNA, 600 bp, Chicken  19866894228665_3
catgtaacactagatatttttctggatgttatccttagaccaatggtgagtcacttagtgaaacttgactcactttttgtacctttccctttcagatctatgaagaaaccttcaagaggagctgtgagaactcagcgtcgcaggcgttccaagtccccaattcttcatcctccaaaatttatccactgcagcacaaaatcacaatccacgtgcaaccaactrgtgcacaagggccagattgatgccccagctgatggcartgcatttggaatactagtcccaaaggaagctcgtgcacaygaacgatgcagtgttgcctcagacattggccagaaaagagatggagttggttctccyggagcctctgttgcacagcccacatcagtgaacacacaagagaattctcctactgccatttctttagtatccgaagcaagcctaaagactgaagagctctctgacttccgatctgtgtccaagctgaacaagaataacccatgtgcctgcgtagataaagcctgtcagtgtaaacgatggcaagatatggaggtgtataaattctctggcttgcagaacactttcacgttggcatctgataga

SEQ ID NO: 19177 - DNA, 600 bp, Chicken  19866894228665_4
gtgaaacttgactcactttttgtacctttccctttcagatctatgaagaaaccttcaagaggagctgtgagaactcagcgtcgcaggcgttccaagtccccaattcttcatcctccaaaatttatccactgcagcacaaaatcacaatccacgtgcaaccaactrgtgcacaagggccagattgatgccccagctgatggcartgcatttggaatactagtcccaaaggaagctcgtgcacaygaacgatgcagtgttgcctcagacattggccagaaaagagatggagttggttctccyggagcctctgttgcacagcccacatcagtgaacacacaagagaattctcctactgccatttctttagtatccgaagcaagcctaaagactgaagagctctctgacttccgatctgtgtccaagctgaacaagaataacccatgtgcctgcgtagataaagcctgtcagtgtaaacgatggcaagatatggaggtgtataaattctctggcttgcagaacactttcacgttggcatctgatagaagaacagttgctgaggatcactcccagtctttgccatcgagaactccatcaagttcc

SEQ ID NO: 19178 - DNA, 600 bp, Chicken  19866894228668_1
taagaaagctattttgtttccccctctttaatttcaaaatggtaggtaattggggagtcagcttacagagatgaaaagcttttgatagctagtaagtcgccgctaggttaaattcagccatggaaatcttacaccggtggtgagaagagaactgtttactagaaactataacccctatggttcaagcttatgtctctttcccactgtgcctttgaatttagctgtacttttctgcattttttaaaagtagtgaaaaattgtaacaaagatctaaggaaatttaagcagaagtttataaaygctttgtttccaaatggaaatgtggaaggacctttggaaactttgttctcttttcaccgtggcttttgttctaccttctgacaaacaaaattaacaggagaaggctttctccctcaggctgcttggtgaatggaccttgctttcaagacagccccatgcagctcactagcagcaacttcaatgctctgaaaatttcagtgtcactgcatgacagtctggaaacttggggcaaaaagaaaaaaagaraaagaaaaagtggtgaracgtggtttggagcaacgtatttttttcactttcagg

SEQ ID NO: 19179 - DNA, 600 bp, Chicken  19866894228668_2
gtagtgaaaaattgtaacaaagatctaaggaaatttaagcagaagtttataaaygctttgtttccaaatggaaatgtggaaggacctttggaaactttgttctcttttcaccgtggcttttgttctaccttctgacaaacaaaattaacaggagaaggctttctccctcaggctgcttggtgaatggaccttgctttcaagacagccccatgcagctcactagcagcaacttcaatgctctgaaaatttcagtgtcactgcatgacagtctggaaacttggggcaaaaagaaaaaaagaraaagaaaaagtggtgaracgtggtttggagcaacgtatttttttcactttcagggtatggaaagaggagagagtgctttgagtgcaactctcctgcttccaattaaacttcattttgattatagggaaatctcatgaagttaggctagttaaaataaatttttacagaagcaaatcaagaggagattaatatgtttaccatgtatagttccatcttgagtctaatatcacatatttcacagctctacaaggatgaatggattctcaccatatataatagcatcacccatttgtcccccga

SEQ ID NO: 19180 - DNA, 600 bp, Chicken  19866894228668_3
caaagatctaaggaaatttaagcagaagtttataaaygctttgtttccaaatggaaatgtggaaggacctttggaaactttgttctcttttcaccgtggcttttgttctaccttctgacaaacaaaattaacaggagaaggctttctccctcaggctgcttggtgaatggaccttgctttcaagacagccccatgcagctcactagcagcaacttcaatgctctgaaaatttcagtgtcactgcatgacagtctggaaacttggggcaaaaagaaaaaaagaraaagaaaaagtggtgaracgtggtttggagcaacgtatttttttcactttcagggtatggaaagaggagagagtgctttgagtgcaactctcctgcttccaattaaacttcattttgattatagggaaatctcatgaagttaggctagttaaaataaatttttacagaagcaaatcaagaggagattaatatgtttaccatgtatagttccatcttgagtctaatatcacatatttcacagctctacaaggatgaatggattctcaccatatataatagcatcacccatttgtcccccgattcagacccacagacct

SEQ ID NO: 19181 - DNA, 600 bp, Chicken  19866894228669_1
tctgcacttctatgtcagacgccattttgccagagtgctcctctgctgccatctgtcacatggcagcaaagtgtaacagaaaattggtgggaaggttcagcctctactgccacatcaccgacaccttcctctgacattgtgagccaacacaataaaatcggaggcattacttttgaagtggccctcgtactattatcctgccctgaacccagctatcagagccatgccagcacagtcagaagtgaataatttcccttcaagagctggtaggaacgtgaggctggcagagtcacaggtatratgcttgtttaattctttctgtcctttgtattcgtgtctttggatgctcagcactggccaagcctaccatgtgggatgaaggtttgtgatgttcttttccgctgctcctgccaggaaagtgtggttaaatggctactcgtgagcaatctcatttgaggggcatccagttggcacactgaatgctgtcctgaaattacatctgtgtccactgttaatgcactgtgaaccagtttgaaatacgcatgtgatcaaaacacaaattcctatgctaaactttggctgcatctcaaaagagagcac

SEQ ID NO: 19182 - DNA, 599 bp, Chicken  19866894228682_1
  misc_feature (1)..(158): n is any nucleotide
nnnnnnnnnnnnnnnnnnnnnnnnnnnnnnnnnnnnnnnnnnnnnnnnnnnnnnnnnnnnnnnnnnnnnnnnnnnnnnnnnnnnnnnnnnnnnnnnnnnnnnnnnnnnnnnnnnnnnnnnnnnnnnnnnnnnnnnnnnnnnnnnnnnnnnnnnnnnnnaggaaaatggtagttttcaccattctgcattttcattcatttgtatattttcttatgttactttccaagtgtagaaattaagatttcttttctgcatgctgactttttccagatgactcagtgagtattggatcctccctgyaaataagcaatcgagagcaagcaccagtgccccgtattcctccagctgagtgtggtggagtgccatcttgtgggattgttactacattacttatattctccrggttaaaacgggtaacttctatgggtgtggagagtgctattccttttgccacagaggggtacctgcacatttatctcctcataagagctagaataaactaccaagtgctaaagcagtactgagaggaattaactgtaaatgaatttttaaaatacataggtgttctcaaggagttaacgctgttgataaacatgtta

SEQ ID NO: 19183 - DNA, 599 bp, Chicken  19866894228682_2
  misc_feature (1)..(56): n is any nucleotide
nnnnnnnnnnnnnnnnnnnnnnnnnnnnnnnnnnnnnnnnnnnnnnnnnnnnnnnnaggaaaatggtagttttcaccattctgcattttcattcatttgtatattttcttatgttactttccaagtgtagaaattaagatttcttttctgcatgctgactttttccagatgactcagtgagtattggatcctccctgyaaataagcaatcgagagcaagcaccagtgccccgtattcctccagctgagtgtggtggagtgccatcttgtgggattgttactacattacttatattctccrggttaaaacgggtaacttctatgggtgtggagagtgctattccttttgccacagaggggtacctgcacatttatctcctcataagagctagaataaactaccaagtgctaaagcagtactgagaggaattaactgtaaatgaatttttaaaatacataggtgttctcaaggagttaacgctgttgataaacatgttaaatttatatattcgtacaccacaatattattactgtctcaataaaggagaatttacaaggaagatatgaagaagaaccagaaagtatgtatatatacactca

SEQ ID NO: 19184 - DNA, 599 bp, Chicken  19866894228683_1
  misc_feature (1)..(238): n is any nucleotide
nnnnnnnnnnnnnnnnnnnnnnnnnnnnnnnnnnnnnnnnnnnnnnnnnnnnnnnnnnnnnnnnnnnnnnnnnnnnnnnnnnnnnnnnnnnnnnnnnnnnnnnnnnnnnnnnnnnnnnnnnnnnnnnnnnnnnnnnnnnnnnnnnnnnnnnnnnnnnnnnnnnnnnnnnnnnnnnnnnnnnnnnnnnnnnnnnnnnnnnnnnnnnnnnnnnnnnnnnnnnnnnnnnnnnnnnnnnnnnttttgtgttagtcacacatgtttgactaagtcatgagatctttctgtaggccctagtttccygttttgtttaatagggttttacaatttcttctgtgtttgtcaaacatgccaagatgaagtgataagcagtattaaggattatcctaaatagtcatttacagcgtacaggtaaattctgctgtttaataacgacttcaataaattttcaaagttgtgggcaaaagcccagccagggcaaaagccctgcaacctgcccaggtacgcagttactggtgtaggaagatacctttaaacaatgaggttttytttcctctttcttattcaccttccccaatttctcagacaattgtttatgtact

SEQ ID NO: 19185 - DNA, 600 bp, Chicken  19866894228683_2
tagtcacacatgtttgactaagtcatgagatctttctgtaggccctagtttccygttttgtttaatagggttttacaatttcttctgtgtttgtcaaacatgccaagatgaagtgataagcagtattaaggattatcctaaatagtcatttacagcgtacaggtaaattctgctgtttaataacgacttcaataaattttcaaagttgtgggcaaaagcccagccagggcaaaagccctgcaacctgcccaggtacgcagttactggtgtaggaagatacctttaaacaatgaggttttytttcctctttcttattcaccttccccaatttctcagacaattgtttatgtactgtacaagcagcatgcagtgtatgcccccatgcctctgcaagggctcaaagcttctttgtggcagcagcaaaaaagaaaaaaaaaaaaaagtatttgttgataaaaagaggaagcattatttgcatctttgaaaggattctttcatttcttcccccccataatgtgcaggtttccaggacagctctaaggtgacagttcaaaatatattagctgaccttttcaaaaaatcagcctgccaagagccttt

SEQ ID NO: 19186 - DNA, 600 bp, Chicken  19866894228683_3
tgtgcaggtttccaggacagctctaaggtgacagttcaaaatatattagctgaccttttcaaaaaatcagcctgccaagagccttttctcctcagaaagctcactcctcacattgttagcagctgccatcaggaacactgactgtgcatatccagcctcaagaaacctttgctcttttcaaacctctagatttcaccgcttcccctcactatcttcaatgggttgtggaaaactaatctctgtgtaagtcatctcaattagttcctgtcaatccagtgcttagaggtgcagcatacagaycaaagcagcccctttgttaggctattgctatttagaggtggctatgctgcrtgacacagtggtttgttcttcccaagaacaggtgaaagacagtaagaaaggcccacccaaatgacaaacaccagctgtgtattagtcaagggacacttccttgatacagtgataggctccttgttgtggcatacttctgtgcaagatggtatggtyttatcacagcccaacagaaagtgtttttctcttaagtaatagcaggcctcagcagttagcagtgcacattttcagtgtgttttgagctctgtt

SEQ ID NO: 19187 - DNA, 600 bp, Chicken  19866894228683_4
gaccttttcaaaaaatcagcctgccaagagccttttctcctcagaaagctcactcctcacattgttagcagctgccatcaggaacactgactgtgcatatccagcctcaagaaacctttgctcttttcaaacctctagatttcaccgcttcccctcactatcttcaatgggttgtggaaaactaatctctgtgtaagtcatctcaattagttcctgtcaatccagtgcttagaggtgcagcatacagaycaaagcagcccctttgttaggctattgctatttagaggtggctatgctgcrtgacacagtggtttgttcttcccaagaacaggtgaaagacagtaagaaaggcccacccaaatgacaaacaccagctgtgtattagtcaagggacacttccttgatacagtgataggctccttgttgtggcatacttctgtgcaagatggtatggtyttatcacagcccaacagaaagtgtttttctcttaagtaatagcaggcctcagcagttagcagtgcacattttcagtgtgttttgagctctgtttaagtcctgtttaaggtttaagataaagcctaatcactcctggtagggtgt

SEQ ID NO: 19188 - DNA, 600 bp, Chicken  19866894228683_5
actatcttcaatgggttgtggaaaactaatctctgtgtaagtcatctcaattagttcctgtcaatccagtgcttagaggtgcagcatacagaycaaagcagcccctttgttaggctattgctatttagaggtggctatgctgcrtgacacagtggtttgttcttcccaagaacaggtgaaagacagtaagaaaggcccacccaaatgacaaacaccagctgtgtattagtcaagggacacttccttgatacagtgataggctccttgttgtggcatacttctgtgcaagatggtatggtyttatcacagcccaacagaaagtgtttttctcttaagtaatagcaggcctcagcagttagcagtgcacattttcagtgtgttttgagctctgtttaagtcctgtttaaggtttaagataaagcctaatcactcctggtagggtgtagtttaagacaagtaacttcatactgatctttcatcttcatacataatcaaaaatgtgagttacatacgtgtaatggaatctaagaagatgtggcacaatggctataccgtatgtaattaagatattcttatcagaaagctgaaagcgaatttgct

SEQ ID NO: 19189 - DNA, 477 bp, Chicken  19866894228685_1
ttctttcacaagagcagagacttgcttcaaaaaaacctgctgtttctttcttcccatgccctattttttgctcagatttttgtatgagtaacatcacaaaataagaaagcaaagtaatggccccctagacacatctcccagttttgttgagatgcaagcatggcttccaggggagttggactaggtggccttcagaagtcccttccaactctaaggattctatgattctaatatttccccacttaaagtaagaatagttgggcattttttgaaatgcatccttttacttttatgttcacwgtgtctgtagggctggaaaaaaattaaggctgcacctaygctgctgaaaagcactagaactcagggtgacttctgtggcccaatacacacagcctagtatgaatttcactgattctcactggtagaaaatactttgtggcctctacaagaagagatcctaattcgtcatgctttgct

SEQ ID NO: 19190 - DNA, 438 bp, Chicken  19866894228685_2
ctgtttctttcttcccatgccctattttttgctcagatttttgtatgagtaacatcacaaaataagaaagcaaagtaatggccccctagacacatctcccagttttgttgagatgcaagcatggcttccaggggagttggactaggtggccttcagaagtcccttccaactctaaggattctatgattctaatatttccccacttaaagtaagaatagttgggcattttttgaaatgcatccttttacttttatgttcacwgtgtctgtagggctggaaaaaaattaaggctgcacctaygctgctgaaaagcactagaactcagggtgacttctgtggcccaatacacacagcctagtatgaatttcactgattctcactggtagaaaatactttgtggcctctacaagaagagatcctaattcgtcatgctttgct

SEQ ID NO: 19191 - DNA, 599 bp, Chicken  19866894228689_1
  misc_feature (1)..(129): n is any nucleotide
nnnnnnnnnnnnnnnnnnnnnnnnnnnnnnnnnnnnnnnnnnnnnnnnnnnnnnnnnnnnnnnnnnnnnnnnnnnnnnnnnnnnnnnnnnnnnnnnnnnnnnnnnnnnnnnnnnnnnnnnnnnnnnnnncctcctagaagtggtgcaggtgtccagcctcaaaggcagctctgctaagaagcctcagcaggagcatccttccactttgctcaggagtagcttttaaatagaggctcttgcccttgatctctggttgaactgcagcagcacaacatccataccttaccttgtcgtaggtcrtgttgatctggacctggaccccaactccaggctgatttatggccttgaccttagccctgcctcatcactctggcccagcctgaatctggaatccagagctgaccatgtctgctcctccagatctttcctgctcacctcactcggggctgacaggcctcaccctggctgatgaggcctcagtyctgatagccatgttatcactccaggctctcactgctccctggcagcaagcctggcttctaacagtactaaaacaaaataaaacaaatactgaagcaaaaattatggtgtgatcagga

SEQ ID NO: 19192 - DNA, 600 bp, Chicken  19866894228689_2
ctcagcaggagcatccttccactttgctcaggagtagcttttaaatagaggctcttgcccttgatctctggttgaactgcagcagcacaacatccataccttaccttgtcgtaggtcrtgttgatctggacctggaccccaactccaggctgatttatggccttgaccttagccctgcctcatcactctggcccagcctgaatctggaatccagagctgaccatgtctgctcctccagatctttcctgctcacctcactcggggctgacaggcctcaccctggctgatgaggcctcagtyctgatagccatgttatcactccaggctctcactgctccctggcagcaagcctggcttctaacagtactaaaacaaaataaaacaaatactgaagcaaaaattatggtgtgatcaggacagtatatttatgttgataagtgatagattctatgaaaaatcttgtttggattatttagtggcaaaaggagaacaaagaaaaacaaactagtatagcacactagcatagctgatatagctttggccttgccaaacctaaggcaagcattcattcctcttggcttgtcacagggatattcgtct

SEQ ID NO: 19193 - DNA, 600 bp, Chicken  19866894228691_1
gccttggataacagtatgcatgttggattttaaatacatattgctcagcttttcagacagtattcagatggaaaaacacagtggtctgtttaatgtggcttcacttaattctgcagctatcagctatataaaacttctttttacggagaaatcatgctgatatgctttcactgctcagtaattctttctcagattttatcctccaagataattcatatgctaatattcaagtgccttacaatttttagaaatgtacattctgttctgattgtgtttgtttatttgatgctagcaaaaaawtctcctgttgatcacatgcctgtttatttattttatgcaatctttaagcaatctttatatttaattgcaagtatcctcattgtaggtgacagtgtgtagttcagtaagatgactaatgactccagtgtaaaaagtaagcactttcttgtgattaccgcatgtgacatgttatttaaaattattcatccaatttttgtaatagaaatatatgtagcattataattaccactgccacagctttcattgacagtttaatgctaattataacagatagagaagcatcaggaaaatgaatcattt

SEQ ID NO: 19194 - DNA, 599 bp, Chicken  19866894228697_1
  misc_feature (1)..(9): n is any nucleotide
nnnnnnnnnacagagtgtgaaatacgccattgcagtgaactgctcttcataaagcaagaggagaaatgtaaagaagattacacactattagtcccactagaattttgctcttaatctgtcttaaattgaaaaattgtttgcaagtcttcacagttctctcgtgctacaaaacggggtgtgagagggacatgggacccaaagggatctcagagggtcagaacctgggggacatcagcacggagcagggctgtgctctggctgtgtgtagggctgcccaaccccgtgctgtcccagcagagyagggactccctgaggctcctcactgagtcagcggggcactgcatggcacatggcacggcacggcactgctctgccacgcacagccaaacacagcaggaaggcaatccttgagtcccacccgcaccaaccatccattggttcaattggagacacctgaatgctcaactgaattcctaatgtgttcgaggtcgggaggggccttcctgtcagagcaagggaatgacatttgataaatacccggggaaagaaaactccacgaaaacatcctcctggctctgggggattgctttgttccgatt

SEQ ID NO: 19195 - DNA, 600 bp, Chicken  19866894228702_1
aaatgaagattaaacaaaaaagatacctttctaacactgtcagttttacttgttaatggcatttgagagttaccttcttcctagagtatttgtatcagaaatacagccatactaacttctgaagacttaatgtttatcctaactgtaatgtaaggaaagcatttgaacgtgaactagtatttcttaaccaacagattcttctatatgttttaaatgagtaaatcttgccaattcttaaatatttgcttctaaaatatgcccatagttttgtcttggcatatgacagtgttctataatttwaaagtctggttgttttcctgacccagttgtccatacctcttatctgtaatagccttcttcaatataatatgatactgtatgtgagacttctaattgctgaaatttcattaatacatgagaacataatgagtttcacctgtcattccctcgagtagatattaccagtgctattctgtgcttggtgccttccatattgctcctcaggaatcgctagaatcactttttgtccatgaaatagttttaatagtgttccttgaaatatggtcaatgactagttatttgtcttctattttcatgcct

SEQ ID NO: 19196 - DNA, 600 bp, Chicken  19866894228704_1
agaacccacagacataccaataacgccaatcagctctgccaattccctgctgactgcaaacagctatagacaggatgccaaacagttaatttcaaatagctccttgtctctcatctctgcacaaattcctgtcatgttgcattacatgtaaacaactcagaaacttaatgacatgcctttcagtcaaaaactggtatggtttttccatctgagcagattaattgcagtttgtagcaatatagaatgatgcagtctgattagggtttctattgcttttcaggataaaatattttatgtgaragtaaagccaaaattcctgctggcacaacattactgacttctgtgcaaaaataaaagactcgtgtaaaatccatagaacattatttttagtgtgttgttacagtaaataactttgataactttctgtaaactagatgtcagatcagattccagcccctatggaaatggtgttgtcagtgaagttaggcaacaggaatattttgctatggaggagacacttctgagtgagtctttgatctctttggcattggacttttgtacttccatttcacatggcccatcttcttcccaaatacactt

SEQ ID NO: 19197 - DNA, 600 bp, Chicken  19866894228704_2
aacattactgacttctgtgcaaaaataaaagactcgtgtaaaatccatagaacattatttttagtgtgttgttacagtaaataactttgataactttctgtaaactagatgtcagatcagattccagcccctatggaaatggtgttgtcagtgaagttaggcaacaggaatattttgctatggaggagacacttctgagtgagtctttgatctctttggcattggacttttgtacttccatttcacatggcccatcttcttcccaaatacacttctcttaaaacttcttgtcattccctwtagtgtaattgctatgtactcaagtgttgttcttctattctggctgcaggcattgcttgtgcttggtagcagttctgtaaatccaggctcaggagctcagcagcacaaackttgttaattatcaatggaattaatgcgaggaactccctgaaacccctatgaatgcatgccttsctgaacaatatgtccctcaaagctttaggatggggtatacctctttcttttttggatcccaattcctttttcctctcctttttcctccccttttgaaagcaaaatattataaaaattaattcgagt

SEQ ID NO: 19198 - DNA, 600 bp, Chicken  19866894228704_3
tcagatcagattccagcccctatggaaatggtgttgtcagtgaagttaggcaacaggaatattttgctatggaggagacacttctgagtgagtctttgatctctttggcattggacttttgtacttccatttcacatggcccatcttcttcccaaatacacttctcttaaaacttcttgtcattccctwtagtgtaattgctatgtactcaagtgttgttcttctattctggctgcaggcattgcttgtgcttggtagcagttctgtaaatccaggctcaggagctcagcagcacaaackttgttaattatcaatggaattaatgcgaggaactccctgaaacccctatgaatgcatgccttsctgaacaatatgtccctcaaagctttaggatggggtatacctctttcttttttggatcccaattcctttttcctctcctttttcctccccttttgaaagcaaaatattataaaaattaattcgagtggatagaagcacattctgggggttttgtttgtttgctttcttttttttttaagaatggggtaggaaatctctcagtggcagacatactactgtctagctgcttgacttaat

SEQ ID NO: 19199 - DNA, 600 bp, Chicken  19866894228704_4
ttgctatggaggagacacttctgagtgagtctttgatctctttggcattggacttttgtacttccatttcacatggcccatcttcttcccaaatacacttctcttaaaacttcttgtcattccctwtagtgtaattgctatgtactcaagtgttgttcttctattctggctgcaggcattgcttgtgcttggtagcagttctgtaaatccaggctcaggagctcagcagcacaaackttgttaattatcaatggaattaatgcgaggaactccctgaaacccctatgaatgcatgccttsctgaacaatatgtccctcaaagctttaggatggggtatacctctttcttttttggatcccaattcctttttcctctcctttttcctccccttttgaaagcaaaatattataaaaattaattcgagtggatagaagcacattctgggggttttgtttgtttgctttcttttttttttaagaatggggtaggaaatctctcagtggcagacatactactgtctagctgcttgacttaatctctccctttgaaatgtttgtgtattcttgtctgttgctctgtcaaaacaaaaacaactacaa

SEQ ID NO: 19200 - DNA, 600 bp, Chicken  19866894228710_1
tacttaagcttatgcactgtcttaggtgtgtgagcaactcacatgagtggtgtcttgtaaaatctgtgcactttgatacctttgctgtgttaaacagctattagctgccgtgaatctgtggtggtttcgctcaataaaggcagcaaaataacctgttctgatagcatgtgaatgcacaaatggctgtgtttgctggcaactgcatattgccaggggttttgcatagaacctgtctttctcttaaatatccaaataccatagccacatgagtgtctttgggaagaagcagtccattgctgygcttagagccctactgggggcaagctctgtttcctgcctttggaaaatattcagggttgattatggaagagccctgcagcaaggtacacggagtctggacttactgtattgctctttggagaactttcaggtttatataaacagtctctggtatgcagctatcaaaatgcagtagaaataagtaacatttctgctacacttggcatcaacaaagtggtttaatgtggtctcgtctaatatcttttataattctggtgttgcttttaccaaacgcagttcaataatttaccctttccaaga

SEQ ID NO: 19201 - DNA, 600 bp, Chicken  19866894228718_1
aacaaaccactccgcgcctaaaattttgactacagacatattagagcattattcccaccattagagtgtgcatttcacaagcctgatagcagtgaaacctctggataaatcaggaggctgctgctgctcactgggctggttgtgcacaacactgttagaaaaagaacagtagttacaaatggactgcaaacatttttagacttgaaggctggtgacccacagagcaataagctcctcaaagaggcttccaataggagtacaggaggtaaagagtctgatgaattaaatacagctctctgwagaggcttggwctctggtaccagaactgagggtggggtgaaggtgatgactgggaacttgtctcatgccacagatgctacaggagagtgtgaggggcatgaaaatgactcatcacatcttcttcttttcactatttatttttatttttatttttattcttctccccttgtttgcaaatgaagatctcaccctattttgatgaatttcatatcggacaaagtgaaaacatctgagctgagattctactagctgtgaaaatctcagctgtaacagatagcattcctctagcagcaattcttg

SEQ ID NO: 19202 - DNA, 600 bp, Chicken  19866894228718_2
ccgcgcctaaaattttgactacagacatattagagcattattcccaccattagagtgtgcatttcacaagcctgatagcagtgaaacctctggataaatcaggaggctgctgctgctcactgggctggttgtgcacaacactgttagaaaaagaacagtagttacaaatggactgcaaacatttttagacttgaaggctggtgacccacagagcaataagctcctcaaagaggcttccaataggagtacaggaggtaaagagtctgatgaattaaatacagctctctgwagaggcttggwctctggtaccagaactgagggtggggtgaaggtgatgactgggaacttgtctcatgccacagatgctacaggagagtgtgaggggcatgaaaatgactcatcacatcttcttcttttcactatttatttttatttttatttttattcttctccccttgtttgcaaatgaagatctcaccctattttgatgaatttcatatcggacaaagtgaaaacatctgagctgagattctactagctgtgaaaatctcagctgtaacagatagcattcctctagcagcaattcttgaagcttgttta

SEQ ID NO: 19203 - DNA, 600 bp, Chicken  19866894228720_1
ggggagatgctgctgctcccaagcccggctctgttgcatttccctccctcccaacttgatgacagtccctgcagcccacggtcaagcctggagtggtgcgagtgcccagcttcagacagatggcactgggaagcagaggaactgctgcagatataaactgcagtgccccaggcttgtccctggggtgggagcagctcagcacgcaggagagcagctctcaggacagtactccatcccccagttacctctttgagagctgaggacatcttggggaagctcctgccacctgtgacaagctgrtaccgtctctcaagagatgcaagcttctccttctcctgagcacacaacragagcagagagaggaggaaggttatcatcacgcggtggccaggacccatctcacaccctaacagccaacccctgatgcaagaggagggaggatcccctctcagcccaatcagcaacatctgcaagctgggatgctgcagtgatctgtgccccctgtgcscctccccctgggagcactttgcacactcctgcacccgcggtgcaagcacgcaagtccagggagtgtgtgacaaccctctggccctagatgtg

SEQ ID NO: 19204 - DNA, 600 bp, Chicken  19866894228720_2
cccaacttgatgacagtccctgcagcccacggtcaagcctggagtggtgcgagtgcccagcttcagacagatggcactgggaagcagaggaactgctgcagatataaactgcagtgccccaggcttgtccctggggtgggagcagctcagcacgcaggagagcagctctcaggacagtactccatcccccagttacctctttgagagctgaggacatcttggggaagctcctgccacctgtgacaagctgrtaccgtctctcaagagatgcaagcttctccttctcctgagcacacaacragagcagagagaggaggaaggttatcatcacgcggtggccaggacccatctcacaccctaacagccaacccctgatgcaagaggagggaggatcccctctcagcccaatcagcaacatctgcaagctgggatgctgcagtgatctgtgccccctgtgcscctccccctgggagcactttgcacactcctgcacccgcggtgcaagcacgcaagtccagggagtgtgtgacaaccctctggccctagatgtgggcattaccttctgaaggagccgcaggatgtcgttcctctcctgggcca

SEQ ID NO: 19205 - DNA, 600 bp, Chicken  19866894228720_3
gagcagctctcaggacagtactccatcccccagttacctctttgagagctgaggacatcttggggaagctcctgccacctgtgacaagctgrtaccgtctctcaagagatgcaagcttctccttctcctgagcacacaacragagcagagagaggaggaaggttatcatcacgcggtggccaggacccatctcacaccctaacagccaacccctgatgcaagaggagggaggatcccctctcagcccaatcagcaacatctgcaagctgggatgctgcagtgatctgtgccccctgtgcscctccccctgggagcactttgcacactcctgcacccgcggtgcaagcacgcaagtccagggagtgtgtgacaaccctctggccctagatgtgggcattaccttctgaaggagccgcaggatgtcgttcctctcctgggccaggcgttcggcctcctgggtgctctgcagccggatctgggcggcctgagcatccagcgcagccacccgctcctggggatgggcaggggctgagctgcccgcaggggaagctcagcaacgtggccgggctggggacacgggatgctggggacatggggtgc

SEQ ID NO: 19206 - DNA, 600 bp, Chicken  19866894228721_1
gcttattgcttggtatgtcccgtggactgcatttcagtgtagaaagagtcaagggaactggaagtcaacaaacaacaccaagtaatttactcatgatggcacagaagtctgaaggttagttttctctgcttcccaagtgctgggaaacagttgttttcttgcaataacaaacaatgcatgctaatgtaggtcagcatagtacaatcgttccccaaccttggtgtatacactcagtttgtagttgggtaataacactcagagcaaccaacattcacattctctggattttcttgcaataaytgtggggttwttttagcagtaaatattttaatttccttcagcatacccaggagtatctaaacatctgtcctggtagagcagctctagatcaaaggaatcatctggaatacaaccatttcaacatgaacattaatataatgctaatggttcttgtattaatgagcaaattaattgtggaaaaaacacttttttatttaattgagaccattccagattcactaattcagtgttttgatataaggattgtgggccctccacgatcccctgttctgagaaggggcctctgaaagaagtatttat

SEQ ID NO: 19207 - DNA, 600 bp, Chicken  19866894228721_2
tggtatgtcccgtggactgcatttcagtgtagaaagagtcaagggaactggaagtcaacaaacaacaccaagtaatttactcatgatggcacagaagtctgaaggttagttttctctgcttcccaagtgctgggaaacagttgttttcttgcaataacaaacaatgcatgctaatgtaggtcagcatagtacaatcgttccccaaccttggtgtatacactcagtttgtagttgggtaataacactcagagcaaccaacattcacattctctggattttcttgcaataaytgtggggttwttttagcagtaaatattttaatttccttcagcatacccaggagtatctaaacatctgtcctggtagagcagctctagatcaaaggaatcatctggaatacaaccatttcaacatgaacattaatataatgctaatggttcttgtattaatgagcaaattaattgtggaaaaaacacttttttatttaattgagaccattccagattcactaattcagtgttttgatataaggattgtgggccctccacgatcccctgttctgagaaggggcctctgaaagaagtatttatttttagtccc

SEQ ID NO: 19208 - DNA, 600 bp, Chicken  19866894228725_1
atctgcctgatgaccatcgctatcatgcagaacagtatgagcaaagccaccagccccactcccatggatatagcaatccaggggactggtttaggaggaagtgtgatgggcactgaataaactggtaattcacaacggctgcccatgaagccagaaggacagtagcagacaaagttggcactataaagtccactgtagcacgtgcctccattctcacatggcccagaagcacattcatctctggttttgatgtcacagttcctgccgctatagcctggcaagcacgtgcaggtgtagtcrttgatcaggtcatgacaagttcccccgttggaacatgggctcctggcacagtcattgatgttaatctcacatttctgaccagagaagccagcccgacaacgacacacacgaatctgaccaaggtaaaagcaattaccatctgaggaaaaaaagtaaaaaagaaatcagtatgcaatgtgtttcccaccccataagcattacatactacctcaagaagagggagattatttcacaaaacagccacgcatctgaaacttccttctagcttatctatcaccccttaaaaccatgccacttcta

SEQ ID NO: 19209 - DNA, 600 bp, Chicken  19866894228733_1
tttttttagaaaaatctcgcctttacccgcactgtactttgttgatctggtgcttgaggtaggactgcctatgtttcccgtaatgcatggggttgtggtaagaatgaagtgcttatatttcttgaaaagctactgaacaattaagtaggggcctttaaaaaggcagtaactgcagatgagaaaagctggacatgtttatatgaactgcaaagttacaccattttttattcctttcctgtgctactcccttgggaaattaatagatttgattctttgtttcatttacctaagtacattacracagcaccagtcttaccagcattagattgtcagcaaaaactccattgcgatctgaatttatcaactaatcttaatgtactgcagatgaggaattgctcttgacacactagtcaggatctgcacaaaacaatgctctcacaactcgagcaaattgaaaatgttataaatggtgaggcaagcaggaggagacaacaacatctgttcttagtgtcaagagtcttaaaacagatacttgttccaaacagacgcactgactgaaggcctgatcccaaacccctccatgtcagtgraaagattcac

SEQ ID NO: 19210 - DNA, 550 bp, Chicken  19866894228733_2
gtacattacracagcaccagtcttaccagcattagattgtcagcaaaaactccattgcgatctgaatttatcaactaatcttaatgtactgcagatgaggaattgctcttgacacactagtcaggatctgcacaaaacaatgctctcacaactcgagcaaattgaaaatgttataaatggtgaggcaagcaggaggagacaacaacatctgttcttagtgtcaagagtcttaaaacagatacttgttccaaacagacgcactgactgaaggcctgatcccaaacccctccatgtcagtgraaagattcacattaacctcaagtcaatgggcttgagtacaggtctttttactagacaagagacacgtgcattcaggattgaattttttattggtgctgatgtccctgttggtctatgtccaagacttagaggctctggaagtacttagtgaaaatgtttcagtgcacaccttgctttgcgctcctaattgggaccaccaaggtcccaaggcctccagcatgcgttagtatgctgggaaacactccccaac

SEQ ID NO: 19211 - DNA, 600 bp, Chicken  19866894228739_1
caggcactataatcaactgtggtgaagaaatgcttagctctgtaaatgagctttgggagcactggagtatttgctattaggaaccaaatttaccttcaacttctcttcacccgtccatgtagtctcatatcacaaaagctaaaatctctacagcttaaagtggaaagtggatccatccaacccacatcttttccatgatctacatttgtctcttatcataggagacaggaatccagggcatagaaagtgtagaaacctcaagtttcatttacccggataacatatgttgccattgaactyggggtgactattgctgccttttatctcatcagttgctagagctgtagggagtagcaatctgttaaagacaggctgttggagagagcttgattattccttatcctttggtgaaatctayttgtaggaggaggtatgaacatttgcatgtggtcagaaatttgaaaatcttttggatttcttttactgagagtctacacaacacttaaaatatgaaaataggaagtgtttctgtgctttctctaatttgcacccatgcccaagaattaacacaagaccctttccaatcttgacctgtaatga

SEQ ID NO: 19212 - DNA, 600 bp, Chicken  19866894228739_2
gtagtctcatatcacaaaagctaaaatctctacagcttaaagtggaaagtggatccatccaacccacatcttttccatgatctacatttgtctcttatcataggagacaggaatccagggcatagaaagtgtagaaacctcaagtttcatttacccggataacatatgttgccattgaactyggggtgactattgctgccttttatctcatcagttgctagagctgtagggagtagcaatctgttaaagacaggctgttggagagagcttgattattccttatcctttggtgaaatctayttgtaggaggaggtatgaacatttgcatgtggtcagaaatttgaaaatcttttggatttcttttactgagagtctacacaacacttaaaatatgaaaataggaagtgtttctgtgctttctctaatttgcacccatgcccaagaattaacacaagaccctttccaatcttgacctgtaatgagctgacaaaatttgtctgacttcattaggagctgcttatgcagcaggaaaaactgttctcaatctgtgcaacatcaggcaagtaaaggttattcagaactttccaatgttgttggtaa

SEQ ID NO: 19213 - DNA, 600 bp, Chicken  19866894228741_1
cgttccacctgtgccagacattgctgcaatagccatgtactgttgatgtcagctcacacaggaacatgcttggatttccaactcccagtctggcatgtcagggtcaccttttaaatgtgggcttttcactaatggcctaatagtttccaaaagagacttttagaaaaagactgttttccctgcttagaggagtacaatgcatgcctgttcacttagctttgcatcaccacctatgccataaaacaaaagcttgctctaccagagccaagaaacaaattcttttgtgccttgattgtttgkaacaccagtttgttttgagaagcctaaagctgtttctgagcaaaatgcaaggtagaacataagtcaycatcagcaaaatccatcctacagtgttttgagtcgtcaatctgagatcagcagatggttaacggctaaaatacgtatctccagaggcactttcctacttttgctctctgatctcatataacaagaagagtatggcatatgtggcatacagtcatgccaatacctgtaagagttcagagggcaaattcatagccctagtccatagaacagcctacctctacattttcacttttg

SEQ ID NO: 19214 - DNA, 600 bp, Chicken  19866894228741_2
gcttggatttccaactcccagtctggcatgtcagggtcaccttttaaatgtgggcttttcactaatggcctaatagtttccaaaagagacttttagaaaaagactgttttccctgcttagaggagtacaatgcatgcctgttcacttagctttgcatcaccacctatgccataaaacaaaagcttgctctaccagagccaagaaacaaattcttttgtgccttgattgtttgkaacaccagtttgttttgagaagcctaaagctgtttctgagcaaaatgcaaggtagaacataagtcaycatcagcaaaatccatcctacagtgttttgagtcgtcaatctgagatcagcagatggttaacggctaaaatacgtatctccagaggcactttcctacttttgctctctgatctcatataacaagaagagtatggcatatgtggcatacagtcatgccaatacctgtaagagttcagagggcaaattcatagccctagtccatagaacagcctacctctacattttcacttttggagaggcaaaaatacaatcccacgttcacttgtttccacctcagcaatagaaaatatctcctgcaat

SEQ ID NO: 19215 - DNA, 600 bp, Chicken  19866894228741_3
ttttcacttttggagaggcaaaaatacaatcccacgttcacttgtttccacctcagcaatagaaaatatctcctgcaatatcaagaaacaggaaagggcaacagaatcaagccattctctgggaaggaacttgtctctggaaaagtgaagtagtcttggtctcatgacactcttctgacaggattacctctagggtatggaaagctacaactgatagtgatcaacaggtttttgatcccagctctgcctgacaataaaccatgctgaaaaaaagccttaaacactgcctttttcatctakctttcaagcccttggactgccacagagacactaacccaaagcaaaaatgattcagaactcaaaaaaaagtgtaagtacttactattccagagacagattttccatctactgcytccaaaagagcagacttctccaaataggctrcaatcctgagacagaccaaagtttctaaactttgagataatgctgacaagcagaataagtaccattatctatatcaaaggctaatcattaactactgctcagatttaactgtgatcacttttactccgctttaagcctgtttattgctcaacttgt

SEQ ID NO: 19216 - DNA, 600 bp, Chicken  19866894228741_4
gaaaatatctcctgcaatatcaagaaacaggaaagggcaacagaatcaagccattctctgggaaggaacttgtctctggaaaagtgaagtagtcttggtctcatgacactcttctgacaggattacctctagggtatggaaagctacaactgatagtgatcaacaggtttttgatcccagctctgcctgacaataaaccatgctgaaaaaaagccttaaacactgcctttttcatctakctttcaagcccttggactgccacagagacactaacccaaagcaaaaatgattcagaactckaaaaaaagtgtaagtacttactattccagagacagattttccatctactgcytccaaaagagcagacttctccaaataggctrcaatcctgagacagaccaaagtttctaaactttgagataatgctgacaagcagaataagtaccattatctatatcaaaggctaatcattaactactgctcagatttaactgtgatcacttttactccgctttaagcctgtttattgctcaacttgtaacctatttcaaaccagatctatcacctgtaatctactcagtggaaaatatttatattaag

SEQ ID NO: 19217 - DNA, 600 bp, Chicken  19866894228741_5
attctctgggaaggaacttgtctctggaaaagtgaagtagtcttggtctcatgacactcttctgacaggattacctctagggtatggaaagctacaactgatagtgatcaacaggtttttgatcccagctctgcctgacaataaaccatgctgaaaaaaagccttaaacactgcctttttcatctakctttcaagcccttggactgccacagagacactaacccaaagcaaaaatgattcagaactcaaaaaaaagtgtaagtacttactattccagagacagattttccatctactgcytccaaaagagcagacttctccaaataggctrcaatcctgagacagaccaaagtttctaaactttgagataatgctgacaagcagaataagtaccattatctatatcaaaggctaatcattaactactgctcagatttaactgtgatcacttttactccgctttaagcctgtttattgctcaacttgtaacctatttcaaaccagatctatcacctgtaatctactcagtggaaaatatttatattaagcctttcctaggtattcagaacagggataagggctgaagcagcaggggcttca

SEQ ID NO: 19218 - DNA, 600 bp, Chicken  19866894228741_6
gtgaagtagtcttggtctcatgacactcttctgacaggattacctctagggtatggaaagctacaactgatagtgatcaacaggtttttgatcccagctctgcctgacaataaaccatgctgaaaaaaagccttaaacactgcctttttcatctakctttcaagcccttggactgccacagagacactaacccaaagcaaaaatgattcagaactcaaaaaaaagtgtaagtacttactattccagagacagattttccatctactgcytccaaaagagcagacttctccaaataggctrcaatcctgagacagaccaaagtttctaaactttgagataatgctgacaagcagaataagtaccattatctatatcaaaggctaatcattaactactgctcagatttaactgtgatcacttttactccgctttaagcctgtttattgctcaacttgtaacctatttcaaaccagatctatcacctgtaatctactcagtggaaaatatttatattaagcctttcctaggtattcagaacagggataagggctgaagcagcaggggcttcagctacattctaccctggctgaaaccatcctc

SEQ ID NO: 19219 - DNA, 600 bp, Chicken  19866894228745_1
gttttgtaacgtactaacgacatggtttcctctaggatatagcttttggaagctgaccaaaataaattttaactccttgtacaattctaaccctgttttctaaacaaacttttttgattcattcaattccttctataaattcacgactttcacaaagagtgcaagaagtgaaattgtttttattaattattctaattcagttagaatgtaatatttttacttttttacagctccatccttttccccatgtgaactggattttgtctgccttgaaaaacacaaacacagtttaaagtaatraatagttattatatgaatgttttaaaaattcaggccctatacaacattgaattgatatatgtccttccaagcaatttaaaactgtatcatattttgatcaaaaacagatttcacatgcaaatgataattacataaagttatgcttgaggactaaaccaccaacaaactactgaagtctcacaatgaccagagtcatcatacttctctgaagtatagatccaggaaattattttccagaacaagaagaaaaatgctattatgaagagagaaaacaaacaaacaaacaaaaaaaacatacaa

SEQ ID NO: 19220 - DNA, 599 bp, Chicken  19866894228748_1
  misc_feature (1)..(20): n is any nucleotide
nnnnnnnnnnnnnnnnnnnncttttttcctggtgctgtttgccagcactgccccgacatcagctacagccaagccctgcccgggggcagcagtaccttccccagacggcgtgtgtccgaagccaggagataggtgttgactccagcccatacatcacagctcccccgtagtccaaaaactgcttctggaacctgtccagagtggggagagagagaaggaagggacgtcagctcagttctgtgttctatggttgcactcatgggtaaacagctggtggtaaagcccctcctggctgaggcytcacgtggacagcctgctgctgggaggcttcaggraaaccccaggagccggagggaaggatggaagagctgtgggaggacaggtgctgctccttacctgtagcagaagtggtgggcrcatttcaccaggatgctcatgcagtgcacagccacaacacccatcaccagcaggctcaggggacccagctgaggggagagaggggagaataaccccacaggaagtcccagatatgggaggaacgagcatcctgtggcagttgggatgtagcaaaacaccaatatgaattgttttccaaaact

SEQ ID NO: 19221 - DNA, 600 bp, Chicken  19866894228748_2
tgtttgccagcactgccccgacatcagctacagccaagccctgcccgggggcagcagtaccttccccagacggcgtgtgtccgaagccaggagataggtgttgactccagcccatacatcacagctcccccgtagtccaaaaactgcttctggaacctgtccagagtggggagagagagaaggaagggacgtcagctcagttctgtgttctatggttgcactcatgggtaaacagctggtggtaaagcccctcctggctgaggcytcacgtggacagcctgctgctgggaggcttcaggraaaccccaggagccggagggaaggatggaagagctgtgggaggacaggtgctgctccttacctgtagcagaagtggtgggcrcatttcaccaggatgctcatgcagtgcacagccacaacacccatcaccagcaggctcaggggacccagctgaggggagagaggggagaataaccccacaggaagtcccagatatgggaggaacgagcatcctgtggcagttgggatgtagcaaaacaccaatatgaattgttttccaaaactatcttctgcactgctatcataaaggtaacaaaggga

SEQ ID NO: 19222 - DNA, 600 bp, Chicken  19866894228748_3
gaagccaggagataggtgttgactccagcccatacatcacagctcccccgtagtccaaaaactgcttctggaacctgtccagagtggggagagagagaaggaagggacgtcagctcagttctgtgttctatggttgcactcatgggtaaacagctggtggtaaagcccctcctggctgaggcytcacgtggacagcctgctgctgggaggcttcaggraaaccccaggagccggagggaaggatggaagagctgtgggaggacaggtgctgctccttacctgtagcagaagtggtgggcrcatttcaccaggatgctcatgcagtgcacagccacaacacccatcaccagcaggctcaggggacccagctgaggggagagaggggagaataaccccacaggaagtcccagatatgggaggaacgagcatcctgtggcagttgggatgtagcaaaacaccaatatgaattgttttccaaaactatcttctgcactgctatcataaaggtaacaaagggagcatagsctggatgaaagaaaactgttttctgcctcatttaatcctttctatttccctgcagagcacggcacggggaggcac

SEQ ID NO: 19223 - DNA, 594 bp, Chicken  19866894228748_4
aggagccggagggaaggatggaagagctgtgggaggacaggtgctgctccttacctgtagcagaagtggtgggcrcatttcaccaggatgctcatgcagtgcacagccacaacacccatcaccagcaggctcaggggacccagctgaggggagagaggggagaataaccccacaggaagtcccagatatgggaggaacgagcatcctgtggcagttgggatgtagcaaaacaccaatatgaattgttttccaaaactatcttctgcactgctatcataaaggtaacaaagggagcatagsctggatgaaagaaaactgttttctgcctcatttaatcctttctatttccctgcagagcacggcacggggaggcacacagcaaccccactgccacaaggtgaggagctgcttaccaggatgccggcgttcttcagagccaggggcagccccagcagcccggtgccgatgttccccttcaggaggtggatcagggtctggtaccacctgagggacagaaggcggagggatcatagaaccacagccctcagcctgtccttgcaggatttttgggcccctcctgtgcacacgctccaa

SEQ ID NO: 19224 - DNA, 600 bp, Chicken  19866894228750_1
gggcgccagttcggcctgacgggtacagaagcaaagggcattgtgcgggcatgctctcagggttcacagcacgggtctagcctaggtctaggagttaatccaaagggtttacaagcctgtgagatttggcagatggatgtcactcatgtgccagaatttgggaggttaaagaatgtacatgtatccattgataccttttctagaatgctgtgggctacggcacaggctggtgaaaaggcagcacatgtggtgaggcatttgacagcttgctttgcagtcatgggtgtgcctcaggagatmaaaacggatcatggtccggcgtacacgggaggttrgattcacaggttcttgcagatgtgggaggtaaagcatatcactggaatccctcatagtcccacgggtcaagcaatgatagaaagagctcatagaactgttaaagaatacctaacgaaacagaagcaggaggaagagattgatccagtcgtgagattatcacgagtcctttttacccttcacttccttagcttagtaggaaatgcagaattagctcccgtaattatacatcatagtcagattcgtatgcagtctactccctcagag

SEQ ID NO: 19225 - DNA, 600 bp, Chicken  19866894228750_2
gggcattgtgcgggcatgctctcagggttcacagcacgggtctagcctaggtctaggagttaatccaaagggtttacaagcctgtgagatttggcagatggatgtcactcatgtgccagaatttgggaggttaaagaatgtacatgtatccattgataccttttctagaatgctgtgggctacggcacaggctggtgaaaaggcagcacatgtggtgaggcatttgacagcttgctttgcagtcatgggtgtgcctcaggagatmaaaacggatcatggtccggcgtacacgggaggttrgattcacaggttcttgcagatgtgggaggtaaagcatatcactggaatccctcatagtcccacgggtcaagcaatgatagaaagagctcatagaactgttaaagaatacctaacgaaacagaagcaggaggaagagattgatccagtcgtgagattatcacgagtcctttttacccttcacttccttagcttagtaggaaatgcagaattagctcccgtaattatacatcatagtcagattcgtatgcagtctactccctcagagaaggttcaatataggaaccctaccactgccatggg

SEQ ID NO: 19226 - DNA, 600 bp, Chicken  19866894228751_1
gctgcagggcacggtgagtgacccccggcactgcctgctgctttctctcctgatgttcccttctgtcatgccacggtgtttgaacttgttgctgtgctgtgctgcaggcagggtgccaggagagctgctgcagtgtggtgcacgtggtgagctgcgaggaggaattccagcagcagcagatggatctgctgtggaggattttggatccaggagcccacatggatttgcaggtgaggaactcctacactctacatcgtggcccacactgagaacccatctttagcacctgcagtgaatgckgagacccagccttgtgcctttatgagtcttcccttccccttggcatccaatttccttgggattttaccattaaagaaggagggataggagaaaactgcagagacacagctagaataggactgtcttcagcttaacgcagtgctgtgttttagcagcctctgactgtgggctcctcttttcctgtggtacccattcccaggatgtgaacagtttcctggcagctctgtaggcacagttcttcctgcgctacgttacaatggagcttctgtctttcacctagcacttcccctctctttcaga

SEQ ID NO: 19227 - DNA, 585 bp, Chicken  19866894228753_1
aatgacttgccccagagcatctgactgatttaaggcatcattcacatgagagccgctgctctcttcgctgccgtcttcctccccttcgttgccagagtcactgctgtccacaatttggagggcatcatcctctcccgaactcagctcaatcacttctgtaaacagaacaggagagaataagggcaaaggctaacgtgacgtcagtgttaatcacgcatggaagaaaactcatacggggaaaataaggccaccacattttgcaacgctgccctggcccagtgacctactctgagcaagcakgcaggacacaggcctacaggaggcccctcaggctagcatacaaacactggggtttccctgagtttcccattgtttcaaggaacacccatttgagctgggccatgcagaatatgaggtagttcctgtatgcgttttacaycctccttcatgtgttctctaattcccaaatccagacaagcattgtatctgttgatacactgtctaacgactgccaaagagatcaggcagaagtactggggtggtataaagcaatcaggctagatccacctgggacaggggacgcaa

SEQ ID NO: 19228 - DNA, 446 bp, Chicken  19866894228753_2
ctcagctcaatcacttctgtaaacagaacaggagagaataagggcaaaggctaacgtgacgtcagtgttaatcacgcatggaagaaaactcatacggggaaaataaggccaccacattttgcaacgctgccctggcccagtgacctactctgagcaagcakgcaggacacaggcctacaggaggcccctcaggctagcatacaaacactggggtttccctgagtttcccattgtttcaaggaacacccatttgagctgggccatgcagaatatgaggtagttcctgtatgcgttttacaycctccttcatgtgttctctaattcccaaatccagacaagcattgtatctgttgatacactgtctaacgactgccaaagagatcaggcagaagtactggggtggtataaagcaatcaggctagatccacctgggacaggggacgcaa

SEQ ID NO: 19229 - DNA, 600 bp, Chicken  19866894228756_1
atatttcaagagacagtactcaaacattagctgttgcaaaacctggacagcccaccccatttataaaaaaaaatatttataagccattaataaaactttcttcacgtacccaaaagaggttgcaaagataaagaaaagataacagaaaatcataccacgttttcaggcaaactaatacatttcataagttgcacctactgctttaaaagcagcttttcacagattgtttggaagtccactctaaagcatgcttagtatactgacattgcattgtattgcttctgccagcatatcacaagwctcaactctagagggtgccatctgcctgtacaagcacygaagagcatggtaagaaactcctgcttgcccagaacaccatcatctcccaagaattttcaaccagaacataccacagagaagcctgaaacrtttggttacctgagcacagcctgtggctttggacagctgctcctgcagctgagtaatgtgcttctttgtttcctgtatctctctgagcagtcgtgagctggcagatcggccgtactcttcttgcagagactgaaaagtagttttatgaggtttcatcactcagtatctcct

SEQ ID NO: 19230 - DNA, 600 bp, Chicken  19866894228756_2
aaacctggacagcccaccccatttataaaaaaaaatatttataagccattaataaaactttcttcacgtacccaaaagaggttgcaaagataaagaaaagataacagaaaatcataccacgttttcaggcaaactaatacatttcataagttgcacctactgctttaaaagcagcttttcacagattgtttggaagtccactctaaagcatgcttagtatactgacattgcattgtattgcttctgccagcatatcacaagwctcaactctagagggtgccatctgcctgtacaagcacygaagagcatggtaagaaactcctgcttgcccagaacaccatcatctcccaagaattttcaaccagaacataccacagagaagcctgaaacrtttggttacctgagcacagcctgtggctttggacagctgctcctgcagctgagtaatgtgcttctttgtttcctgtatctctctgagcagtcgtgagctggcagatcggccgtactcttcttgcagagactgaaaagtagttttatgaggtttcatcactcagtatctcctcggcatcagagcttacaactacagcctaccactaatct

SEQ ID NO: 19231 - DNA, 600 bp, Chicken  19866894228756_3
aaagaaaagataacagaaaatcataccacgttttcaggcaaactaatacatttcataagttgcacctactgctttaaaagcagcttttcacagattgtttggaagtccactctaaagcatgcttagtatactgacattgcattgtattgcttctgccagcatatcacaagwctcaactctagagggtgccatctgcctgtacaagcacygaagagcatggtaagaaactcctgcttgcccagaacaccatcatctcccaagaattttcaaccagaacataccacagagaagcctgaaacrtttggttacctgagcacagcctgtggctttggacagctgctcctgcagctgagtaatgtgcttctttgtttcctgtatctctctgagcagtcgtgagctggcagatcggccgtactcttcttgcagagactgaaaagtagttttatgaggtttcatcactcagtatctcctcggcatcagagcttacaactacagcctaccactaatcttcatcccacttacacatctaaaatattcagcacatttgcacaaccactgtagatgctatggaacgtctgttttaaatagctctcctttgtc

SEQ ID NO: 19232 - DNA, 600 bp, Chicken  19866894228759_1
ttgtaagttgtacgtagcttatttatcatgttttcttccatgtagctttacaaatggttagtgttctttccctgaatcacagctttttggtattaatttactactatttaacaatatagagagcataccagaatgaaaagttccatcaagtggacaattattaaaattctaaccagtcaagctaattgatagtccttctttgtttgtgttatgatcagtttgtttgttgcatctttcagtctgtttgcaatatacccaaaatctccattgcctttacagattgtctgcattttatgtaawttttcccrttgataagcggcagttgatcaggcaatacaatatcagcaagaaattaactgccttagaacattgcatttcatggaatcatagaatggcttgggttggaaggaacgccaaagatcatcaagttcccttcctccatgccacaggcagagtcaccaacctccagatctagtactagaacaggtttcccagggtcccatccaacctgagcttgaacaccttgagggatagagcaggtactatcaaagcaataaacatctctatattatcaaagcaataaacatctccttttgcaac

SEQ ID NO: 19233 - DNA, 600 bp, Chicken  19866894228759_2
tgtacgtagcttatttatcatgttttcttccatgtagctttacaaatggttagtgttctttccctgaatcacagctttttggtattaatttactactatttaacaatatagagagcataccagaatgaaaagttccatcaagtggacaattattaaaattctaaccagtcaagctaattgatagtccttctttgtttgtgttatgatcagtttgtttgttgcatctttcagtctgtttgcaatatacccaaaatctccattgcctttacagattgtctgcattttatgtaawttttcccrttgataagcggcagttgatcaggcaatacaatatcagcaagaaattaactgccttagaacattgcatttcatggaatcatagaatggcttgggttggaaggaacgccaaagatcatcaagttcccttcctccatgccacaggcagagtcaccaacctccagatctagtactagaacaggtttcccagggtcccatccaacctgagcttgaacaccttgagggatagagcaggtactatcaaagcaataaacatctctatattatcaaagcaataaacatctccttttgcaactatcagca

SEQ ID NO: 19234 - DNA, 600 bp, Chicken  19866894228765_1
cactaagatcacccaagtccaacccccaaacccacccccaaatgcccactgaccatgtccctcagtgcctcatctccatggttcttgtaaacctctaagggtggtgaccccaccattttgtagcttttttgtcccagttgtgaccaagaagcagtgtgatatgccaaggagcagttggaaaagcagtgtttataggaaggaagagatctgatatcaataaggctagaactgtgagcctgtgcactgcaaagctgtcattgtgtaagtgttgcctgaaagtaaggctgttcctcacacgcyttcctcctctggctttagtttgcatctggtaattaagtttaaaagggaataaaaatgttctggtgctgtgtgttggcaaatggttggaaatgaaacagaacaaagcacagaagggatcttttgagccctgggctgccctgctcaacctccccacacatgattggcttctccagaaccactctcatggccttccatgtgccacagctagggtgctgctgtacttcccagtgagccaaaccctcattttttcctttcttttgcctttttccagggtgccagagggcctgatggaccagtagg

SEQ ID NO: 19235 - DNA, 600 bp, Chicken  19866894228769_1
gctttttttctcatccagctttgcttttctcctttttttcttttattttttgggcctgaaaaagtagagattttcatcttgctggctaagcgttggtcggcactcctgccccttggagttgaaaccgctgtcccaggtgctgccacttggtgcctggtgggtgtccttgggcacagggtgatggccacgtgtctgccgttgcctttgtggtagaaatatcacagaaacactgtgattccatggccacagccctgcagctggcacaagcccggcagcccctctctgtgggaaggtgatggrtycacgtcctccgcttccaacaggatgtcctggtgtggatccctgtgctggtggtgtcccatgcagcacagtgctgcattcagctgtcccagcgctcgccatcagatgccatttgctgcagccaccacgagtccaaatgaggagaggctttacagactgatataggcaagaagttattgccaatattaatattttactgtattagagcacgctaatggtattttaagctacaatgatttcagaaacatggagaggaaatgagggctctcccaggccttctccctstttaaaaggaagcaa

SEQ ID NO: 19236 - DNA, 600 bp, Chicken  19866894228769_2
tttttttctcatccagctttgcttttctcctttttttcttttattttttgggcctgaaaaagtagagattttcatcttgctggctaagcgttggtcggcactcctgccccttggagttgaaaccgctgtcccaggtgctgccacttggtgcctggtgggtgtccttgggcacagggtgatggccacgtgtctgccgttgcctttgtggtagaaatatcacagaaacactgtgattccatggccacagccctgcagctggcacaagcccggcagcccctctctgtgggaaggtgatggrtycacgtcctccgcttccaacaggatgtcctggtgtggatccctgtgctggtggtgtcccatgcagcacagtgctgcattcagctgtcccagcgctcgccatcagatgccatttgctgcagccaccacgagtccaaatgaggagaggctttacagactgatataggcaagaagttattgccaatattaatattttactgtattagagcacgctaatggtattttaagctacaatgatttcagaaacatggagaggaaatgagggctctcccaggccttctccctstttaaaaggaagcaagg

SEQ ID NO: 19237 - DNA, 600 bp, Chicken  19866894228769_3
tgggaaggtgatggrtycacgtcctccgcttccaacaggatgtcctggtgtggatccctgtgctggtggtgtcccatgcagcacagtgctgcattcagctgtcccagcgctcgccatcagatgccatttgctgcagccaccacgagtccaaatgaggagaggctttacagactgatataggcaagaagttattgccaatattaatattttactgtattagagcacgctaatggtattttaagctacaatgatttcagaaacatggagaggaaatgagggctctcccaggccttctccctstttaaaaggaagcaaggttcaagtattattttctcttccagaggggaggaacagctgtgccggggctgtgaagtaagttcataatgattgagttgaattgcagagtgcattttaggttgcattcaaatcagggcaatttcacttctctcagtgacagagcaaggagctcttcactttgatcgttgatgttgacttggagaggcggaaaacagagaagggaagcttttgtttcaggattgtcgtgtttctttgyacacaacagcatgtcggcatcggctgtgccctgcctgcaccacaggc

SEQ ID NO: 19238 - DNA, 600 bp, Chicken  19866894228769_4
tcagaaacatggagaggaaatgagggctctcccaggccttctccctstttaaaaggaagcaaggttcaagtattattttctcttccagaggggaggaacagctgtgccggggctgtgaagtaagttcataatgattgagttgaattgcagagtgcattttaggttgcattcaaatcagggcaatttcacttctctcagtgacagagcaaggagctcttcactttgatcgttgatgttgacttggagaggcggaaaacagagaagggaagcttttgtttcaggattgtcgtgtttctttgyacacaacagcatgtcggcatcggctgtgccctgcctgcaccacaggctgcagcaagcatgtggccaaagyactcagaactgcatggggtgtcacagcagctccctacagcaacaactgtgggcttttttggctgctggtgtgggcctgttgcagtggctacagtgtttcaggtggtcaccgtccttcagcctaccccactgctggaaatctgcaatgggaaacaggaactgaactggccaagtggagcccattagggtcagtcattgtcttcatctccaattcccatgttcttgcatggg

SEQ ID NO: 19239 - DNA, 574 bp, Chicken  19866894228769_5
tattattttctcttccagaggggaggaacagctgtgccggggctgtgaagtaagttcataatgattgagttgaattgcagagtgcattttaggttgcattcaaatcagggcaatttcacttctctcagtgacagagcaaggagctcttcactttgatcgttgatgttgacttggagaggcggaaaacagagaagggaagcttttgtttcaggattgtcgtgtttctttgyacacaacagcatgtcggcatcggctgtgccctgcctgcaccacaggctgcagcaagcatgtggccaaagyactcagaactgcatggggtgtcacagcagctccctacagcaacaactgtgggcttttttggctgctggtgtgggcctgttgcagtggctacagtgtttcaggtggtcaccgtccttcagcctaccccactgctggaaatctgcaatgggaaacaggaactgaactggccaagtggagcccattagggtcagtcattgtcttcatctccaattcccatgttcttgcatggggcacgtgcaaaagaagtctggcatggaggagaccaatccatcag

SEQ ID NO: 19240 - DNA, 599 bp, Chicken  19866894228780_1
  misc_feature (1)..(156): n is any nucleotide
nnnnnnnnnnnnnnnnnnnnnnnnnnnnnnnnnnnnnnnnnnnnnnnnnnnnnnnnnnnnnnnnnnnnnnnnnnnnnnnnnnnnnnnnnnnnnnnnnnnnnnnnnnnnnnnnnnnnnnnnnnnnnnnnnnnnnnnnnnnnnnnnnnnnnnnnnnnncatctgcaaggatgattgtgcacggggtgtggagctagtagaagtttggtgaatgcattgtgtgaactggttgtcaggctgcaattagaatattgtcctactgagccatgactgtatgaattaccgagtttactttgtaaggarattttgcagaaataagcatgaggacagagctgatataatgccactgcagcaagagcagcctcaagatgtagggaggactctgagcttcaaggccattctactaaactttcagcacagaattgctagctatctgggtaaaatctttatttttagaagtctttattttaaaaaaagtatattcttaatacagtgacccagcttcagatttctatgcacatcccactgcagttgcatcccaagcatgtgctctgtataccggccttggtcagtcagcagactctgggtctctctactggagc

SEQ ID NO: 19241 - DNA, 600 bp, Chicken  19866894228796_1
catttcctccatacaaaccagtctttttgtgtctgatatcatctttcatttcaacttatattttgtcatgtgtcccttcacagtttgaattgaatgaggttagaatcagatttttttttttcaaggaaattctgataacatcatttaaaaagcataatatatgcatttgcaaattgaaagctgtgactaaacatcttgttgagtacatcaaaagcaagtaaaaaacaagatttttgtgactctccttcatgtgtctgagttaaaaaaaagatagtgttatgctaaacctctatcaagaaygatattagtatctccttgtactcaatcaatctccaaggtgatcatgcctggtgcaatgaagcagggaatccctcagcaggcgaggggaaattctgctatctatgagtgaactgtgaggagctgactgtgccattagccctcatgacagcagctcatgaaagcagctgacaaggtgtgcggaggccagtagcaacagtggggcatttaaaagcagtaaaaccacccttaatacttgatctctgatatgatcagctctgttgcaagtgttctgggaagtaagtttgctagactgactaccag

SEQ ID NO: 19242 - DNA, 599 bp, Chicken  19866894228802_1
  misc_feature (1)..(3): n is any nucleotide
nnncccgctcaaagtctgtgacaagttggctcggagagggaagaacgcggtgctcgggagggagatgccaagtttggcctctgtggtgccaggccggaaaataatgtcccgggataagcagacctcgctttgtgctccttatcgtgcgagatcgctcctcaagttagagggccaaattctgctcccagctttccttcccccgcccactgcagtcaaacgaggatgtagctgcgagcagaatttggctcattgccttttgaaatgttaatatctccgggacgagtgttggcttcagcaggmgctgctcccatagccctctgcacgtccctttgagcgaggccggggcaccgcaagtttacagagttgtcattgccctgtaagccccgggaatatgggagctggrggcagaaagcaccaacgcaaataaatggtttccagctgccaatgctccgaagggtcaggaatgtgggcagtaacgaccaggagcacccactggccgttaccacccgtggaaaaggaacccgagatttattctttatgatttttaaccctcttccggggtcattctgtgcgggagagggaacccctcgtttttacca

SEQ ID NO: 19243 - DNA, 600 bp, Chicken  19866894228802_2
atgtcccgggataagcagacctcgctttgtgctccttatcgtgcgagatcgctcctcaagttagagggccaaattctgctcccagctttccttcccccgcccactgcagtcaaacgaggatgtagctgcgagcagaatttggctcattgccttttgaaatgttaatatctccgggacgagtgttggcttcagcaggmgctgctcccatagccctctgcacgtccctttgagcgaggccggggcaccgcaagtttacagagttgtcattgccctgtaagccccgggaatatgggagctggrggcagaaagcaccaacgcaaataaatggtttccagctgccaatgctccgaagggtcaggaatgtgggcagtaacgaccaggagcacccactggccgttaccacccgtggaaaaggaacccgagatttattctttatgatttttaaccctcttccggggtcattctgtgcgggagagggaacccctcgtttttaccatggatgaaacrctgtgtgtcgaagcctttgttaaatgctcgcgttgcccagcaatactttggtctctgttcaagtgtgatgcttttacagactttgcaaatatt

SEQ ID NO: 19244 - DNA, 600 bp, Chicken  19866894228802_3
tagccctctgcacgtccctttgagcgaggccggggcaccgcaagtttacagagttgtcattgccctgtaagccccgggaatatgggagctggrggcagaaagcaccaacgcaaataaatggtttccagctgccaatgctccgaagggtcaggaatgtgggcagtaacgaccaggagcacccactggccgttaccacccgtggaaaaggaacccgagatttattctttatgatttttaaccctcttccggggtcattctgtgcgggagagggaacccctcgtttttaccatggatgaaacrctgtgtgtcgaagcctttgttaaatgctcgcgttgcccagcaatactttggtctctgttcaagtgtgatgcttttacagactttgcaaatattttgctgccgttgatcaaagcgttatttatactgattgtcgcctgtaattttgatgtaagccctccatatgcatttgaaataataaaaggtgtagagaaatcgattctgttttgtaccttgtaccagcagcccctccgaggcgggtccgtgcgaaaaacctgtccctcccgtcattaccatgctaagagacgagtgactccgcattgc

SEQ ID NO: 19245 - DNA, 600 bp, Chicken  19866894228806_1
taaaaactgatcttttctcctctgaaattacttaccatcccaaaaggtcgttaacaagctgaatattattattactgctagctttggtgaaaccaggtttttctctaattaacagtaatgagctctagttgaaacagtttacaaagctatgaacgaaaagcacctcttatcattttaattttacggtgagataacacactgattactcaaaaggagttcacctcctctccaaattcacaaatgaaaataattggagctggactctctacaggtgatgaaaggaacagtcattgaaaagcwaaagagaaaaaaactaattacaaatctgaatgtgattttagctgtagtttgcaaagaaaagcaatggattagattagtgctttccttccattcttaaccatttgctgctgtagaatacaagaaaaggtactgtagatgtttctggatgatttcttccacatatctcctttagtcaaatcctaaagaaggatacacatactctgactccttaaagattctcatgacccaactgcaggtcttaccacatctggctgttaaatatggaaaatatctgtgcttctgcaaaacactaacattgtc

SEQ ID NO: 19246 - DNA, 600 bp, Chicken  19866894228810_1
ctctagcagttcttggtgttctgctctctctgtatcctgatgtcctttctgtaaagcaacatctaactatgctctctcttgagagatgtaatcttccttagacttttccactttttctggcatgagatgtgcagcttctcagagaaaagtcattacattattttgaaagaaatccaattaaaaaaaaaaaaaaagtcaactttttgaatcccttagaggttttcacagatgaaaaataccataaatggaccagacgctgcaatttgaaatatacggggtgcttctgggagaggagacaayacaaatttctgccaagtctgagtcttaattactggattttgtaattctttttcataaccagtataccataaaagtaaaaaataaaataaaatgaaaatagggcctgttaacaattagtgctttgatttgtcatgaatagagaagggaaactgctgcagaggctgagcagctgaagtaagccatttacagacgcttacttaccatattttcattatatatacatatatatatataaactatatacagtttactatatagtttgtgtatatttgyttaatatatagtttatatatgtatgta

SEQ ID NO: 19247 - DNA, 600 bp, Chicken  19866894228810_2
cggggtgcttctgggagaggagacaayacaaatttctgccaagtctgagtcttaattactggattttgtaattctttttcataaccagtataccataaaagtaaaaaataaaataaaatgaaaatagggcctgttaacaattagtgctttgatttgtcatgaatagagaagggaaactgctgcagaggctgagcagctgaagtaagccatttacagacgcttacttaccatattttcattatatatacatatatatatataaactatatacagtttactatatagtttgtgtatatttgyttaatatatagtttatatatgtatgtatgtatagtttagcaccattacattatgccttaattaaaggaaagtgtgttcctctgctgccagcaaacttcagtaatatmctaacggtgcagggctccatgtacctctgttagcttatatggcaaagrtctgcagagagactcaggatgctccagacctgctaatctggggtcattgcagtgtgataaagattaaatatcaggaagagggaggaaggctggttgctgtttttaagggactttgcaggtaggaaatgacttgtaaaactatatt

SEQ ID NO: 19248 - DNA, 600 bp, Chicken  19866894228810_3
ataaaataaaatgaaaatagggcctgttaacaattagtgctttgatttgtcatgaatagagaagggaaactgctgcagaggctgagcagctgaagtaagccatttacagacgcttacttaccatattttcattatatatacatatatatatataaactatatacagtttactatatagtttgtgtatatttgyttaatatatagtttatatatgtatgtatgtatagtttagcaccattacattatgccttaattaaaggaaagtgtgttcctctgctgccagcaaacttcagtaatatmctaacggtgcagggctccatgtacctctgttagcttatatggcaaagrtctgcagagagactcaggatgctccagacctgctaatctggggtcattgcagtgtgataaagattaaatatcaggaagagggaggaaggctggttgctgtttttaagggactttgcaggtaggaaatgacttgtaaaactatattttagaagcatgcattcaaaggtgtaaagccatacactcaagaaacgcaagaattagagttgcttgtatcccattaatattgctctctatgcactgttattattatgc

SEQ ID NO: 19249 - DNA, 600 bp, Chicken  19866894228810_4
gtcatgaatagagaagggaaactgctgcagaggctgagcagctgaagtaagccatttacagacgcttacttaccatattttcattatatatacatatatatatataaactatatacagtttactatatagtttgtgtatatttgyttaatatatagtttatatatgtatgtatgtatagtttagcaccattacattatgccttaattaaaggaaagtgtgttcctctgctgccagcaaacttcagtaatatmctaacggtgcagggctccatgtacctctgttagcttatatggcaaagrtctgcagagagactcaggatgctccagacctgctaatctggggtcattgcagtgtgataaagattaaatatcaggaagagggaggaaggctggttgctgtttttaagggactttgcaggtaggaaatgacttgtaaaactatattttagaagcatgcattcaaaggtgtaaagccatacactcaagaaacgcaagaattagagttgcttgtatcccattaatattgctctctatgcactgttattattatgccctcacataatgctatgttattatgatgcrtacacacccagaagagaa

SEQ ID NO: 19250 - DNA, 600 bp, Chicken  19866894228810_5
tagcttatatggcaaagrtctgcagagagactcaggatgctccagacctgctaatctggggtcattgcagtgtgataaagattaaatatcaggaagagggaggaaggctggttgctgtttttaagggactttgcaggtaggaaatgacttgtaaaactatattttagaagcatgcattcaaaggtgtaaagccatacactcaagaaacgcaagaattagagttgcttgtatcccattaatattgctctctatgcactgttattattatgccctcacataatgctatgttattatgatgcrtacacacccagaagagaaactaacctctggcagatttacaatggaaaccagatccattccctctgtggcatctgctaataccttaggtgtcagactttcatttaagtctaaaataaatattttcctttagggaaaaaaaatcacctaattggctgcaccttgctattcgcagtggtatggcaacctgtgaattctgaaaaaaaatcccttaggctcagtatataatgctttttcccatgcacaaaggagctggagctttcagtatcccgtgtcagttcactaagatgctattgatcccag

SEQ ID NO: 19251 - DNA, 600 bp, Chicken  19866894228810_6
tcccttttctgttttcttgatttgctgagctgcaggattcttctgtctccttatacccaaccattaccacagcactgcaaactacttctgcgccgagatcctctgtgggtgaggaaggggttttggttcttgtctggaaatccctttgtcttcctattggacctcttactttcatagttcctgagctccatcagcctctcattgaagtactcttgcaagggtttgtcgtggaagccactgctgtgtgccagttggcccttcatgtagcctcttgaggggccccccaagcaatgggctaaygaagctgtgtttggaaaaycattcagctgtgaggaagagctctttcctctttcccaatcctggaaaagccggttgaagcctcgagtttcaggataatttcttgataactgtttaaaaggggaaggagagaggcaggagtggggcagaagggtgaagggagtctgtattaaaatgtgctggtttatgtagaaaaagatcttatggttcctcacagtaaacagctgttgggaaacgtttcaggttcttaacctgaattccctggggactctaattcttatccctctctggaaaataaatgct

SEQ ID NO: 19252 - DNA, 600 bp, Chicken  19866894228810_7
atttgctgagctgcaggattcttctgtctccttatacccaaccattaccacagcactgcaaactacttctgcgccgagatcctctgtgggtgaggaaggggttttggttcttgtctggaaatccctttgtcttcctattggacctcttactttcatagttcctgagctccatcagcctctcattgaagtactcttgcaagggtttgtcgtggaagccactgctgtgtgccagttggcccttcatgtagcctcttgaggggccccccaagcaatgggctaaygaagctgtgtttggaaaaycattcagctgtgaggaagagctctttcctctttcccaatcctggaaaagccggttgaagcctcgagtttcaggataatttcttgataactgtttaaaaggggaaggagagaggcaggagtggggcagaagggtgaagggagtctgtattaaaatgtgctggtttatgtagaaaaagatcttatggttcctcacagtaaacagctgttgggaaacgtttcaggttcttaacctgaattccctggggactctaattcttatccctctctggaaaataaatgctttggtctgaggttaaacaa

SEQ ID NO: 19253 - DNA, 600 bp, Chicken  19866894228813_1
acttcctgttaaaaagtctgttctcaccagggctctatattctatagagcatgttgatgcagtcagaatgaaaactgttctatttcagcaaaaagtggaggacttagaaacaacttattcaagtgagatatattctaaattagagccagttcttttagcaaacaagaccatcattaaagcttcaattatgggcagttcttttttgtattctgacagggagacacatctacctgattaatggaattttcttcacataaaattgtcagctcattttctttctgctgatcttacagcagaacyacacacacacaaagcagaagtgtaaagcaggactggctagaagataaaaccatgtgggacagaaagcctgttgcagattctccaggtcaaaacagcaaatcagctgtacaactaacaagctgtgacgactagctacagactcaccattgactgaagtgtgaagacagtaccttgtaggaagccataccacacatacatgagaaaggtatccaatatttacctccacagcactgaaagcacttttggctcccatttccatgtctttcacagggagcctaacagaaggcagtgattccatct

SEQ ID NO: 19254 - DNA, 600 bp, Chicken  19866894228813_2
gtatccaatatttacctccacagcactgaaagcacttttggctcccatttccatgtctttcacagggagcctaacagaaggcagtgattccatcttagaacagaacatactgattataactgagacatataaataccaaatacctgcagggaaggcattaggccccagacactttcagcagcattggaaccaaaatggtagccttctcacattaaaatgaagaaataaatcccatttttttagatgctagtctcgtgtttctcttgcaattctttttaaactacactggaggagacagcrgggagagttaaggactgtagaaagtagaggtttcccattaaggaatgaagggtaggaagagcaccttgaacaaggcaaggaagaatggcgaggataagagaaggaggataaaggacaaaaaagataaatgaaagataaacaatctagacttcaagactttgcatttacaagacattctgagctgggagtccttaactgtcaggaaaggaaaaaaggaaggcacatgcatgtctcttgcagatggcttctctcttaaaatttagggaccgaatggcagcttgcacttcatttcaacatatc

SEQ ID NO: 19255 - DNA, 600 bp, Chicken  19866894228815_1
ttattaatatcttatgacaggtacaaatgggtatcactttaatttgttattgatcctgtaccctcttgggcagtgaactacagtgtagaaatacctacctgaatcctgctgtgggcacagttgggtccttgctttcctgttggaaaaacttcacacggcagaaatgaacttcagaggaagcagaaatcacagaagtatcccttaatgtcagtgcttggaggagtatgagtgtataacccttgcatttctccagatcagtgtttgtaatctcaactgctaatacaagtttacagccacaastgtcttctcagaaatccattacttgtgccacaggtgagagaggaggaactaagattattcagccccagcctgaggcctggtcttggtgagttttctgtctggtatctgacctgggaaggcagtaagcactgcatctctgctgcttgcagcacctcagctgaggtcagatccagccacagcactgctctcctttcccaatgtaattccagtaaatcttcaaaattatctatttactatggcacagaaggggaacattcattaagtcaggcattgatctcagtgtggaaacagcagtttgct

SEQ ID NO: 19256 - DNA, 600 bp, Chicken  19866894228824_1
ctttgatgggtacaaaaaccacaggtgaactttaaggagaaaatgttactaagcattgaaggtgacagttcgatgttcacagcaccttcagatctgacggggctggggataacctaaatgccaagcacatgtccctggaggcagtggcttgtgggcagcggtttgggaggacctggccactgggaagcactgctccttccccaaagagcaccacaataaatgagacagataaagggacagacattttagtggggtctgttgtgacaggacaaggggaaatggtttcaaactaaaagaggrgagatttagatgggatataaggaaaaggttttacgaytggggcagtgaggcactggcacaggttgcccagagatgtggtgggtgccctgtccctggagacacccaaggtcaggctggagaggctctaagcacctgatgggagctgtaggtgtccctgttcagtgcagggaagttgggatagatggcctttaagcattctttccaattgagtacattctatagcatcatagaatcttagaatggcttgggttggaagggacctcaaggatcatcaagctccaaccccccgtcatatgcagg

SEQ ID NO: 19257 - DNA, 600 bp, Chicken  19866894228824_2
agaaaatgttactaagcattgaaggtgacagttcgatgttcacagcaccttcagatctgacggggctggggataacctaaatgccaagcacatgtccctggaggcagtggcttgtgggcagcggtttgggaggacctggccactgggaagcactgctccttccccaaagagcaccacaataaatgagacagataaagggacagacattttagtggggtctgttgtgacaggacaaggggaaatggtttcaaactaaaagaggrgagatttagatgggatataaggaaaaggttttacgaytggggcagtgaggcactggcacaggttgcccagagatgtggtgggtgccctgtccctggagacacccaaggtcaggctggagaggctctaagcacctgatgggagctgtaggtgtccctgttcagtgcagggaagttgggatagatggcctttaagcattctttccaattgagtacattctatagcatcatagaatcttagaatggcttgggttggaagggacctcaaggatcatcaagctccaaccccccgtcatatgcagggctatcaacctccatatctaatactagaccagggcct

SEQ ID NO: 19258 - DNA, 600 bp, Chicken  19866894228827_1
taaatgcttaactaggtttcattgagtccttttcccgaccttccattttgtcacactaacactgagacgctggccatgcttacaggctccatgagaattaaaacagcagtaaaaagagaaaaaaaatgacatttcgtttcacaggggtcagaagaaggtgctctacaaagcacgccaaacgtcagggatgagcctaagctttgccaaccagttgtgctgtaaagccagcagcaggcagtgccagcaggcatgctccctgcccacccctccaggccacctgcacaaatttggcctcatacrcagaatgaaagctgggcaagaggatcttgaattatgaatatgagcttgtgaagaagtctgagtggaatctgatggctagcgacctgactgaagtaaggcagatagggccagattcagcagagctgaagttctgtagctctaagaaattaacaagcccttattccagtccaccactacatgtcaaagccattagtctgtatgcacacaagcaacaggagaatcacatttgcaagtatatatataactcacctaaggtgaagtttttcaagtccagcgtctgtgaggtcatcgttagctctc

SEQ ID NO: 19259 - DNA, 600 bp, Chicken  19866894228829_1
taatgactctgcatgcattgccttggctcgaaactggatttccctccagcagctcctggcgctgctgtctgtgctcccggatccgtgcaatcgttcgcccggcgcgggcggtgggtccaggagcagctccaggtgtgaaggctgcgaggtaggggtgtgcaggtacagagatagctgtcagcgcagccatctgctgctaattgcccgtcctcgctgctggcggttatttgttttgctgttatgcaccagagggggattgaaaaacaagaaatcaataattaaaaaataataataataatraawaaaaaagcaaccctccacctttcttttaggaatcggtttgggcagaggagtcgtaggatcggtaaagttggcgaaggccacgaagttcatcaggtccaactgttaacccctccccaccgtgcccacgaagcacgtccccgtaatgtggcagcactttggggtgctgctgctctcagtggccccagggaacgtccccatccccgtcctcatccccatgcagacccttcctctcagcctctcctgcccctccgttccctgtccccatcccgtgcgctctctgatctctccctgcccgcc

SEQ ID NO: 19260 - DNA, 600 bp, Chicken  19866894228829_2
tgactctgcatgcattgccttggctcgaaactggatttccctccagcagctcctggcgctgctgtctgtgctcccggatccgtgcaatcgttcgcccggcgcgggcggtgggtccaggagcagctccaggtgtgaaggctgcgaggtaggggtgtgcaggtacagagatagctgtcagcgcagccatctgctgctaattgcccgtcctcgctgctggcggttatttgttttgctgttatgcaccagagggggattgaaaaacaagaaatcaataattaaaaaataataataataataaawaaaaaagcaaccctccacctttcttttaggaatcggtttgggcagaggagtcgtaggatcggtaaagttggcgaaggccacgaagttcatcaggtccaactgttaacccctccccaccgtgcccacgaagcacgtccccgtaatgtggcagcactttggggtgctgctgctctcagtggccccagggaacgtccccatccccgtcctcatccccatgcagacccttcctctcagcctctcctgcccctccgttccctgtccccatcccgtgcgctctctgatctctccctgcccgccggg

SEQ ID NO: 19261 - DNA, 600 bp, Chicken  19866894228830_1
atttatacatattacagggacaaatgtgatagaaataatggagattaaagatgttaagagttattatttaaagaaatgataagcagtaagacattccttatcataagcacagagctaacaaaaaaatccgtattgctggtcccaccagtcaagggaacaattaaatacatcaaagatgttgctgagaagctgctttcttttcttgtcttccttttgactcactgctttagatgttgactaaaaggcatctgcttttccaaagaagctatgtagaagatattcacataattatgtaaattragaatatggccatattccatactaaacataactgtactaatcactgtctcagtaataggattctgaaagatttcagaaaaatgagcacaagttcaggagtataaaaaaagtgtcagttgaacaagtaaagtatgtgtaattatctaaaacagtcactgttaaccagaagacagaaaggttgaatccattagactttccagcttttatgaaacygcccaacatttatacgtctttaatctgtttcactacaactaatcttgttttattctactttggtagtctgtactatgtggtgggatg

SEQ ID NO: 19262 - DNA, 600 bp, Chicken  19866894228830_2
ttgactcactgctttagatgttgactaaaaggcatctgcttttccaaagaagctatgtagaagatattcacataattatgtaaattragaatatggccatattccatactaaacataactgtactaatcactgtctcagtaataggattctgaaagatttcagaaaaatgagcacaagttcaggagtataaaaaaagtgtcagttgaacaagtaaagtatgtgtaattatctaaaacagtcactgttaaccagaagacagaaaggttgaatccattagactttccagcttttatgaaacygcccaacatttatacgtctttaatctgtttcactacaactaatcttgttttattctactttggtagtctgtactatgtggtgggatgaatttatctgtaargtttgccataatccctttagatgtatggactgatcagactctttgcaacaattaagtagcragaagtcctttcaactgagactttaggaacggaaaagaatttgaagacaaacatttccttcagataaaatgctgattttgatttttaaatttatttttttcatattccattcattctaagaatggacacgaagagttt

SEQ ID NO: 19263 - DNA, 600 bp, Chicken  19866894228830_3
ttccatactaaacataactgtactaatcactgtctcagtaataggattctgaaagatttcagaaaaatgagcacaagttcaggagtataaaaaaagtgtcagttgaacaagtaaagtatgtgtaattatctaaaacagtcactgttaaccagaagacagaaaggttgaatccattagactttccagcttttatgaaacygcccaacatttatacgtctttaatctgtttcactacaactaatcttgttttattctactttggtagtctgtactatgtggtgggatgaatttatctgtaargtttgccataatccctttagatgtatggactgatcagactctttgcaacaattaagtagcragaagtcctttcaactgagactttaggaacggaaaagaatttgaagacaaacatttccttcagataaaatgctgattttgatttttaaatttatttttttcatattccattcattctaagaatggacacgaagagtttgaaatggaatctttgctaattctttcattaaaaagcctattaaaaaaatcagatacaacttaatcccccaaatccatcttttcatgtatgtatttttgatg

SEQ ID NO: 19264 - DNA, 600 bp, Chicken  19866894228830_4
gaaaaatgagcacaagttcaggagtataaaaaaagtgtcagttgaacaagtaaagtatgtgtaattatctaaaacagtcactgttaaccagaagacagaaaggttgaatccattagactttccagcttttatgaaacygcccaacatttatacgtctttaatctgtttcactacaactaatcttgttttattctactttggtagtctgtactatgtggtgggatgaatttatctgtaargtttgccataatccctttagatgtatggactgatcagactctttgcaacaattaagtagcragaagtcctttcaactgagactttaggaacggaaaagaatttgaagacaaacatttccttcagataaaatgctgattttgatttttaaatttatttttttcatattccattcattctaagaatggacacgaagagtttgaaatggaatctttgctaattctttcattaaaaagcctattaaaaaaatcagatacaacttaatcccccaaatccatcttttcatgtatgtatttttgatgtaaaaaagtccagatagaaaacttctgactgaatatggttctattctgaatatggatctat

SEQ ID NO: 19265 - DNA, 600 bp, Chicken  19866894228830_5
ttgaagacaaacatttccttcagataaaatgctgattttgatttttaaatttatttttttcatattccattcattctaagaatggacacgaagagtttgaaatggaatctttgctaattctttcattaaaaagcctattaaaaaaatcagatacaacttaatcccccaaatccatcttttcatgtatgtatttttgatgtaaaaaagtccagatagaaaacttctgactgaatatggttctattctgaatatggatctattagaggagacaaaatactgatgtacatcgacctttaaccygatcaggaatataatacaaaaactcctctcatttagtggtaagttacctggtgaagaaagtaacctgataattaaatcaaatggcatctctgaacaccaccaacagcacgcaacaggagactgaattacttttgcagatttataattagttctgaaattttgaactttcagtttgtgaagttaacagcatatgctggttacatttctcagtgatgccaggaaacaaatacaggaatactttagtacaattttgtgaaaagctatgctcttctctaaggagaaatgttgtctttttttttg

SEQ ID NO: 19266 - DNA, 600 bp, Chicken  19866894228832_1
agggaagctggaatcagtgtcccttgattagtattattattctatgtgactcagtttgaactgaaagagcaagatgggtagtttacaatgtgaaaactgtagtttagtgtttcataatcaaattgcaaatcagcaatattggaactcatggcagaaggggtcagaagattgggtttctgtgatctctgtcggtatgttctgagaagagttattcttttggagcttatgttcaggtttttgctgagcagcagattaaaccagttcagtagcaccagtaattatagttctcattgttgtaaratgccttacccagttagaaaactttcactctttccttcttgaaacagccttcctcctgctttggaktgcaatggaaacattattattattagctacgttgtatcaaatcaacttcatttagtgcttaagtaaaaagagtggaaactgaattgcaaaaatggagtttgtgaaggcagtgcaatccagagttgtgtgtgagtagctygttgtggrcttgaaaccrtctgttcctgttgtttttaagaatatttgaggaatctggatattgtattttgtatgtctacctaagtattggtggcc

SEQ ID NO: 19267 - DNA, 600 bp, Chicken  19866894228832_2
gagcaagatgggtagtttacaatgtgaaaactgtagtttagtgtttcataatcaaattgcaaatcagcaatattggaactcatggcagaaggggtcagaagattgggtttctgtgatctctgtcggtatgttctgagaagagttattcttttggagcttatgttcaggtttttgctgagcagcagattaaaccagttcagtagcaccagtaattatagttctcattgttgtaaratgccttacccagttagaaaactttcactctttccttcttgaaacagccttcctcctgctttggaktgcaatggaaacattattattattagctacgttgtatcaaatcaacttcatttagtgcttaagtaaaaagagtggaaactgaattgcaaaaatggagtttgtgaaggcagtgcaatccagagttgtgtgtgagtagctygttgtggrcttgaaaccrtctgttcctgttgtttttaagaatatttgaggaatctggatattgtattttgtatgtctacctaagtattggtggccacgtagtgttgctatttctagttctgtggccacttaagcccattttatcctcagagctgtgattcc

SEQ ID NO: 19268 - DNA, 600 bp, Chicken  19866894228832_3
gagttattcttttggagcttatgttcaggtttttgctgagcagcagattaaaccagttcagtagcaccagtaattatagttctcattgttgtaaratgccttacccagttagaaaactttcactctttccttcttgaaacagccttcctcctgctttggaktgcaatggaaacattattattattagctacgttgtatcaaatcaacttcatttagtgcttaagtaaaaagagtggaaactgaattgcaaaaatggagtttgtgaaggcagtgcaatccagagttgtgtgtgagtagctygttgtggrcttgaaaccrtctgttcctgttgtttttaagaatatttgaggaatctggatattgtattttgtatgtctacctaagtattggtggccacgtagtgttgctatttctagttctgtggccacttaagcccattttatcctcagagctgtgattcctgaattgagagcaattatactgatggctaataggcttcagaaaacaaggaaataagtgggttcttacatctcataaaattccaatgtctgttgttaattctccctgctttctgttgtcaggttcccgcagagctctctc

SEQ ID NO: 19269 - DNA, 600 bp, Chicken  19866894228832_4
cttttggagcttatgttcaggtttttgctgagcagcagattaaaccagttcagtagcaccagtaattatagttctcattgttgtaaratgccttacccagttagaaaactttcactctttccttcttgaaacagccttcctcctgctttggaktgcaatggaaacattattattattagctacgttgtatcaaatcaacttcatttagtgcttaagtaaaaagagtggaaactgaattgcaaaaatggagtttgtgaaggcagtgcaatccagagttgtgtgtgagtagctygttgtggrcttgaaaccrtctgttcctgttgtttttaagaatatttgaggaatctggatattgtattttgtatgtctacctaagtattggtggccacgtagtgttgctatttctagttctgtggccacttaagcccattttatcctcagagctgtgattcctgaattgagagcaattatactgatggctaataggcttcagaaaacaaggaaataagtgggttcttacatctcataaaattccaatgtctgttgttaattctccctgctttctgttgtcaggttcccgcagagctctctccatggcta

SEQ ID NO: 19270 - DNA, 600 bp, Chicken  19866894228832_5
ttatgttcaggtttttgctgagcagcagattaaaccagttcagtagcaccagtaattatagttctcattgttgtaaratgccttacccagttagaaaactttcactctttccttcttgaaacagccttcctcctgctttggaktgcaatggaaacattattattattagctacgttgtatcaaatcaacttcatttagtgcttaagtaaaaagagtggaaactgaattgcaaaaatggagtttgtgaaggcagtgcaatccagagttgtgtgtgagtagctygttgtggrcttgaaaccrtctgttcctgttgtttttaagaatatttgaggaatctggatattgtattttgtatgtctacctaagtattggtggccacgtagtgttgctatttctagttctgtggccacttaagcccattttatcctcagagctgtgattcctgaattgagagcaattatactgatggctaataggcttcagaaaacaaggaaataagtgggttcttacatctcataaaattccaatgtctgttgttaattctccctgctttctgttgtcaggttcccgcagagctctctccatggctagttgcacttt

SEQ ID NO: 19271 - DNA, 600 bp, Chicken  19866894228832_6
acaaacacccagcaggctacccatagcaaagctgaggagttttttgcatgtcatttaaatatgttttttgtctcattgccacagatggaacaaacaagagagaaaagagcactttaaatccagacagtaacaaaatggccatcaggtggctctggttctcagcagtatgaggaacagagctttaattcagacatattttcataccccagactaccagttccaattgtctgtatgagccagaatgctatttttttttttcttctgaggcaggatttgctattatttttttttatattcacrtacagctttatttatacaccttgcacagaatgagtaagtggcaagctttttatgctctgctgatggagcttaacatttaatacaggttgcacaagtgtggtgttactgatacaaaaggcacgctaattgttaagcctgctaaacctttcgtggcaatcacgacaccctaatttggagatagtatttggagakgagcgatttagcttcagcagaaaatctgccatctgctggccgaggaggaaaattacttcctaagcattgggatgcgctgagtggagtgctcgagcggctccaacaaga

SEQ ID NO: 19272 - DNA, 600 bp, Chicken  19866894228832_7
atattttcataccccagactaccagttccaattgtctgtatgagccagaatgctatttttttttttcttctgaggcaggatttgctattatttttttttatattcacrtacagctttatttatacaccttgcacagaatgagtaagtggcaagctttttatgctctgctgatggagcttaacatttaatacaggttgcacaagtgtggtgttactgatacaaaaggcacgctaattgttaagcctgctaaacctttcgtggcaatcacgacaccctaatttggagatagtatttggagakgagcgatttagcttcagcagaaaatctgccatctgctggccgaggaggaaaattacttcctaagcattgggatgcgctgagtggagtgctcgagcggctccaacaagaggagcgactggcggctctgtagagcttttcggcagcaagtgtttcagagcaggtcagtcgttttctaacrgaaaaagatgctgtcagaaagtactgttctgttataattaaaactttctgtgggagcacatcaatgagaaatagaaatgttccattctaaaaatgtcagaacatactgtttccaagtttttt

SEQ ID NO: 19273 - DNA, 584 bp, Chicken  19866894228832_8
taacatttaatacaggttgcacaagtgtggtgttactgatacaaaaggcacgctaattgttaagcctgctaaacctttcgtggcaatcacgacaccctaatttggagatagtatttggagakgagcgatttagcttcagcagaaaatctgccatctgctggccgaggaggaaaattacttcctaagcattgggatgcgctgagtggagtgctcgagcggctccaacaagaggagcgactggcggctctgtagagcttttcggcagcaagtgtttcagagcaggtcagtcgttttctaacrgaaaaagatgctgtcagaaagtactgttctgttataattaaaactttctgtgggagcacatcaatgagaaatagaaatgttccattctaaaaatgtcagaacatactgtttccaagttttttacactgcaacactggcttttagtaaagaatgatttttttttttaaggtaatcatttctttacactataaaaacaataagtcaaaactgaaatagtcgtctttgtatgaagcactggtgaggcctcacataatcactataggacatgaagaagttcaaggcag

SEQ ID NO: 19274 - DNA, 600 bp, Chicken  19866894228835_1
tgcccaaggctctcacaggaagatcaaacttgcagtaaaatgaaatgcaaaaagtgctgtgggacctggtgggtggtcagaggttttgactcccaaaatatcactgctgctcgagatcccgttgctacctgaagtgctctgggatctcctcattgaagagtaacccacgcacatcccaggaggcagcaggtggtgccccagagcccgcagcgactcaagagcctgactgcagtgccgctttgctgtagctcagacttctgctgcacttttaagagacggcatttagctgctgatctgctrggcctgtgccgccctgaggacggggrtatgtgggaactgcctcagcttctgggggaagagtacccggtgccctctggagtgcactcagctcgtgtgcatccctccctctgcccactgcagtccacccatgtgtctgtgcctgggatgtgcacttgcagctgcactgttcccatgcctggactgaaacctgcacaggagatatcaggatgtttctgctccttttagaaagctgtcctgggagtcagagcccagcgtgatatgcacagcatatgtggcaggagagcttgtgagaaaaggcat

SEQ ID NO: 19275 - DNA, 600 bp, Chicken  19866894228835_2
aacttgcagtaaaatgaaatgcaaaaagtgctgtgggacctggtgggtggtcagaggttttgactcccaaaatatcactgctgctcgagatcccgttgctacctgaagtgctctgggatctcctcattgaagagtaacccacgcacatcccaggaggcagcaggtggtgccccagagcccgcagcgactcaagagcctgactgcagtgccgctttgctgtagctcagacttctgctgcacttttaagagacggcatttagctgctgatctgctrggcctgtgccgccctgaggacggggrtatgtgggaactgcctcagcttctgggggaagagtacccggtgccctctggagtgcactcagctcgtgtgcatccctccctctgcccactgcagtccacccatgtgtctgtgcctgggatgtgcacttgcagctgcactgttcccatgcctggactgaaacctgcacaggagatatcaggatgtttctgctccttttagaaagctgtcctgggagtcagagcccagcgtgatatgcacagcatatgtggcaggagagcttgtgagaaaaggcatggtatgaataaaagacaaatgtactt

SEQ ID NO: 19276 - DNA, 600 bp, Chicken  19866894228835_3
ctttagaaaagaaatatgtgcaaagtattcaggggataacattgtacttgcaaatagttatgcttttgaggaactttatctggtagctgaaccaactgctgcagtatggttagtcacgtacttaatgctatgggaatgagtatgtgctgattcagagcctgcactcgtgccctgtggaggagcaccactgcgcccatctcagccctgcatacagcagcttcgtgtgccccgggcagtgccggcgctgggcagctcctccgggggagagcagcagcagctgagctgtgctgggagcgatgygtcaccgcagcgcatgccacagacacacaggggtgtacgtttgcagcgtatggtggaatgtttygtggatgctaagcagcaattagagtcttcctttggaatcgattcatttcacactgccatggtagcagggaggatcttattgaaactgtaggatttttaatattattacgctaaagactctctcagtaacagtgtctccgtggagggtcattagtgcactgtaatgggtaacaacttctccagttcaggaaatcttgttgcatttgtaatgggacgtctggggcatatattatgtat

SEQ ID NO: 19277 - DNA, 600 bp, Chicken  19866894228835_4
tttgaggaactttatctggtagctgaaccaactgctgcagtatggttagtcacgtacttaatgctatgggaatgagtatgtgctgattcagagcctgcactcgtgccctgtggaggagcaccactgcgcccatctcagccctgcatacagcagcttcgtgtgccccgggcagtgccggcgctgggcagctcctccgggggagagcagcagcagctgagctgtgctgggagcgatgygtcaccgcagcgcatgccacagacacacaggggtgtacgtttgcagcgtatggtggaatgtttygtggatgctaagcagcaattagagtcttcctttggaatcgattcatttcacactgccatggtagcagggaggatcttattgaaactgtaggatttttaatattattacgctaaagactctctcagtaacagtgtctccgtggagggtcattagtgcactgtaatgggtaacaacttctccagttcaggaaatcttgttgcatttgtaatgggacgtctggggcatatattatgtatgggacatatatttctcatttccaccaggcatcatctttccttctctctaaattattctctgaat

SEQ ID NO: 19278 - DNA, 600 bp, Chicken  19866894228835_5
caaaaaaaaaaaaaaagtctcccccctcaaaaaggatgtattcctaatgcctctctattttattttaatctttgaacccagaagccactgccaccaccagggctgtgcagaggagtgctcagccatgcagtgacggaaggctgttggggcccagctgtgctggagcgggagtgctgtgtttgggggtacacagagcacagccctgagcattgcgcctgccttgtcatgaaagttctcactacaccttcacagaacttttcttactgcacttcatacccaccactcccagaccaggctgakgacaaggactggtcgctgccctcctctttgatgctcctccaggttaatgctttcctcmatgctgcactttgcttctcccctctgtgtttgtttcattattgctttcctttagttctttcagtgctgcactaaaggctgttgatgttggctctacactgatctgctctgtgggttattaccccctgtaagcatggtgtccagagctgggtgcaggacagctgcagcattaccctatggctgctgctgtgggctgtgccgtggttttcatcagctgccaactcagtgggttttcagtgccat

SEQ ID NO: 19279 - DNA, 600 bp, Chicken  19866894228835_6
tttattttaatctttgaacccagaagccactgccaccaccagggctgtgcagaggagtgctcagccatgcagtgacggaaggctgttggggcccagctgtgctggagcgggagtgctgtgtttgggggtacacagagcacagccctgagcattgcgcctgccttgtcatgaaagttctcactacaccttcacagaacttttcttactgcacttcatacccaccactcccagaccaggctgakgacaaggactggtcgctgccctcctctttgatgctcctccaggttaatgctttcctcmatgctgcactttgcttctcccctctgtgtttgtttcattattgctttcctttagttctttcagtgctgcactaaaggctgttgatgttggctctacactgatctgctctgtgggttattaccccctgtaagcatggtgtccagagctgggtgcaggacagctgcagcattaccctatggctgctgctgtgggctgtgccgtggttttcatcagctgccaactcagtgggttttcagtgccatcgctgaaatgtgacaacactgagcctaacagctctgcagcagctcaggtcaggatgta

SEQ ID NO: 19280 - DNA, 600 bp, Chicken  19866894228837_1
ttttcttcctgctgttttctttcagttggactaatcatggcgtaatgtaactgtaataggttaacaaccccaccccccccccccccatgcaaatgggatttccagatagatgggatctttttttttaaagagataacagcggctgatttccagtgcgtcttggagtccctgggcctcccaacgttaacagttgttgaagtaaatggaaccccacaaagtgtgtgaaactaaccctgtgtgtgagcctttgtgaaattcaagtccagaaacagggaaatgaatgctaaattaatggctttycttactctttgacttgagtgcctctggtgtttcaagggtgtaggggtttatgggatgctggttcattcctattttgctaacaggagcaaatgagggaaggggccaaatctctgcaggctgaacaaccttttggcagtagcttgaggggctagttctccttatggaagagggctgacttgcaaaactgtacttttatgcaaagctgttttcagttagaccagtacataaaagtgtctgaaacacaaaactttgattttgtggttgcagcctttaatatttaaaaatggccaaaatccattt

SEQ ID NO: 19281 - DNA, 599 bp, Chicken  19866894228840_1
  misc_feature (1)..(158): n is any nucleotide
nnnnnnnnnnnnnnnnnnnnnnnnnnnnnnnnnnnnnnnnnnnnnnnnnnnnnnnnnnnnnnnnnnnnnnnnnnnnnnnnnnnnnnnnnnnnnnnnnnnnnnnnnnnnnnnnnnnnnnnnnnnnnnnnnnnnnnnnnnnnnnnnnnnnnnnnnnnnnnaccgatgtattatataggtacgaagcgtacgaaatatgagtacctcttctgtacacattaagtgtacaaaacctgtccttaactgactgtacacatatgtgatcatgtagcatatgcatacaatacgatacaataacagaaygtatggcacacagatcagactgtttttgtcttaatagccttgacatcttgaaagcttttaagtctcgtagatgacttacctgagggcataacaggaagacagctgtgaagtgctggagtggtgccatggggtcagagctgaccaagtcctgagctccccaagtgggggaargaagatactggctggacaagtgggccccaagagccccgaccaacattgtgctgatgcagggtcgaaagacaggagtcattctctaaatcactaacaaatgccacgcctgctgtgatgctggatatcaa

SEQ ID NO: 19282 - DNA, 600 bp, Chicken  19866894228840_2
ataggtacgaagcgtacgaaatatgagtacctcttctgtacacattaagtgtacaaaacctgtccttaactgactgtacacatatgtgatcatgtagcatatgcatacaatacgatacaataacagaaygtatggcacacagatcagactgtttttgtcttaatagccttgacatcttgaaagcttttaagtctcgtagatgacttacctgagggcataacaggaagacagctgtgaagtgctggagtggtgccatggggtcagagctgaccaagtcctgagctccccaagtgggggaargaagatactggctggacaagtgggccccaagagccccgaccaacattgtgctgatgcagggtcgaaagacaggagtcattctctaaatcactaacaaatgccacgcctgctgtgatgctggatatcaaagcacacaaaagagttcagaaaaccacaccccacgatctctgtacagatcccatttgacctcagaccaggtcacggatccccaaatgatttttaaagctttaagtcaccgacygttatcaaagcactccccacatcttccagctcctcaataacaaaagccagcatgaacca

SEQ ID NO: 19283 - DNA, 521 bp, Chicken  19866894228840_3
ctggagtggtgccatggggtcagagctgaccaagtcctgagctccccaagtgggggaargaagatactggctggacaagtgggccccaagagccccgaccaacattgtgctgatgcagggtcgaaagacaggagtcattctctaaatcactaacaaatgccacgcctgctgtgatgctggatatcaaagcacacaaaagagttcagaaaaccacaccccacgatctctgtacagatcccatttgacctcagaccaggtcacggatccccaaatgatttttaaagctttaagtcaccgacygttatcaaagcactccccacatcttccagctcctcaataacaaaagccagcatgaaccaagcagggtccaagcctggatgtcagggcacgccatctgctcagtgcagaattcaaggagaaacccactccctcyggtgctgctgcagctttctgctcagcagatcctggctctgtgctcaggcaatgccctggatctgggcttgtgggtctcttgggtgctt

SEQ ID NO: 19284 - DNA, 388 bp, Chicken  19866894228840_4
gtcattctctaaatcactaacaaatgccacgcctgctgtgatgctggatatcaaagcacacaaaagagttcagaaaaccacaccccacgatctctgtacagatcccatttgacctcagaccaggtcacggatccccaaatgatttttaaagctttaagtcaccgacygttatcaaagcactccccacatcttccagctcctcaataacaaaagccagcatgaaccaagcagggtccaagcctggatgtcagggcacgccatctgctcagtgcagaattcaaggagaaacccactccctcyggtgctgctgcagctttctgctcagcagatcctggctctgtgctcaggcaatgccctggatctgggcttgtgggtctcttgggtgctt

SEQ ID NO: 19285 - DNA, 600 bp, Chicken  19866894228859_1
tcacagcctcggtaagctgtcttctcacacccttaaaagcatattctgttgcaattgcttctctctttaaaattttcctggcctcatagaaataaatggattaaattttgatttaaatactgcataaaaattgaaatatgagtgagacacttttaagttttctaaagaaagtagctgttaagtgtgaactgttttcttccttttgataggctgttgctcatggtgctctctgttcagactgtgttctctcatactgactgcattcagaagaaaccacaagagtttaatttacttgcaacygttttgatatttttctcatttaaaatggttttgcagttcaaaattaactttagctgaaagcagtatgttgcagttatttttatgtacagcatgtgtacatacccagaaacacagcttatagtgcagaattaatgcccttgaatcccacatggaaaaatagtttttaggtatcgcgcggttactgcaggtttttcttgatgggtgtattggattgagatacttcatagatggctacaaagaagcaacaaataaaatacatcaaatatttggatcttcgcagtcatttggcactgaagttat

SEQ ID NO: 19286 - DNA, 565 bp, Chicken  19866894228861_1
tgtaatatcagtctgcacgagactcaagagcttttgttatttctgcatttggtagattcaggcgtaacaattcccgaagtcctttggcttttacaagcagctatgacagacagcctctaaatgctgtgcttttcatgacaacagtgattgacagccccttggtggatggcccaggcagcctaacaacattattgttctctagtaattacctgatcattttttttttcttcagtgtgttgcagttatggttcaactaaggaagagtcctcagaactttctgaaagtttatttagcttgcaytgatttctgccttgcctttctgattctgtggcagtgctgggwttgcagacatcaatgcccaaggtgtataatagaatcatagaatcacaaaattgctcaggttggaaaagaccttcaaggtcatccagtccagctgcaatctaaccatcctatcctaactctaacagctctccactaaatcatgtccctaagcaccacatccagatggtttttaaacacatccagggatggcgactcaaccacctccctggggagcccactccag

SEQ ID NO: 19287 - DNA, 523 bp, Chicken  19866894228861_2
ctgcatttggtagattcaggcgtaacaattcccgaagtcctttggcttttacaagcagctatgacagacagcctctaaatgctgtgcttttcatgacaacagtgattgacagccccttggtggatggcccaggcagcctaacaacattattgttctctagtaattacctgatcattttttttttcttcagtgtgttgcagttatggttcaactaaggaagagtcctcagaactttctgaaagtttatttagcttgcaytgatttctgccttgcctttctgattctgtggcagtgctgggwttgcagacatcaatgcccaaggtgtataatagaatcatagaatcacaaaattgctcaggttggaaaagaccttcaaggtcatccagtccagctgcaatctaaccatcctatcctaactctaacagctctccactaaatcatgtccctaagcaccacatccagatggtttttaaacacatccagggatggcgactcaaccacctccctggggagcccactccag

SEQ ID NO: 19288 - DNA, 600 bp, Chicken  19866894228864_1
aaatcccatgaatttgtatctatcctcactttgccactggccccactgccagtcccaaattccaggctccaaagcagcatctggagaatccatcggtgcttgctctcaggtctcctgcagggcaggctcccagcccttcgctacagcaggaaaaagtggttcagccattgagaaacctcccagcagctttctatttgttttgctttattttggaatggcccagcgctgggcaggctgagtttaaccaccagagctggcagcaacagcagcacacatttgctggggagatccgctctgcascaattcctacagatgggttggatcratcattggggtcccccawagaagtggtaccaacaaaacctatcccgcagagcaggagcccccagcttgctgcttgcacagggctttcctaaagctcagcagtgggatgcaaaagctctctgctgctttttgggttggtttcacccccaaatcccccagtgatgagcagtgatgctgcaacgcctgctctgtccccccctcccccagccaggaccccgctgccctgtcctgtttcaccattgcggacctgctgccagacctgcagcacatcctctt

SEQ ID NO: 19289 - DNA, 600 bp, Chicken  19866894228864_2
tcactttgccactggccccactgccagtcccaaattccaggctccaaagcagcatctggagaatccatcggtgcttgctctcaggtctcctgcagggcaggctcccagcccttcgctacagcaggaaaaagtggttcagccattgagaaacctcccagcagctttctatttgttttgctttattttggaatggcccagcgctgggcaggctgagtttaaccaccagagctggcagcaacagcagcacacatttgctggggagatccgctctgcascaattcctacagatgggttggatcratcattggggtcccccawagaagtggtaccaacaaaacctatcccgcagagcaggagcccccagcttgctgcttgcacagggctttcctaaagctcagcagtgggatgcaaaagctctctgctgctttttgggttggtttcacccccaaatcccccagtgatgagcagtgatgctgcaacgcctgctctgtccccccctcccccagccaggaccccgctgccctgtcctgtttcaccattgcggacctgctgccagacctgcagcacatcctcttctggatgtccaacgccattgaggtg

SEQ ID NO: 19290 - DNA, 600 bp, Chicken  19866894228864_3
cactgccagtcccaaattccaggctccaaagcagcatctggagaatccatcggtgcttgctctcaggtctcctgcagggcaggctcccagcccttcgctacagcaggaaaaagtggttcagccattgagaaacctcccagcagctttctatttgttttgctttattttggaatggcccagcgctgggcaggctgagtttaaccaccagagctggcagcaacagcagcacacatttgctggggagatccgctctgcascaattcctacagatgggttggatcratcattggggtcccccawagaagtggtaccaacaaaacctatcccgcagagcaggagcccccagcttgctgcttgcacagggctttcctaaagctcagcagtgggatgcaaaagctctctgctgctttttgggttggtttcacccccaaatcccccagtgatgagcagtgatgctgcaacgcctgctctgtccccccctcccccagccaggaccccgctgccctgtcctgtttcaccattgcggacctgctgccagacctgcagcacatcctcttctggatgtccaacgccattgaggtgctctacttcgtccagcag

SEQ ID NO: 19291 - DNA, 600 bp, Chicken  19866894228879_1
agttcccaatccaaacgccatccttgagccccagtgctgcgtgtgtcagcacaagaacaagatgtctcatgttcacttataaggcactgagttgcacatttgacgggcatccaggccgtaaggtttcaggagggctcacagcacatctccccatctcagcactgcgtggtgcagctctttgccttgctctgagcacagcctctgcactgcagctctccgtgtttcagcccttcccctgaccacagcaccaggactgtgccgtgggtctggacaaacctgctacagtctccttctcactcrctccccaggttaattaaagctgctgctgctgacactgttggcacgcagttccccgtacatcacccctctccacagcccatctctgcctgttggtcagacacatccttgctcgttctgcacgcactctcaccagcactgttgctggttcttctggcacctcgctccccactgctctggacagactttctcccctttctctgttgtgagatgagccaatgcaagccaatctgctacgccctgcatttgctttgctcaggcacatcgtaggggtggtgagacaaggccacttctgtgctggca

SEQ ID NO: 19292 - DNA, 599 bp, Chicken  19866894228895_1
  misc_feature (1)..(120): n is any nucleotide
nnnnnnnnnnnnnnnnnnnnnnnnnnnnnnnnnnnnnnnnnnnnnnnnnnnnnnnnnnnnnnnnnnnnnnnnnnnnnnnnnnnnnnnnnnnnnnnnnnnnnnnnnnnnnnnnnnnnnnnnccctcctcctacacaaccctatcatggggaactccctacttattctctggttttccataattctgtgagcattttaaatggctttgatgctatcacagttcatattttgcttggactgtatttgcaactgcagcctagaaagttttgtgatagacacttggcaaacaaagttcatccttscagcgtgcctgtgggctcacaagctgtggtggtgtgtcagataaaagtgttggatgttggatctccatgcacagctacactgacacttaaccatgtgcactgtatattttagatacgttttaaatgcagaagtgataagagcaaatcctcaaaacccacagtattgggtgtttccaggtctttgcaagttcggtgatcattagataaacagaaggaacatcttttatgaacttccttaggatttactgctttcctttgcaaagcaaacggttaaatttgacctgtcctgttagccatgt

SEQ ID NO: 19293 - DNA, 509 bp, Chicken  19866894228916_1
atgtctgatggcgatctgtttctaaatttgaggactcacttttgatgagaaatgaaaagaaagtatttcttgttttctttttttttcttttttttttttcatttgtttgttctgctgtgttgttgttgtgtgaatatatcctgtaagaaaaaagttttcaaacagagaaattgggaattacggaggggtaagttattcatcagaattgcatttagtgtttagaaaagaacctagcaagtttcttcttgcagaaattacttagtggcataatgattgctctttgtttacctaaacagtacwaatttttttttaactataacattgttttttgtaactaacatcacaatatgcatatgatctaaagataataattactacacaggcacacatctttggtttgggggtttgtatttctacttctcttacttttttccttgtcagacagtactctgagagtttagaaacctgatgatggcacagatgacatcagagaatataaaaagtcttag

SEQ ID NO: 19294 - DNA, 600 bp, Chicken  19866894228923_1
tccaggttgagagacttgtaagcaaattttctaattactttagccctcagctattcttactctaagctgtttaatggaagctgaggcccaaaaatgctgaaagcaaagcattagtggcacacctgagactacatcatctgtttttccccatttaaattccaaccttgttgttgccagaacacagcagcaattacagtgaataccgaacaggtgtaccgacataacgcatccctgccaaactcctttcctaatgttaaacagcactgtcctttttgtctctccagctactccccatcagcrgtatggaacacacatggcacagagttccattttcatgcaagcggcctttggccttttgtcaacgtaaatgcattgctaggacwcggctgtaggagccccgcgtgtgagttttagttatctgctggtgcttctgctcttctgtgccatcagtcgctgcgaagtggaacgatcagttcagcctccagcaatctggcttgccagatgcttcttctaagctgtatttctctccctttcccccagatgaggagaaagagcagcacttcagttggaagatgaatgaagctcttcagcagtctgtac

SEQ ID NO: 19295 - DNA, 574 bp, Chicken  19866894228923_2
aggcccaaaaatgctgaaagcaaagcattagtggcacacctgagactacatcatctgtttttccccatttaaattccaaccttgttgttgccagaacacagcagcaattacagtgaataccgaacaggtgtaccgacataacgcatccctgccaaactcctttcctaatgttaaacagcactgtcctttttgtctctccagctactccccatcagcrgtatggaacacacatggcacagagttccattttcatgcaagcggcctttggccttttgtcaacgtaaatgcattgctaggacwcggctgtaggagccccgcgtgtgagttttagttatctgctggtgcttctgctcttctgtgccatcagtcgctgcgaagtggaacgatcagttcagcctccagcaatctggcttgccagatgcttcttctaagctgtatttctctccctttcccccagatgaggagaaagagcagcacttcagttggaagatgaatgaagctcttcagcagtctgtacaatccattaattcttgaaggtgcaagggcagagaatagatattgtctcagaaaccat

SEQ ID NO: 19296 - DNA, 600 bp, Chicken  19866894228929_1
atgtccaaaagtcttcctggtaactacttctatagtaaaaatagatttaattgcaaccaatatattatgctagtttcgaccataacttctacagtttccaaagacatcaacacataccacagacatttataaataagagctatcttctcatctggttagttttatcaacagttactgctttctagccaagattcagtagcacagatagcttaactatttatatgctgcaaaactaaatattgaatgtctctcattgtttaacactcagttaattcaaagtctttcattttcaagtcactyggtatgaaatcaatttataagtgttttgtagaagagagcagtacagtgaacaactgactgcaagtgcaagattacccccttgtggttacacagagctcagctgtaccaaatatcaccacgtaccacatatattctaagatttaaactacagccagttaataaagccacagaaactaaacacgtaagcatttgtaaagttccaaaaacaagaccttcctgtaatttgccttcaacagcagtgaatgagccattacctccaatttgtgcggtgcatcatcaggtaaagggacaaaaatgaag

SEQ ID NO: 19297 - DNA, 600 bp, Chicken  19866894228930_1
ctctgcttctaccttctagcttttgcagaatttaatacaaaatttcccttctctcacgatatcttttgtaacctgttagtgaagattctgtggcttcagtagtagctcttcaggttgagctttatttaagctgaatatcaccaagccgttgcctcactgacagagaatgtgacattctgatcacttacaaatttgttttcttttgaagggaaaataggattaatttttccctagaacttgaaacttcccatgaagtttgcttcttacgggtgccttaaattaagaccagggagtagaacrtgccacttctactcagagttccatgaattactaaagcattggaatcacaggagcctttcacctagtttcagaacagataatgtgtttgtctaaatagcaaaatgaaattaactgtaaggggaaaatgtcagttgtgatctcttcacatatatttttaaaaaatgcagttatggaggcatgtttgttgttattcacatgacagttacttatgccataactagttcttacctctcagttgtcatctcaggtgtgacatcactraccaagtacattcaaagtacttaaatactttcatctcac

SEQ ID NO: 19298 - DNA, 551 bp, Chicken  19866894228930_2
tcttacgggtgccttaaattaagaccagggagtagaacrtgccacttctactcagagttccatgaattactaaagcattggaatcacaggagcctttcacctagtttcagaacagataatgtgtttgtctaaatagcaaaatgaaattaactgtaaggggaaaatgtcagttgtgatctcttcacatatatttttaaaaaatgcagttatggaggcatgtttgttgttattcacatgacagttacttatgccataactagttcttacctctcagttgtcatctcaggtgtgacatcactraccaagtacattcaaagtacttaaatactttcatctcactgtgcagtcagcaagtgatttctgaaattggcagtgttttgattacaactttggctttctaatcaaatgagtcttctgactcagtactgacagtaggttcgaagtttactcatttatgtctgtccttagtagtaattttttaagatttaaaactggtatgccacctgtaggatgttcataattcctgatagcctgaatttccctgattctta

SEQ ID NO: 19299 - DNA, 600 bp, Chicken  19866894228932_1
caaaaacaaatgaaaaaaacccatgattttctgtttagcaaagctgctcttcctctgtcatcagaactgtgatcgctttgttaccatatcattacttctaccagaagaagacagcagcatgtgagattttgctatcttcatctcttttaatctgttggcattaatgtctgccaagtttatttagggtagaggcagagctgtgaaacgctaagcaggtagcacttatttttgcttttatccataggcattttcataataaacatgagtgctaacgtgaggtctttctctcctgctctcttsagggtttcaattgttttttgttcatgtaagatgtattaacatttaaagagaatttaacccttctgagaggaaaacatccatctttgcgccttctaaataacctttattttgtatttaactggttctacttgtgtgaaaaaatcgggttggattttattaaatgtttaaccttgcatctagaatatggtgtgggagtgctctaaagttcacctctcacctctccctgttggtttcctgaacgtctggttttggttcctgtctgggacttgctacaactgcctcctggtccaggagttcaga

SEQ ID NO: 19300 - DNA, 600 bp, Chicken  19866894228933_1
gcgtgtgccttcaggccctgcgctgtcagatggggtgggcagagggctgaaatactgacagcagaaagttcagctctgccctgcagggagaagagctgcgaaggcgaagggaggaatggttgcaaggtatttctgtccctggctggctggcagctggggctggaaacagcgatgctgcgcccttcactgctaagagagatggaggaatgtatttcctgatataatgttggtataatgtagtgatctaagaacggcttaacaagactgttgtagccatgtggttatttatggcatagaggrcagggttaaacacacacacatagtgtgtgtttatatgtatatgctgagtcctgaggctcagagcgtgctcacttgtgccccagctgttgaagcagggctctgctatcatttctttcaatccccactttgagacagatttaaggccattaatctgttttagccagtgttacctgttgtgttgtgcattgtcttcctgtgcagggccttgtgagcaaggccaggctgaagaagggagctgagggaagaaggtggaggaggggtgagcaggatgtatctctctccctatgcacactacagtca

SEQ ID NO: 19301 - DNA, 600 bp, Chicken  19866894228936_1
atgctttgtaccccttacttgtttcactccttggtcatttttttaagggagacagaacaaaatctaaagagcagaagaaatattgtgctgtcgcattcagtcttcccacacataaaataaccttgagtatctctcctactttctttttaatggtttctctatctaacgagaacgtctcatctgaatgactgaggtacagcagggtgttattctttctcagagctttccctgaaagcattttcctatgtgtcatactgacagtgagatcagaaaattactgtactgattgcagagatgcaytgtaaggtacaaatcctgttcccattgagttcactgccaaaatttccattgtcgtcttagagcaagaagagatcctaaactaatgaaacacattttgctgattttggtcactaaattgacatctctaggatggaaccttattcagtgtacagcctaattccactctgtggatcagacagtggcactggcattctggcaaaaaaaaatacataaagtttatttatgttctttctttcactgctgctttggatgtactcagtaaacttcatctgcctacggctcctcccccacttaatgagg

SEQ ID NO: 19302 - DNA, 562 bp, Chicken  19866894228943_1
tgaactttcaagctttgtaatgcaataaatgctgagcaaagctaaatgctacctgcctgtcttcctctgtctctacttcatgcagccatgctcaaggacaaggccctgctgaaacacaattctggcactgttgcacagggccagatgtgacccaagggccaacccagtgcagtacttcacttgggcaagcagcttagtcacccagtacagctcttctttgtcccatacagggtcaaataccagaccactacttccctaagcagatgtgaagcagacttttgaggcatctttttagaagayctgtaatatttaatttctggccacrgtcsctgtagccatggcccttatgctactgttatggaacagacccacatctatgctgctcagcttgtttgcccttcaaaatgggctggcttcaccagagctgtttaatatcatcatccctaagccccaaaagcacaaagatgcattcagaaaaggggaggaaaacactgggatggacagaaaaactactcctggggacagtcctaatacagtacagcatattcagcacattcaacca

SEQ ID NO: 19303 - DNA, 537 bp, Chicken  19866894228943_2
taaatgctgagcaaagctaaatgctacctgcctgtcttcctctgtctctacttcatgcagccatgctcaaggacaaggccctgctgaaacacaattctggcactgttgcacagggccagatgtgacccaagggccaacccagtgcagtacttcacttgggcaagcagcttagtcacccagtacagctcttctttgtcccatacagggtcaaataccagaccactacttccctaagcagatgtgaagcagacttttgaggcatctttttagaagayctgtaatatttaatttctggccacrgtcsctgtagccatggcccttatgctactgttatggaacagacccacatctatgctgctcagcttgtttgcccttcaaaatgggctggcttcaccagagctgtttaatatcatcatccctaagccccaaaagcacaaagatgcattcagaaaaggggaggaaaacactgggatggacagaaaaactactcctggggacagtcctaatacagtacagcatattcagcacattcaacca

SEQ ID NO: 19304 - DNA, 533 bp, Chicken  19866894228943_3
tgctgagcaaagctaaatgctacctgcctgtcttcctctgtctctacttcatgcagccatgctcaaggacaaggccctgctgaaacacaattctggcactgttgcacagggccagatgtgacccaagggccaacccagtgcagtacttcacttgggcaagcagcttagtcacccagtacagctcttctttgtcccatacagggtcaaataccagaccactacttccctaagcagatgtgaagcagacttttgaggcatctttttagaagayctgtaatatttaatttctggccacrgtcsctgtagccatggcccttatgctactgttatggaacagacccacatctatgctgctcagcttgtttgcccttcaaaatgggctggcttcaccagagctgtttaatatcatcatccctaagccccaaaagcacaaagatgcattcagaaaaggggaggaaaacactgggatggacagaaaaactactcctggggacagtcctaatacagtacagcatattcagcacattcaacca

SEQ ID NO: 19305 - DNA, 600 bp, Chicken  19866894228950_1
gggctcctatcactcaaatacagcgctggtaagtgaattaaaacactatttcccaggaaactatagagagaaaattatcacatgtgctgaaaatctttagacaaggcctgaataagtgagaattcttattttctatggatttccaaggtataaagtcctactgtacttgcagcccagaaagccaactgtatcctggtccacatcaaacaagagggggccagcagggcaatggaagggactgtcctcctctactctgctcttgtgaggcccacctgcagtggtcaaggccacactggatgrggtcctgggcagcccaatccagtgattggcaaacctacccatggcaggccaatggaactggatgcactttatggccctttccaattcaagccactctatcattctgtgctactttggcaagttcctgatctcaaasggcragtcttgaaacattgtcccagacctgttttccgaaaactgccagaagctgatcctaagaaatactgtattactgtataaatctgagatgaaaagataaaaactgagcccgtgaycgaacagcttcatgtggacttgaacatcctttgacttcttgcatcc

SEQ ID NO: 19306 - DNA, 600 bp, Chicken  19866894228950_2
ggatttccaaggtataaagtcctactgtacttgcagcccagaaagccaactgtatcctggtccacatcaaacaagagggggccagcagggcaatggaagggactgtcctcctctactctgctcttgtgaggcccacctgcagtggtcaaggccacactggatgrggtcctgggcagcccaatccagtgattggcaaacctacccatggcaggccaatggaactggatgcactttatggccctttccaattcaagccactctatcattctgtgctactttggcaagttcctgatctcaaasggcragtcttgaaacattgtcccagacctgttttccgaaaactgccagaagctgatcctaagaaatactgtattactgtataaatctgagatgaaaagataaaaactgagcccgtgaycgaacagcttcatgtggacttgaacatcctttgacttcttgcatccctcttttgacaatgttcctcagataaaagagattgctccttttggtcatatgtacatacaatgctctcaggccacagaggagcaattacatcagaagttttagctgctcttgatgagagatggaagacagcgtaat

SEQ ID NO: 19307 - DNA, 600 bp, Chicken  19866894228950_3
ttccaaggtataaagtcctactgtacttgcagcccagaaagccaactgtatcctggtccacatcaaacaagagggggccagcagggcaatggaagggactgtcctcctctactctgctcttgtgaggcccacctgcagtggtcaaggccacactggatgrggtcctgggcagcccaatccagtgattggcaaacctacccatggcaggccaatggaactggatgcactttatggccctttccaattcaagccactctatcattctgtgctactttggcaagttcctgatctcaaasggcragtcttgaaacattgtcccagacctgttttccgaaaactgccagaagctgatcctaagaaatactgtattactgtataaatctgagatgaaaagataaaaactgagcccgtgaycgaacagcttcatgtggacttgaacatcctttgacttcttgcatccctcttttgacaatgttcctcagataaaagagattgctccttttggtcatatgtacatacaatgctctcaggccacagaggagcaattacatcagaagttttagctgctcttgatgagagatggaagacagcgtaatccca

SEQ ID NO: 19308 - DNA, 600 bp, Chicken  19866894228950_4
tgctcttgtgaggcccacctgcagtggtcaaggccacactggatgrggtcctgggcagcccaatccagtgattggcaaacctacccatggcaggccaatggaactggatgcactttatggccctttccaattcaagccactctatcattctgtgctactttggcaagttcctgatctcaaasggcragtcttgaaacattgtcccagacctgttttccgaaaactgccagaagctgatcctaagaaatactgtattactgtataaatctgagatgaaaagataaaaactgagcccgtgaycgaacagcttcatgtggacttgaacatcctttgacttcttgcatccctcttttgacaatgttcctcagataaaagagattgctccttttggtcatatgtacatacaatgctctcaggccacagaggagcaattacatcagaagttttagctgctcttgatgagagatggaagacagcgtaatcccatggatatggatgtcaggcrtacagtccactcacctagaacaaaacaatatgtgcatatatatatacaccaggagtcatcatacaactttgcatgaggagtgccataagtgtaca

SEQ ID NO: 19309 - DNA, 600 bp, Chicken  19866894228950_5
agacctgttttccgaaaactgccagaagctgatcctaagaaatactgtattactgtataaatctgagatgaaaagataaaaactgagcccgtgaycgaacagcttcatgtggacttgaacatcctttgacttcttgcatccctcttttgacaatgttcctcagataaaagagattgctccttttggtcatatgtacatacaatgctctcaggccacagaggagcaattacatcagaagttttagctgctcttgatgagagatggaagacagcgtaatcccatggatatggatgtcaggcrtacagtccactcacctagaacaaaacaatatgtgcatatatatatacaccaggagtcatcatacaactttgcatgaggagtgccataagtgtacaactaatctctacacccttcttagtccttaaacttttctggaacagtcttcactctatcatcatatttggagatttacaagctgatatcttccctctgcaatcctaaacattcacctgtaaactgcagctttacaaattcatttcaagacacagaaaggagggcagcaggagcaaaagcagtagctgggaagctgctgaagactac

SEQ ID NO: 19310 - DNA, 600 bp, Chicken  19866894228954_1
aaaagaaccttctgcctgctaggaggggcgaggagaacagaggctgcagcagcactgtgccccatggaggaggtatcccatccaaccaaccccactgcacattcatcctctcttaggaagaaagctgatatttcctttttccctcccttttttcttcatcaccacatttttctccttttctttccccagcatggaaataaaaccatctcagccatgcaccagcagtgcagatcagagtgttttacttcttgcaccaaggatcatttcaaaccactaattgctcagacaccctcgggaacrgctgggctgcacrgcccccaggtcctctcagwaacaagatttgcacaaggtgatacagctccatttctgctccrtagtagcactttcstgcttggaggcaaacgagctgctccccatttcccactcctctccaccatttgcaacakgctgacagtccagcatagaatcttagaataactgaggttggaaaaaaccactgaggtcatcttgtccagccatcagcccaccatcagcatgagcagtttgttggttgaaaaagcctgagtgcagcaaataagctggattttagatgacacaagc

SEQ ID NO: 19311 - DNA, 600 bp, Chicken  19866894228954_2
gcctgctaggaggggcgaggagaacagaggctgcagcagcactgtgccccatggaggaggtatcccatccaaccaaccccactgcacattcatcctctcttaggaagaaagctgatatttcctttttccctcccttttttcttcatcaccacatttttctccttttctttccccagcatggaaataaaaccatctcagccatgcaccagcagtgcagatcagagtgttttacttcttgcaccaaggatcatttcaaaccactaattgctcagacaccctcgggaacrgctgggctgcacrgcccccaggtcctctcagwaacaagatttgcacaaggtgatacagctccatttctgctccrtagtagcactttcstgcttggaggcaaacgagctgctccccatttcccactcctctccaccatttgcaacakgctgacagtccagcatagaatcttagaataactgaggttggaaaaaaccactgaggtcatcttgtccagccatcagcccaccatcagcatgagcagtttgttggttgaaaaagcctgagtgcagcaaataagctggattttagatgacacaagccttcgggcactag

SEQ ID NO: 19312 - DNA, 600 bp, Chicken  19866894228954_3
gagaacagaggctgcagcagcactgtgccccatggaggaggtatcccatccaaccaaccccactgcacattcatcctctcttaggaagaaagctgatatttcctttttccctcccttttttcttcatcaccacatttttctccttttctttccccagcatggaaataaaaccatctcagccatgcaccagcagtgcagatcagagtgttttacttcttgcaccaaggatcatttcaaaccactaattgctcagacaccctcgggaacrgctgggctgcacrgcccccaggtcctctcagwaacaagatttgcacaaggtgatacagctccatttctgctccrtagtagcactttcstgcttggaggcaaacgagctgctccccatttcccactcctctccaccatttgcaacakgctgacagtccagcatagaatcttagaataactgaggttggaaaaaaccactgaggtcatcttgtccagccatcagcccaccatcagcatgagcagtttgttggttgaaaaagcctgagtgcagcaaataagctggattttagatgacacaagccttcgggcactaggaggaaacacatacataca

SEQ ID NO: 19313 - DNA, 600 bp, Chicken  19866894228954_4
atcccatccaaccaaccccactgcacattcatcctctcttaggaagaaagctgatatttcctttttccctcccttttttcttcatcaccacatttttctccttttctttccccagcatggaaataaaaccatctcagccatgcaccagcagtgcagatcagagtgttttacttcttgcaccaaggatcatttcaaaccactaattgctcagacaccctcgggaacrgctgggctgcacrgcccccaggtcctctcagwaacaagatttgcacaaggtgatacagctccatttctgctccrtagtagcactttcstgcttggaggcaaacgagctgctccccatttcccactcctctccaccatttgcaacakgctgacagtccagcatagaatcttagaataactgaggttggaaaaaaccactgaggtcatcttgtccagccatcagcccaccatcagcatgagcagtttgttggttgaaaaagcctgagtgcagcaaataagctggattttagatgacacaagccttcgggcactaggaggaaacacatacatacattcagctttctcatcttttcatgttattttaaatgaatacca

SEQ ID NO: 19314 - DNA, 600 bp, Chicken  19866894228954_5
accccactgcacattcatcctctcttaggaagaaagctgatatttcctttttccctcccttttttcttcatcaccacatttttctccttttctttccccagcatggaaataaaaccatctcagccatgcaccagcagtgcagatcagagtgttttacttcttgcaccaaggatcatttcaaaccactaattgctcagacaccctcgggaacrgctgggctgcacrgcccccaggtcctctcagwaacaagatttgcacaaggtgatacagctccatttctgctccrtagtagcactttcstgcttggaggcaaacgagctgctccccatttcccactcctctccaccatttgcaacakgctgacagtccagcatagaatcttagaataactgaggttggaaaaaaccactgaggtcatcttgtccagccatcagcccaccatcagcatgagcagtttgttggttgaaaaagcctgagtgcagcaaataagctggattttagatgacacaagccttcgggcactaggaggaaacacatacatacattcagctttctcatcttttcatgttattttaaatgaataccaatacacgtgttgaa

SEQ ID NO: 19315 - DNA, 600 bp, Chicken  19866894228954_6
cttttttcttcatcaccacatttttctccttttctttccccagcatggaaataaaaccatctcagccatgcaccagcagtgcagatcagagtgttttacttcttgcaccaaggatcatttcaaaccactaattgctcagacaccctcgggaacrgctgggctgcacrgcccccaggtcctctcagwaacaagatttgcacaaggtgatacagctccatttctgctccrtagtagcactttcstgcttggaggcaaacgagctgctccccatttcccactcctctccaccatttgcaacakgctgacagtccagcatagaatcttagaataactgaggttggaaaaaaccactgaggtcatcttgtccagccatcagcccaccatcagcatgagcagtttgttggttgaaaaagcctgagtgcagcaaataagctggattttagatgacacaagccttcgggcactaggaggaaacacatacatacattcagctttctcatcttttcatgttattttaaatgaataccaatacacgtgttgaaaggcaagtagagaaaaaaggatgcaaactgcaggaagaatttggtacaggattcatga

SEQ ID NO: 19316 - DNA, 600 bp, Chicken  19866894228958_1
ggttgccttcccagaatcaatatttcatagccagaggatgaaaagcttgcaacagattaaagccttccatgttatatgttgctacagcatttggaaaagaaattaaatctatttaataacttccaataacagccagcaagacaaatcagatacaatcactgaaggacattttgtaactgaacttaaggatcatgtacacaggaggcattccaatactcataacaaattatgtttgctatgtacaatatggtactaatttggttttgattcgctcttcaaaatgatgaacatctttcacaycaaacattgcaagtattttcacttctgcctttcctgcaaactgatgcttattttttgaacttatttaatgctactccttcaatggctgaagatcacaacagagcaacagccattctccttccaaattccctatggaagaatagaaacctgtgcagctggctcagtttaaagcagaggtaaacaccattttcttgaacaatttcattagctaacttgttattgtttgaacaacagaaatgtttgcttttgttgtaaatagctactctgtgatggatgagttagcataaccagctggccaac

SEQ ID NO: 19317 - DNA, 600 bp, Chicken  19866894228960_1
ttaattatttgcttcagctgcttcctcctcagttcttctgtgagcaaatagcaagacttgctcaagctgtagtgcagcagcactgacctgcgagccgctgtagttgggtgcattgagaacgcagcagtgcagagctcacagctctgtgcagtcctgctggaagtagtgtgcaccttccctcagactccctgtgtgtggtaggtgctcatctgtttccttataaaacatggtacgtatctgcagcgttctacagacaccatggaaaatggctctggtggttctttctgtagaaattgctgygtgtaactttctttatagctggcatttgctgtggtggccttgcctgcattacctcctcaggctgaaacagatgtgactgcagaagagatgagcaaagaaacaggaagagaaawgcaagatacctaatattcagaaggcttgagctgttaggctgaagaaatatgtggaagcttagatttggagagagaacacaggtctgagggaagtttagctccagagatcccagaaggggttatgtgctgggatttgagcagctgcccctaactgctgctgcagaaaaatagcaaaacaaaaagcacg

SEQ ID NO: 19318 - DNA, 600 bp, Chicken  19866894228960_2
tgagaacgcagcagtgcagagctcacagctctgtgcagtcctgctggaagtagtgtgcaccttccctcagactccctgtgtgtggtaggtgctcatctgtttccttataaaacatggtacgtatctgcagcgttctacagacaccatggaaaatggctctggtggttctttctgtagaaattgctgygtgtaactttctttatagctggcatttgctgtggtggccttgcctgcattacctcctcaggctgaaacagatgtgactgcagaagagatgagcaaagaaacaggaagagaaawgcaagatacctaatattcagaaggcttgagctgttaggctgaagaaatatgtggaagcttagatttggagagagaacacaggtctgagggaagtttagctccagagatcccagaaggggttatgtgctgggatttgagcagctgcccctaactgctgctgcagaaaaatagcaaaacaaaaagcacgaatacaaagatttgtacaccgtggtatttctttactctagacttytaggaaagcaaaagtggttctccattctttccatcttagaaagtgaaaatacaggtacaagtcctttg

SEQ ID NO: 19319 - DNA, 599 bp, Chicken  19866894228960_3
gcattacctcctcaggctgaaacagatgtgactgcagaagagatgagcaaagaaacaggaagagaaawgcaagatacctaatattcagaaggcttgagctgttaggctgaagaaatatgtggaagcttagatttggagagagaacacaggtctgagggaagtttagctccagagatcccagaaggggttatgtgctgggatttgagcagctgcccctaactgctgctgcagaaaaatagcaaaacaaaaagcacgaatacaaagatttgtacaccgtggtatttctttactctagacttytaggaaagcaaaagtggttctccattctttccatcttagaaagtgaaaatacaggtacaagtcctttgcctcacattatgctttcagttctctttatttcaactgtctctataggtttggaattgcttccataaagtttattagtctaatcctacaggtatttggctgagatatactgagtgttttagcagatagtttatagttggatgctttttctaaagctaattctgcagttcatggaaaatgtttcagagggctttttcttttttcagtctttcctaaacaagccataatttata

SEQ ID NO: 19320 - DNA, 565 bp, Chicken  19866894228965_1
ataatgtttaactgaaaagatccaagactgtgagggtctaaactgcctcaagttgtgtatgctaccatatggaagaaattatgcagctagaactgctccattaaacgcccatgtctttgcttgtcaaacattaatacagtatgaaaaatgtgtaaagagaagtatactatgtattccaaaactttttaaagtaattgttaaattcaattgaaattgaatctcttagtgtcttctgtgctactgttacttgtatcattatagttctacagtacttacttttatattatattacagtattayattaaaaccagatgtggaattagttttatttgccccccaaaaaagaaaaagaaacaatttttttttagaatgttcatattggatgatcatatttagaatacttacaaaatacatttatgttaaatagctgatgtgtttatcagcaatcaccgtttttacctgtacttgtgattttggatgtagtaatgtgatatgttgggtgaccagtagtaagtaaattacactgaacgggatgccatcataacgggaaaaggcttcaagctta

SEQ ID NO: 19321 - DNA, 599 bp, Chicken  19866894228967_1
  misc_feature (1)..(10): n is any nucleotide
nnnnnnnnnnttgtatggtatttactttgtggcagatcttattacacataatcctcagaccacctcaccctctctagtccccagctgaaaaccctttctacatggatagccttacacaaggcagactgctttttcttttgccatgctcaggaagcaacactatggctagagggatgttttgttcactgttggggaggaaaaaaaaagagaaagttacagaaagccaaacaagtagagcttagagaagccagtcctgccctgtttcagctttttccaccaagagcagatgaataagcaaayaagaaacatgaacwctctcttctttgccaatatcaacagcagactgcgacttactgagcagaaactaagccatgcttattccttaacacagcagcaatctagtcataagtacttatgggcagccacagtaagacagaaattacgcattattttacaagtgactgtgttagtactgctcctactgtgctcactgcacatgaaactatcttcatttcaccaagtctgcagagyacagccaggaaacttcaacttcaggaaagtaagactaacttcaagtatactctgcataaatacctttc

SEQ ID NO: 19322 - DNA, 600 bp, Chicken  19866894228967_2
atggtatttactttgtggcagatcttattacacataatcctcagaccacctcaccctctctagtccccagctgaaaaccctttctacatggatagccttacacaaggcagactgctttttcttttgccatgctcaggaagcaacactatggctagagggatgttttgttcactgttggggaggaaaaaaaaagagaaagttacagaaagccaaacaagtagagcttagagaagccagtcctgccctgtttcagctttttccaccaagagcagatgaataagcaaayaagaaacatgaacwctctcttctttgccaatatcaacagcagactgcgacttactgagcagaaactaagccatgcttattccttaacacagcagcaatctagtcataagtacttatgggcagccacagtaagacagaaattacgcattattttacaagtgactgtgttagtactgctcctactgtgctcactgcacatgaaactatcttcatttcaccaagtctgcagagyacagccaggaaacttcaacttcaggaaagtaagactaacttcaagtatactctgcataaatacctttctcagcttgttactgc

SEQ ID NO: 19323 - DNA, 600 bp, Chicken  19866894228967_3
gtagagcttagagaagccagtcctgccctgtttcagctttttccaccaagagcagatgaataagcaaayaagaaacatgaacwctctcttctttgccaatatcaacagcagactgcgacttactgagcagaaactaagccatgcttattccttaacacagcagcaatctagtcataagtacttatgggcagccacagtaagacagaaattacgcattattttacaagtgactgtgttagtactgctcctactgtgctcactgcacatgaaactatcttcatttcaccaagtctgcagagyacagccaggaaacttcaacttcaggaaagtaagactaacttcaagtatactctgcataaatacctttctcagcttgttactgcttttcagcttcagtcactgcaagcttgaatagaataacataaattgcagaccaggcatttaatcttgaaaatattgtagccattcatggcctgctgaattatagaccatatgacttatagtatgccaaccagctctggtccctctaagagaaccagataccagcagggcatagatcatcttgacaagtctctattttcctttctactcctgctaccg

SEQ ID NO: 19324 - DNA, 600 bp, Chicken  19866894228969_1
ggtagcaataactttacactgtttcagttacataatgcctttgaaattttggtaaagtgattactgagaacaaaaagcaggctggcttcagcagctgttttgggaagaactggcgttggagagaagtgtcatttcctcctgagagaggttcccacccattccccaggatccatgctggccagagcattggccacccgtgctctccccagcaccagcatcctgcaccacttgtgttcatctcttgcccacgggctgaacgtggagcagctgagagcttcgagagctgagaccctcagccarcttcccacagtgcctcctgcygtgggcctccaaaatggattgcactcgagtttcttacagcttttctggctgaaggtgacttaggggtgtatgttaattatcctgcatttagtaatccttaacaycaagaacgtcttaatcaccgaacaagtttattctgtaccctgaaaagggctgttgaggctgtacccatagtttcagagagctctattaggattttactcctgggtgtggcggcagtgagagagcagagaaaggcaaacaggtctgttgccttatgagcatcctgagtttaatctt

SEQ ID NO: 19325 - DNA, 600 bp, Chicken  19866894228969_2
tttcagttacataatgcctttgaaattttggtaaagtgattactgagaacaaaaagcaggctggcttcagcagctgttttgggaagaactggcgttggagagaagtgtcatttcctcctgagagaggttcccacccattccccaggatccatgctggccagagcattggccacccgtgctctccccagcaccagcatcctgcaccacttgtgttcatctcttgcccacgggctgaacgtggagcagctgagagcttcgagagctgagaccctcagccarcttcccacagtgcctcctgcygtgggcctccaaaatggattgcactcgagtttcttacagcttttctggctgaaggtgacttaggggtgtatgttaattatcctgcatttagtaatccttaacaycaagaacgtcttaatcaccgaacaagtttattctgtaccctgaaaagggctgttgaggctgtacccatagtttcagagagctctattaggattttactcctgggtgtggcggcagtgagagagcagagaaaggcaaacaggtctgttgccttatgagcatcctgagtttaatcttaagttgcagctgaaactggaa

SEQ ID NO: 19326 - DNA, 600 bp, Chicken  19866894228969_3
gtgtcatttcctcctgagagaggttcccacccattccccaggatccatgctggccagagcattggccacccgtgctctccccagcaccagcatcctgcaccacttgtgttcatctcttgcccacgggctgaacgtggagcagctgagagcttcgagagctgagaccctcagccarcttcccacagtgcctcctgcygtgggcctccaaaatggattgcactcgagtttcttacagcttttctggctgaaggtgacttaggggtgtatgttaattatcctgcatttagtaatccttaacaycaagaacgtcttaatcaccgaacaagtttattctgtaccctgaaaagggctgttgaggctgtacccatagtttcagagagctctattaggattttactcctgggtgtggcggcagtgagagagcagagaaaggcaaacaggtctgttgccttatgagcatcctgagtttaatcttaagttgcagctgaaactggaaggcgttggctgaacgcggctccagtgaacctgaggtggatgcctccagcccataggtgttggttctgaaacttctctgcttgtagtttctaaaccccttgaacw

SEQ ID NO: 19327 - DNA, 600 bp, Chicken  19866894228969_4
caagaacgtcttaatcaccgaacaagtttattctgtaccctgaaaagggctgttgaggctgtacccatagtttcagagagctctattaggattttactcctgggtgtggcggcagtgagagagcagagaaaggcaaacaggtctgttgccttatgagcatcctgagtttaatcttaagttgcagctgaaactggaaggcgttggctgaacgcggctccagtgaacctgaggtggatgcctccagcccataggtgttggttctgaaacttctctgcttgtagtttctaaaccccttgaacwctttgaaagttctctgctgaataaatagggatgtggaatgttcttgtgacatgatctgccatgggaaattcatctgaaaaataactaagaaggcactgtggcgtggtatcttgagagctgtaccatgcggtaggttcccaattccagaaatgtgtttcttcttaaagccaatctttgcacaaaattgagagaaaaatgaagtcgaaattcacaatgtgacccaagctaaacaaacaatacgtgttccttctttcccccctttctcttagttttatgccattgttagaatcagccttatta

SEQ ID NO: 19328 - DNA, 600 bp, Chicken  19866894228979_1
tatgtcaaaattctgctgcttcttcaattccccctatttgaatatgatgaaggtcagaaatgttacatgatgcacaaatctgctagtagtttggtgtttaagccatattgaactactggagcagtctgcaaacaaattaatggacacgttgaccaggtttgggtccttggtattgtccactattgcaatgagttgctttccgagtccagcaaacactggtctactgtttaaagcatgagagagggatccagaaagtacccgagtgctaatcctggatctgtcactgatttgatgtgttgrgaaagtcacttaatctcattgcctcagcttcctcatctgtaaaatagggacagtaatacttacttatctgccttcctcaccgatctgctctgtgccacaattaatattcatgcagcattttaaaaataaataaataaataactgtaaagcattacagaagtgctaagtcattcaatttaggaatgtgtagagtacatgcaatgtaaagagataataggaaaccacagattggtaaaaatcaacatttagactttttctaaacaacatcaaattatactactcccttgaaatacagtgcac

SEQ ID NO: 19329 - DNA, 600 bp, Chicken  19866894228981_1
ctaatgaaaaataacatttctatctgtgaaattaatacatatatctccagtatcagatttgctttagaaggactgaatacggagagcagctgtagtgaacaaggcacctgctaatgctccaacaacatgaggtgagcattagctctcattaattcgtgttcttggtgctattcggcatcatggctaacctgatgtgatgtaacgggatgtggcatgccagaatgcatcacaacgtgtgcagcatcataaaagcaaacgagctctaaacaactaagcttccttgcagcccctggcacagtycagcattcgtgatcagatgccgtcttacctttattatcaaagtgttacaccttgtgttgctggttcagtgagtattttctctcatctgttttctaaaccaacaaaagcaggtcaatgcatcttcatttaaaaacaaaagcacagaatgctgcttacagctttgccttactggggtcttctattttctctccctccttgtgtttttatctgaaataccgctaacctactctaagggaggaccaaggaaatyaggaaacggatgctgttattttagcaactctcttgacaaaaaaaatatct

SEQ ID NO: 19330 - DNA, 600 bp, Chicken  19866894228981_2
agcaaacgagctctaaacaactaagcttccttgcagcccctggcacagtycagcattcgtgatcagatgccgtcttacctttattatcaaagtgttacaccttgtgttgctggttcagtgagtattttctctcatctgttttctaaaccaacaaaagcaggtcaatgcatcttcatttaaaaacaaaagcacagaatgctgcttacagctttgccttactggggtcttctattttctctccctccttgtgtttttatctgaaataccgctaacctactctaagggaggaccaaggaaatyaggaaacggatgctgttattttagcaactctcttgacaaaaaaaatatctggcatgtaaaggaacccataacactagaacagaagcaagcacaacagcagagctgtggcactgcatgctccatctaacaaggtgttgagcaccaaagcccaggggactcatggaactctcgctgtgaagattagacacgagcactcgcacaggacacagcaggaatatgaagggacatgaagtaagcaatcccagcagacagcctgttgagatgtcagtcaggcactctgcctccaccacctttcacaga

SEQ ID NO: 19331 - DNA, 600 bp, Chicken  19866894228982_1
actggatgtgcaatggctgcaggtgggcaatccaaagcaacagagtccctgggaaaaggagcacttccctctaagcagtgcttccacctgaagccttgcagccacccttatgtgtctctgacagaaggtggcagctccagagcacgctgcatgcagaacagtctcagtcactcttcactgcccaactattctgatcatcctctttgattttcttgctaactgcatccataactcttgctctggtaaaaacccactaattaatgcacagccatgttgtagagtggagctacggttccaacrtgcctaatcctaaaagaggcattcgttcaaaaaaggtcctcttccctgggaartgtgctttgatttgcaaaacagaaaatgtattcatttaatggagctattcatgtgacaggtcactatttcaccctttttgtgtagtaaaaatttatttttttaataggtttactgctttttggttattcacctccgaaggactgacttgagtgctgcagctctgatctggagtgcagaaaattaattctttttatggtagtctattcctttcacaagtcctcattttaagtgcagctcaactgtatt

SEQ ID NO: 19332 - DNA, 600 bp, Chicken  19866894228982_2
aaaaggagcacttccctctaagcagtgcttccacctgaagccttgcagccacccttatgtgtctctgacagaaggtggcagctccagagcacgctgcatgcagaacagtctcagtcactcttcactgcccaactattctgatcatcctctttgattttcttgctaactgcatccataactcttgctctggtaaaaacccactaattaatgcacagccatgttgtagagtggagctacggttccaacrtgcctaatcctaaaagaggcattcgttcaaaaaaggtcctcttccctgggaartgtgctttgatttgcaaaacagaaaatgtattcatttaatggagctattcatgtgacaggtcactatttcaccctttttgtgtagtaaaaatttatttttttaataggtttactgctttttggttattcacctccgaaggactgacttgagtgctgcagctctgatctggagtgcagaaaattaattctttttatggtagtctattcctttcacaagtcctcattttaagtgcagctcaactgtattgcaaataacagtatgtggtcctagagggagtagcaaggctctaatttaatcgt

SEQ ID NO: 19333 - DNA, 600 bp, Chicken  19866894228982_3
agctctgatctggagtgcagaaaattaattctttttatggtagtctattcctttcacaagtcctcattttaagtgcagctcaactgtattgcaaataacagtatgtggtcctagagggagtagcaaggctctaatttaatcgtgtactggaggccttagaatgtcagcacagcggagtgcagctcttctctttgagccctctgtgcctcagtgggagttgaggggatggcggtgaggtaccagggataagggaagcagtgttctcccaaatggtggcccactgttggctctccccttgasggaaggcctccccttcaaggtgactttaataatgggagccattatcatctcttatatcacggggaaagtgagaagttattggcaactgtgtggccctggttacgtgagaaacaggcagccaccatctgtgaaattaagtacattccctcaaaaaattaatttaattagccctgattccataagtaatacaactagagctccccggtgcctcccaggagaagcccgttctgagtcgagtgtaccgggagaccgcctttggaagtgagtcaattattggtttaattcagtcattaatttaat

SEQ ID NO: 19334 - DNA, 600 bp, Chicken  19866894228987_1
gcagaagcactgagttgagacagaaagtttgtagtaactataggttctgctgaactgagggcccccagatgaaacacactgtacaacatttatctccattacctgtcatgggaaggatctttgctctacatacacatacatactcattaaaatttgaatatggggcttgcaagattcattgccccccaaaatctctgggcaacccattgctccagcactgacttttgacagggcaaagtatctatagctgctcctggagctatgggaggtggccttcagccatcagctgaagactctgawggacttcatgggataaggaaaactttgaattttcttctccargctaccgagtctccacctactctcaacacataaacttcagtttgcatcgctcctttgacatagggggggaaaaatagcacggtggaagaggctttcactctaggtaagaagttcagagcaccagaatgtaygtggacaataaaggagatggtatttaaccacgctagaagtgatgattaaattaatccagcattctccttttctcagctctttgagggatttatatcaagaaagtaacaaaggaatgccacagcctgc

SEQ ID NO: 19335 - DNA, 600 bp, Chicken  19866894228987_2
ggttctgctgaactgagggcccccagatgaaacacactgtacaacatttatctccattacctgtcatgggaaggatctttgctctacatacacatacatactcattaaaatttgaatatggggcttgcaagattcattgccccccaaaatctctgggcaacccattgctccagcactgacttttgacagggcaaagtatctatagctgctcctggagctatgggaggtggccttcagccatcagctgaagactctgawggacttcatgggataaggaaaactttgaattttcttctccargctaccgagtctccacctactctcaacacataaacttcagtttgcatcgctcctttgacatagggggggaaaaatagcacggtggaagaggctttcactctaggtaagaagttcagagcaccagaatgtaygtggacaataaaggagatggtatttaaccacgctagaagtgatgattaaattaatccagcattctccttttctcagctctttgagggatttatatcaagaaagtaacaaaggaatgccacagcctgccaataatgtaattaaggagccaagcctcatctgagctttctc

SEQ ID NO: 19336 - DNA, 600 bp, Chicken  19866894228987_3
attcattgccccccaaaatctctgggcaacccattgctccagcactgacttttgacagggcaaagtatctatagctgctcctggagctatgggaggtggccttcagccatcagctgaagactctgawggacttcatgggataaggaaaactttgaattttcttctccargctaccgagtctccacctactctcaacacataaacttcagtttgcatcgctcctttgacatagggggggaaaaatagcacggtggaagaggctttcactctaggtaagaagttcagagcaccagaatgtaygtggacaataaaggagatggtatttaaccacgctagaagtgatgattaaattaatccagcattctccttttctcagctctttgagggatttatatcaagaaagtaacaaaggaatgccacagcctgccaataatgtaattaaggagccaagcctcatctgagctttctcatgccaaagaacttgttggatgtaagttgggggaaaaaaagttcaagtcttcagagaaaagatggagagatataatgaaaaagttattggatttttaactctttgcttccttcaatctcctwaacactctc

SEQ ID NO: 19337 - DNA, 600 bp, Chicken  19866894228987_4
agaatgtaygtggacaataaaggagatggtatttaaccacgctagaagtgatgattaaattaatccagcattctccttttctcagctctttgagggatttatatcaagaaagtaacaaaggaatgccacagcctgccaataatgtaattaaggagccaagcctcatctgagctttctcatgccaaagaacttgttggatgtaagttgggggaaaaaaagttcaagtcttcagagaaaagatggagagatataatgaaaaagttattggatttttaactctttgcttccttcaatctcctwaacactctcagatggaagaaaatggaaatgataaataacgcagcttctttgagaagactgagcgaaacaaaaagygatttaatggggctggttacactcaaggaacagcttaatggctttggaagacaggtagacttggaaggggatctggagctcatctccaatcaactgcaaatgtttgtcccatcatgctgtggaaacgtgctaaaagaatggtccaaataaaccagacgttctcttttggtttgtgcccttcttgagttgtcctgataataatttggagagtcttgtcttttcctc

SEQ ID NO: 19338 - DNA, 546 bp, Chicken  19866894228987_5
cttttctcagctctttgagggatttatatcaagaaagtaacaaaggaatgccacagcctgccaataatgtaattaaggagccaagcctcatctgagctttctcatgccaaagaacttgttggatgtaagttgggggaaaaaaagttcaagtcttcagagaaaagatggagagatataatgaaaaagttattggatttttaactctttgcttccttcaatctcctwaacactctcagatggaagaaaatggaaatgataaataacgcagcttctttgagaagactgagcgaaacaaaaagygatttaatggggctggttacactcaaggaacagcttaatggctttggaagacaggtagacttggaaggggatctggagctcatctccaatcaactgcaaatgtttgtcccatcatgctgtggaaacgtgctaaaagaatggtccaaataaaccagacgttctcttttggtttgtgcccttcttgagttgtcctgataataatttggagagtcttgtcttttcctctcttttgcctaaagtacagca

SEQ ID NO: 19339 - DNA, 600 bp, Chicken  19866894228988_1
tatactgatagaactctgtttatttgcaagtatgacacaatcttactttatctttacattcaaactttgttgcatggtgtctgcctaccttacaaggtttctggatcagtatttctagcctgtcctggctttatatcattgattcctcagctaggtgtaatcaaaggtcattaatattggaaaagttcactttaattgacttactttaattatggcaatataaaagagtgtcaagtgctagactcctacagaaataatcagttaatatgtggattcagtatttcctgtgtccttttagcyctagttaaggactgtaaaagagttccctacatctttatctctctttcaaggtgaagaaatatgttaaaatagatgggcagaggaacaagcttctttaaaaaaaaaaaaaaaaaggcagaaatcttgaactgttcttttatacttatgatttgtatacagattaactcagaaacgtgcaggtaaaattcttacttatggtaggagcaccgattatagaaatgataccctttgaattttgacatactaaaagcttgcatatatatgcttaatcattttcttttccattttctggcatgctag

SEQ ID NO: 19340 - DNA, 600 bp, Chicken  19866894228994_1
tcattgtccatgacggagcgaaaatgcttggccagcagccagccaacgtgactcttccccactcccgtggggccatttaacgagaggaccagcggcttgttatggatgtgggtggcgagatagtccttcagcagctgcataatactttccacagcgagcttctgcccgaatacctcccggtgcatcgttttctctaagccatccaggtcgtatttttggaggttgtcatccaggttctctatggcgttgaggatctggaagaagataatgacgatgagcaacaggaggcagcgcttggcrttgctcttctcctccgctgggaggtacctctttgttttgtcggggtacagaacgacccgagatttccttcgcttctttttccgcctgggtttgctcatygcccactcttccacggatgtgtcaaaggtgaagtactgggatgtcttgaagccggactggttaaagaaggacttggaggagccrtacagacctgatctgttcagtgaaaactgcctctggagcacccgcgcatggacgggctcggatgacttctcctgggggagctcgaagtgcagacggcctttcttctgcactcggtag

SEQ ID NO: 19341 - DNA, 554 bp, Chicken  19866894228994_2
ttatggatgtgggtggcgagatagtccttcagcagctgcataatactttccacagcgagcttctgcccgaatacctcccggtgcatcgttttctctaagccatccaggtcgtatttttggaggttgtcatccaggttctctatggcgttgaggatctggaagaagataatgacgatgagcaacaggaggcagcgcttggcrttgctcttctcctccgctgggaggtacctctttgttttgtcggggtacagaacgacccgagatttccttcgcttctttttccgcctgggtttgctcatygcccactcttccacggatgtgtcaaaggtgaagtactgggatgtcttgaagccggactggttaaagaaggacttggaggagccrtacagacctgatctgttcagtgaaaactgcctctggagcacccgcgcatggacgggctcggatgacttctcctgggggagctcgaagtgcagacggcctttcttctgcactcggtagcgctgcttgaggcggacaattgccctcaagggagaagaaataaagagactctc

SEQ ID NO: 19342 - DNA, 470 bp, Chicken  19866894228994_3
atcgttttctctaagccatccaggtcgtatttttggaggttgtcatccaggttctctatggcgttgaggatctggaagaagataatgacgatgagcaacaggaggcagcgcttggcrttgctcttctcctccgctgggaggtacctctttgttttgtcggggtacagaacgacccgagatttccttcgcttctttttccgcctgggtttgctcatygcccactcttccacggatgtgtcaaaggtgaagtactgggatgtcttgaagccggactggttaaagaaggacttggaggagccrtacagacctgatctgttcagtgaaaactgcctctggagcacccgcgcatggacgggctcggatgacttctcctgggggagctcgaagtgcagacggcctttcttctgcactcggtagcgctgcttgaggcggacaattgccctcaagggagaagaaataaagagactctc

SEQ ID NO: 19343 - DNA, 600 bp, Chicken  19866894228995_1
gttttttttgttgttttttttttttttgccattggatttcacagttgctgatacactgcagcaacgaggcgtagaagcatcagattctggaggggaaaatactccattatttatatactttataatcttccctcccatcatctgtccagcttcttctttctgtctgtaaatcctccaccccaggctcacatccttttctctcttaatattgcttttgcgatgaagtcaggctgctgcttgtttgccacttttcatgcatatcaaataagcaaacaatgggaggacagaggaggtgtagcygccctcccaagctcagtgtcagccagtgggaaaagcaatttgaggaagacctcagggagctctgagattaaattgttctgctgtcctccaacaacaataaatccaaagtctacccattacttaaaagctgcagaggaatggaataaagagcaacatttcttttttcttactgatagaattgaaaaaaaatgccccaagaaaatatggtgaaagggatcataaaaaccataggcaaatgtgtttggagagaggagattttggaagacgatgtagctgcttcataggtaaccccactcttga

SEQ ID NO: 19344 - DNA, 600 bp, Chicken  19866894229003_1
ctccagggggttgatgtacaggctgttaggggaagacgttaccaggctcaaggtgaactgctagaacaagtaaggttaagcacattgccacatgtacaaatcagcggttttcaagtaggaaataagcatgaaaatgagttttttctgctctttctgttctctgagggagcttggtggactagataacattttcaattagttgttaccctttatgagtttgtactcatctctcagccatgtccaccaagtgctggagagggcctcctgtccttaggaagtcattaagtccagcaggattasaaagtttgttcaacctttaagaggaatacatgaaatmctggtggcatttctgaaaagctgactgtggagccaggttttggccccaaaacttcattatgcttgaggataaggtagataattcttcacattatagaaacagagaggaaggcatttttccagactccaatgaataaatgaaaagtctgaagtttgttctgagatctgtatgtccctccctgtcccttcttctcacaggtggccttaaaatccatgttggtctctgcagaaaaacaacccagcagtgggaaatgtgatttacaa

SEQ ID NO: 19345 - DNA, 600 bp, Chicken  19866894229003_2
gttaccaggctcaaggtgaactgctagaacaagtaaggttaagcacattgccacatgtacaaatcagcggttttcaagtaggaaataagcatgaaaatgagttttttctgctctttctgttctctgagggagcttggtggactagataacattttcaattagttgttaccctttatgagtttgtactcatctctcagccatgtccaccaagtgctggagagggcctcctgtccttaggaagtcattaagtccagcaggattasaaagtttgttcaacctttaagaggaatacatgaaatmctggtggcatttctgaaaagctgactgtggagccaggttttggccccaaaacttcattatgcttgaggataaggtagataattcttcacattatagaaacagagaggaaggcatttttccagactccaatgaataaatgaaaagtctgaagtttgttctgagatctgtatgtccctccctgtcccttcttctcacaggtggccttaaaatccatgttggtctctgcagaaaaacaacccagcagtgggaaatgtgatttacaaggatggtgacaaaacctcaaaccctgctccaggattt

SEQ ID NO: 19346 - DNA, 600 bp, Chicken  19866894229011_1
aatacaagagtttacaaaagtaaaaatattttttattgattgatattttattgattgatccaaattttaaagctttttttagtaaatattttccatcatgcagctgcacaggcttgaaacaaatattcaaaatacacagaggatgtaagtctttgttgaaaatgaattagtttaactcaggactactcataaaggattttatgactgttgactagccaaactacttgacaagatcctttatatttcctgttcttccacattgcaaggggtgaacaatcttaaaacgaaaacactaaatgraaaaaacccacacaactaacaaaaccaatgaaaaatatgtttatgttttgatggcagacaacactaagtgtactgcatacataggtatagaactatcaagctctactgaagctaccagcatcctctgcagtgatttgaagcaaacatgccgttaagaaaccttgctagtaatagactgcatggcacaagaagcttctggcttgcaaatgaaacagtgtctcatgaccttatcaaaggtaactttttgtgttcaaaatttattcaggacttaaactgtsgtgtgaagaagggttgacatta

SEQ ID NO: 19347 - DNA, 600 bp, Chicken  19866894229011_2
ttaaaacgaaaacactaaatgraaaaaacccacacaactaacaaaaccaatgaaaaatatgtttatgttttgatggcagacaacactaagtgtactgcatacataggtatagaactatcaagctctactgaagctaccagcatcctctgcagtgatttgaagcaaacatgccgttaagaaaccttgctagtaatagactgcatggcacaagaagcttctggcttgcaaatgaaacagtgtctcatgaccttatcaaaggtaactttttgtgttcaaaatttattcaggacttaaactgtsgtgtgaagaagggttgacattaagcctgtgaaatcatttctttgawtatatgatcttaggatactgatggaaagatgtttctaaaaatcagagtgcttcttggtgattattaggtcgtttagaatggaggtggtaaagagaagatgtacctagcagtttcccacatttgaaagagctgatctgtttggatgacatttttggatgacatcttttagagtcagtcagaggtattttaaatgggcaaatgtccagggaaatgctacgattaggacttattttaactgccagccaaagacagag

SEQ ID NO: 19348 - DNA, 600 bp, Chicken  19866894229011_3
ccaatgaaaaatatgtttatgttttgatggcagacaacactaagtgtactgcatacataggtatagaactatcaagctctactgaagctaccagcatcctctgcagtgatttgaagcaaacatgccgttaagaaaccttgctagtaatagactgcatggcacaagaagcttctggcttgcaaatgaaacagtgtctcatgaccttatcaaaggtaactttttgtgttcaaaatttattcaggacttaaactgtsgtgtgaagaagggttgacattaagcctgtgaaatcatttctttgawtatatgatcttaggatactgatggaaagatgtttctaaaaatcagagtgcttcttggtgattattaggtcgtttagaatggaggtggtaaagagaagatgtacctagcagtttcccacatttgaaagagctgatctgtttggatgacatttttggatgacatcttttagagtcagtcagaggtattttaaatgggcaaatgtccagggaaatgctacgattaggacttattttaactgccagccaaagacagagattcctaaatgacaattcttgttgcattttgaccattaacgttgac

SEQ ID NO: 19349 - DNA, 599 bp, Chicken  19866894229023_1
  misc_feature (1)..(139): n is any nucleotide
nnnnnnnnnnnnnnnnnnnnnnnnnnnnnnnnnnnnnnnnnnnnnnnnnnnnnnnnnnnnnnnnnnnnnnnnnnnnnnnnnnnnnnnnnnnnnnnnnnnnnnnnnnnnnnnnnnnnnnnnnnnnnnnnnnnnnnnnnnnttgtaagtgtttatggaaaatgcagctggtgtgactacagtgaatatgcacgatgtacatacacaaatgaatatagaatgcagaaaagatgtctaaaatcttttccatgccactaagagctttatgtcattataaatcctgggaaccaccagaaacagacsaaggcatcagcttaaaaattgcaaatacaaagaaccattcaaaacgtgatggtcatttaagaatctgcccaagaaattacttctctctcttcacttgactctggtcttttgtcgttacttactgatggatatcttgtttccatgtgtctgtgtgggagaatgagtgaaatgaaatgcagtgtttcagtccaggaaaaaaagagggcatttagctgtagagctgagaatgtcatcaaagatatgaatgcagmacagctatgttgaagaactttatactgaaatgcaggtatcaacacaca

SEQ ID NO: 19350 - DNA, 600 bp, Chicken  19866894229023_2
ctaagagctttatgtcattataaatcctgggaaccaccagaaacagacsaaggcatcagcttaaaaattgcaaatacaaagaaccattcaaaacgtgatggtcatttaagaatctgcccaagaaattacttctctctcttcacttgactctggtcttttgtcgttacttactgatggatatcttgtttccatgtgtctgtgtgggagaatgagtgaaatgaaatgcagtgtttcagtccaggaaaaaaagagggcatttagctgtagagctgagaatgtcatcaaagatatgaatgcagmacagctatgttgaagaactttatactgaaatgcaggtatcaacacacatagtagggatatgcataggcaagacatgcctatatacttgctgtgcagctactgtgtgcctcttctgtaccttaatgtataagaaataagtctggttctcctttccttctctatcctggcaccattcctttttctactccttgccatgacagtccaagcccagcttaacccagtgggggggggggatggttcagttttgaatgtattgctttcactggtttctggggagactgaattctactcttcttgcta

SEQ ID NO: 19351 - DNA, 600 bp, Chicken  19866894229027_1
acagagaaacagtcacctctatctccccaccagcaggcctccttgtgcatagtaaggtggccagaacttgcttgctttggcaccctgctgttgcccatatcacagttctgtccccagggcagtgccccagcagtgctctgaaggcaggcattgttgggggctgttctctctgcaggcctcctctgttctgatgctttcatttaacaacaatcagatgtttgctagaggctcatcacaggaaaaactttaaagttaagccaaaatatctacagagcattgcatttgccaggtcagtgtgtyacatcttgtcagcagaattgagcagttccatgtttgagggccacctgctgctcaagcgtggtccttctgctggcagagggaccagagaatttaactttctggggaggaccttctaatgacctycagcccatgcctgcgggaacaaaacagctctttgttatctctgtgtcatgttatttatgtacagaggagtatgagtctggctccagtctcaattcctgttactgtggcatcttaggcaaggccacaggtgcagtgacagtggcagtaagggcacttctctaattttccctggtgttg

SEQ ID NO: 19352 - DNA, 600 bp, Chicken  19866894229027_2
gccccagcagtgctctgaaggcaggcattgttgggggctgttctctctgcaggcctcctctgttctgatgctttcatttaacaacaatcagatgtttgctagaggctcatcacaggaaaaactttaaagttaagccaaaatatctacagagcattgcatttgccaggtcagtgtgtyacatcttgtcagcagaattgagcagttccatgtttgagggccacctgctgctcaagcgtggtccttctgctggcagagggaccagagaatttaactttctggggaggaccttctaatgacctycagcccatgcctgcgggaacaaaacagctctttgttatctctgtgtcatgttatttatgtacagaggagtatgagtctggctccagtctcaattcctgttactgtggcatcttaggcaaggccacaggtgcagtgacagtggcagtaagggcacttctctaattttccctggtgttgtgactygccaaatcaktcyctggagcatgctttgttgcctccagtcatactgagtgtttctggcaaaaaacactcttgtgaaaggtgccggctgcctggagagctttgttgtgctccagcagg

SEQ ID NO: 19353 - DNA, 584 bp, Chicken  19866894229027_3
tgtcagcagaattgagcagttccatgtttgagggccacctgctgctcaagcgtggtccttctgctggcagagggaccagagaatttaactttctggggaggaccttctaatgacctycagcccatgcctgcgggaacaaaacagctctttgttatctctgtgtcatgttatttatgtacagaggagtatgagtctggctccagtctcaattcctgttactgtggcatcttaggcaaggccacaggtgcagtgacagtggcagtaagggcacttctctaattttccctggtgttgtgactygccaaatcaktcyctggagcatgctttgttgcctccagtcatactgagtgtttctggcaaaaaacactcttgtgaaaggtgccggctgcctggagagctttgttgtgctccagcaggcgtccaggtcgtgctgtctgtggtgtggtagctggggtctgctccttgtgggctccaacacgtgctgtgtccagatgttgaggtccaagttgagctggtagggtgagttcagatcagttcagagagactgttttcaaacctctgtgcctcattatgccttatttact

SEQ ID NO: 19354 - DNA, 574 bp, Chicken  19866894229027_4
attgagcagttccatgtttgagggccacctgctgctcaagcgtggtccttctgctggcagagggaccagagaatttaactttctggggaggaccttctaatgacctycagcccatgcctgcgggaacaaaacagctctttgttatctctgtgtcatgttatttatgtacagaggagtatgagtctggctccagtctcaattcctgttactgtggcatcttaggcaaggccacaggtgcagtgacagtggcagtaagggcacttctctaattttccctggtgttgtgactygccaaatcaktcyctggagcatgctttgttgcctccagtcatactgagtgtttctggcaaaaaacactcttgtgaaaggtgccggctgcctggagagctttgttgtgctccagcaggcgtccaggtcgtgctgtctgtggtgtggtagctggggtctgctccttgtgggctccaacacgtgctgtgtccagatgttgaggtccaagttgagctggtagggtgagttcagatcagttcagagagactgttttcaaacctctgtgcctcattatgccttatttact

SEQ ID NO: 19355 - DNA, 571 bp, Chicken  19866894229027_5
gagcagttccatgtttgagggccacctgctgctcaagcgtggtccttctgctggcagagggaccagagaatttaactttctggggaggaccttctaatgacctycagcccatgcctgcgggaacaaaacagctctttgttatctctgtgtcatgttatttatgtacagaggagtatgagtctggctccagtctcaattcctgttactgtggcatcttaggcaaggccacaggtgcagtgacagtggcagtaagggcacttctctaattttccctggtgttgtgactygccaaatcaktcyctggagcatgctttgttgcctccagtcatactgagtgtttctggcaaaaaacactcttgtgaaaggtgccggctgcctggagagctttgttgtgctccagcaggcgtccaggtcgtgctgtctgtggtgtggtagctggggtctgctccttgtgggctccaacacgtgctgtgtccagatgttgaggtccaagttgagctggtagggtgagttcagatcagttcagagagactgttttcaaacctctgtgcctcattatgccttatttact

SEQ ID NO: 19356 - DNA, 600 bp, Chicken  19866894229029_1
tgctaatttcttctataagtggcaaatcaggaccatgaaataaaagtcagaaagtgtaagagaaaaacagagatgatttttattttaggaagtttggaacatcatgtggaaaaacgaaaagaaatgggaaagaaacaacagcagaatagcaatcttcttgatgtaagatttcacagtaaaccagttctgctttggcaatgaataatattaaagaccttttaaagttgccaccatagaaatgtgtagaccaagggcagtattttaaaagtgaggaaccttcatgtgtatggatgtatgagrcagaggtggctgtatcagagaaggaagaaggaagagactgtcactgtaatgagttcaatttctttgagccttcaaaatgccaggctcttttcttacatatctatcacagataaaggctgtggactcgctcaggttaccccccccattttaatacaaaagcgctgttcagtgctttagtgtgcatgtttatactgctcctgcaatgggggagttacaggcaacagagaactcagatgctggtcccattgtccctctgaatgaaataaataaatcccttatcgttcgttccccagcttttgt

SEQ ID NO: 19357 - DNA, 600 bp, Chicken  19866894229030_1
tacaaaaaaaaaaaatgaaggaagtatgttaagaaaagtcacgtgcctgtaagttgccattctgttgggtggaagtcaagaaaacactatgcgctgttgtctcaaccttggaggcagtgcaagtagcagcagaaccaggacaggcagatttatgggttgctctagttcctgcccctccagcagaggatgcagtggatgctgagggtgtcttcatatcagctcccaccagatcatcaaccccattcccctcttcccttgtctgcacagcctcctgactgatcaccacattcagtcccaccrtgttcatacttcyctttccrctgaaatggttttaaatgctatgtgactgagttaaccatgtgggctctcctgctgagcctgccatctgaactgaaccagttcaaaccaaatctctgccatatttgcaaaaggattgcatcagccaaagaccaatctgaactgtcacttccaaccaataattctccatctttgctggccaccctgttgtcacgtgagttttctgggcaaggattgctttctgaacaaacactcctccttctcatcagcattaagactgtggcatcaaatggcaatagcagg

SEQ ID NO: 19358 - DNA, 600 bp, Chicken  19866894229030_2
aatgaaggaagtatgttaagaaaagtcacgtgcctgtaagttgccattctgttgggtggaagtcaagaaaacactatgcgctgttgtctcaaccttggaggcagtgcaagtagcagcagaaccaggacaggcagatttatgggttgctctagttcctgcccctccagcagaggatgcagtggatgctgagggtgtcttcatatcagctcccaccagatcatcaaccccattcccctcttcccttgtctgcacagcctcctgactgatcaccacattcagtcccaccrtgttcatacttcyctttccrctgaaatggttttaaatgctatgtgactgagttaaccatgtgggctctcctgctgagcctgccatctgaactgaaccagttcaaaccaaatctctgccatatttgcaaaaggattgcatcagccaaagaccaatctgaactgtcacttccaaccaataattctccatctttgctggccaccctgttgtcacgtgagttttctgggcaaggattgctttctgaacaaacactcctccttctcatcagcattaagactgtggcatcaaatggcaatagcaggaagcaggctcaaa

SEQ ID NO: 19359 - DNA, 600 bp, Chicken  19866894229030_3
gaagtatgttaagaaaagtcacgtgcctgtaagttgccattctgttgggtggaagtcaagaaaacactatgcgctgttgtctcaaccttggaggcagtgcaagtagcagcagaaccaggacaggcagatttatgggttgctctagttcctgcccctccagcagaggatgcagtggatgctgagggtgtcttcatatcagctcccaccagatcatcaaccccattcccctcttcccttgtctgcacagcctcctgactgatcaccacattcagtcccaccrtgttcatacttcyctttccrctgaaatggttttaaatgctatgtgactgagttaaccatgtgggctctcctgctgagcctgccatctgaactgaaccagttcaaaccaaatctctgccatatttgcaaaaggattgcatcagccaaagaccaatctgaactgtcacttccaaccaataattctccatctttgctggccaccctgttgtcacgtgagttttctgggcaaggattgctttctgaacaaacactcctccttctcatcagcattaagactgtggcatcaaatggcaatagcaggaagcaggctcaaagcaaaca

SEQ ID NO: 19360 - DNA, 600 bp, Chicken  19866894229038_1
atcaggagtaaattaactgcataatactataaacaataatatgtataaaacaacataatatatccaattataattcactattgaatttataactactcacatgttttgattaatcttttctttgtgtctttattatacaggtacaaaagacctaataaataatattaaaattatctaattgtagagcagtggaagattggagctatgcagcagctagagaagtatagcaaatgttaacttgttaatattttttctttttttaaattcatcttgctatttttattttctgtttacaagatrgataataaacacagattmttcttcttcttccttatctyccattcctcagttatgatattctagaaatcaactatttcttaaattcattttactactattcctcaatttctttgacccctctctttgattctatcctgttttattttattattgcttttccttcattcagactttttccatgttcatctaccagctctcctcttctcaaaagccttttatattgtacgtgagttaatgtttatttttattattcttgaaaagtttaaacacttgtcagtaaggacaggcattttttatctt

SEQ ID NO: 19361 - DNA, 600 bp, Chicken  19866894229038_2
gcataatactataaacaataatatgtataaaacaacataatatatccaattataattcactattgaatttataactactcacatgttttgattaatcttttctttgtgtctttattatacaggtacaaaagacctaataaataatattaaaattatctaattgtagagcagtggaagattggagctatgcagcagctagagaagtatagcaaatgttaacttgttaatattttttctttttttaaattcatcttgctatttttattttctgtttacaagatrgataataaacacagattmttcttcttcttccttatctyccattcctcagttatgatattctagaaatcaactatttcttaaattcattttactactattcctcaatttctttgacccctctctttgattctatcctgttttattttattattgcttttccttcattcagactttttccatgttcatctaccagctctcctcttctcaaaagccttttatattgtacgtgagttaatgtttatttttattattcttgaaaagtttaaacacttgtcagtaaggacaggcattttttatcttgctacttgacctatcact

SEQ ID NO: 19362 - DNA, 600 bp, Chicken  19866894229038_3
atatgtataaaacaacataatatatccaattataattcactattgaatttataactactcacatgttttgattaatcttttctttgtgtctttattatacaggtacaaaagacctaataaataatattaaaattatctaattgtagagcagtggaagattggagctatgcagcagctagagaagtatagcaaatgttaacttgttaatattttttctttttttaaattcatcttgctatttttattttctgtttacaagatrgataataaacacagattmttcttcttcttccttatctyccattcctcagttatgatattctagaaatcaactatttcttaaattcattttactactattcctcaatttctttgacccctctctttgattctatcctgttttattttattattgcttttccttcattcagactttttccatgttcatctaccagctctcctcttctcaaaagccttttatattgtacgtgagttaatgtttatttttattattcttgaaaagtttaaacacttgtcagtaaggacaggcattttttatcttgctacttgacctatcactgcaggcatatctcaagactt

SEQ ID NO: 19363 - DNA, 600 bp, Chicken  19866894229038_4
ctttgacccctctctttgattctatcctgttttattttattattgcttttccttcattcagactttttccatgttcatctaccagctctcctcttctcaaaagccttttatattgtacgtgagttaatgtttatttttattattcttgaaaagtttaaacacttgtcagtaaggacaggcattttttatcttgctacttgacctatcactgcaggcatatctcaagacttggaaattgtgtcgtagtcacgtatgtttgtttttttctgttacaagaaaagagaataacttgttctgctyattacttgcaatgtactccatgtgcaaataacagaatatttagcaaattatctgtattgaaagtgttcagtctagtgcaataaacagttattttcataatgatctcactgtcattgaagatgttaaagagcactggtccctgtattgagccctgagggacaccacttgtcactaatctccatacagacattgagtaattgaccactgttctctgaatacaatcttgtaaccaaatcctcatcctttgaatccatcaaatccatgtatttccagtttggagataaggatgttatggggaat

SEQ ID NO: 19364 - DNA, 600 bp, Chicken  19866894229041_1
tcaaaggaaattacagcactattgaagaactgaaaaaaagaataccaacacaggagaataaatttagactttgaactgaagtgtaaaccactttccttcagctctccaacatatttagcataaccagactgttttgctgcggctggactgcctgtgggatgctcaaatgctctagataactatggctgtttcccaaacaactaatggctattctttccatgctttctcatcgaccatggcagcagttctgccatttacatagccctacactattttcagaaagcattatttttatttaayttccaaacaattccaggcagttcacttgctggtctggagcgttctgtttttaagctgttatgactagcagacagaaaaacagtattttctatttcttttaagaacactgagacatcctgaactacatttattcttcaaaaacgtttgttttaaaaaagagaaaaaaaacaaaaaaacaaaccacagtatcttacatgcatcccaataaaagaactatatagatatacaaatttacatattgctagcaatattttgaaatgtgttagtctttgaattttttacttacataaaataatttaa

SEQ ID NO: 19365 - DNA, 600 bp, Chicken  19866894229045_1
aatctcatcgtgtagtctaacccatcactagagtacactggtcaagatggatggatggagacttcacaacctctctacacaatctgcttgatcatccttgcagcaaagaaatactatcttatgttcagatggattttcctgtatgacagtttctacactgccccttgttctgtcagtgggtatttcatccttccttttcctataattctttatgggcctttatgttaaaacagattgttacaatctctaagaccagaatttctacagaacagagaaattgtcctacatgaaaatgatttktaggacatatcacccaactttaaaatcagattagctatgatgatrtgatattatatttattctatttttcaatttatcaaaatagccagccttttttttttttttaatcattttccttattttctgccgtttgttaaaaaaattcagaaacctggtaatatttgcttccagaaataggcacttgaaagtggtcacttccatgtagtcttaaacctaatagataggactgtcatttttatcaagaatacaaaataaggacaactgataatattgttccagattagcacagcaagaatacat

SEQ ID NO: 19366 - DNA, 600 bp, Chicken  19866894229045_2
gatggatggatggagacttcacaacctctctacacaatctgcttgatcatccttgcagcaaagaaatactatcttatgttcagatggattttcctgtatgacagtttctacactgccccttgttctgtcagtgggtatttcatccttccttttcctataattctttatgggcctttatgttaaaacagattgttacaatctctaagaccagaatttctacagaacagagaaattgtcctacatgaaaatgatttktaggacatatcacccaactttaaaatcagattagctatgatgatrtgatattatatttattctatttttcaatttatcaaaatagccagccttttttttttttttaatcattttccttattttctgccgtttgttaaaaaaattcagaaacctggtaatatttgcttccagaaataggcacttgaaagtggtcacttccatgtagtcttaaacctaatagataggactgtcatttttatcaagaatacaaaataaggacaactgataatattgttccagattagcacagcaagaatacatcagccaacaagaaaaaaaaaatgttttgctcttttttactatttt

SEQ ID NO: 19367 - DNA, 600 bp, Chicken  19866894229053_1
tgctttacaggcaccatgtctacactctcgcagccagcacacacgcagcagatggcccaccccacaaagcagcacaaaccagtcctgtcccatgcctctccccatgcatgctctgaccaccacaggcacactcgtggccccccaccagcaaagtatatatttgtgagggcatcttttgtgcagaatggaaacactgctgctgaatgcaccatgcaaccaacacacacatactcctactgcagccagtgcccaccacgcagtggtgctatgaataataataatgcatattataatgctctrtgtggaaatacacacctcaagtgtcctttggaacagggggaatgtcaactcatattcatcctgagaaggcaagtagctgcctcatgcaccagcatcacttatgatacatgataaatgatcacatcatttatgatgtccagcccaggaaatgcaccaaaggagctgtagggtcgaatcagacagggcccctcttcatctggcgtgtcatgctttatttttgcaattagagctgctccttactgggcaatgcaggagacagagacatagcacctctgttctatgaactaagcagaactctgc

SEQ ID NO: 19368 - DNA, 600 bp, Chicken  19866894229053_2
tatactaaagcatcatgtatgttttaaaccttctatgtaaatcctcatcagctgtgaataagtaagcaccaggttgatcaaagtcatactcgtatacaaatgtacacgtgaaacatttattcttcccatcagccatacatacaagttctctggaggtgccaactaaggtcagctggtgaaaaacaagccatgcctcacaaccagtcagactacactgtgtcattatggacaattcagtggtaggactaatgtgttctacagtaatgttttcacaggtatatgagctacttaagagcatamatcttatttgtacamggaaarcagaccttacacggctgaacctcctgcaccagtgtatatgaagttcaattttgccaaagggtgggcacttgctgcctggggaaggcaagcagggggtagaagccatcctcagrgcttggccgcaggatgggcagggagttctgcttccagagagacaacacacactcaggcacagcccccggctctcagcccttgaactgtgggcaggcagcctccttttccctggctctgagacagaaaagcagcagagggacagcaactgttcactgccaccagaag

SEQ ID NO: 19369 - DNA, 600 bp, Chicken  19866894229053_3
tgtatgttttaaaccttctatgtaaatcctcatcagctgtgaataagtaagcaccaggttgatcaaagtcatactcgtatacaaatgtacacgtgaaacatttattcttcccatcagccatacatacaagttctctggaggtgccaactaaggtcagctggtgaaaaacaagccatgcctcacaaccagtcagactacactgtgtcattatggacaattcagtggtaggactaatgtgttctacagtaatgttttcacaggtatatgagctacttaagagcatamatcttatttgtacamggaaarcagaccttacacggctgaacctcctgcaccagtgtatatgaagttcaattttgccaaagggtgggcacttgctgcctggggaaggcaagcagggggtagaagccatcctcagrgcttggccgcaggatgggcagggagttctgcttccagagagacaacacacactcaggcacagcccccggctctcagcccttgaactgtgggcaggcagcctccttttccctggctctgagacagaaaagcagcagagggacagcaactgttcactgccaccagaagcctgctgccctaggc

SEQ ID NO: 19370 - DNA, 600 bp, Chicken  19866894229053_4
ttttaaaccttctatgtaaatcctcatcagctgtgaataagtaagcaccaggttgatcaaagtcatactcgtatacaaatgtacacgtgaaacatttattcttcccatcagccatacatacaagttctctggaggtgccaactaaggtcagctggtgaaaaacaagccatgcctcacaaccagtcagactacactgtgtcattatggacaattcagtggtaggactaatgtgttctacagtaatgttttcacaggtatatgagctacttaagagcatamatcttatttgtacamggaaarcagaccttacacggctgaacctcctgcaccagtgtatatgaagttcaattttgccaaagggtgggcacttgctgcctggggaaggcaagcagggggtagaagccatcctcagrgcttggccgcaggatgggcagggagttctgcttccagagagacaacacacactcaggcacagcccccggctctcagcccttgaactgtgggcaggcagcctccttttccctggctctgagacagaaaagcagcagagggacagcaactgttcactgccaccagaagcctgctgccctaggcaactgt

SEQ ID NO: 19371 - DNA, 600 bp, Chicken  19866894229053_5
atacatacaagttctctggaggtgccaactaaggtcagctggtgaaaaacaagccatgcctcacaaccagtcagactacactgtgtcattatggacaattcagtggtaggactaatgtgttctacagtaatgttttcacaggtatatgagctacttaagagcatamatcttatttgtacamggaaarcagaccttacacggctgaacctcctgcaccagtgtatatgaagttcaattttgccaaagggtgggcacttgctgcctggggaaggcaagcagggggtagaagccatcctcagrgcttggccgcaggatgggcagggagttctgcttccagagagacaacacacactcaggcacagcccccggctctcagcccttgaactgtgggcaggcagcctccttttccctggctctgagacagaaaagcagcagagggacagcaactgttcactgccaccagaagcctgctgccctaggcaactgtctgcttcagctgtgcgtaaagctggcactacgaagcaggcacgaattgcacccggccttgaatgaggcttaggctcaggggacttggctgttttggaaattgttagcctgtat

SEQ ID NO: 19372 - DNA, 599 bp, Chicken  19866894229057_1
  misc_feature (1)..(142): n is any nucleotide
nnnnnnnnnnnnnnnnnnnnnnnnnnnnnnnnnnnnnnnnnnnnnnnnnnnnnnnnnnnnnnnnnnnnnnnnnnnnnnnnnnnnnnnnnnnnnnnnnnnnnnnnnnnnnnnnnnnnnnnnnnnnnnnnnnnnnnnnnnnnnncatatgttgttaacattagatggcgagaaaaattaactgtatcatatgctgttgcacagcctgtatttttagcctctcctgtttaaaaacagcgtaaaacaaatggaaaagataaaacaagtattttcctcaagtgagaacagatggcaatgttttcrggctatggaaggcagaaggaggctccatgaccaggaggcagtggaggtgcaatgagtgctcctyagggcactggatgacctctttctgcagcaggaatgtctaaatcctccagaaacacactttttgtcacagtaatgtatattttttaaccagctgtcctccttttgccttactgtgtcttaaagttgaaaatacgagtatgaagtttcttgatggacacaattgttactcattatgatggttggttggtttgttagactgaatttttcctgttgtcctgcaaatcttatgggacctt

SEQ ID NO: 19373 - DNA, 599 bp, Chicken  19866894229057_2
  misc_feature (1)..(78): n is any nucleotide
nnnnnnnnnnnnnnnnnnnnnnnnnnnnnnnnnnnnnnnnnnnnnnnnnnnnnnnnnnnnnnnnnnnnnnnnnnnnnncatatgttgttaacattagatggcgagaaaaattaactgtatcatatgctgttgcacagcctgtatttttagcctctcctgtttaaaaacagcgtaaaacaaatggaaaagataaaacaagtattttcctcaagtgagaacagatggcaatgttttcrggctatggaaggcagaaggaggctccatgaccaggaggcagtggaggtgcaatgagtgctcctyagggcactggatgacctctttctgcagcaggaatgtctaaatcctccagaaacacactttttgtcacagtaatgtatattttttaaccagctgtcctccttttgccttactgtgtcttaaagttgaaaatacgagtatgaagtttcttgatggacacaattgttactcattatgatggttggttggtttgttagactgaatttttcctgttgtcctgcaaatcttatgggacctttaatatggcaccctcgagcatctcagttttcttcctttcatatgtgtcaggaaacgtgggagtt

SEQ ID NO: 19374 - DNA, 600 bp, Chicken  19866894229058_1
tatatgttcctatagatttgaatgttgcttttttattctgatctcacttagttttttctttgctggagtagtaggtgcattagaaagctttgtgctctactactgttatacagaaacgcaaatcttcaaatgagtttgcagtagaggcttttcctgggcattgaactgtggagtgcacatcatttttgataggcacagaacattttagttcccagatataattggcttgaaaaatagtaggacctgaagcagatctagttattatgtaaatatggaaagctgcccttccttagtaggccrtatcttatggaatatctgagttgatctgtctctgttcagatgcatggtgttawttctaagtttcacataaaccactagcctgtataataaaggattgtcatcagagggtttacccattggacaacaagttcttaggtaggagagagaagtggttcttgcaaatgagtgrggagctgaaagaaagggggacaggtgaagtgaacggagaaatatatctaatctrccttttatatctttcttcctcctgtagttttatatctatctgcctcctgtagtatttctgcatttaagttgttttgc

SEQ ID NO: 19375 - DNA, 600 bp, Chicken  19866894229058_2
ttttctttgctggagtagtaggtgcattagaaagctttgtgctctactactgttatacagaaacgcaaatcttcaaatgagtttgcagtagaggcttttcctgggcattgaactgtggagtgcacatcatttttgataggcacagaacattttagttcccagatataattggcttgaaaaatagtaggacctgaagcagatctagttattatgtaaatatggaaagctgcccttccttagtaggccrtatcttatggaatatctgagttgatctgtctctgttcagatgcatggtgttawttctaagtttcacataaaccactagcctgtataataaaggattgtcatcagagggtttacccattggacaacaagttcttaggtaggagagagaagtggttcttgcaaatgagtgrggagctgaaagaaagggggacaggtgaagtgaacggagaaatatatctaatctrccttttatatctttcttcctcctgtagttttatatctatctgcctcctgtagtatttctgcatttaagttgttttgcagatttaaatagaagcattggcaagtggggtttattattttcctgtaaactaa

SEQ ID NO: 19376 - DNA, 600 bp, Chicken  19866894229058_3
ggagtgcacatcatttttgataggcacagaacattttagttcccagatataattggcttgaaaaatagtaggacctgaagcagatctagttattatgtaaatatggaaagctgcccttccttagtaggccrtatcttatggaatatctgagttgatctgtctctgttcagatgcatggtgttawttctaagtttcacataaaccactagcctgtataataaaggattgtcatcagagggtttacccattggacaacaagttcttaggtaggagagagaagtggttcttgcaaatgagtgrggagctgaaagaaagggggacaggtgaagtgaacggagaaatatatctaatctrccttttatatctttcttcctcctgtagttttatatctatctgcctcctgtagtatttctgcatttaagttgttttgcagatttaaatagaagcattggcaagtggggtttattattttcctgtaaactaataaagttatagtatatatgttcagtaatctcccattactacatttccaaaaccacgttgttagatgcatatatccccggaaaaacaaattgttctttctcttccttctttgacctt

SEQ ID NO: 19377 - DNA, 600 bp, Chicken  19866894229058_4
ggcttgaaaaatagtaggacctgaagcagatctagttattatgtaaatatggaaagctgcccttccttagtaggccrtatcttatggaatatctgagttgatctgtctctgttcagatgcatggtgttawttctaagtttcacataaaccactagcctgtataataaaggattgtcatcagagggtttacccattggacaacaagttcttaggtaggagagagaagtggttcttgcaaatgagtgrggagctgaaagaaagggggacaggtgaagtgaacggagaaatatatctaatctrccttttatatctttcttcctcctgtagttttatatctatctgcctcctgtagtatttctgcatttaagttgttttgcagatttaaatagaagcattggcaagtggggtttattattttcctgtaaactaataaagttatagtatatatgttcagtaatctcccattactacatttccaaaaccacgttgttagatgcatatatccccggaaaaacaaattgttctttctcttccttctttgaccttatttacttttcaggaattcttttgaaaacagtaatgtgtcaaggaaatgtttgg

SEQ ID NO: 19378 - DNA, 600 bp, Chicken  19866894229061_1
aaaataaaggtttaacaccacgccttaggtgatcatttcaaacaattcagcagcatgactgaaatagtttgctctaaattggcctgaaatagaatattattcatacaattccattacaatacagagataaatgaaagttcacttgggaatgagcgtcagtttgccttctagatttcttttaaagctgctctagcagctgtggcttctatagcaatgggaattgctgttgctatgctctagtgatgctagtggtccctgtgggattctcaagaaacttcagacaactgtagcttttacctrcatcagtgtctgatgggtgctgatactcacaaaacagctgtgcttcatcctcagaatgagtgcacattaaatcactgatgaaagagtgtcttcctgttactgacactgaattacaaaacctgcaaataaagggcaaaatactcactctagaaacaattgctttgtcatctggtcatccttatccttcatccctgttctcagcatccgtacttacatcatgttttgttactactctatctgtactatccttgcttgaggcaagcatgttcacatgaagaagggttatgaaattgaattcct

SEQ ID NO: 19379 - DNA, 599 bp, Chicken  19866894229063_1
  misc_feature (1)..(161): n is any nucleotide
nnnnnnnnnnnnnnnnnnnnnnnnnnnnnnnnnnnnnnnnnnnnnnnnnnnnnnnnnnnnnnnnnnnnnnnnnnnnnnnnnnnnnnnnnnnnnnnnnnnnnnnnnnnnnnnnnnnnnnnnnnnnnnnnnnnnnnnnnnnnnnnnnnnnnnnnnnnnnnnnncctggtctagagggaggtgtccctgcctatagcagggggttggaactaggtgatcttaaaggtcccttccaacccaaaccattctatgattctatgattccatgctattttacctcagagggcaatgaggcgctggcayaggctggacaaagaggctgcggatgcctcatccctggaggtgctcaaggccaggctggatggagccctggacaacctgatccggtagggagcaagtagcccacagcaggggctggaacaggaggatactttatttgggcttcttttcagtgctctaaagcaaagactgaattaaaatggtgagagcaataaagcccatatcaagcccagcaactctaactaccttgtaccaaaaaacagaagaaaactaggaacaaagaatcgccaggcataaatacagtgactcctgaagcactgcct

SEQ ID NO: 19380 - DNA, 600 bp, Chicken  19866894229072_1
ctgccttgagaaattaaaaaacaaacccagatgtgaaggaggcatatagttttcctatcagcaagtacaaaaatgtctttgtatagattggagactaattccaggtttgagaacagaaaatttactttatcgctctatattctcagtaacctagagaaactgaaatgaaaagtgttcctcatcatatccgtactactgatcttgaaaatttgcagttgtgtgcgtgtaggagttactttatactaaggccaagctagtttaataacctaattatgttcagcagagataatacatgatgargaatctgtacctttgtggcctccatcctagatttcctgttgcaaagcctaacactgcctttagatgtatccaaatcttttcttgtctcaggttagaggtgaggcaacatgatttctgctctttgctagacttttttgcagagtgaggccttggtttaatgaaaagttgatttttacttcttagagtagttttttttttaaagtcctaatttatacccttgtgaatattgccagttatgaacgatctagtgtgagatttttcaaaaaggccaaaaagtcagattcytagagctgcaaagtc

SEQ ID NO: 19381 - DNA, 600 bp, Chicken  19866894229072_2
ataatacatgatgargaatctgtacctttgtggcctccatcctagatttcctgttgcaaagcctaacactgcctttagatgtatccaaatcttttcttgtctcaggttagaggtgaggcaacatgatttctgctctttgctagacttttttgcagagtgaggccttggtttaatgaaaagttgatttttacttcttagagtagttttttttttaaagtcctaatttatacccttgtgaatattgccagttatgaacgatctagtgtgagatttttcaaaaaggccaaaaagtcagattcytagagctgcaaagtcccactgattttacttgagtttcctcttagtctgtccctttgtgactgcagaatgtgtactaaaagatgtgccataactaaaggcatgctttccaagggcaaaaaatgcatgccagtgtggtggaggctgcatgcatcatccctgtgtgggagctgctctgggagacaaggctcgttagttgggatgcagcatccaacccttgagatgaaagtcagcatctcctcctcgatggccattgtcatggcaatgtattgacagacagagacaatgcaaaaatctcttctc

SEQ ID NO: 19382 - DNA, 600 bp, Chicken  19866894229081_1
actcttcagtttaaaaccccccaaactgctgctcacgggcgtgcagttacctgaatgcgactgttgctgtggctgtggttctggatgttaagggctctctgtacagtacttcaacaaataattttagaaagcattataaaaatggatgtctatctatgccctggtgggctgtgggaggctctgaacgcttccccaggctgaatgtgggctgtgggaggcttcaggtttccctccctgctgcagctgagactcaggagctgccctaaaagcctccctggctgccttgcttcctgccttacygaaacacgccatcaggaaggcaataaatgctcaggtgcttcgctttgattccggatcctgccctcagattatggatttaygtcttaattttgcagtgcgggctgtaagccagggtgtgggctaggatgagatgctgacaaagcacagcgggtttggggccggggatcaaccagcaaagcgatgcacgtagcaggagcaggtaggtgaatgctggaagtgagatgtgagggaggctctgtccctgatacacagctcatgtggtgcttcccgaaacgcatggtatgcagttaatgtgtttgc

SEQ ID NO: 19383 - DNA, 600 bp, Chicken  19866894229081_2
ctggatgttaagggctctctgtacagtacttcaacaaataattttagaaagcattataaaaatggatgtctatctatgccctggtgggctgtgggaggctctgaacgcttccccaggctgaatgtgggctgtgggaggcttcaggtttccctccctgctgcagctgagactcaggagctgccctaaaagcctccctggctgccttgcttcctgccttacygaaacacgccatcaggaaggcaataaatgctcaggtgcttcgctttgattccggatcctgccctcagattatggatttaygtcttaattttgcagtgcgggctgtaagccagggtgtgggctaggatgagatgctgacaaagcacagcgggtttggggccggggatcaaccagcaaagcgatgcacgtagcaggagcaggtaggtgaatgctggaagtgagatgtgagggaggctctgtccctgatacacagctcatgtggtgcttcccgaaacgcatggtatgcagttaatgtgtttgcagagctgaggttgatgcaaatatgctcctgagcactgaaatgcagatgagaagtggccctgttctgcagggggaaatctt

SEQ ID NO: 19384 - DNA, 600 bp, Chicken  19866894229084_1
aaaacaacagctcagtctgaggacagttaggtctgcaatatgacactggctttcttccactccattccctaagtcaaaccagctgactggctccgggatgcccatctctgtagagccttttcccacagccaacaagaaaggggaattgctttagtggttgcctgaatcagaacagcacttctgggattttttcaccccctctctctgtatagaagagtcaacaaaatagtgcaacatgacaagatgttgagccacattgccaagacaacttgcacactttgcatttttcctcttagagaygcatcagtgagtatggaacagaagagggagagagaatatagtcctgagctgtcaagcccagccccaaaagcctttgtgttttcacgttagcactgagatggagtattacaatacactgatgatttgtagcacgcaagtgttgtagtaaatctggccctttattaaaactattttcccaagaaacaaataaacgaaacaaaaccaacacaaaacactacaaatggccagacctaaagtttacaaagtgcacagctaaccttcaccccgaaaccaagactttctttcagagccctcctgctt

SEQ ID NO: 19385 - DNA, 600 bp, Chicken  19866894229084_2
gttgctccttcttgttgcctttgagcccttttgatttgcagtgagtgagacgtgagttgcccattgctgagtaacactgtgaccaggatgagcctttctggctgctccaaaaagcacaaatccattccttcacaaactgaaggcagttcattttaagcctttttaattgtaaatgaagtgtgagattatggggaaggagtactgtatgatgtcaggtgaaaattggcttgataattataaatcagaataatgggattaccctcacaaagctaagtattagcatttagccattacacaaaytactgctctactactcgtactgacacagtcaacctaaaacctcaaggccattagaagagttcactctgggtgctcttgttttcaagtaaaaaacaaaaatatatttggattaactaccccaccctcactgaagcttttaaaacgttgctgatgtgcatcatggttttaataacccatgacctgtactgcagatgtttgattttatatgtctacaaaattgaaccatgtgttgagtgatcacctacgcggggcatcttggctttactacttcgttggatttctgatagagcttttctaatt

SEQ ID NO: 19386 - DNA, 600 bp, Chicken  19866894229085_1
gcttactgcataaaattctggcaaacttatttattacctattgctaacagactagagcagttagaactaaaagcaaactccagacacctacagggggacagcctccttcactgtgggcctctcctaggctgcagggaactgttgctctgcgcccggagcacctcctgtcctcctcctgtgctgactttgggggctgcatggacacttctcccccatctctcatccctccctcccagctgcagttgcacagcactgtttccctccctccaatctgctctcccagaggcacacccagcgtcrcccacagctcagctctgatcaacaatgcatacctgttggtgcagctggagctgctctgctctgctctgacatgggggtactgctgggcgctgctaatagagccactcctgcagcccttgctaccaaaatccatgtaagcccaatacagtcacaaagtggaggactgagtctcagggaaaaaagaaattcaagccagtaaatctagtaacctcacaaggaatttcaaagtccaggtgttatttaataatcataaggctgtcattggatatatgttaaaatacattgacattaaagaagaca

SEQ ID NO: 19387 - DNA, 598 bp, Chicken  19866894229086_1
catctggaaaaaaagccccgaacctttgctattagagcagtacagtcagccccagactgaagagaagcaaggattgagagttatgccttccagctgaaaaccttaaggctgtttaaataacagggctgccataccctgcagaaacttccatccagtctggtagaatcattgctttggatacttaatagaagtattaaaaaaaaaggttattgctactctgccaaggaaacagaacaatctacaggagagaaagtgcatcccaagtccttaaaaaaataaaaacaaacatctcagccaccrtgggctacagatgcccaagtactagaggtgtacaaacaagcctctagcaatccctccttccttctagcttttgtcctgcagcaattctcttcctccctgtaaaggcactttctagattctatatccttatgcagggaaacatttccagttttcaatcccaacaaacagaacactcccacaaatacacaacattcagaaggaattttaattaacaaaatggtccaggaaaggggaggaagaacccaaaaaaacaggccattgcgttgaaagattgcatgtcagtcactaggtatgcctg

SEQ ID NO: 19388 - DNA, 600 bp, Chicken  19866894229096_1
gttctgtggattacgtacttctttcagatagtctggtaatctgtggacatcgtgatgcatttttgatagaattcatgttttcttcagatacagatcaacactctgctgaccctgaggaacgggagagctctgatacaatgctgcttagcgggacccaggcatcccaggggcccgtggaaattcaagtcatataaataggaaaataatatatatccaaagcacctttctaatttcttgcttctagagtaaacttgtaagtggatatacattaagactttggtagcaaggaattagaaatgygctttagatttgtattagttcgccgttttacgttcgagcgccgcggcgggaagcacgcactgcgagcgcgccgcaaacagcgcctgactcgcccgagggcgacagcagcgcgagcccgaggcgggagcagcgcgcctgagcgcgcatgcgcggctccctcccgccttgcgctggcattgcccgggccgtgcgttcgcacgcattgcgttccatacgcgggcggagctgccgcaataggaagcggcaatcggagaagcccggcaagcgcgcggggtggggtggggctgcgttcttcttgcc

SEQ ID NO: 19389 - DNA, 600 bp, Chicken  19866894229099_1
tctgtgcagtttggggaaggatgggaaaggaaatcaccagcagtttctgctgctgactttaatgacagttcccccgggtctgtcctatacctcacatctgcccagatgtgtgctgccagcagctcttgccacgcaagcacagaagtcagccaggagtgcagccccacagctcgcagagctcacgtgaattacctcccaagtcccccttgctccactttcaaggcaatttctcagtgaccggagtccatttctgaagctgctttgtttgctgactgctcactgaaggcacagctacgtccrtcccgctgcctccacacattccctgttttgtcccgtttgcgctgctctggaattccctacttcatttcctcatactcttgtgagggatccaaggttgggccaggaatcatcaccgtctgaaacagcaaggacaaaaatcagcctgacacgcagcgactccaaactccaaccgtaatgagagcacgagaaagggtgagcagagggttctggcagtgccactgcctcgcacaggaggatggcctgattttaggaacaaaggaagacagagcacccacacactttgcacacataggccatgct

SEQ ID NO: 19390 - DNA, 600 bp, Chicken  19866894229100_1
ttccagccaagctaggtgttcatgtaactcaggatgggtttggctagggtctatggcatcatcaaaattccattcaaaccccagttgtttgaacccagtcaggtttggcatggagcagaagaaaggtacagtatgattgaaaaacagttattggctgcctctactccacattgcaggcagtagagccaataactcaaacatctgaggtcattgttaagactgctttgccaatgcaggggtgagtgaaaaatcagacccactttcctaagacaggggtggcccaagcacacacagtggcaygattggtcgcctgtctcagccagagtagtctgtcttcatcaccacggaaagaagtactccagaagattgtaggcctagtgacatattgcagcgatacaatggaagaaaaaatggccacttgaatggagaagaatcctattcaggaaggaaagtatcccattcctgaagatgcctggtgtacagatgagtccagcaagtggagagcagtggcataccatccctccactgaaatattctggtttgaagaaggggatggtcagagtagccagtggacagaactacaagccatgtggatggtta

SEQ ID NO: 19391 - DNA, 599 bp, Chicken  19866894229108_1
  misc_feature (1)..(89): n is any nucleotide
nnnnnnnnnnnnnnnnnnnnnnnnnnnnnnnnnnnnnnnnnnnnnnnnnnnnnnnnnnnnnnnnnnnnnnnnnnnnnnnnnnnnnnnnnctagtattcctcaagtaacctggcatcaaaccaaaaagctgagaacagagagccaaaagtgaagccagaaaatggattttagtttcaagctgaagttaataatacagaaaagtaatttttaaatgactcctattcctctccacatgacttgaaacactagcacaaactaaatagtgatgccagctttcgaggaccgacagatacaggcacrttacaaagtctgcatagtgaagtttagcagctgcaaagagaattaccttgctcgtttcaggactctctgggtcaaactggacctgcttagctgcaagctctctgcctgtgtccacatcatagcacaaatacacacgaccaaaggcaccctggcccagcagttttcctcgtcgccagtttattggagcgcttggagctgaaaaagagtagaagtaacaattctcctttttggctgtgctatttgaagataacgggtgaggttttcaaaggtcagttcccactgtagagagctggaaatgc

SEQ ID NO: 19392 - DNA, 600 bp, Chicken  19866894229114_1
atttgttgcaagtcaataatgctgaatgaaaaatgattctgaggactgtagctgttgaccaggaaaattcataaatagaaatcatttaagaaatcatttagagctacttaagctgcttgcaaaagtgattgatagcaactaagactttctatagaactgtagactgatcaaagtaatcaaaagaacttgaggatgaattttttaacatacttctcagtgacagctataatccatcattactcttcattcccacgttatcttcaggattagggattctgagacatcagctggaatagaagygtaatggcaggttgcagacaaaaggcgtatgagaaaacttaatttctttttacaattttttttattttttctgtttttaagtagctgggggttcagttctgcctactaaaggtcattctcgctggtgaagtatttgtagaacaacattttatggaagaaaacaaacaaacccacaattctcaatataggttcatttctattttataacaactatgcatatttccagagctagcatttgcaggaatttctctagcatatgttttgttatggttttttgtttgactctgcatatgttctaaa

SEQ ID NO: 19393 - DNA, 600 bp, Chicken  19866894229114_2
aaattcataaatagaaatcatttaagaaatcatttagagctacttaagctgcttgcaaaagtgattgatagcaactaagactttctatagaactgtagactgatcaaagtaatcaaaagaacttgaggatgaattttttaacatacttctcagtgacagctataatccatcattactcttcattcccacgttatcttcaggattagggattctgagacatcagctggaatagaagygtaatggcaggttgcagacaaaaggcgtatgagaaaacttaatttctttttacaattttttttyttttttctgtttttaagtagctgggggttcagttctgcctactaaaggtcattctcgctggtgaagtatttgtagaacaacattttatggaagaaaacaaacaaacccacaattctcaatataggttcatttctattttataacaactatgcatatttccagagctagcatttgcaggaatttctctagcatatgttttgttatggttttttgtttgactctgcatatgttctaaacattttgattctataaaaatggcaagaagattctgttaaaattcaagaaccacatgattctagt

SEQ ID NO: 19394 - DNA, 600 bp, Chicken  19866894229121_1
tgctgctggaataaaataccaataatgtgttataaaaatgatatcttcattaaacagggataaatgttttacgtatcaccatcaagcagtgaggagatgccagtgtgtaagtaccaaatagatgctatataaaaacttaagttacacaaacagaaaagtactcatagaatcaaacttccaagtctcctgtagtgcttctcttgcatgtttatctgcctttataacagctaaagtgtgatatcaaaagtataattatattcagaaaatgacattacaatagtcatatattctaaaatgctracttgattagattttcattccacaatttgtgggagaatttgatttttaaaaatgtaatgtgcaaatcattagacatacatacatataacagacatatatcactgtatttttaaaaacaacttgttttaaattactataatagccttaaaacgagttctgaacatcttgttactgcaagacgttgctcatttgtatgcacagttaggcttgcaagtatacgcattcagttttcactgtgctgttaaatataaccacagtcacatgttgcttcaacatgccatccactttttcactggtcat

SEQ ID NO: 19395 - DNA, 600 bp, Chicken  19866894229121_2
atagaacccttttctttacatataaccttgcactgtgcattcattgggctttttcttcttcttcttcttctttttttccctttttggcagctcaagacaatcagtactgcacaacaatgtaaagaaactcctatcctgatcctaagaccttttgcatgtgcctgaactcaaagcatgcagggagttatctgaggttaatccctggaagaagaaggaccctgttccactggctgatcatagcctactcctcttggacacgcatatgcagttccacctgacatcatcacatgagttacaggygcccaatgaaaggtaaaacaaaatccccattttccacgttgtttgaaaaagtcatgccttcagctgttctgcatcaaaacagttcccagtaacttctttgtggatgagacatcatgcaaaccccacagagcttctgtactcagaaagagtattttaacatcacatcctcttttaaattctaaaaacaatattytttatattcttgatataatmtatcttgctaaagttatgccaggtatttatagtgatccacagctcaaaactatcatctatagctatttctacaaaaagacagaaagg

SEQ ID NO: 19396 - DNA, 600 bp, Chicken  19866894229121_3
gttaatccctggaagaagaaggaccctgttccactggctgatcatagcctactcctcttggacacgcatatgcagttccacctgacatcatcacatgagttacaggygcccaatgaaaggtaaaacaaaatccccattttccacgttgtttgaaaaagtcatgccttcagctgttctgcatcaaaacagttcccagtaacttctttgtggatgagacatcatgcaaaccccacagagcttctgtactcagaaagagtattttaacatcacatcctcttttaaattctaaaaacaatattytttatattcttgatataatmtatcttgctaaagttatgccaggtatttatagtgatccacagctcaaaactatcatctatagctatttctacaaaaagacagaaagggaaacaaaacttttagtgcaacttctgtatgttaatgctgcctacaacaaggctgctgctataaaggtcacagatgacataatttatattattatagataatctgtgtcttctgtgtgcccacatttttccctctgtattttatagcgatgttgtgtattctgatggataaagctcctaggagakctttagtc

SEQ ID NO: 19397 - DNA, 600 bp, Chicken  19866894229121_4
ggaccctgttccactggctgatcatagcctactcctcttggacacgcatatgcagttccacctgacatcatcacatgagttacaggygcccaatgaaaggtaaaacaaaatccccattttccacgttgtttgaaaaagtcatgccttcagctgttctgcatcaaaacagttcccagtaacttctttgtggatgagacatcatgcaaaccccacagagcttctgtactcagaaagagtattttaacatcacatcctcttttaaattctaaaaacaatattytttatattcttgatataatmtatcttgctaaagttatgccaggtatttatagtgatccacagctcaaaactatcatctatagctatttctacaaaaagacagaaagggaaacaaaacttttagtgcaacttctgtatgttaatgctgcctacaacaaggctgctgctataaaggtcacagatgacataatttatattattatagataatctgtgtcttctgtgtgcccacatttttccctctgtattttatagcgatgttgtgtattctgatggataaagctcctaggagakctttagtctcaggcttacaaggcaggtg

SEQ ID NO: 19398 - DNA, 552 bp, Chicken  19866894229121_5
caatattytttatattcttgatataatmtatcttgctaaagttatgccaggtatttatagtgatccacagctcaaaactatcatctatagctatttctacaaaaagacagaaagggaaacaaaacttttagtgcaacttctgtatgttaatgctgcctacaacaaggctgctgctataaaggtcacagatgacataatttatattattatagataatctgtgtcttctgtgtgcccacatttttccctctgtattttatagcgatgttgtgtattctgatggataaagctcctaggagakctttagtctcaggcttacaaggcaggtgcagtcaccacatgggagatttgttgcttctccagcaggataggaacatttcctgcctccagaggagatgcagtgaatgaccttgcatgagcaataagtttgttctcaaacatctttctttttgtgaaaaccactttgatgaaccatacaacaaaccaggacaagctgcttcctatcattgggggcatgcccagaagtgggggtgggcaggggagatgtgcaggg

SEQ ID NO: 19399 - DNA, 599 bp, Chicken  19866894229124_1
  misc_feature (1)..(142): n is any nucleotide
nnnnnnnnnnnnnnnnnnnnnnnnnnnnnnnnnnnnnnnnnnnnnnnnnnnnnnnnnnnnnnnnnnnnnnnnnnnnnnnnnnnnnnnnnnnnnnnnnnnnnnnnnnnnnnnnnnnnnnnnnnnnnnnnnnnnnnnnnnnnnntgaataatcagttgtaaatttttaggcaggtggcttggagcgtgttctgcatgagccctgggcttttaaaagggtcagtgatatcgaacctcagaaaagacaagactggaaaggttcttagaggtcatttaaagacaggaaagatagaagtgcaaagragggatataacattttcttagatattctactaaattcgttacgttgcaggacacctttttaatgtaattgaaatcattgcaagttyggtcttktcttagaagaagttttattttaaaagaaatggaaagtaaggaaaatgaagcacgcaaatggtattaataaaatcttttttctttttttttctaagtcgcattgaatgatcagatgaaagcggtccggaaaaggaatgagacttctgttattgaccaaattggggaggacttgctttcttgggtaagttccatttttattcttgaaa

SEQ ID NO: 19400 - DNA, 599 bp, Chicken  19866894229124_2
  misc_feature (1)..(56): n is any nucleotide
nnnnnnnnnnnnnnnnnnnnnnnnnnnnnnnnnnnnnnnnnnnnnnnnnnnnnnnntgaataatcagttgtaaatttttaggcaggtggcttggagcgtgttctgcatgagccctgggcttttaaaagggtcagtgatatcgaacctcagaaaagacaagactggaaaggttcttagaggtcatttaaagacaggaaagatagaagtgcaaagragggatataacattttcttagatattctactaaattcgttacgttgcaggacacctttttaatgtaattgaaatcattgcaagttyggtcttktcttagaagaagttttattttaaaagaaatggaaagtaaggaaaatgaagcacgcaaatggtattaataaaatcttttttctttttttttctaagtcgcattgaatgatcagatgaaagcggtccggaaaaggaatgagacttctgttattgaccaaattggggaggacttgctttcttgggtaagttccatttttattcttgaaaatgtgtttcagaaaatgaccaatggtgtcagaggttaatgaaggtaattctcagctaatgggaattgaaggtctgagagctgttat

SEQ ID NO: 19401 - DNA, 599 bp, Chicken  19866894229124_3
  misc_feature (1)..(49): n is any nucleotide
nnnnnnnnnnnnnnnnnnnnnnnnnnnnnnnnnnnnnnnnnnnnnnnnntgaataatcagttgtaaatttttaggcaggtggcttggagcgtgttctgcatgagccctgggcttttaaaagggtcagtgatatcgaacctcagaaaagacaagactggaaaggttcttagaggtcatttaaagacaggaaagatagaagtgcaaagragggatataacattttcttagatattctactaaattcgttacgttgcaggacacctttttaatgtaattgaaatcattgcaagttyggtcttktcttagaagaagttttattttaaaagaaatggaaagtaaggaaaatgaagcacgcaaatggtattaataaaatcttttttctttttttttctaagtcgcattgaatgatcagatgaaagcggtccggaaaaggaatgagacttctgttattgaccaaattggggaggacttgctttcttgggtaagttccatttttattcttgaaaatgtgtttcagaaaatgaccaatggtgtcagaggttaatgaaggtaattctcagctaatgggaattgaaggtctgagagctgttatttgtgtg

SEQ ID NO: 19402 - DNA, 600 bp, Chicken  19866894229130_1
aatcatagcatggcctggggtggaaaggatcttgaagatcatcgaacatcaaccccctgccatgggcaaggttgccccccaccagctcaggctgcacagggctccatccaacccagtcttgaactcttccaggaatggagatccacagcttctctggacagcctgtgccaaggcctcaccaccatttattccctagctacctgtatataccagatgccttttaaagaatggaaacgtagatttcagacttagaaatgcatgtgccatatagtcacttgaaacctttttctgcgtcccttwcaaagtctgggtttaaggkaagaacactgtttcttctgttgtacatgaagtctatatcccctttgcagtgtgtatttgcaacccctaagtccccctcagtgggcactgctgacatgcctcctccttggccctacgaagcatgagtgtcaagactggaggagcatcaccactttgttgagcctctctctgctccagaggagagcatgggcagagtgttagttgggtacttgttgtgtccttgcttagcatgtttcccagcaaagcccagctttgctctctgtgctgcagagactgcataga

SEQ ID NO: 19403 - DNA, 600 bp, Chicken  19866894229130_2
gtggaaaggatcttgaagatcatcgaacatcaaccccctgccatgggcaaggttgccccccaccagctcaggctgcacagggctccatccaacccagtcttgaactcttccaggaatggagatccacagcttctctggacagcctgtgccaaggcctcaccaccatttattccctagctacctgtatataccagatgccttttaaagaatggaaacgtagatttcagacttagaaatgcatgtgccatatagtcacttgaaacctttttctgcgtcccttwcaaagtctgggtttaaggkaagaacactgtttcttctgttgtacatgaagtctatatcccctttgcagtgtgtatttgcaacccctaagtccccctcagtgggcactgctgacatgcctcctccttggccctacgaagcatgagtgtcaagactggaggagcatcaccactttgttgagcctctctctgctccagaggagagcatgggcagagtgttagttgggtacttgttgtgtccttgcttagcatgtttcccagcaaagcccagctttgctctctgtgctgcagagactgcatagatgttgcctgtggtgggctg

SEQ ID NO: 19404 - DNA, 600 bp, Chicken  19866894229132_1
gtgctgggatggcatgtgcagtgcagagggacttggcatcagtgtagaaaagggagcaaatccccagggctgggaaggggctgtggtgaggggtcctgcccatgcagctggcccctgggatgtgatgaagtccccctgccagtgtgggagcactgtggagccatgggaagcctcttgtcctggccgtgggctgtgtccccttcctgtgacccagcagacagctggcactgatccatgtgggggctttgctgccagagctgctcctgtccctgtggaccacagtgagttaaccccgtgctkggacatttgtcacaccgcacgtccccattgccctgagtgccccaggaccccccctgtgtcctgtccctggaccctttcccatgtgatgtctctaagttatttttaacatgccgacccaagcacggagctttctgccttaaaggtgccgttatgcaggggaccagggagccgtgtccatcccaggccaccagcctttgagcccagtggtttggggggaggaattagccaagcagtaatcagttttgaggggtcgttgtttttaatactttgcactagtcatctcctgctgtgggctgcagt

SEQ ID NO: 19405 - DNA, 600 bp, Chicken  19866894229133_1
agcaaaccagctgacatttcttcttattttttcttttagtttcctttctgctgttatgttgcagtggtgatgcttattttaatattgcaaagctgaaggaggcactgatttcaagaccctcagaaagtacatgcactatgaaacagaggtcttcagcatatgaaatattaacacatttatcacaaaacaaaacaaagtcaaatgaaacaaaaacactttgggctaagggggatctgggtcaggagaagaagagtgagtggcatttcacaggagatgctgtctcatcagccctgtaaattkctgtcatttctacacgaaagagtcgaatgaatcagtttctggatggctgtgacagccatcatctaaacaaaagcttcctggaaaacagacagaaaaaaaagaattctgggaggggggtggaaattgggccttatctattaaacttacaaaaaccaatgaaatatcaggagagctcacgaaaccattccttaaatactaattcagcagcagtttcaagcagctagctatatggttattgaatatttactccttccctcccatccgctggctgccagctgtcctaccttcccctcctccaac

SEQ ID NO: 19406 - DNA, 600 bp, Chicken  19866894229134_1
caaatgttccagccctgtaacaatcctggtgacttgtccctggactcaaattttcaaatctttcttgtactggggtacccagtgggctgggctgaaaggagtggtcacctctcctgatgtactgactacttttgcttcctgctgatacaaccagccatactgatagtcttcgctgttgccaggatgcattgctgaatcgtggctggctgactgcccaccataagctttccatcagctctgcaccattcagtgcgctgtcatctgcaaacttgatgagggtgctttagctctccttgtacrtctctgaaaaagttgttcagatgtgtaagtcccaggacagactcgtgagagccaccatttataaatggctttcaggtagtcttctagaattgtgaagacttgtgcggagggatttcaggagtaggaaatctcatggggttatcgtggaggctggtggggagggcctgggatgtgactctgtgggaagcgggcatctcaggaaacgatcctttcattatggatgaagttccaaagagtggaataggcaaaacaagctgcatggtagttgagttgacttagagcaaaagtggttaaaattag

SEQ ID NO: 19407 - DNA, 599 bp, Chicken  19866894229138_1
  misc_feature (1)..(171): n is any nucleotide
nnnnnnnnnnnnnnnnnnnnnnnnnnnnnnnnnnnnnnnnnnnnnnnnnnnnnnnnnnnnnnnnnnnnnnnnnnnnnnnnnnnnnnnnnnnnnnnnnnnnnnnnnnnnnnnnnnnnnnnnnnnnnnnnnnnnnnnnnnnnnnnnnnnnnnnnnnnnnnnnnnnnnnnnnnngtactgtattagagatgattggtgtggagaatatagtaacatagtttcttgccaaattacagtggagaaaaatgttgatgctggttcgtgtcccttcatgcctattatctgttctgcggtgaatgcatyctctatgtagctttccagtgttagttcccttctagctggttttattacaggcataaggttttgagacagaatgtatcaagaccaggcacaagaggtatctttgttaaaccttcctaatatttggcctatgtagtacacagagattttttttccctgaaggatcaaacaaaaatattttcttttaaaactgtaggagttaaagataatgaggaaatgcactgaaactaaaaacaaagtctttattgtcttgaagacaaactcactgtaattgcacttcttgtgaggtatttcttccctct

SEQ ID NO: 19408 - DNA, 600 bp, Chicken  19866894229138_2
ctatgtagctttccagtgttagttcccttctagctggttttattacaggcataaggttttgagacagaatgtatcaagaccaggcacaagaggtatctttgttaaaccttcctaatatttggcctatgtagtacacagagattttttttccctgaaggatcaaacaaaaatattttcttttaaaactgtaggagttaaagataatgaggaaatgcactgaaactaaaaacaaagtctttattgtcttgaagacaaactcactgtaattgcacttcttgtgaggtatttcttccctctgtycttatgtttcacttacaaggcaggaaatacagctttactgattaaawtttttttatgaggtataaataacttgctgccttcaaagatggcattcatttcaagatgaatctaaaaagaaagtgtttgtgatgaattaaaaataaaattaaaatgttgttttatctgggtaagtacaacttcttgtggatgtctgtactgtgtgtacagacataaaaggtgcttttatgagaaagagcattgaaatacatgttctggcacttcaatcaagtccaaattgttttatttcmtattctgtattgt

SEQ ID NO: 19409 - DNA, 600 bp, Chicken  19866894229138_3
ggcataaggttttgagacagaatgtatcaagaccaggcacaagaggtatctttgttaaaccttcctaatatttggcctatgtagtacacagagattttttttccctgaaggatcaaacaaaaatattttcttttaaaactgtaggagttaaagataatgaggaaatgcactgaaactaaaaacaaagtctttattgtcttgaagacaaactcactgtaattgcacttcttgtgaggtatttcttccctctgtycttatgtttcacttacaaggcaggaaatacagctttactgattaaawtttttttatgaggtataaataacttgctgccttcaaagatggcattcatttcaagatgaatctaaaaagaaagtgtttgtgatgaattaaaaataaaattaaaatgttgttttatctgggtaagtacaacttcttgtggatgtctgtactgtgtgtacagacataaaaggtgcttttatgagaaagagcattgaaatacatgttctggcacttcaatcaagtccaaattgttttatttcmtattctgtattgttcttgtctgtttctgtctgactctttgccatgagaggtaatgtatat

SEQ ID NO: 19410 - DNA, 600 bp, Chicken  19866894229138_4
tcttccctctgtycttatgtttcacttacaaggcaggaaatacagctttactgattaaawtttttttatgaggtataaataacttgctgccttcaaagatggcattcatttcaagatgaatctaaaaagaaagtgtttgtgatgaattaaaaataaaattaaaatgttgttttatctgggtaagtacaacttcttgtggatgtctgtactgtgtgtacagacataaaaggtgcttttatgagaaagagcattgaaatacatgttctggcacttcaatcaagtccaaattgttttatttcmtattctgtattgttcttgtctgtttctgtctgactctttgccatgagaggtaatgtatatgccttttttctatctacttgctgctttgctaggattataatacagataaaataataaaataaattcagaagctgcataagctgacttgcaccagtcatatgcagacacgtgtatatatatatacagcattgtttatggataattatcattaaattcaaagagtcagggatcagcatgttggaagagagcagatatctaacattatacttctgcgttaagccatgcaataatttctggttt

SEQ ID NO: 19411 - DNA, 600 bp, Chicken  19866894229139_1
acactgttcatatcatatggaaaactttttttttttttttttttttttttggtctgggctgcaatgatcatgttaaaataaatttacattaggttaagttttttaagtcaaacttactctgggcttaaatacttaatgaccttcagtaaattaaaattttgctgaacaaagaacctgagactggatatcctgcaatggacttacggatggtagttttgcagagaccctgtgaggaattcctctggtacctgagagatggctgattaacagggctgctgggacagctcccacctccctggrttttccacagcatgcctatcaggaaatccataatgtaaaatttgtctactctttactgactgaacctgaaaggatgaaaatgcagtaaattatttgccaagtgacacaaattgtctcttaaggaaataacaggtacgaaactcttcaagcttttccactgtgtagagtaaaattcatttccagatgatctaagagcattcttcctttctttataagattaagcctttggaaactatataggtcacctatattatgccctcaggatgcagttcttaataagtatttggttgctgtactgtt

SEQ ID NO: 19412 - DNA, 600 bp, Chicken  19866894229139_2
cttccttattttctcagcaggcacacagttgatttcatggtataatgttgagtttgtaatgcttgcagtgtttacctaaataagggacagaatgttctttgtgtgtctgacttcaaatgatgagagatctcaggaatgtgtattcctttgtcaatggaagggggaatggttcagagctgattggtttttcatgtttctttctgttcatatgctatctctttctatgaaaggaataatgtagaaaaagatatttttaaagggaaatgggagggatccttcctttgttcactttgacacttycttggcaattattttgacccagtttggcaaaaatgacattgcagctgtttgtaagtgttatttagcccattatgaactctgcatgaggtatttttagatttgatgctgttgagcctcctctgttttagtacttatttctaattcatatgagtatcatgaatctgagagctccattgaccttcattacactatctctgcagttcacagccttagcaaacaagcaaacgcaaaggtgagatacacaagaaccaaagagtcttaaaaagaatcaaaatgtatcaaacagttggtttgaagaaa

SEQ ID NO: 19413 - DNA, 600 bp, Chicken  19866894229139_3
tgcagctgtttgtaagtgttatttagcccattatgaactctgcatgaggtatttttagatttgatgctgttgagcctcctctgttttagtacttatttctaattcatatgagtatcatgaatctgagagctccattgaccttcattacactatctctgcagttcacagccttagcaaacaagcaaacgcaaaggtgagatacacaagaaccaaagagtcttaaaaagaatcaaaatgtatcaaacagttggtttgaagaaaagccaagaggcacagctggcttatgtaaagtaagaaagsaggattcttctatttgactttttagcagaccagaagctagacttcagtttctggcttttgtgccttgttttcttgtcatctttatcagaaaagcatgctttccatcactccgctgcacttcaagagtaaagctcattttaatagtatgcattacccaggtaattttattccccttccatcttatatgaaaagagaaaaagtttctcaggtacttcagaatttaatttttttttttttttaatcttcccagttcactccctccccccagaagtggattttgcagtctttatcttcatccaa

SEQ ID NO: 19414 - DNA, 600 bp, Chicken  19866894229144_1
tggattcgacccatgtcagagaaagtaaagtacagctcacagtgtttgtgtggagtgatgtacaaaatccattgtgattttaataatggaaaaagtggacttggagctctcttgagaagcaaagtatatcttcattttcagtctttctaatgagaggacagatttccctgaatgcttgatgagtggctggagatacaagtacttataagaccataaatataagcttttttttctctttttattttgctgctgctctgcttctgcttgagtttgtttaacgcagacaaaaatggcacttamagtcatgtttctagggctgcaaaatacaaacgcaactgagggtaaacacgcgttgcttaatcttcagcatctaaaataatggaacaatgatgagaattaagctcagcaatgaattaatagcactgcaagcactgtccttcagaggacaacaagtggtacctccagtctttcgtgagagcagcatttctgggtccaggctgtggaaaggagaaaggcactggagcaaaccatccccctccccgcctccccttctcgccttggagttccctgcccaccacctttctgctgacctctgtctcc

SEQ ID NO: 19415 - DNA, 599 bp, Chicken  19866894229148_1
  misc_feature (1)..(41): n is any nucleotide
nnnnnnnnnnnnnnnnnnnnnnnnnnnnnnnnnnnnnnnnnagagctttgttagcaccttgtagctttatctgcaacctgttgttgcagtgtgaaggctggatttttgtcttcaaattacctgatttaaattctgaatttgaaacaacaagaagaaaaacaccaccacacctgctttggctttgaacatccagtttgaaggacaccctgtgtgaagcctgtgctgtacagaatttctgtaaaaagaaggggaaaaaataaccaaaccattgctttgcaggtgctaaaataaaggttcctrggcatccgtgtcaggcggttgcatgccaaaccgygtgtctttaggcaccactctaagtaygagtaaaacgtgagacagtgtggctgtatcttaagaattacagcaggtctttggggcaggtgaagtagaaaaactcaagccatctgaagctcaggcacccgaggtgcaaaggaccgtcccacagccctgcaacaggggaggcttggccatggtgcgccttcctaagcagcgctcatcttctgcagagcaccgtttcctcctggcgttccccctgagggacacatgagcacataccagct

SEQ ID NO: 19416 - DNA, 599 bp, Chicken  19866894229148_2
  misc_feature (1)..(7): n is any nucleotide
nnnnnnnagagctttgttagcaccttgtagctttatctgcaacctgttgttgcagtgtgaaggctggatttttgtcttcaaattacctgatttaaattctgaatttgaaacaacaagaagaaaaacaccaccacacctgctttggctttgaacatccagtttgaaggacaccctgtgtgaagcctgtgctgtacagaatttctgtaaaaagaaggggaaaaaataaccaaaccattgctttgcaggtgctaaaataaaggttcctrggcatccgtgtcaggcggttgcatgccaaaccgygtgtctttaggcaccactctaagtaygagtaaaacgtgagacagtgtggctgtatcttaagaattacagcaggtctttggggcaggtgaagtagaaaaactcaagccatctgaagctcaggcacccgaggtgcaaaggaccgtcccacagccctgcaacaggggaggcttggccatggtgcgccttcctaagcagcgctcatcttctgcagagcaccgtttcctcctggcgttccccctgagggacacatgagcacataccagctgctgtactttctctctggtgagaggattcctgtt

SEQ ID NO: 19417 - DNA, 600 bp, Chicken  19866894229148_3
gtagctttatctgcaacctgttgttgcagtgtgaaggctggatttttgtcttcaaattacctgatttaaattctgaatttgaaacaacaagaagaaaaacaccaccacacctgctttggctttgaacatccagtttgaaggacaccctgtgtgaagcctgtgctgtacagaatttctgtaaaaagaaggggaaaaaataaccaaaccattgctttgcaggtgctaaaataaaggttcctrggcatccgtgtcaggcggttgcatgccaaaccgygtgtctttaggcaccactctaagtaygagtaaaacgtgagacagtgtggctgtatcttaagaattacagcaggtctttggggcaggtgaagtagaaaaactcaagccatctgaagctcaggcacccgaggtgcaaaggaccgtcccacagccctgcaacaggggaggcttggccatggtgcgccttcctaagcagcgctcatcttctgcagagcaccgtttcctcctggcgttccccctgagggacacatgagcacataccagctgctgtactttctctctggtgagaggattcctgttgcttaccttgcacgtctttacgtaaca

SEQ ID NO: 19418 - DNA, 600 bp, Chicken  19866894229151_1
ctgctccctgtgcatgtctgaactgaaaaagtattgtaatcaagtcataaaaatcatctccaaagcagtgtagacctcgattctctctgccctggggtccgcaaccattgtcaggaataaaatgagacacatatcaaaacaaagagagcattcctacagaagtgcagagtcatgttgttatgctctcagtggaaaaaagcaaccacgagactgcagatgtgcagcacccatggaaaaagggccagtgcttggctcaaggtcatttctctctcatcagctgataatggagtggctctccaracccaggagattcataaacccattgggttgtatggcatgtagcaatgatagaagcgcaaagcccagccactaggctgctggaaagactgtggtagctgtgaatagatgagtatcagttaggaacaaccagaacagagctttggttgacaagctagagcatctctgggcaaagaaaattaggcaggtcatcttcaacctccttgtgctgtgactgcatcgagtatagggtgcactgaccatcaatagaaaatgttttctgtaacgtatttgcatctcttgtcttttgcactgagttagaaa

SEQ ID NO: 19419 - DNA, 600 bp, Chicken  19866894229156_1
gtgtgaaggtactcattgctgagtaagaaaatatttaggattcaaggtggtgtaacactgttatgacaactgccattattagaacaaatactggtgaaggtgaaagggagaataaggtgcagttcaaccacatttacatataatgcatgcaaggtgtttaaatcatatcttcatgttctctgaacatcttgggtcttttgacatatgaaaagtaactgctaccatttttgagtacagaaactttaagggtttagaaggaaactgtaggagtaaaaaaaagttctgttaaatcttcaaagraaaaaaaatcagggatgaaagcaaagctgagatacaaagtgcattttaaggcatttaatgtttccaagtgtgtttctggcctttgtctactggcaagtttcaaatttactgtttaagaattgaaatttcaaaggtgatttggaaatgcttttctcctgcattaacaaatgtgagggtatatggccttttagtcagaacacatggcactaaaaatatacatgtgtggaggcttttgtttcacagagtcacattttcttcctttcatttgtttctgaaatcaaagttttgtgttctttaaag

SEQ ID NO: 19420 - DNA, 600 bp, Chicken  19866894229157_1
ctgatgtgtaatatcagtcccctcttcacaacctattcccttagcagcaggactgaggagggttcccatggtccacatgcccgcatgtggggagtattttgtagggccaattttgtccagctaaagccatcagcactttcagatcactgaccaagactgccctgatcctttcagctgacctctacggagcactcacaatcagatgaggtaagcagagtaattagaatatatttaatacacttaattgataagatgatccctactaagtacaattccctgcattcctgtcatcggggcttycacctcaggtgctcttcagcatgctttcttgagcttatgtgtttttgcctttaataattattcctgttcaggctttttaactctactaactcttaacgctgctttaaggtatttaacgttagatcaaaatattcatagacttgtcagctgttaaagaagtgcaygctaggagttatattactatgttgttatatttattctcagttaccttaaagcaggtattggtttggggctgcagttgttgatcaattggtgactcgcacacaatgcaagtgggtgtattcattggcacgagatgtc

SEQ ID NO: 19421 - DNA, 600 bp, Chicken  19866894229157_2
atcctttcagctgacctctacggagcactcacaatcagatgaggtaagcagagtaattagaatatatttaatacacttaattgataagatgatccctactaagtacaattccctgcattcctgtcatcggggcttycacctcaggtgctcttcagcatgctttcttgagcttatgtgtttttgcctttaataattattcctgttcaggctttttaactctactaactcttaacgctgctttaaggtatttaacgttagatcaaaatattcatagacttgtcagctgttaaagaagtgcaygctaggagttatattactatgttgttatatttattctcagttaccttaaagcaggtattggtttggggctgcagttgttgatcaattggtgactcgcacacaatgcaagtgggtgtattcattggcacgagatgtctgcatccaagacatggtgccatctgaaagaaaacaaacatcacatcttattaaggagatcattaagattatcatgagatcattaatgatattgtgacagcttgtcacaacgttatcattaatgtcacaatattgtgacgttttctatatcttgctgattagagt

SEQ ID NO: 19422 - DNA, 600 bp, Chicken  19866894229157_3
atgttgttatatttattctcagttaccttaaagcaggtattggtttggggctgcagttgttgatcaattggtgactcgcacacaatgcaagtgggtgtattcattggcacgagatgtctgcatccaagacatggtgccatctgaaagaaaacaaacatcacatcttattaaggagatcattaagattatcatgagatcattaatgatattgtgacagcttgtcacaacgttatcattaatgtcacaatattgtgacgttttctatatcttgctgattagagtttatatcagcagcaaagycagcggactgacagcaaaaaataaaagctggcattgatcaaagagaatgctttactggtatgtgtgtcagaaaggtgctgagttacctttcagtagatttaaatctaccataacgtgtgtaggtagttccagtcattgtaactatgaaccttaagtacagaagtgctgaatatttgcagttctctgttgaaactacagcattgcctcagacaagacatctttctgaggatacggggaggaaaaaaaccaccattgactcactagatagggttattctctcctgggaagagtttatgggag

SEQ ID NO: 19423 - DNA, 600 bp, Chicken  19866894229157_4
tcaggcatattagatggatcttctacagctatggcataggtactagttactaactaactgacctcactagttagcactgaaataagatgcatatgcagctcctgaagatgcggtcactgttgcaggatgaggaggaatctgaatttggtgatgtttcctggcacaagtgaataaaatacaatttacttttataaagttgcccttatgaaaatatgtggcacctgcagcaatccacagttaattttgccctccactgaataattactttgtgcccactgctgaagttactgaagaaaatgyaaaaaataagaacttctcaaatgaaagagtgacttaacagtgaacacataatctgctgaggaagttcctccaaagaggattcattttgttacgatattttgctgacctgtgctccttcaggggatgggaagcgatgcactgacacaggtgggataggagagccacattcctggcagaagtgagccaaggggtcagagaggcgaggtgcagagcagtacgcacatctgaaaacaacagcaagctggctgatcttgttttggtgatgtactggtgcgtaataatgacaaatctggaaccrtc

SEQ ID NO: 19424 - DNA, 600 bp, Chicken  19866894229157_5
tagatggatcttctacagctatggcataggtactagttactaactaactgacctcactagttagcactgaaataagatgcatatgcagctcctgaagatgcggtcactgttgcaggatgaggaggaatctgaatttggtgatgtttcctggcacaagtgaataaaatacaatttacttttataaagttgcccttatgaaaatatgtggcacctgcagcaatccacagttaattttgccctccactgaataattactttgtgcccactgctgaagttactgaagaaaatgaaaaaaataayaacttctcaaatgaaagagtgacttaacagtgaacacataatctgctgaggaagttcctccaaagaggattcattttgttacgatattttgctgacctgtgctccttcaggggatgggaagcgatgcactgacacaggtgggataggagagccacattcctggcagaagtgagccaaggggtcagagaggcgaggtgcagagcagtacgcacatctgaaaacaacagcaagctggctgatcttgttttggtgatgtactggtgcgtaataatgacaaatctggaaccrtctgtgtctgga

SEQ ID NO: 19425 - DNA, 600 bp, Chicken  19866894229157_6
gaaaaaaataagaacttctcaaatgaaagagtgacttaacagtgaacacataatctgctgaggaagttcctccaaagaggattcattttgttacgatattttgctgacctgtgctccttcaggggatgggaagcgatgcactgacacaggtgggataggagagccacattcctggcagaagtgagccaaggggtcagagaggcgaggtgcagagcagtacgcacatctgaaaacaacagcaagctggctgatcttgttttggtgatgtactggtgcgtaataatgacaaatctggaaccrtctgtgtctggaytttggccactgatgtctaaattgcggctcctaatcaacggcggctcaccaggccattcccagtgtcctttgcaggagactgaacaatgaagagctttgcaacgtggaagcctctgactgctgctacaaagtttcatgctttttactcaccgtactctactgagatgtgagctgtgtcaccttctactgtgagtatctcttttgctttccctatttaagatagagtctcacagcattatcaacttgcttgttggaagcaattgctctgtttctttctaagaacaaaga

SEQ ID NO: 19426 - DNA, 600 bp, Chicken  19866894229157_7
acttctcaaatgaaagagtgacttaacagtgaacacataatctgctgaggaagttcctccaaagaggattcattttgttacgatattttgctgacctgtgctccttcaggggatgggaagcgatgcactgacacaggtgggataggagagccacattcctggcagaagtgagccaaggggtcagagaggcgaggtgcagagcagtacgcacatctgaaaacaacagcaagctggctgatcttgttttggtgatgtactggtgcgtaataatgacaaatctggaaccrtctgtgtctggaytttggccactgatgtctaaattgcggctcctaatcaacggcggctcaccaggccattcccagtgtcctttgcaggagactgaacaatgaagagctttgcaacgtggaagcctctgactgctgctacaaagtttcatgctttttactcaccgtactctactgagatgtgagctgtgtcaccttctactgtgagtatctcttttgctttccctatttaagatagagtctcacagcattatcaacttgcttgttggaagcaattgctctgtttctttctaagaacaaagatgtcaatagaagt

SEQ ID NO: 19427 - DNA, 600 bp, Chicken  19866894229161_1
gtgttgtatccccaaagactacttccagtagtgtggatcaaagtggtacctatgaaccaccccttaaatacccagagtcatttctgaaaaattaaacatgctatgtttgcttgcacgctgattggggcactctggttgttgatagcaatcagtctgagcttccctactgctgatgtaatgatgatgaatgctgtgacactgctatttcagacagctcttctcagtggatgcaaaccacttgttaatgaactgaatacaactgcagcagcatcgcagcatcgaataaagcagtgagaagcyttttttttttttttttttaacaatgcattaaaaggtacctcctcaaaaatgtacctcataaagacagagggtttaaaaccagcctaaaattgagagtttcagatgctgattcctgacagcttatatggaaccaggtagtcttgttgacggtcagtgagactatttacatgcataaatgtgtgcatgatctgatccttaaaatgaagttaaacaaaacaataatctaaaaagtaattcagataggagctgagcagggcagagctgaggatttcttggaaaactgcagtgttatattcagaa

SEQ ID NO: 19428 - DNA, 600 bp, Chicken  19866894229163_1
tctgctggatagggaataacacacagaaaacagccagcaagtgtcaaaagttcagagaagcagtaactaatcatcctatttcagatatacacatagatgagacagaaaatcaagtcaaaaatagcaagcctgttgtgcagaagaaatcatgagtacataactgttaagaataaatggttttccattactgccctcagcgaagctccctagaaatgatctcttagaagtgaagctcagagaataaaatgccaaacccaggtactgcagatatctgcagtcaaggaggaggtctgtggcagyggcaatccacaaacacatacatttcaaggaaacaacactagaaatttcctatggctctgcctagcaatagtctcatcaaaaggagacatcaaaggtggcatgcacatctgctgcagaaaatgcaaagacagcagtctcctaccacatgaagttaatactagtgtactacattaaagcctgcatttttagggctaaccatctatcagtctttctggaaatgactaccaggaagaaaaaygccttaaagcaaagggccgctttctctgatggccacatgcttagtatccagttgcaaagcaa

SEQ ID NO: 19429 - DNA, 600 bp, Chicken  19866894229163_2
gaataaaatgccaaacccaggtactgcagatatctgcagtcaaggaggaggtctgtggcagyggcaatccacaaacacatacatttcaaggaaacaacactagaaatttcctatggctctgcctagcaatagtctcatcaaaaggagacatcaaaggtggcatgcacatctgctgcagaaaatgcaaagacagcagtctcctaccacatgaagttaatactagtgtactacattaaagcctgcatttttagggctaaccatctatcagtctttctggaaatgactaccaggaagaaaaaygccttaaagcaaagggccgctttctctgatggccacatgcttagtatccagttgcaaagcaaatagcccttcagcttcttatgccaaagtatcagattattttgttaaactttcatataggcttgcaaggcttcctaataagttttctttccatttaaaaatatggaaagaaaaatcaaaatactttgaaggtaatatttttaaaagcatgaaaggataataaatctaactttctgtggcattttatggtagtgacatctgtaccttgttctcagggaatttcatgcagtatgacagctc

SEQ ID NO: 19430 - DNA, 600 bp, Chicken  19866894229171_1
cccgctgttgttacaatggattgcttctctttgtaaaggcagaaattctgattcccttcaagctgctattgattttggcacacagagacttcaccctcccccgtttgcaatgcactgtgctctttaaattgtggcgtcaacagccgcccattatctgctgctcatccggcaggtcgctgcacttgagaggggagaaaacctcttgctacaccgcagtgtgtcacaccaccattcgtgttgtgaaattaatcctttctgaaacgttaaagacttgaagaagtctcagatataatcattccygattttggaaaagattaacaattatggtcttattttgagagttaaatttgagactttttagcagtcaatttaccatgctgataatatgattcatgctacaataggtatctgttcatgcagtagggatgtagaagtagaaaaaaaccttttatttaaagcaggtcaaactgatgctgtggcagacaccaataacactttttaacaaagaaaagtaatgtatcatagaagcggcagaaagcagataaacacatacagctgtactgccagtcatccgtaacatactaatctcttaagaactga

SEQ ID NO: 19431 - DNA, 600 bp, Chicken  19866894229180_1
caggaccaaaaaattattagcttggcctctcagaaaaatccttactattgattttcaatgcgtatcttattcacgaaattatttttctgtcttggcatgtttaaaccttcaggtttttgaggttctcacatcccctagagctttaaaacaaaacccttattcatgagtaatgctttgattccagcaacaagagttttacgaaaactacttctgcgagattagagttaagatgcccaaatggctcttagcattcactccccttttccaccctacctagagagcagatgtcagggctcagcrtgctgagcacaccacacggccagcagcagcaggacagagctcggccctgaggacacaccgacccccagtgacacacaggagcactggctggcgtttgctcttccttctgtggccagcagtggacaatgacagtttagcagtggcatttctggcaagatagcagggctatttctgaaatcgggcatatgggatagcgataaccccatcacgtctgttttattgcaggagtattcaatttaggaactttctgctgactctggccccattacctgatatcacagatgcttttctctgttttta

SEQ ID NO: 19432 - DNA, 599 bp, Chicken  19866894229187_1
  misc_feature (1)..(56): n is any nucleotide
nnnnnnnnnnnnnnnnnnnnnnnnnnnnnnnnnnnnnnnnnnnnnnnnnnnnnnnntactgccactttgtgtttggtgctgggattacagcagggcacgtgggaagtactgctgacctcacctgttcccagcaagtgcttgtctgacctgttccgttccagcacccactcctgcctgcagccaaggctgactcacgggagcgggggctgctgccctcctgagagtcttccttgtgccagacttggccctgggcactcctctttctgaaggtggtcaggagagcagtgctctggtggaggrgattttcacctttttcacctatctggtgaaatgaaatggaaatgtggtgtgtttwtccatcacctctgcacccaagtacctcaccaatcacaagtgggcctctgcacccatagagccaagcagtgatctgctgggatgcgctcagaaccagagcacagaaggtcactggcactacggcatggcgagaggcagtgcaratcycattccagaggacactgcctatsaggcctgctatctatgggtaactgcagcagcctgggggcactgctttcctccagctctgtggcagtgttgggaaa

SEQ ID NO: 19433 - DNA, 599 bp, Chicken  19866894229187_2
  misc_feature (1)..(1): n is any nucleotide
ntactgccactttgtgtttggtgctgggattacagcagggcacgtgggaagtactgctgacctcacctgttcccagcaagtgcttgtctgacctgttccgttccagcacccactcctgcctgcagccaaggctgactcacgggagcgggggctgctgccctcctgagagtcttccttgtgccagacttggccctgggcactcctctttctgaaggtggtcaggagagcagtgctctggtggaggrgattttcacctttttcacctatctggtgaaatgaaatggaaatgtggtgtgtttwtccatcacctctgcacccaagtacctcaccaatcacaagtgggcctctgcacccatagagccaagcagtgatctgctgggatgcgctcagaaccagagcacagaaggtcactggcactacggcatggcgagaggcagtgcaratcycattccagaggacactgcctatsaggcctgctatctatgggtaactgcagcagcctgggggcactgctttcctccagctctgtggcagtgttgggaaatgtttgcatctcccacctgcaaatccttgtcctacaccaacagtcttatgatttg

SEQ ID NO: 19434 - DNA, 600 bp, Chicken  19866894229187_3
gagcgggggctgctgccctcctgagagtcttccttgtgccagacttggccctgggcactcctctttctgaaggtggtcaggagagcagtgctctggtggaggrgattttcacctttttcacctatctggtgaaatgaaatggaaatgtggtgtgtttwtccatcacctctgcacccaagtacctcaccaatcacaagtgggcctctgcacccatagagccaagcagtgatctgctgggatgcgctcagaaccagagcacagaaggtcactggcactacggcatggcgagaggcagtgcaratcycattccagaggacactgcctatsaggcctgctatctatgggtaactgcagcagcctgggggcactgctttcctccagctctgtggcagtgttgggaaatgtttgcatctcccacctgcaaatccttgtcctacaccaacagtcttatgatttgggggtgtgtggcacaagacacagcagtctgccaaaaaccagtgccaggatgcagctcccctgaaggaccataaatttgggctgcacagagcagagctctccaaaaaccmtctagcatcacttatggccaaacgatgaggctcc

SEQ ID NO: 19435 - DNA, 600 bp, Chicken  19866894229187_4
gggggctgctgccctcctgagagtcttccttgtgccagacttggccctgggcactcctctttctgaaggtggtcaggagagcagtgctctggtggaggrgattttcacctttttcacctatctggtgaaatgaaatggaaatgtggtgtgtttwtccatcacctctgcacccaagtacctcaccaatcacaagtgggcctctgcacccatagagccaagcagtgatctgctgggatgcgctcagaaccagagcacagaaggtcactggcactacggcatggcgagaggcagtgcaratcycattccagaggacactgcctatsaggcctgctatctatgggtaactgcagcagcctgggggcactgctttcctccagctctgtggcagtgttgggaaatgtttgcatctcccacctgcaaatccttgtcctacaccaacagtcttatgatttgggggtgtgtggcacaagacacagcagtctgccaaaaaccagtgccaggatgcagctcccctgaaggaccataaatttgggctgcacagagcagagctctccaaaaaccmtctagcatcacttatggccaaacgatgaggctccsggt

SEQ ID NO: 19436 - DNA, 600 bp, Chicken  19866894229187_5
tcttccttgtgccagacttggccctgggcactcctctttctgaaggtggtcaggagagcagtgctctggtggaggrgattttcacctttttcacctatctggtgaaatgaaatggaaatgtggtgtgtttwtccatcacctctgcacccaagtacctcaccaatcacaagtgggcctctgcacccatagagccaagcagtgatctgctgggatgcgctcagaaccagagcacagaaggtcactggcactacggcatggcgagaggcagtgcaratcycattccagaggacactgcctatsaggcctgctatctatgggtaactgcagcagcctgggggcactgctttcctccagctctgtggcagtgttgggaaatgtttgcatctcccacctgcaaatccttgtcctacaccaacagtcttatgatttgggggtgtgtggcacaagacacagcagtctgccaaaaaccagtgccaggatgcagctcccctgaaggaccataaatttgggctgcacagagcagagctctccaaaaaccmtctagcatcacttatggccaaacgatgaggctccsggtacatttaaggtctccatggtcag

SEQ ID NO: 19437 - DNA, 580 bp, Chicken  19866894229187_6
cactggcactacggcatggcgagaggcagtgcaratcycattccagaggacactgcctatsaggcctgctatctatgggtaactgcagcagcctgggggcactgctttcctccagctctgtggcagtgttgggaaatgtttgcatctcccacctgcaaatccttgtcctacaccaacagtcttatgatttgggggtgtgtggcacaagacacagcagtctgccaaaaaccagtgccaggatgcagctcccctgaaggaccataaatttgggctgcacagagcagagctctccaaaaaccmtctagcatcacttatggccaaacgatgaggctccsggtacatttaaggtctccatggtcagctcatctctttactctgctgtttttccagtgaggtccatcactttgggaaagccttcagctgctttgcggctgatgagatttgcacatatggtgaggatggcacgggggaggcagcacccaggctgtggggagggatcccgaggggaaaataagcgttcctgcagaacaccagcagggaagcggattcctgcatcattgggctcatgggaaggcatggg

SEQ ID NO: 19438 - DNA, 545 bp, Chicken  19866894229187_7
tcycattccagaggacactgcctatsaggcctgctatctatgggtaactgcagcagcctgggggcactgctttcctccagctctgtggcagtgttgggaaatgtttgcatctcccacctgcaaatccttgtcctacaccaacagtcttatgatttgggggtgtgtggcacaagacacagcagtctgccaaaaaccagtgccaggatgcagctcccctgaaggaccataaatttgggctgcacagagcagagctctccaaaaaccmtctagcatcacttatggccaaacgatgaggctccsggtacatttaaggtctccatggtcagctcatctctttactctgctgtttttccagtgaggtccatcactttgggaaagccttcagctgctttgcggctgatgagatttgcacatatggtgaggatggcacgggggaggcagcacccaggctgtggggagggatcccgaggggaaaataagcgttcctgcagaacaccagcagggaagcggattcctgcatcattgggctcatgggaaggcatggg

SEQ ID NO: 19439 - DNA, 599 bp, Chicken  19866894229188_1
  misc_feature (1)..(25): n is any nucleotide
nnnnnnnnnnnnnnnnnnnnnnnnnttgagggagggggaatatgctaaacacttgagattgtgtccagcttttaagatacctgcattccttgtttatttctttgttttatatccttttgatcactagcttagaaaaagaacagaaaatagtcatacaataatgccttgcagcctgtggcatattccatttcaggatcctaacaaaaggtctgtaggcatgtaagaatagtttcagtctaagtttagttcagtctggaaaagctttttagttccctgtaataaaatggagcaaattagttygaacaagaaagagtaacaacacaagtagtgcttgagggatctaggaaggcaggcagcgagatccttcagttagccaagtctggcaattaactcaccaattaactcacaaaaaagacttctrcgggtttcacagtgaccaacagaccctgccagtggggtctcctrgtcttcagggtatggcaggtaagctctgaggaatccyagtggtcatcacaggctttctctgggccttctgtgatcactactgcctcagcagggagcagcaagggctgtgtgctggcacgtcggctgctccaatt

SEQ ID NO: 19440 - DNA, 600 bp, Chicken  19866894229188_2
cactagcttagaaaaagaacagaaaatagtcatacaataatgccttgcagcctgtggcatattccatttcaggatcctaacaaaaggtctgtaggcatgtaagaatagtttcagtctaagtttagttcagtctggaaaagctttttagttccctgtaataaaatggagcaaattagttygaacaagaaagagtaacaacacaagtagtgcttgagggatctaggaaggcaggcagcgagatccttcagttagccaagtctggcaattaactcaccaattaactcacaaaaaagacttctrcgggtttcacagtgaccaacagaccctgccagtggggtctcctrgtcttcagggtatggcaggtaagctctgaggaatccyagtggtcatcacaggctttctctgggccttctgtgatcactactgcctcagcagggagcagcaagggctgtgtgctggcacgtcggctgctccaatttgtagcccagcatataattccaaatgtagcttgtcagcagtttgcactaagaaacttctctgaggctggagtacactctcctcctggtcagctcctctagcaccattataacctttccaagc

SEQ ID NO: 19441 - DNA, 600 bp, Chicken  19866894229188_3
ttgcagcctgtggcatattccatttcaggatcctaacaaaaggtctgtaggcatgtaagaatagtttcagtctaagtttagttcagtctggaaaagctttttagttccctgtaataaaatggagcaaattagttygaacaagaaagagtaacaacacaagtagtgcttgagggatctaggaaggcaggcagcgagatccttcagttagccaagtctggcaattaactcaccaattaactcacaaaaaagacttctrcgggtttcacagtgaccaacagaccctgccagtggggtctcctrgtcttcagggtatggcaggtaagctctgaggaatccyagtggtcatcacaggctttctctgggccttctgtgatcactactgcctcagcagggagcagcaagggctgtgtgctggcacgtcggctgctccaatttgtagcccagcatataattccaaatgtagcttgtcagcagtttgcactaagaaacttctctgaggctggagtacactctcctcctggtcagctcctctagcaccattataacctttccaagcaccagagcaggcttgcccaaggggctggaacttttcctttgttt

SEQ ID NO: 19442 - DNA, 600 bp, Chicken  19866894229188_4
aaaaggtctgtaggcatgtaagaatagtttcagtctaagtttagttcagtctggaaaagctttttagttccctgtaataaaatggagcaaattagttygaacaagaaagagtaacaacacaagtagtgcttgagggatctaggaaggcaggcagcgagatccttcagttagccaagtctggcaattaactcaccaattaactcacaaaaaagacttctrcgggtttcacagtgaccaacagaccctgccagtggggtctcctrgtcttcagggtatggcaggtaagctctgaggaatccyagtggtcatcacaggctttctctgggccttctgtgatcactactgcctcagcagggagcagcaagggctgtgtgctggcacgtcggctgctccaatttgtagcccagcatataattccaaatgtagcttgtcagcagtttgcactaagaaacttctctgaggctggagtacactctcctcctggtcagctcctctagcaccattataacctttccaagcaccagagcaggcttgcccaaggggctggaacttttcctttgtttcaaggctgaaactgatcatagaccatggaatatttct

SEQ ID NO: 19443 - DNA, 600 bp, Chicken  19866894229189_1
atcaggctaaaaatgaatcttctgactgcggcctctgtaaagatctcagatcaggtacaagagggagaaggaaaagtaaatctagctgtttactatgtaaaggcttcagttaccagctgcaagagattccccatacggaaggttatgccagtagttggtgtctactcagttaccttcttttcttctgcaatgtccccatcaggcttcgggaccttattttctttcctctgccagagcacgctcatgcatcagttactctcatttatttttactttaacatttatacttgaatttatcaaktatgtaggtagtacgacaagctgttaaagagacttgtggtttacaggactccgttgatgttagtgatgccatgaagaacaaaggttttagatgcagccaaggatacagtcccatagttgttcaaaagccatgtcctcattaccttagaaactcaaacaaatactttgcaaaagaatagactggtttatttcagatttctaggcggatgtcagtttatttgtaactgcacgtttgtaataaactttgcagatttgttcagatttggtcgctactgtaagttctcgagtctctgatggagtt

SEQ ID NO: 19444 - DNA, 599 bp, Chicken  19866894229191_1
  misc_feature (1)..(46): n is any nucleotide
nnnnnnnnnnnnnnnnnnnnnnnnnnnnnnnnnnnnnnnnnnnnnntgggggtgggttggggttggactggatgatcttagaggtcttttccaaccttaatgattctgtgattccatgatctgtcatgtggagtggccagaacggtacacagtgctctactgtggctatttacatgctaagtagagggcatgatggctttcttggatgtgccaggtatcctttgtctcatgtagaccagtctaaggatagcccacatcacctctggctcaagctggtctgatctgaaccatactcagtcrgcatggtcaggaccatactggtcatactggccttagccaaactgcaratttctgcatcaccagaaacctcttttgagtcctctacgagcacattgaaagctctcatcccaggatcaacacagtaagctctattgtgatgcaaaaacgactgtttattaccatgtatttaagagagttctgtttctttacaagtctttttctgaagcatcatgtcaaaagactgagatttgtgatattccctcggcaacaactgactatttcactgaggtcacagatttaagattcttaatgtgagtcgg

SEQ ID NO: 19445 - DNA, 600 bp, Chicken  19866894229191_2
gggggtgggttggggttggactggatgatcttagaggtcttttccaaccttaatgattctgtgattccatgatctgtcatgtggagtggccagaacggtacacagtgctctactgtggctatttacatgctaagtagagggcatgatggctttcttggatgtgccaggtatcctttgtctcatgtagaccagtctaaggatagcccacatcacctctggctcaagctggtctgatctgaaccatactcagtcrgcatggtcaggaccatactggtcatactggccttagccaaactgcaratttctgcatcaccagaaacctcttttgagtcctctacgagcacattgaaagctctcatcccaggatcaacacagtaagctctattgtgatgcaaaaacgactgtttattaccatgtatttaagagagttctgtttctttacaagtctttttctgaagcatcatgtcaaaagactgagatttgtgatattccctcggcaacaactgactatttcactgaggtcacagatttaagattcttaatgtgagtcggcactgcactggattgcaaagggaaaagcactctggaacagctgacttg

SEQ ID NO: 19446 - DNA, 580 bp, Chicken  19866894229191_3
ggcctgaccagtatttgactaggatgcagattttaaatccctgctatggaaagcacaagccaattagtcatgcttaaatacatgggagattgctggagccccgagcctgcatgagctgtaagactcaattctgccccgctagagaacagatttgcagggaaataggggaggagatattttctcaaggtgaaacatatcttcttggaggatgggttgttttaatacaattaaataaatggcagattaacctccacagccttgattagccttatactgggattcacaggtgaagcaaatacraaaaacacaaagaaaacaatctacagttaaagggatttggagtacatgactttccatagcagtttttaacgtgtcctrtgatgctgtagtaaaaaggagcacaactttggagttgtgtccctcctgacccaacaaggtctgggtcatctttcatttacatgtcactcagcgcatcgtcctgcttgtctgtgaatcctaaattcgatctgattttagtctgattactttcccctccacttgagagaattaattaatctccagctctgctctgggctttttt

SEQ ID NO: 19447 - DNA, 502 bp, Chicken  19866894229191_4
tacatgggagattgctggagccccgagcctgcatgagctgtaagactcaattctgccccgctagagaacagatttgcagggaaataggggaggagatattttctcaaggtgaaacatatcttcttggaggatgggttgttttaatacaattaaataaatggcagattaacctccacagccttgattagccttatactgggattcacaggtgaagcaaatacraaaaacacaaagaaaacaatctacagttaaagggatttggagtacatgactttccatagcagtttttaacgtgtcctrtgatgctgtagtaaaaaggagcacaactttggagttgtgtccctcctgacccaacaaggtctgggtcatctttcatttacatgtcactcagcgcatcgtcctgcttgtctgtgaatcctaaattcgatctgattttagtctgattactttcccctccacttgagagaattaattaatctccagctctgctctgggctttttt

SEQ ID NO: 19448 - DNA, 600 bp, Chicken  19866894229195_1
gagcccacaggcagctcctacttgatgacagtgattatgccaagcacaggaccttgcctttatctagaagcacagtgagaagttctcacaggaacatccttcctgtttggcagtagcagtgattaatagaattgtttccttgtaacaaaatcctgcaacagtttgaatgactaaaacagagtaacacctgctacggacagggtctgctcagcatgctgaacatggatcccaggagcactaaatgctgcacagcttaggattcgcaccatctaaagggtcgtaatattagttatactgttytctctttctgtacagtgttagctcaaataaacatcattttaactgatactttacagactcttcattattattctcatacagaaaagtgtcttttcaatctataatrcaccgagtaatcaagttttataaagatgtgaataaggtgaggaaagtcatcttcatgaacatacctgttcacactgccactgaggacttgcacaaagcctttctgctgtctgccttccacagatgcaccgctgtttactgacacgtggacaaggctgacaatctcctgtatgaaatcgtaaagttacgctgagc

SEQ ID NO: 19449 - DNA, 600 bp, Chicken  19866894229195_2
ttggcagtagcagtgattaatagaattgtttccttgtaacaaaatcctgcaacagtttgaatgactaaaacagagtaacacctgctacggacagggtctgctcagcatgctgaacatggatcccaggagcactaaatgctgcacagcttaggattcgcaccatctaaagggtcgtaatattagttatactgttytctctttctgtacagtgttagctcaaataaacatcattttaactgatactttacagactcttcattattattctcatacagaaaagtgtcttttcaatctataatrcaccgagtaatcaagttttataaagatgtgaataaggtgaggaaagtcatcttcatgaacatacctgttcacactgccactgaggacttgcacaaagcctttctgctgtctgccttccacagatgcaccgctgtttactgacacgtggacaaggctgacaatctcctgtatgaaatcgtaaagttacgctgagcataggaattagattttttgtattcaacttggaaaatartaatacttcttaaraagtaaaacaactgctctttggaagcctaaggaggcaggctacctgagtgacag

SEQ ID NO: 19450 - DNA, 600 bp, Chicken  19866894229195_3
ttaactgatactttacagactcttcattattattctcatacagaaaagtgtcttttcaatctataatrcaccgagtaatcaagttttataaagatgtgaataaggtgaggaaagtcatcttcatgaacatacctgttcacactgccactgaggacttgcacaaagcctttctgctgtctgccttccacagatgcaccgctgtttactgacacgtggacaaggctgacaatctcctgtatgaaatcgtaaagttacgctgagcataggaattagattttttgtattcaacttggaaaatartaatacttcttaaraagtaaaacaactgctctttggaagcctaaggaggcaggctacctgagtgacagggattctcacaagtatgctgtccacatagcaacattcgtccacatggcagacgacatgaccactccttggcactgcaccttcggggcactggtttagctttcctacagtgacaggatgttgtgaccatctttgggcaaggtggacagggacctaagcacagaaaaaaaagaaaccatgaatagctattcagcaaatgcctccttaactacatctgttttattctggaaattt

SEQ ID NO: 19451 - DNA, 600 bp, Chicken  19866894229195_4
acagactcttcattattattctcatacagaaaagtgtcttttcaatctataatrcaccgagtaatcaagttttataaagatgtgaataaggtgaggaaagtcatcttcatgaacatacctgttcacactgccactgaggacttgcacaaagcctttctgctgtctgccttccacagatgcaccgctgtttactgacacgtggacaaggctgacaatctcctgtatgaaatcgtaaagttacgctgagcataggaattagattttttgtattcaacttggaaaatartaatacttcttaaraagtaaaacaactgctctttggaagcctaaggaggcaggctacctgagtgacagggattctcacaagtatgctgtccacatagcaacattcgtccacatggcagacgacatgaccactccttggcactgcaccttcggggcactggtttagctttcctacagtgacaggatgttgtgaccatctttgggcaaggtggacagggacctaagcacagaaaaaaaagaaaccatgaatagctattcagcaaatgcctccttaactacatctgttttattctggaaattttaaatatagacagc

SEQ ID NO: 19452 - DNA, 425 bp, Chicken  19866894229196_1
caggggaccccacggtgtctcctctccccagtgatgctcctcctggcttgatgaggtggccttggtggccctgcacagcactaggcatgcagaaccctgttgttagggccgaactcccgcaggctctgtggctcctggcacacatggaaatgatttgggagaggccagaaggaggtcatgaggaccttgattgcaaacagctcccttgttactgaattggtggtgggatcctgtccccaccaacgcgatggccaacaggatggtggtgctgcctgggctactgatttcttttccctttgygatcgcttgttcccatgtgcctgggaagcatcaccagcactgggaggagcaggaagggaggagtgggaccgcccgatccctgcccaggtgctgtcacccactcctgcaatctgtttcctgcaggg

SEQ ID NO: 19453 - DNA, 600 bp, Chicken  19866894229200_1
ttgttaagttcaagcaaattaagacttcactgttgagttctcaagttcactgtttaacgacacaaaagtaggctgactttaggagtacagatttgtttatagctttcattaaaaactctaaaaatcttagccaagatgttaaacacacgatggcatttatagctaagatattaaactacacggtttatatagtgtatttatatagtttaatgtgtcattacgatacaatgctcagttttgagataaggtaatcaacagggttttcacagattcaaggcttaaatcaactcccaacagaayggcaggaaaagccatagcttttctttttcttctttcttccttcctttgctcttagattctgcagcaaaatagaaaccctcctagaaaggagackgattcctttcagtaccatctctctaattcagattgccaagaacagyamagagaacagtttctagggttgagacaaaagacttccaaaatcagctgcaaaatgtgtaaggttaaggacacctctcacactatttcagtcaccagtaaccacactaggatggaactagagactcctaagtctgttgtccatcaccagcaagtgagctg

SEQ ID NO: 19454 - DNA, 600 bp, Chicken  19866894229200_2
gtttatagctttcattaaaaactctaaaaatcttagccaagatgttaaacacacgatggcatttatagctaagatattaaactacacggtttatatagtgtatttatatagtttaatgtgtcattacgatacaatgctcagttttgagataaggtaatcaacagggttttcacagattcaaggcttaaatcaactcccaacagaayggcaggaaaagccatagcttttctttttcttctttcttccttcctttgctcttagattctgcagcaaaatagaaaccctcctagaaaggagackgattcctttcagtaccatctctctaattcagattgccaagaacagyamagagaacagtttctagggttgagacaaaagacttccaaaatcagctgcaaaatgtgtaaggttaaggacacctctcacactatttcagtcaccagtaaccacactaggatggaactagagactcctaagtctgttgtccatcaccagcaagtgagctgctcttgaactctgtaaatgtacctcaaaggaatccaccgttatgcttttcctacgttcatggtatgatgagaacagaataaggaatacagtcta

SEQ ID NO: 19455 - DNA, 600 bp, Chicken  19866894229200_3
aaacacacgatggcatttatagctaagatattaaactacacggtttatatagtgtatttatatagtttaatgtgtcattacgatacaatgctcagttttgagataaggtaatcaacagggttttcacagattcaaggcttaaatcaactcccaacagaayggcaggaaaagccatagcttttctttttcttctttcttccttcctttgctcttagattctgcagcaaaatagaaaccctcctagaaaggagackgattcctttcagtaccatctctctaattcagattgccaagaacagyamagagaacagtttctagggttgagacaaaagacttccaaaatcagctgcaaaatgtgtaaggttaaggacacctctcacactatttcagtcaccagtaaccacactaggatggaactagagactcctaagtctgttgtccatcaccagcaagtgagctgctcttgaactctgtaaatgtacctcaaaggaatccaccgttatgcttttcctacgttcatggtatgatgagaacagaataaggaatacagtctattaagcattctttaatgtcttgatatgttttcattctgtatttcaa

SEQ ID NO: 19456 - DNA, 600 bp, Chicken  19866894229200_4
acacacgatggcatttatagctaagatattaaactacacggtttatatagtgtatttatatagtttaatgtgtcattacgatacaatgctcagttttgagataaggtaatcaacagggttttcacagattcaaggcttaaatcaactcccaacagaayggcaggaaaagccatagcttttctttttcttctttcttccttcctttgctcttagattctgcagcaaaatagaaaccctcctagaaaggagackgattcctttcagtaccatctctctaattcagattgccaagaacagyamagagaacagtttctagggttgagacaaaagacttccaaaatcagctgcaaaatgtgtaaggttaaggacacctctcacactatttcagtcaccagtaaccacactaggatggaactagagactcctaagtctgttgtccatcaccagcaagtgagctgctcttgaactctgtaaatgtacctcaaaggaatccaccgttatgcttttcctacgttcatggtatgatgagaacagaataaggaatacagtctattaagcattctttaatgtcttgatatgttttcattctgtatttcaaga

SEQ ID NO: 19457 - DNA, 600 bp, Chicken  19866894229200_5
agaacagaataaggaatacagtctattaagcattctttaatgtcttgatatgttttcattctgtatttcaagactcatttgaaacattaaagtgcacatttcttaaaactggacatttgaaacacaacctcagtcaaatacgataaagaaaattcagtacctgcacccaaaacagaagtgctaacagacatctctgccttcagaaaggccaaacgtgcttgcttaccaaaaccagttcctcattttcacagctttctcctctggtcctgtggtttcattgggtttactcatatcactcartaacattaagtacataatgatactgcagaaaggaacaccaccacttctgcggttgtaaatttagccacatacccttcctgttaaggcacaattcaaggcaataactaacagtacatgcatccacaatcttcagctgccagaattcatgcttaagccaatttaggaccatgccaccacagacagggattcattttactcccctcattttggctgtaagaatgagtttaacttgaagaccacaccagcactaccgtcccctaacctaagaaacaagacaagcctgttcagtcagatacgatc

SEQ ID NO: 19458 - DNA, 600 bp, Chicken  19866894229201_1
taactgtggaacaccaatgagagtttcatttgtcatgagatggagtaattagaagtcatttctgcatattttggatgaggattctgacttcagtcagggcatgagctccacaaagtgcttatttttatagttttgacgtaaattgtggaatgttttcattcttaatttggaacatttgccccaagtgttccaagtctgtgtagataagtccatgctcttttcttcctcacaatttacatccatgtacactaaaattccagtgttgactacctggtccaagacaggactgagatctcttamgatgtcagtttccacctgtttctattaggccactgatcccaagttagattttaacaggtagtaaaacagtgcatctatcttctactctgcaaaagtgcctgtggtcatctgcttcacaaaacaaacacacccccctcccccaaatccagcacatacacaaaaataatttcattggttatgttgttccctggagatgtttaaattgtcaaatttgctgagctacattcccccctctyattctttctcatgggagatggtctgtcataggggactcacagcaaattcacattttgagatttt

SEQ ID NO: 19459 - DNA, 600 bp, Chicken  19866894229201_2
catccatgtacactaaaattccagtgttgactacctggtccaagacaggactgagatctcttamgatgtcagtttccacctgtttctattaggccactgatcccaagttagattttaacaggtagtaaaacagtgcatctatcttctactctgcaaaagtgcctgtggtcatctgcttcacaaaacaaacacacccccctcccccaaatccagcacatacacaaaaataatttcattggttatgttgttccctggagatgtttaaattgtcaaatttgctgagctacattcccccctctyattctttctcatgggagatggtctgtcataggggactcacagcaaattcacattttgagattttccagaggatttaatattaatgccattcaagagacttgaaaaaaactcttttgaaatggtaatatgctataaatagcttctagaactggtattgttcatctttcacaactggttcaaaatacagtcaatgccaasacatctgatcccaggataacaaagaaataacatctttcatgtcaatcactgtctcagggtatctgcacatgggttgttggttcattaacattgatttgagag

SEQ ID NO: 19460 - DNA, 464 bp, Chicken  19866894229201_3
ctcccccaaatccagcacatacacaaaaataatttcattggttatgttgttccctggagatgtttaaattgtcaaatttgctgagctacattcccccctctyattctttctcatgggagatggtctgtcataggggactcacagcaaattcacattttgagattttccagaggatttaatattaatgccattcaagagacttgaaaaaaactcttttgaaatggtaatatgctataaatagcttctagaactggtattgttcatctttcacaactggttcaaaatacagtcaatgccaasacatctgatcccaggataacaaagaaataacatctttcatgtcaatcactgtctcagggtatctgcacatgggttgttggttcattaacattgatttgagagaacagtttcaaagcagcccatgttatcattatcatttcacactgaactgggagctttacatt

SEQ ID NO: 19461 - DNA, 600 bp, Chicken  19866894229204_1
atcctcagcacagtagccaggaaaattgactgtgtgacatatccaaggtttttttttgttttgtttttaccatggaagccactctgtgttcatgtgcctgcttatcctactgcttgttgttggtttagcctggcaggcagctcagcactacacagccgctcattctgtttctgccacactcttcctcgcagtgggatgaatgaaagaagtggaaaaaagggtaaaactcgtgggttgatataattgcagtttataaaacaggaaaggaagggaaaataatgatattggtcttagaagccrctatttcccctctccctaccccccttctggacaactcccccagttttattgttccatataatgccagatggcatgggatatctctttggctagtttgggtctgttgtcctgattctgtccctccccccagcttcttgtgcaccctcarctcctcactggcagagcaatacaagaagcagaaaaaacctcagtgctgtgcaagcattgctatgcaacagataaataatcggtgtgctgtcaacaktattgtcatctgtctcgatccaatttatcgaagagagaggaggttctttgatatat

SEQ ID NO: 19462 - DNA, 600 bp, Chicken  19866894229204_2
tacacagccgctcattctgtttctgccacactcttcctcgcagtgggatgaatgaaagaagtggaaaaaagggtaaaactcgtgggttgatataattgcagtttataaaacaggaaaggaagggaaaataatgatattggtcttagaagccrctatttcccctctccctaccccccttctggacaactcccccagttttattgttccatataatgccagatggcatgggatatctctttggctagtttgggtctgttgtcctgattctgtccctccccccagcttcttgtgcaccctcarctcctcactggcagagcaatacaagaagcagaaaaaacctcagtgctgtgcaagcattgctatgcaacagataaataatcggtgtgctgtcaacaktattgtcatctgtctcgatccaatttatcgaagagagaggaggttctttgatatatgtatacccagcatgagattaagaaacaacggttcaaatgttggtccgaccagtttattataaattctagttgttcagggagaaggggaagggagaaggggaaggggagaagggcaatagaaaagataggaaatggaagcaaggagtct

SEQ ID NO: 19463 - DNA, 600 bp, Chicken  19866894229204_3
tgcagtttataaaacaggaaaggaagggaaaataatgatattggtcttagaagccrctatttcccctctccctaccccccttctggacaactcccccagttttattgttccatataatgccagatggcatgggatatctctttggctagtttgggtctgttgtcctgattctgtccctccccccagcttcttgtgcaccctcarctcctcactggcagagcaatacaagaagcagaaaaaacctcagtgctgtgcaagcattgctatgcaacagataaataatcggtgtgctgtcaacaktattgtcatctgtctcgatccaatttatcgaagagagaggaggttctttgatatatgtatacccagcatgagattaagaaacaacggttcaaatgttggtccgaccagtttattataaattctagttgttcagggagaaggggaagggagaaggggaaggggagaagggcaatagaaaagataggaaatggaagcaaggagtctgtgtaggaagcaagagggagatagtcaccaccatgggttcaatgtggttcgtaggtcagtccttgatcttcagtagtggtgggtcatcaggcgttg

SEQ ID NO: 19464 - DNA, 600 bp, Chicken  19866894229204_4
tacatatacagatgtacaatccttgtctaaaactacgtaggaaatattttgaccaacaaatcttcatcagaactctgaatcaatgaacacactgtaattctgcctgtatggatatgcagtataatttaaatgtgtaattgttgatttgtagttgacatgctgggggaagggatgctacctagaggaacctggacaggcttgagaggtgggcccctgccatcctcatgaagttagacaaggccaagtgcaaggtcctgcatctgggtcggggcaattgcaagcacaggtacaggttaggcrgagaatgacttgacagctgtcctgaggagaaggatttgggagtgtagattgatgagagattcaacatgagccagcagtgtatgcttgcagcacagaaggccaaacgtatcctgggttgcatcaagagaaacgtgaccagcaggctgaaggaggtgattctgcccctccagtctgttctcatgagaccccacctggagtactgagtccagttctggggccctcaacacaagaaggatacggagttgttggagcaggtccagaggagggccaagaagatgattagagggctggagcacctcc

SEQ ID NO: 19465 - DNA, 547 bp, Chicken  19866894229205_1
cagaatgatggatccctcatcacatcagggctaaaaaccactccaacaaaggcagcctcaggctgagaagcttcaccaatcatttaatccatgctcaagatgtgaatggagagagatgacttggcaggtcttgcaaggaggtctctaacattgccacagctctggtaaatgagataaccaccatggtgcttcagatcgatggtgtcctaaaggttcccagatggtcatgtgcaaataagtagaaagaaagactttcttaaccttaggttgaaggatcctttgaacaggatccttgtcctsctaacaggaaaagacccggattgccctcattttgagggtgcccaaaattgagtaggacacattaggaaggcactattgagatcacgtcttgatcaaggtggagcagtgcctctccaaacacatcagcttattagagctcttcaaaaagatgcgtccagccatctctgctctattcaacagcagatgctgcagcatgagagaaaggggtgatgaggaaaactcactgtcctctcaaattcaatagttt

SEQ ID NO: 19466 - DNA, 600 bp, Chicken  19866894229206_1
cacttctttataaaaaaacaaaaaaaaaacaaaaaaacttgaatattgtataaacctacatggctcctccttcgtctgtttcagcaattctaaagctttgtttcgcactaaactaccttttcatatcgtctgcattattaatttagtcatttaccaaaaagaataaactaagacaatttcctcaccatacgaattttaatggaagaagtgagggagactgtgccacacagacttatgtgctggctttacaaaagccagatttcaagtggtatcattcagagcaattaagaatggttttgraagctattctccatatattgcacaaccaccacaagtgtacagtttgtgttatattctgtgtgcggggaagattacgtacacaaaacttggttgaattagaaatatttacagtttttatgaacacaacgtaggacctttcaaaaaaaaaaaacgagcaaaaaaatgcaaaccaatgttgcagttcctggccatggtctctgactgcttattaaacagtcacgaccaccattagattttgtctgacctgtgttctttatagacagcatttgcttggagctcttccctggtgttttttgaggg

SEQ ID NO: 19467 - DNA, 600 bp, Chicken  19866894229209_1
ttctgcccatctcagcagtcctgaacactgctggcaggcagcatgggagaatgtgtctcgaacagcaaggactaccagtctctgtaggtgtgtccagaaaggtggagagcaaaggatggaagaaaattgaagagctggtgggaagagaatgctgtggttctgctgaggacctgtgggccccacagctctctctcctctttagctttctgcatctcagtatgtttgttactcaggcagttcggtgaattcccctgggaaaaagagagcagccaactggaactctgtatcacccatcatagmctgccagaaagcagggagtaaatataccatctttaggaacgcagtagagtctggctcatcagccctcatccagcaagcacagaaatggacagttaatctctcctctatgtgccagaccttcatytttcttttccagctgcactggcttttaagatatctaacttcaagcagcttcactctggttcctgccagaccatgcaataactttcaccttttccaaagaaaaagaagaatggatatccccttccttggagcatagaagaactgtgcagagaagggcacacctgagaagagtggcag

SEQ ID NO: 19468 - DNA, 600 bp, Chicken  19866894229209_2
aattgaagagctggtgggaagagaatgctgtggttctgctgaggacctgtgggccccacagctctctctcctctttagctttctgcatctcagtatgtttgttactcaggcagttcggtgaattcccctgggaaaaagagagcagccaactggaactctgtatcacccatcatagmctgccagaaagcagggagtaaatataccatctttaggaacgcagtagagtctggctcatcagccctcatccagcaagcacagaaatggacagttaatctctcctctatgtgccagaccttcatytttcttttccagctgcactggcttttaagatatctaacttcaagcagcttcactctggttcctgccagaccatgcaataactttcaccttttccaaagaaaaagaagaatggatatccccttccttggagcatagaagaactgtgcagagaagggcacacctgagaagagtggcagacttcatggggaagcgaacaaccatccatgctcttgaaatctgccttctcactcaggcacctgaatgtggctttacatgtttcggttcagttacacgtaaatgtaaactggtcacagaaacata

SEQ ID NO: 19469 - DNA, 600 bp, Chicken  19866894229209_3
gaaatctgccttctcactcaggcacctgaatgtggctttacatgtttcggttcagttacacgtaaatgtaaactggtcacagaaacatacccaaggtttgggagagtatgatattaatgtgcaaaatgtcaaaaatctgaaactttgtagactgtagcaatggcttaaaaatcttttacgtgtattccatcagagacgaataactcagacaattcagaagcaacctggaaacacttggaattacaggagtcttgtcccacacttaccagatagggcgggtgggagggcagcaaagaaaaytctgctgtgtggctgatttgctgcagacagatgatgcagttagagggcaatgcacagctctgaggatggatgtctccagagctgggcagggagcagcagggagatagggctctgagtactggttggtactagtacaggttgtggatggaaaactgctcttggtactatccaaaaaaaaacagaggctgtgccagcaagggtgtgctayggaggtgagtgcctgtgcagaagtgctagcctgtcaggatacacagaagagaaagtaacagtgcagcagtttatgtgtgctcatgtggctta

SEQ ID NO: 19470 - DNA, 600 bp, Chicken  19866894229209_4
aaatctgccttctcactcaggcacctgaatgtggctttacatgtttcggttcagttacacgtaaatgtaaactggtcacagaaacatacccaaggtttgggagagtatgatattaatgtgcaaaatgtcaaaaatctgaaactttgtagactgtagcaatggcttaaaaatcttttacgtgtattccatcagagacgaataactcagacaattcagaagcaacctggaaacacttggaattacaggagtcttgtcccacacttaccagatagggcgggtgggagggcagcaaagaaaacyctgctgtgtggctgatttgctgcagacagatgatgcagttagagggcaatgcacagctctgaggatggatgtctccagagctgggcagggagcagcagggagatagggctctgagtactggttggtactagtacaggttgtggatggaaaactgctcttggtactatccaaaaaaaaacagaggctgtgccagcaagggtgtgctayggaggtgagtgcctgtgcagaagtgctagcctgtcaggatacacagaagagaaagtaacagtgcagcagtttatgtgtgctcatgtggcttat

SEQ ID NO: 19471 - DNA, 600 bp, Chicken  19866894229209_5
acaattcagaagcaacctggaaacacttggaattacaggagtcttgtcccacacttaccagatagggcgggtgggagggcagcaaagaaaactctgctgtgtggctgatttgctgcagacagatgatgcagttagagggcaatgcacagctctgaggatggatgtctccagagctgggcagggagcagcagggagatagggctctgagtactggttggtactagtacaggttgtggatggaaaactgctcttggtactatccaaaaaaaaacagaggctgtgccagcaagggtgtgctayggaggtgagtgcctgtgcagaagtgctagcctgtcaggatacacagaagagaaagtaacagtgcagcagtttatgtgtgctcatgtggcttatcctaggagtacctctggtcatgcagtgtgtactttaatccttattacacccgagygtgaaaataataatgaaaattatgtcaaatcaacatagatctcacggtttaataaattctcctgcagtcattcaacaatctttatttttttccttccacggtggaacagacaaaagcaagcatctgtcctttcttctgtgtgcactacgagg

SEQ ID NO: 19472 - DNA, 600 bp, Chicken  19866894229209_6
tgcagttagagggcaatgcacagctctgaggatggatgtctccagagctgggcagggagcagcagggagatagggctctgagtactggttggtactagtacaggttgtggatggaaaactgctcttggtactatccaaaaaaaaacagaggctgtgccagcaagggtgtgctayggaggtgagtgcctgtgcagaagtgctagcctgtcaggatacacagaagagaaagtaacagtgcagcagtttatgtgtgctcatgtggcttatcctaggagtacctctggtcatgcagtgtgtacyttaatccttattacacccgagygtgaaaataataatgaaaattatgtcaaatcaacatagatctcacggtttaataaattctcctgcagtcattcaacaatctttatttttttccttccacggtggaacagacaaaagcaagcatctgtcctttcttctgtgtgcactacgaggaatactgcggtaaatccttaaaaagggttgttataccatgggctttcagttgaatgcaaaaacagattcttggagacagacaacacatttttgttttaaatgaaatgcccgcatcccatatgggcc

SEQ ID NO: 19473 - DNA, 595 bp, Chicken  19866894229209_7
gctctgaggatggatgtctccagagctgggcagggagcagcagggagatagggctctgagtactggttggtactagtacaggttgtggatggaaaactgctcttggtactatccaaaaaaaaacagaggctgtgccagcaagggtgtgctayggaggtgagtgcctgtgcagaagtgctagcctgtcaggatacacagaagagaaagtaacagtgcagcagtttatgtgtgctcatgtggcttatcctaggagtacctctggtcatgcagtgtgtactttaatccttattacacccgagygtgaaaataataatgaaaattatgtcaaatcaacatagatctcacggtttaataaattctcctgcagtcattcaacaatctttatttttttccttccacggtggaacagacaaaagcaagcatctgtcctttcttctgtgtgcactacgaggaatactgcggtaaatccttaaaaagggttgttataccatgggctttcagttgaatgcaaaaacagattcttggagacagacaacacatttttgttttaaatgaaatgcccgcatcccatatgggcctttaaatttactaatta

SEQ ID NO: 19474 - DNA, 599 bp, Chicken  19866894229215_1
  misc_feature (1)..(27): n is any nucleotide
nnnnnnnnnnnnnnnnnnnnnnnnnnnggtgtccctgaccaaggtgtgggagaggatgagtaatgagcactttgttctgggtcttgttgatcctcaaggttctcacgtgcccatcttccagtcttgtccagggcccactgcatgacatccctttctcttgcatcagttgcacctcaggcttggtgtcatcagttaatcagtttttgcagagctgagtcattgtgcttgcctgacatggatattggcatgatgttatcagccttcagagatgtattaaaattagtaccagggcatcaaacrtgccccagggtgttttcataagttcctgttgttatctttgcggagtcgctcttgattgcaactgcagcatgaagcacttcatctttctgaagtgatacaagtatattctcctgtttctggtttgcatttagaaggaaatatttattgagcttttctgttatgaataattttacccttctcatgcagtagtctgcctatgccaatgataaaatctyattatgcttttaaacaactttatcgtactcagcccttctgccaggaattcttcttgttcagttattctatattgtgtgtttttc

SEQ ID NO: 19475 - DNA, 600 bp, Chicken  19866894229215_2
gtcattgtgcttgcctgacatggatattggcatgatgttatcagccttcagagatgtattaaaattagtaccagggcatcaaacrtgccccagggtgttttcataagttcctgttgttatctttgcggagtcgctcttgattgcaactgcagcatgaagcacttcatctttctgaagtgatacaagtatattctcctgtttctggtttgcatttagaaggaaatatttattgagcttttctgttatgaataattttacccttctcatgcagtagtctgcctatgccaatgataaaatctyattatgcttttaaacaactttatcgtactcagcccttctgccaggaattcttcttgttcagttattctatattgtgtgtttttctaacrtgtattgacccctctgtgttcatttatggatgctttgctttgttctgcaccrctttctccagattttagctgaaggaggatggatttccactccctcttcrtgctgagatgaatgttggcttcatgttaaccatgtgatgaagtggtgatgataaaactgctcaggcaggaagtatcacagcagtgctatatattgctctattgtatgtga

SEQ ID NO: 19476 - DNA, 600 bp, Chicken  19866894229215_3
ccagggtgttttcataagttcctgttgttatctttgcggagtcgctcttgattgcaactgcagcatgaagcacttcatctttctgaagtgatacaagtatattctcctgtttctggtttgcatttagaaggaaatatttattgagcttttctgttatgaataattttacccttctcatgcagtagtctgcctatgccaatgataaaatctyattatgcttttaaacaactttatcgtactcagcccttctgccaggaattcttcttgttcagttattctatattgtgtgtttttctaacrtgtattgacccctctgtgttcatttatggatgctttgctttgttctgcaccrctttctccagattttagctgaaggaggatggatttccactccctcttcrtgctgagatgaatgttggcttcatgttaaccatgtgatgaagtggtgatgataaaactgctcaggcaggaagtatcacagcagtgctatatattgctctattgtatgtgatagccgagtgttatctagccactaactctgatgcccgatagtgcttttaaaacgtgattttagagcaaatcaacttgaaaggaattttt

SEQ ID NO: 19477 - DNA, 600 bp, Chicken  19866894229215_4
tgcaactgcagcatgaagcacttcatctttctgaagtgatacaagtatattctcctgtttctggtttgcatttagaaggaaatatttattgagcttttctgttatgaataattttacccttctcatgcagtagtctgcctatgccaatgataaaatctyattatgcttttaaacaactttatcgtactcagcccttctgccaggaattcttcttgttcagttattctatattgtgtgtttttctaacrtgtattgacccctctgtgttcatttatggatgctttgctttgttctgcaccrctttctccagattttagctgaaggaggatggatttccactccctcttcrtgctgagatgaatgttggcttcatgttaaccatgtgatgaagtggtgatgataaaactgctcaggcaggaagtatcacagcagtgctatatattgctctattgtatgtgatagccgagtgttatctagccactaactctgatgcccgatagtgcttttaaaacgtgattttagagcaaatcaacttgaaaggaatttttttctaatgtcacctgagggaattaattttaacttcctttgggatttagagga

SEQ ID NO: 19478 - DNA, 594 bp, Chicken  19866894229215_5
ttctcctgtttctggtttgcatttagaaggaaatatttattgagcttttctgttatgaataattttacccttctcatgcagtagtctgcctatgccaatgataaaatctyattatgcttttaaacaactttatcgtactcagcccttctgccaggaattcttcttgttcagttattctatattgtgtgtttttctaacrtgtattgacccctctgtgttcatttatggatgctttgctttgttctgcaccrctttctccagattttagctgaaggaggatggatttccactccctcttcrtgctgagatgaatgttggcttcatgttaaccatgtgatgaagtggtgatgataaaactgctcaggcaggaagtatcacagcagtgctatatattgctctattgtatgtgatagccgagtgttatctagccactaactctgatgcccgatagtgcttttaaaacgtgattttagagcaaatcaacttgaaaggaatttttttctaatgtcacctgagggaattaattttaacttcctttgggatttagaggaagcgtaaatgctacctctgagtctctctaaactcccagcctaa

SEQ ID NO: 19479 - DNA, 600 bp, Chicken  19866894229222_1
ttccagccatctttcattggtaggttgaatgactattgtgctttggtaagctgctcgtaaataccaggtctctatttccttctgattgtatcccactgctggctcatttagatgtatacgcaagtatgtcccagtgcctattataaaataatctttcagaacagcactattaatacactgggaggaactttatgtcaaacagtaaagcaaaatgctttcccaaaataaactccgagtgtttatttctggctttgagcccatgacattgtgtatattatgtattagttactatgaaaattytggctgcagaaacacttttctaaatggtatgagggttatagtctgaatgtgcttgcagggaggggttaaaaaacaagcgaacaaaaagcactacttttattctactgaaagactgccccmaaatgtgaatccagagtgcatcacatttgcagagcagatcaatggtcatggaggcaagcttgcagcaaggtcacgtaaaaacctagtttgatggaatatcagctcataaatagatgaagtagctgcatacttagttaraggtattgggacatattttgactatttttttctctaagctgg

SEQ ID NO: 19480 - DNA, 600 bp, Chicken  19866894229222_2
caagtatgtcccagtgcctattataaaataatctttcagaacagcactattaatacactgggaggaactttatgtcaaacagtaaagcaaaatgctttcccaaaataaactccgagtgtttatttctggctttgagcccatgacattgtgtatattatgtattagttactatgaaaattytggctgcagaaacacttttctaaatggtatgagggttatagtctgaatgtgcttgcagggaggggttaaaaaacaagcgaacaaaaagcactacttttattctactgaaagactgccccmaaatgtgaatccagagtgcatcacatttgcagagcagatcaatggtcatggaggcaagcttgcagcaaggtcacgtaaaaacctagtttgatggaatatcagctcataaatagatgaagtagctgcatacttagttaraggtattgggacatattttgactatttttttctctaagctggctcagtttaaaaagggggaaaaaaaatagagggaaaaaaaaaaagtaagaacaagaaaacaaatgattccaggaccatataaggaattcttcggacatatggaaggttgtctgcaaaagc

SEQ ID NO: 19481 - DNA, 532 bp, Chicken  19866894229222_3
catgacattgtgtatattatgtattagttactatgaaaattytggctgcagaaacacttttctaaatggtatgagggttatagtctgaatgtgcttgcagggaggggttaaaaaacaagcgaacaaaaagcactacttttattctactgaaagactgccccmaaatgtgaatccagagtgcatcacatttgcagagcagatcaatggtcatggaggcaagcttgcagcaaggtcacgtaaaaacctagtttgatggaatatcagctcataaatagatgaagtagctgcatacttagttaraggtattgggacatattttgactatttttttctctaagctggctcagtttaaaaagggggaaaaaaaatagagggaaaaaaaaaaagtaagaacaagaaaacaaatgattccaggaccatataaggaattcttcggacatatggaaggttgtctgcaaaagcctaccggaaactgtactactccataccccctggattttctttttaacgaggagttgagtgtgtagatggg

SEQ ID NO: 19482 - DNA, 600 bp, Chicken  19866894229227_1
tactaaatgtcaggtttttttttcatctgaagaagaaaatttaacttcatttcatggatggaggaaaataaaaatttcaggtatttcaggtgctctctgactaaggctagaactctgagtaacttgaaacaatcttttagatttggagttctaatcctgtaaaataatattttaaatgtttacatacaaagctcttatgtatagtacaatgagtaaggcactagtacagccttttcttttgtagctatataatctgctcgctaaggaagactaaaactggctaactaaaataggactgtyttgcatgaatttttattgatcttgattagtcaatggagatggtttttacattggtggcttaattcttttaagtgatatttactgaattaatttgtwtaagaggattacaatatctacttccgtcttattcactcagtagatctaatacaatgaaatagctgtatattttgcgtgaaaagctcttacactgttcctcccaaacatccttgtatttcttctctaaaccatcttttttattagatggtgagaatttgggttccagtgagtgagaagggaaaaggagcttcctatttgagctcc

SEQ ID NO: 19483 - DNA, 600 bp, Chicken  19866894229227_2
ctgactaaggctagaactctgagtaacttgaaacaatcttttagatttggagttctaatcctgtaaaataatattttaaatgtttacatacaaagctcttatgtatagtacaatgagtaaggcactagtacagccttttcttttgtagctatataatctgctcgctaaggaagactaaaactggctaactaaaataggactgtyttgcatgaatttttattgatcttgattagtcaatggagatggtttttacattggtggcttaattcttttaagtgatatttactgaattaatttgtwtaagaggattacaatatctacttccgtcttattcactcagtagatctaatacaatgaaatagctgtatattttgcgtgaaaagctcttacactgttcctcccaaacatccttgtatttcttctctaaaccatcttttttattagatggtgagaatttgggttccagtgagtgagaagggaaaaggagcttcctatttgagctcctggttatgaacgtatgttcactgtgtgccacttaagagatgagagatcaagatactataaactcatagaaatgagcaatgagctttagataaacat

SEQ ID NO: 19484 - DNA, 600 bp, Chicken  19866894229228_1
agacctttttacatgtcagcctttcgtattagagcagatgctgcaatgctggcctgattgcagacccttattgataacatcagaaaccacctgttgagtccatcctgcctttgggacagggaatggtctagatgacattcaacatctttattcacatattttctaaaaatgtaaataagctgctatttctacttgaaatggatggctagagtggatcctgagacatgtcttagttctctgcacacgttgtgacaagacatagaaacatgatatgaagatatgaaatgttttcttgtgagratcttcacctccttgttcttttgagtgcccctcatcccagcttgcacaggctgttttcattgccacggcttcttagttaaagctctggacattggatcttccagaacctcagcttaaaaggtgattgtaaaacctgtgttgaacagaatctggctgccagtttcagtggtgcatcactggctgttagatgaaaggtccccttccctcttgcattcctcttgtgatttttgatgtaaggctactgatagatgagcagtgccttcactttctcggtttagcttctctgactagaaaaaaact

SEQ ID NO: 19485 - DNA, 600 bp, Chicken  19866894229228_2
ttcttatgggtaattttgattttagacaacatttcttttgcttacccatatatatatagatatatatacatattatttttagatgtagcattttggagattaatctgtagagaaaaatttgcagccctcaaaaaatcaatgtggagtcaacgaaagtaaagccaccttaaaatttttaacaggcagtaagatgaatggtaacatgaggtcttagatgtgtctcttgaatcttctttaaatagtgctgtggttgaacctggcaggcatctcagcacaacacagaaattcactcacttcccyctgacagtgggaatggagagaaaattggaaacaaaataggtccatttgttttgtatgaacatatcaggaacaagraagaaatcttcagtattttacctaattgatgtttcacacatttaaatgttctcttttaggtaagaaaatcagagaattatagatyggtttaagttggaaaagactggcataggcaggtacatcttcctctagaccaagttggccaaagacccatagaaactgctcttgaacactgggatggggcacccatagcttctctaggcatcctgttcctgtgcctcacca

SEQ ID NO: 19486 - DNA, 600 bp, Chicken  19866894229228_3
tttttagatgtagcattttggagattaatctgtagagaaaaatttgcagccctcaaaaaatcaatgtggagtcaacgaaagtaaagccaccttaaaatttttaacaggcagtaagatgaatggtaacatgaggtcttagatgtgtctcttgaatcttctttaaatagtgctgtggttgaacctggcaggcatctcagcacaacacagaaattcactcacttcccyctgacagtgggaatggagagaaaattggaaacaaaataggtccatttgttttgtatgaacatatcaggaacaagraagaaatcttcagtattttacctaattgatgtttcacacatttaaatgttctcttttaggtaagaaaatcagagaattatagatyggtttaagttggaaaagactggcataggcaggtacatcttcctctagaccaagttggccaaagacccatagaaactgctcttgaacactgggatggggcacccatagcttctctaggcatcctgttcctgtgcctcaccaccctctgtataaagaatttcttgcttatgtttggcataaatctaccctcttctactgtaaaatcattacccctta

SEQ ID NO: 19487 - DNA, 600 bp, Chicken  19866894229228_4
gccaccttaaaatttttaacaggcagtaagatgaatggtaacatgaggtcttagatgtgtctcttgaatcttctttaaatagtgctgtggttgaacctggcaggcatctcagcacaacacagaaattcactcacttcccyctgacagtgggaatggagagaaaattggaaacaaaataggtccatttgttttgtatgaacatatcaggaacaagraagaaatcttcagtattttacctaattgatgtttcacacatttaaatgttctcttttaggtaagaaaatcagagaattatagatyggtttaagttggaaaagactggcataggcaggtacatcttcctctagaccaagttggccaaagacccatagaaactgctcttgaacactgggatggggcacccatagcttctctaggcatcctgttcctgtgcctcaccaccctctgtataaagaatttcttgcttatgtttggcataaatctaccctcttctactgtaaaatcattaccccttatccttctactatactccctaacagattcccccctcatctttcctgtaggcccctctaagtactggaaggcctctgtaaggtctcc

SEQ ID NO: 19488 - DNA, 600 bp, Chicken  19866894229236_1
tgcgaggaaaggcagaagatgtggttgagtggagctggagactgaggcaatcagcttagggctggacatacttggaagcaactgcagtgtgttggaagcttggccagggtgaaaggaaacctactaattttctgagttctgctgcatatgtatgctcacactcactgtgtggagctgcggactagcttgtcttctttctcctttgaaaaatgcacccaaaatccagtgtccttcatttgtgtcctttctcatctgtgtatagtatattgccatcaagtggaacatgtgcgatggaagtaygggacataaattaaactggaggctgctgtcctgtgtcatttgtgtcccttgagtagcacatattattttagtttttgtaggaaatgaattttaaagtattgtggcagcaattgcacttttgccctggtgtctcaaaaatgcacacacaaaccacaacaccttcgaagcaagtggtggacactcaagtctacagtagggtgcctttgaaatactattaagccacttgtatagaaacttacaggctgacccttcagctctggttacagaaggaacgtccttaactgatggtacttaatttgt

SEQ ID NO: 19489 - DNA, 599 bp, Chicken  19866894229239_1
  misc_feature (1)..(120): n is any nucleotide
nnnnnnnnnnnnnnnnnnnnnnnnnnnnnnnnnnnnnnnnnnnnnnnnnnnnnnnnnnnnnnnnnnnnnnnnnnnnnnnnnnnnnnnnnnnnnnnnnnnnnnnnnnnnnnnnnnnnnnnnctatcatacagaaatgggaacaaatgagctgtttgcttgacttgtttcagtggtgctgggataccaagtactgtgatcacagttctgcttgtattttcagtactggctccgaagagttggtgagctacttcagttgaccttaacagaattgaaatatataaggagtatttaagaaaatgyataatgtgtttgttgtgaatattttgagattcaatgaaacttcatgtggcttagtcgggtaaytaatacttgtggtaaaacattccattcaacacatgttgggtgccaaagaaacaagctaactccactcccccaaacaaaaagcaaacaaaaaaaaacccagctctaaaagtagccaaaaaagccaaacagtgaggcagggtcaggagaactatggatgtgtactccacactttgtttttcaccttttcgtttcctagctwggattttgatagctagtttcttcagactacttattcc

SEQ ID NO: 19490 - DNA, 599 bp, Chicken  19866894229239_2
  misc_feature (1)..(57): n is any nucleotide
nnnnnnnnnnnnnnnnnnnnnnnnnnnnnnnnnnnnnnnnnnnnnnnnnnnnnnnnnctatcatacagaaatgggaacaaatgagctgtttgcttgacttgtttcagtggtgctgggataccaagtactgtgatcacagttctgcttgtattttcagtactggctccgaagagttggtgagctacttcagttgaccttaacagaattgaaatatataaggagtatttaagaaaatgyataatgtgtttgttgtgaatattttgagattcaatgaaacttcatgtggcttagtcgggtaaytaatacttgtggtaaaacattccattcaacacatgttgggtgccaaagaaacaagctaactccactcccccaaacaaaaagcaaacaaaaaaaaacccagctctaaaagtagccaaaaaagccaaacagtgaggcagggtcaggagaactatggatgtgtactccacactttgtttttcaccttttcgtttcctagctwggattttgatagctagtttcttcagactacttattcccacagaaatagaaaatcatgttgaatcatggtctgctgctggtatatttatcagaatttgtca

SEQ ID NO: 19491 - DNA, 600 bp, Chicken  19866894229239_3
acagaattgaaatatataaggagtatttaagaaaatgyataatgtgtttgttgtgaatattttgagattcaatgaaacttcatgtggcttagtcgggtaaytaatacttgtggtaaaacattccattcaacacatgttgggtgccaaagaaacaagctaactccactcccccaaacaaaaagcaaacaaaaaaaaacccagctctaaaagtagccaaaaaagccaaacagtgaggcagggtcaggagaactatggatgtgtactccacactttgtttttcaccttttcgtttcctagctwggattttgatagctagtttcttcagactacttattcccacagaaatagaaaatcatgttgaatcatggtctgctgctggtatatttatcagaatttgtcagctaacatgaagatgtcatcgttaaacactgaccttacatgttgcttttttttaatcatggattttgattctttttcccccccaaaaaagtctgtctccagaaatctctgctcccaacctgagtggtaaaatcaatgactatgtttcatgtttttcctttctgtgtgtgctgttttccctagggaaaattagtttaaaaa

SEQ ID NO: 19492 - DNA, 600 bp, Chicken  19866894229240_1
aggtgtgcaaggctgagaggaaaaagctttgttttgctgccaccttgcgcagaggataattacagctcctgcactcaggttgggagcagagtggacttagtacctacttgaataaaacgtggggaaagtagaaataggtgggagaggtagccaaacattcctaggggacagattcatccataggtgttaccaacaaggtttgtattgccgtgtctataaggatctcatcacagactgggatgccactgcagagcaaatgaaacagcaagatgcaactcccatcctgaaaataaatggtgyagcttaattgcatrtttttgtggtgcacacataactgggtagggttgtatgtcctgagaagattctgaaaaaatcccaaaggacaaaaagaatataaatgaagttcaccaccagttcagacttgaggtggttcacaccacaaaacagcaagcttagtctctactaaatcaatttttacacttacacacacatacagtaaacatacacatatacatatggagtatactttatgcataagtattgtatgagctcacaatagcttctaaggttatcaaacacctctgaaacataaatrtatgt

SEQ ID NO: 19493 - DNA, 600 bp, Chicken  19866894229240_2
gagaggaaaaagctttgttttgctgccaccttgcgcagaggataattacagctcctgcactcaggttgggagcagagtggacttagtacctacttgaataaaacgtggggaaagtagaaataggtgggagaggtagccaaacattcctaggggacagattcatccataggtgttaccaacaaggtttgtattgccgtgtctataaggatctcatcacagactgggatgccactgcagagcaaatgaaacagcaagatgcaactcccatcctgaaaataaatggtgyagcttaattgcatrtttttgtggtgcacacataactgggtagggttgtatgtcctgagaagattctgaaaaaatcccaaaggacaaaaagaatataaatgaagttcaccaccagttcagacttgaggtggttcacaccacaaaacagcaagcttagtctctactaaatcaatttttacacttacacacacatacagtaaacatacacatatacatatggagtatactttatgcataagtattgtatgagctcacaatagcttctaaggttatcaaacacctctgaaacataaatrtatgtgtatgtttccttct

SEQ ID NO: 19494 - DNA, 527 bp, Chicken  19866894229240_3
ggtgyagcttaattgcatrtttttgtggtgcacacataactgggtagggttgtatgtcctgagaagattctgaaaaaatcccaaaggacaaaaagaatataaatgaagttcaccaccagttcagacttgaggtggttcacaccacaaaacagcaagcttagtctctactaaatcaatttttacacttacacacacatacagtaaacatacacatatacatatggagtatactttatgcataagtattgtatgagctcacaatagcttctaaggttatcaaacacctctgaaacataaatrtatgtgtatgtttccttctttgtgtgtaaatggcatgagctcacaatggttagccttcaacaacacctgacagctctcttttccagaaagtgcaaagcacgatgatgaaacattcacatagtagttaggcagcagatggatcttgggcaaagacaaaaaaataattagcctcggattaaaacatcttcataaagcactgaatttttgtaatgtactgctcacactta

SEQ ID NO: 19495 - DNA, 600 bp, Chicken  19866894229243_1
tgttccaggaggaaccctctgaaaccaatgcatcttactccaacctctcctttacatattctttgcatttacttgcgaaagcaggtggcattttgctctagacccctacaatgggtcagcatgtgtcagtacacactgagagacttgaatacaccgcaccaggagcaattatgttcacaaacagattgagaaagggagtactgttgtcttcatttgacatagagtgggctgagattcagaaacacatagggtgttctgtctcttaaatattttatgaattgtagtactgattaccaaaakatctgtgccaaaagaataacaacaaataataaaagatcacatcaggagaatattacaaatcctttatcttgctttatgttctcttacttggatggcttccgttgtccagctagagatgggaaaggtgatgaggacacatcgtggctgtggactgcaaagggccgccaatgacctgcttgtgagcagtatgacttgaacagtcttcatccaattttctcccataatgccaaataaacctggacaaaaaaataacagaatcaattcactaatcaaaggaagggctaaagcaacaatcgttaa

SEQ ID NO: 19496 - DNA, 600 bp, Chicken  19866894229244_1
ccccacccctatgatgtgccaaaattccacaataaaaggaagagaaaacattattataaaaagtaaacagtagctgaagggattagaaagaggacggcggtttacttctgacctacaccatgcactacctacaccacttccaacaagttacttccgagccttctctcctgttatctctggtatataataggataattatctgtgtgaaattctccaaaagcacttgcctcccttagaagtgaaagacttctaggaggaatttaagccttataaaaagactgtccaaaactttctacaggkaaaaaaaaacattgatagttacttaaaaaaataataaaaaaaatcagcccctgccctacaaagcaaccaaagacagaataggctagccatttygagctttttgatactgaatgaagaaagacagcttttaaacagaggtaaagatagagtagtaggctcaagtgcaatttgcatgtggaactgtaaggcagatcagaaacaattctatagtgtggctggctagagacataacaaactctttgcccacacrtgtacatgattcatgcttataatactatcccatgtacactggatccatat

SEQ ID NO: 19497 - DNA, 600 bp, Chicken  19866894229244_2
acggcggtttacttctgacctacaccatgcactacctacaccacttccaacaagttacttccgagccttctctcctgttatctctggtatataataggataattatctgtgtgaaattctccaaaagcacttgcctcccttagaagtgaaagacttctaggaggaatttaagccttataaaaagactgtccaaaactttctacaggaaaaaaaaaacattgatagttacttaaaaaaataataaaaaaaatcagcccctgccctacaaagcaaccaaagacagaataggctagccatttygagctttttgatactgaatgaagaaagacagcttttaaacagaggtaaagatagagtagtaggctcaagtgcaatttgcatgtggaactgtaaggcagatcagaaacaattctatagtgtggctggctagagacataacaaactctttgcccacacrtgtacatgattcatgcttataatactatcccatgtacactggatccatattattctgtgtcaatctgcaatatgctattctgcaggtctgtctacaaatatcaagcatagagtgaaggagaaaagcacgttatggtaagaata

SEQ ID NO: 19498 - DNA, 600 bp, Chicken  19866894229244_3
taggaggaatttaagccttataaaaagactgtccaaaactttctacaggaaaaaaaaaacattgatagttacttaaaaaaataataaaaaaaatcagcccctgccctacaaagcaaccaaagacagaataggctagccatttygagctttttgatactgaatgaagaaagacagcttttaaacagaggtaaagatagagtagtaggctcaagtgcaatttgcatgtggaactgtaaggcagatcagaaacaattctatagtgtggctggctagagacataacaaactctttgcccacacrtgtacatgattcatgcttataatactatcccatgtacactggatccatattattctgtgtcaatctgcaatatgctattctgcaggtctgtctacaaatatcaagcatagagtgaaggagaaaagcacgttatggtaagaatacagcttcaacaagacaaaatcagattcccagagcatccttaattctgctatcttgagcctgtgcattaaagtcctttgtgacctggttaatccagatgtaagcagcrtgatggactgggaagaatcatgataacggaaattcattgccacagacctt

SEQ ID NO: 19499 - DNA, 462 bp, Chicken  19866894229244_4
aattctatagtgtggctggctagagacataacaaactctttgcccacacrtgtacatgattcatgcttataatactatcccatgtacactggatccatattattctgtgtcaatctgcaatatgctattctgcaggtctgtctacaaatatcaagcatagagtgaaggagaaaagcacgttatggtaagaatacagcttcaacaagacaaaatcagattcccagagcatccttaattctgctatcttgagcctgtgcattaaagtcctttgtgacctggttaatccagatgtaagcagcrtgatggactgggaagaatcatgataacggaaattcattgccacagaccttttctctatacattgtctttctattgcagtgtcctgtagggcagtcttttcacagaagttaccttaaatcagcagcatttaatctccatgtaaggcaactaggaactctgcat

SEQ ID NO: 19500 - DNA, 599 bp, Chicken  19866894229245_1
  misc_feature (1)..(169): n is any nucleotide
nnnnnnnnnnnnnnnnnnnnnnnnnnnnnnnnnnnnnnnnnnnnnnnnnnnnnnnnnnnnnnnnnnnnnnnnnnnnnnnnnnnnnnnnnnnnnnnnnnnnnnnnnnnnnnnnnnnnnnnnnnnnnnnnnnnnnnnnnnnnnnnnnnnnnnnnnnnnnnnnnnnnnnnnnttttttggagtcgggaagatggttaaaatgaatagaagagacaaaacatatgtctgagtattaaaatgctccaatgtttgttgcatgtggtaaatgcttttcagcacttggagcaagctgtatacgtctcrtgtcgctgaaggagcctactgtgtaaatgtagccatcttgaatccagtaaaactttatacctagataataaacaagaatgtcactgatacagtactttgaatttatggaacttttccggtttcccagcaatgcacactatcagcatgataatttataatggtttgtgacaaatgttgctgagcaaagaggtgtgtggttacattcagatcagatgtcattatctggggagcaataaaaatttcacagacgctaggttaaaaacattaagaaaatgaatgtgaagcttcagaagaaaagg

SEQ ID NO: 19501 - DNA, 600 bp, Chicken  19866894229245_2
taaatgtagccatcttgaatccagtaaaactttatacctagataataaacaagaatgtcactgatacagtactttgaatttatggaacttttccggtttcccagcaatgcacactatcagcatgataatttataatggtttgtgacaaatgttgctgagcaaagaggtgtgtggttacattcagatcagatgtcattatctggggagcaataaaaatttcacagacgctaggttaaaaacattaagaaaatgaatgtgaagcttcagaagaaaagggcttaagaaaggtggagaactggrtagagaaagcccaaaagtggttttcttactgacaaattattgactttgttgccakacttgactatattgctttacaaggtcttcatagatattccatgcagtacagttgttttattggccatcatttatagatgtatggagtaaatatcatccttgcttgacaattataaaaggtgtacacagtgctgtcaaattggtttgaacagaagaattgcccattttggaaacatttgtgtcttagatggaaagatgtcacagataatttttctttatactgcgtttaccagggattagatacac

SEQ ID NO: 19502 - DNA, 600 bp, Chicken  19866894229245_3
tgtcactgatacagtactttgaatttatggaacttttccggtttcccagcaatgcacactatcagcatgataatttataatggtttgtgacaaatgttgctgagcaaagaggtgtgtggttacattcagatcagatgtcattatctggggagcaataaaaatttcacagacgctaggttaaaaacattaagaaaatgaatgtgaagcttcagaagaaaagggcttaagaaaggtggagaactggrtagagaaagcccaaaagtggttttcttactgacaaattattgactttgttgccakacttgactatattgctttacaaggtcttcatagatattccatgcagtacagttgttttattggccatcatttatagatgtatggagtaaatatcatccttgcttgacaattataaaaggtgtacacagtgctgtcaaattggtttgaacagaagaattgcccattttggaaacatttgtgtcttagatggaaagatgtcacagataatttttctttatactgcgtttaccagggattagatacactgatgagattagggctgaatagaaattgcagttagttacagaatacagagaaaga

SEQ ID NO: 19503 - DNA, 600 bp, Chicken  19866894229253_1
ttttcatataaacctatactgacaatttctgtgatttacatatgtattttgttttaaactcattaccccaaagcaaatactatatactgtactctatgattgtattagcaaggggaacacaaagatcatccaacctgtttaatatttcagcattaaaatgcccctgcagcattacttttagacactagttaatatattgtttatataacagaatttatgatgatggatttttcaagtttcctacagtgtaacttgcagcactgttaagagaaatgaatggtaccttgtagttaaacactyttccattttaatctacaaatagctgtgagaatcctttattcctgtgaagtgaataatttttatatacttaccactacattaaaaatatgaatactggtaacacagcgcaatgaaacaataatggatctgatgaattaatagaaaaaagaaaatagtccagaaatatgacaaaaaggatggaaatcatacctccagggatggggcagccacaacctctctggacagcctgttccagcaccttaccactctcatagtaaagaacttccccctaacatctgacctaaatcttccctccttcaa

SEQ ID NO: 19504 - DNA, 600 bp, Chicken  19866894229254_1
ctgtgtgctttccagaagtactcattactgctgtttaatgtgttaacaaatattaataggtatctcaatggtaaactagaaggcaggatatagcgcagacaagtaagatttacgcagctcattttaagaaaaatataatggaaaagtgtaataaaattaatgagtagtgtttgatttttctaccagtgtgtagctgagtaatcatgctgcccttgggattggaaaggtatcttgattgtgaaataatgtcttcagcctttgactttctattgtaataatgtgtccttagagcacagtacmcagtgtgtttcctctgagcatgtagtactcattttgtgctaatcaggaaacagaaaggcttcttggtttgcaagggagtatgatgagctggggagtatctgcatcaggtgtaatgtaggaggagagaarrtaagttttcctttggcgtatgctatatgatgaacagaaggggaatagttaaagaagaagtagatacgtgtgtgtgcacaacagctacagtttaggtgaaggggaaccataaacagtgtctgtctatgaaatgtgcaggaaaacaaaagttaggactatgtgagccggggt

SEQ ID NO: 19505 - DNA, 600 bp, Chicken  19866894229254_2
aaaatataatggaaaagtgtaataaaattaatgagtagtgtttgatttttctaccagtgtgtagctgagtaatcatgctgcccttgggattggaaaggtatcttgattgtgaaataatgtcttcagcctttgactttctattgtaataatgtgtccttagagcacagtacmcagtgtgtttcctctgagcatgtagtactcattttgtgctaatcaggaaacagaaaggcttcttggtttgcaagggagtatgatgagctggggagtatctgcatcaggtgtaatgtaggaggagagaarrtaagttttcctttggcgtatgctatatgatgaacagaaggggaatagttaaagaagaagtagatacgtgtgtgtgcacaacagctacagtttaggtgaaggggaaccataaacagtgtctgtctatgaaatgtgcaggaaaacaaaagttaggactatgtgagccggggttagactggcattgttcacgtgagttttcaagttaaaagggttaagagtggaaaaggtgagaggagaaagaatctaggcaagtgtcttctaatgttggcctttgttaaataatgactgcatgtcttcagt

SEQ ID NO: 19506 - DNA, 600 bp, Chicken  19866894229254_3
aaatataatggaaaagtgtaataaaattaatgagtagtgtttgatttttctaccagtgtgtagctgagtaatcatgctgcccttgggattggaaaggtatcttgattgtgaaataatgtcttcagcctttgactttctattgtaataatgtgtccttagagcacagtacmcagtgtgtttcctctgagcatgtagtactcattttgtgctaatcaggaaacagaaaggcttcttggtttgcaagggagtatgatgagctggggagtatctgcatcaggtgtaatgtaggaggagagaarrtaagttttcctttggcgtatgctatatgatgaacagaaggggaatagttaaagaagaagtagatacgtgtgtgtgcacaacagctacagtttaggtgaaggggaaccataaacagtgtctgtctatgaaatgtgcaggaaaacaaaagttaggactatgtgagccggggttagactggcattgttcacgtgagttttcaagttaaaagggttaagagtggaaaaggtgagaggagaaagaatctaggcaagtgtcttctaatgttggcctttgttaaataatgactgcatgtcttcagtg

SEQ ID NO: 19507 - DNA, 600 bp, Chicken  19866894229259_1
agctgagcctcgtgcagcgcctaccccacgcgcacagccccgccgtgtgttctgtacacgtaactcagccttcctgctgctccatggccgggcactttggacccctctgggggggctcacagctcccgcctgcccccacgcagctcggttatgcctctcttcacagctgtgtggctcctcccttctttcccccccgccccacttgcgatgtttattggttttcagccattttagcacgctggaccttcgggtggtgtggttcctcagctctgtgctggggtggttcctgataatggagtyggatgggctcaggggtgtatggggagaggcagggggatggttggcatcacgttgtttgcagcagatgccaccccataccttggttgtgcgcacccaatgaatgctcygctcttcaaaacgttacatctgcttgtggtttcctgcacaaagccgatctctatggctggggtttgctggctgtgctcctgtctggctgtaatacccagtgctgaagatggattctttcctgggcagcgctgggacaccgtggggtcattttggattgggatttctctgctggagctcagcagctgctctgct

SEQ ID NO: 19508 - DNA, 600 bp, Chicken  19866894229259_2
tgggggggctcacagctcccgcctgcccccacgcagctcggttatgcctctcttcacagctgtgtggctcctcccttctttcccccccgccccacttgcgatgtttattggttttcagccattttagcacgctggaccttcgggtggtgtggttcctcagctctgtgctggggtggttcctgataatggagtyggatgggctcaggggtgtatggggagaggcagggggatggttggcatcacgttgtttgcagcagatgccaccccataccttggttgtgcgcacccaatgaatgctcygctcttcaaaacgttacatctgcttgtggtttcctgcacaaagccgatctctatggctggggtttgctggctgtgctcctgtctggctgtaatacccagtgctgaagatggattctttcctgggcagcgctgggacaccgtggggtcattttggattgggatttctctgctggagctcagcagctgctctgctgtcagctgctctaaggggccctgtcccggcctaagggctgcgtcctggggggctgctggacaactgaacccagctaactatgccatccaagcgttgctgtttgggtt

SEQ ID NO: 19509 - DNA, 600 bp, Chicken  19866894229262_1
agttattcattaacttgttcatataaggtaaaaaaatgtaatattagaaagaggtaaataccttttctctcaaagctttcttctctcacaaagcaaacaagagcaaggaatttcgtcacttcttttaaataaaggacagttgtattgttcagttttatgattgccattgattctttgtcataaggagttccagtgccatcatctttaagcctgaaaggcaatattcaaagaaacaaacaagataaggcatcagatgagttaaaagtatttccaggtaggttctttcatcagatcatctcratctttaygaaattttcattttcatctttcagggaaattcttcaagcaccacagtgcataaactaagcagacacagagattaaactgtttattcaaatacacctagaaatcagatcattaggtttcyaagaatctgacacggagccctactttcttcaaaccatttaccctaaagttgtctgttttcttttaatcactgcgctatattacaaacttatctaaagcatgtgagccattaagtctgtactgataattccaaatccaataaccttgcttcagcacgggcagctgactgatagt

SEQ ID NO: 19510 - DNA, 600 bp, Chicken  19866894229262_2
attaacttgttcatataaggtaaaaaaatgtaatattagaaagaggtaaataccttttctctcaaagctttcttctctcacaaagcaaacaagagcaaggaatttcgtcacttcttttaaataaaggacagttgtattgttcagttttatgattgccattgattctttgtcataaggagttccagtgccatcatctttaagcctgaaaggcaatattcaaagaaacaaacaagataaggcatcagatgagttaaaagtatttccaggtaggttctttcatcagatcatctcratctttaygaaattttcattttcatctttcagggaaattcttcaagcaccacagtgcataaactaagcagacacagagattaaactgtttattcaaatacacctagaaatcagatcattaggtttcyaagaatctgacacggagccctactttcttcaaaccatttaccctaaagttgtctgttttcttttaatcactgcgctatattacaaacttatctaaagcatgtgagccattaagtctgtactgataattccaaatccaataaccttgcttcagcacgggcagctgactgatagtttacacca

SEQ ID NO: 19511 - DNA, 600 bp, Chicken  19866894229262_3
aataaaggacagttgtattgttcagttttatgattgccattgattctttgtcataaggagttccagtgccatcatctttaagcctgaaaggcaatattcaaagaaacaaacaagataaggcatcagatgagttaaaagtatttccaggtaggttctttcatcagatcatctcratctttaygaaattttcattttcatctttcagggaaattcttcaagcaccacagtgcataaactaagcagacacagagattaaactgtttattcaaatacacctagaaatcagatcattaggtttcyaagaatctgacacggagccctactttcttcaaaccatttaccctaaagttgtctgttttcttttaatcactgcgctatattacaaacttatctaaagcatgtgagccattaagtctgtactgataattccaaatccaataaccttgcttcagcacgggcagctgactgatagtttacaccatcatgagaccttcctcatgagacaccggcttttgtaacatcatattacgaagacggttctccttcacaaatgatacaccatgacaatcactgtattggctttggaccttgtcatttttc

SEQ ID NO: 19512 - DNA, 600 bp, Chicken  19866894229274_1
gaagagtaccctgaggataactggtccgacttttaaagacagatgtcaagaatgcactgagaacctcagccttatcctcagtggtcatgtttgttgccacatccagtaaaggatggagattctccttagctttgttcttactgttaatatacttgtaaaaagttttttcacttttaccccaatggctgaatggagttcaagctaggcttttgcctttctaattttcttcctacatatggattattataccaaaatagcttagcttttctaggcaaaacactctatccctaccagaatttmtctgctgttcaaatgattcattctgagacagaaaaaaaagattttctttatggttatctttgtccatgctcatcttccaaaaggaagccttagttaaaagcaaagtcaatactgggttaattttgatgtttgcctaagtggaatctctgaagttaaaaaactgctcagtaatttaggaatacaaatctcaccaccttccagtgagatttagatttttaagggagaaagatgctttggagattatgacagaaaaagaaatgaaaaaaaaaaaaaaaaaaagagtaaagctggggattaaga

SEQ ID NO: 19513 - DNA, 600 bp, Chicken  19866894229277_1
acagggggtttaaggcttggagggcatctttaggtctgggtatttaggggtatctgtgggctggggttccccacagtgcaggtttgggtttcccaagggctggatacaggtggtgcacataaatgtgagggtaagccatatgaggttgggggtcatttggggtccccatggggaaggtttgggtttccatggagatgtgaggtgtgggtcttaagaagtgaactgggatttggggtccactgaccccgacacttacctggaattgcactgacttgggcatctcaggggtgacacctgcaycaaaaagaagagggggaagggtgggagttatgtgtgggcctagaggagcaagtgggaaaccataaaggatctgcagagggtcagagaataagcagaggacacttgaggggatcgatagcttaggaaaaccactgaagtccttcctcaccagcactctcatctctccatgtccagaggctgcgggcatcgaggacaaagtagaggcccaggctgaagaccaagacagcagcacagcccctcagcactgccaccaccaggttcccatgggaccactccttggcacctgtgggctccgagtgt

SEQ ID NO: 19514 - DNA, 600 bp, Chicken  19866894229284_1
gataagaaagactccgtttagtccactaatcacctctctccaagatgcatataaaagagatgggtggttgtgttacttaagtcattgtctttaagttaatgtgacggtcagtgtttggtcaacactattttgaaatattagtaacagcagtgactcattcaggatacccttcagtggtgtgtgacaaagagagttcctctgcagagttggcatttgtcaaagcactttccagtacctaaggggcagtgtgcctaaacaatgcctatacagcaggaggcatgcaaaggcagccttgttgtrctcctctgtgccccttaaggcaagggaaggacagctggtgaaggaagatctgcccatctcctcagttccaagaagtctgtatgacttctccagtgttatgtgtgtgtacatttgcatttatcccaagactggtgttaaaggtcatttcagggctttgattttcactgttttgtaacagaagaaatttgactggagttagtgtacatcttgctcatggcttactgagcagctttgtttttctgtcaagactatctgctatcttaccctgttctgctgaaccttggggtgtggcacaaggct

SEQ ID NO: 19515 - DNA, 600 bp, Chicken  19866894229284_2
cagctgaattcttttcctcagactgtgcaccatgtccagctctgtcttgcttttctttaacccatagactcagaggaaggtgaaaagtcccagctgacgtgggaggggaagggagcgttgagggttgagcctgggaagactaagggacctgttgtttagaagtgagatttgtccttttgccttagcacaagcactgtgggtactttacagtgaggtcgagaggatgtatgagagatggatgtgactgtatttttaaagtgacatcgttcaataaggcaggatagtacttcacataaaggytctatatgtggaacccttggctacctcactccacaggtaacagtgccttggatccatctcctgtggcacctcttcagactgaacyggcatcagcagaacagaggaatcttacaaaacaactgagtatgaacatttctttttcctttcattcaaacaggctttactgagcacccagaataagctgagaactttagtcccaaatttcaccttcaacctgggcttctcagggaaattctaccacacaggtaagcctctggcaccccttttgtcccagcgcctgcatacggcccacatgtttgc

SEQ ID NO: 19516 - DNA, 600 bp, Chicken  19866894229284_3
agtcccagctgacgtgggaggggaagggagcgttgagggttgagcctgggaagactaagggacctgttgtttagaagtgagatttgtccttttgccttagcacaagcactgtgggtactttacagtgaggtcgagaggatgtatgagagatggatgtgactgtatttttaaagtgacatcgttcaataaggcaggatagtacttcacataaaggytctatatgtggaacccttggctacctcactccacaggtaacagtgccttggatccatctcctgtggcacctcttcagactgaacyggcatcagcagaacagaggaatcttacaaaacaactgagtatgaacatttctttttcctttcattcaaacaggctttactgagcacccagaataagctgagaactttagtcccaaatttcaccttcaacctgggcttctcagggaaattctaccacacaggtaagcctctggcaccccttttgtcccagcgcctgcatacggcccacatgtttgcgggagcttcatggcaccctgacaatgtacagttctgttgtggctcttggcagaagtgatgcatctcttctaccactcgcaacttt

SEQ ID NO: 19517 - DNA, 600 bp, Chicken  19866894229285_1
aaggaaaactagttttctcaacctataaaatcacttccattttttttttaatttttttattttttgctaaatatgaccttggaattgaaataggttctcaggaaaatgtattttggaggaaatggagcaaatgaaaaaaaaaaatttcatctaagaagtaaaggttttggttgctgctactgcaaaacctcataagatgaatgaatagctgatagcatgttccttattaagtcagtgatgcaattatgcttgcaacagatctgcacacataatctaagcttgccttagtagtaatgtgcytttttttttttaatatgtaactaaccaacagaagtttcaaatgggtgggaatatttatgcacaatttaacactaagaatttctctgctaatcagcagaaaaacttcaatgcatgttatgaccagcacaattctaatataatttttttgtttgtttcatcactggagtgagtcaaattgtttcactagaaaaattggtaaaaatgatctgtagctgatgatgcttgtagttctgactttggaaacagcttgtgaagtaaaaaacatagcttatttatgtaataaatgtgcaagatggcatg

SEQ ID NO: 19518 - DNA, 600 bp, Chicken  19866894229287_1
ttgctccacattgctatgttttagcagcagtctgacatgtcctcgaaagaggtgagacaccggttcagagggacatcctgtgcagtcagcaggtgccatggaaggcccacagttctgaacacttccacgtgtttgtgtgacttattttgctttggtgcagctgtgggaaactccatgaccagtttttctctccagctaatgccgattgggagaattcatttcctgccgagtggtccctctgctctgcaaaggacagcaaaacctctgccaccgcatccccttgggatggggcaggatggrgcactcaaaaccacaggccatagaggagccccatcaggtgggagcgggtgggtggctttacagtgrggcttgtttccccttttagttttactggtttccttcagcaatcattagggcttaactaagcttttctggcttccctttgtgcttctgaggttcttttgttcccacagcaggmgcagggctgtaaggatcccttcaaatcaaatcattttatatccctgaaattcttggttagggcttaaaattcaactcagtgctcactgtttgctccactctgttgcggaaaataagacagag

SEQ ID NO: 19519 - DNA, 600 bp, Chicken  19866894229287_2
agagggacatcctgtgcagtcagcaggtgccatggaaggcccacagttctgaacacttccacgtgtttgtgtgacttattttgctttggtgcagctgtgggaaactccatgaccagtttttctctccagctaatgccgattgggagaattcatttcctgccgagtggtccctctgctctgcaaaggacagcaaaacctctgccaccgcatccccttgggatggggcaggatggrgcactcaaaaccacaggccatagaggagccccatcaggtgggagcgggtgggtggctttacagtgrggcttgtttccccttttagttttactggtttccttcagcaatcattagggcttaactaagcttttctggcttccctttgtgcttctgaggttcttttgttcccacagcaggmgcagggctgtaaggatcccttcaaatcaaatcattttatatccctgaaattcttggttagggcttaaaattcaactcagtgctcactgtttgctccactctgttgcggaaaataagacagagatcagagttcctgtgttttgatgctgaaatctctttacattggctgatttttctgcttcaaatcaa

SEQ ID NO: 19520 - DNA, 600 bp, Chicken  19866894229287_3
ccagtttttctctccagctaatgccgattgggagaattcatttcctgccgagtggtccctctgctctgcaaaggacagcaaaacctctgccaccgcatccccttgggatggggcaggatggrgcactcaaaaccacaggccatagaggagccccatcaggtgggagcgggtgggtggctttacagtgrggcttgtttccccttttagttttactggtttccttcagcaatcattagggcttaactaagcttttctggcttccctttgtgcttctgaggttcttttgttcccacagcaggmgcagggctgtaaggatcccttcaaatcaaatcattttatatccctgaaattcttggttagggcttaaaattcaactcagtgctcactgtttgctccactctgttgcggaaaataagacagagatcagagttcctgtgttttgatgctgaaatctctttacattggctgatttttctgcttcaaatcaaaacagactggcagtattacagcatcagcacgcatttgtcacaggtcccacagtggcctacagggtgggcacaagcaaagacaagcagtgtcttttgttatgaagacataaag

SEQ ID NO: 19521 - DNA, 599 bp, Chicken  19866894229293_1
  misc_feature (1)..(128): n is any nucleotide
nnnnnnnnnnnnnnnnnnnnnnnnnnnnnnnnnnnnnnnnnnnnnnnnnnnnnnnnnnnnnnnnnnnnnnnnnnnnnnnnnnnnnnnnnnnnnnnnnnnnnnnnnnnnnnnnnnnnnnnnnnnnnnnntaccagactgatatgtgagtttcacaaatccagggtgaaatagcccacgagttttatgtttttattgcctttttaaaaaaaattaaaatactaaagacaaaaaatacattttgttacttatataaatcaaccatattacatattttatgagagctgctccaaaagtaatgcytgctattttattatgttggcccatgaagcaggtgtttgtggtatggcagtagaggttgaacattcacacattttgctgccatgtgacagatggcagcagcagagcagtctgacaaacagcatctgacatggaagtgtatctgaagcaaaagtgtgtcactgaatttcctctatgaggaaaaaaatggcatccactgacattcatcaatgtttgctgaatgttgatggtgaccaaagagcggatgtgagcacagtgaggtggtgggcactgcatttcagtgggccacttctactggtaca

SEQ ID NO: 19522 - DNA, 600 bp, Chicken  19866894229300_1
acgtcgatataaactgaatgacaattaacattagtgcaggttggattcgcgtttattgctgctcgcaggttcacactcgacgtgcctctgcacggagctttcattgccacccatcagcacctcttcatcagcacagctcccagttccaaaaggtggctggaaaactgccccagcagctcggggtgcatgtgggaacccctaactcagccccgtgcacacccacctgtgctcgcacgtggggtggaggtaactgagtcccttgagccaacccagtgtcactgccctcagctccttatggaygctgggytcccacgtggtggtggatgcgcacagaggtcaggaggggccagcactgcctttcctgaatcctagtgaagctctaacatcagatccaactgcgaaagcaaagtctrgagcagctgggggtattgcacttgagcagtgtataaatgaatcccgcgtgctatgagacgttatataaatgttatgtattatctgtgtaatctcattctgatttatacaatagtagagactgctcagtaatccaaaataaatatatctcaagttgagctccaagtgttttcaatttgggagtgcctg

SEQ ID NO: 19523 - DNA, 600 bp, Chicken  19866894229300_2
tataaactgaatgacaattaacattagtgcaggttggattcgcgtttattgctgctcgcaggttcacactcgacgtgcctctgcacggagctttcattgccacccatcagcacctcttcatcagcacagctcccagttccaaaaggtggctggaaaactgccccagcagctcggggtgcatgtgggaacccctaactcagccccgtgcacacccacctgtgctcgcacgtggggtggaggtaactgagtcccttgagccaacccagtgtcactgccctcagctccttatggaygctgggytcccacgtggtggtggatgcgcacagaggtcaggaggggccagcactgcctttcctgaatcctagtgaagctctaacatcagatccaactgcgaaagcaaagtctrgagcagctgggggtattgcacttgagcagtgtataaatgaatcccgcgtgctatgagacgttatataaatgttatgtattatctgtgtaatctcattctgatttatacaatagtagagactgctcagtaatccaaaataaatatatctcaagttgagctccaagtgttttcaatttgggagtgcctgtgtctcc

SEQ ID NO: 19524 - DNA, 600 bp, Chicken  19866894229300_3
tcagcacctcttcatcagcacagctcccagttccaaaaggtggctggaaaactgccccagcagctcggggtgcatgtgggaacccctaactcagccccgtgcacacccacctgtgctcgcacgtggggtggaggtaactgagtcccttgagccaacccagtgtcactgccctcagctccttatggaygctgggytcccacgtggtggtggatgcgcacagaggtcaggaggggccagcactgcctttcctgaatcctagtgaagctctaacatcagatccaactgcgaaagcaaagtctrgagcagctgggggtattgcacttgagcagtgtataaatgaatcccgcgtgctatgagacgttatataaatgttatgtattatctgtgtaatctcattctgatttatacaatagtagagactgctcagtaatccaaaataaatatatctcaagttgagctccaagtgttttcaatttgggagtgcctgtgtctccaaggtcacctcataaatcctggcactgtggcacggcgctgccaatctgcgtggggtgtaataagtctggagggaaatcaacgctgaaaacgctgccgaatttctca

SEQ ID NO: 19525 - DNA, 599 bp, Chicken  19866894229304_1
  misc_feature (1)..(1): n is any nucleotide
nctcaatatgccctcaggcagagttctctccagcagaattcatccacatgccttcatctgcacttgcagtaaccacaggtaagcaacaagtaataaatttaattctagtgatatctgcagttaaaatgttgttctaaccctttgccgggtgatatgttttacctatcaaacacctttgaaatgaaagggtatttctcactactttctatcttagcaatactactgtacttaacataaagtcctgttctctgtagatacctgagagacagcagtgtcccagcttgaggtcagagaagtttygttttgtttttaagtagcgatagcattttcttatttctagaacagcagatgacagatacatctgcttccaagcagatgggcagtttttctgacaattcagcaaacagaaggcaggtgcaaggatttttggcaatagsaagtttgtgcgacttgttactattaaaagaaacaaaaagcaaagtrcagttaaatggtggtcttgcatcacagcccgagcttcatgctgaactccatgataaatatttaggggagcacagaacaaaccagcayagcaagagttgygtttccccatccgactt

SEQ ID NO: 19526 - DNA, 600 bp, Chicken  19866894229304_2
ccctttgccgggtgatatgttttacctatcaaacacctttgaaatgaaagggtatttctcactactttctatcttagcaatactactgtacttaacataaagtcctgttctctgtagatacctgagagacagcagtgtcccagcttgaggtcagagaagtttygttttgtttttaagtagcgatagcattttcttatttctagaacagcagatgacagatacatctgcttccaagcagatgggcagtttttctgacaattcagcaaacagaaggcaggtgcaaggatttttggcaatagsaagtttgtgcgacttgttactattaaaagaaacaaaaagcaaagtrcagttaaatggtggtcttgcatcacagcccgagcttcatgctgaactccatgataaatatttaggggagcacagaacaaaccagcayagcaagagttgygtttccccatccgactttcttaacgtaattggaggaggcccaactcttgagaaggcagtttattaacttgaaaaagcttgtgcatgtagaacagtgactccctatttccacgaaggaaaaaaaacaaccagtcagtggggacagcagccctagga

SEQ ID NO: 19527 - DNA, 600 bp, Chicken  19866894229304_3
aaagggtatttctcactactttctatcttagcaatactactgtacttaacataaagtcctgttctctgtagatacctgagagacagcagtgtcccagcttgaggtcagagaagtttygttttgtttttaagtagcgatagcattttcttatttctagaacagcagatgacagatacatctgcttccaagcagatgggcagtttttctgacaattcagcaaacagaaggcaggtgcaaggatttttggcaatagsaagtttgtgcgacttgttactattaaaagaaacaaaaagcaaagtrcagttaaatggtggtcttgcatcacagcccgagcttcatgctgaactccatgataaatatttaggggagcacagaacaaaccagcayagcaagagttgygtttccccatccgactttcttaacgtaattggaggaggcccaactcttgagaaggcagtttattaacttgaaaaagcttgtgcatgtagaacagtgactccctatttccacgaaggaaaaaaaacaaccagtcagtggggacagcagccctaggatagctcatgctggacgccaggcttgcccagctgctgaaggttgtgg

SEQ ID NO: 19528 - DNA, 600 bp, Chicken  19866894229304_4
agtgtcccagcttgaggtcagagaagtttygttttgtttttaagtagcgatagcattttcttatttctagaacagcagatgacagatacatctgcttccaagcagatgggcagtttttctgacaattcagcaaacagaaggcaggtgcaaggatttttggcaatagsaagtttgtgcgacttgttactattaaaagaaacaaaaagcaaagtrcagttaaatggtggtcttgcatcacagcccgagcttcatgctgaactccatgataaatatttaggggagcacagaacaaaccagcayagcaagagttgygtttccccatccgactttcttaacgtaattggaggaggcccaactcttgagaaggcagtttattaacttgaaaaagcttgtgcatgtagaacagtgactccctatttccacgaaggaaaaaaaacaaccagtcagtggggacagcagccctaggatagctcatgctggacgccaggcttgcccagctgctgaaggttgtggggtttgctttgttgagcaggatgtggttggtgtcagtgtcaccacttcttccctgggaaacacaaagaccccggttaattaagggaa

SEQ ID NO: 19529 - DNA, 600 bp, Chicken  19866894229304_5
tgaggtcagagaagtttygttttgtttttaagtagcgatagcattttcttatttctagaacagcagatgacagatacatctgcttccaagcagatgggcagtttttctgacaattcagcaaacagaaggcaggtgcaaggatttttggcaatagsaagtttgtgcgacttgttactattaaaagaaacaaaaagcaaagtrcagttaaatggtggtcttgcatcacagcccgagcttcatgctgaactccatgataaatatttaggggagcacagaacaaaccagcayagcaagagttgygtttccccatccgactttcttaacgtaattggaggaggcccaactcttgagaaggcagtttattaacttgaaaaagcttgtgcatgtagaacagtgactccctatttccacgaaggaaaaaaaacaaccagtcagtggggacagcagccctaggatagctcatgctggacgccaggcttgcccagctgctgaaggttgtggggtttgctttgttgagcaggatgtggttggtgtcagtgtcaccacttcttccctgggaaacacaaagaccccggttaattaagggaaccaaactcctca

SEQ ID NO: 19530 - DNA, 600 bp, Chicken  19866894229305_1
ctaattgagtgtaatgattagagatggcaactggcaggaaatctatcagctattttgggagcccagagagggctgcaaggagaggatgatgggtcatgctgctgctggaggccagcagaagtggcacgctcattcaagtatagaccaatatgtcactataagctgttttgctgcttgttttcttgtctgattaaaataaacctgagggacaattcagttactaaatccagttcatgacaagaaaactcaaagctttttgattgggttggcttgtaggaacaaacttcatttctgatgttyccattcatatttagcatgaaattccccccccatcagactttcattcatctctgaggtttctgaaatgcatcatcaccagtgttaaaccatttaagtctgtgtacctagacatgaaaaggtggtttacagcaagcctacccctgctttatatgtgggaatgtgacgctagctcaatgaaagaacattatgggacccatcttgtcatatctgcctccttccacagcaacatccttaaaaattatttgtaacaccggactctgcgatgaacaatgttgccctcacaggtcattggtctctagc

SEQ ID NO: 19531 - DNA, 600 bp, Chicken  19866894229307_1
caagctgtattacattaaaggaaaatgctaaaagttccctgttgggttattatgattttggcatcctcaaagctttatgttattttaaattgtattctttgtaattggaaatctcaatttgtacaaaaaaaatgtataaaatttgattcacatttgtaattagtcagtggaattctgattaattaaaaagacattatgctaatccattgagcaaagtgattgtcccactctgcactgtgctgctgtggtctcactttgagtactgtacgcagttttgagtgtcacagtacaaaaaaggayttaaaactatttgagaatgtccaaaggagggctacaaatatggtgaagactcaagaggggaaaatgtatgagtaggggctgacatctcttggtttgctcagcccagagcagaggaggctgaggggaggtcttatggcagcctgcagatcctcatgagggaagaggaagggcagcactgagttctgctctctggtgacaatgaccggacgtgagagaactggcatgaagctgtgacaggggacgttcgtgttggatatcagttaaagcttcatcacagagagggtggttggagcagatttc

SEQ ID NO: 19532 - DNA, 600 bp, Chicken  19866894229312_1
taccatgatacgtaactattttccagtggaaaccattcttctcctaacctcttcaatactctggctttaagcttactgagtgaaaaattgagctatgaagtattattccaaaacgcaaagtggaggtacagtacagctattaattagttatgttgcaaaaggaatagagatcataaacaaggaacaaggtagataaaatgctctactccaggttactcaggtgaacagcaaagcaaagtatatcacctatatcaccaaagagaaatgcataaaagctatccctgtatgtaggatacaccwrgtcactctctgcmtgtcttaccattatccttaattgttttttcactttgcaactgagaacagggacagaaatgtggttaattgtgaaatttgttatatgtcaatttatctgccatttgttgtctgtggcatgttatgaatacaattttagactttctcatattttcttatccttcactcatgtcagaaatgccagattcttgagcagcgcagtcagagagaaaataactgaaatgtcctttcctgaatcaatcttgtctctgctgacatggcaagacatcccaaaaccctgaagatgaa

SEQ ID NO: 19533 - DNA, 600 bp, Chicken  19866894229312_10
ataaaataaaccaytgaagtccagttcagtgccttagaggaaggtgaatgtggtccatctttactggtgggattttgaaacgtgtttcaagctggcctaattatcctcacattaaagtcactagtattgcattacagacackrgtaaaattcatcaattcactttgaacagactcaggttgaaagctgtgcatttctggaaatcccttgccaagccaacttaaccacgttcagacagatgttcctatatatagttgtagtgtgcagaggacctgaccaagatcaaactctcactggccaygagaaaaacaacagataactgtaatwtgatgagttttctgcctaaacatataagggcaggagaaaaagtgttactaatatcccagtttttgaaatggcagctgagggtagcaacttgtctaaagtacccgttcctgtgcttcagaaacacaacagattttcccttccaggattgttctctcaagatataagaggcacttgtgaacaaaggctgttatggtacaaatatctcaaggcttattattgcttccattaaagacagtggaatccagggagagcaggagttagcttgaaacaggaa

SEQ ID NO: 19534 - DNA, 600 bp, Chicken  19866894229312_11
cagtgccttagaggaaggtgaatgtggtccatctttactggtgggattttgaaacgtgtttcaagctggcctaattatcctcacattaaagtcactagtattgcattacagacackrgtaaaattcatcaattcactttgaacagactcaggttgaaagctgtgcatttctggaaatcccttgccaagccaacttaaccacgttcagacagatgttcctatatatagttgtagtgtgcagaggacctgaccaagatcaaactctcactggccaygagaaaaacaacagataactgtaatwtgatgagttttctgcctaaacatataagggcaggagaaaaagtgttactaatatcccagtttttgaaatggcagctgagggtagcaacttgtctaaagtacccgttcctgtgcttcagaaacacaacagattttcccttccaggattgttctctcaagatataagaggcacttgtgaacaaaggctgttatggtacaaatatctcaaggcttattattgcttccattaaagacagtggaatccagggagagcaggagttagcttgaaacaggaaaaacaacagacggttgcagaatgggg

SEQ ID NO: 19535 - DNA, 600 bp, Chicken  19866894229312_2
accatgatacgtaactattttccagtggaaaccattcttctcctaacctcttcaatactctggctttaagcttactgagtgaaaaattgagctatgaagtattattccaaaacgcaaagtggaggtacagtacagctattaattagttatgttgcaaaaggaatagagatcataaacaaggaacaaggtagataaaatgctctactccaggttactcaggtgaacagcaaagcaaagtatatcacctatatcaccaaagagaaatgcataaaagctatccctgtatgtaggatacaccwrgtcactctctgcmtgtcttaccattatccttaattgttttttcactttgcaactgagaacagggacagaaatgtggttaattgtgaaatttgttatatgtcaatttatctgccatttgttgtctgtggcatgttatgaatacaattttagactttctcatattttcttatccttcactcatgtcagaaatgccagattcttgagcagcgcagtcagagagaaaataactgaaatgtcctttcctgaatcaatcttgtctctgctgacatggcaagacatcccaaaaccctgaagatgaaa

SEQ ID NO: 19536 - DNA, 600 bp, Chicken  19866894229312_3
actattttccagtggaaaccattcttctcctaacctcttcaatactctggctttaagcttactgagtgaaaaattgagctatgaagtattattccaaaacgcaaagtggaggtacagtacagctattaattagttatgttgcaaaaggaatagagatcataaacaaggaacaaggtagataaaatgctctactccaggttactcaggtgaacagcaaagcaaagtatatcacctatatcaccaaagagaaatgcataaaagctatccctgtatgtaggatacaccwrgtcactctctgcmtgtcttaccattatccttaattgttttttcactttgcaactgagaacagggacagaaatgtggttaattgtgaaatttgttatatgtcaatttatctgccatttgttgtctgtggcatgttatgaatacaattttagactttctcatattttcttatccttcactcatgtcagaaatgccagattcttgagcagcgcagtcagagagaaaataactgaaatgtcctttcctgaatcaatcttgtctctgctgacatggcaagacatcccaaaaccctgaagatgaaaaattgcttactat

SEQ ID NO: 19537 - DNA, 600 bp, Chicken  19866894229312_4
actttgcaactgagaacagggacagaaatgtggttaattgtgaaatttgttatatgtcaatttatctgccatttgttgtctgtggcatgttatgaatacaattttagactttctcatattttcttatccttcactcatgtcagaaatgccagattcttgagcagcgcagtcagagagaaaataactgaaatgtcctttcctgaatcaatcttgtctctgctgacatggcaagacatcccaaaaccctgaagatgaaaaattgcttactattcacaggagtaaattaataacaatacaaayacyggagccaaatcctacaggtgttactcaaatctgacgtccatcagctccattagaacctattcagctaatagcagaggctggattcttcacaagctactgcctatgatcrtggggtatacataatggatttgtaatactagaacagtgaaactcacctctgggcacagtgtttgcacaataaaataaaccaytgaagtccagttcagtgccttagaggaaggtgaatgtggtccatctttactggtgggattttgaaacgtgtttcaagctggcctaattatcctcacattaaagtca

SEQ ID NO: 19538 - DNA, 600 bp, Chicken  19866894229312_5
ttgcaactgagaacagggacagaaatgtggttaattgtgaaatttgttatatgtcaatttatctgccatttgttgtctgtggcatgttatgaatacaattttagactttctcatattttcttatccttcactcatgtcagaaatgccagattcttgagcagcgcagtcagagagaaaataactgaaatgtcctttcctgaatcaatcttgtctctgctgacatggcaagacatcccaaaaccctgaagatgaaaaattgcttactattcacaggagtaaattaataacaatacaaayacyggagccaaatcctacaggtgttactcaaatctgacgtccatcagctccattagaacctattcagctaatagcagaggctggattcttcacaagctactgcctatgatcrtggggtatacataatggatttgtaatactagaacagtgaaactcacctctgggcacagtgtttgcacaataaaataaaccaytgaagtccagttcagtgccttagaggaaggtgaatgtggtccatctttactggtgggattttgaaacgtgtttcaagctggcctaattatcctcacattaaagtcacta

SEQ ID NO: 19539 - DNA, 600 bp, Chicken  19866894229312_6
ctcatattttcttatccttcactcatgtcagaaatgccagattcttgagcagcgcagtcagagagaaaataactgaaatgtcctttcctgaatcaatcttgtctctgctgacatggcaagacatcccaaaaccctgaagatgaaaaattgcttactattcacaggagtaaattaataacaatacaaayacyggagccaaatcctacaggtgttactcaaatctgacgtccatcagctccattagaacctattcagctaatagcagaggctggattcttcacaagctactgcctatgatcrtggggtatacataatggatttgtaatactagaacagtgaaactcacctctgggcacagtgtttgcacaataaaataaaccaytgaagtccagttcagtgccttagaggaaggtgaatgtggtccatctttactggtgggattttgaaacgtgtttcaagctggcctaattatcctcacattaaagtcactagtattgcattacagacackrgtaaaattcatcaattcactttgaacagactcaggttgaaagctgtgcatttctggaaatcccttgccaagccaacttaaccacgttca

SEQ ID NO: 19540 - DNA, 600 bp, Chicken  19866894229312_7
ctttcctgaatcaatcttgtctctgctgacatggcaagacatcccaaaaccctgaagatgaaaaattgcttactattcacaggagtaaattaataacaatacaaayacyggagccaaatcctacaggtgttactcaaatctgacgtccatcagctccattagaacctattcagctaatagcagaggctggattcttcacaagctactgcctatgatcrtggggtatacataatggatttgtaatactagaacagtgaaactcacctctgggcacagtgtttgcacaataaaataaaccaytgaagtccagttcagtgccttagaggaaggtgaatgtggtccatctttactggtgggattttgaaacgtgtttcaagctggcctaattatcctcacattaaagtcactagtattgcattacagacackrgtaaaattcatcaattcactttgaacagactcaggttgaaagctgtgcatttctggaaatcccttgccaagccaacttaaccacgttcagacagatgttcctatatatagttgtagtgtgcagaggacctgaccaagatcaaactctcactggccaygagaaaaacaacag

SEQ ID NO: 19541 - DNA, 600 bp, Chicken  19866894229312_8
gttactcaaatctgacgtccatcagctccattagaacctattcagctaatagcagaggctggattcttcacaagctactgcctatgatcrtggggtatacataatggatttgtaatactagaacagtgaaactcacctctgggcacagtgtttgcacaataaaataaaccaytgaagtccagttcagtgccttagaggaaggtgaatgtggtccatctttactggtgggattttgaaacgtgtttcaagctggcctaattatcctcacattaaagtcactagtattgcattacagacackrgtaaaattcatcaattcactttgaacagactcaggttgaaagctgtgcatttctggaaatcccttgccaagccaacttaaccacgttcagacagatgttcctatatatagttgtagtgtgcagaggacctgaccaagatcaaactctcactggccaygagaaaaacaacagataactgtaatwtgatgagttttctgcctaaacatataagggcaggagaaaaagtgttactaatatcccagtttttgaaatggcagctgagggtagcaacttgtctaaagtacccgttcctgtgcttc

SEQ ID NO: 19542 - DNA, 600 bp, Chicken  19866894229312_9
ttactcaaatctgacgtccatcagctccattagaacctattcagctaatagcagaggctggattcttcacaagctactgcctatgatcrtggggtatacataatggatttgtaatactagaacagtgaaactcacctctgggcacagtgtttgcacaataaaataaaccaytgaagtccagttcagtgccttagaggaaggtgaatgtggtccatctttactggtgggattttgaaacgtgtttcaagctggcctaattatcctcacattaaagtcactagtattgcattacagacackrgtaaaattcatcaattcactttgaacagactcaggttgaaagctgtgcatttctggaaatcccttgccaagccaacttaaccacgttcagacagatgttcctatatatagttgtagtgtgcagaggacctgaccaagatcaaactctcactggccaygagaaaaacaacagataactgtaatwtgatgagttttctgcctaaacatataagggcaggagaaaaagtgttactaatatcccagtttttgaaatggcagctgagggtagcaacttgtctaaagtacccgttcctgtgcttca

SEQ ID NO: 19543 - DNA, 600 bp, Chicken  19866894229320_1
ttttggggtcaagaaattgctttttgcctatttttcaaatgcccataaactgctgcaggccattgtttgcagaaagcccaaaccactaaaaattaaagatgtaccaaaattgtgctgagaatacttgcagatgcaagacaaaggtgaagaagagacagcaatagtttccttcaggagcacagggacacatgctaaaagcacatatttgtcctcccttgcactgtttgtgcatttgtacttccctgccatgcctgctggacagagataaatcagctaacttcactttcaatatatttagtmcatcattttcagtttttatgttgttttccttttatgaagggaacatgaggatagctgcacacaacctacttagaaagagcaggctcgttccagcctttacattttggctccctctgctggaaataagttaaaaagccaagtagcaccacccgtgtaccttygttagctgctgaatgcagcatgcagctctcagtatggtacagttcacccccacctcatccaacaccagaatacgactgaggacaacgactaaaacagacctacctgcgtgcttttatgccaagaaatgctaaactttaa

SEQ ID NO: 19544 - DNA, 600 bp, Chicken  19866894229320_2
tagtttccttcaggagcacagggacacatgctaaaagcacatatttgtcctcccttgcactgtttgtgcatttgtacttccctgccatgcctgctggacagagataaatcagctaacttcactttcaatatatttagtmcatcattttcagtttttatgttgttttccttttatgaagggaacatgaggatagctgcacacaacctacttagaaagagcaggctcgttccagcctttacattttggctccctctgctggaaataagttaaaaagccaagtagcaccacccgtgtaccttygttagctgctgaatgcagcatgcagctctcagtatggtacagttcacccccacctcatccaacaccagaatacgactgaggacaacgactaaaacagacctacctgcgtgcttttatgccaagaaatgctaaactttaagcagcattgatagatccacattcagcttccctcagctaccaaaacacgcaggactgctttatcatctgcctgttttattgtttcaaactctatccgttacatttattagttcttagaggttaagtggaactcagtctgtaagtctacccactcctaaacct

SEQ ID NO: 19545 - DNA, 600 bp, Chicken  19866894229320_3
tgcgtgcttttatgccaagaaatgctaaactttaagcagcattgatagatccacattcagcttccctcagctaccaaaacacgcaggactgctttatcatctgcctgttttattgtttcaaactctatccgttacatttattagttcttagaggttaagtggaactcagtctgtaagtctacccactcctaaacctgactgcattcctgtttcctcacatagctgaaaagagcagatgtttcattgcccagtgaagacttccagtatgccagtggcaatggggctcatattcaaagcagygatacaaaataaagcrctgtgaacacactcaggtattcttatctgaaattattagattacaggaaaacttctgcttctatcccatgaaagcacaacttcctcagaagcttctactcacttgatttaactggtatctcatatgccatggttacaaagagtgatttgtgttccacgtttgtgaagcaatcctgcagtaactgtcctgcagaaatccatgctgggagaggcaggaaggagccacagcctattccaagtgcacaggattccttcagatacaaagtagatcataaaactaccacg

SEQ ID NO: 19546 - DNA, 600 bp, Chicken  19866894229320_4
aagaaatgctaaactttaagcagcattgatagatccacattcagcttccctcagctaccaaaacacgcaggactgctttatcatctgcctgttttattgtttcaaactctatccgttacatttattagttcttagaggttaagtggaactcagtctgtaagtctacccactcctaaacctgactgcattcctgtttcctcacatagctgaaaagagcagatgtttcattgcccagtgaagacttccagtatgccagtggcaatggggctcatattcaaagcagygatacaaaataaagcrctgtgaacacactcaggtattcttatctgaaattattagattacaggaaaacttctgcttctatcccatgaaagcacaacttcctcagaagcttctactcacttgatttaactggtatctcatatgccatggttacaaagagtgatttgtgttccacgtttgtgaagcaatcctgcagtaactgtcctgcagaaatccatgctgggagaggcaggaaggagccacagcctattccaagtgcacaggattccttcagatacaaagtagatcataaaactaccacgagaaagctctggcaag

SEQ ID NO: 19547 - DNA, 600 bp, Chicken  19866894229321_1
tgaaaagcatggccgggtttcagctggcggccgaattggataataggaggttgattaagcaggctgcgctcagaggagggagttaagcatttccctgtgggctgggtgaaattggttggaagggaatgcgggctgcgcacgaggcagctggctggaagagaggggctttgcagcagcagccggcagggacagtgctgtgcaatccctgtgccgtgctgtgccgtgctgccgcagccggtggagctgagccgtgggcgagatcccactgagctcccggcttccctggggggctcacgctgygcctcgagccgtcagcgcacctctgctattggctgcacgcggtgctcccggtgctcctgcacccatccgtgcccgctctgcccatcctcagcctccacaatccccaggccctggggttgtgccgttctgctgctcctttcttccctcgtggggttgcatccggactgtggggagaggcaggggtgagggatggcattgctgtgcatctgcacaagagatgaggcgctgctcgctggggctccgtggcgctcccggagagctgtgctgagggctgcgctgtgtgggtgctgctggcccagt

SEQ ID NO: 19548 - DNA, 599 bp, Chicken  19866894229331_1
  misc_feature (1)..(122): n is any nucleotide
nnnnnnnnnnnnnnnnnnnnnnnnnnnnnnnnnnnnnnnnnnnnnnnnnnnnnnnnnnnnnnnnnnnnnnnnnnnnnnnnnnnnnnnnnnnnnnnnnnnnnnnnnnnnnnnnnnnnnnnnnntgtattgatacctgcctgggttgcatggcagcccaccagtgtgccaggcctgagcatgctcaccaatgaatgcagagatgggagagatgggaatgtgaagaaaatagctgagggaagagaaggaatgaactatataagaggaaactcactgaaaaagtctgacagccaagggaaaaaraagtcagatgccaaggaaagagagaaatacaatctgaaacagtgagagtggactgaaattgcttgtgagctgtaaagtctcagagagtcccaggaaaagccttggtacctgagagccgagacagtggctcacagcagcaccaacctaaggtaagaaagcaacctttccaaagcagtaatgttccaaaaccttctcccatcttgtacggcactttattcctcatcctcttctaccagcttctgagcagttttgcttgcttattataggcagagttrccagtgcttacaatttaattgtga

SEQ ID NO: 19549 - DNA, 600 bp, Chicken  19866894229331_2
aaagtctgacagccaagggaaaaaraagtcagatgccaaggaaagagagaaatacaatctgaaacagtgagagtggactgaaattgcttgtgagctgtaaagtctcagagagtcccaggaaaagccttggtacctgagagccgagacagtggctcacagcagcaccaacctaaggtaagaaagcaacctttccaaagcagtaatgttccaaaaccttctcccatcttgtacggcactttattcctcatcctcttctaccagcttctgagcagttttgcttgcttattataggcagagttrccagtgcttacaatttaattgtgaactttgaggtacttggcactttatgtaaagcctcagctcctgcaaatgcaaaaggatttttttttttttttaatgagaacaaaactttctggttctcatgattgtgtaggaaatcttccaagtgtgatcccaaaaatataygttaagatgtaatccttcaacattcagaagtcatcgtgagagcataaggaaccaaaacgtgctggggatttctgtttcttatttctcatattttgttgggtttttttccctagttttgtagttattgtgctaatg

SEQ ID NO: 19550 - DNA, 600 bp, Chicken  19866894229331_3
caacctaaggtaagaaagcaacctttccaaagcagtaatgttccaaaaccttctcccatcttgtacggcactttattcctcatcctcttctaccagcttctgagcagttttgcttgcttattataggcagagttrccagtgcttacaatttaattgtgaactttgaggtacttggcactttatgtaaagcctcagctcctgcaaatgcaaaaggatttttttttttttttaatgagaacaaaactttctggttctcatgattgtgtaggaaatcttccaagtgtgatcccaaaaatataygttaagatgtaatccttcaacattcagaagtcatcgtgagagcataaggaaccaaaacgtgctggggatttctgtttcttatttctcatattttgttgggtttttttccctagttttgtagttattgtgctaatgttcaggattttgtaaagtccagctgatggtctgtcaaaggttggcatggtgcttgtatagaataaaggttttaatgacattctgactacagcttcctgttaggtacttcacacacacacacacacaaaaatgtatttgacatttgaaaatctttggcgatttcag

SEQ ID NO: 19551 - DNA, 600 bp, Chicken  19866894229333_1
tttctcccaaaatctgaaaaactgtgatagtgtcagacagtgtcaagattataaaaatgaagtgtcatgaaaatcttaccttttctactctaagaaatatctctggtatttgagaagaaggaaagagtgctgaacctaggatttcctgtcaaggagggaaagtaagccctacttcatgaagtccagcctgatggctaaaagtaaaaaaaataataatgttaatgaaagcagtgtgcaccttagtcaaaatacacatcttgttataacttcttgggaaacctgtatatctgaaagacttaygtggagaagtgcaaagtcctgcacctagagaagaacaacccayggcactagtacatactggggcccgactggctggaaagcagctatttcagaacaggatctggagggtcctggtagacacagacttgaatgaaagccaacaatgctcttttgctgccaagtaagctgatactatcttgggctgcattaaggggattgctgccagcaggtggagggaaggtgatcttactcagtattgatgaggccacccctggagtgcttggtccagttctgggctcccccgtacaagagagacatact

SEQ ID NO: 19552 - DNA, 600 bp, Chicken  19866894229333_2
caagattataaaaatgaagtgtcatgaaaatcttaccttttctactctaagaaatatctctggtatttgagaagaaggaaagagtgctgaacctaggatttcctgtcaaggagggaaagtaagccctacttcatgaagtccagcctgatggctaaaagtaaaaaaaataataatgttaatgaaagcagtgtgcaccttagtcaaaatacacatcttgttataacttcttgggaaacctgtatatctgaaagacttaygtggagaagtgcaaagtcctgcacctagagaagaacaacccayggcactagtacatactggggcccgactggctggaaagcagctatttcagaacaggatctggagggtcctggtagacacagacttgaatgaaagccaacaatgctcttttgctgccaagtaagctgatactatcttgggctgcattaaggggattgctgccagcaggtggagggaaggtgatcttactcagtattgatgaggccacccctggagtgcttggtccagttctgggctcccccgtacaagagagacatactggggagagcttggcaaagggctacaaagatcagtaagggagca

SEQ ID NO: 19553 - DNA, 599 bp, Chicken  19866894229334_1
  misc_feature (1)..(120): n is any nucleotide
nnnnnnnnnnnnnnnnnnnnnnnnnnnnnnnnnnnnnnnnnnnnnnnnnnnnnnnnnnnnnnnnnnnnnnnnnnnnnnnnnnnnnnnnnnnnnnnnnnnnnnnnnnnnnnnnnnnnnnnnctttgaaatcaatccactttggaacccctgccaggatgagcttactgctgcattgccctgcagctgggcagcattagtgcttggaaatctgaaagcccttctagaaggcatgagagcgtccacccacccatccaataggtcccatggcaggcaagcagctgtgccccacagtgtgctgcrtgcttaccttttctaggattacataaggtgctggaaacctttggtaaggcattggaacaagctgcccaaggaagtggtgcagtcaccatccctggaggtgttcaagaaccgtggagatgtggacatggctcagtgggcacagtggtgatgggtggacagttggacctgatgagcctcgtggctttttccagtcttaatgattctacgaaacctcctgctgatgttccagctcttgttcccaagcaacctctccctttccttgcactcacctgctgtccccagcgtttgccacatacagc

SEQ ID NO: 19554 - DNA, 455 bp, Chicken  19866894229334_2
acagttggacctgatgagcctcgtggctttttccagtcttaatgattctacgaaacctcctgctgatgttccagctcttgttcccaagcaacctctccctttccttgcactcacctgctgtccccagcgtttgccacatacagctttccctggaaataaagggcagccagagcagtgcagcctcctgtctggttggtggcttccatctcctggccaatgacttcatcctgggggtttaaacaagtttgaagagcgatgtgagccaaggtactgctttctgcagctgcctcctggctcctmgcagaaatctggagctaaaaccgaytgaagacggtcagcaggaaatcagcaaggtgaaagcgagcattgcttcagtgyggccaacaaagttatcactgctggactgagtgctaaggacaggctgatagcagagatctcaaacttgcatatggtct

SEQ ID NO: 19555 - DNA, 430 bp, Chicken  19866894229334_3
gctttttccagtcttaatgattctacgaaacctcctgctgatgttccagctcttgttcccaagcaacctctccctttccttgcactcacctgctgtccccagcgtttgccacatacagctttccctggaaataaagggcagccagagcagtgcagcctcctgtctggttggtggcttccatctcctggccaatgacttcatcctgggggtttaaacaagtttgaagagcgatgtgagccaaggtactgctttctgcagctgcctcctggctcctmgcagaaatctggagctaaaaccgaytgaagacggtcagcaggaaatcagcaaggtgaaagcgagcattgcttcagtgyggccaacaaagttatcactgctggactgagtgctaaggacaggctgatagcagagatctcaaacttgcatatggtct

SEQ ID NO: 19556 - DNA, 377 bp, Chicken  19866894229334_4
tgttcccaagcaacctctccctttccttgcactcacctgctgtccccagcgtttgccacatacagctttccctggaaataaagggcagccagagcagtgcagcctcctgtctggttggtggcttccatctcctggccaatgacttcatcctgggggtttaaacaagtttgaagagcgatgtgagccaaggtactgctttctgcagctgcctcctggctcctmgcagaaatctggagctaaaaccgaytgaagacggtcagcaggaaatcagcaaggtgaaagcgagcattgcttcagtgyggccaacaaagttatcactgctggactgagtgctaaggacaggctgatagcagagatctcaaacttgcatatggtct

SEQ ID NO: 19557 - DNA, 600 bp, Chicken  19866894229339_1
agtaatatgtgtccctgggctccagcccacaccgcttacatttatttgttacagagcgcacttatactttgcagttaaacataaagtaagtcatgttgcttctttgaaaacatagaaaagtgcagcagacaaaaacattattgttcctgagatttttcaacagctgcagaatgaagaatgtattgtatataaccactaaagcaatgatattctcctcaaacttcaacagactcttcacagaacttccctctttcaccctgatacacttgaggttgctcaggtgcctttagagactaaaayaaagcccttagagagggctggtaaaaatcacaacagtggttgcccttgtgctctgcactgaatccctacgctggtacttgtatgagagaagaagtgctcttggctctgttggagacctctcctaccagcccacatttccactagaagtggttgggcatctttaagattttgtttgcactgaagcattttcagtgtgggagcaggtttctgaagcacccagaacacacaaacacaatattctaactactaaaaagagtatcatttttctttttaagataaaaacatggtcaagaataataa

SEQ ID NO: 19558 - DNA, 600 bp, Chicken  19866894229348_1
ccttggaaacaggggacagaggtagaattctgcatccacttcatcactttaagtgccgtagcagggtcagtgaattagttacaaactgcagtgtacaagcattaagcccttcagcaaaagcacgaggtaaagaggagaccatgaatgatctgcagggagagggctgcttgctccctggctctcagcagcacatccttcactgctcccacacccccactaaggagtacacaacagtcacagaggtgaactaaaagtgtcagttttcattgagcatcatcctccccagatccttccgggacrtgcaggtttcaaggctcgttcattgttattcaggggtcagcttctggcagttcagaaactcggatgacaggctgggagagttctaattcatttcagtttacaaatcctgggtctgcactgcatgcattgctttgaaatgcttttcaaaccttcaagaaacgggctgagagaagttagctcgttcctgctgaattacaagaaaatgctgaaacatgaatttgatgtgagaattcagctgcaaaagtgaggagaggaggaaggcagctggcagatgcaacactgggcagattcttcccacag

SEQ ID NO: 19559 - DNA, 600 bp, Chicken  19866894229348_2
tgcaaaagtgaggagaggaggaaggcagctggcagatgcaacactgggcagattcttcccacagaattcttcagacagggctgccactgcaggggaacagcattcagaatagctttgagaacaaagggaggaactgatgtgctttgccccatcaagctgcctccagcatctacggtgcttcaccaagcagcactcaattcctgctcagtattcattcccctcatccactgataaagccttgcaccctcaatgctgcaccagaagagagaggcatcaccatacaggagaaacacagccatycatgcagctcaagagggttaagaggagtgcagaaaccccaaaatcattgctgaccatcactccctccctccaccccaaccagacatctacaaattctacaaatcaaggcactttctaccaaaatcctttcccaaaaccctctgacagtatctgaatggctacctgctgtccttctgattgctttgttcggttttaaataaagcagggtctggttaagagtaagggcaaagcttgcttctatttaaagacaaaaggagagaactgagctctggattctttaacacagtgctgccccacaga

SEQ ID NO: 19560 - DNA, 600 bp, Chicken  19866894229353_1
caccgccgcctccctgagagctcctgaaatctcccttttcagccttaggagcgtttgtatgctgttcagtcatgcagcagctcgcagaggaacaggtgcagggtgggaggtgggaacgggcggcctgatgccagaatgatgggcagctggggactggggagagtacagccctgccctgctcctggtgcagggcaagaggagcatgaggacattaggagagcaaaatggggaggaggatactgggaggctgccgtggagacatggggttttgtgccacggccatgccagcagaggctgggyggggcctgcaggaagccctcactgaccaggtttggggcyggctgcatccattccatgaccaccaggcacaaatgcagtgctggctggaggctgcagccctccctactatggccccaaacatgtcccttcacttccgtgcctcccacgtggccawaggggcttcttgcctttgtgccaggctctgatgggatctttctatttctgcctctctcccaccctgctccggattcccggctgcggtgaaagaagtgctcaagctgccagcaagcgggagccaccgtgggctgctgccagaagggg

SEQ ID NO: 19561 - DNA, 600 bp, Chicken  19866894229353_2
cagccttaggagcgtttgtatgctgttcagtcatgcagcagctcgcagaggaacaggtgcagggtgggaggtgggaacgggcggcctgatgccagaatgatgggcagctggggactggggagagtacagccctgccctgctcctggtgcagggcaagaggagcatgaggacattaggagagcaaaatggggaggaggatactgggaggctgccgtggagacatggggttttgtgccacggccatgccagcagaggctgggyggggcctgcaggaagccctcactgaccaggtttggggcyggctgcatccattccatgaccaccaggcacaaatgcagtgctggctggaggctgcagccctccctactatggccccaaacatgtcccttcacttccgtgcctcccacgtggccawaggggcttcttgcctttgtgccaggctctgatgggatctttctatttctgcctctctcccaccctgctccggattcccggctgcggtgaaagaagtgctcaagctgccagcaagcgggagccaccgtgggctgctgccagaaggggtgtccccacacctaccactacgcgtgtgccgttgacaca

SEQ ID NO: 19562 - DNA, 600 bp, Chicken  19866894229353_3
tggggagagtacagccctgccctgctcctggtgcagggcaagaggagcatgaggacattaggagagcaaaatggggaggaggatactgggaggctgccgtggagacatggggttttgtgccacggccatgccagcagaggctgggyggggcctgcaggaagccctcactgaccaggtttggggcyggctgcatccattccatgaccaccaggcacaaatgcagtgctggctggaggctgcagccctccctactatggccccaaacatgtcccttcacttccgtgcctcccacgtggccawaggggcttcttgcctttgtgccaggctctgatgggatctttctatttctgcctctctcccaccctgctccggattcccggctgcggtgaaagaagtgctcaagctgccagcaagcgggagccaccgtgggctgctgccagaaggggtgtccccacacctaccactacgcgtgtgccgttgacacaggtgagcccaggtgctgggattgggatgcggggacccccctggtccctctgaccctgctgatggcagggctgggtgggctgggggctccccacgaatggtgatgctctgctgcgt

SEQ ID NO: 19563 - DNA, 600 bp, Chicken  19866894229355_1
gcagtaggtaagggatggaatacaatatacaaataggccacaggtaagaacaacaattaataaataatagtctgcaacactctcatgcagcgcttcacatgttcaatgtgataactaattaatcatagcaacaactttgtattctttgctgccattcatccatcacctcaaagtgctttacaaatgttaattaatacacaagctgtacttttgaggaaagatgttatgacattggttctggtcaatgttaagctgttcttcaatagtacaacttgttgactttctcactgaaacccaaaygtgcaaagcttccattcaaacataagctattccactgtgctagtgacaatatggcacaatccatcccttcacgttgcactccagtataacctcatacaagacaacatgtttgaagtgtaagatgagattaacttttcacaagaaaattggataactggtattttagcctgaacatctggcacacttttagctaaactgcttccttcaaaagctatttttgttgttttacattcacatactacaaagtttcactaacttcaactcaacagccgagacaraaagctaatttctttgctttgg

SEQ ID NO: 19564 - DNA, 600 bp, Chicken  19866894229355_2
actttctcactgaaacccaaaygtgcaaagcttccattcaaacataagctattccactgtgctagtgacaatatggcacaatccatcccttcacgttgcactccagtataacctcatacaagacaacatgtttgaagtgtaagatgagattaacttttcacaagaaaattggataactggtattttagcctgaacatctggcacacttttagctaaactgcttccttcaaaagctatttttgttgttttacattcacatactacaaagtttcactaacttcaactcaacagccgagacaraaagctaatttctttgctttggtgaccagactggagctgcccaacacaactggatgtctgcctgtttttataattattcaaattctttcatttagcactgtaaattcacatgacattttgtatacattcaaccaatttctggtcatacaatgaatctcttggcttcaaagggagtgtgtgtataaatgagatgcaggatttatccagcatccccataaaaacatcataatggatcgttcttcacattcttaagagtatattcccattgtacacacatctctgattgaagagatactgaag

SEQ ID NO: 19565 - DNA, 600 bp, Chicken  19866894229355_3
attattcaaattctttcatttagcactgtaaattcacatgacattttgtatacattcaaccaatttctggtcatacaatgaatctcttggcttcaaagggagtgtgtgtataaatgagatgcaggatttatccagcatccccataaaaacatcataatggatcgttcttcacattcttaagagtatattcccattgtacacacatctctgattgaagagatactgaagcaaaactttctgggactccagtgatcagagctcagaaaggtcagctaaatcctcacagtcatacagggtaartagaagactgttaataamtggaaaactaatataaactgtcacaatctctcttcccatcttcttagaaatctcagaatagtacatccagacaaccttaaacttgatctgttagaaaggcctatatatattccacactaattaaccaagaatgccatcttatgtcattcaggttttatatcaaaaatccttgcaaacatgtactttgctcacagatgtgcatacgcactcggaagacgttggaagggaaatgataagaaaaggcataccaaactaatctaatcactgaagtattaaaatcat

SEQ ID NO: 19566 - DNA, 600 bp, Chicken  19866894229355_4
tttagcactgtaaattcacatgacattttgtatacattcaaccaatttctggtcatacaatgaatctcttggcttcaaagggagtgtgtgtataaatgagatgcaggatttatccagcatccccataaaaacatcataatggatcgttcttcacattcttaagagtatattcccattgtacacacatctctgattgaagagatactgaagcaaaactttctgggactccagtgatcagagctcagaaaggtcagctaaatcctcacagtcatacagggtaartagaagactgttaataamtggaaaactaatataaactgtcacaatctctcttcccatcttcttagaaatctcagaatagtacatccagacaaccttaaacttgatctgttagaaaggcctatatatattccacactaattaaccaagaatgccatcttatgtcattcaggttttatatcaaaaatccttgcaaacatgtactttgctcacagatgtgcatacgcactcggaagacgttggaagggaaatgataagaaaaggcataccaaactaatctaatcactgaagtattaaaatcatagaaggcgctgtgtaata

SEQ ID NO: 19567 - DNA, 599 bp, Chicken  19866894229358_1
  misc_feature (1)..(99): n is any nucleotide
nnnnnnnnnnnnnnnnnnnnnnnnnnnnnnnnnnnnnnnnnnnnnnnnnnnnnnnnnnnnnnnnnnnnnnnnnnnnnnnnnnnnnnnnnnnnnnnnnnnaatatgggcacccttctttttctgtattcctcaataaaacaaaccactcagaaacttcagtatttattttccagatatggggatgcaagtgacttcttgtaaccagagcagcaattggcactggaaattacacatgaacttgactactcctgtaccaggatatgtaaacctacctactggtatgtatgaggctggaacccrgacgtctcctcttcagctccagaaagaaccagaatttgtacggtgtaaacatctttaaagatttcatgcaatgaatacattctgacattcaatgggaagactgacttgatggctgttagcaacttctcaaaattcctgtgtgtgaaaacgcactttaaagaccaatttcactgcactgtcatcttacaatgatttgaggggaaaaaaaaaacacaacatattttccargcttcagttgtgtaatcataacgcatctccagaataaatggctctttcttacagaccactgtgtggtcccc

SEQ ID NO: 19568 - DNA, 600 bp, Chicken  19866894229358_2
cagagcagcaattggcactggaaattacacatgaacttgactactcctgtaccaggatatgtaaacctacctactggtatgtatgaggctggaacccrgacgtctcctcttcagctccagaaagaaccagaatttgtacggtgtaaacatctttaaagatttcatgcaatgaatacattctgacattcaatgggaagactgacttgatggctgttagcaacttctcaaaattcctgtgtgtgaaaacgcactttaaagaccaatttcactgcactgtcatcttacaatgatttgaggggraaaaaaaaacacaacatattttccargcttcagttgtgtaatcataacgcatctccagaataaatggctctttcttacagaccactgtgtggtcccctctccctatgagctcacggatcagtttgaagcttctcaggctgtgatgcatcctgatcagaacacgctgtctcttcatatgttgcaacaacgaaatttaactgcctgttatgactttgcaggctatttaccacagccctgaaacccctgatgggtggaacagtcagaactgctttaaatcagcagaatcagtcctgcaagctc

SEQ ID NO: 19569 - DNA, 600 bp, Chicken  19866894229358_3
acacatgaacttgactactcctgtaccaggatatgtaaacctacctactggtatgtatgaggctggaacccrgacgtctcctcttcagctccagaaagaaccagaatttgtacggtgtaaacatctttaaagatttcatgcaatgaatacattctgacattcaatgggaagactgacttgatggctgttagcaacttctcaaaattcctgtgtgtgaaaacgcactttaaagaccaatttcactgcactgtcatcttacaatgatttgaggggaaaaaaaaaacacaacatattttccargcttcagttgtgtaatcataacgcatctccagaataaatggctctttcttacagaccactgtgtggtcccctctccctatgagctcacggatcagtttgaagcttctcaggctgtgatgcatcctgatcagaacacgctgtctcttcatatgttgcaacaacgaaatttaactgcctgttatgactttgcaggctatttaccacagccctgaaacccctgatgggtggaacagtcagaactgctttaaatcagcagaatcagtcctgcaagctctactttcaagactgccaccacaggtc

SEQ ID NO: 19570 - DNA, 599 bp, Chicken  19866894229359_1
  misc_feature (1)..(155): n is any nucleotide
nnnnnnnnnnnnnnnnnnnnnnnnnnnnnnnnnnnnnnnnnnnnnnnnnnnnnnnnnnnnnnnnnnnnnnnnnnnnnnnnnnnnnnnnnnnnnnnnnnnnnnnnnnnnnnnnnnnnnnnnnnnnnnnnnnnnnnnnnnnnnnnnnnnnnnnnnnncattgtttgggttatctgtggctagggttttcattttcctccctgtttcttcccgagttactctgtgtgtaccacaaaaagaaggggaaggagaggtgaaaaggcagagcaaggcagcatcatactctgttatttaaatggaaaygctcaagaaaggatacattgcatgtaactgtgaccctgactctctaggtgtccctgtgtggtaagagagaagacttaggggagatttgctaagaagcagagctggggaaagcccttctgctggctccttgtgtgaatcaagataaaacattggttaatatgagcattagatggaattcaacctgtgcaggtgggacagaccaccatggactggaattgttattggaaaacgtgttgaaaaacrtcattgaatgataagaagtttcattaggtagatacttagctacacaaaatggcaga

SEQ ID NO: 19571 - DNA, 600 bp, Chicken  19866894229359_2
aggagaggtgaaaaggcagagcaaggcagcatcatactctgttatttaaatggaaaygctcaagaaaggatacattgcatgtaactgtgaccctgactctctaggtgtccctgtgtggtaagagagaagacttaggggagatttgctaagaagcagagctggggaaagcccttctgctggctccttgtgtgaatcaagataaaacattggttaatatgagcattagatggaattcaacctgtgcaggtgggacagaccaccatggactggaattgttattggaaaacgtgttgaaaaacrtcattgaatgataagaagtttcattaggtagatacttagctacacaaaatggcagagtgaatttggctacagggactctattgaggcctggatttcaccagcagctgtttcttacatgtttagtatatttaaaattctgccactgatgatgttcggggcacttccagaagacacagcaagcccagtgactcatcttatcatagcgttatcaagaataatgttccaggtagcagataaacagcctagataatcacattcagtgatcatgttcagatgacgttgcacttggcggaactagtc

SEQ ID NO: 19572 - DNA, 600 bp, Chicken  19866894229360_1
gttttgttcgttatgtagagtaaaaatgtttctaatctccagaaaacgaggctgtcaagagtcagttctttcatacactgacatctcaagccatgttcccctcagtgtttgacgactcaaattctttaagaaagtttttacttcttggcctcaaagatgcttatttctgtaattttaactattttgttaaatctacgaatttcaaaatgtacctgcatagaaaagtctctactaagtagactcactctaagaggctgtacaacctgcagactctctgcagtcttttactacttcatctcrtatttcctgaaaygttgctagcatatagcctgtaatctgtgtgttgcttacttttaggaatttgaggttctttctcattctaatgtgattacattcttaaaatatttcacttttccaagagttaaatgagccttctattcaatttcagccatggagagccrtgtttaatattaattaaatacataaaataaggcgatcagaaatatcaaggccttcctagtatatttatttaaattctcagtagaagtttaaatccattatgtggtttagagccatawgtactcctttctatacagagag

SEQ ID NO: 19573 - DNA, 600 bp, Chicken  19866894229360_2
tgtagagtaaaaatgtttctaatctccagaaaacgaggctgtcaagagtcagttctttcatacactgacatctcaagccatgttcccctcagtgtttgacgactcaaattctttaagaaagtttttacttcttggcctcaaagatgcttatttctgtaattttaactattttgttaaatctacgaatttcaaaatgtacctgcatagaaaagtctctactaagtagactcactctaagaggctgtacaacctgcagactctctgcagtcttttactacttcatctcrtatttcctgaaaygttgctagcatatagcctgtaatctgtgtgttgcttacttttaggaatttgaggttctttctcattctaatgtgattacattcttaaaatatttcacttttccaagagttaaatgagccttctattcaatttcagccatggagagccrtgtttaatattaattaaatacataaaataaggcgatcagaaatatcaaggccttcctagtatatttatttaaattctcagtagaagtttaaatccattatgtggtttagagccatawgtactcctttctatacagagagctgtgtcttttga

SEQ ID NO: 19574 - DNA, 600 bp, Chicken  19866894229360_3
tatttctgtaattttaactattttgttaaatctacgaatttcaaaatgtacctgcatagaaaagtctctactaagtagactcactctaagaggctgtacaacctgcagactctctgcagtcttttactacttcatctcrtatttcctgaaaygttgctagcatatagcctgtaatctgtgtgttgcttacttttaggaatttgaggttctttctcattctaatgtgattacattcttaaaatatttcacttttccaagagttaaatgagccttctattcaatttcagccatggagagccrtgtttaatattaattaaatacataaaataaggcgatcagaaatatcaaggccttcctagtatatttatttaaattctcagtagaagtttaaatccattatgtggtttagagccatawgtactcctttctatacagagagctgtgtcttttgaatccttaagctaatttgtcttgtgcagaaaatagagcagatataacatgccatatgatttcagagactgtccttgcactttacaagttttatttaggcatattatagcatagcttcatataagaccagattcattcttccggaacttc

SEQ ID NO: 19575 - DNA, 600 bp, Chicken  19866894229360_4
agtcttttactacttcatctcrtatttcctgaaaygttgctagcatatagcctgtaatctgtgtgttgcttacttttaggaatttgaggttctttctcattctaatgtgattacattcttaaaatatttcacttttccaagagttaaatgagccttctattcaatttcagccatggagagccrtgtttaatattaattaaatacataaaataaggcgatcagaaatatcaaggccttcctagtatatttatttaaattctcagtagaagtttaaatccattatgtggtttagagccatawgtactcctttctatacagagagctgtgtcttttgaatccttaagctaatttgtcttgtgcagaaaatagagcagatataacatgccatatgatttcagagactgtccttgcactttacaagttttatttaggcatattatagcatagcttcatataagaccagattcattcttccggaacttcagcagattttacagtttttctcaagtgttttacatctcaaatacataaaaagcaggcactggggagccagtataagcctttataaaatgttagctcatttggagattataatattct

SEQ ID NO: 19576 - DNA, 432 bp, Chicken  19866894229362_1
ggttggggctgaccgcagttcgggtccagggtggcctcagccagccccagccctttggataacctccccttccagccccaccctgcccaggggagagagcctccccctcccctcccgagctccccgaatgagtctggccttcctcccactcccaagacctcggtcttccccccaccccagcagctcatcacacagctggccacaacggcaccttccgtgctgtttccccagcagtgatgcggctctgctgctgccactgcttccccagccctggggctgcatctcccattacagcagtgytggtgctcagctctctctgcacttgctttatatgaattttcctctgtgccaactggcatgagcaagctaaaatgctcacaaatacagtggggagcagcaagggggggagcatggaggagggcacagcacccg

SEQ ID NO: 19577 - DNA, 600 bp, Chicken  19866894229364_1
cttgagagtgaaagccaaaactcagacataggccattttacatatcagctaattgccaaaatcaagctgggaattcactgggaaaataaataggggacagtgtctgagaagacattcacaactggtcacttttcagtctaacttcctgacagagacacgtgaaagtgtgtcagcaaaggagccagatttccagaactcttctgtataagcagtttgtattgagggatcagagtaatgaacaggatacagacactaagtgctgaatctgtttcgaaatctcatctggtcttttggagagayaaatgtggccccctgccctgctggcacgttcaccatgtggcatggtgcttccaaactggttaagccaagcggaaggcacaactgtctataaccatcccaaaatcagacactgtagctataagcccagagctaactatttgcaagacttggagtttttttcttacccagaagattaaacagagtcttttctatgtagatctcagtggtgatctttttactatttcctatgcaagtaaattattttattcaatttttctgtgtttctgtctgtggaaagatcaagcatagtgaaaatatcat

SEQ ID NO: 19578 - DNA, 599 bp, Chicken  19866894229370_1
  misc_feature (1)..(73): n is any nucleotide
nnnnnnnnnnnnnnnnnnnnnnnnnnnnnnnnnnnnnnnnnnnnnnnnnnnnnnnnnnnnnnnnnnnnnnnnntaaagtaaaaataatgcaaattgcatttccttttgatccatggcaaggaacaaaacttttttcttttttcttttttttttttcgcctttaataagcttagtaaatgaagtgtacccataccagctaaattacctaaccgacgatctcctggcacagagaagaatttttgtctaataaaaataaaactgcccagtgtgggacattttgcattagactcagaggagtgmagggagtagagtttcctgccccagttttgatgctctctacaggaattgccctctggccccttggcaggaactccatgatccagctgagttttctactgaatagctcagcagggtgcaggagccagttgcatggcttcacatggtgcagaaagctgtagagcttttctcctgaacagcaccttggccattttgcaacatctgcaatagctacaattcgtggtatggagggagggggaaggaattctccagctgttacgtctttgctgaatcttttttattcctgtctactgccttcatga

SEQ ID NO: 19579 - DNA, 574 bp, Chicken  19866894229370_2
agcttttctcctgaacagcaccttggccattttgcaacatctgcaatagctacaattcgtggtatggagggagggggaaggaattctccagctgttacgtctttgctgaatcttttttattcctgtctactgccttcatgatgatttggaaggacaccaaatggtttccattattcagaatggaataacatctgctcaacaaatattgttactcctagggaagcacctcattcaagcagcagctctcgttacaacattactacacaacacagtttattttatatagcattcagaagacayagtctcacacatacattaaagaaagggggagagaaagagaagtagttgcaaacaaaaagaaaatgaaaatggtgtttaaaggaaagatcatgttctgtaattgaagggggtgagtagactatgtcccacacatgtagggtagctcaagagaaaaaatgacctctcttcagtgcaatagctagcataccaaggaggaaaactgaggggggccatgttgggaaagagtatggaagcagatggacgtgagtttggtagcatggactaagtccaaaga

SEQ ID NO: 19580 - DNA, 600 bp, Chicken  19866894229372_1
tctgtgtacaacatgtatcaccagaggagttctgcttagcagtacaggctgtctgcacaacacaagcttcctcttctcagaggccactgccaaactctgggtgctatgaacagattttcagagaaaagctgaagtgtttgtaaatttaaggaaacaccaaggagaatggactcctagtggttccaatgtaataaatcagataactagaggcaaggaatacagtaacaggaagcacgttgtaacattagaagatactatattttttactacagtaaagctagtcgttatgccttatgcttmtttattatgtttgaatctgtgtacagaataggttttcaatttkctgtctatttgcacgattcccagtttatcttactattttacagtgatgcctgataattccaacttcccttaccgacggtatgaccgactccctccaatccaacagttttctatagaaagtgacacygatctttctgaaactgctgagctaattgaggaatatgatgtgtttgatcctgcaagacctcgaccaaaaattatccttgtcataggtatgaacacagactcattttgacattttgtcttccttgctttgac

SEQ ID NO: 19581 - DNA, 600 bp, Chicken  19866894229372_2
acaggctgtctgcacaacacaagcttcctcttctcagaggccactgccaaactctgggtgctatgaacagattttcagagaaaagctgaagtgtttgtaaatttaaggaaacaccaaggagaatggactcctagtggttccaatgtaataaatcagataactagaggcaaggaatacagtaacaggaagcacgttgtaacattagaagatactatattttttactacagtaaagctagtcgttatgccttatgcttmtttattatgtttgaatctgtgtacagaataggttttcaatttkctgtctatttgcacgattcccagtttatcttactattttacagtgatgcctgataattccaacttcccttaccgacggtatgaccgactccctccaatccaacagttttctatagaaagtgacacygatctttctgaaactgctgagctaattgaggaatatgatgtgtttgatcctgcaagacctcgaccaaaaattatccttgtcataggtatgaacacagactcattttgacattttgtcttccttgctttgactttttatttgttctacaaacacagcaggtgcctgtgtgcattt

SEQ ID NO: 19582 - DNA, 600 bp, Chicken  19866894229372_3
actcctagtggttccaatgtaataaatcagataactagaggcaaggaatacagtaacaggaagcacgttgtaacattagaagatactatattttttactacagtaaagctagtcgttatgccttatgcttmtttattatgtttgaatctgtgtacagaataggttttcaatttkctgtctatttgcacgattcccagtttatcttactattttacagtgatgcctgataattccaacttcccttaccgacggtatgaccgactccctccaatccaacagttttctatagaaagtgacacygatctttctgaaactgctgagctaattgaggaatatgatgtgtttgatcctgcaagacctcgaccaaaaattatccttgtcataggtatgaacacagactcattttgacattttgtcttccttgctttgactttttatttgttctacaaacacagcaggtgcctgtgtgcatttaaatgcaggtattctgtctgccccagcaagtggtgcagcctgattagagtgaatcagaaagagaaactgttagtgctgaggacataacatccaactgctagcattgtaatggagttacccttgagt

SEQ ID NO: 19583 - DNA, 600 bp, Chicken  19866894229375_1
aggtggtagaatcaccatgcctggaggtgttcaagaaccttggagatatggcactaagaacatggtcagtgggcatggtgaggatggattgggattggccttgactgattttagtgatgttttcctactttaatgataccatgattctatgacactattttttctgtctcttacgaaagatcaagagaaatcttcatattgctgttaacagaaagaggaaaattaagctttcatctggataactatgctctaggagcactccctcaaagagatcccttcggtgaaagtcacatctagaargaaattacattctgtttccatttactgtaatattctagacaaagctcaaaatgtaaggaaggaagacaaagccatgtctagtgctttaatggtgtctgaaatctcgtgaattttggctatagtagagtgaattgttttattaactatgggcaatccaacatacgcttaataaggaaacaatggaacagcttcctctgtttccctgatgaaactgtggtttaggttaactctagggtcttcatctcacagcagagcattcctgatcttgtgaacttaacctctcacagcattattttactc

SEQ ID NO: 19584 - DNA, 533 bp, Chicken  19866894229395_1
caggtgttttctttatttagagtataatcctgtaatataatgttagaatttaataagttcaagatgtttatttgattcctttaagtcggttcacaaaataggaacacggttgtgttcagtgaggagacctggctcttcagagtggctttgttcaagagagtcagtcagtggctatttctgttacccctacactgaatgaattgttcagcagctgctaatggtcactgttctatgaaatccaacccccagtaggggggtactatctgttacaaggacttttaagcaagcatctcttttttwaaattaaacagttaaacctgagcttggtaggtttgtatttctacttcagagtcagacttaaaaagatgtttttctttcttgccgttcagccgccctgtgctgtcacactgtgctcacacgccataggtttgtgatggccccgaagggtgggagcagcttttggcctcagccttctcatacccgggggggggaactgctagttgaaggagcagaacgcgttattttataaggaa

SEQ ID NO: 19585 - DNA, 600 bp, Chicken  19866894229396_1
tgtgtgccaggctgcagcgcgacaaatggatcagcgtggaacttagagaagaaagcttgagaacccgtgtgtgggagacgaaggcttttaggggatgccactgccaacctttggccatcatgaagacatgcaggcaattgcagaatttgccggcaatcttaggcacacatggacagaccaggacacactaaggacatatttttcactccaacaatcactgtccaccatgatgatctggttacctgactgtacagtcctgcccaccatcccaaggatcctacagctgtggtaaagtgtatragtgtccatatgcacattgagcagggaaggtgagcactgcttttgtcttgtgtggtaactaacaaggtgcaggattgtgggatctcttggccagaagcaagtttctcttcaagtatttgcactttgtgggttttcttaggttatataccctccagagtttgtcataactcagaacctctcaagatttggagctatagatgcaaactctattctgatgtgtaatggcatggaatcataaaatagaatcatagaatgattaaggagaagatcatctagtccaaccgtcaaccccttgctatg

SEQ ID NO: 19586 - DNA, 599 bp, Chicken  19866894229399_1
  misc_feature (1)..(193): n is any nucleotide
nnnnnnnnnnnnnnnnnnnnnnnnnnnnnnnnnnnnnnnnnnnnnnnnnnnnnnnnnnnnnnnnnnnnnnnnnnnnnnnnnnnnnnnnnnnnnnnnnnnnnnnnnnnnnnnnnnnnnnnnnnnnnnnnnnnnnnnnnnnnnnnnnnnnnnnnnnnnnnnnnnnnnnnnnnnnnnnnnnnnnnnnnnnnnnnnntgaaaaaaaaacccaaaccaatatcttatgcaaaccagctgtccctcaattggccttggcacttccacattgttttacattttttaagggaggtataaggttaattwaaaaattcctgtaatggcccttagaagtgcactcagcccagctgaatcctttcccccagctgtacaagcacctgtggcaggataggtggggctaggggcaggactctgtggctaggtgaggaggacatcacaaaatggatggagccctgcatagggaatggggtttgctgtgctggcactcatgggtggaatccctactggaactgctgggggcctcagtcagccctgggaccgcagagatgttgagtgtggttgaagctgaatgagcattctcatgctgcatttattttttcttgggg

SEQ ID NO: 19587 - DNA, 600 bp, Chicken  19866894229412_1
aacctcctcaagctctttctgcatgatgctcagcagccaccaactctggggaatgtcttcaaaaggttttcagtgagcagcttaactaatgcctgctgtagaaatacacaaagcaaaaatgaatcttcagagagaaaggccagtggctggagagttgggtggatgatgctaggtatagcagagaggaagctgcagagagcaggcttgtgcactgagtcctgccaagggaggtcactatggacaaggctcagcagaaagggcagccagactcagccagcccaaatcccactgctgtccacrttttccagtgtttctgggggcccatgaataccttattgaaagggactaagcaatggccaaaggagaaactggaaaagagcccagaaacagcaagtcttaagagcagaccataaaaaccaaggcgcatcatggcagtctttgttcacattgccatccctggggacaatggcatgtgacagacaaaaaactaagcatcaaaatccctgccaaaccagaaagatggagctgaactgaaaaaatatcctgggcaagactgcccaggcaatattttacctgtcctatgcagggatgatattagct

SEQ ID NO: 19588 - DNA, 600 bp, Chicken  19866894229417_1
attcgtaccttctgtgttgtctgtgcacattgctgctgctacacaaccataattcataaataggttctacaagctacaagttagaaaacaagtaattcagttttctgaaacactcctttctgcatatgcatgttcctgaatcactgatttttagaactttgtaaaatgaaggtgaattttggagcactttttggttatatttcttctccttttactgtggtcttatagaagatgagataccacacacaaaacaagtgactgatgttagttaatagagctagttatgctctcagctctgcrtgatgccacagtgctatagttaccattttcctgaaccttaaaggcagatcaaagtggattgtggcagctgcgtagagttaacacaagcttcttggggaaaagcatgccttcttcagaacaaacatgtaatcaaaacattaagtgacttcactcagtcaggacacacaagtcatcactttgaggctcactgaaaggtttaatctgtgttaaaactccccgttctcttataaaaatctgtagatgctggccaygcattaagactgctggtcagctggtaattttctgccaactcctacaaag

SEQ ID NO: 19589 - DNA, 600 bp, Chicken  19866894229417_2
caagtgactgatgttagttaatagagctagttatgctctcagctctgcrtgatgccacagtgctatagttaccattttcctgaaccttaaaggcagatcaaagtggattgtggcagctgcgtagagttaacacaagcttcttggggaaaagcatgccttcttcagaacaaacatgtaatcaaaacattaagtgacttcactcagtcaggacacacaagtcatcactttgaggctcactgaaaggtttaatctgtgttaaaactccccgttctcttataaaaatctgtagatgctggccaygcattaagactgctggtcagctggtaattttctgccaactcctacaaaggttcaaaagcactgagacaggtggtaaaggaaacgacatcgatgtaaggttcctcagccatgttttcataattcatayaaagcccgtaagacaaatgctcttskttctgaaaaacacttaatgggatttctttaacagtattaagttgctaacagacttggaatgccattggctcctggaggacaaatggaagacgtggtcatttcaaatcaaaagaaagcatttaagtggaattactacagatccatttt

SEQ ID NO: 19590 - DNA, 545 bp, Chicken  19866894229417_3
taacacaagcttcttggggaaaagcatgccttcttcagaacaaacatgtaatcaaaacattaagtgacttcactcagtcaggacacacaagtcatcactttgaggctcactgaaaggtttaatctgtgttaaaactccccgttctcttataaaaatctgtagatgctggccaygcattaagactgctggtcagctggtaattttctgccaactcctacaaaggttcaaaagcactgagacaggtggtaaaggaaacgacatcgatgtaaggttcctcagccatgttttcataattcatayaaagcccgtaagacaaatgctcttskttctgaaaaacacttaatgggatttctttaacagtattaagttgctaacagacttggaatgccattggctcctggaggacaaatggaagacgtggtcatttcaaatcaaaagaaagcatttaagtggaattactacagatccatttttgttgccagatcagattataccgtgttgtaggaggatactgagaatgaagttcatgatcgaagaatacagaa

SEQ ID NO: 19591 - DNA, 520 bp, Chicken  19866894229417_4
atgccttcttcagaacaaacatgtaatcaaaacattaagtgacttcactcagtcaggacacacaagtcatcactttgaggctcactgaaaggtttaatctgtgttaaaactccccgttctcttataaaaatctgtagatgctggccaygcattaagactgctggtcagctggtaattttctgccaactcctacaaaggttcaaaagcactgagacaggtggtaaaggaaacgacatcgatgtaaggttcctcagccatgttttcataattcatayaaagcccgtaagacaaatgctcttskttctgaaaaacacttaatgggatttctttaacagtattaagttgctaacagacttggaatgccattggctcctggaggacaaatggaagacgtggtcatttcaaatcaaaagaaagcatttaagtggaattactacagatccatttttgttgccagatcagattataccgtgttgtaggaggatactgagaatgaagttcatgatcgaagaatacagaa

SEQ ID NO: 19592 - DNA, 519 bp, Chicken  19866894229417_5
tgccttcttcagaacaaacatgtaatcaaaacattaagtgacttcactcagtcaggacacacaagtcatcactttgaggctcactgaaaggtttaatctgtgttaaaactccccgttctcttataaaaatctgtagatgctggccaygcattaagactgctggtcagctggtaattttctgccaactcctacaaaggttcaaaagcactgagacaggtggtaaaggaaacgacatcgatgtaaggttcctcagccatgttttcataattcatayaaagcccgtaagacaaatgctcttskttctgaaaaacacttaatgggatttctttaacagtattaagttgctaacagacttggaatgccattggctcctggaggacaaatggaagacgtggtcatttcaaatcaaaagaaagcatttaagtggaattactacagatccatttttgttgccagatcagattataccgtgttgtaggaggatactgagaatgaagttcatgatcgaagaatacagaa

SEQ ID NO: 19593 - DNA, 599 bp, Chicken  19866894229423_1
  misc_feature (1)..(42): n is any nucleotide
nnnnnnnnnnnnnnnnnnnnnnnnnnnnnnnnnnnnnnnnnntgtacctttgagaaagcttcagtctgcacacagtaagccgctatggcaagaaatcattttaattccctaaaactctaggatggctataagtttaagcagcctttatctttatagatgtcatcaagttcaaagacactgtgaattcaacttcaggtaaacttttgttgtcaagacagcctccaaatatcagcattatcaactctctgacatgaatcaaatgtcctattgtctctccctggattgtactttaaagactcrccttctcttaaacagagatacatattttaacacggtataatttcctcaagtgacagattcattatccaaacacaaactgagtagcacaactcagccctctgaggttaaaattatttgctagctgccgagatgatttgcgcagttcactgacagttatccyctgttctctaactattcaacacttcagaatcgggacagtttgtaagagctaaactaactgaagcccacacaaaagtatcaggaagtgcttttgggcagctttgcaccacagttacccacctccacactaccactgatct

SEQ ID NO: 19594 - DNA, 600 bp, Chicken  19866894229423_2
catcaagttcaaagacactgtgaattcaacttcaggtaaacttttgttgtcaagacagcctccaaatatcagcattatcaactctctgacatgaatcaaatgtcctattgtctctccctggattgtactttaaagactcrccttctcttaaacagagatacatattttaacacggtataatttcctcaagtgacagattcattatccaaacacaaactgagtagcacaactcagccctctgaggttaaaattatttgctagctgccgagatgatttgcgcagttcactgacagttatccyctgttctctaactattcaacacttcagaatcgggacagtttgtaagagctaaactaactgaagcccacacaaaagtatcaggaagtgcttttgggcagctttgcaccacagttacccacctccacactaccactgatctgcttttgaaccctttcattgggcaacagtctcatgaaagccttcaactgtgactgtttgtctgcggtgcttaaatgggcacctgaactgtgtctcactgggtacctttcctctggccagcactgcaccctggacatcagctaagtgcaagtgtttaagaat

SEQ ID NO: 19595 - DNA, 599 bp, Chicken  19866894229424_1
  misc_feature (1)..(141): n is any nucleotide
nnnnnnnnnnnnnnnnnnnnnnnnnnnnnnnnnnnnnnnnnnnnnnnnnnnnnnnnnnnnnnnnnnnnnnnnnnnnnnnnnnnnnnnnnnnnnnnnnnnnnnnnnnnnnnnnnnnnnnnnnnnnnnnnnnnnnnnnnnnnngtctgagaccaaggcatcccctggttgcctggattttgaatcgctgtgttcaaagctccctcttcccacagttttctcatatggtgttatgaacctagaagaataatgcttttcaaaaggaaaaatggggtgagaaaaatgcaaggagaagataggaaratggggaagaaaatcaggaaatcattgctatgtgagagaatattgccattacagtgtgtatctcttaattactctgatatgcattttcactctagtatatttgtaaaatgataattacaaaatagtaaaccccattaagagttctttacacttcagacaccattatgtgaggaatcagtctgctagttcagtgtcagactctcagygcctttcactgctgcagagaccacacttgcccaccactgaaagcagctaaatggctgcacaaatgtttgaactgaggatattaccctgtatct

SEQ ID NO: 19596 - DNA, 600 bp, Chicken  19866894229424_2
ccacagttttctcatatggtgttatgaacctagaagaataatgcttttcaaaaggaaaaatggggtgagaaaaatgcaaggagaagataggaaratggggaagaaaatcaggaaatcattgctatgtgagagaatattgccattacagtgtgtatctcttaattactctgatatgcattttcactctagtatatttgtaaaatgataattacaaaatagtaaaccccattaagagttctttacacttcagacaccattatgtgaggaatcagtctgctagttcagtgtcagactctcagygcctttcactgctgcagagaccacacttgcccaccactgaaagcagctaaatggctgcacaaatgtttgaactgaggatattaccctgtatctaagcatggagccaacagttgctctgccacatggggtatagtaagtttgatgatatgaaattcaatagttaccaaaataaaaataaaagaaaagctgctatccattactgtaatatattgtgaatcctcgtgtatctgaaaaaatacagaaccaaagcttctctaaatctgactccagttcagtggaaccatccataaggtagaggta

SEQ ID NO: 19597 - DNA, 600 bp, Chicken  19866894229428_1
agctttccaatgaactagaaacttgtgtcaggttccagctttgctggtacaccccgggagcgaagcctatgatttattaataacacagctgtggttcctgcactgtcattaagggctggtaaacactcttccttctgcagagggaaaagatagtgtacttttcacctctgcaattatgtaatgcgtcctaggctatttgtatatttaactaggatgttgctttttccttttgtttgtagggtgatcagctaagaaagtgtgaaatccacaaaagaagagaagctttgtgtgttatttgtrtcttgatagtgcctagcaaaccccagctggatgtggagccagctatgaggttcacatgcacttgggaagctgtggaaactgctgacatgcggtgacaaagctggggaaaatgttggtcagtgtaaggagtaatagaacaactcaccatcaggagatctcttttaagaaagggagaaaggaagatccagggagctacagggctgttgagcctcatatctgatatgaggctcaacaacagatcctcgtagaagctacgttaaggcatatgtaagagagatgagaaggtcatcagagatagcc

SEQ ID NO: 19598 - DNA, 599 bp, Chicken  19866894229429_1
  misc_feature (1)..(242): n is any nucleotide
nnnnnnnnnnnnnnnnnnnnnnnnnnnnnnnnnnnnnnnnnnnnnnnnnnnnnnnnnnnnnnnnnnnnnnnnnnnnnnnnnnnnnnnnnnnnnnnnnnnnnnnnnnnnnnnnnnnnnnnnnnnnnnnnnnnnnnnnnnnnnnnnnnnnnnnnnnnnnnnnnnnnnnnnnnnnnnnnnnnnnnnnnnnnnnnnnnnnnnnnnnnnnnnnnnnnnnnnnnnnnnnnnnnnnnnnnnnnnnnnnnaaaaaaaaaaaaaaaaaaaaaaacccagaaataatagtgctttgaaaattatcaattrgatgtttttgcatacggattaatgtccattaggttaacttgttagagttgtttattagcctttgtgtctaccaaacagggcagacttactattgggaatatgtcatttttatttcaatcactgggcctaacatgtaaagacaatatgactacaaaattctggtaagcgtgaaaataaaactaactactgtcttacttgagtatgatgatcacagtcatagaatcatatgtagaatatagcagaagatataaaatacaaaatcaaaatgtacttttgtaaatctcataactccaatgtga

SEQ ID NO: 19599 - DNA, 599 bp, Chicken  19866894229432_1
  misc_feature (1)..(54): n is any nucleotide
nnnnnnnnnnnnnnnnnnnnnnnnnnnnnnnnnnnnnnnnnnnnnnnnnnnnnntcaaaataggtcatcttcatgtcagagcggaagactgaacatggagagattctcccaaaaacgaagaaaattcataagatgtttggcagacaatgatcaggagtaatttagagcccttttacataaatacaaccagagagaggagaggttcccactcagtggaacactgaccactctgcatgagagcaccatttgacttgctttgagccacagacaagtgctcacctgcaggcaactcctggcttkcagcacagcacaggaaactcttctaaatcctcaagctaaacatgggaacttctgacctcagtgttctatatttttccartgttttcctatatttccacttattccacctggcttcttatatttggtgtattaacgcawtttaccttttcctcctttaacattgcaattttttttcctggttttgctacccagctagagacaagtgtgtgtttaatagtgactgattacttcagatgaggaatttgagtggaaatgtttacaacaacttcacatttcatcttcccagaaccttggtgaca

SEQ ID NO: 19600 - DNA, 600 bp, Chicken  19866894229432_2
agcggaagactgaacatggagagattctcccaaaaacgaagaaaattcataagatgtttggcagacaatgatcaggagtaatttagagcccttttacataaatacaaccagagagaggagaggttcccactcagtggaacactgaccactctgcatgagagcaccatttgacttgctttgagccacagacaagtgctcacctgcaggcaactcctggcttkcagcacagcacaggaaactcttctaaatcctcaagctaaacatgggaacttctgacctcagtgttctatatttttccartgttttcctatatttccacttattccacctggcttcttatatttggtgtattaacgcawtttaccttttcctcctttaacattgcaattttttttcctggttttgctacccagctagagacaagtgtgtgtttaatagtgactgattacttcagatgaggaatttgagtggaaatgtttacaacaacttcacatttcatcttcccagaaccttggtgacatctagtctggaatacacaattggcatcacatctctgtacgtgtattcctgggcttgattatttgagctctcagaggaaat

SEQ ID NO: 19601 - DNA, 600 bp, Chicken  19866894229432_3
ggcagacaatgatcaggagtaatttagagcccttttacataaatacaaccagagagaggagaggttcccactcagtggaacactgaccactctgcatgagagcaccatttgacttgctttgagccacagacaagtgctcacctgcaggcaactcctggcttkcagcacagcacaggaaactcttctaaatcctcaagctaaacatgggaacttctgacctcagtgttctatatttttccartgttttcctatatttccacttattccacctggcttcttatatttggtgtattaacgcawtttaccttttcctcctttaacattgcaattttttttcctggttttgctacccagctagagacaagtgtgtgtttaatagtgactgattacttcagatgaggaatttgagtggaaatgtttacaacaacttcacatttcatcttcccagaaccttggtgacatctagtctggaatacacaattggcatcacatctctgtacgtgtattcctgggcttgattatttgagctctcagaggaaatgaatgccaagagctatatacctttgctaactagctttattgtgctgtgttttgcataat

SEQ ID NO: 19602 - DNA, 600 bp, Chicken  19866894229436_1
cttatttgcctttcctttcaagtccggaagggtctttgttaagatcacttatagtaaggaagtgagttttcactcactttgtatgtgtatttttataagctaatcctgtaaataaacctacagtactttgtggagagcagtagtggacagagtgcctttgctatgttaaatgaaaatctgtaggaaagccacatatacactggcaagcagtcagacaacaaaaacaagctggtaccagcatcctgacttcactccaagcagctaccaccagtaggcaaggaaaaggcaaaatatttaccragtgtctgtataaatgtgcacagcatggaacaaccttgtttctaagaactcaattaaatggaagtcaaatcaatagtgaagccatatgctagactctgcaatcagcactgtctacagcagtgaagaagggtgggcattagcccacrtgtcagatgctgtcctcagtaagtgagaaaacagggaggtgtttgtttgtttttaagacacaatgttatctgtcccttcctcttcgtttcttcagcctggaccagttcactttctaatttaaaggaagggagctttgctcagtagatcacaagg

SEQ ID NO: 19603 - DNA, 600 bp, Chicken  19866894229436_2
acagagtgcctttgctatgttaaatgaaaatctgtaggaaagccacatatacactggcaagcagtcagacaacaaaaacaagctggtaccagcatcctgacttcactccaagcagctaccaccagtaggcaaggaaaaggcaaaatatttaccragtgtctgtataaatgtgcacagcatggaacaaccttgtttctaagaactcaattaaatggaagtcaaatcaatagtgaagccatatgctagactctgcaatcagcactgtctacagcagtgaagaagggtgggcattagcccacrtgtcagatgctgtcctcagtaagtgagaaaacagggaggtgtttgtttgtttttaagacacaatgttatctgtcccttcctcttcgtttcttcagcctggaccagttcactttctaatttaaaggaagggagctttgctcagtagatcacaaggctcttgtagagctccctttgtactgtcaaaggatttggtraagactggctgctcctgcagcctcagctgaggcaacctcagcatcacttataatcttatgaaagctgaagggccagaattgtccctgtatagcccatgccttcgcc

SEQ ID NO: 19604 - DNA, 570 bp, Chicken  19866894229436_3
tctaagaactcaattaaatggaagtcaaatcaatagtgaagccatatgctagactctgcaatcagcactgtctacagcagtgaagaagggtgggcattagcccacrtgtcagatgctgtcctcagtaagtgagaaaacagggaggtgtttgtttgtttttaagacacaatgttatctgtcccttcctcttcgtttcttcagcctggaccagttcactttctaatttaaaggaagggagctttgctcagtagatcacaaggctcttgtagagctccctttgtactgtcaaaggatttggtraagactggctgctcctgcagcctcagctgaggcaacctcagcatcacttataatcttatgaaagctgaagggccagaattgtccctgtatagcccatgccttcgccctggggtctaataatgatatttgaaagctctgctgtgctgtcagcacttaagccttgacaaactcttaccaggactcttctgtgaagactgcatgaaaaagaaatctccatgacatgatatctccagatttcttcactatatcatgccagtcccagatttacca

SEQ ID NO: 19605 - DNA, 599 bp, Chicken  19866894229437_1
  misc_feature (1)..(172): n is any nucleotide
nnnnnnnnnnnnnnnnnnnnnnnnnnnnnnnnnnnnnnnnnnnnnnnnnnnnnnnnnnnnnnnnnnnnnnnnnnnnnnnnnnnnnnnnnnnnnnnnnnnnnnnnnnnnnnnnnnnnnnnnnnnnnnnnnnnnnnnnnnnnnnnnnnnnnnnnnnnnnnnnnnnnnnnnnnnnctacaggtcatctgtttttgtgactagtacaggatgcttattacatcatcatatttctttcacattttctggtgtttctgttctaagtctctgagtttgttgagatcctcccaggcaacaacaatacyacattgctgtgtcctgctagaaaggcagtgctaggccttggtagtagaaagttgaatttatgagcaataaagaaaatatataaagagcaaccatggcaggaaattactgacagtgtgacagaggaaaactgacagttactgggcagtagcagstcagaaagatagygagtgttgtgctccgtactctgtacttttgggactctcttgatctgaaagcatgagcaagataatgggtagaactggagcagtaccttttcttatggaagctgtgacagctggataaagtaaacaagctctgc

SEQ ID NO: 19606 - DNA, 600 bp, Chicken  19866894229437_10
gtgcttctttgggtagaagttcccttttgtttactccagtggacatgctgaatattatccttcagcaaatgtgacagtaactgaagatctagtgctctgttgcagttttgatgatgatmggggttttgggtggttggtctttaggttttctgtataaggtatatatccrtattctatacacatttttgtattacatacaccaaaataatatttttaatataagccttagtgtctatataagctgcatttttcttccaaaaatatctcagtaggctagcaatacttaatgtcattatgatrgaaatctatgagactatccaaattttaccttctgtatcctagacactgttacctagaaactcttatttaaggtggttcattataagtcttacctacagatgggccacagccttcctctgggaaatgctactgaatgacaataaatttaaagctagcaaggatataacagatgagcctgtatgttcagagctagcactgatcttgcttttgtaagtattcagagcttgcctaaaatgccatcagagatggactgtactggctaacagtatccatagggatattattggatatacatataaa

SEQ ID NO: 19607 - DNA, 599 bp, Chicken  19866894229437_2
  misc_feature (1)..(19): n is any nucleotide
nnnnnnnnnnnnnnnnnnnctacaggtcatctgtttttgtgactagtacaggatgcttattacatcatcatatttctttcacattttctggtgtttctgttctaagtctctgagtttgttgagatcctcccaggcaacaacaatacyacattgctgtgtcctgctagaaaggcagtgctaggccttggtagtagaaagttgaatttatgagcaataaagaaaatatataaagagcaaccatggcaggaaattactgacagtgtgacagaggaaaactgacagttactgggcagtagcagstcagaaagatagygagtgttgtgctccgtactctgtacttttgggactctcttgatctgaaagcatgagcaagataatgggtagaactggagcagtaccttttcttatggaagctgtgacagctggataaagtaaacaagctctgctttgagtctgaagtagaagcagaagacctcaaaactaaatacaagttcagtgtagctacttcatgttaagagaggtaaagaatgacaagaaagagactgcattctacaacgtctctggctcagcactgctcctgtctggccactgggatctct

SEQ ID NO: 19608 - DNA, 599 bp, Chicken  19866894229437_3
  misc_feature (1)..(6): n is any nucleotide
nnnnnnctacaggtcatctgtttttgtgactagtacaggatgcttattacatcatcatatttctttcacattttctggtgtttctgttctaagtctctgagtttgttgagatcctcccaggcaacaacaatacyacattgctgtgtcctgctagaaaggcagtgctaggccttggtagtagaaagttgaatttatgagcaataaagaaaatatataaagagcaaccatggcaggaaattactgacagtgtgacagaggaaaactgacagttactgggcagtagcagstcagaaagatagygagtgttgtgctccgtactctgtacttttgggactctcttgatctgaaagcatgagcaagataatgggtagaactggagcagtaccttttcttatggaagctgtgacagctggataaagtaaacaagctctgctttgagtctgaagtagaagcagaagacctcaaaactaaatacaagttcagtgtagctacttcatgttaagagaggtaaagaatgacaagaaagagactgcattctacaacgtctctggctcagcactgctcctgtctggccactgggatctctgcccaggctgagg

SEQ ID NO: 19609 - DNA, 600 bp, Chicken  19866894229437_4
tttttacactttctgatagcgataggacaaggggaaatggtttaaactaaagtagaagagatttatattagatgtcaggaagaaattctttactcagaggacagtgaggccctggcacaggctgcctagagagctgtgagtaccccattcctggaggtattaaaggccagttggatggagccctgggcagtctgagctggtgggtggcagacctgcccatggcagtgcagttggaactggatggtctttaagatgcctttcaatttaagtcattctatgattctacaatccttactatcycttcttgccttgraaaaaggtcctttctaggtacccttacaggagcagacaatctccttcaacatacacttacactttgaatttaacaagattagtgaggctgtgaggaaagattgttggtaccctgtgaaataaagaggatgttaatattgccaagacagctgataaagtccttaccttttaggtgaaagagggggargggtgatttataatctgtggaatatagtgctcaggagataagaaataaagtgacgtaaaaccagtatctttctctacagatggcatatattttctcagtca

SEQ ID NO: 19610 - DNA, 600 bp, Chicken  19866894229437_5
tgatagcgataggacaaggggaaatggtttaaactaaagtagaagagatttatattagatgtcaggaagaaattctttactcagaggacagtgaggccctggcacaggctgcctagagagctgtgagtaccccattcctggaggtattaaaggccagttggatggagccctgggcagtctgagctggtgggtggcagacctgcccatggcagtgcagttggaactggatggtctttaagatgcctttcaatttaagtcattctatgattctacaatccttactatcycttcttgccttgraaaaaggtcctttctaggtacccttacaggagcagacaatctccttcaacatacacttacactttgaatttaacaagattagtgaggctgtgaggaaagattgttggtaccctgtgaaataaagaggatgttaatattgccaagacagctgataaagtccttaccttttaggtgaaagagggggargggtgatttataatctgtggaatatagtgctcaggagataagaaataaagtgacgtaaaaccagtatctttctctacagatggcatatattttctcagtcattaaaaggatagg

SEQ ID NO: 19611 - DNA, 600 bp, Chicken  19866894229437_6
gtgggtggcagacctgcccatggcagtgcagttggaactggatggtctttaagatgcctttcaatttaagtcattctatgattctacaatccttactatcycttcttgccttgraaaaaggtcctttctaggtacccttacaggagcagacaatctccttcaacatacacttacactttgaatttaacaagattagtgaggctgtgaggaaagattgttggtaccctgtgaaataaagaggatgttaatattgccaagacagctgataaagtccttaccttttaggtgaaagagggggargggtgatttataatctgtggaatatagtgctcaggagataagaaataaagtgacgtaaaaccagtatctttctctacagatggcatatattttctcagtcattaaaaggataggtttaatttctcagtcttttcctggatcagcaatatctaggtacagagatcagaggtggaaagatggtttgataagtgagaattaggtaaatgctaggtccttagctgcacatattagagygtacacatgtgccaccatgtgcataatgattgcttagtttcatctgaatagatgtaaacattaggt

SEQ ID NO: 19612 - DNA, 600 bp, Chicken  19866894229437_7
aaagaggatgttaatattgccaagacagctgataaagtccttaccttttaggtgaaagagggggargggtgatttataatctgtggaatatagtgctcaggagataagaaataaagtgacgtaaaaccagtatctttctctacagatggcatatattttctcagtcattaaaaggataggtttaatttctcagtcttttcctggatcagcaatatctaggtacagagatcagaggtggaaagatggtttgataagtgagaattaggtaaatgctaggtccttagctgcacatattagagygtacacatgtgccaccatgtgcataatgattgcttagtttcatctgaatagatgtaaacattaggtgcactggatcactgtggaaagtgcaaataaggatgcagagtttttgtggattgtcttcctcatgaggacagtaaaggtttcttgtctcactaacatctagagtcatttagtaaatgttggccttgggatcctccatcgttctactgataaagtgactcaggtttgggatctatttggaggttgagatgaactgttcttagaaaatatatttcaaggaaggattgtcttatttta

SEQ ID NO: 19613 - DNA, 600 bp, Chicken  19866894229437_8
cttagaaaatatatttcaaggaaggattgtcttattttaggctataattacgtagtgattttccatggaaattccacatctgattagctgacagtaaggcattctttatttatctcatttctactctcgatcatttctgatgagcagtacttgtgccttttgaaaaacaagaggtagaagagtgcttctttgggtagaagttcccttttgtttactccagtggacatgctgaatattatccttcagcaaatgtgacagtaactgaagatctagtgctctgttgcagttttgatgatgatmggggttttgggtggttggtctttaggttttctgtataaggtatatatccrtattctatacacatttttgtattacatacaccaaaataatatttttaatataagccttagtgtctatataagctgcatttttcttccaaaaatatctcagtaggctagcaatacttaatgtcattatgatrgaaatctatgagactatccaaattttaccttctgtatcctagacactgttacctagaaactcttatttaaggtggttcattataagtcttacctacagatgggccacagccttcctctg

SEQ ID NO: 19614 - DNA, 600 bp, Chicken  19866894229437_9
cgtagtgattttccatggaaattccacatctgattagctgacagtaaggcattctttatttatctcatttctactctcgatcatttctgatgagcagtacttgtgccttttgaaaaacaagaggtagaagagtgcttctttgggtagaagttcccttttgtttactccagtggacatgctgaatattatccttcagcaaatgtgacagtaactgaagatctagtgctctgttgcagttttgatgatgatmggggttttgggtggttggtctttaggttttctgtataaggtatatatccrtattctatacacatttttgtattacatacaccaaaataatatttttaatataagccttagtgtctatataagctgcatttttcttccaaaaatatctcagtaggctagcaatacttaatgtcattatgatrgaaatctatgagactatccaaattttaccttctgtatcctagacactgttacctagaaactcttatttaaggtggttcattataagtcttacctacagatgggccacagccttcctctgggaaatgctactgaatgacaataaatttaaagctagcaaggatataacag

SEQ ID NO: 19615 - DNA, 549 bp, Chicken  19866894229438_1
aaattattaacccaagcaccaaacagtcagacactgcgtgctcctgtcttgaaggtgaagaacgatccctctccactcacaggtggctaatggcacagagggtcttacagactgaggccatgctgctctgctgggaatctgctggcctgcctgcagctctgccatgcgagagggctttctcagtgcaacctgcatcttctatggatgtggtgtctttacagtaagtcctctcccaggcttgctgtgcatgcactagagggccccccaggcacaggcaggcactgtgtcttccagcttcartgaatgtacatatgggaaggacatgattaatttacactgcttttaatctcagccatgactaaaatcgtgtgtatgctactgttctgtcactcgctcccaagcaggcaggatttcaccccatatctttagtggagaaacactgacagacagagctgctgacacacggaactgagtgtgagataccatttacagtggtttcctctcttcatctcgtaacctgacaggatttaatcctgccttagttaacaa

SEQ ID NO: 19616 - DNA, 600 bp, Chicken  19866894229443_1
cctttgatttaacagagctgtggggaatacagtaaataatcaatgaaacactctgaaaactgttttcaattttatactcagacatttttaggacctcttccccttaacaactttaattcacaaagaatgagggtttcatgtgagttgtatgaacgaaggaaaaaggaagcagaaagcaaggaaaatatgaaatttagaactctgaataaacttccacatttttttttttttttaaatctggaatctgtctgagaaaatattcactgctgaagtttctgttttagctacaagcataatagytttccaaatcctcctgcaacacmacgtgatcttctctgtgagctgttcttccactgcttctataatgctctttacttccaatagcctacacaggcatattgtccttgctttcatgtacatttttctggtgaaaagaacatctgttactgatgctacacagatggtaatctcgaaatgaaaaaaaaagagagcaattttagtaatgtctttgggcgatattaataactgctttcccctccagaatgctaaaatattaataccattattttaacataaagctgggcatttaaacatattgtt

SEQ ID NO: 19617 - DNA, 600 bp, Chicken  19866894229443_2
ggaatacagtaaataatcaatgaaacactctgaaaactgttttcaattttatactcagacatttttaggacctcttccccttaacaactttaattcacaaagaatgagggtttcatgtgagttgtatgaacgaaggaaaaaggaagcagaaagcaaggaaaatatgaaatttagaactctgaataaacttccacatttttttttttttttaaatctggaatctgtctgagaaaatattcactgctgaagtttctgttttagctacaagcataatagytttccaaatcctcctgcaacacmacgtgatcttctctgtgagctgttcttccactgcttctataatgctctttacttccaatagcctacacaggcatattgtccttgctttcatgtacatttttctggtgaaaagaacatctgttactgatgctacacagatggtaatctcgaaatgaaaaaaaaagagagcaattttagtaatgtctttgggcgatattaataactgctttcccctccagaatgctaaaatattaataccattattttaacataaagctgggcatttaaacatattgtttccactgacatatgctttctagt

SEQ ID NO: 19618 - DNA, 599 bp, Chicken  19866894229451_1
  misc_feature (1)..(176): n is any nucleotide
nnnnnnnnnnnnnnnnnnnnnnnnnnnnnnnnnnnnnnnnnnnnnnnnnnnnnnnnnnnnnnnnnnnnnnnnnnnnnnnnnnnnnnnnnnnnnnnnnnnnnnnnnnnnnnnnnnnnnnnnnnnnnnnnnnnnnnnnnnnnnnnnnnnnnnnnnnnnnnnnnnnnnnnnnnnnnnnnatgaacatgactgaaaaataataatgtgcttggcctgcagccttgtcatttattgatttacatgtcatttatctctatacaaaatgcaattattgcttaaatacaatacagtattttactaatrggatacaaatgtcaccactgaataaaaaggtcacacttgcatctaagtgattgtcaacccagactcaagcttgttgctgctgttatttgaagaggatgttaaggcactggagacctaggtttatttttgtagayatcagtgagcgctcaccttttgatttgtgccatcagtagttccaattttttggccttatatttgtgttttgtgcttgtgtagtcatatgaagtgtataaatgcrggtcacaagtagagggtttacaagatgtgatgcaggagtagcgatagtgtgagcattccat

SEQ ID NO: 19619 - DNA, 599 bp, Chicken  19866894229451_2
  misc_feature (1)..(42): n is any nucleotide
nnnnnnnnnnnnnnnnnnnnnnnnnnnnnnnnnnnnnnnnnnatgaacatgactgaaaaataataatgtgcttggcctgcagccttgtcatttattgatttacatgtcatttatctctatacaaaatgcaattattgcttaaatacaatacagtattttactaatrggatacaaatgtcaccactgaataaaaaggtcacacttgcatctaagtgattgtcaacccagactcaagcttgttgctgctgttatttgaagaggatgttaaggcactggagacctaggtttatttttgtagayatcagtgagcgctcaccttttgatttgtgccatcagtagttccaattttttggccttatatttgtgttttgtgcttgtgtagtcatatgaagtgtataaatgcrggtcacaagtagagggtttacaagatgtgatgcaggagtagcgatagtgtgagcattccattatttgtgcatgtctgggagaagttgttgtgacctccttgagacctgtcttgagttctctgtgacctgagcagtactgacagaaccctgctccttggaagcacctgaggagcttctgcgaggcagagagttttc

SEQ ID NO: 19620 - DNA, 600 bp, Chicken  19866894229451_3
tgtcatttatctctatacaaaatgcaattattgcttaaatacaatacagtattttactaatrggatacaaatgtcaccactgaataaaaaggtcacacttgcatctaagtgattgtcaacccagactcaagcttgttgctgctgttatttgaagaggatgttaaggcactggagacctaggtttatttttgtagayatcagtgagcgctcaccttttgatttgtgccatcagtagttccaattttttggccttatatttgtgttttgtgcttgtgtagtcatatgaagtgtataaatgcrggtcacaagtagagggtttacaagatgtgatgcaggagtagcgatagtgtgagcattccattatttgtgcatgtctgggagaagttgttgtgacctccttgagacctgtcttgagttctctgtgacctgagcagtactgacagaaccctgctccttggaagcacctgaggagcttctgcgaggcagagagttttcagtgtttgcgcgtttcttgtttctttgttcttgtttctttctctgtcattgctatgactgcgatgggtagtcagtaagcatttgctccttgactgaagaatcaaa

SEQ ID NO: 19621 - DNA, 600 bp, Chicken  19866894229451_4
catgtctgggagaagttgttgtgacctccttgagacctgtcttgagttctctgtgacctgagcagtactgacagaaccctgctccttggaagcacctgaggagcttctgcgaggcagagagttttcagtgtttgcgcgtttcttgtttctttgttcttgtttctttctctgtcattgctatgactgcgatgggtagtcagtaagcatttgctccttgactgaagaatcaaaggagaagagccaagtgtacatggacaaaagaggaaaaaaaaaattaaaaaataaaaaaggagaagatartatgacttggaatatgtattcttacctccataagtggaagatagaaccttaaacaattcttccaaatacacttggaaagctatagcaaaaaatattgtaaaagagatgctctcctagcttgctttgaatttttcatggcaattgttctgctgcaactttgtcaaaccttataatttattgcagtaactatcttagataagaaatctctctgaagtggcactacaaggcattgaactgcagaataactggtatggagaaggaaaaaactgttgtatgaagacctttttcaatttttttttt

SEQ ID NO: 19622 - DNA, 599 bp, Chicken  19866894229455_1
  misc_feature (1)..(216): n is any nucleotide
nnnnnnnnnnnnnnnnnnnnnnnnnnnnnnnnnnnnnnnnnnnnnnnnnnnnnnnnnnnnnnnnnnnnnnnnnnnnnnnnnnnnnnnnnnnnnnnnnnnnnnnnnnnnnnnnnnnnnnnnnnnnnnnnnnnnnnnnnnnnnnnnnnnnnnnnnnnnnnnnnnnnnnnnnnnnnnnnnnnnnnnnnnnnnnnnnnnnnnnnnnnnnnnnnnnnnnnncctgtatcttcggaaaggtgacctttgcagtgcccccatcgtgtgccagtttccacagcccctggtgaggcatagcccctggtragtctgatttctgtggactctgctgtccttattggagggaaatgtggaaagtgctatatatttcaaacagctgattgcttttccaaaggatgagtttatttccctgtgacttctattaatctccttagtaataatcagacaaatgtcaagttaaatcaattgtgctccttagcagcttgtagagtcacagtcacaagtgccagggacactttaaaatccttgatagctcaaattatttacagaagattagagagtacccattggctaaatattgaaattcccacctcttcaaacaggat

SEQ ID NO: 19623 - DNA, 599 bp, Chicken  19866894229464_1
  misc_feature (1)..(214): n is any nucleotide
nnnnnnnnnnnnnnnnnnnnnnnnnnnnnnnnnnnnnnnnnnnnnnnnnnnnnnnnnnnnnnnnnnnnnnnnnnnnnnnnnnnnnnnnnnnnnnnnnnnnnnnnnnnnnnnnnnnnnnnnnnnnnnnnnnnnnnnnnnnnnnnnnnnnnnnnnnnnnnnnnnnnnnnnnnnnnnnnnnnnnnnnnnnnnnnnnnnnnnnnnnnnnnnnnnnnnnttgtgtgtgaggctctgctgtggacctgagcctggactcagatgatgcagaggccacgtaggtccatcacagggattctgcactayttcatttttacttatttccttggttggtcatttytagttttttatacctccatatcaactggaatttctgtttgaagcttttggagcgcgttctttcatgaaagctttgcctgggaagatagagaggattgttttgatatctgtggaataatctagatcctccatcagtgtgacttatctaataagacccttgttgggcatcaggaagcgtgtcctatgttctcatctctgtgctgacgtattatgcagcttagctaatcattctgcctcttcctgcctctctcacttgtaaattgaag

SEQ ID NO: 19624 - DNA, 599 bp, Chicken  19866894229464_2
  misc_feature (1)..(180): n is any nucleotide
nnnnnnnnnnnnnnnnnnnnnnnnnnnnnnnnnnnnnnnnnnnnnnnnnnnnnnnnnnnnnnnnnnnnnnnnnnnnnnnnnnnnnnnnnnnnnnnnnnnnnnnnnnnnnnnnnnnnnnnnnnnnnnnnnnnnnnnnnnnnnnnnnnnnnnnnnnnnnnnnnnnnnnnnnnnnnnnnnnnnttgtgtgtgaggctctgctgtggacctgagcctggactcagatgatgcagaggccacgtaggtccatcacagggattctgcactayttcatttttacttatttccttggttggtcatttytagttttttatacctccatatcaactggaatttctgtttgaagcttttggagcgcgttctttcatgaaagctttgcctgggaagatagagaggattgttttgatatctgtggaataatctagatcctccatcagtgtgacttatctaataagacccttgttgggcatcaggaagcgtgtcctatgttctcatctctgtgctgacgtattatgcagcttagctaatcattctgcctcttcctgcctctctcacttgtaaattgaagctgatgatgcctgctgccctttgtaatacacttg

SEQ ID NO: 19625 - DNA, 600 bp, Chicken  19866894229466_1
ttgcatcaaataccttcacatgagagacaccacaattgcttgtaaaggtacttgaaaaagccttccttccctccctggtctcatggcagggtggagacggacacctaatttaaacacaagtctcaaaaggaaataaagcatgccatttccttcacactgccctgaaatggcagcaagctcttcttatgtccttcttcttaccacacagaggtattttgccccacagccaccacagaaaaatatgagttatgtgtcagaggtctttcagctattaggtgtggagggaaatccaagttgttrcagttagaggagggattttcttctgaggtccttgcagcatttcctcctttagtggttgctgctgttttccacagacaagtaattcctccagttatgccctttgctgattcaccaccttatctaaagctttcactaagagacagaaaatttaagctatcagttccatgcagctctgcacatcctaaagtggaatggtgctttgcaccaattaatgtcattccagtgcaaatttgctaaaccaaccatatgtgacatctcctcaacactccagtcatcagttgcctccttcgtatcaaatgt

SEQ ID NO: 19626 - DNA, 600 bp, Chicken  19866894229470_1
ggtaaattgagggaccgttgtccaacccaggagtagtaagaatatgagaaaaggcaagacagatgcaagcatggcagtctcccagccaaatagggatgattaaacatggtctgctttacaatctcctatttaggcatcagcaaaaaacacaacagaatttctcccagactgtggactgaactgacagtgggactgtgcattcccacaaattagaatgggcatgtaaattcttcaaaaaaacgtttgtgaacaccatttctgtcttgctgagacttctgacccaagggctgacaccatcaygttgtgtcccaaagccccagcaaarctgtctaaatgagagggctgatgtgttgggcaaccagtgctaagtgcgttagtattatcacctagtgttgtaagtggtgcatcctgaaattaaatcagcaatactaaggtaccagtggtgattcttaaaacccatgtgtatgtgtgtctctgaaaggtttttttgtttacaytactttgacaaaattagttaagaaatatgcctaatctgtaagaacacttacaaaataaacttacagagagtcaagtagccaatttgatttagcctaagtagta

SEQ ID NO: 19627 - DNA, 600 bp, Chicken  19866894229470_2
cccaggagtagtaagaatatgagaaaaggcaagacagatgcaagcatggcagtctcccagccaaatagggatgattaaacatggtctgctttacaatctcctatttaggcatcagcaaaaaacacaacagaatttctcccagactgtggactgaactgacagtgggactgtgcattcccacaaattagaatgggcatgtaaattcttcaaaaaaacgtttgtgaacaccatttctgtcttgctgagacttctgacccaagggctgacaccatcaygttgtgtcccaaagccccagcaaarctgtctaaatgagagggctgatgtgttgggcaaccagtgctaagtgcgttagtattatcacctagtgttgtaagtggtgcatcctgaaattaaatcagcaatactaaggtaccagtggtgattcttaaaacccatgtgtatgtgtgtctctgaaaggtttttttgtttacaytactttgacaaaattagttaagaaatatgcctaatctgtaagaacacttacaaaataaacttacagagagtcaagtagccaatttgatttagcctaagtagtattgtaacctcatccattctcacaca

SEQ ID NO: 19628 - DNA, 600 bp, Chicken  19866894229470_3
cattcccacaaattagaatgggcatgtaaattcttcaaaaaaacgtttgtgaacaccatttctgtcttgctgagacttctgacccaagggctgacaccatcaygttgtgtcccaaagccccagcaaarctgtctaaatgagagggctgatgtgttgggcaaccagtgctaagtgcgttagtattatcacctagtgttgtaagtggtgcatcctgaaattaaatcagcaatactaaggtaccagtggtgattcttaaaacccatgtgtatgtgtgtctctgaaaggtttttttgtttacaytactttgacaaaattagttaagaaatatgcctaatctgtaagaacacttacaaaataaacttacagagagtcaagtagccaatttgatttagcctaagtagtattgtaacctcatccattctcacacaaaacccaaatgttttccagtttgcatacaatttccagaaaagtctgagtaggtatactgaagtaagtctgaatttccctaaataaaacagaattttcccagcactagatgtcacattttggcagtactgtaaaaatgaattttcttcctagtaagaatagacatgactttct

SEQ ID NO: 19629 - DNA, 599 bp, Chicken  19866894229471_1
  misc_feature (1)..(249): n is any nucleotide
nnnnnnnnnnnnnnnnnnnnnnnnnnnnnnnnnnnnnnnnnnnnnnnnnnnnnnnnnnnnnnnnnnnnnnnnnnnnnnnnnnnnnnnnnnnnnnnnnnnnnnnnnnnnnnnnnnnnnnnnnnnnnnnnnnnnnnnnnnnnnnnnnnnnnnnnnnnnnnnnnnnnnnnnnnnnnnnnnnnnnnnnnnnnnnnnnnnnnnnnnnnnnnnnnnnnnnnnnnnnnnnnnnnnnnnnnnnnnnnnnnnnnnnnntcttatagctgtccaccggctgcggtgtccaactggacgttaggggaattsacgtcgctgcccgcagggagcagcgccctacggcctccccccggcgtttccccggagctggatgtggggctgagctttggccccctgcgccttttgggacagccccagcagacagcatggggaacgtggggggaaggagtcccagcaccacgtggtggggccgtgatgtggggtttctccatcaagtgcctggggtaagcygtaggggttggggtcccagggccacacggtggggacgtgatgtagggttcccaccgagcattgagcccaacctcaaggctcccagtcccacgtgatgg

SEQ ID NO: 19630 - DNA, 599 bp, Chicken  19866894229471_2
  misc_feature (1)..(48): n is any nucleotide
nnnnnnnnnnnnnnnnnnnnnnnnnnnnnnnnnnnnnnnnnnnnnnnntcttatagctgtccaccggctgcggtgtccaactggacgttaggggaattsacgtcgctgcccgcagggagcagcgccctacggcctccccccggcgtttccccggagctggatgtggggctgagctttggccccctgcgccttttgggacagccccagcagacagcatggggaacgtggggggaaggagtcccagcaccacgtggtggggccgtgatgtggggtttctccatcaagtgcctggggtaagcygtaggggttggggtcccagggccacacggtggggacgtgatgtagggttcccaccgagcattgagcccaacctcaaggctcccagtcccacgtgatggagtcacaaggacagaatttctccagcaagcacccaggttcgaccacagggatgggagccccattgccacttgatggggacacagtttaggatttctccatcaactgcctggagccaacctcagggacgggggtcccagtgccctatggcggcgatgtcatatagggtttcttcaccaaacatccaggctcacctctagcca

SEQ ID NO: 19631 - DNA, 600 bp, Chicken  19866894229474_1
tctgtgcacgcctgcagcttcctctaaaggcaacagcagccaatgggcggctcggtgcggggcagaaatgctttctgcttagagacagaacagcaaagagacaacttgtgccagatgggactggggctgcactgctggggtgtgggggctccttgcttcctcttcctcccccagtgacatttaaatggtcgctccccaaatactttctgcttgctctgtgtgttttcccagcgacacaaagccctgagcctttcagaataaatcatttagaggcaaggaaaaaaaaacaaggaacagctytgaccccgcacgtacacacactcccctcctcctccgagcgtggtttggagccactcaagcaaaaggaagagtgagcaggagtaattttccatggatgcagggaacaatggagccccgcgtggtttttgctgttcagaggtttccctccagcgctttctgctcctccacagcagcagacaaaagcagtgtgcatgcacagaccggcccggcctcgctgcaccctgcagtgcgaggtgcagggtgatggcgaggagactctgtacagcacgtagggggatgtctgagtcagtgcagggcagg

SEQ ID NO: 19632 - DNA, 600 bp, Chicken  19866894229476_1
agagcatgtgtatacgtgtccacctttccagatcacagcatgccttaacgcaaaattcctctcagtttgacattttaagctaaaatgctggggaaattgctggcaatgaacagcaacttccaaaacaagccagttaatacctgagaactgtaatgttctacaaggctgcggacacatttattttaggttttctgtaaaagcacatattatcacaaaggcataagtatgaattcttctctttttcaggtggccatgacataggccaacagcacttttaaaacaagtgattctggaagcatrtttttttttgtgtgtggttttttgttttgttttgttttgttttccaaatcaaacataacattattgaaaactagttaaaaataaccaaaagcgtatttatcttacttttaaatatagcctgtgatgaacaaacttcccaatgagttgtggctatataaatggttcggcctgactttccacagaaaatcactgaaacctaaaaattgttttctcactccaagggatgaccctttttcagtgctgctcagtgaagcagggctcacttcttatacatagcaatggccgttatgactgaactga

SEQ ID NO: 19633 - DNA, 600 bp, Chicken  19866894229481_1
gcttttattttatgaagccatattaagtagaccaaaatgcacattgtcctaatacacatttttggtgaagatggtagtggaatatttccaaggggctaaggagcaaaagtcacagatataaggaaaggaataaatgctataagtatctttatctcagaatatggaggtaggtgtaagtgtttgtgcgtctctgcacagaagccaagcgtttaaattcatttgtgccaagaaatatttaatcattgttaagaaatgtattaacttgcatgcagtattcatcctgtgactcaaatcttgtaygggaacaagaaggcaaccaaaatgggtgacaatttccatatgaagatgaaaaatgcctagggatcttcgtcctgaatgggagtatggaaaaagaaaatgctgggttgaagatgatcagtgatttttttttttaatcttgcaatgtaggaactggggaaacgaaacaaaatgatcagcaactgaattactgacaaatgaaagtaaagatttccatcacacagagtgaatttctggagctctgagactatatagtaccaggaatacagttgtgtccaaggtattttgataaaattgatggag

SEQ ID NO: 19634 - DNA, 600 bp, Chicken  19866894229482_1
agcaaaaaggggatttgtttcttttttggaaatagtgacttcagtggcgcaaactgtcttctaactggactggtgcctcacctacacaaagcactccttgtgcactgaactcaagaagcagctggcttcaaacacctgaatgttattggcacagaatggtttcactttttgtttttctcgttgtagggctttgcactgggtgactccacaaatgctgtgtgttcctgtcaatgaagagattccagaagtctctgatatggttgtaaaagcaattacaggtttgtgagggataacacttasaggcttaaatttcaggtctcctggtcagagagattttctgctgtcttcagaaagagattgaggcttttagtttggcagtagtctttgttatggtgggcaagtttgtcatctgtgaagcaggaataactttgcaacgagagaagtgtttaggcttacctaatctatttgagatgcttggattcaaccaagaagaagttgaataaacagattgaaaaccaaaactcrcacttgtcagtgttgtattctgcttgtctgagtgactgatgaaaatggttttaactgtttgaaaaacctttctgt

SEQ ID NO: 19635 - DNA, 600 bp, Chicken  19866894229482_2
tgtcaatgaagagattccagaagtctctgatatggttgtaaaagcaattacaggtttgtgagggataacacttasaggcttaaatttcaggtctcctggtcagagagattttctgctgtcttcagaaagagattgaggcttttagtttggcagtagtctttgttatggtgggcaagtttgtcatctgtgaagcaggaataactttgcaacgagagaagtgtttaggcttacctaatctatttgagatgcttggattcaaccaagaagaagttgaataaacagattgaaaaccaaaactcrcacttgtcagtgttgtattctgcttgtctgagtgactgatgaaaatggttttaactgtttgaaaaacctttctgtcttacagatattattgagatggattcaaagcgtgttcctcgtgataagttggcatgcatcaccaagtgcagcaagcacatctttaatgctataaagataaccaaaaacgaaccagcttctgctgatgactttcttccaacactcatatacatcgttttgaagggaaacccaccccgtctgcagtccaacatccagtatataacacgcttttgtaacccaagcagg

SEQ ID NO: 19636 - DNA, 600 bp, Chicken  19866894229504_1
cactaggtgatcttagaggtctttcccaacattaatgtttctgtgtttctatgcttctatgattgtgtaatactgaatgaggaacagcgttttataaagttattgctctgaaaacgatttaagatggagggatagcaagcagctgaacatggacatcagtgtcacagagcatatatggctcctggctaaacagagaatgctgaaaaagcagaagttgtctaaaaaggagtaagaaaaagtacccaaatactagagggaaagacttttgagaagacttttaagaagcttaatcataaaagwagactgataagtgattgattagagtgttagtgaagaaaaatttttccataaagaaaaaatatgaagtactaaaagacttgaatttagcagaagcaaaagtcagcagctgaaagatggaggcagatgtgttcatattttgaaagaagaacatttcttatttagcacagaaggcaacaaacctcttaaacaaattgccaagggaagtgttagactttcagacttcctgtgtcccccagcaaggctgggtgcttttccaacaggtatcatttaaacacaaactgcagttgagttcctgggctc

SEQ ID NO: 19637 - DNA, 600 bp, Chicken  19866894229504_2
tagcagaagcaaaagtcagcagctgaaagatggaggcagatgtgttcatattttgaaagaagaacatttcttatttagcacagaaggcaacaaacctcttaaacaaattgccaagggaagtgttagactttcagacttcctgtgtcccccagcaaggctgggtgcttttccaacaggtatcatttaaacacaaactgcagttgagttcctgggctcaatatgagagcaacagggagatggagaaagcctcctgcagatgaaaaatcagatcgagtgatccagtgggttcttctggatgcrtgttctgagaacacacaaattcaaggcctgttaagttttttcagaagatcacaaatatctttccctgagattagcaagtgcagcacatgagcagcctggataaaatcagttctgtgacagtaaaaataagagattcaattatgcattatttgcttctatgatcttcaaagggagctggcattttgacttccactggctgaggacctgctgtgaacatcactcggaccaggaagactgatgacattttgaaagaactacatcattcacctgatgaacattttatgagacacggaatttacc

SEQ ID NO: 19638 - DNA, 600 bp, Chicken  19866894229505_1
tatggtgaacacatgcatgtacttagcttaagcaggtcactagagatatgttctaaactgatagttatctaatatttttgttaatgaaaatggtaccaaataatgtaatgaactactctgagaagcagtctttacacaacttctgaacctgcttccttattacatataggagtaacgtctctttagataaatcccaggattgctctgtgtatctacctgggactcttggagaaaaaataattcaaaaagaaattccgcattaatatatgaatcagagagtgggtgcactgctctcagtaraactaaatgtttgtactaatgcagacaaaatataccgaaatatatacatactctcacagctagaaacatactttctacgtcttgagcttctatatttactattttcactctaaaataaataaattaattaataaaaaacccagctaatgtttatataaaaatcttaggcctgagaagaarcaaataaacaagcaaaaaacgggacatacaaaaggcttccaaacacatacacaaagatacagcaayagcacttgcagctttttttccaagctactccctgacctcaatacattttgggcc

SEQ ID NO: 19639 - DNA, 600 bp, Chicken  19866894229505_2
ctttagataaatcccaggattgctctgtgtatctacctgggactcttggagaaaaaataattcaaaaagaaattccgcattaatatatgaatcagagagtgggtgcactgctctcagtaraactaaatgtttgtactaatgcagacaaaatataccgaaatatatacatactctcacagctagaaacatactttctacgtcttgagcttctatatttactattttcactctaaaataaataaattaattaataaaaaacccagctaatgtttatataaaaatcttaggcctgagaagaarcaaataaacaagcaaaaaacgggacatacaaaaggcttccaaacacatacacaaagatacagcaayagcacttgcagctttttttccaagctactccctgacctcaatacattttgggccaaatcctgcagccagatagcctggcagatttagagcacttgcagaagaaaggacaggaacttgcactacgtaggttaaactgaggactatgccttatcaacagagaattacagaacatatggaaatacagaaaatattcacccactctccaaatattatctgcataacgacattaattac

SEQ ID NO: 19640 - DNA, 600 bp, Chicken  19866894229505_3
aagaaattccgcattaatatatgaatcagagagtgggtgcactgctctcagtaraactaaatgtttgtactaatgcagacaaaatataccgaaatatatacatactctcacagctagaaacatactttctacgtcttgagcttctatatttactattttcactctaaaataaataaattaattaataaaaaacccagctaatgtttatataaaaatcttaggcctgagaagaarcaaataaacaagcaaaaaacgggacatacaaaaggcttccaaacacatacacaaagatacagcaayagcacttgcagctttttttccaagctactccctgacctcaatacattttgggccaaatcctgcagccagatagcctggcagatttagagcacttgcagaagaaaggacaggaacttgcactacgtaggttaaactgaggactatgccttatcaacagagaattacagaacatatggaaatacagaaaatattcacccactctccaaatattatctgcataacgacattaattacttgcatggttatcttgaaagaatcagttattaggtctctgatggaaacaacatatcaggatgaata

SEQ ID NO: 19641 - DNA, 600 bp, Chicken  19866894229511_1
tttccacagacagaagtaaaatcagagtcaaatcccatactaaatatatatatatatataaaatactgcaaaggaataaaaaccgttgaataaatgtttcagaaagcaagagcaggtcacaaagaaatattagttctactggatatgcagtgagtgaatacaatgaattgttaggggaagaatgatcctgggtgaagtgataatgagagcttcattttctcaaggcatatgcaactcttcttttatgcactgactagaaattagggccaattgtatgattttctcctactttctggactyccttctattccacacatctcttataccactrttttggctgcaatcatagctgttgagcaatgttctcttgcagtaagagtctccacactcagcattattttagaatatctggtctacatgaaattcacagcttytctgcatcgtcacaggtaccacataaataagtatttctctgaaaaaatgcagctaatgtactgtataaatgtatatccaaactgtttatagcaastcctataccttattttatttattcactatctgtaattagtcaacacctctcatttgataatctgtatactg

SEQ ID NO: 19642 - DNA, 600 bp, Chicken  19866894229511_2
atcccatactaaatatatatatatatataaaatactgcaaaggaataaaaaccgttgaataaatgtttcagaaagcaagagcaggtcacaaagaaatattagttctactggatatgcagtgagtgaatacaatgaattgttaggggaagaatgatcctgggtgaagtgataatgagagcttcattttctcaaggcatatgcaactcttcttttatgcactgactagaaattagggccaattgtatgattttctcctactttctggactyccttctattccacacatctcttataccactrttttggctgcaatcatagctgttgagcaatgttctcttgcagtaagagtctccacactcagcattattttagaatatctggtctacatgaaattcacagcttytctgcatcgtcacaggtaccacataaataagtatttctctgaaaaaatgcagctaatgtactgtataaatgtatatccaaactgtttatagcaastcctataccttattttatttattcactatctgtaattagtcaacacctctcatttgataatctgtatactgaggtaaatgttaaaytaatataaaggaaata

SEQ ID NO: 19643 - DNA, 600 bp, Chicken  19866894229511_3
tctactggatatgcagtgagtgaatacaatgaattgttaggggaagaatgatcctgggtgaagtgataatgagagcttcattttctcaaggcatatgcaactcttcttttatgcactgactagaaattagggccaattgtatgattttctcctactttctggactyccttctattccacacatctcttataccactrttttggctgcaatcatagctgttgagcaatgttctcttgcagtaagagtctccacactcagcattattttagaatatctggtctacatgaaattcacagcttytctgcatcgtcacaggtaccacataaataagtatttctctgaaaaaatgcagctaatgtactgtataaatgtatatccaaactgtttatagcaastcctataccttattttatttattcactatctgtaattagtcaacacctctcatttgataatctgtatactgaggtaaatgttaaaytaatataaaggaaataagcaaaatgcgaagattacttaggtccattttatctcccaaatcaataagatttacttagtgctaatgcactaactgaattatgagaactaatgcagcgctgt

SEQ ID NO: 19644 - DNA, 600 bp, Chicken  19866894229511_4
tgcaactcttcttttatgcactgactagaaattagggccaattgtatgattttctcctactttctggactyccttctattccacacatctcttataccactrttttggctgcaatcatagctgttgagcaatgttctcttgcagtaagagtctccacactcagcattattttagaatatctggtctacatgaaattcacagcttytctgcatcgtcacaggtaccacataaataagtatttctctgaaaaaatgcagctaatgtactgtataaatgtatatccaaactgtttatagcaastcctataccttattttatttattcactatctgtaattagtcaacacctctcatttgataatctgtatactgaggtaaatgttaaaytaatataaaggaaataagcaaaatgcgaagattacttaggtccattttatctcccaaatcaataagatttacttagtgctaatgcactaactgaattatgagaactaatgcagcgctgttcaatgacaaaagcaaataactctttgaatgatcttgacaatagaacatataatcatcttaatttgtattaactaattacatttaacggtagatg

SEQ ID NO: 19645 - DNA, 600 bp, Chicken  19866894229511_5
atctcttataccactrttttggctgcaatcatagctgttgagcaatgttctcttgcagtaagagtctccacactcagcattattttagaatatctggtctacatgaaattcacagcttytctgcatcgtcacaggtaccacataaataagtatttctctgaaaaaatgcagctaatgtactgtataaatgtatatccaaactgtttatagcaastcctataccttattttatttattcactatctgtaattagtcaacacctctcatttgataatctgtatactgaggtaaatgttaaaytaatataaaggaaataagcaaaatgcgaagattacttaggtccattttatctcccaaatcaataagatttacttagtgctaatgcactaactgaattatgagaactaatgcagcgctgttcaatgacaaaagcaaataactctttgaatgatcttgacaatagaacatataatcatcttaatttgtattaactaattacatttaacggtagatgtctttttaccttattacccttaagtggagcatcactacagtaacctccttctcctcctcatttaacagtgaagtagatcaaggcaa

SEQ ID NO: 19646 - DNA, 599 bp, Chicken  19866894229513_1
  misc_feature (1)..(69): n is any nucleotide
nnnnnnnnnnnnnnnnnnnnnnnnnnnnnnnnnnnnnnnnnnnnnnnnnnnnnnnnnnnnnnnnnnnnntaggagattcctggagtctgttgaggacaactctcctggtccaggtaatagatggaccaacctgaggtgaagccttactggacctggtgctcactaatgaagaggagagcattatagaggttaagattggaggcagcctgggctgtagtgaccatgccttggtggagtttgtgatcttgaagaatccaggcctggcaaaaagcagagctaggaccctgtgctttaggagakcaaactttcggctgctcaaggaactgctgagtgggatcccctgggaaactgtccatgagggcatgggtacagaacagaactggcagctctttaaggacacccttctgagagcacaatgattctccatcccccaggagaagaacttgagaaggggaggcaggtgaccgttgtgcctgtgcaaggacctgcagcttaaactgagggaaaagagggaaatgtacaggaagtggaagcaggaatggactatccatgcttgtccaatctggggcagagatatgtggttagatatatggaatgtg

SEQ ID NO: 19647 - DNA, 599 bp, Chicken  19866894229538_1
  misc_feature (1)..(197): n is any nucleotide
nnnnnnnnnnnnnnnnnnnnnnnnnnnnnnnnnnnnnnnnnnnnnnnnnnnnnnnnnnnnnnnnnnnnnnnnnnnnnnnnnnnnnnnnnnnnnnnnnnnnnnnnnnnnnnnnnnnnnnnnnnnnnnnnnnnnnnnnnnnnnnnnnnnnnnnnnnnnnnnnnnnnnnnnnnnnnnnnnnnnnnnnnnnnnnnnnnnnnagaatttccacagtttcattagaaaccagagcaatttgggcattgagactttaagcaaccacttttaagaaaataaaacctttctcacacttaatcgctatcyttcctgaatgctacccaggacaaatggactagatatgcatgggagtaaagaataatgatagtgaagttcttcacagaatcaaaaatattatctgaagctgaaactgacataaacacgtgaattcaatctttcatattatgacgaatacataaagtagttttgtttctcatatccaacaagaaaattatttcattcctgccagcaacagtgcagaattgtctttagcacatctgagataacaagtacaacctctaatctcctggtcatactaagtttctgttctgtctctgtatttatta

SEQ ID NO: 19648 - DNA, 600 bp, Chicken  19866894229540_1
ctaatgcacagtatgagcatctgtgtcatgaatcaatgattaaagtaaagtttctttcatcaaaattcagctatctcaaccatggtaaataataggctaattaggcatctgctcattcaatgtccaaagggacaggccaattcctggcgcaaagtgaaacatttgtcgcaacagtgaaaaagtcattttgaagtctgagaaccacctagagcaaaagagatcatttaccaaatgattctcacctcagaaagcacctccaccttcctctttgtgctgacggggcttgcaaactgacctgakgtgagagaacaagataaaatggcctgatccrgtgcaagatggacatgaaatgtaaggcctaactttcaaaatgtcawttgtttagagaataaagagtgggaagcygtaatggtctcttggcccaaatgtatcaattatacattgtcagggggacaaaatttaaccagagaacaaagcaggcagctttggtaacaatactggactagttttcctttcatggactcagccaactacgacacccttacagcgcaacaatttgaacagaggcacaatcttcatttgctttctgactgcatccct

SEQ ID NO: 19649 - DNA, 600 bp, Chicken  19866894229540_2
atcaatgattaaagtaaagtttctttcatcaaaattcagctatctcaaccatggtaaataataggctaattaggcatctgctcattcaatgtccaaagggacaggccaattcctggcgcaaagtgaaacatttgtcgcaacagtgaaaaagtcattttgaagtctgagaaccacctagagcaaaagagatcatttaccaaatgattctcacctcagaaagcacctccaccttcctctttgtgctgacggggcttgcaaactgacctgakgtgagagaacaagataaaatggcctgatccrgtgcaagatggacatgaaatgtaaggcctaactttcaaaatgtcawttgtttagagaataaagagtgggaagcygtaatggtctcttggcccaaatgtatcaattatacattgtcagggggacaaaatttaaccagagaacaaagcaggcagctttggtaacaatactggactagttttcctttcatggactcagccaactacgacacccttacagcgcaacaatttgaacagaggcacaatcttcatttgctttctgactgcatccctcctcttctgcctaaaaacaggctcagtttcc

SEQ ID NO: 19650 - DNA, 600 bp, Chicken  19866894229540_3
aaccatggtaaataataggctaattaggcatctgctcattcaatgtccaaagggacaggccaattcctggcgcaaagtgaaacatttgtcgcaacagtgaaaaagtcattttgaagtctgagaaccacctagagcaaaagagatcatttaccaaatgattctcacctcagaaagcacctccaccttcctctttgtgctgacggggcttgcaaactgacctgakgtgagagaacaagataaaatggcctgatccrgtgcaagatggacatgaaatgtaaggcctaactttcaaaatgtcawttgtttagagaataaagagtgggaagcygtaatggtctcttggcccaaatgtatcaattatacattgtcagggggacaaaatttaaccagagaacaaagcaggcagctttggtaacaatactggactagttttcctttcatggactcagccaactacgacacccttacagcgcaacaatttgaacagaggcacaatcttcatttgctttctgactgcatccctcctcttctgcctaaaaacaggctcagtttccttttctattttcctttggctctttaagcagttcagcacagctatca

SEQ ID NO: 19651 - DNA, 600 bp, Chicken  19866894229540_4
catctgctcattcaatgtccaaagggacaggccaattcctggcgcaaagtgaaacatttgtcgcaacagtgaaaaagtcattttgaagtctgagaaccacctagagcaaaagagatcatttaccaaatgattctcacctcagaaagcacctccaccttcctctttgtgctgacggggcttgcaaactgacctgakgtgagagaacaagataaaatggcctgatccrgtgcaagatggacatgaaatgtaaggcctaactttcaaaatgtcawttgtttagagaataaagagtgggaagcygtaatggtctcttggcccaaatgtatcaattatacattgtcagggggacaaaatttaaccagagaacaaagcaggcagctttggtaacaatactggactagttttcctttcatggactcagccaactacgacacccttacagcgcaacaatttgaacagaggcacaatcttcatttgctttctgactgcatccctcctcttctgcctaaaaacaggctcagtttccttttctattttcctttggctctttaagcagttcagcacagctatcaaggcatcaccctgttgtggtgggaatag

SEQ ID NO: 19652 - DNA, 600 bp, Chicken  19866894229544_1
ctaggtgacgtgctaagctttgccacctctgattttttttctgattcttttatgccagcaggagtgacactaattatagtggcaatttttgctgaggggagacctgttttctaagagctcagctgtattattgccttggtctgaactggcttcaagaatggaagttcagaatgaataaactaatgctgtacttgggtgatatcgtgtatgtgagagcttctcttaggtgaccacataagtggtcagagaaatgtgcactggaatgggaacattgaaattaattggatcatgaggcaccakagatgtgtgctgcctgcctataagatcagaggttgcttctgggagcctgggggaggaggaggagggagggatgtctccacgtgccctgagatccgggtagaagtctgatcctacacattattttatagctttcccctcacagtaggcaacatcagagtgggaaggcaataaattacagtcattccagaaaagatcactttttctctctgtggaactgttaacagaaattaataaagaaagtttaaagcttaattatgctcttctcctccaccaaaccacaaagacgctcaggatacaagg

SEQ ID NO: 19653 - DNA, 600 bp, Chicken  19866894229548_1
agtcaccatttcacataagcatcaaaaaccacagctgcttaaaactcagccctttgctcatttggtacatgtgccctctctccatgctcacatgcctgcctttcttaggagatttgtaccacctctgcttttccaaatccccttccattatcctctgaaaaactttggtcaatagattgcatgttgttcagtgatttttcgtttcttcttcaatctgccagagcagcagatcaccttttctcagttttctccagtgtagaacttttctaccatttcttcagctaaagccttgcttatctraagacattctaatctgacccattcaacttgacaytcaaatgactgactggtcattgttaacagttaaagacactaagttcttcaggtttgccagcctaacaagcatgtatttwaaaaaaaggatgttcatattaagagtagactcaaaattaagtcatatgtttacatattccaaaagctttgtacgcagtttttcagaatacctttatgaccagaagcagcattagaaagagatctcatgatttgagggatgaggttgaatcaggtagcttttataaattaagttgtaagcaacttcta

SEQ ID NO: 19654 - DNA, 600 bp, Chicken  19866894229548_2
ctgcttaaaactcagccctttgctcatttggtacatgtgccctctctccatgctcacatgcctgcctttcttaggagatttgtaccacctctgcttttccaaatccccttccattatcctctgaaaaactttggtcaatagattgcatgttgttcagtgatttttcgtttcttcttcaatctgccagagcagcagatcaccttttctcagttttctccagtgtagaacttttctaccatttcttcagctaaagccttgcttatctraagacattctaatctgacccattcaacttgacaytcaaatgactgactggtcattgttaacagttaaagacactaagttcttcaggtttgccagcctaacaagcatgtatttwaaaaaaaggatgttcatattaagagtagactcaaaattaagtcatatgtttacatattccaaaagctttgtacgcagtttttcagaatacctttatgaccagaagcagcattagaaagagatctcatgatttgagggatgaggttgaatcaggtagcttttataaattaagttgtaagcaacttctaatattaagaaatgttatttgtatcagacattaca

SEQ ID NO: 19655 - DNA, 600 bp, Chicken  19866894229548_3
ttgtaccacctctgcttttccaaatccccttccattatcctctgaaaaactttggtcaatagattgcatgttgttcagtgatttttcgtttcttcttcaatctgccagagcagcagatcaccttttctcagttttctccagtgtagaacttttctaccatttcttcagctaaagccttgcttatctraagacattctaatctgacccattcaacttgacaytcaaatgactgactggtcattgttaacagttaaagacactaagttcttcaggtttgccagcctaacaagcatgtatttwaaaaaaaggatgttcatattaagagtagactcaaaattaagtcatatgtttacatattccaaaagctttgtacgcagtttttcagaatacctttatgaccagaagcagcattagaaagagatctcatgatttgagggatgaggttgaatcaggtagcttttataaattaagttgtaagcaacttctaatattaagaaatgttatttgtatcagacattacaatcgtgagctttcgaaatattcctgaattcaaagttccttcctcctgaagttaagcaacagaataaactgttcctgctt

SEQ ID NO: 19656 - DNA, 600 bp, Chicken  19866894229575_1
gctgagctcctgctatgtacttgtgctatttgaaagctccacttacgattcttattgtgtaatgcaaaacccaactatacttactgggctctcaaacaattattttatgttgtgtgcccattcagtgacaagcagtagcaagcaaatgattgcaaatgttatatatataaaatgtgtctaattaagaactgctgtgatgcacttagtcttcctgaaggtaaacccttggacaaagtcaggtggccttcagcccttaagcaaccacacacaccctgtttgagcaggacagaacagacaccrtgactgttagagatccccattagaaggtcattattttttcacttatcaagttgccttcatctcttcctttgatgtgctgaaagtccactctttttaggcctttaaaactaggttgtttaaaggtctgtagtgcaaatgaaaaataagccagcactaactctgggaatggatgagacaaagctgctagcaagtagttttcatctatgttgcaaggcttttctgatcctgggagagctgtggaatatgtagcaacagtgctgggaagatgtggaaggcaagctgctggagcgtcttattttt

SEQ ID NO: 19657 - DNA, 599 bp, Chicken  19866894229576_1
  misc_feature (1)..(113): n is any nucleotide
nnnnnnnnnnnnnnnnnnnnnnnnnnnnnnnnnnnnnnnnnnnnnnnnnnnnnnnnnnnnnnnnnnnnnnnnnnnnnnnnnnnnnnnnnnnnnnnnnnnnnnnnnnnnnnnnncctacaattaacgtgtggctcagaggagctatatatgcaaacaggctggtgtctgaccaaaggacacttgctgcaggaagacgtgttttccaggtgtagggcttatttaagttataaacaagcgattaagcttttagctctgcatcacttgccaaactgctccggcttcagcgggaccagaggcagsaacgtgagttggctgagcactgttgcagcccacccagtgggatttcactgccggtgctctgctycttttgctgctggagccttaggtctgggcagagcagaggttaatgcagagcacgttggatagatggcgtcagctgcaccgcctggaagcatccyctgcagttggtgaataggtgcaggcaggacaagtgtgtggtgccgatgtccctttgcatgaggggctgatgtcctttggtgtccaagcgtgcaacccacattaacacagcatcttcctgtacatctgctggtgrtgctgtg

SEQ ID NO: 19658 - DNA, 599 bp, Chicken  19866894229576_2
  misc_feature (1)..(49): n is any nucleotide
nnnnnnnnnnnnnnnnnnnnnnnnnnnnnnnnnnnnnnnnnnnnnnnnncctacaattaacgtgtggctcagaggagctatatatgcaaacaggctggtgtctgaccaaaggacacttgctgcaggaagacgtgttttccaggtgtagggcttatttaagttataaacaagcgattaagcttttagctctgcatcacttgccaaactgctccggcttcagcgggaccagaggcagsaacgtgagttggctgagcactgttgcagcccacccagtgggatttcactgccggtgctctgctycttttgctgctggagccttaggtctgggcagagcagaggttaatgcagagcacgttggatagatggcgtcagctgcaccgcctggaagcatccyctgcagttggtgaataggtgcaggcaggacaagtgtgtggtgccgatgtccctttgcatgaggggctgatgtcctttggtgtccaagcgtgcaacccacattaacacagcatcttcctgtacatctgctggtgrtgctgtgccagcagagctgggggtgggaggatggaatgatgtccccggttcccctttgcaatgcagtaggt

SEQ ID NO: 19659 - DNA, 600 bp, Chicken  19866894229576_3
ctggtgtctgaccaaaggacacttgctgcaggaagacgtgttttccaggtgtagggcttatttaagttataaacaagcgattaagcttttagctctgcatcacttgccaaactgctccggcttcagcgggaccagaggcagsaacgtgagttggctgagcactgttgcagcccacccagtgggatttcactgccggtgctctgctycttttgctgctggagccttaggtctgggcagagcagaggttaatgcagagcacgttggatagatggcgtcagctgcaccgcctggaagcatccyctgcagttggtgaataggtgcaggcaggacaagtgtgtggtgccgatgtccctttgcatgaggggctgatgtcctttggtgtccaagcgtgcaacccacattaacacagcatcttcctgtacatctgctggtgrtgctgtgccagcagagctgggggtgggaggatggaatgatgtccccggttcccctttgcaatgcagtaggttggaggtggtcctctgcacaaccatrtcactgccgatcccattggaacaggagggctgaaatgtctccttgtgcactaagagttaaggggtctgt

SEQ ID NO: 19660 - DNA, 600 bp, Chicken  19866894229576_4
gaggcagsaacgtgagttggctgagcactgttgcagcccacccagtgggatttcactgccggtgctctgctycttttgctgctggagccttaggtctgggcagagcagaggttaatgcagagcacgttggatagatggcgtcagctgcaccgcctggaagcatccyctgcagttggtgaataggtgcaggcaggacaagtgtgtggtgccgatgtccctttgcatgaggggctgatgtcctttggtgtccaagcgtgcaacccacattaacacagcatcttcctgtacatctgctggtgrtgctgtgccagcagagctgggggtgggaggatggaatgatgtccccggttcccctttgcaatgcagtaggttggaggtggtcctctgcacaaccatrtcactgccgatcccattggaacaggagggctgaaatgtctccttgtgcactaagagttaaggggtctgtgcagctctgaagataagaaacagatgataaaggttagggaaaggatcgcgtttccattatgcagcytacaaatgtgaactaattagaatgcagccttctttccgagaaaatgcaaagaaggaagaaagcaaaaa

SEQ ID NO: 19661 - DNA, 551 bp, Chicken  19866894229576_5
gggcagagcagaggttaatgcagagcacgttggatagatggcgtcagctgcaccgcctggaagcatccyctgcagttggtgaataggtgcaggcaggacaagtgtgtggtgccgatgtccctttgcatgaggggctgatgtcctttggtgtccaagcgtgcaacccacattaacacagcatcttcctgtacatctgctggtgrtgctgtgccagcagagctgggggtgggaggatggaatgatgtccccggttcccctttgcaatgcagtaggttggaggtggtcctctgcacaaccatrtcactgccgatcccattggaacaggagggctgaaatgtctccttgtgcactaagagttaaggggtctgtgcagctctgaagataagaaacagatgataaaggttagggaaaggatcgcgtttccattatgcagcytacaaatgtgaactaattagaatgcagccttctttccgagaaaatgcaaagaaggaagaaagcaaaaaaaaccaaaaaccaaaaaagcatctccttcttcccaggcaaaaaagcta

SEQ ID NO: 19662 - DNA, 416 bp, Chicken  19866894229576_6
tgatgtcctttggtgtccaagcgtgcaacccacattaacacagcatcttcctgtacatctgctggtgrtgctgtgccagcagagctgggggtgggaggatggaatgatgtccccggttcccctttgcaatgcagtaggttggaggtggtcctctgcacaaccatrtcactgccgatcccattggaacaggagggctgaaatgtctccttgtgcactaagagttaaggggtctgtgcagctctgaagataagaaacagatgataaaggttagggaaaggatcgcgtttccattatgcagcytacaaatgtgaactaattagaatgcagccttctttccgagaaaatgcaaagaaggaagaaagcaaaaaaaaccaaaaaccaaaaaagcatctccttcttcccaggcaaaaaagcta

SEQ ID NO: 19663 - DNA, 600 bp, Chicken  19866894229581_1
gtcactgcagtgaggaagaagaactatcagacttgggactgttctagtctggcgaaagctttgatttctcccacagctgcaattcttaggcgtgatgcatgagagttatcaccactgtttgcaaacagcaggaaaaaggaaagggaataaaatactcacctccaaagtcaacaccaaacgaggctatgcatctatctttctctttcaaggacatcatcaaaacttgtggaggcaaagccatccgctgcaaaccatgaggctgtatagattttaaggtaataaagctaacgtaactgtcastctccaaactgaaaccatggtagcctttttaactaaagagaaagttatttttttcttttctgaagaggcttcttcttcaaagaccctagtgatgggaaggtagaaggcaacctgacatcattttggattcttcccagcctaccttcaggcatctctttctactgcttctttcatggcggtactcaaggcttagtgtgacaatttaaaaaatacgaagcctctgggctattataaatttctgtccccagagagaagcacagtacaaatctgacacaccagaagactcagaggaatgttcta

SEQ ID NO: 19664 - DNA, 600 bp, Chicken  19866894229582_1
catctcttgatgagaaagagataaaagagggtcaagcagcagacagagcttccctgtggctccaccagactgcactccagcacagcaggtctccttccacactctccagcatttttgccctgtgcaccctgagtggctcttcactctcccgtcacacattgcaatctgacgactgcttcaccaatccaccctccacgtgccgctaagggctctgaaactgtatgtcacaacaagttcattagtctaaatgtccccagggagcatcgcctggatgccgggatgctccccagggagcatcamccatatgacgtccctccatgccatgtcttgcatayagggctctgagtcaaaggtagtagggctactggcgagaaaaatgatcgcatcttctgcaggcaaarggcttcccattgaacatgcagcataagttgctcatgtgcaccacttatcccactatgtctatagaataaattatgctcaagaaatttgytctcaatggcctctttcagatagaagcaatgagtaagataaaacctgacactttatgtcaagtcacactcgtcaagtacagatttagtaatagtaatacttatcttttat

SEQ ID NO: 19665 - DNA, 600 bp, Chicken  19866894229582_2
gcagcagacagagcttccctgtggctccaccagactgcactccagcacagcaggtctccttccacactctccagcatttttgccctgtgcaccctgagtggctcttcactctcccgtcacacattgcaatctgacgactgcttcaccaatccaccctccacgtgccgctaagggctctgaaactgtatgtcacaacaagttcattagtctaaatgtccccagggagcatcgcctggatgccgggatgctccccagggagcatcamccatatgacgtccctccatgccatgtcttgcatayagggctctgagtcaaaggtagtagggctactggcgagaaaaatgatcgcatcttctgcaggcaaarggcttcccattgaacatgcagcataagttgctcatgtgcaccacttatcccactatgtctatagaataaattatgctcaagaaatttgytctcaatggcctctttcagatagaagcaatgagtaagataaaacctgacactttatgtcaagtcacactcgtcaagtacagatttagtaatagtaatacttatcttttatgtagcactttacatttcccagttgctgcacagaga

SEQ ID NO: 19666 - DNA, 600 bp, Chicken  19866894229582_3
ctctccagcatttttgccctgtgcaccctgagtggctcttcactctcccgtcacacattgcaatctgacgactgcttcaccaatccaccctccacgtgccgctaagggctctgaaactgtatgtcacaacaagttcattagtctaaatgtccccagggagcatcgcctggatgccgggatgctccccagggagcatcamccatatgacgtccctccatgccatgtcttgcatayagggctctgagtcaaaggtagtagggctactggcgagaaaaatgatcgcatcttctgcaggcaaarggcttcccattgaacatgcagcataagttgctcatgtgcaccacttatcccactatgtctatagaataaattatgctcaagaaatttgytctcaatggcctctttcagatagaagcaatgagtaagataaaacctgacactttatgtcaagtcacactcgtcaagtacagatttagtaatagtaatacttatcttttatgtagcactttacatttcccagttgctgcacagagattaattaatcagttcgacatatataagccaaccctaaagcacatattgaaggactgacagatgcct

SEQ ID NO: 19667 - DNA, 600 bp, Chicken  19866894229582_4
ctccacgtgccgctaagggctctgaaactgtatgtcacaacaagttcattagtctaaatgtccccagggagcatcgcctggatgccgggatgctccccagggagcatcamccatatgacgtccctccatgccatgtcttgcatayagggctctgagtcaaaggtagtagggctactggcgagaaaaatgatcgcatcttctgcaggcaaarggcttcccattgaacatgcagcataagttgctcatgtgcaccacttatcccactatgtctatagaataaattatgctcaagaaatttgytctcaatggcctctttcagatagaagcaatgagtaagataaaacctgacactttatgtcaagtcacactcgtcaagtacagatttagtaatagtaatacttatcttttatgtagcactttacatttcccagttgctgcacagagattaattaatcagttcgacatatataagccaaccctaaagcacatattgaaggactgacagatgcctgcgctgctacarcagcacaaaggcgaccgtctggccagcaaatgaacaggtacgctgaattgaataggaacaaggcactggcaatctgt

SEQ ID NO: 19668 - DNA, 593 bp, Chicken  19866894229582_5
aacatgcagcataagttgctcatgtgcaccacttatcccactatgtctatagaataaattatgctcaagaaatttgytctcaatggcctctttcagatagaagcaatgagtaagataaaacctgacactttatgtcaagtcacactcgtcaagtacagatttagtaatagtaatacttatcttttatgtagcactttacatttcccagttgctgcacagagattaattaatcagttcgacatatataagccaaccctaaagcacatattgaaggactgacagatgcctgcgctgctacarcagcacaaaggcgaccgtctggccagcaaatgaacaggtacgctgaattgaataggaacaaggcactggcaatctgttgagatttaagaggcaccacgttagctcagaggccttgctcttttccaacagaaaaaaaaaaaaaaagaaagacgtagtaagcacctccctctcttgtgactggcagagttactaattcttaggctgggaattaagaaataaaggtagacggttctgcttccagctttgtggcaccctgtttctgaagtcatagaatcacggaatgatttgggttt

SEQ ID NO: 19669 - DNA, 600 bp, Chicken  19866894229592_1
taaagtatacttaatgtgcctaaagatggctgaatacttccagtttgtaagatgtgtttttaatgagagcttcacttgatcacactgaatgcttctgatactgagtagataactgaattaagattagatagaaaagaataggggtacataaaacatagcaacatgagatgtccagtacacgtttaaagattttaatttttgctcagaaattatagactaaaagtgggaacagctcagaatcctggtatcagtgtctaaatatcatacatcattaaagcttacttgctcctttcccacttytgtttgtggatggtgatgccgagatattatttctccaaagaggaaaagaaattacagatattgtttacagaattttgaaatataccactgggatgacacagccgtgtgatttcattttaagtgcattttagagcaaagtgtttcttcatacatcacttacattatctaattatattctgctcttcatatctcatcaaacatgcaagctgttggcacagcaattccaagttgtataagatggaagtcgcaatttttataactataaatagttaatttactttcattctttttttcctctac

SEQ ID NO: 19670 - DNA, 599 bp, Chicken  19866894229596_1
  misc_feature (1)..(49): n is any nucleotide
nnnnnnnnnnnnnnnnnnnnnnnnnnnnnnnnnnnnnnnnnnnnnnnnncccagcacaggtcttgcaggccagggttctggctggaagaagttttgacatttgcaccctgtttacaagttgggaaactcatgtggatagaaattcaagagctcacaggagctttttgctgctgcagtattaggtagacctaagagatcgctgtaaaatgtcactaaggagatagtgggttttagtgacagcaaagtgcctgtgtgctctgccgagctcagctcatctgagaatagagcagtttgttcatytgcattwtaattattttatacaacaggtgcattcacttctcttcccacatgtcaatgtattactcgcagtgttcatcaagttctgaggttccatagaggaagatatcacttaagtacagttctgttgtaatacttgccatgaaagtcctgcagatgagctttactcacccttcagggcatagcttgcttctatttaggagtatgcttttgctrggctatgctgtaacagtcttcacctatgaaatactccacagacatcctcctgctcaagagctgcraagtggaggtgctttctcaag

SEQ ID NO: 19671 - DNA, 599 bp, Chicken  19866894229596_2
  misc_feature (1)..(42): n is any nucleotide
nnnnnnnnnnnnnnnnnnnnnnnnnnnnnnnnnnnnnnnnnncccagcacaggtcttgcaggccagggttctggctggaagaagttttgacatttgcaccctgtttacaagttgggaaactcatgtggatagaaattcaagagctcacaggagctttttgctgctgcagtattaggtagacctaagagatcgctgtaaaatgtcactaaggagatagtgggttttagtgacagcaaagtgcctgtgtgctctgccgagctcagctcatctgagaatagagcagtttgttcatytgcattwtaattattttatacaacaggtgcattcacttctcttcccacatgtcaatgtattactcgcagtgttcatcaagttctgaggttccatagaggaagatatcacttaagtacagttctgttgtaatacttgccatgaaagtcctgcagatgagctttactcacccttcagggcatagcttgcttctatttaggagtatgcttttgctrggctatgctgtaacagtcttcacctatgaaatactccacagacatcctcctgctcaagagctgcraagtggaggtgctttctcaaggagaaaa

SEQ ID NO: 19672 - DNA, 600 bp, Chicken  19866894229596_3
taaggagatagtgggttttagtgacagcaaagtgcctgtgtgctctgccgagctcagctcatctgagaatagagcagtttgttcatytgcattwtaattattttatacaacaggtgcattcacttctcttcccacatgtcaatgtattactcgcagtgttcatcaagttctgaggttccatagaggaagatatcacttaagtacagttctgttgtaatacttgccatgaaagtcctgcagatgagctttactcacccttcagggcatagcttgcttctatttaggagtatgcttttgctrggctatgctgtaacagtcttcacctatgaaatactccacagacatcctcctgctcaagagctgcraagtggaggtgctttctcaaggagaaaatccatcgtttaaccagtggaagacaaacatgccaaaacactgggaaaaaaaaatcatgaagttttgtctgctgaggcctgggctgtgcttgcaccttccaagtgcatccctgcacctccatcctacacacctacactgtgatgatgcttcatgccgtgtgatgctactcagcttactgggcagggctgtatggatagcatgcagagc

SEQ ID NO: 19673 - DNA, 600 bp, Chicken  19866894229596_4
agaatagagcagtttgttcatytgcattwtaattattttatacaacaggtgcattcacttctcttcccacatgtcaatgtattactcgcagtgttcatcaagttctgaggttccatagaggaagatatcacttaagtacagttctgttgtaatacttgccatgaaagtcctgcagatgagctttactcacccttcagggcatagcttgcttctatttaggagtatgcttttgctrggctatgctgtaacagtcttcacctatgaaatactccacagacatcctcctgctcaagagctgcraagtggaggtgctttctcaaggagaaaatccatcgtttaaccagtggaagacaaacatgccaaaacactgggaaaaaaaaatcatgaagttttgtctgctgaggcctgggctgtgcttgcaccttccaagtgcatccctgcacctccatcctacacacctacactgtgatgatgcttcatgccgtgtgatgctactcagcttactgggcagggctgtatggatagcatgcagagctctggattgcagcaatggctcaaaccttctcattgcagcacagaaggattggggttactcagtgc

SEQ ID NO: 19674 - DNA, 600 bp, Chicken  19866894229596_5
gttcctcctacacttcttgttgccttttacatggagctcattgcaccttggagggccagtggtatcctgggctccctcagaagaagggtggccagcaggaacagggaggtgattgattgtccacctctattctgccctcatgaggccccatctacagtactgtgtacaggtctggggccctcagcagaggaaggacgtggagctcttggagagggtccagaggaggccactaagatgatcagagggctggagcagctctcctgtgaggaaaggttgagggagctgggattgttcagcctrgagaagagaaggctgtgaggaaacctcattgcagccttccagtatttaaaaggggattataaaraggaggggaatcaactttttacaagggtagacactgataggaaagggggaatggttttaagctccaggaggggaggcttggattggctgtcagggggaagttcttcacagagagagcggtgaggtgctggcacagctgcccacacaggctgtgggtgctccatccctggaggcgttcatgcccaggttggatggggccctgggcagcctggtctggtgccagatctgaaggttggc

SEQ ID NO: 19675 - DNA, 600 bp, Chicken  19866894229596_6
tcctgggctccctcagaagaagggtggccagcaggaacagggaggtgattgattgtccacctctattctgccctcatgaggccccatctacagtactgtgtacaggtctggggccctcagcagaggaaggacgtggagctcttggagagggtccagaggaggccactaagatgatcagagggctggagcagctctcctgtgaggaaaggttgagggagctgggattgttcagcctrgagaagagaaggctgtgaggaaacctcattgcagccttccagtatttaaaaggggattataaaraggaggggaatcaactttttacaagggtagacactgataggaaagggggaatggttttaagctccaggaggggaggcttggattggctgtcagggggaagttcttcacagagagagcggtgaggtgctggcacagctgcccacacaggctgtgggtgctccatccctggaggcgttcatgcccaggttggatggggccctgggcagcctggtctggtgccagatctgaaggttggcggccctgtccgcggcagggaggttggagtctcttctcaagccgttccacgattctgtgacccca

SEQ ID NO: 19676 - DNA, 600 bp, Chicken  19866894229597_1
agagcacacagagcgcacagcccggctgcttctcgctcagcaaaccctcacagcccagctcccagcgggtcgtgatgacgtgcacagggatgtaaaacccaccgggatgcagaagccgtatttccagagcgcttttcagggagctgagcagctgctgcctcaggtttgtcctttccaggcagaacttgaggtcctccacagcaggctttgattctgggaaatctacagaccgagcagcgattagagacagcaccaggctccacggggagacagcgtggcaccaggaggtgaggacatggygagcacacatcgaccactcaatccaagcccagcagtgagtgcacacacagcgaatgatgggtgacaccaacctcgaataatgctgaacagctcctcgatcagcatgctggcgtagatgcggtagaagaacctctggacgtggcaccgccagcgcctcagggtgctgctggcttctgcagaggggcgagccaaggggccgtcctgcaggaacactctgctgagccagcccagcaccttctcgatccactgcaacagcagagggagagcacagggatggaggacgcctctgcacggcaggac

SEQ ID NO: 19677 - DNA, 600 bp, Chicken  19866894229598_1
cagtgaggtggcgccgccattttaggcgtctgtaaccggcggggcagcggtgagcggagctgggggcggtggaaggggttgttggcgagctgggtcgggccttctgcgctgctctgtgttcccttgggtggaacaccgctcatggggtcgccccagcggtactgagccctgctcggggaaggttcatgtcggcggggcgagatgtttccttagacggggcaggcggtggtgggaatggtgttctcgggagcacatactggtacggcagcgtgcggctcgtgttgaggctttcttgcagtyctgtaaagttacttatgtgttgtaggagtatattcaggttatagaagggcagaacttttcatggtgtcaggtgaatatattacaagcttttatgtatcagtgtttgtttgaccttagttggctctgtgtgttgttgataattgcactgagatttgaacagatcagctcaatgatctgcgtgtactctaaatagcagtaagtttatgcaaagtactgtctggatgctaagtgttaccatgatccaaaagtctgctccttctcctttggaacaagccaggtccttcagtgttagctctgggg

SEQ ID NO: 19678 - DNA, 600 bp, Chicken  19866894229604_1
aagagctgtcttgctatagtttttattctgcagatttggagggcaaggtgggggggggacataactaactttgcactgtcagaaggaagcacagaattgctgtcactgaaatcagtgtttgggatatctgtgaagcacattgcccctgacagtgcatgtctcacataaccttgagcacaccctaagaggagcatgaaagtggtctccctcagattggaagtacaaactaatgcagcactctaaagaatgtaaagccacatgcttaactctctcttcactctaacaccatttctgagatckttgtccgctatgccaagtgacacaataacaaggtgtcaatgatttatttaaagacatktgtgggaaagttaggttcatcttatggtcaggctaaatttccagctatgttaacgtagttttgttgtgggtcactgtacacaaatggcaaggcttcaaactgagagttaaattaattttaaagctgtagacaaagatcaaatacaaaagcacttcgcatttgaagcataagactttaaactgagagtttaaaatgtgaggtcctcatatctggacatatttcatggctctgcttcccacctc

SEQ ID NO: 19679 - DNA, 600 bp, Chicken  19866894229604_2
acataactaactttgcactgtcagaaggaagcacagaattgctgtcactgaaatcagtgtttgggatatctgtgaagcacattgcccctgacagtgcatgtctcacataaccttgagcacaccctaagaggagcatgaaagtggtctccctcagattggaagtacaaactaatgcagcactctaaagaatgtaaagccacatgcttaactctctcttcactctaacaccatttctgagatckttgtccgctatgccaagtgacacaataacaaggtgtcaatgatttatttaaagacatktgtgggaaagttaggttcatcttatggtcaggctaaatttccagctatgttaacgtagttttgttgtgggtcactgtacacaaatggcaaggcttcaaactgagagttaaattaattttaaagctgtagacaaagatcaaatacaaaagcacttcgcatttgaagcataagactttaaactgagagtttaaaatgtgaggtcctcatatctggacatatttcatggctctgcttcccacctcttgagtgaagctatcaagccattgaaatcatgttgtgttgcagtattctggtctctga

SEQ ID NO: 19680 - DNA, 548 bp, Chicken  19866894229606_1
atacaaaacttaaacccctaaattcctaactgtaactgaatggaaagtctctgcgaggcaaaatgacttttatttattttccaataaccatagatgtacttccacaactggtcattttgaaacttaaaaactctgggctgctgtctgttaaataaaagtgttaccacaaatgactttgtcaaaattctccttttcttcagtgagaaaacaatcattacagtagtagaagaaatagcagagcagagatattttcaagattcaagacattaacaagattgttaggaagcaaagctatgactycttacccaaggtgaaggagagcccaggagatggccttcaaagttccagaatttctgtggaattttattgaagcctgctgaaaattccctatagctctgctccttgcctgatccctgtttccccaaggtcccctcatctagatgctttctcgctcctgttctgctgataaccttcatctactcacctctttcgtgagaaaagaataagattttctcccattattccacaatttttctctcacattctaa

SEQ ID NO: 19681 - DNA, 423 bp, Chicken  19866894229613_1
cttggcgaatagcgtgcgctacgccgctgccgcagggcgctgcgtgcagcagcccggctgtgtggttctggtctgatttctctgatcagtggcactgcgtttttctttctgatcctttaaggccctgcaaacgtgtgtgctaggagccacctcatgtctatagtgcagtcccagggccgtgatcctgtgtttggtgtcagcagggcatgctgagccagttctgagctctggggcaattactgaagctttaacattcatccctaaccatttcagttttaggcgatcctgttttgctggacmtatcttcattttggtggctcaaggatttgcaaacagtgagtcataactccctgggatcgaaattgcagctgctggggcaccaagcattgaaaagtgtggtccaagataaagcaaagtaaacct

SEQ ID NO: 19682 - DNA, 599 bp, Chicken  19866894229617_1
  misc_feature (1)..(52): n is any nucleotide
nnnnnnnnnnnnnnnnnnnnnnnnnnnnnnnnnnnnnnnnnnnnnnnnnnnnattttcccagaatttcttacatttctacattatcatttccagctgctccattgttcattcctgtgctgttacataaaacctgttttcattactaatgaggtacgtaatcacactatgaagttctgcttatgcagtacacctgaaaaaagaatcacaatgctgattctatctcaccattgatttttttaggggtgtgtatatacatatatatgtgtattttatatacattccttggcaccagtctacartttctagattctgattcatagttctaagtatcaactacccctttggtgctatgggtttatttagtttagccaccctcccttgcccttaatgaattctctctttaatcagaagtgtcacagttattctcaaaagctggcttcttcagcacgccaagcatacagaaatatatacrcaygyacacccagactttctaaagtatcattcttctcacagttcagaatttagccagctcatgttcttttgtacttctgttaattactccctttggtacttaagctatcattaattttctattcat

SEQ ID NO: 19683 - DNA, 600 bp, Chicken  19866894229617_2
tctgcttatgcagtacacctgaaaaaagaatcacaatgctgattctatctcaccattgatttttttaggggtgtgtatatacatatatatgtgtattttatatacattccttggcaccagtctacartttctagattctgattcatagttctaagtatcaactacccctttggtgctatgggtttatttagtttagccaccctcccttgcccttaatgaattctctctttaatcagaagtgtcacagttattctcaaaagctggcttcttcagcacgccaagcatacagaaatatatacrcaygyacacccagactttctaaagtatcattcttctcacagttcagaatttagccagctcatgttcttttgtacttctgttaattactccctttggtacttaagctatcattaattttctattcatctgtgaagatgaggtctaatacagaattctctcaaaaccaaattttgtagaaagaaattaatcatctacatacatgcactaaaaaaaagaaaaggaaaagaaaaagaaaaagaaaagaaaagaaattgaagtagtgctttataaggcactgtgattgcaataacatcgtacaaa

SEQ ID NO: 19684 - DNA, 600 bp, Chicken  19866894229617_3
gcttatgcagtacacctgaaaaaagaatcacaatgctgattctatctcaccattgatttttttaggggtgtgtatatacatatatatgtgtattttatatacattccttggcaccagtctacartttctagattctgattcatagttctaagtatcaactacccctttggtgctatgggtttatttagtttagccaccctcccttgcccttaatgaattctctctttaatcagaagtgtcacagttattctcaaaagctggcttcttcagcacgccaagcatacagaaatatatacrcaygyacacccagactttctaaagtatcattcttctcacagttcagaatttagccagctcatgttcttttgtacttctgttaattactccctttggtacttaagctatcattaattttctattcatctgtgaagatgaggtctaatacagaattctctcaaaaccaaattttgtagaaagaaattaatcatctacatacatgcactaaaaaaaagaaaaggaaaagaaaaagaaaaagaaaagaaaagaaattgaagtagtgctttataaggcactgtgattgcaataacatcgtacaaattg

SEQ ID NO: 19685 - DNA, 600 bp, Chicken  19866894229617_4
ttatgcagtacacctgaaaaaagaatcacaatgctgattctatctcaccattgatttttttaggggtgtgtatatacatatatatgtgtattttatatacattccttggcaccagtctacartttctagattctgattcatagttctaagtatcaactacccctttggtgctatgggtttatttagtttagccaccctcccttgcccttaatgaattctctctttaatcagaagtgtcacagttattctcaaaagctggcttcttcagcacgccaagcatacagaaatatatacrcaygyacacccagactttctaaagtatcattcttctcacagttcagaatttagccagctcatgttcttttgtacttctgttaattactccctttggtacttaagctatcattaattttctattcatctgtgaagatgaggtctaatacagaattctctcaaaaccaaattttgtagaaagaaattaatcatctacatacatgcactaaaaaaaagaaaaggaaaagaaaaagaaaaagaaaagaaaagaaattgaagtagtgctttataaggcactgtgattgcaataacatcgtacaaattgga

SEQ ID NO: 19686 - DNA, 599 bp, Chicken  19866894229619_1
  misc_feature (1)..(43): n is any nucleotide
nnnnnnnnnnnnnnnnnnnnnnnnnnnnnnnnnnnnnnnnnnntgcagccttccagtacttgaagggagcatataagcaggagggggaagagctgtttacaagggtggatagtgataggacaaggggggaatggtcttaaacaggggaggtgtaggttggatattaggagaaagtttttcacacagagggtggtgacacactggaacaggttgcccaaggaggttttggatgcctcatctctggatgcattcaaggtcaggctggatgtggctttgggcagcctggtctggaggttgacractctgcacatggcaaggggtttgaaactagaagatctttgaggtccttttcaacccaggccattctatgatatgattctatgatataagwcacataatctctaatgtctgcttgagtttgaaggacatcatttttaatgtgggatttatataggtttgcctggctgattaacctgcagatttctgaaagagctgaggatgagacaaacctatagtaagtctgcagtactgttatggaagacaaagaaatatgtagtgattacatcttaccaaatacatattttcaacagagtggtcag

SEQ ID NO: 19687 - DNA, 600 bp, Chicken  19866894229619_2
gctgtttacaagggtggatagtgataggacaaggggggaatggtcttaaacaggggaggtgtaggttggatattaggagaaagtttttcacacagagggtggtgacacactggaacaggttgcccaaggaggttttggatgcctcatctctggatgcattcaaggtcaggctggatgtggctttgggcagcctggtctggaggttgacractctgcacatggcaaggggtttgaaactagaagatctttgaggtccttttcaacccaggccattctatgatatgattctatgatataagwcacataatctctaatgtctgcttgagtttgaaggacatcatttttaatgtgggatttatataggtttgcctggctgattaacctgcagatttctgaaagagctgaggatgagacaaacctatagtaagtctgcagtactgttatggaagacaaagaaatatgtagtgattacatcttaccaaatacatattttcaacagagtggtcagtaaaatgtgattttgatttaaaaatagaaaataagcaaacaaacaaacaaaaaagaaaattaataaagtctaaggttctacataacctgata

SEQ ID NO: 19688 - DNA, 600 bp, Chicken  19866894229627_1
cacccacgtatacacacatgtatacgccagcagaccattcacccccgcgcctccgagttcctttccagctctgctctccggcaaccgagtggttaaacataactaatgaggctctaaatggcagccggggtttatcataaatatcgcagcccttcctcgatgcctgcagtttagctccgaatagataccaaagcaatatatggacagcgagcggtcatttaataaatacatatacacagagggagatgtatggcgatgtattcctcgtgttttccaaccaaatggaagctctgattcttyggggctgagaacacctctgcgtttatgcacccaaataaatacctccacacrcacacacacacacgcacacacacacacatcgatttcggctccgcccgcaccgggatttgcagtcggaccgtccataaatccaatgcacgcgttattgttaccgataagggcagcagaaaggagctcggggtgttttattcgctataattaaactgctccggagggagagcccacccttccgcgcccccaccccggcgaaaagttgccgatgtccgatcattcccgacgcgatccctccctccaacaccg

SEQ ID NO: 19689 - DNA, 600 bp, Chicken  19866894229627_2
tccgagttcctttccagctctgctctccggcaaccgagtggttaaacataactaatgaggctctaaatggcagccggggtttatcataaatatcgcagcccttcctcgatgcctgcagtttagctccgaatagataccaaagcaatatatggacagcgagcggtcatttaataaatacatatacacagagggagatgtatggcgatgtattcctcgtgttttccaaccaaatggaagctctgattcttyggggctgagaacacctctgcgtttatgcacccaaataaatacctccacacrcacacacacacacgcacacacacacacatcgatttcggctccgcccgcaccgggatttgcagtcggaccgtccataaatccaatgcacgcgttattgttaccgataagggcagcagaaaggagctcggggtgttttattcgctataattaaactgctccggagggagagcccacccttccgcgcccccaccccggcgaaaagttgccgatgtccgatcattcccgacgcgatccctccctccaacaccgggctgttttgtcacatcaaagccaccatcttcgttcccgaggggggagaac

SEQ ID NO: 19690 - DNA, 600 bp, Chicken  19866894229627_3
ccagctctgctctccggcaaccgagtggttaaacataactaatgaggctctaaatggcagccggggtttatcataaatatcgcagcccttcctcgatgcctgcagtttagctccgaatagataccaaagcaatatatggacagcgagcggtcatttaataaatacatatacacagagggagatgtatggcgatgtattcctcgtgttttccaaccaaatggaagctctgattcttyggggctgagaacacctctgcgtttatgcacccaaataaatacctccacacrcacacacacacargcacacacacacacatcgatttcggctccgcccgcaccgggatttgcagtcggaccgtccataaatccaatgcacgcgttattgttaccgataagggcagcagaaaggagctcggggtgttttattcgctataattaaactgctccggagggagagcccacccttccgcgcccccaccccggcgaaaagttgccgatgtccgatcattcccgacgcgatccctccctccaacaccgggctgttttgtcacatcaaagccaccatcttcgttcccgaggggggagaacgccccgaatgagc

SEQ ID NO: 19691 - DNA, 600 bp, Chicken  19866894229627_4
cagctctgctctccggcaaccgagtggttaaacataactaatgaggctctaaatggcagccggggtttatcataaatatcgcagcccttcctcgatgcctgcagtttagctccgaatagataccaaagcaatatatggacagcgagcggtcatttaataaatacatatacacagagggagatgtatggcgatgtattcctcgtgttttccaaccaaatggaagctctgattcttyggggctgagaacacctctgcgtttatgcacccaaataaatacctccacacrcacacacacacacrcacacacacacacatcgatttcggctccgcccgcaccgggatttgcagtcggaccgtccataaatccaatgcacgcgttattgttaccgataagggcagcagaaaggagctcggggtgttttattcgctataattaaactgctccggagggagagcccacccttccgcgcccccaccccggcgaaaagttgccgatgtccgatcattcccgacgcgatccctccctccaacaccgggctgttttgtcacatcaaagccaccatcttcgttcccgaggggggagaacgccccgaatgagcc

SEQ ID NO: 19692 - DNA, 600 bp, Chicken  19866894229629_1
tctttaggtagtacctagacatagatagagctgttaaaagccaagatgtttgttgtgtattaatcaactagagatatagtgatagcagaagaaatttctcttaactgtaactgctcagtagtagcaattagctgttgcatcagtagtgttttttcttctttcttgcatgtttttttctacagtggtcacaagctttttcttccattgtttgaggcttctgtagtcagtctcatttttgattaaatgtgtcagatgttcataattctagttgctaggagtttgttcctcatgtttctgccygggactctgttttcggcatgtgaagcctcttgggtaaggatcgtgcctctctctgtttgtacactgtctagcacgccataagagctagtggaagacaaaatacagagcacaggataaaatttgtgttgaaatttgtcatgatgttttattttcttaagtaaaagaacctgacaaaaggctattagccaacagatgcaactagatgaattgcagttatgagtgatgtggcatacagcctgtcaacaagtgttcagaagcatgttttttctttttttcttttttttttcttttttttgagtc

SEQ ID NO: 19693 - DNA, 599 bp, Chicken  19866894229630_1
  misc_feature (1)..(69): n is any nucleotide
nnnnnnnnnnnnnnnnnnnnnnnnnnnnnnnnnnnnnnnnnnnnnnnnnnnnnnnnnnnnnnnnnnnnntccatgtttgggtaaagttgaaaagaaaacagctgagtagcaaagtatctgggataaaatgttctccagcaatacctacttacaatgctcaccggaaataaaggtgtaaagacggccctttagccaaaaccaggtctgtggcagggctctatgttcaagatgaaaatgggaaacagtgtcttggaaaattactacaaattacaggctcttagaacaaataaagaacaaatwtttttgccatggattatttcagtcaatgtgaaaaagaaaaaaaaaaaacaacagaaggaataagactatgtttcaataattgtactacctgaaaggcatacacatgattagactactctaatcgaattcattraagagtgggattcattttaagtgcaaaagtatgtatggctctatgacagagttagtccatagtgcttcccacttttcctatacatctgagtgagaattgcctgcaattgtgtgagagaagttccttgtttaccttactggttcagatgacaaattggcttcctctt

SEQ ID NO: 19694 - DNA, 600 bp, Chicken  19866894229630_2
tccagcaatacctacttacaatgctcaccggaaataaaggtgtaaagacggccctttagccaaaaccaggtctgtggcagggctctatgttcaagatgaaaatgggaaacagtgtcttggaaaattactacaaattacaggctcttagaacaaataaagaacaaatwtttttgccatggattatttcagtcaatgtgaaaaagaaaaaaaaaaaacaacagaaggaataagactatgtttcaataattgtactacctgaaaggcatacacatgattagactactctaatcgaattcattraagagtgggattcattttaagtgcaaaagtatgtatggctctatgacagagttagtccatagtgcttcccacttttcctatacatctgagtgagaattgcctgcaattgtgtgagagaagttccttgtttaccttactggttcagatgacaaattggcttcctcttgaaattcaaatgaaaaaactataatgttgcactttgtaaactattatcaaaagataaatcaaaaatcattttctaattagagtttttcagggttctattcactgtaaatcttgggtttttcagggagcaattat

SEQ ID NO: 19695 - DNA, 600 bp, Chicken  19866894229631_1
tagtagacttggccccgtgagctgccactgagattttcaaattgctttccctggaacaactaaatgtttgcaagaccatacttaaattgcatgtgcttaacttcagcaaactaaaatgtcaggacagcttgatataataaaacagatccaattttgtaataatcaagtcaaattgactgatgattttactaatgctactaaagtaacatttgcctaatatttgctttattacctgataaaatctttcagatttgttttattttggatgtccagtaattgagagaaaattatacaaaaaamaaaaaacaaaaaaaaacaaaacaaaaaaaaaaamcaaaccaaaaaacacatattaagagatctaaatttagatctttccagttgccaaactgttaacactttttaaagcacagtgaaacttgctcaaagatgcgaaggttagtgttgggaataagagtctgcttctttaacgcagtcatctcttaaaacagaatcatagcttaccaggattttggtggactcatcagtaatgtgattgcaccctcgaattgctcactatcacagtcagatttgcccctatgcacgtctcaattttatcct

SEQ ID NO: 19696 - DNA, 600 bp, Chicken  19866894229631_2
tttcaaattgctttccctggaacaactaaatgtttgcaagaccatacttaaattgcatgtgcttaacttcagcaaactaaaatgtcaggacagcttgatataataaaacagatccaattttgtaataatcaagtcaaattgactgatgattttactaatgctactaaagtaacatttgcctaatatttgctttattacctgataaaatctttcagatttgttttattttggatgtccagtaattgagagaaaattatacaaaaaamaaaaaacaaaaaaaaacaaaacaaaaaaaaaaamcaaaccaaaaaacacatattaagagatctaaatttagatctttccagttgccaaactgttaacactttttaaagcacagtgaaacttgctcaaagatgcgaaggttagtgttgggaataagagtctgcttctttaacgcagtcatctcttaaaacagaatcatagcttaccaggattttggtggactcatcagtaatgtgattgcaccctcgaattgctcactatcacagtcagatttgcccctatgcacgtctcaattttatcctgttcaaataaatacagaagtaccaggtattatta

SEQ ID NO: 19697 - DNA, 600 bp, Chicken  19866894229632_1
atgtttatgtgtgagcgctgcagaaatgcagcttccagagggaaaggttttggccacttgacctgatacagaacagccaagtgatgtgtctgcattttgctttctctaggagctctactgctctatacagctgaaaatgtgggcacttgattctgccctatacagtgagggaaagaaagggtagtctttcatgcttatacctgtgtgtaggaactgctgagtcatggcctgaaccactgattgagcacctggggaaactatcaggtcggccctgggagcacaggtgaaggcagttcatcygtgcaaccagagggggtggtgcctggctgcctctctcttaccccttatttaaggggtcactgccactggggaaggatctcttctggagatccctcattggtgaagttttcccctgcaaacctagagtcttttgatatgggtgagcaattttcttcccttcctgtatagcatctctctattgcgtcagtcctttcatcatcacacctttgctgtaacatctttcccattgtattggtctgtccagttactgcatcctgccagctcgtctcctcagccacctcccacagcccttcctcagtt

SEQ ID NO: 19698 - DNA, 599 bp, Chicken  19866894229637_1
  misc_feature (1)..(4): n is any nucleotide
nnnnacatatcaccactgcaaactagggtagctggggagtggtgcattctgtaggatgacccatagagaagggttccagtggctaagcttgctagagagagcatctttgtgttatagatttgtagtagcattttttatttgatctcaagaacatcttacagagggaagatcacctcctccattttggcaaatcttccaggcacaaaggagtctttggttgaaaaatgatgtgatccaacaaactatcatgacaagtacttgcatgtcagctgcagattacggtccattagatttgggtgygcagtggagagagacctacctttgataactcaaagacaggaggtacactatgtgggccataaccaggtattgtaatatgcttcaaagaatctgtggacgagaggatttcttgtttattaccagcaatgtcaaatgacaggtgcgaaataaattttatctaaaaagcttgtgtgatggtcaagtttcggaggtgttgagaaccaaacactttgacattacactctgtgtagtcattccagtggttcataaacacctagttctggcagtctgaatccagacatcgaggaaaaaatctgtgg

SEQ ID NO: 19699 - DNA, 600 bp, Chicken  19866894229640_1
ttgaaaaaaagtaatcacttgagtttgctataatgctgtttaatcacgagcatactttacactgctcgccaacatatgcaaaagcaaattgtatctcaattccaatatatttaaatcggaaacagtgaaaattgtctgatattgtttgctctaaacttttaagtcaactcctaaggtggtggtaaagccttccatgcccttgttctttctgctttgaagtgtattgtctcaaagttaattcactgttgtttctgatgattgttttaaccagaacaggaatttcctgtttcagatgccttsctaagtggcttccgaagggtcatgtttaaaataaaacaacacaaagtacagcgttccttcagaagctttggttgatgcttttctatttcattaaggaaaatgtgagctaatgagggacaaaacagagcaactaatatttatgagtacatgggcagtaygtaaccattttgttgcgttgaagaaatggtagcccatgaataacttctgatttatattgccagaatagctgttttgaggctatatacagtgtcaaatgttcttccttggtttcacacagtttaaacgcagcattscagatga

SEQ ID NO: 19700 - DNA, 600 bp, Chicken  19866894229640_2
ttaagtcaactcctaaggtggtggtaaagccttccatgcccttgttctttctgctttgaagtgtattgtctcaaagttaattcactgttgtttctgatgattgttttaaccagaacaggaatttcctgtttcagatgccttsctaagtggcttccgaagggtcatgtttaaaataaaacaacacaaagtacagcgttccttcagaagctttggttgatgcttttctatttcattaaggaaaatgtgagctaatgagggacaaaacagagcaactaatatttatgagtacatgggcagtaygtaaccattttgttgcgttgaagaaatggtagcccatgaataacttctgatttatattgccagaatagctgttttgaggctatatacagtgtcaaatgttcttccttggtttcacacagtttaaacgcagcattscagatgagaatttggtaatattctcttttatgatagtaagtcggtattaatagtgcattggtgatgttctcaaacgtgacagtcaaaatgaagcacttacccagagcagaatttgtactctcagatctgttttaggtgctttatgcagcaaggtgagaatacacg

SEQ ID NO: 19701 - DNA, 600 bp, Chicken  19866894229640_3
tgccttsctaagtggcttccgaagggtcatgtttaaaataaaacaacacaaagtacagcgttccttcagaagctttggttgatgcttttctatttcattaaggaaaatgtgagctaatgagggacaaaacagagcaactaatatttatgagtacatgggcagtaygtaaccattttgttgcgttgaagaaatggtagcccatgaataacttctgatttatattgccagaatagctgttttgaggctatatacagtgtcaaatgttcttccttggtttcacacagtttaaacgcagcattscagatgagaatttggtaatattctcttttatgatagtaagtcggtattaatagtgcattggtgatgttctcaaacgtgacagtcaaaatgaagcacttacccagagcagaatttgtactctcagatctgttttaggtgctttatgcagcaaggtgagaatacacgtgtgagaggatgtgtgacagagaactgagtattgtcagaatgcccgcaatcatccacgctcagtggataagtcagtgatgccgcattttgtctttttaaaggatttataggtttgtgggtggtcttcagcctctg

SEQ ID NO: 19702 - DNA, 600 bp, Chicken  19866894229642_1
tctgggcagcctgttctggtgcgtcaccaccctctgagtaaaaagcttcctcttaataactaacctaaacctcccctgtcttagtttaaaaccatttcctcatcctgagtagctcttgatattcccaacacctagcccttcagggagcttcgggacctagtggcttgtaacatccaagacagtaaaaataaatgagacaataggctgcagtgattatatttcaaaaatgcacaaattccagagttactggcacttactacctgtacctggtcatttctactgctgttttaacgttctttrtaattctgcttttctgtgacatttagacaaagggacatctctgctcagtcagggtcctcagagcactactgtgatactggcagtacactttataaatcaaaacagagtctgaataattagcaacataagagaaaactgtgggagaacatggaaaaggaagggaaaatacagggctggtcatgttgaaaagcgtctggctgtgcaacagaagaagaatcatctgaaactagaaagataggtgagtactggaacagtaacacaaagccagtctgcacgtactgactctgcatgaccagcaac

SEQ ID NO: 19703 - DNA, 600 bp, Chicken  19866894229642_2
gggatggagttgtctcggtttcaggtaggacagagttgattttcttcatagtgtatggtatgatgctatgctttggctttaggagaaaaacaatgttgattatgcatcgatgttttagttgttgctgaaaagagccaagaacactccagtttttcagcttcacatactgtcctgccagtgaagggggtggaggtgggcacaaggagctggcaggggtaaaacttggacagatgacttaaactggtcaagggggtattccataccatatgatatcatgtgaaaaagatacaaaactgaggrgagttgaccagggggctgctgctgctaggggactggctgggcattgcttggcaggtggtgagcaattgctttatacatcacttgttttgtgtatatgtatatagataattatcattgctgctacttcttktctttttcttagtaaatagtttttatctcaatccaaaagttctaactyttttcccctgattctttcccataccccaccaggaggagaaggagtgagcaaaaggctgtgtggtgtttgactgcttgaggggttacaccacaagggtgtacctgtgcaggaaaaaggcctac

SEQ ID NO: 19704 - DNA, 600 bp, Chicken  19866894229642_3
agagccaagaacactccagtttttcagcttcacatactgtcctgccagtgaagggggtggaggtgggcacaaggagctggcaggggtaaaacttggacagatgacttaaactggtcaagggggtattccataccatatgatatcatgtgaaaaagatacaaaactgaggrgagttgaccagggggctgctgctgctaggggactggctgggcattgcttggcaggtggtgagcaattgctttatacatcacttgttttgtgtatatgtatatagataattatcattgctgctacttcttktctttttcttagtaaatagtttttatctcaatccaaaagttctaactyttttcccctgattctttcccataccccaccaggaggagaaggagtgagcaaaaggctgtgtggtgtttgactgcttgaggggttacaccacaagggtgtacctgtgcaggaaaaaggcctaccagaggatgctcctgtggtactaccactcccttcaccctctcctcagcagctactgtcttttctccagagcagtagcaatagtcaaaaacatgatttctctagtcattctacatttaaaggaagctcaac

SEQ ID NO: 19705 - DNA, 600 bp, Chicken  19866894229642_4
tgaagggggtggaggtgggcacaaggagctggcaggggtaaaacttggacagatgacttaaactggtcaagggggtattccataccatatgatatcatgtgaaaaagatacaaaactgaggrgagttgaccagggggctgctgctgctaggggactggctgggcattgcttggcaggtggtgagcaattgctttatacatcacttgttttgtgtatatgtatatagataattatcattgctgctacttcttktctttttcttagtaaatagtttttatctcaatccaaaagttctaactyttttcccctgattctttcccataccccaccaggaggagaaggagtgagcaaaaggctgtgtggtgtttgactgcttgaggggttacaccacaagggtgtacctgtgcaggaaaaaggcctaccagaggatgctcctgtggtactaccactcccttcaccctctcctcagcagctactgtcttttctccagagcagtagcaatagtcaaaaacatgatttctctagtcattctacatttaaaggaagctcaacagagcaacaacaaaaccactatgcattaagcattaattttgacctcgc

SEQ ID NO: 19706 - DNA, 600 bp, Chicken  19866894229642_5
cttttctccagagcagtagcaatagtcaaaaacatgatttctctagtcattctacatttaaaggaagctcaacagagcaacaacaaaaccactatgcattaagcattaattttgacctcgccaaacatgcaactccttcttcatttcatgctctcccactgccactttttgcataaaacaagcctttaggttttcctgcttgcccatttttttttttcctgaagaagtaaataatctttacaaccagcaacggcaaagaagagatggaaaatgacagctgaccaaaagatctgaacacaygttttcattccctccagtgatagacagatggcacaagacaagtgattcagagccaatgactttaagacaaagtgraaaagaatactgagcaaccaacctagttgtctacaggctattccacaacataaattactgatttttaaccaaggaaccccatctaatttgaaggggttccggaacaagtttctaattcaccccaaaccataaaatatgcagtgtacacagccaaacttgcaggaccatagtgtaaagcagaagcttacttttgccagctggtatataatttattgcattatctca

SEQ ID NO: 19707 - DNA, 600 bp, Chicken  19866894229642_6
agcaacaacaaaaccactatgcattaagcattaattttgacctcgccaaacatgcaactccttcttcatttcatgctctcccactgccactttttgcataaaacaagcctttaggttttcctgcttgcccatttttttttttcctgaagaagtaaataatctttacaaccagcaacggcaaagaagagatggaaaatgacagctgaccaaaagatctgaacacaygttttcattccctccagtgatagacagatggcacaagacaagtgattcagagccaatgactttaagacaaagtgraaaagaatactgagcaaccaacctagttgtctacaggctattccacaacataaattactgatttttaaccaaggaaccccatctaatttgaaggggttccggaacaagtttctaattcaccccaaaccataaaatatgcagtgtacacagccaaacttgcaggaccatagtgtaaagcagaagcttacttttgccagctggtatataatttattgcattatctcaattttttttccttgtaattttcttaccccacctaactcttgagcagttttctctttaaactttagacactgaaat

SEQ ID NO: 19708 - DNA, 600 bp, Chicken  19866894229651_1
ataagggctctaggctgagattccagccctgaggcctcctggcctcctgtaggcattggggtagggattgttgggtttcattatggcacataggacaggggatgccaccagaatgtcctgataaaggctgtagggtgcacgtgaccccctcagggtcttccccagctcttgcctccggtgtgtgcttcctttggcagggatcagcatggagcagcagagtgcccaggaggagtgggaggcagtggaggatatccagtcaggtacaggtccaagaagtgtgtggggatgggggcacagctyacagagggtctggggaggggcatggttggggtggtggaggagagctggggaaagggcagaagggctgggaggaggagtgggctkcaggctcccttcattccccaccatcctaagccttggtgttactgcagcaccgaggtgtgcagcactgggtctccccaggatgcagcggctgctctggggtcaggcagaactggttgtggcactcrttgccctggagcggatgcagggctgacgctgccctgtgccattctgcagtgctgckggggagatcagctggtcctgtgcccctcatatcct

SEQ ID NO: 19709 - DNA, 600 bp, Chicken  19866894229651_2
ggcacataggacaggggatgccaccagaatgtcctgataaaggctgtagggtgcacgtgaccccctcagggtcttccccagctcttgcctccggtgtgtgcttcctttggcagggatcagcatggagcagcagagtgcccaggaggagtgggaggcagtggaggatatccagtcaggtacaggtccaagaagtgtgtggggatgggggcacagctyacagagggtctggggaggggcatggttggggtggtggaggagagctggggaaagggcagaagggctgggaggaggagtgggctkcaggctcccttcattccccaccatcctaagccttggtgttactgcagcaccgaggtgtgcagcactgggtctccccaggatgcagcggctgctctggggtcaggcagaactggttgtggcactcrttgccctggagcggatgcagggctgacgctgccctgtgccattctgcagtgctgckggggagatcagctggtcctgtgcccctcatatccttcaatgaagcgctgcagttcttccagaccacagacctgtcygagtgcagggtatgtgcggggccagccgatccaaccttcactc

SEQ ID NO: 19710 - DNA, 600 bp, Chicken  19866894229651_3
agcagcagagtgcccaggaggagtgggaggcagtggaggatatccagtcaggtacaggtccaagaagtgtgtggggatgggggcacagctyacagagggtctggggaggggcatggttggggtggtggaggagagctggggaaagggcagaagggctgggaggaggagtgggctkcaggctcccttcattccccaccatcctaagccttggtgttactgcagcaccgaggtgtgcagcactgggtctccccaggatgcagcggctgctctggggtcaggcagaactggttgtggcactcrttgccctggagcggatgcagggctgacgctgccctgtgccattctgcagtgctgckggggagatcagctggtcctgtgcccctcatatccttcaatgaagcgctgcagttcttccagaccacagacctgtcygagtgcagggtatgtgcggggccagccgatccaaccttcactccagagttgttccctgcctcgtgctctctggttgggcagctcygtcttgtgctcctctttcccattgcttctgccctccctcagccaagctctgtgcgatccctttccctcccagctcacctgctg

SEQ ID NO: 19711 - DNA, 600 bp, Chicken  19866894229651_4
ggtccaagaagtgtgtggggatgggggcacagctyacagagggtctggggaggggcatggttggggtggtggaggagagctggggaaagggcagaagggctgggaggaggagtgggctkcaggctcccttcattccccaccatcctaagccttggtgttactgcagcaccgaggtgtgcagcactgggtctccccaggatgcagcggctgctctggggtcaggcagaactggttgtggcactcrttgccctggagcggatgcagggctgacgctgccctgtgccattctgcagtgctgckggggagatcagctggtcctgtgcccctcatatccttcaatgaagcgctgcagttcttccagaccacagacctgtcygagtgcagggtatgtgcggggccagccgatccaaccttcactccagagttgttccctgcctcgtgctctctggttgggcagctcygtcttgtgctcctctttcccattgcttctgccctccctcagccaagctctgtgcgatccctttccctcccagctcacctgctggcttttctcccaggagaccaacgcgccctcatttactttgcctgttctcctctctg

SEQ ID NO: 19712 - DNA, 600 bp, Chicken  19866894229651_5
gagctggggaaagggcagaagggctgggaggaggagtgggctkcaggctcccttcattccccaccatcctaagccttggtgttactgcagcaccgaggtgtgcagcactgggtctccccaggatgcagcggctgctctggggtcaggcagaactggttgtggcactcrttgccctggagcggatgcagggctgacgctgccctgtgccattctgcagtgctgckggggagatcagctggtcctgtgcccctcatatccttcaatgaagcgctgcagttcttccagaccacagacctgtcygagtgcagggtatgtgcggggccagccgatccaaccttcactccagagttgttccctgcctcgtgctctctggttgggcagctcygtcttgtgctcctctttcccattgcttctgccctccctcagccaagctctgtgcgatccctttccctcccagctcacctgctggcttttctcccaggagaccaacgcgccctcatttactttgcctgttctcctctctgcagaagaagatccaagcaacagtgcgcaggcagggcctgactgctctgcttcacttcctctttgggcccccccggc

SEQ ID NO: 19713 - DNA, 600 bp, Chicken  19866894229651_6
tgcagcaccgaggtgtgcagcactgggtctccccaggatgcagcggctgctctggggtcaggcagaactggttgtggcactcrttgccctggagcggatgcagggctgacgctgccctgtgccattctgcagtgctgckggggagatcagctggtcctgtgcccctcatatccttcaatgaagcgctgcagttcttccagaccacagacctgtcygagtgcagggtatgtgcggggccagccgatccaaccttcactccagagttgttccctgcctcgtgctctctggttgggcagctcygtcttgtgctcctctttcccattgcttctgccctccctcagccaagctctgtgcgatccctttccctcccagctcacctgctggcttttctcccaggagaccaacgcgccctcatttactttgcctgttctcctctctgcagaagaagatccaagcaacagtgcgcaggcagggcctgactgctctgcttcacttcctctttgggcccccccggctccagcagcagctgcagggcgagcgggacctggctctcgccattgctcagtggtgagtgttccccctcatgtcccccaagctgca

SEQ ID NO: 19714 - DNA, 600 bp, Chicken  19866894229653_1
tgttctctgtgcagcaggttaatctgtggcctttggtgtctcaggaacctactaaggcagagacttagactgctaagaagagtgacgatcggatgtgtatattaacctcatctacagtaatgcattctgtcatatcccaggaggcctcattccctgctaggacaaggcaggggctgaattgtgtgaggagctgtatgttgatgtatggtaatgctggtgtacagtagtgctggtggctgatttccctcaggcattttaatactgtttgctggtgtggaggaaagattattggtctagatmtgaggtaggtctgtcttggtacatgtaaaatcatcttgcttaccttgttgaccttactggtgctaaaacaaggttctaytgagacattaatcctcagtctacagaagatggggtgatgtgatgtgctgagggaaagaagttgagtactgaagttcctagctgtgtgctgggcatgcagaagaatctgagatagctgtcagaaggcagtgtagtaggtgtgatacgcctgcagtaagtggtgtgtttggacgaaactcaacagaaggactcaaagttggagttattgtgagtggtctgtag

SEQ ID NO: 19715 - DNA, 600 bp, Chicken  19866894229653_2
gagtgacgatcggatgtgtatattaacctcatctacagtaatgcattctgtcatatcccaggaggcctcattccctgctaggacaaggcaggggctgaattgtgtgaggagctgtatgttgatgtatggtaatgctggtgtacagtagtgctggtggctgatttccctcaggcattttaatactgtttgctggtgtggaggaaagattattggtctagatmtgaggtaggtctgtcttggtacatgtaaaatcatcttgcttaccttgttgaccttactggtgctaaaacaaggttctaytgagacattaatcctcagtctacagaagatggggtgatgtgatgtgctgagggaaagaagttgagtactgaagttcctagctgtgtgctgggcatgcagaagaatctgagatagctgtcagaaggcagtgtagtaggtgtgatacgcctgcagtaagtggtgtgtttggacgaaactcaacagaaggactcaaagttggagttattgtgagtggtctgtagaaactgctgtacaggtcagcaagacagtctggtaggatgtatttggatcatcagtacaactgttgcttggtgtgcatgg

SEQ ID NO: 19716 - DNA, 599 bp, Chicken  19866894229657_1
  misc_feature (1)..(86): n is any nucleotide
nnnnnnnnnnnnnnnnnnnnnnnnnnnnnnnnnnnnnnnnnnnnnnnnnnnnnnnnnnnnnnnnnnnnnnnnnnnnnnnnnnnnnngatataaaaatttagcacccgattgctataaaccctcgaagaccagagctaaacataagaccacaaaaaaacaatctgtaaatttgtaatcatatatctttaaagagacatatatcattagagagaaaaaataaagacgttgctcactaaaacaggcaaattagtcagacagcattaattccagtactgctgctaatgcagtttaatggccatrtttctggttacagggcacagcggtttttttcctttgttagaagccagtttggtattattgtatttgatgctgactgcctgttaagccataagcttaaaaggaaaagaagactggggaaaagaaggccaagaggggcttctgagtctcgtgtcctacatcagacagaagaaccatcatttccatctatcatttcttacaaattaagaattgatagttcatctgcaaaatgaattagaatctcagtctagacccaagggcccaaatacgtggggtttttttgttttttttttttaaaaaag

SEQ ID NO: 19717 - DNA, 600 bp, Chicken  19866894229659_1
ttaaagatttcctccaaaagtattttaggaaattgttacaaacctgctttaaaacatatggattgtaatagacagtatattgtatgatctcctagggctacctgaaaactgacattaaggtattgctgagaccagaatcggatgcccagcattaagagatgttatcatccagcctgcaggctgcagctgctgagctatgcagagaagtgcagcccctcttgtagaacagcagtcctctccttggggtgcccgagctacagcccatgctcaagtgctctgctagactgcagctgagctacrgcttgtgcccatctgaggattcttatgaatgctacaaaaaaattcataagaacccacacttctttttttgaaaatatcatttgaatctcacagygttcaaataattaagtgttctggaagaaggaaaaacaggaattaggaaattcrgtacagaatgtaacccactttttatgcctacaagcaatgagcagggctgcattttataccattccttcccctaggcccaagcagcgttatcatatcaacttgagaataattacagyagttgcatcatgtcacctgcagctattcctttttctc

SEQ ID NO: 19718 - DNA, 600 bp, Chicken  19866894229659_2
gggctacctgaaaactgacattaaggtattgctgagaccagaatcggatgcccagcattaagagatgttatcatccagcctgcaggctgcagctgctgagctatgcagagaagtgcagcccctcttgtagaacagcagtcctctccttggggtgcccgagctacagcccatgctcaagtgctctgctagactgcagctgagctacrgcttgtgcccatctgaggattcttatgaatgctacaaaaaaattcataagaacccacacttctttttttgaaaatatcatttgaatctcacagygttcaaataattaagtgttctggaagaaggaaaaacaggaattaggaaattcrgtacagaatgtaacccactttttatgcctacaagcaatgagcagggctgcattttataccattccttcccctaggcccaagcagcgttatcatatcaacttgagaataattacagyagttgcatcatgtcacctgcagctattcctttttctctctgctttccattaatctgcacttctctgattatcacaggatgtagtcttggcaaagactaactcatctaatttacagtggtactccaagacaa

SEQ ID NO: 19719 - DNA, 600 bp, Chicken  19866894229659_3
agcattaagagatgttatcatccagcctgcaggctgcagctgctgagctatgcagagaagtgcagcccctcttgtagaacagcagtcctctccttggggtgcccgagctacagcccatgctcaagtgctctgctagactgcagctgagctacrgcttgtgcccatctgaggattcttatgaatgctacaaaaaaattcataagaacccacacttctttttttgaaaatatcatttgaatctcacagygttcaaataattaagtgttctggaagaaggaaaaacaggaattaggaaattcrgtacagaatgtaacccactttttatgcctacaagcaatgagcagggctgcattttataccattccttcccctaggcccaagcagcgttatcatatcaacttgagaataattacagyagttgcatcatgtcacctgcagctattcctttttctctctgctttccattaatctgcacttctctgattatcacaggatgtagtcttggcaaagactaactcatctaatttacagtggtactccaagacaagcataagtccttgaaattgagaaccgtcagacacactagtttttggaagtacc

SEQ ID NO: 19720 - DNA, 600 bp, Chicken  19866894229659_4
atgctcaagtgctctgctagactgcagctgagctacrgcttgtgcccatctgaggattcttatgaatgctacaaaaaaattcataagaacccacacttctttttttgaaaatatcatttgaatctcacagygttcaaataattaagtgttctggaagaaggaaaaacaggaattaggaaattcrgtacagaatgtaacccactttttatgcctacaagcaatgagcagggctgcattttataccattccttcccctaggcccaagcagcgttatcatatcaacttgagaataattacagyagttgcatcatgtcacctgcagctattcctttttctctctgctttccattaatctgcacttctctgattatcacaggatgtagtcttggcaaagactaactcatctaatttacagtggtactccaagacaagcataagtccttgaaattgagaaccgtcagacacactagtttttggaagtaccacaggaagaacatcttcatttacttctatttgtcaacttgttttccttttcaaaggaatcaagttaaaatggaatcctctttcaattgctgaacgagctattatgaatgatttcta

SEQ ID NO: 19721 - DNA, 600 bp, Chicken  19866894229659_5
atcatgtcacctgcagctattcctttttctctctgctttccattaatctgcacttctctgattatcacaggatgtagtcttggcaaagactaactcatctaatttacagtggtactccaagacaagcataagtccttgaaattgagaaccgtcagacacactagtttttggaagtaccacaggaagaacatcttcatttacttctatttgtcaacttgttttccttttcaaaggaatcaagttaaaatggaatcctctttcaattgctgaacgagctattatgaatgatttctattcaaraagcaaacatctcattcccttccaagccgcttaacccaaaacagaaagcattatcaacagaagttgctgtgcatccatgccacttactcaggcatgcaggcgcatatgcagggcatatctgtgtacatccacagctgagaatccattcagtgagtgaccagcagccgctgtcactaaggaccaagacaattaaacctaaactctacttagcccttacctttacctctaaaacatagttaaatgttcttggttacaattttgatgggtagtagcctcaggaaagattagtaaagaatgaaa

SEQ ID NO: 19722 - DNA, 600 bp, Chicken  19866894229676_1
agaggagattctgaaggacaacaaatgaaggaagaaagtaaaagagatgaggagtcaactgacactgcaaaaagtcagcacgagcacataatgcatttttaaataagaaacattactgaaagaccttctgcagcacaacacaagtatgatggactgcattagctcatatggaatagatagatgcagttatcagagcaccatagtaaagtgtgcctgaattattctcattttacacatggatccatcaggaaattatcaaggtctgtttttaatcatctcaagctcgtggtttgctagtargaatcctgtcaggttccctctgctcagtaagtgtggctcccytgtatctgggcttttctgagcgtgacatttcacraagatyggaggaggatgagtgggagaaggtaattcagttgggagattcttctggtttatgcttccactgcctttattttctgagcagtacccatcacagtaagtgggaygcgcagcctttgggtttgcacgcgtgcaagtgcacagcaagtcatgggagaccatcacacacagccccgcgggtggcagtggagtgggcagcacaggartggccccggagctgcg

SEQ ID NO: 19723 - DNA, 600 bp, Chicken  19866894229676_2
agagatgaggagtcaactgacactgcaaaaagtcagcacgagcacataatgcatttttaaataagaaacattactgaaagaccttctgcagcacaacacaagtatgatggactgcattagctcatatggaatagatagatgcagttatcagagcaccatagtaaagtgtgcctgaattattctcattttacacatggatccatcaggaaattatcaaggtctgtttttaatcatctcaagctcgtggtttgctagtargaatcctgtcaggttccctctgctcagtaagtgtggctcccytgtatctgggcttttctgagcgtgacatttcacraagatyggaggaggatgagtgggagaaggtaattcagttgggagattcttctggtttatgcttccactgcctttattttctgagcagtacccatcacagtaagtgggaygcgcagcctttgggtttgcacgcgtgcaagtgcacagcaagtcatgggagaccatcacacacagccccgcgggtggcagtggagtgggcagcacaggartggccccggagctgcggcagttgcagtggttttgtgmaagggaatcaagaaaaacaca

SEQ ID NO: 19724 - DNA, 600 bp, Chicken  19866894229676_3
agcacgagcacataatgcatttttaaataagaaacattactgaaagaccttctgcagcacaacacaagtatgatggactgcattagctcatatggaatagatagatgcagttatcagagcaccatagtaaagtgtgcctgaattattctcattttacacatggatccatcaggaaattatcaaggtctgtttttaatcatctcaagctcgtggtttgctagtargaatcctgtcaggttccctctgctcagtaagtgtggctcccytgtatctgggcttttctgagcgtgacatttcacraagatyggaggaggatgagtgggagaaggtaattcagttgggagattcttctggtttatgcttccactgcctttattttctgagcagtacccatcacagtaagtgggaygcgcagcctttgggtttgcacgcgtgcaagtgcacagcaagtcatgggagaccatcacacacagccccgcgggtggcagtggagtgggcagcacaggartggccccggagctgcggcagttgcagtggttttgtgmaagggaatcaagaaaaacacagcagacatttctgacagatggtgtcctaggaaca

SEQ ID NO: 19725 - DNA, 600 bp, Chicken  19866894229676_4
agcacataatgcatttttaaataagaaacattactgaaagaccttctgcagcacaacacaagtatgatggactgcattagctcatatggaatagatagatgcagttatcagagcaccatagtaaagtgtgcctgaattattctcattttacacatggatccatcaggaaattatcaaggtctgtttttaatcatctcaagctcgtggtttgctagtargaatcctgtcaggttccctctgctcagtaagtgtggctcccytgtatctgggcttttctgagcgtgacatttcacraagatyggaggaggatgagtgggagaaggtaattcagttgggagattcttctggtttatgcttccactgcctttattttctgagcagtacccatcacagtaagtgggaygcgcagcctttgggtttgcacgcgtgcaagtgcacagcaagtcatgggagaccatcacacacagccccgcgggtggcagtggagtgggcagcacaggartggccccggagctgcggcagttgcagtggttttgtgmaagggaatcaagaaaaacacagcagacatttctgacagatggtgtcctaggaacagcaccg

SEQ ID NO: 19726 - DNA, 600 bp, Chicken  19866894229676_5
gttatcagagcaccatagtaaagtgtgcctgaattattctcattttacacatggatccatcaggaaattatcaaggtctgtttttaatcatctcaagctcgtggtttgctagtargaatcctgtcaggttccctctgctcagtaagtgtggctcccytgtatctgggcttttctgagcgtgacatttcacraagatyggaggaggatgagtgggagaaggtaattcagttgggagattcttctggtttatgcttccactgcctttattttctgagcagtacccatcacagtaagtgggaygcgcagcctttgggtttgcacgcgtgcaagtgcacagcaagtcatgggagaccatcacacacagccccgcgggtggcagtggagtgggcagcacaggartggccccggagctgcggcagttgcagtggttttgtgmaagggaatcaagaaaaacacagcagacatttctgacagatggtgtcctaggaacagcaccgatgtacaaatataggaaggcttaaaaacacaaataacagatgagctaggaagtctggcagaggaaaagcagctaagtgatgaacacgactggagaaatggcaa

SEQ ID NO: 19727 - DNA, 600 bp, Chicken  19866894229676_6
cgtggtttgctagtargaatcctgtcaggttccctctgctcagtaagtgtggctcccytgtatctgggcttttctgagcgtgacatttcacraagatyggaggaggatgagtgggagaaggtaattcagttgggagattcttctggtttatgcttccactgcctttattttctgagcagtacccatcacagtaagtgggaygcgcagcctttgggtttgcacgcgtgcaagtgcacagcaagtcatgggagaccatcacacacagccccgcgggtggcagtggagtgggcagcacaggartggccccggagctgcggcagttgcagtggttttgtgmaagggaatcaagaaaaacacagcagacatttctgacagatggtgtcctaggaacagcaccgatgtacaaatataggaaggcttaaaaacacaaataacagatgagctaggaagtctggcagaggaaaagcagctaagtgatgaacacgactggagaaatggcaaataagcacaaaaagcttcgggtatcaacaggccatcagaattcacaaagaacagagcaagccacaggaatggagacagcaggatagccataaaaatgga

SEQ ID NO: 19728 - DNA, 600 bp, Chicken  19866894229676_7
gctcagtaagtgtggctcccytgtatctgggcttttctgagcgtgacatttcacraagatyggaggaggatgagtgggagaaggtaattcagttgggagattcttctggtttatgcttccactgcctttattttctgagcagtacccatcacagtaagtgggaygcgcagcctttgggtttgcacgcgtgcaagtgcacagcaagtcatgggagaccatcacacacagccccgcgggtggcagtggagtgggcagcacaggartggccccggagctgcggcagttgcagtggttttgtgmaagggaatcaagaaaaacacagcagacatttctgacagatggtgtcctaggaacagcaccgatgtacaaatataggaaggcttaaaaacacaaataacagatgagctaggaagtctggcagaggaaaagcagctaagtgatgaacacgactggagaaatggcaaataagcacaaaaagcttcgggtatcaacaggccatcagaattcacaaagaacagagcaagccacaggaatggagacagcaggatagccataaaaatggacgtaggaagaactttttgcaagaggaaaagacaatac

SEQ ID NO: 19729 - DNA, 599 bp, Chicken  19866894229680_1
  misc_feature (1)..(45): n is any nucleotide
nnnnnnnnnnnnnnnnnnnnnnnnnnnnnnnnnnnnnnnnnnnnntgtgctttaacagattatgatttgctgcatcagtgttccttgcaaaaggtgttgctcccatgagggcttatgcagatgcctttattggttggtggtgatgccacgacagtacgtgggacagaaagacagagctgtgtaaccacctggatgcttgaactcaaactttttctccagtgtcaagtatttaaggctctaaataaaaatctgaatacttcatgcctacttttctcccagaatgctgacagggcacttacygatgtcagtgtcattgcaactcttatgatgcaaattgtcactctgctaccctgaaatgtctctcaggggacctatttcacgttaaaagaccgacctctgctctcagtaaccccagtataaatctagaataaattttatattgtcaacagcaattatacatgccactcagggcataagtgatagatgcaggtcctgccygaaagttgattcaaagctctgatgataatcttattgcccagtgcagagatttgccatcttcttaactttagctgtgcactcattccttgcctttggattcg

SEQ ID NO: 19730 - DNA, 600 bp, Chicken  19866894229680_2
gaactcaaactttttctccagtgtcaagtatttaaggctctaaataaaaatctgaatacttcatgcctacttttctcccagaatgctgacagggcacttacygatgtcagtgtcattgcaactcttatgatgcaaattgtcactctgctaccctgaaatgtctctcaggggacctatttcacgttaaaagaccgacctctgctctcagtaaccccagtataaatctagaataaattttatattgtcaacagcaattatacatgccactcagggcataagtgatagatgcaggtcctgccygaaagttgattcaaagctctgatgataatcttattgcccagtgcagagatttgccatcttcttaactttagctgtgcactcattccttgcctttggattcgaattctctttctgggggggaaagccaaacttatatacaaatgcaaaatacaacctggccgtaygcatttccatgcattatgttggatttcagcagattgcctgtcaataatgcattttatttccttacctggctacttaacattgctttgcactgctctgattttacccatagactgaggaaaaaagtcaccttgcctc

SEQ ID NO: 19731 - DNA, 600 bp, Chicken  19866894229680_3
tcaggggacctatttcacgttaaaagaccgacctctgctctcagtaaccccagtataaatctagaataaattttatattgtcaacagcaattatacatgccactcagggcataagtgatagatgcaggtcctgccygaaagttgattcaaagctctgatgataatcttattgcccagtgcagagatttgccatcttcttaactttagctgtgcactcattccttgcctttggattcgaattctctttctgggggggaaagccaaacttatatacaaatgcaaaatacaacctggccgtaygcatttccatgcattatgttggatttcagcagattgcctgtcaataatgcattttatttccttacctggctacttaacattgctttgcactgctctgattttacccatagactgaggaaaaaagtcaccttgcctctctttcagcgtctgctttttttttttttcagttgaaaaattaaaaaaatagaataaccaccagaaaaaaaacctgcaaagatagttaaggtaaaacaagggtctacaaaataagtataatgaaaaatggaataggtgcagaataacctgaagcagggtttcagg

SEQ ID NO: 19732 - DNA, 599 bp, Chicken  19866894229683_1
  misc_feature (1)..(111): n is any nucleotide
nnnnnnnnnnnnnnnnnnnnnnnnnnnnnnnnnnnnnnnnnnnnnnnnnnnnnnnnnnnnnnnnnnnnnnnnnnnnnnnnnnnnnnnnnnnnnnnnnnnnnnnnnnnnnnnttccctgccctgtaaggggtaaggattttttaattttttttttttttttttaccatgtccagctctccttgtgttggaagcccagtgcctaacctcaaaagagaaggtgccattgagtgagagggacctgagcagttgagatgccaacctgcctgtacgcagctgacacaagatggagcctgtaggctrtgagtcagagaagttttatctgcagacctttctccctcactaatgtttcatttcttcatctgtttcaggctgtgccagcatctcagaaattggccaagacctggtacagttttcaaagctgtgaacagtctcctgcaacacctgagcttaagaagccaatggctgaggttccacaacagactgaagagagagaaagaagtgaaaatgttgaatatataacatgtctgagaaggacttcaggaaactcttgaggcaattaggaagggctttgtattagcagcaatcactrtttgcttttt

SEQ ID NO: 19733 - DNA, 600 bp, Chicken  19866894229683_2
cctgtaggctrtgagtcagagaagttttatctgcagacctttctccctcactaatgtttcatttcttcatctgtttcaggctgtgccagcatctcagaaattggccaagacctggtacagttttcaaagctgtgaacagtctcctgcaacacctgagcttaagaagccaatggctgaggttccacaacagactgaagagagagaaagaagtgaaaatgttgaatatataacatgtctgagaaggacttcaggaaactcttgaggcaattaggaagggctttgtattagcagcaatcactrtttgctttttttgagaccgatgagttctttaacacttcagatagatgatacttgcttaaatgcatataatttaaactggctattccctgacattacctgtgttgggcattactccccaratcagttctgtctggcagccagattgtagtctgactgcagcccaagctacatacttctctactccaggcagtattgtggctgtatcttccatagcctgggctttcctggatgaattcatagcaggcacagaagctagataaatcagatatcagacaccatatttcccctttaaggtggagt

SEQ ID NO: 19734 - DNA, 600 bp, Chicken  19866894229683_3
gttttcaaagctgtgaacagtctcctgcaacacctgagcttaagaagccaatggctgaggttccacaacagactgaagagagagaaagaagtgaaaatgttgaatatataacatgtctgagaaggacttcaggaaactcttgaggcaattaggaagggctttgtattagcagcaatcactrtttgctttttttgagaccgatgagttctttaacacttcagatagatgatacttgcttaaatgcatataatttaaactggctattccctgacattacctgtgttgggcattactccccaratcagttctgtctggcagccagattgtagtctgactgcagcccaagctacatacttctctactccaggcagtattgtggctgtatcttccatagcctgggctttcctggatgaattcatagcaggcacagaagctagataaatcagatatcagacaccatatttcccctttaaggtggagtaggtattgtcttcttctgaatgcagagaaatgaagtgattagtgaccaaagcaatgggctctgctccctgcagagcgcatctcctcctgcagatggttgatgcagtctgaacactcatc

SEQ ID NO: 19735 - DNA, 600 bp, Chicken  19866894229683_4
gtgaccaaagcaatgggctctgctccctgcagagcgcatctcctcctgcagatggttgatgcagtctgaacactcatcagaacagtggtcaggatccacacatcttccaagtacaacataaatctgtggcagtgcataaatggatcagataaatggatcagatactcctggcttcctggtctcttttcctgtggaggagttattgcagataggtagtggtggtgatgggtccgtgacaaaaaacaggagttttgtttgctttcttttggtcctctttcatatggatatttccttttcagyctcattctttagaacacagtcttcagtgacaccactgagtctttcttttccctctcatcctcattccatctcctttcatcatctaactgcccctgtcaatctcccctctccattatttttcttcagaaatatttcagttctcacctaggctactatttttatagtacccccagacaccacaagctcccagcgtcacagagctttgcagatctctgaaaagtggccacaacctcctctctccaaactcgtaaaattggctgctatctcctgctaaagtctgactccatgcttccagtctgt

SEQ ID NO: 19736 - DNA, 600 bp, Chicken  19866894229689_1
tccttatgtcctccaacttgtgttgatattgacgattgccatgacccagatgcagaccttgcacttggctttgttgaacctcatgaggttcatctgaacccactgctcagcctgcctaggtctctgaatggcatcccatccctctggtgtgctgactgcactccacagctcagtgtcgtgcacaaacttgctgagggtgcacttgatcccattgttgatgaaggtgttaaaaaaaccaaaccaaaacaaaaaaaaaaccactggtcccagtactgaccagaaggacactactcgtcacartctccatccagacttggagccattgatcaccactctctgggtacagtctcacaaccagttcctcttccattgaacagtccacccatcgaatccatatctttctgatttgaagagaagggtgttgtggaggactgtgtcaaagggtatatccctgaaaaagcttaacaagagactttcatctaaaacttgtatgcaagtgagtctttaggtatgtctgcatctactggagcttgtgacaaaattccagtcagtaaaaacagggtggtggaaagtagctggtgatcactgggcttgatctgc

SEQ ID NO: 19737 - DNA, 547 bp, Chicken  19866894229693_1
gaagctcagtgccatggggaatggaggtgcgcccatctcgggcagaagtacaagatcaaaattctgtgccttgactgtggccagaaatatctgtttgaaacccttccaaatgacccaggagacacagaggctgaacttgatactgaatggatttcagaggaacacagagatcttccttgattctgcagtgtcaacaaatgatccagaaaagagcagctgctgggccagtactgaggttcttctctgtggctctcgcgcaacatttcctccctcagcagcctcacgtttgccatagatagsctcctactctgcagttggaccttctgtctgtttagagaatagtgctgtccatggattccattctctcgtcagttgtgccaacggatagcactggtgtggacctgtgatggtgaggggttgggcacagtggggctgacactgcaaggcagtgctgtgctggtggcaggaagcactgctggcctggccctgacatgtgggtacttctccattttcagggtagctaaatactttcaggttccccagagag

SEQ ID NO: 19738 - DNA, 600 bp, Chicken  19866894229696_1
ccacaagatatgagatctcgttaggttgaaccagcctgcaatgttcccatcacataaacgtgcattttgacaaatacctaacttaacctttagtcacatctcctacattattacgtcatcagatgtctaaatgtaaaccaagggacagctatcagcagtcactccttcgcctcctgaagtcgctgtatgtcacacagacagaggtacgctgttaggctgttgtactgcctatctggatttaaaagcatttggaggtgatcatttactgagtcctcaacacaccgcagcttacagggattytggaggctcttttccctttgttacaattactcaacagtgacagtaatacctctgatgtgctccctttaatgaaaacaaagccattaaagctgaacccaaggaaggtaccacccagtgcacacaacaagccttcaggtgggcaacgaaaggcttcaggatcctctatggcaatcgttacaacctggatgctgtaaaaagaatgcagggaaaaaaatactaaagggaccagagcttcaaagaagcttcctggagcagaaaggagacaaacgttgcacgaaagcaaacaaaagagcaggtttc

SEQ ID NO: 19739 - DNA, 600 bp, Chicken  19866894229705_1
ttaaatcctgcccctgagctctgaagttgagcaggcaccatcaggactcaccagcagctgtgtagcagccatgttccataggggcctgggagtcagcagggaacagcattgttctggctgaaatggtgggcttggttagatcagcacagctatgcagagtggagaatttaaaacaggtttttacagggttaaataaaaacattgtatgcttaatggtcttatagctgagcaaagtctgagaaagtgacctattgcttattaaagtttctttcagtctcgaagttccatagtcaatgacamtgaagtactttttctattactcttttacttcttaactgacgtgacgaaaacaagttaaatgttttggtagtttagacacttcagtgcccaataactgcctattttatatggtctgtggaattgcagtaacttctatttgaatgtttttctttgattgtacggttcgtgtgcttttaggaaaggtgatagacttgagctgagattagggagcccgtgattgatttatttctaccattgtcgtactgtattctaaatagccttgggggaagttgtttcttgagaagccatagtgagttggca

SEQ ID NO: 19740 - DNA, 599 bp, Chicken  19866894229707_1
  misc_feature (1)..(118): n is any nucleotide
nnnnnnnnnnnnnnnnnnnnnnnnnnnnnnnnnnnnnnnnnnnnnnnnnnnnnnnnnnnnnnnnnnnnnnnnnnnnnnnnnnnnnnnnnnnnnnnnnnnnnnnnnnnnnnnnnnnnnnatctgaaatccctctcccatctcctgatagcaacattttgatgtctttgtctcttgtatttcagcagtgttggtttaagcttttgatggggaagtgtatgatttttaaaccaatatggactttgcctgcatttccctgacaatgagcgattgtgttcctcactcctgcatgccaaattaacrgagctcagcacagcagctgctgtaatttaccgagtgtgattgtaayggggcttacaggagaggaaggcagcatctccgtagggtttggccacagaaaggtgctgcttgccctctggaggggcagtgctggtcctggggcgatgccagcttaccccccaggaaagattcgccgttctccccattccttggtgagtttggggtggcagcctgaggtttgttctgggcacgggaggctttgggcgcgttgttctccagcrggtgcctcaatgaggttggccccgagcagctcgctctgggtt

SEQ ID NO: 19741 - DNA, 599 bp, Chicken  19866894229707_2
  misc_feature (1)..(72): n is any nucleotide
nnnnnnnnnnnnnnnnnnnnnnnnnnnnnnnnnnnnnnnnnnnnnnnnnnnnnnnnnnnnnnnnnnnnnnnnatctgaaatccctctcccatctcctgatagcaacattttgatgtctttgtctcttgtatttcagcagtgttggtttaagcttttgatggggaagtgtatgatttttaaaccaatatggactttgcctgcatttccctgacaatgagcgattgtgttcctcactcctgcatgccaaattaacrgagctcagcacagcagctgctgtaatttaccgagtgtgattgtaayggggcttacaggagaggaaggcagcatctccgtagggtttggccacagaaaggtgctgcttgccctctggaggggcagtgctggtcctggggcgatgccagcttaccccccaggaaagattcgccgttctccccattccttggtgagtttggggtggcagcctgaggtttgttctgggcacgggaggctttgggcgcgttgttctccagcrggtgcctcaatgaggttggccccgagcagctcgctctgggtttagcatcctaagcgaaggactgcctcaccgatgggaggtctctgct

SEQ ID NO: 19742 - DNA, 600 bp, Chicken  19866894229707_3
caatgagcgattgtgttcctcactcctgcatgccaaattaacrgagctcagcacagcagctgctgtaatttaccgagtgtgattgtaayggggcttacaggagaggaaggcagcatctccgtagggtttggccacagaaaggtgctgcttgccctctggaggggcagtgctggtcctggggcgatgccagcttaccccccaggaaagattcgccgttctccccattccttggtgagtttggggtggcagcctgaggtttgttctgggcacgggaggctttgggcgcgttgttctccagcrggtgcctcaatgaggttggccccgagcagctcgctctgggtttagcatcctaagcgaaggactgcctcaccgatgggaggtctctgctgttccctaaccccgcgtgtttctgttgctcgcccaggtctggtacatggacagctaccacaacaaccgcttcgtccgcgaatacaaatccatggcggatttcatgaacaccgacaattttacctctcaccgtctccctcacccgtggtcaggcaccggtcaagtggtctacaatggttctatctatttcaataaataccaaagccacataat

SEQ ID NO: 19743 - DNA, 518 bp, Chicken  19866894229707_4
actgatctaggaaaacaaaggaaaaaaggagaaaaaagggagaaacaaataagaaacaaatgctaatcctgaggaaacacactttaaataagtaaataaacaaacagctgccaaaattaagaccaacgtcatggagggttattcagcatagacctgacagatcagcattacctctacatttctagaagtctggccccgcgttatggactcacaactaaccatgtacttgcagctggaactgcacctggagaaccacttcagtttgggggttttgttttgtttctgttccgatagcaaacstatagcgcatacaaaagaagtaaggcaatgactgttggaagtttatccttgggagactcgctctcttctgtgtgggggttgcatggacattttccgacatcacaggcagctgtgatggatgtgtgatttctatttctaagcagaaagctgacccgtgaggagctctcgctgtctgaacaagacctatcacaggttagttttattcgccttccattgca

SEQ ID NO: 19744 - DNA, 600 bp, Chicken  19866894229708_1
gcccagagaggttgttgctgccccatccctggaggtgttcaaggccaggctggatggggctgtggacaacctgatctagtgcctgatttagtggttggcaaccctgccagtggcggggggctggaactagatgatcttggaggtctcttccaaatcaagccatagtatgactttagctaggcagataaaagttatgtttacatgaataaatatctctctttttgttctttcaccataaatatgaacaattcttcatagcacagaaggcaggagaacaatttttcctgtctgtactggttygactggctgtgtttatcacctcccatagctacaggtgtgctgcagtatggtagaaacaatcaggctttgtgacatttctgtaactgactcagtagaaaaaaataaaatggataatctaattctgtacattcacatggaatttataacttatcctttttactcattttgattactctaagtttttgatatttagagtaattcttgaggcactgacctaacttcagtgtccttcataaataatagatatgaaaaatacagccttctgctgatgcaccttcttgtatcaatasttattcatct

SEQ ID NO: 19745 - DNA, 600 bp, Chicken  19866894229708_2
gtactggttygactggctgtgtttatcacctcccatagctacaggtgtgctgcagtatggtagaaacaatcaggctttgtgacatttctgtaactgactcagtagaaaaaaataaaatggataatctaattctgtacattcacatggaatttataacttatcctttttactcattttgattactctaagtttttgatatttagagtaattcttgaggcactgacctaacttcagtgtccttcataaataatagatatgaaaaatacagccttctgctgatgcaccttcttgtatcaatasttattcatctcacctcaccaattaaaatacatattttaggagccagttaaatagatttcttatgtgagtggagttacatgttgctccctactgaggtgttacaagcttcactggacaaagtgaaaatttcaccataaaataaaacttctacatgtttaaatggaaaccacaggcaattttctgactacatcacactttggatcatatagcacatcttatttgggcttttgtgaaaagttacaacactaccaggcaaggtaagtattccaatatggtatcagatttgcctgtatgttgatg

SEQ ID NO: 19746 - DNA, 519 bp, Chicken  19866894229708_3
tattcatctcacctcaccaattaaaatacatattttaggagccagttaaatagatttcttatgtgagtggagttacatgttgctccctactgaggtgttacaagcttcactggacaaagtgaaaatttcaccataaaataaaacttctacatgtttaaatggaaaccacaggcaattttctgactacatcacactttggatcatatagcacatcttatttgggcttttgtgaaaagttacaacactaccaggcaaggtaagtattccaatatggtatcagatttgcctgtatgttgatgrtagctttgcccatcactggctgatattaaaatgggctggaaaaatctatgtatcaaccttctgaaagggtcatctcttggcatatatgttggagctgaactatcaaaggcaaagagcccaggatgtgaaagtcattcatgagcagatcatccctgcaaactttccttgttcagcatataacacgatcacagcgacaagaaacatcccatgccacgaata

SEQ ID NO: 19747 - DNA, 599 bp, Chicken  19866894229728_1
  misc_feature (1)..(18): n is any nucleotide
nnnnnnnnnnnnnnnnnnccctctctcccctctcccttcccccgggccccgtagcgccgagagagcgccgcagccgcctctcgccatggcgagcagcagcggctccaaggccgagttcatcgtcgggggcaagtacaagctggtgcggaagatcggctcgggctccttcggggacatctatttggcgatcaacatcaccaacggggaggtaagggcggcacgcacctccatcggcggctcggggggacgcggagagcggcggtgccctcttgaagccggtgcctggcccctttcccccgsgatcgccttcccggggagccgggctgcgcgctccgggcctgggcccgcacctcacggcctccggctgggagccgtgtgccccttccgacggagccgtgggcccccacccggcgctttgctttgtgagaggtagggagagaagagcaccttgtcagtggccggagaagtctgtcttctggcactcatctctgcctcttttctcagctgaggaacactttatctcgtgttcatcaacagcagtagaaacaaagaagatcccatttcatcagtttttttttcttcgtattttttttattctt

SEQ ID NO: 19748 - DNA, 599 bp, Chicken  19866894229731_1
  misc_feature (1)..(26): n is any nucleotide
nnnnnnnnnnnnnnnnnnnnnnnnnncatgatgtgaacagttgtttcccaaatgcccactttgttttccaaaagttgcattgtgtgattttacataatgttaacatttctgttaaattgaataaatgcacatgaacggaaaagtttcatgcaaatgaaactaagaacacatgttgtattaatgcaaaaattgtgctggctcattttgttgccaaagggctctctacacacctgctcttacttccatcagaactaagaccagcttcccatcaggtgggctagacagattttcatttggaayyactgtcaaataaagtggcacaaatcattaaacagaaaaatacaatacttttggactatgcatgctcaggaatgcttctgactgtcaagggcaaagccaaaaccaggggtctacttgtctctaggctgttaaaattgaatataccagctaccaytgtctgctgctaacatatgtcaatacagtttcagctgagtttttctcaatctgtgtatcccagagaggtggtggagtcactgatcctggagatgttcaaggaacgtttagatgttgtgttgagggacatgktttagagagagcta

SEQ ID NO: 19749 - DNA, 599 bp, Chicken  19866894229731_2
  misc_feature (1)..(25): n is any nucleotide
nnnnnnnnnnnnnnnnnnnnnnnnncatgatgtgaacagttgtttcccaaatgcccactttgttttccaaaagttgcattgtgtgattttacataatgttaacatttctgttaaattgaataaatgcacatgaacggaaaagtttcatgcaaatgaaactaagaacacatgttgtattaatgcaaaaattgtgctggctcattttgttgccaaagggctctctacacacctgctcttacttccatcagaactaagaccagcttcccatcaggtgggctagacagattttcatttggaayyactgtcaaataaagtggcacaaatcattaaacagaaaaatacaatacttttggactatgcatgctcaggaatgcttctgactgtcaagggcaaagccaaaaccaggggtctacttgtctctaggctgttaaaattgaatataccagctaccaytgtctgctgctaacatatgtcaatacagtttcagctgagtttttctcaatctgtgtatcccagagaggtggtggagtcactgatcctggagatgttcaaggaacgtttagatgttgtgttgagggacatgktttagagagagctat

SEQ ID NO: 19750 - DNA, 600 bp, Chicken  19866894229731_3
tgaaactaagaacacatgttgtattaatgcaaaaattgtgctggctcattttgttgccaaagggctctctacacacctgctcttacttccatcagaactaagaccagcttcccatcaggtgggctagacagattttcatttggaayyactgtcaaataaagtggcacaaatcattaaacagaaaaatacaatacttttggactatgcatgctcaggaatgcttctgactgtcaagggcaaagccaaaaccaggggtctacttgtctctaggctgttaaaattgaatataccagctaccaytgtctgctgctaacatatgtcaatacagtttcagctgagtttttctcaatctgtgtatcccagagaggtggtggagtcactgatcctggagatgttcaaggaacgtttagatgttgtgttgagggacatgktttagagagagctattggtgayaggtggacagttggactggatgatcttgtaggtcttttccaaccttggtgattctatgattctatgattctatctcaatggatggtgagcagatggaaagactgtctamatagcaggtttatttagaacaatcaaaaggccagcata

SEQ ID NO: 19751 - DNA, 600 bp, Chicken  19866894229731_4
attttcatttggaayyactgtcaaataaagtggcacaaatcattaaacagaaaaatacaatacttttggactatgcatgctcaggaatgcttctgactgtcaagggcaaagccaaaaccaggggtctacttgtctctaggctgttaaaattgaatataccagctaccaytgtctgctgctaacatatgtcaatacagtttcagctgagtttttctcaatctgtgtatcccagagaggtggtggagtcactgatcctggagatgttcaaggaacgtttagatgttgtgttgagggacatgktttagagagagctattggtgayaggtggacagttggactggatgatcttgtaggtcttttccaaccttggtgattctatgattctatgattctatctcaatggatggtgagcagatggaaagactgtctamatagcaggtttatttagaacaatcaaaaggccagcataaataaaagttaatgacagtgtagatttacattgtctaaaatgtgcctaaatttaggggtacgtatgcaggcatttaaatattcagtcgatgtctaagctctcatagttatggaacagatcctcctggacaa

SEQ ID NO: 19752 - DNA, 600 bp, Chicken  19866894229731_5
aaataaagtggcacaaatcattaaacagaaaaatacaatacttttggactatgcatgctcaggaatgcttctgactgtcaagggcaaagccaaaaccaggggtctacttgtctctaggctgttaaaattgaatataccagctaccaytgtctgctgctaacatatgtcaatacagtttcagctgagtttttctcaatctgtgtatcccagagaggtggtggagtcactgatcctggagatgttcaaggaacgtttagatgttgtgttgagggacatgktttagagagagctattggtgayaggtggacagttggactggatgatcttgtaggtcttttccaaccttggtgattctatgattctatgattctatctcaatggatggtgagcagatggaaagactgtctamatagcaggtttatttagaacaatcaaaaggccagcataaataaaagttaatgacagtgtagatttacattgtctaaaatgtgcctaaatttaggggtacgtatgcaggcatttaaatattcagtcgatgtctaagctctcatagttatggaacagatcctcctggacaacatgcttgatcacatgagtaat

SEQ ID NO: 19753 - DNA, 496 bp, Chicken  19866894229731_6
gtctctaggctgttaaaattgaatataccagctaccaytgtctgctgctaacatatgtcaatacagtttcagctgagtttttctcaatctgtgtatcccagagaggtggtggagtcactgatcctggagatgttcaaggaacgtttagatgttgtgttgagggacatgktttagagagagctattggtgayaggtggacagttggactggatgatcttgtaggtcttttccaaccttggtgattctatgattctatgattctatctcaatggatggtgagcagatggaaagactgtctamatagcaggtttatttagaacaatcaaaaggccagcataaataaaagttaatgacagtgtagatttacattgtctaaaatgtgcctaaatttaggggtacgtatgcaggcatttaaatattcagtcgatgtctaagctctcatagttatggaacagatcctcctggacaacatgcttgatcacatgagtaatgagca

SEQ ID NO: 19754 - DNA, 600 bp, Chicken  19866894229734_1
tcaagaaagcttggctgcatgagtcctcccctaactgtacccagctagtttccctctctgtgcaacctcaggatgagcattctgagtttctcacgcacacacataccgtacatgtaaaccatgttttcaggtttcactgccagcgttgtcctcagatatgcacggaacaacactgataacctggtgtgaagctactgaactcagcagtgctacaccaccaaatgctttggacagtcctgttaaaggctactgcttgtgccactgccgtaaccaaatggatgagaggtgcccatggccagrctggatggggccctggactgcctgatctagtgggagcagtcagcccacagcagggagggactgtgggggcaatccaagccattctgggcttctacggagtggatgtctaagctcttgagaaatgcatgccaccactttggtactttggattgttcatcagttttaaccagttcttagaatgagagcattaggtctgcaattgcaacatggtatcctgagggagctggtgcaagtaatctgcaaaacactcatcaagtgacttttcttgtccgtgcatgtaagattttgccccatttaaga

SEQ ID NO: 19755 - DNA, 549 bp, Chicken  19866894229734_2
gggggcaatccaagccattctgggcttctacggagtggatgtctaagctcttgagaaatgcatgccaccactttggtactttggattgttcatcagttttaaccagttcttagaatgagagcattaggtctgcaattgcaacatggtatcctgagggagctggtgcaagtaatctgcaaaacactcatcaagtgacttttcttgtccgtgcatgtaagattttgccccatttaagagaaatacagaggcaagtttagccacacacattgtcacgaaaccttcttcatagaatcataaagrgtggaaaggacctctaagaccatccwgtccaaccatccaccccccaccaatactgtccactaaaccacgtccctaagtaccacatctacatgctccttgaagctgtccagggacggtgactccatcgcctccctgagcctgctgttcccatgcatcactgctcttcctgaaattaagtatttttctaacatccaacctgatatcactggacaatcttgagagagtctcggtcagttcctgcaggagaga

SEQ ID NO: 19756 - DNA, 523 bp, Chicken  19866894229734_3
tctacggagtggatgtctaagctcttgagaaatgcatgccaccactttggtactttggattgttcatcagttttaaccagttcttagaatgagagcattaggtctgcaattgcaacatggtatcctgagggagctggtgcaagtaatctgcaaaacactcatcaagtgacttttcttgtccgtgcatgtaagattttgccccatttaagagaaatacagaggcaagtttagccacacacattgtcacgaaaccttcttcatagaatcataaagrgtggaaaggacctctaagaccatccwgtccaaccatccaccccccaccaatactgtccactaaaccacgtccctaagtaccacatctacatgctccttgaagctgtccagggacggtgactccatcgcctccctgagcctgctgttcccatgcatcactgctcttcctgaaattaagtatttttctaacatccaacctgatatcactggacaatcttgagagagtctcggtcagttcctgcaggagaga

SEQ ID NO: 19757 - DNA, 600 bp, Chicken  19866894229749_1
attgtactcaagagttccacactatttctaaatagattactgaaatattttcaggagtcttttcattctccaaaaaatcactaggaaaaaacccaaacactacagccttcacataaagctttgccatttgaacaaacctcttctaaagtagaaaaatacaaaaccaacccacaccaccaatctaaaagaacactaatcctcacagccagtaattattttaaccttatgttaaaatactgtaaaaactgaatttatttcaacttcctgtacttcttgtatttctggaattttctcaacacrttgagcaaaactgtacagaaaaattgagaaacaattcatctcccttcatttctgaagtacccactactgccagattgcctgcatgacagcaagggaaaaggcacaccaatactgtggagaaagttgtttttcttttcttcgaagacaggcagaacaatttcactgtaattcacctttactgataatacctttcgaamacatcttaaagctcttcagctcctaacaaatcctagtggggcaagacactgcacaaatttacaaaacgggactacagaaatagcaatctgctgagccctgtgc

SEQ ID NO: 19758 - DNA, 600 bp, Chicken  19866894229749_2
cctcacagccagtaattattttaaccttatgttaaaatactgtaaaaactgaatttatttcaacttcctgtacttcttgtatttctggaattttctcaacacrttgagcaaaactgtacagaaaaattgagaaacaattcatctcccttcatttctgaagtacccactactgccagattgcctgcatgacagcaagggaaaaggcacaccaatactgtggagaaagttgtttttcttttcttcgaagacaggcagaacaatttcactgtaattcacctttactgataatacctttcgaamacatcttaaagctcttcagctcctaacaaatcctagtggggcaagacactgcacaaatttacaaaacgggactacagaaatagcaatctgctgagccctgtgcatttgtcccttgttgtctgccatcatttcaaacagatcaggtctttcccatgttgttctatggcttcacgcctaccctctatgtagscractgtcctgcctggctgagcagtgcatctggtgcttgggcactagagcagcaaagctggaagtcctacagaagggaaacattaaagaagactgcagtcacagcacttg

SEQ ID NO: 19759 - DNA, 600 bp, Chicken  19866894229749_3
agcaagggaaaaggcacaccaatactgtggagaaagttgtttttcttttcttcgaagacaggcagaacaatttcactgtaattcacctttactgataatacctttcgaamacatcttaaagctcttcagctcctaacaaatcctagtggggcaagacactgcacaaatttacaaaacgggactacagaaatagcaatctgctgagccctgtgcatttgtcccttgttgtctgccatcatttcaaacagatcaggtctttcccatgttgttctatggcttcacgcctaccctctatgtagscractgtcctgcctggctgagcagtgcatctggtgcttgggcactagagcagcaaagctggaagtcctacagaagggaaacattaaagaagactgcagtcacagcacttgtagtcctttattcccrtcaggtttgcctgcctaccaacctacaggatcccttgtctttctagttcaaactgaaaaaatactaattatcagattttcattacactaaactgcaacaagttaaatgaaagattcacttgcctctgataactcccatgatcagtggatgaggaatagctgacttgatgtgcaa

SEQ ID NO: 19760 - DNA, 600 bp, Chicken  19866894229749_4
caagggaaaaggcacaccaatactgtggagaaagttgtttttcttttcttcgaagacaggcagaacaatttcactgtaattcacctttactgataatacctttcgaamacatcttaaagctcttcagctcctaacaaatcctagtggggcaagacactgcacaaatttacaaaacgggactacagaaatagcaatctgctgagccctgtgcatttgtcccttgttgtctgccatcatttcaaacagatcaggtctttcccatgttgttctatggcttcacgcctaccctctatgtagscractgtcctgcctggctgagcagtgcatctggtgcttgggcactagagcagcaaagctggaagtcctacagaagggaaacattaaagaagactgcagtcacagcacttgtagtcctttattcccrtcaggtttgcctgcctaccaacctacaggatcccttgtctttctagttcaaactgaaaaaatactaattatcagattttcattacactaaactgcaacaagttaaatgaaagattcacttgcctctgataactcccatgatcagtggatgaggaatagctgacttgatgtgcaatg

SEQ ID NO: 19761 - DNA, 600 bp, Chicken  19866894229749_5
cagctcctaacaaatcctagtggggcaagacactgcacaaatttacaaaacgggactacagaaatagcaatctgctgagccctgtgcatttgtcccttgttgtctgccatcatttcaaacagatcaggtctttcccatgttgttctatggcttcacgcctaccctctatgtagscractgtcctgcctggctgagcagtgcatctggtgcttgggcactagagcagcaaagctggaagtcctacagaagggaaacattaaagaagactgcagtcacagcacttgtagtcctttattcccrtcaggtttgcctgcctaccaacctacaggatcccttgtctttctagttcaaactgaaaaaatactaattatcagattttcattacactaaactgcaacaagttaaatgaaagattcacttgcctctgataactcccatgatcagtggatgaggaatagctgacttgatgtgcaatgactgttcgtatagtgctttaagttttttgttatttttctgtgctgtatacatttgaatttccaaagcataaatttccaatagttgagtacctttttttagatcatcttccccatcatcagtcta

SEQ ID NO: 19762 - DNA, 600 bp, Chicken  19866894229754_1
tacagttttaatcaaatcccaaatgctgaagacctttcagcagtatcttaggcagcactgtgcaatgcttattccacttgaagtggccactagggaggtacaattagctgttcccatggagaagtttgttatactaataaataataagtagtgtaggtagagatggaatcaattaaagatatttttgaccatctaatggtttatgggaatactaaataattgacaacaagttttgactatgtgttccataagaacgttttattgtaactaaagtgtgaccacagaacagggaatgactgygttgacagatgtaaaggttaacaacttacacctctttcttaaacatcactgctcataatgttcaccattaaccctttctaaagagttaaaatgtagtcataaatacacttttgctgcatgttgaagctgctgcatcaaagctcatttgcctttttcaaaaaaccaaaaagatatttgaaatgttaagaatgtaggtagttattgctatctatattttcatgcgtttgcttgaataactaagaatttattttgttacttaagattgatttgacaaacttattcaaactatagcttaatcat

SEQ ID NO: 19763 - DNA, 599 bp, Chicken  19866894229756_1
  misc_feature (1)..(12): n is any nucleotide
nnnnnnnnnnnntatccttaccattttacaagtcatggatgacatagactctgcatcatagtttttacatcacctttttctcttcttaagtgaagagaatttaatggaaaaacaattgtgggcacagatatttgaagtcagaaagtgaaacaatctgtaggacagaagttaaaatgaaaatatgcactatacaaagatcacagttcctagtacactttagtacacttcggaatgtattgaatagaaaaaaaaaaaaaacggatagttggcattgttattcttcttttttttttttttttycttttcccccattaggataatgataataatagtatcttagagtatgatggcagtaaaagtggattgtctgttgttataaccttccatgtcatactgtaagatcactcagcaactgataatgaattgaatgaagtcatgttttcaatattaataaattctttttctattcaatctgtgaatggatgtatccactaatgaatattacttttacacttaaaaaaggcttttgagttgtaaatattattagcaaactactggaagaagtaacagaaggatacaaattyaaattctttatttat

SEQ ID NO: 19764 - DNA, 600 bp, Chicken  19866894229756_2
tttttttttttttttycttttcccccattaggataatgataataatagtatcttagagtatgatggcagtaaaagtggattgtctgttgttataaccttccatgtcatactgtaagatcactcagcaactgataatgaattgaatgaagtcatgttttcaatattaataaattctttttctattcaatctgtgaatggatgtatccactaatgaatattacttttacacttaaaaaaggcttttgagttgtaaatattattagcaaactactggaagaagtaacagaaggatacaaattyaaattctttatttatccaatatgaagtaaatactatgtacaaaccatttgctccaaagaaaggtagaacagttcaggttacattaagttattggttaatatcacataaaaaatgttgatttttttttcagaaacaattatgcaggaggaatacagaagccattaatcacagaatcacagaactgtaggggttggaaaggacctctggagatcatctagtcttaagccctgtttaaagcaggttccctagaacaggtcacacgggatagtgtccaggagggtgttgaacatctccagagaa

SEQ ID NO: 19765 - DNA, 600 bp, Chicken  19866894229758_1
tcttttttcttttttttttttatttatttcccagagctgctggtgacattatagtaaattcttcacaaagacagtaattttatgagacagaaagttccttaactgcctaccccaacaggaatcactgtatctcaaagtgcacaaaagtcagttaatttacttagcaatcccaccagtgcaccaaattctataaatgttccagagatagtatgtttatctctctgataaatagcatatttactcctgttgggaaacagattttattttcttagatcaaaattttaagcaattttccagtayaaagtatagggcaataacctcaaatagtattcacagaaacttatgtcttaagtgagaaaaaaaggaaagagctcagtacccaatatgtgccttctatttgaatgtactcttattactaaaagtccttgttttgagaaggttaaaatacccagtcagcaatatgttttgataatatgaatgatgtcaccataaaagaaagatacacctagcagcttagtctagtcacggcaggatccttctaggctgctttgtggattaaccagcagcttgtaaaacatgaacaaagtgaaaacgtggaga

SEQ ID NO: 19766 - DNA, 600 bp, Chicken  19866894229767_1
ccctcacttctcatttttaccatcctaactttgcttctggcctgtactctcagcccagaagatgtgaatctagttttgattcagccactgactcaaccaaatgcattactcatctcaccattctcttctcaacatgttttttgtcttggaaatttagtttataggcttagtggggttggggatgtgttaccactcatagctttcatgcagtcctttgctgaggccctcagtctgccttcaaagtactgcaataatacgcatcagaggaaaaaacaaacaaacatggattacttgggataytctgtgattctaagttggatgggacccataaggattgagtccaactcctggctcctcacaggactgcgagtgatgctcagtgaatgagaatcaacacattcactggagttgcatttagcacataagcaaatgttgcaaaacaggaaaacactgaaaaagaaagactcctgtttttctatattcatccggtaatttattcacaatgagtaatttgacattgtctaacacaccagcttgactgtcaggagtgctcagatggttttgtaatgaactcgttggaaaggtgctttatttaaagaa

SEQ ID NO: 19767 - DNA, 600 bp, Chicken  19866894229770_1
atggcattacggtctgcatcagaaatagtgtgaccagcagaacttggaagtggttgtccattgtaccattacatggtactggtgagaccacaccttgactattgtgttcagtttgagcccctcccttcaaaatgatattgagttactcaagcatgtgcaaggaagaacaatgaaattggtgaagggattagaaaacatgacttatgaaggatggatgaggaaactggagccctttagtctggaggaacggatggagaagagaggcctcatcactctgtataactacccgaaaggaggttsaagagaggaggatactrctctcttctcaggtgacaagtgctaaaatgcaaggaaacagtctcagcttgcactagagaaggtttaractgaacatcaggaagaaatccttcatggaaaggatggttacactttaacattaaacatctcccacccagggaagcggtgtagtctccatcccttgaggtacttaagagacatggggacatggcactaaagaacatggcttagtgatgggactcatcactattgatgacgtgagtgaccatcatgttgatggttggatttggtgattgtgaaagg

SEQ ID NO: 19768 - DNA, 600 bp, Chicken  19866894229770_2
atcagaaatagtgtgaccagcagaacttggaagtggttgtccattgtaccattacatggtactggtgagaccacaccttgactattgtgttcagtttgagcccctcccttcaaaatgatattgagttactcaagcatgtgcaaggaagaacaatgaaattggtgaagggattagaaaacatgacttatgaaggatggatgaggaaactggagccctttagtctggaggaacggatggagaagagaggcctcatcactctgtataactacccgaaaggaggttsaagagaggaggatactrctctcttctcaggtgacaagtgctaaaatgcaaggaaacagtctcagcttgcactagagaaggtttaractgaacatcaggaagaaatccttcatggaaaggatggttacactttaacattaaacatctcccacccagggaagcggtgtagtctccatcccttgaggtacttaagagacatggggacatggcactaaagaacatggcttagtgatgggactcatcactattgatgacgtgagtgaccatcatgttgatggttggatttggtgattgtgaaaggtgttttccaaactagag

SEQ ID NO: 19769 - DNA, 600 bp, Chicken  19866894229770_3
gaccacaccttgactattgtgttcagtttgagcccctcccttcaaaatgatattgagttactcaagcatgtgcaaggaagaacaatgaaattggtgaagggattagaaaacatgacttatgaaggatggatgaggaaactggagccctttagtctggaggaacggatggagaagagaggcctcatcactctgtataactacccgaaaggaggttsaagagaggaggatactrctctcttctcaggtgacaagtgctaaaatgcaaggaaacagtctcagcttgcactagagaaggtttaractgaacatcaggaagaaatccttcatggaaaggatggttacactttaacattaaacatctcccacccagggaagcggtgtagtctccatcccttgaggtacttaagagacatggggacatggcactaaagaacatggcttagtgatgggactcatcactattgatgacgtgagtgaccatcatgttgatggttggatttggtgattgtgaaaggtgttttccaaactagaggattctattattttatagttagtagtagtagatatattcttcttaactatgaaactatgaatagtttt

SEQ ID NO: 19770 - DNA, 600 bp, Chicken  19866894229772_1
aaaaagcttgcaggatttttttgtggtcgttttctggccattagttgaaataattctggactacaaggccttagttaaggagatgtaaaaatatatcacagagctagtgtccagcaacaaatgttaactttcattccacgtgttctgaatgtcaagggtatcagtagagagagagaaggggctgaaataaaaaaaggaatgcaaatgtgagcaatggacagctatctgcttcaaagtgcaagttgcaatcaataatgtcttaaccaggcaaaagagagaaaagaaatccacatgctgtastgtcaggggctagaggacctaagrctctttaggaaagtgaaaacagttgcagacacrgtgtgctggagacttaataataatgaggctggacatttaaaacctcagcgatataaatttatgaagagcacagaaaacaagactaaacacaggagctggaattcagagatcactttcatcagcttttatttctgactgcctggagtgcaaggtcagaataacaggcagaacctytcagtgtaattgcaaacttcttagacaagaaccttaagaaatagtgcccaggatggagaattaaaccat

SEQ ID NO: 19771 - DNA, 600 bp, Chicken  19866894229772_2
ggtcgttttctggccattagttgaaataattctggactacaaggccttagttaaggagatgtaaaaatatatcacagagctagtgtccagcaacaaatgttaactttcattccacgtgttctgaatgtcaagggtatcagtagagagagagaaggggctgaaataaaaaaaggaatgcaaatgtgagcaatggacagctatctgcttcaaagtgcaagttgcaatcaataatgtcttaaccaggcaaaagagagaaaagaaatccacatgctgtastgtcaggggctagaggacctaagrctctttaggaaagtgaaaacagttgcagacacrgtgtgctggagacttaataataatgaggctggacatttaaaacctcagcgatataaatttatgaagagcacagaaaacaagactaaacacaggagctggaattcagagatcactttcatcagcttttatttctgactgcctggagtgcaaggtcagaataacaggcagaacctytcagtgtaattgcaaacttcttagacaagaaccttaagaaatagtgcccaggatggagaattaaaccatgcagactattccaaaagggagtgc

SEQ ID NO: 19772 - DNA, 600 bp, Chicken  19866894229772_3
ggactacaaggccttagttaaggagatgtaaaaatatatcacagagctagtgtccagcaacaaatgttaactttcattccacgtgttctgaatgtcaagggtatcagtagagagagagaaggggctgaaataaaaaaaggaatgcaaatgtgagcaatggacagctatctgcttcaaagtgcaagttgcaatcaataatgtcttaaccaggcaaaagagagaaaagaaatccacatgctgtastgtcaggggctagaggacctaagrctctttaggaaagtgaaaacagttgcagacacrgtgtgctggagacttaataataatgaggctggacatttaaaacctcagcgatataaatttatgaagagcacagaaaacaagactaaacacaggagctggaattcagagatcactttcatcagcttttatttctgactgcctggagtgcaaggtcagaataacaggcagaacctytcagtgtaattgcaaacttcttagacaagaaccttaagaaatagtgcccaggatggagaattaaaccatgcagactattccaaaagggagtgctgagaaacagcacttaccacagccagatttctc

SEQ ID NO: 19773 - DNA, 600 bp, Chicken  19866894229772_4
caaagtgcaagttgcaatcaataatgtcttaaccaggcaaaagagagaaaagaaatccacatgctgtastgtcaggggctagaggacctaagrctctttaggaaagtgaaaacagttgcagacacrgtgtgctggagacttaataataatgaggctggacatttaaaacctcagcgatataaatttatgaagagcacagaaaacaagactaaacacaggagctggaattcagagatcactttcatcagcttttatttctgactgcctggagtgcaaggtcagaataacaggcagaacctytcagtgtaattgcaaacttcttagacaagaaccttaagaaatagtgcccaggatggagaattaaaccatgcagactattccaaaagggagtgctgagaaacagcacttaccacagccagatttctcacttgatgctggcttttagtttagagttttttcccttggctctttcaaaacatgtcaggagaagaaatcagataacatgacctgatgttgtgaatayttaacacgtattggtatgcttacacttggtcatgtctcttatagacaaagagcttgattgaagcaccatctgaataa

SEQ ID NO: 19774 - DNA, 600 bp, Chicken  19866894229772_5
ggaattcagagatcactttcatcagcttttatttctgactgcctggagtgcaaggtcagaataacaggcagaacctytcagtgtaattgcaaacttcttagacaagaaccttaagaaatagtgcccaggatggagaattaaaccatgcagactattccaaaagggagtgctgagaaacagcacttaccacagccagatttctcacttgatgctggcttttagtttagagttttttcccttggctctttcaaaacatgtcaggagaagaaatcagataacatgacctgatgttgtgaatayttaacacgtattggtatgcttacacttggtcatgtctcttatagacaaagagcttgattgaagcaccatctgaataaaatgtaaactgattaatctgtaaaatgggagtggacggaacagttcataaagtctagaactatcttgcacaccctttcctttgattaaaagcatctgtctgtagttgtttagttcagtccatagcttatttccctataagagtatttccatattcaatgttgattcctgaatccggaagacttttgcatctgttgattaatgctttctagtatacattgtctt

SEQ ID NO: 19775 - DNA, 563 bp, Chicken  19866894229775_1
caatcagaaaaaaaacttcaacatctgcttggagagagtaataccagtgagtttctatggaatttctgctacttttacctttgaggttgttaacaaccggtgtgtgagggagctcatggtcaacccaaaagtgtagatactggatatcattgagtctttaggggtgggttccaagctacacccaaagcctggattccagggagccttttagcctctcccacatgtggtcactcacggcagcctcttttcttcccttccccatcccagatgaagcgtgctggaacaacaggctcgtctcgygggatggctctgtatgaggaggaggtagggaccctcagcacttttcacctcatctttcacatcgtaacccttcttcgaaccagcaaggggttctgcgtgcctacaagtctccttcacatctgttctgtctcttctttgccattgcctggcttccgctcctggcctgcatcctcatctccagttgcttcctcttgcaggtggatcgcggtggggacgtggaaaagcgtggcaagatcctggtgtccctcatgtacagcacccag

SEQ ID NO: 19776 - DNA, 600 bp, Chicken  19866894229781_1
gttggtaccatacagtcattttcctgcattgccatccagcccctgctatggctgaatttgcgttctgtgtctgcaggagatgaaggcatcgtggtggggctgatggtcccggcagcatttacaaacaccctcctttgatctccagtgaccgacttgaagctgtcagtgaacgataatacaattaaagggtgataatttcaaaaggatttaattctttcaagcccctctggttagcacggctgccacaactgtgtcctcctctgctcagcacagccaggagcatgggctcctgcagctccycctgagcagcagtgggatctgtcctgcttctaccaggggctctcctgctgtgttggatctccataaaaacagtgaaggtgggggcacctcctgggtaggaatgagccaaagcccctttgtgctctatggagtcatggaatcactgacgttggaaaagaccctcaggtctatagaatcatagggtcactaaggtcggagatcctcaaggtcatctatgagatcacagagccattgaggttggaaagatgctcgagatcatctgtgggatcatagaaccattggagttggaaaagacctcaa

SEQ ID NO: 19777 - DNA, 600 bp, Chicken  19866894229783_1
taaacttataaaatggcactaatggacattttgtccttacactaacaaatagcaagatattcttgtcatgagtcttttgatatcatagtttttaatgcaatttagtctactaatctccatgacagattagcagaatgtgctggagagcaatgtaatcataaatgagaaacaaaaggtgaagtcagactgacctttggcaactcacaactcctctgttagatgcagtctttaatatataaatactatcatatgtttcttgatattccaaataaaaagaaagccatatgttcatgatagagsaggactttgcaaatgtcaccaagttgatttttcctaaaaccgtactgcagagcattccagtgttggtatttagggcacaccttgggaactcctgttttggagatttcctttcttcttacgatactgatgtagatgcaaaacaagaatcatatctaagaaggatcctaagccatgtacttataaatttggtgattgtgtgagtgttttgagagagagttgtgaaagttcagcagtccttcacctgtggtcctctttccacttgattcattgaacctcagtatgtttatcccttaagataaa

SEQ ID NO: 19778 - DNA, 599 bp, Chicken  19866894229788_1
  misc_feature (1)..(79): n is any nucleotide
nnnnnnnnnnnnnnnnnnnnnnnnnnnnnnnnnnnnnnnnnnnnnnnnnnnnnnnnnnnnnnnnnnnnnnnnnnnnnnncagcaggagagcattgcaaatccctacttgtgcttcacacgctgccatcaccccagcacacgagcctcaaacacagggccaaacaggagagtcaaagcaattctcacactatcagcttctggaatatatgtatttttttcctttctttcttgaaactcatacccttatctccaaagcctccctgctgcctgggattacaagcagacaacacgccatctcamtgcagtagggaaaacaccctgcaaaattaagagttaagcttttaaagtagatataacagttaaaatacattttaacttctcgtgttcaacttcgaatgggaacctcagtttttactacaggttcagcagcaagataagcaccaaagttagaacatagcaaaagtaagcagacctagcccttatctgcctaaatgaccttgagtaatgtactgctagytgctgctccactgcttttgcccctctgcatgtcagtggcttttttttttttaacccagcacatccattttactaagctgtga

SEQ ID NO: 19779 - DNA, 600 bp, Chicken  19866894229788_2
tcctttctttcttgaaactcatacccttatctccaaagcctccctgctgcctgggattacaagcagacaacacgccatctcamtgcagtagggaaaacaccctgcaaaattaagagttaagcttttaaagtagatataacagttaaaatacattttaacttctcgtgttcaacttcgaatgggaacctcagtttttactacaggttcagcagcaagataagcaccaaagttagaacatagcaaaagtaagcagacctagcccttatctgcctaaatgaccttgagtaatgtactgctagytgctgctccactgcttttgcccctctgcatgtcagtggcttttttttttttaacccagcacatccattttactaagctgtgaaatacactggagaaagcaccactagcacacaactgtttctatattgaatacccccctaaataaagctccctaacaaacaatttaaaggacagagcataaacctgagctgtaagattgcaatggtaaagccaggaaaatcaaaataaataagccttgcttgaggtgtgcatgttttccaaatatctatttccttccttctacacctttaatacccttta

SEQ ID NO: 19780 - DNA, 600 bp, Chicken  19866894229794_1
gtcaccactgtcactgctggtacacaccatccaccacaggcactgtctcacatccactgtttggtctccataaacattcagcaagcatcaatgaatgtcaatgggtgccatttcttccacacggaggaattcaattacatggttttgcttcaatctccactgccatagcagcaacatctgcctctgatgttgtgggccaacataacaaaataggacgcattacttttggagcagccctcatacactcaaacaaaatgacaccctcacagtgtgtaaagtgcttatcactactgcctacawgactgcttgggttacttctgcgactgtggcctggctggcattcagacagctaaaagatgctacccatgtgtttccaggatcccagacttaaatttagtgattcagaggagaaaaggtatgtgattacataattaaagaccgatagaatgcatgcctagcgtggcgcacaaaacctgaacttaggcatttcctgacttctgagtgtttcacaccacaaaactctgcaaaatcagtaaaatactcatctactctggaaaaaatggaaaacgcttttgagagaacagacagagaggtaacaaa

SEQ ID NO: 19781 - DNA, 600 bp, Chicken  19866894229794_2
aaatgacaccctcacagtgtgtaaagtgcttatcactactgcctacawgactgcttgggttacttctgcgactgtggcctggctggcattcagacagctaaaagatgctacccatgtgtttccaggatcccagacttaaatttagtgattcagaggagaaaaggtatgtgattacataattaaagaccgatagaatgcatgcctagcgtggcgcacaaaacctgaacttaggcatttcctgacttctgagtgtttcacaccacaaaactctgcaaaatcagtaaaatactcatctactcwggaaaaaatggaaaacgcttttgagagaacagacagagaggtaacaaacaaacaaacacggaggcattaaaagcagctgtcctttccaagttttccaaacagtcctgatcctgacccattaagtgtgccttgttgagctctgcagctccctacgtccacggtaacccgggcacctgaggagcttcctgaagcccagcgccaggctgtaaggctgcacatgctgtggtgaggggccaggctgagcccctgccccttcccagctctccgggagccttcacggcactttaccagaggaagcag

SEQ ID NO: 19782 - DNA, 600 bp, Chicken  19866894229794_3; identical to SEQ ID NO: 19781

SEQ ID NO: 19783 - DNA, 600 bp, Chicken  19866894229794_4
tcctttccaagttttccaaacagtcctgatcctgacccattaagtgtgccttgttgagctctgcagctccctacgtccacggtaacccgggcacctgaggagcttcctgaagcccagcgccaggctgtaaggctgcacatgctgtggtgaggggccaggctgagcccctgccccttcccagctctccgggagccttcacggcactttaccagaggaagcagttcagctgggcaggtacatatggtgatttctttttcagctgtgcgttttatgactttttggcagggggcgggggggagragaaagaaatctgctcttcatgcttagtgtgtgattttcaaatgcttgtaggtttttcagttatgtctgatttcctttggaatcactaatgacccagctcttcactgcgggatatctcccctgccaaatttcaccttcaaagctctggctaaaaaatgctatttatgaaagatgagacaaagaaacattttcatgcatgaaaagattatttacttattaccctgttttttttttgcttttttctttttcctaaaagaaaaaagaccttttccaggccacatttgcagaaagctaaggaag

SEQ ID NO: 19784 - DNA, 536 bp, Chicken  19866894229795_1
ttgataccttcacagtaactctcactggtggtgtaggtgttgagctccaattctaccacagcatatatgcttcacctcagcatttctgagtctttctgaaggcatggaggtctcttaaagcacagtgtggaagttgtccttatcacctgaatgctggacctaccgtgctggataataacatggatgtgccccatctgagagtgggatgggatgggtagcatccaaggtggcagagctgcccatcaattgcaactgctcgttaatttcagaggttcccaattctatgtatgatgttgtcamtagaaagaattgcatgcaggaaggtggtgctgctgtggtgttactcaaaagtgttttcctcaggtttatgcctctgtgtctggctgcactgcagctctctgcctggagcacgtaggttagaaacttgcttattcctgacctgacagatgtcaccgggagctgaactctgaacacagaaacaaagcaggaaaaaaagttcccagctaattttgtctaattaagttcttatagtttag

SEQ ID NO: 19785 - DNA, 600 bp, Chicken  19866894229801_1
agggtagattatccaaggaaagttattcaagagactttaaaccctgatggtaggaaagaggtatgatagtgtggacataaaacaatgaaactaccagacattattggtagataaatgccacttagtagaggacttagagaactataatgtggtaagtcacaggtgatctgcatcagattcagaaaaaaacagtgttctggagagagaattggaatgaaagtcttcctttcccagcacaaacccattatcagcaataccacagagagttgatacagcactgtcagtgaaacagtttcttaytgtaaagaaaaagtaaggaatgacatctacactggcaaagtccaaactcagttwtacaaactccagtttagagggactgcattatgcagaaagttttcatttaatgtatccttaggtttgttttatcttcttggtacattaaaacaggaagcaactgtagatgtggaggtctgtyctaggtagcaactaatttaaactattttaaatatatccaaacagaatatacacgcagaagggtccagtaaaaatagccattggttagttagatgaggctatttagagtgaatgtgatgttatgaa

SEQ ID NO: 19786 - DNA, 600 bp, Chicken  19866894229801_2
aaagaggtatgatagtgtggacataaaacaatgaaactaccagacattattggtagataaatgccacttagtagaggacttagagaactataatgtggtaagtcacaggtgatctgcatcagattcagaaaaaaacagtgttctggagagagaattggaatgaaagtcttcctttcccagcacaaacccattatcagcaataccacagagagttgatacagcactgtcagtgaaacagtttcttaytgtaaagaaaaagtaaggaatgacatctacactggcaaagtccaaactcagttwtacaaactccagtttagagggactgcattatgcagaaagttttcatttaatgtatccttaggtttgttttatcttcttggtacattaaaacaggaagcaactgtagatgtggaggtctgtyctaggtagcaactaatttaaactattttaaatatatccaaacagaatatacacgcagaagggtccagtaaaaatagccattggttagttagatgaggctatttagagtgaatgtgatgttatgaaaatggtgccaaataaactttgattgtactttaaaatcaaaacgtaaatagatgg

SEQ ID NO: 19787 - DNA, 600 bp, Chicken  19866894229801_3
gattcagaaaaaaacagtgttctggagagagaattggaatgaaagtcttcctttcccagcacaaacccattatcagcaataccacagagagttgatacagcactgtcagtgaaacagtttcttaytgtaaagaaaaagtaaggaatgacatctacactggcaaagtccaaactcagttwtacaaactccagtttagagggactgcattatgcagaaagttttcatttaatgtatccttaggtttgttttatcttcttggtacattaaaacaggaagcaactgtagatgtggaggtctgtyctaggtagcaactaatttaaactattttaaatatatccaaacagaatatacacgcagaagggtccagtaaaaatagccattggttagttagatgaggctatttagagtgaatgtgatgttatgaaaatggtgccaaataaactttgattgtactttaaaatcaaaacgtaaatagatggaaaatgaaacaatcaggaaagagtattagaattgatatctctagcatcttcttataagaatttcgctttattactttattgactaatcagagatgtaacagcagctaatgcagtaactcag

SEQ ID NO: 19788 - DNA, 600 bp, Chicken  19866894229805_1
tgttttaatgctgtttttcaagcagtggttgtactggtggatactggtatccagttgagatttgactcttagaagccagtacatcaagtatgatgttaggctagtttcatgagtaaatcatcgagttttgaactcctgtctttcctaatgagttgcttctataataaactaatagatagaaattctctgggttgtcccatgatgaaaatgtgcagcttggtgcttttaaaagttctgcctgtttcctctgaggagggcagcagggggcacagggcctaaagcctctcctagaaggcttcyttagctgttagtgaaagccaacctgggttgtgctttgactgaaactcctcacgtgaacaagaagagttcagggggtgtgcagggctacagtgaaacaaggggatctgactagaaagacttgctcatgtagggggaggtcattggctaaaatgtaggaagggagagatgtaattggaacacttgcagtgagttgccttgttcagcattttgggtgggaaaatagctataggaagtgatttgccaccatctcactcagtatttttgtttgtttgtttttgttgttgtagggtttacaacatc

SEQ ID NO: 19789 - DNA, 600 bp, Chicken  19866894229806_1
attaacagaaaataaggaaagatgttaattaaaagaaaaaactgagcacagtagtgtggataacagcaatgtggaagtgaaaaaaaaccaccacaaagccagaagcatgaacaaaaagcaaacagtatcaccagatcatgaagtcatgaatatttcccaacatcgatagtttcatcagggcagcgataccaccagacagaaaaaagctaaaaaaaaaaaaggaagtaaccatggacagaaagtaaagcgaatgttgatgaccttgtgttccataaggaacacccacccaaaatcatgcartactgccttacagtttaactgaaggactgtaagaatagatgataaataggtggtgctgaataggcagattttattgaagttctgtagaagtagctttgcccaacatcaaggcttgcgttaaagcctacacaactgctcgcatgcttacccagtatgcctgcataactgcaccaacacacttcaaattgtactgttctgaagactggagtaataggaactatatttaaattacaaacatgtccacagttgtgcagcaaactagctcactgaagggaaaaatctgattgagagaacgataca

SEQ ID NO: 19790 - DNA, 600 bp, Chicken  19866894229806_2
ctgccttacagtttaactgaaggactgtaagaatagatgataaataggtggtgctgaataggcagattttattgaagttctgtagaagtagctttgcccaacatcaaggcttgcgttaaagcctacacaactgctcgcatgcttacccagtatgcctgcataactgcaccaacacacttcaaattgtactgttctgaagactggagtaataggaactatatttaaattacaaacatgtccacagttgtgcagcaaactagctcactgaagggaaaaatctgattgagagaacgatacatsttgaaaactgagtcagtaatgtgaggcagctataaaaaacagtcaactccagtattactgtgcatcaggcaaagtattttrcagagagacaggacaaagtacaaatactcctggagaaggcatttgtgcaatgcatcactgtatgtcagcaccgactactctggttttaagattcctttcaacttcacaagtgcacaaacgggattagcagcataagaaagaagagttccaagtcaccctgagaagatgaagacatcttacttgccctaacagaagrcaaagacttcacattccctaaaa

SEQ ID NO: 19791 - DNA, 600 bp, Chicken  19866894229806_3
gtagaagtagctttgcccaacatcaaggcttgcgttaaagcctacacaactgctcgcatgcttacccagtatgcctgcataactgcaccaacacacttcaaattgtactgttctgaagactggagtaataggaactatatttaaattacaaacatgtccacagttgtgcagcaaactagctcactgaagggaaaaatctgattgagagaacgatacatsttgaaaactgagtcagtaatgtgaggcagctataaaaaacagtcaactccagtattactgtgcatcaggcaaagtattttrcagagagacaggacaaagtacaaatactcctggagaaggcatttgtgcaatgcatcactgtatgtcagcaccgactactctggttttaagattcctttcaacttcacaagtgcacaaacgggattagcagcataagaaagaagagttccaagtcaccctgagaagatgaagacatcttacttgccctaacagaagrcaaagacttcacattccctaaaatgccacgggcaaacaagagccatgtaaactgaagaacactgccacaaaaacagagcatgaatacactgtgaagtagtctat

SEQ ID NO: 19792 - DNA, 600 bp, Chicken  19866894229806_4
tctgattgagagaacgatacatsttgaaaactgagtcagtaatgtgaggcagctataaaaaacagtcaactccagtattactgtgcatcaggcaaagtattttrcagagagacaggacaaagtacaaatactcctggagaaggcatttgtgcaatgcatcactgtatgtcagcaccgactactctggttttaagattcctttcaacttcacaagtgcacaaacgggattagcagcataagaaagaagagttccaagtcaccctgagaagatgaagacatcttacttgccctaacagaagrcaaagacttcacattccctaaaatgccacgggcaaacaagagccatgtaaactgaagaacactgccacaaaaacagagcatgaatacactgtgaagtagtctattttctactcattactgaagtgaaattctaaaacgccttttaatataagcaaatcaggacagaaagtctctggggacagttgagataatgttttcacagcttgtataaatctatccacaggaagttttaggtatctgttccctacagaccaattcacagctgtcctctaccacctacattccccaaagcacacggta

SEQ ID NO: 19793 - DNA, 600 bp, Chicken  19866894229816_1
ggagttagttccctgggagtatcacgtaactttgaggtaagtcactgacagattgaaaaaaaaaaaaaagcataaaaaagccagtttacatcttgacctggattaacgatcaaatatattcaattattttttcttttgtactatagactgcattctcccaaacacacaaccagatttgtagcaaggttaaattccaaccagtcatcactgcaatacctttggaactgcagcttgcgaaatgctgcagaaatctggcagtttctccaaccatggagtctctgatagagatacgcaaagaaygaacrttccccagcatgtttgcagcaagctgcatgtggaagagtgcaaagcacgagcgtagtgaggcattcctgctaattttggtgattgtcatcactcacaaataagcaggatatgtactattttaaaaatatatatataattggaaaaagagagtgattttactaagaaaattctaaagcacataaaatcagaatcatccaaaattctgtagagaacttattcacctatcatgtaagaccactttattatgaagaagcagcaagccagcagtactatttgagcatttccttccttctt

SEQ ID NO: 19794 - DNA, 600 bp, Chicken  19866894229816_2
tagttccctgggagtatcacgtaactttgaggtaagtcactgacagattgaaaaaaaaaaaaaagcataaaaaagccagtttacatcttgacctggattaacgatcaaatatattcaattattttttcttttgtactatagactgcattctcccaaacacacaaccagatttgtagcaaggttaaattccaaccagtcatcactgcaatacctttggaactgcagcttgcgaaatgctgcagaaatctggcagtttctccaaccatggagtctctgatagagatacgcaaagaaygaacrttccccagcatgtttgcagcaagctgcatgtggaagagtgcaaagcacgagcgtagtgaggcattcctgctaattttggtgattgtcatcactcacaaataagcaggatatgtactattttaaaaatatatatataattggaaaaagagagtgattttactaagaaaattctaaagcacataaaatcagaatcatccaaaattctgtagagaacttattcacctatcatgtaagaccactttattatgaagaagcagcaagccagcagtactatttgagcatttccttccttcttcccca

SEQ ID NO: 19795 - DNA, 600 bp, Chicken  19866894229818_1
tctggggatgatgttatgagaatgagtcagcccagaaggcacttctttgctggctgataaaaccttcctccacagaaaccatctgatctgtgtataaacttgcagaaggatttggaacaaataagatttttttttctttgtaaaacaatacgcactctatattagcagccacattttagaaacttcctggctgcaactgtcaagcattaaatgcaaataacaacattacactggtttaaaagtaacagctttctgaaagcctcttgtctctgtagttcctgtatttcttgtcttttagtractctacaccaccataagaagaatgtcaattgtcttcctctgtgaacctaggtttaatgatgtagtgaacatatgcaatgcagaagaacagacagtaagattttttccttaacataataagttgtaggtagggcttgcgactgtgagtaaaaagtatactagaaagagtcagattttaaggaacagtctagtggatcttaattccattctcaggcttgtttccccaccatcttgaaaccttgatgatgatgaagacatatatatgccaaaatatacaaaatatgttggctgttggactag

SEQ ID NO: 19796 - DNA, 599 bp, Chicken  19866894229823_1
  misc_feature (1)..(153): n is any nucleotide
nnnnnnnnnnnnnnnnnnnnnnnnnnnnnnnnnnnnnnnnnnnnnnnnnnnnnnnnnnnnnnnnnnnnnnnnnnnnnnnnnnnnnnnnnnnnnnnnnnnnnnnnnnnnnnnnnnnnnnnnnnnnnnnnnnnnnnnnnnnnnnnnnnnnnnnnnttgcttttttcttactgtaggttgcaatcaagcagatgaatttgcagcagcagcccaaaaaggaattgattatcaatgaaatcctcgtaatgagggaaaacaaaaaccccaacattgtcaactacttggacaggtatgtcacagttygaagagttcacaaagsagctctggaaaacacttmcttgwcactgtcttaagtgatcctgtctcagcttaatgcaaatgaaggacagtcttgcatctggcaaggctggggtgtggatgatgtagtggtctccgtccaaatcctaggagaaacaagtgactgaattggtgctaatggagaatccagtcttcttagagatactggcattagcagcatgctgtcaggactccatttttcaacatgctctgccaaatttaacatggtgagccatttccttcctgtgcctmgaggagaaatggaa

SEQ ID NO: 19797 - DNA, 599 bp, Chicken  19866894229823_2
  misc_feature (1)..(137): n is any nucleotide
nnnnnnnnnnnnnnnnnnnnnnnnnnnnnnnnnnnnnnnnnnnnnnnnnnnnnnnnnnnnnnnnnnnnnnnnnnnnnnnnnnnnnnnnnnnnnnnnnnnnnnnnnnnnnnnnnnnnnnnnnnnnnnnnnnnnnnnnnttgcttttttcttactgtaggttgcaatcaagcagatgaatttgcagcagcagcccaaaaaggaattgattatcaatgaaatcctcgtaatgagggaaaacaaaaaccccaacattgtcaactacttggacaggtatgtcacagttygaagagttcacaaagsagctctggaaaacacttmcttgwcactgtcttaagtgatcctgtctcagcttaatgcaaatgaaggacagtcttgcatctggcaaggctggggtgtggatgatgtagtggtctccgtccaaatcctaggagaaacaagtgactgaattggtgctaatggagaatccagtcttcttagagatactggcattagcagcatgctgtcaggactccatttttcaacatgctctgccaaatttaacatggtgagccatttccttcctgtgcctmgaggagaaatggaaattgatttaactgtgt

SEQ ID NO: 19798 - DNA, 599 bp, Chicken  19866894229823_3
  misc_feature (1)..(119): n is any nucleotide
nnnnnnnnnnnnnnnnnnnnnnnnnnnnnnnnnnnnnnnnnnnnnnnnnnnnnnnnnnnnnnnnnnnnnnnnnnnnnnnnnnnnnnnnnnnnnnnnnnnnnnnnnnnnnnnnnnnnnnnttgcttttttcttactgtaggttgcaatcaagcagatgaatttgcagcagcagcccaaaaaggaattgattatcaatgaaatcctcgtaatgagggaaaacaaaaaccccaacattgtcaactacttggacaggtatgtcacagttygaagagttcacaaagsagctctggaaaacacttmcttgwcactgtcttaagtgatcctgtctcagcttaatgcaaatgaaggacagtcttgcatctggcaaggctggggtgtggatgatgtagtggtctccgtccaaatcctaggagaaacaagtgactgaattggtgctaatggagaatccagtcttcttagagatactggcattagcagcatgctgtcaggactccatttttcaacatgctctgccaaatttaacatggtgagccatttccttcctgtgcctmgaggagaaatggaaattgatttaactgtgttatttatatttgttttcc

SEQ ID NO: 19799 - DNA, 599 bp, Chicken  19866894229823_4
  misc_feature (1)..(114): n is any nucleotide
nnnnnnnnnnnnnnnnnnnnnnnnnnnnnnnnnnnnnnnnnnnnnnnnnnnnnnnnnnnnnnnnnnnnnnnnnnnnnnnnnnnnnnnnnnnnnnnnnnnnnnnnnnnnnnnnnnttgcttttttcttactgtaggttgcaatcaagcagatgaatttgcagcagcagcccaaaaaggaattgattatcaatgaaatcctcgtaatgagggaaaacaaaaaccccaacattgtcaactacttggacaggtatgtcacagttygaagagttcacaaagsagctctggaaaacacttmcttgwcactgtcttaagtgatcctgtctcagcttaatgcaaatgaaggacagtcttgcatctggcaaggctggggtgtggatgatgtagtggtctccgtccaaatcctaggagaaacaagtgactgaattggtgctaatggagaatccagtcttcttagagatactggcattagcagcatgctgtcaggactccatttttcaacatgctctgccaaatttaacatggtgagccatttccttcctgtgcctmgaggagaaatggaaattgatttaactgtgttatttatatttgttttcctcttc

SEQ ID NO: 19800 - DNA, 600 bp, Chicken  19866894229823_5
ggtatgtcacagttygaagagttcacaaagsagctctggaaaacacttmcttgwcactgtcttaagtgatcctgtctcagcttaatgcaaatgaaggacagtcttgcatctggcaaggctggggtgtggatgatgtagtggtctccgtccaaatcctaggagaaacaagtgactgaattggtgctaatggagaatccagtcttcttagagatactggcattagcagcatgctgtcaggactccatttttcaacatgctctgccaaatttaacatggtgagccatttccttcctgtgcctmgaggagaaatggaaattgatttaactgtgttatttatatttgttttcctcttctttcctgagcaagacagacattctgctagcagtagctccttctaggcataggtggtaatcctatccctgttgctgtccactgaggttttctatgtagtgakgagggtaaataacatgkaacatggaactaagcaaaactgttttcttgtggataagggagagaagaagagctggcacaatgtataaaaatcctttgaaaggtgtaagaaacaagcttatttcttacttgtagctgaattctgtggac

SEQ ID NO: 19801 - DNA, 600 bp, Chicken  19866894229823_6
cctaggagaaacaagtgactgaattggtgctaatggagaatccagtcttcttagagatactggcattagcagcatgctgtcaggactccatttttcaacatgctctgccaaatttaacatggtgagccatttccttcctgtgcctmgaggagaaatggaaattgatttaactgtgttatttatatttgttttcctcttctttcctgagcaagacagacattctgctagcagtagctccttctaggcataggtggtaatcctatccctgttgctgtccactgaggttttctatgtagtgakgagggtaaataacatgkaacatggaactaagcaaaactgttttcttgtggataagggagagaagaagagctggcacaatgtataaaaatcctttgaaaggtgtaagaaacaagcttatttcttacttgtagctgaattctgtggacttgtacacgtgctgtgttactcctgctcagccttgggtatgttgcattcatgtggaacatcttgaatccctgcttctccttactgcaggagctgcacctaattgcttacatatgtagggacctgctctacttgcacttgttccttggattagga

SEQ ID NO: 19802 - DNA, 600 bp, Chicken  19866894229823_7
actgaattggtgctaatggagaatccagtcttcttagagatactggcattagcagcatgctgtcaggactccatttttcaacatgctctgccaaatttaacatggtgagccatttccttcctgtgcctmgaggagaaatggaaattgatttaactgtgttatttatatttgttttcctcttctttcctgagcaagacagacattctgctagcagtagctccttctaggcataggtggtaatcctatccctgttgctgtccactgaggttttctatgtagtgakgagggtaaataacatgkaacatggaactaagcaaaactgttttcttgtggataagggagagaagaagagctggcacaatgtataaaaatcctttgaaaggtgtaagaaacaagcttatttcttacttgtagctgaattctgtggacttgtacacgtgctgtgttactcctgctcagccttgggtatgttgcattcatgtggaacatcttgaatccctgcttctccttactgcaggagctgcacctaattgcttacatatgtagggacctgctctacttgcacttgttccttggattaggacagaaacagagcagaac

SEQ ID NO: 19803 - DNA, 600 bp, Chicken  19866894229824_1
atttgattccatatattgatttctttttcaatagcattctaacaagcagggagcccaatgggaatttgtgtcctaccctctgtgtctgcaggtgcgtgttttccaaaatgggaaccatgtaggaaagggtactttccctcctgctgggtggtcctatgggctctcagctgctccagcatgtggcagatcctgcaggaagacttaaatgttttggaaacactttatttggtagaagtggatttgcagaattatggaatgctctttagcctcctgccttcacatgtgaaatgtctgcagaartgtggacagtccatttaggagcccttttgtatgcaatgagttttatgcactgcatattttaccgtttgttttttattgctttgcattctttttctatgtattgagggctgagaaacttgaacatcatggtatgtctgtttgtgcccctcattctgatttatttattgtcctttgttctgagttttggattttgatgcactttggcctcactccttgctttctcatctacaaacaactgaaagcatgcaagcgacgccttcttactctcactaatacctgtccagccggacagctggggct

SEQ ID NO: 19804 - DNA, 599 bp, Chicken  19866894229827_1
  misc_feature (1)..(120): n is any nucleotide
nnnnnnnnnnnnnnnnnnnnnnnnnnnnnnnnnnnnnnnnnnnnnnnnnnnnnnnnnnnnnnnnnnnnnnnnnnnnnnnnnnnnnnnnnnnnnnnnnnnnnnnnnnnnnnnnnnnnnnnncttggggtggttcacaggaactgggtgacaaaacagtacctcctttcattttcttaggagaaagaaagaaataattttgccttttgtttaaaaaactaaagtgaattgaattgatactatactatggaagagttaaatccctgtataaattgctgtaacaacttattggaaagaaagagraaaaaaaaaattccctagaagagagaatttaatacttttggtggtgtatggaaaaaatcactatgggacagtaaactacagtgataccattcattatcgtagcacccagtcaaaaaatgtgagccacttaagtactttgatgtttaggtttctccaaccgtacccgcaagtgcatataatttttattgtgtataatggacaagaaagctgtttaccagattttcagctctgagcactttagaagttatttaatgtcatttcaaacaatagaataactccaattctcctttcaaactgcc

SEQ ID NO: 19805 - DNA, 600 bp, Chicken  19866894229833_1
aaactctgaggagagaaccctgcagtggcaaaccctttctctgcaggatggcagagaatcctcctgttttctcttaggtatgtttgctgttgtcgggcagaggtggagaggcaagtgtgcagagctggctgagagtcagcctgtgatgctcctataagcacatctgttctgcaggcccttgccctgatctgtcctgcaggctcttaccctgctttctgcttagggtggtagctcaccagctggggttcatttcacacctcagtatttctttgaaacccaatgatttggttccttcaatgytgggttttatgttcagtctttctgcagaagtttgatgtctgtgtgcctcgtggtgtaaatatttttattgttccacagcttgtgacagcaggatatgtgcaagtagaggaaatggaaatcagtcgtgartacttactggtgtcartgcacatgaaacaaaacacactgtttgtctgtgcaacttgcacctagaccagcagcagtgccacaagtagatgtctcaataggaagccgcagtggtaaagccaggtcttgtggtaggatgtgggtagtgctgttgattcacatttttctgatgtg

SEQ ID NO: 19806 - DNA, 600 bp, Chicken  19866894229833_2
tgagagtcagcctgtgatgctcctataagcacatctgttctgcaggcccttgccctgatctgtcctgcaggctcttaccctgctttctgcttagggtggtagctcaccagctggggttcatttcacacctcagtatttctttgaaacccaatgatttggttccttcaatgytgggttttatgttcagtctttctgcagaagtttgatgtctgtgtgcctcgtggtgtaaatatttttattgttccacagcttgtgacagcaggatatgtgcaagtagaggaaatggaaatcagtcgtgartacttactggtgtcartgcacatgaaacaaaacacactgtttgtctgtgcaacttgcacctagaccagcagcagtgccacaagtagatgtctcaataggaagccgcagtggtaaagccaggtcttgtggtaggatgtgggtagtgctgttgattcacatttttctgatgtgcaggttgagctggtgtggcaaaccttgcatgtttcccctgaaagaatgctgggtaaaatgttgaattagagcagaagtaaatgctgaatgaaggcggaagaaatgatgtacttctgagctacgagtggt

SEQ ID NO: 19807 - DNA, 600 bp, Chicken  19866894229833_3
atgctcctataagcacatctgttctgcaggcccttgccctgatctgtcctgcaggctcttaccctgctttctgcttagggtggtagctcaccagctggggttcatttcacacctcagtatttctttgaaacccaatgatttggttccttcaatgytgggttttatgttcagtctttctgcagaagtttgatgtctgtgtgcctcgtggtgtaaatatttttattgttccacagcttgtgacagcaggatatgtgcaagtagaggaaatggaaatcagtcgtgartacttactggtgtcartgcacatgaaacaaaacacactgtttgtctgtgcaacttgcacctagaccagcagcagtgccacaagtagatgtctcaataggaagccgcagtggtaaagccaggtcttgtggtaggatgtgggtagtgctgttgattcacatttttctgatgtgcaggttgagctggtgtggcaaaccttgcatgtttcccctgaaagaatgctgggtaaaatgttgaattagagcagaagtaaatgctgaatgaaggcggaagaaatgatgtacttctgagctacgagtggtgtttcttctgttcatc

SEQ ID NO: 19808 - DNA, 600 bp, Chicken  19866894229834_1
gactaattgcttcatttaagttgattagggtttcttttaggttaaggagcaattgaaaaaactcaagggagttcatgaaaatcaatgaagtttagaggagtaagtttttgcttttacttttaactctatgcaatagaatctgaaatacctgtgttttatttacaggctggtaaagaatttacattttccttaaactgtgtacttatctaaagcaaaaaaccagtgagcatgaaaggaatgtgaatcccccagataagagattaattttcctcttgagacattggtctcgtgaagaaagcrctatctcagatttgtgaagcttggtgccacaagtgtcctgtctgaatactagcaagggacttatatttctgttcactgactcttgttttacaaaaacaatgagatacacccctctgcatgttgttaactgatttagtaaatcctttggctataggatgtgaggaatgttcccamgatgggaacttaaggttttagatctgagtagacttttctagtatttcaaatatgctatcttaaaatagtaaatgcaatatatatttttattgatcatttttccatctaaaaaacataatttttaaa

SEQ ID NO: 19809 - DNA, 600 bp, Chicken  19866894229834_2
gaatttacattttccttaaactgtgtacttatctaaagcaaaaaaccagtgagcatgaaaggaatgtgaatcccccagataagagattaattttcctcttgagacattggtctcgtgaagaaagcrctatctcagatttgtgaagcttggtgccacaagtgtcctgtctgaatactagcaagggacttatatttctgttcactgactcttgttttacaaaaacaatgagatacacccctctgcatgttgttaactgatttagtaaatcctttggctataggatgtgaggaatgttcccamgatgggaacttaaggttttagatctgagtagacttttctagtatttcaaatatgctatcttaaaatagtaaatgcaatatatatttttattgatcatttttccatctaaaaaacataatttttaaaaacattgaaactttcctgttgtttcctaaataagatccatccgaaagatattatgaagtttgacttcaaatataaaaagttgtaaaattatagttcagtttagaaaaggcagttatgaaaataggtgttgcaaggtaaaaataaaggtttcagctcaaatatttattatttgaa

SEQ ID NO: 19810 - DNA, 600 bp, Chicken  19866894229835_1
gggaaaggatatcgtccagagggatctggacaggcttgagaggtgggcctgtgtcaacctcacgaagttcaaaaaaagccaagtccatggtcctgcacctgggtggacataaaacccaagtacaaaaacaggctgggcagagaatggcttaagagcagccctgaggagaaggatttggggatgctggttgatgaaagactcaacatgagctagcaatgtgcacttgcagcccagaaggccaatggtattctgggttacatcaagagaagcatgaccagaaggttgagggaggtgattctkcccctttactctgctctcatgagaccaccayctgtagtactgtgtccagttctggggacccaaacccaagaaggacgtcaagctgttggagtgggtccagaggagggccacaaagatgatcagagggctggagcacttcctctttggggacaggctgagagagttgggggctgttcagcctgaagaaggctccagcatgtcctgatagcagcctttcagtatcttagaggggagatacaggaaagaagggaactgattcttgagcacattctgtggtgacagagaaaggggagacggcta

SEQ ID NO: 19811 - DNA, 600 bp, Chicken  19866894229835_2
aggcttgagaggtgggcctgtgtcaacctcacgaagttcaaaaaaagccaagtccatggtcctgcacctgggtggacataaaacccaagtacaaaaacaggctgggcagagaatggcttaagagcagccctgaggagaaggatttggggatgctggttgatgaaagactcaacatgagctagcaatgtgcacttgcagcccagaaggccaatggtattctgggttacatcaagagaagcatgaccagaaggttgagggaggtgattctkcccctttactctgctctcatgagaccaccayctgtagtactgtgtccagttctggggacccaaacccaagaaggacgtcaagctgttggagtgggtccagaggagggccacaaagatgatcagagggctggagcacttcctctttggggacaggctgagagagttgggggctgttcagcctgaagaaggctccagcatgtcctgatagcagcctttcagtatcttagaggggagatacaggaaagaagggaactgattcttgagcacattctgtggtgacagagaaaggggagacggctacaagctcaaagaggggaggttagatttaagg

SEQ ID NO: 19812 - DNA, 425 bp, Chicken  19866894229836_1
agaacttctccttttcatgtgcacatggcacagcacatcttctgattacagttattatcagagaggcaccatcacggttagcctcacttatcaccaacagagcgtacatccataatgtaatgagagaaatggcagcttgccactaactgctgtgtgctgataaaatgaccggtcaatacacagcagaatgtctttagcaggctgttcttcatctacacatggggcccaaaagatttttgtttgccctcaatctgtcctggtttgaatgttcacacttcacattgttttataagccacaamtgatcagaatctgttttacagttttcagccagctcaaagctacaaaaagccagctctatctgattaagagttaatggatactacagggccttatgcgtgctactcaatactttgtccttgttcta

SEQ ID NO: 19813 - DNA, 434 bp, Chicken  19866894229846_1
ccgtcccgggctgggctcgccccgcggggcggcctaacgacgcgcagagcccacctggccctcacccgagacgccggccgcccggcaacgggatggcgtcagctccggggcgggcccggaagcggcggctgttttgctgggccgccatggtgtgcgagaagtgtgagtggggtgggcttggaggggtccctggcactaagcgggggctgagggcagcctgcagcgcagttctgatcgtttctttcgttgtgtttctttccgcaggtgagaggaagctgggcacggtgatcactcctgatrctgctgtcgtttcctttgagctcagtgaaggtttgcttgccttcagctttctggagttgaacttgtccacctcactgcagcctttcagtatttaaaaggggtttgtaaacagggggggaatcaactttttcttg

SEQ ID NO: 19814 - DNA, 600 bp, Chicken  19866894229856_1
aagttgaaagagattgctttgcttcttgagctgtagtcagctggagagagaagacaggcaagggttcagacattgaaaccagcaattttttactcctggtctgagtgccttggtgggactctgattttgttcaccggtgctaatcggggataaatccacttacacgagatgatcagctccctgctgctgtaaatgggataatgcagctacactgaccttcaccagcagacatgagtgaagcctgagagttacagaatacaaactcatgtgagggagagatcagtttgtatttctgctcawggcacaacaaatctatttgctcccttaggcttttctttaaaagaatgtactcaagtttgtaatgcacaacccccactgctgccrttctcctcttttaatagacacatataatatgcagcccttgttactttccttctctttctcactcggatgctgtatctcagagaagtcagtcctgaaaattgctggctttgtaagcacagtctgagttgaaagaaaagcacggagtgcattaggcttcagctttttaattatcagttcataataaagggttctctttgtggggaaaaaaataatttc

SEQ ID NO: 19815 - DNA, 600 bp, Chicken  19866894229856_2
attttttactcctggtctgagtgccttggtgggactctgattttgttcaccggtgctaatcggggataaatccacttacacgagatgatcagctccctgctgctgtaaatgggataatgcagctacactgaccttcaccagcagacatgagtgaagcctgagagttacagaatacaaactcatgtgagggagagatcagtttgtatttctgctcawggcacaacaaatctatttgctcccttaggcttttctttaaaagaatgtactcaagtttgtaatgcacaacccccactgctgccrttctcctcttttaatagacacatataatatgcagcccttgttactttccttctctttctcactcggatgctgtatctcagagaagtcagtcctgaaaattgctggctttgtaagcacagtctgagttgaaagaaaagcacggagtgcattaggcttcagctttttaattatcagttcataataaagggttctctttgtggggaaaaaaataatttcctgaaggctgaacctctgcagggtttccaaggcatggagggaaatatcgatcctttgacaatgagtctctgcattcacagtgca

SEQ ID NO: 19816 - DNA, 600 bp, Chicken  19866894229859_1
actacccccatctttcacgtagaagcaacctgaatgacaattttaacatcaccacggagtaaattgtcccaataactccataattcaagcattttagtatgtctaaattgaaagaggaaccagggcagctttgacatacattttcagaggcattcaataaagtaaactaaataagtttagaggtcccaccttaaatgtgtttgtgccaaaactgcaaaaactgagctgaagaagaaacctctgttttaacacaaaagctaagctgtctgttgaaaaacaaagcagcacattcaggatttktgccctcccctctaacggggggatactccggagaacagggtcatagatggcattgtctctatggctgcttggaagcagtaatgcagttattgtaaagatttgtcagcaatgaggtcaccatgccccgagtcacagaaaatgttcatctacctataaccctattacagctcrcaagctaaatattttcttactcaaccctttggcttgagaaaacatgtatttaccttataaagctgtaattctgcatcaacattcagctaattggaggtttactgtcattaatttagatgatacacattt

SEQ ID NO: 19817 - DNA, 600 bp, Chicken  19866894229859_2
taagtttagaggtcccaccttaaatgtgtttgtgccaaaactgcaaaaactgagctgaagaagaaacctctgttttaacacaaaagctaagctgtctgttgaaaaacaaagcagcacattcaggatttktgccctcccctctaacggggggatactccggagaacagggtcatagatggcattgtctctatggctgcttggaagcagtaatgcagttattgtaaagatttgtcagcaatgaggtcaccatgccccgagtcacagaaaatgttcatctacctataaccctattacagctcrcaagctaaatattttcttactcaaccctttggcttgagaaaacatgtatttaccttataaagctgtaattctgcatcaacattcagctaattggaggtttactgtcattaatttagatgatacacatttgtcttccaaaaattgcttccagcatcttctgtaatgtaacctttcttttagctctcttttttttactgtcacacaactagcaattcagtgctcacaaatgacctcctgtgccccaaccatgccataacaatcaatggcagaaaattcataaaacakattaaattctgcagt

SEQ ID NO: 19818 - DNA, 600 bp, Chicken  19866894229859_3
ccctattacagctcrcaagctaaatattttcttactcaaccctttggcttgagaaaacatgtatttaccttataaagctgtaattctgcatcaacattcagctaattggaggtttactgtcattaatttagatgatacacatttgtcttccaaaaattgcttccagcatcttctgtaatgtaacctttcttttagctctcttttttttactgtcacacaactagcaattcagtgctcacaaatgacctcctgtgccccaaccatgccataacaatcaatggcagaaaattcataaaacakattaaattctgcagtgtttgctttgatgaattagtgggatttgttcgctttagctgctcagagttaatctttgatttttagctgtgtgcactgcactggaaagagtaaaccaaggacacatcctattttccttacttcaatactgacggtggaaatacagaactgcactcactgcagtaaagctgacttttttttaagttcattactgcttatctctgttatctcattacttccaacaatatatgaggaggaacttcccatgacaaagtgtttctatacgaaattggacataactacatt

SEQ ID NO: 19819 - DNA, 599 bp, Chicken  19866894229860_1
  misc_feature (1)..(182): n is any nucleotide
nnnnnnnnnnnnnnnnnnnnnnnnnnnnnnnnnnnnnnnnnnnnnnnnnnnnnnnnnnnnnnnnnnnnnnnnnnnnnnnnnnnnnnnnnnnnnnnnnnnnnnnnnnnnnnnnnnnnnnnnnnnnnnnnnnnnnnnnnnnnnnnnnnnnnnnnnnnnnnnnnnnnnnnnnnnnnnnnnnnnnnatgacagatgaatcatttcagcattttgttgaaatgatgtacagttctgatggctgaaagactgcgacgttgtaaactttgcctttctttaacataaacagaaaccgaagccgccgtratgttctcttcgaagccagggaggccctgccctgagacacacacacctctcctcctttttcctctctcagtacacgtggttctccagcacacgcggtgctgctgcacaccagaatcaaccccttctctccagaaaatgcacatctggaaggcagagtctcctcagatgacctcaaaggaagcgttagctgctattttttagtacgggtttggtttaggctttttgtcttaggcaacaagcagaagtcgtaacagtgacacttcctgctgctgtcagaagcacctgctgtctgccrtacc

SEQ ID NO: 19820 - DNA, 600 bp, Chicken  19866894229860_2
ccgtratgttctcttcgaagccagggaggccctgccctgagacacacacacctctcctcctttttcctctctcagtacacgtggttctccagcacacgcggtgctgctgcacaccagaatcaaccccttctctccagaaaatgcacatctggaaggcagagtctcctcagatgacctcaaaggaagcgttagctgctattttttagtacgggtttggtttaggctttttgtcttaggcaacaagcagaagtcgtaacagtgacacttcctgctgctgtcagaagcacctgctgtctgccrtacccctgcagcactactcgaaggaaggacctgagctcctattaaatcattctccactgtcccacctaacctcagmaatccgacatagttctcctttcagcttttgcctccttgctcaagagttatgaatgcaaatgtgggcgactgtttaaaacccaccctctccccaccttgcgctgcactcggcataacactttcattagccctcctcccgtgggattcacaaccaaggcaggcggggatctgtgtgggcagactctgccccgagcacgccagaacgatgcaatagatacctccatt

SEQ ID NO: 19821 - DNA, 600 bp, Chicken  19866894229860_3
acacgtggttctccagcacacgcggtgctgctgcacaccagaatcaaccccttctctccagaaaatgcacatctggaaggcagagtctcctcagatgacctcaaaggaagcgttagctgctattttttagtacgggtttggtttaggctttttgtcttaggcaacaagcagaagtcgtaacagtgacacttcctgctgctgtcagaagcacctgctgtctgccrtacccctgcagcactactcgaaggaaggacctgagctcctattaaatcattctccactgtcccacctaacctcagmaatccgacatagttctcctttcagcttttgcctccttgctcaagagttatgaatgcaaatgtgggcgactgtttaaaacccaccctctccccaccttgcgctgcactcggcataacactttcattagccctcctcccgtgggattcacaaccaaggcaggcggggatctgtgtgggcagactctgccccgagcacgccagaacgatgcaatagatacctccattaactgaggctgcgacgaaacatcttcattggcaagcagtgctaacaacagcgctgctgctcacagcgtctgctctc

SEQ ID NO: 19822 - DNA, 600 bp, Chicken  19866894229865_1
tacatcaacatcataacataagtggtaattagaattgtgcattgcctttgtggattgaaagcctgagcttagaattcttcagggttataggccataacattcactgctttaaagataaaaactattttcttctctgcttttggtggttttttttataaatagtaatttcctatcactgttgctatctgctgtactgttgcaaaatgagaatgttgttactttcctcatcttgttgccattcgcatgctgtaggcctgaatcttgcatagttccatttctgttcaactttcctagattttrgtgtgtatgtcttcatatctgggctactgtaaatgtcyctctaattttttttaagctcgtacaccagaagtaaagacaacatagtgtaaaaacctgtaagatttaagsttaatattcatgaacttgattgttttatgaagacctttgatgcttagcctgtttccatgacatgaaataattgttggtagttatgctaattgactagctaattccctttatactgcatattatcaggttttgtttaaacattcaagttcttacatgttcttttttgggttttgttagtggcagagaaatatt

SEQ ID NO: 19823 - DNA, 600 bp, Chicken  19866894229865_2
gcattgcctttgtggattgaaagcctgagcttagaattcttcagggttataggccataacattcactgctttaaagataaaaactattttcttctctgcttttggtggttttttttataaatagtaatttcctatcactgttgctatctgctgtactgttgcaaaatgagaatgttgttactttcctcatcttgttgccattcgcatgctgtaggcctgaatcttgcatagttccatttctgttcaactttcctagattttrgtgtgtatgtcttcatatctgggctactgtaaatgtcyctctaattttttttaagctcgtacaccagaagtaaagacaacatagtgtaaaaacctgtaagatttaagsttaatattcatgaacttgattgttttatgaagacctttgatgcttagcctgtttccatgacatgaaataattgttggtagttatgctaattgactagctaattccctttatactgcatattatcaggttttgtttaaacattcaagttcttacatgttcttttttgggttttgttagtggcagagaaatattcataatctgcctttaataagcctttaattcagaactgc

SEQ ID NO: 19824 - DNA, 600 bp, Chicken  19866894229865_3
ttaaagataaaaactattttcttctctgcttttggtggttttttttataaatagtaatttcctatcactgttgctatctgctgtactgttgcaaaatgagaatgttgttactttcctcatcttgttgccattcgcatgctgtaggcctgaatcttgcatagttccatttctgttcaactttcctagattttrgtgtgtatgtcttcatatctgggctactgtaaatgtcyctctaattttttttaagctcgtacaccagaagtaaagacaacatagtgtaaaaacctgtaagatttaagsttaatattcatgaacttgattgttttatgaagacctttgatgcttagcctgtttccatgacatgaaataattgttggtagttatgctaattgactagctaattccctttatactgcatattatcaggttttgtttaaacattcaagttcttacatgttcttttttgggttttgttagtggcagagaaatattcataatctgcctttaataagcctttaattcagaactgcactgtcctcagagcacttatttgtttagaataattaattaccactttcatatagcttgctttttttttct

SEQ ID NO: 19825 - DNA, 600 bp, Chicken  19866894229866_1
ctttactgtcattgatacctctattcattttaatatattgttcttttgtcattttattcttaacctgaaaaccagaaaaaatcttttaatatgaacaagaagcatgtccacagaagttaaaacgctgcctaaaagcaactggacagataagttaccatgaatctgctgattcaaaagaaattgttaattatccaacatatgcaaggtttctctatcaaatctacatcgtgatgcatggacatgtgggcactacaacactgataaatattcaagtagggtatgtagatatattagccacaygttaccaaaaaatacacttttttcatacagaccagactatttgttctaaatataatcccagaattcaatactttttgcagattctttttttttttttaaataatgatggctaattactaaagtttcaaatattatgcactgcgggagtgagcttttgtttgctgaaataaggctgtatcataactgtctgaaattaggagtagatttgtgctaaaatcaatgggtaagtaattacacaagttctctctgagacggtagattactactttcagcgttatatccaacacaaggtagggaaac

SEQ ID NO: 19826 - DNA, 600 bp, Chicken  19866894229870_1
gaacaggaaacctatgcaaagaaatagttcaggttgttgttctaattaggatgtggagctcactgccacaagagttcagtgagtcatctgcaagataatagagttgttgtaggaggcagattttggaagagatacaaaacctgtttcagaccacaagccagttccagattgctaaggggctgtacctaacatgggtgcagttgttccagctccatgcatctctgatacaccatagcagtggctgcctcgtctaggacatgaccccacacctagctctggctggatcagtccagccaggtygcacacagaggatgcagtaacagcattttagacagccaggataaaatttaggtgagtaacagaatcatcttttatcattacttgcaatgaaacccaggtgactcatctaccctcaaaaatgtatttccatggtactctcagtgtcatttttgactgtgaaaggttcaagtgaataatttatgaacatatcgtagcagctcagccaagggatgttcctccaagccaggtttcttgatgagacaaaaacggaaaatgaaaagctgcattctgatcaaactaggactttatccagcatttcac

SEQ ID NO: 19827 - DNA, 599 bp, Chicken  19866894229871_1
  misc_feature (1)..(89): n is any nucleotide
nnnnnnnnnnnnnnnnnnnnnnnnnnnnnnnnnnnnnnnnnnnnnnnnnnnnnnnnnnnnnnnnnnnnnnnnnnnnnnnnnnnnnnnnntggatccggatgaggttactcagcaatacccggaaccccacatcacgttttggggagttttgtagctgcttaagtgttggctcttattgctgatggtgcatattctgtgctggtggtgtcccacaggttgtgtctctgtcttcaccatcacgtgagctgcagctggtcccacatcgtggcggttagtttcatggcagagaagataatactstttggcataaggatgtgctcataaagaaccaggtccattccaacatttttctagcatgcttctctgatcctccaagaagaacatcttgcagctgtttaagaagtcaggcctggttgtctgcggggttttcttcttgcatccagacctttttttttatagtatctgctaaaataccacttgttttcttttctgctctcctcaaatcaaaatatttagccatgtacttttctctgtgacatcctactgcatccccccctaactactgtggagtgtccatcagcctctctgatgctaaccag

SEQ ID NO: 19828 - DNA, 545 bp, Chicken  19866894229871_2
ctcctcaaatcaaaatatttagccatgtacttttctctgtgacatcctactgcatccccccctaactactgtggagtgtccatcagcctctctgatgctaaccaggtctgcaggaagccagcactgccaagcaggcaggctcccactcctggccttgctcagcaatctggtattgtcattgacacagaccccctttgagacttttgggggtgatgctctccctttcagaacctaagaagctataggaggatgattcctttgactgggaatttgcaggatgtcatgcttggacacttaaarcactgccttctggcctaaacctacaaagctaaacctacttttcatacaggggaatcacattttgcttttcwgtgcctcatctgtctcctctgcccatattgctcacaacgttggagtctttcattactcaaacctttccaaggcaccaggttttctccttcaacctgctttgctttctcttttccagcagctgctgagaagctttctggacccatctgtcctgcaggctgggcatctaaccaggg

SEQ ID NO: 19829 - DNA, 474 bp, Chicken  19866894229871_3
tggagtgtccatcagcctctctgatgctaaccaggtctgcaggaagccagcactgccaagcaggcaggctcccactcctggccttgctcagcaatctggtattgtcattgacacagaccccctttgagacttttgggggtgatgctctccctttcagaacctaagaagctataggaggatgattcctttgactgggaatttgcaggatgtcatgcttggacacttaaarcactgccttctggcctaaacctacaaagctaaacctacttttcatacaggggaatcacattttgcttttcwgtgcctcatctgtctcctctgcccatattgctcacaacgttggagtctttcattactcaaacctttccaaggcaccaggttttctccttcaacctgctttgctttctcttttccagcagctgctgagaagctttctggacccatctgtcctgcaggctgggcatctaaccaggg

SEQ ID NO: 19830 - DNA, 599 bp, Chicken  19866894229872_1
  misc_feature (1)..(143): n is any nucleotide
nnnnnnnnnnnnnnnnnnnnnnnnnnnnnnnnnnnnnnnnnnnnnnnnnnnnnnnnnnnnnnnnnnnnnnnnnnnnnnnnnnnnnnnnnnnnnnnnnnnnnnnnnnnnnnnnnnnnnnnnnnnnnnnnnnnnnnnnnnnnnnntgtttcttctattgttgcttgcatacctcagaacatcaagaccaaatgttgatcctgacctcactgtagtttaaggaagtcttagttctgctgacagctacttttacgcttctttcatgtaaagaacaacatggtcaaacactgtacaccccgatgyggagtctgatttactcttacctcatagtatttatgcctgacttgttaaaaaaaccctgagtatgtcttcacagaagatactgcagtatatttaatcctgtctttttaactgcctttttggagatcaagaatggttttaatatacaggctaagaagtgcctgtggacaaacaacttcaaaattaaagctgtatctagaaatagtgtgttttctcatatactttcttaaagaaataaccaagaatgaagctaaaaatagactgtatatgttcaaaggaaaaatgaaatatttgcaattgtg

SEQ ID NO: 19831 - DNA, 600 bp, Chicken  19866894229872_2
tactgcagtatatttaatcctgtctttttaactgcctttttggagatcaagaatggttttaatatacaggctaagaagtgcctgtggacaaacaacttcaaaattaaagctgtatctagaaatagtgtgttttctcatatactttcttaaagaaataaccaagaatgaagctaaaaatagactgtatatgttcaaaggaaaaatgaaatatttgcaattgtgataatcagaaacaaatgtttaagtatattcacagttttaagtcaccatggattttaccatcttctgttgttcacatgyttctaagctatgttttgtacacattacctctatatatttttttttcctcataaggaagcatttggcaacagctaattagctggcttccactccccaccccacaagcccctcacaaataccaacaagcattctgttcttgtttcttagacacatacctgtagtacagttacttcctcagactgatgtatttcgtaactccttagtgtttctttacttatcagcatcatacttcccagaacctcttaacaggctcttagcaataccaggcacagtactcaacagataagccaatagtcataa

SEQ ID NO: 19832 - DNA, 600 bp, Chicken  19866894229878_1
agatgtaataaacctatttcatggcccccacaaggtcaactgtattttacagcatgtataaaaattcagaaaagtcttaaacagacttctcatcctgctaggatcaaacccagctgtaggtgcatgctacatagaatagaatcataaagcctggaaaagatcatcatatctaaccatcaacccatccccaccatgtctgctgaccacatccctcagtgccacatctccacggttcttgagcacctccagggacagtgactccaccaccttcctgggcagcctgtgccactgcctcacgckcttctggataatagatgttccagaatatccaacctgaacctctctgctgcagcttgaggtcatcacctctcttcctatcactgttccctgcgagaagaggccaacccttacctaaagacctaaccccaccttagggaatgtacagctttgacctcattcacaataggcagtggtgcccttggctcaggagggcagcaaactccctggtgcactgagagagaagagaaagaacatactgctttcctaacatgtcctgctaaggggcaccacagcaacacactctgtacacctcactgccag

SEQ ID NO: 19833 - DNA, 600 bp, Chicken  19866894229880_1
gttctcattccaggaaatacaaggatttgataagttgacattgatttaatagtctgaaaactggaatcaatctctcttttcaaccttttattttccctcctgttgcaaattgcaaacacatttctgcttcctgcaagctgtgcatatatttccatggccatcttgaagacctctcccccttctacccccgctctagcttaaggaagaaatgtcttgttaattgaggttgcaattcaatgtttagtgaaggaaacgagcgcaatacagttaaggaaattctgcttcactgcatgttcattytgcagtggctgattgctggtgtgatgatgatgacgatcagatgttgcttgagaactgagatacagtgattggttttgataacctgaaattaacaactggatttatagcttgtaaatattccttgtggtgaattctcgcattgccagcataatcccctcttcctgtacagacctcatttatgaatcccaaaccagtgacattatccccaggatgtaagacaagactctcctgtaatgcacactgcatttactgagtagtcaataaagtggcattctcagactttttatgtggactgattaa

SEQ ID NO: 19834 - DNA, 600 bp, Chicken  19866894229881_1
agcccagactgtggacatcaagatcactgtccctattgtagtggcagaaccccatcatcctttagagggaatacaactgaacgccttgggccctggcctggtaccagaaatcccttcccagcccacacctgtcatacctgctttggattttcgcctcctgtgagggaagcccacccgctcttcctcccgttcggtcagatattccccagtctggtatctccggcttttctgtcgtctccttttctttcttttgacgtggctgtcatcctcctcctcctcgttgggctcccacagctgccsgggtgcgtccactctccagggcagctcccggctcctcctcgcgtggcagctgctcctctcagaggcagacctgtccctggccctgtggctgtgataacgcgacgcctggtgggatttccgcagcttgcggcgtttcaaggatatctcttcctcctcttcttcctcctcttcttcctcatcctcctccagcaaaggtaaaatatcctgaccgctcacatcacactctcccatcacgccagcagaagagccagcgacgcttcctgcacgaaagtggaaacgagtgtcaaaaaaggcaaggcc

SEQ ID NO: 19835 - DNA, 600 bp, Chicken  19866894229881_2
aagtggaaacgagtgtcaaaaaaggcaaggccatctacaagaaaagccccgccaggcaggatggaagacaggcacagagccacgtgaagagggaagagctcacggtccacccaggtgctgaagctgcccgttctcctggcaggaccaccccagtgctcggcaccaactcacccgactggctgcgcgtccgactgctcagcaccactgggatgaagtcccggaagttgttcttgggcttcttctcaaggtaacctgtggggaaaaccaccccttgagaaggcacgtcacagatccctgctyacacrcctgctggcctggggagggcagtccgccgtcccatttgagctctgtttggatcccagtttgcagtgggaagccaccagctccagaggccatcgagcttcaggacaacaacagctcggccccgcaccgtcagcacgacccaaactgccacggcccgaccccgtgagaacacagtgcctttgacagcggtaccttcctcgtggctgtccccgcggtgctcaggagaagggaactctgtcttcgttggcctcctgcgcttacgctttaccctgaggctgttgtggtcactcactgatc

SEQ ID NO: 19836 - DNA, 600 bp, Chicken  19866894229881_3
gaaacgagtgtcaaaaaaggcaaggccatctacaagaaaagccccgccaggcaggatggaagacaggcacagagccacgtgaagagggaagagctcacggtccacccaggtgctgaagctgcccgttctcctggcaggaccaccccagtgctcggcaccaactcacccgactggctgcgcgtccgactgctcagcaccactgggatgaagtcccggaagttgttcttgggcttcttctcaaggtaacctgtggggaaaaccaccccttgagaaggcacgtcacagatccctgctyacacrcctgctggcctggggagggcagtccgccgtcccatttgagctctgtttggatcccagtttgcagtgggaagccaccagctccagaggccatcgagcttcaggacaacaacagctcggccccgcaccgtcagcacgacccaaactgccacggcccgaccccgtgagaacacagtgcctttgacagcggtaccttcctcgtggctgtccccgcggtgctcaggagaagggaactctgtcttcgttggcctcctgcgcttacgctttaccctgaggctgttgtggtcactcactgatcccagg

SEQ ID NO: 19837 - DNA, 599 bp, Chicken  19866894229883_1
  misc_feature (1)..(133): n is any nucleotide
nnnnnnnnnnnnnnnnnnnnnnnnnnnnnnnnnnnnnnnnnnnnnnnnnnnnnnnnnnnnnnnnnnnnnnnnnnnnnnnnnnnnnnnnnnnnnnnnnnnnnnnnnnnnnnnnnnnnnnnnnnnnnnnnnnnnnactactcaaactgtcaaagaggagctgttcagaaactttaaatcattttgatgagaatttccactaaaaaaaaatatatctcaaatgcattttaaaaaggcctcagcattacacagcgtaaccattattcaaagtatcttccatctactacagaatggagttaaatwtcaaatcttggtcgtttgaaatgtcaaggctgggaaagaccagcggatcttgcctgatctgctcattacttacacagttatacaatatttagtgagcaaagctcggtagctcacagctgaattagtagtgcccatgggtgcagtaagacagctccaagycacaaacatgagagagatttacactggtacaacctgagccgacaagtgacacccatgcatatgcccagacaacaaaatgctaaacaaaatgactctgttcagtccaaagaacctacagaagcagatagamagttcattat

SEQ ID NO: 19838 - DNA, 600 bp, Chicken  19866894229883_2
gttcagaaactttaaatcattttgatgagaatttccactaaaaaaaaatatatctcaaatgcattttaaaaaggcctcagcattacacagcgtaaccattattcaaagtatcttccatctactacagaatggagttaaatwtcaaatcttggtcgtttgaaatgtcaaggctgggaaagaccagcggatcttgcctgatctgctcattacttacacagttatacaatatttagtgagcaaagctcggtagctcacagctgaattagtagtgcccatgggtgcagtaagacagctccaagycacaaacatgagagagatttacactggtacaacctgagccgacaagtgacacccatgcatatgcccagacaacaaaatgctaaacaaaatgactctgttcagtccaaagaacctacagaagcagatagamagttcattatgaaggcaaagggggaaaaaaacacctcatccctgaagacaactcaaggctaattcatctccccagaagagcatcagcaccacatcaggatatattccagacagctgacagcaccaaaacatttcactagttccaacttactaacttgaacttattcctag

SEQ ID NO: 19839 - DNA, 600 bp, Chicken  19866894229883_3
ggagttaaatwtcaaatcttggtcgtttgaaatgtcaaggctgggaaagaccagcggatcttgcctgatctgctcattacttacacagttatacaatatttagtgagcaaagctcggtagctcacagctgaattagtagtgcccatgggtgcagtaagacagctccaagycacaaacatgagagagatttacactggtacaacctgagccgacaagtgacacccatgcatatgcccagacaacaaaatgctaaacaaaatgactctgttcagtccaaagaacctacagaagcagatagamagttcattatgaaggcaaagggggaaaaaaacacctcatccctgaagacaactcaaggctaattcatctccccagaagagcatcagcaccacatcaggatatattccagacagctgacagcaccaaaacatttcactagttccaacttactaacttgaacttattcctaggggtagaaaataaccagtttctacaagacatgttcctttctcttcagctctcaccccaaatgatgtcctgtttttggacactgttttttcttaaaatgtaccattaaaaaaaaaaacaactggaaaaata

SEQ ID NO: 19840 - DNA, 600 bp, Chicken  19866894229888_1
aagttttaggcagtcaaagccaagagagaagaaacctcccaagtgaatgtccatttagcccacgcaagaccttctgtttgcatgtaatgtacatgaatcctgaaatcttcatttcaaataatgttcaacattattgtataaaagatttcattaaatagggattcttgtggttccaaagaaaaaaaaataccaaataagttcaacagatagctaacctctctgctaaatatcacatatctgctaagtaagttaaaatagagtattagatgtttacaatatattaggctgaggaaattagcytgatataactatatccactattttctcaagaagattaagataggtcatttctgccctcctttacaatacttacattaattatgtttaccacgtcacagtttcatcaatttggctagagagcctaaacaagtcttctaactgtaaaccaagaatataaacccattatcagaaaatgtcttgaagatctttctacaggatamaaattttagtaaatgtccaataaatttgttttcttcaattcacaggaaagttcttcaatcacattgagaaagctcaataggaaagtaagacccttttaat

SEQ ID NO: 19841 - DNA, 600 bp, Chicken  19866894229888_2
caacagatagctaacctctctgctaaatatcacatatctgctaagtaagttaaaatagagtattagatgtttacaatatattaggctgaggaaattagcytgatataactatatccactattttctcaagaagattaagataggtcatttctgccctcctttacaatacttacattaattatgtttaccacgtcacagtttcatcaatttggctagagagcctaaacaagtcttctaactgtaaaccaagaatataaacccattatcagaaaatgtcttgaagatctttctacaggatamaaattttagtaaatgtccaataaatttgttttcttcaattcacaggaaagttcttcaatcacattgagaaagctcaataggaaagtaagacccttttaatttaaaaagtatatattttcatgctatggtatctgccaatacacaaatgctggaaattggcaatgcaatctaggcatctctaaaataatatactttcagaaacactaacagtttatgaattatagattttactactgttatgcatacatatttatgtgtttatatatgagagatactctgaaagtaatgcctcctctttta

SEQ ID NO: 19842 - DNA, 600 bp, Chicken  19866894229889_1
atgaaaaccaactctcctaatgaaaaacaatagaaaatgacttagctattaatctcatgctcagaggcaattatttcccaactgagatttctgcttttttttttttttaaataatcatacagattattttggaaagatgacaagtctgcttcgtggcccccctttctcttgctgtgtcttaatttgcataaatatgacattaaaattgaaagaatcgctttaaaaaaaacaattactccatcagtaatgcctgacagtgcagaactcaactgcaccacagagatcatcctggtaagaagmaaaaaaaaagagggatttttttcccccccatttactgacattaaaacatctctcacttcttacaggaccgtagttcagatttacgttttagaacgctttaatagttgaacatgtgcaaatatcattattcttagatgcactgcagaagaataaaaaccccacactgagcacctgtgggggctgttcagcccaaggggagttgaagggctgtgcaagatcctaaccacactgagatgaaaaataactagacaccttcctattatcatgccgtgcttgtctctggaagcttttgttccatta

SEQ ID NO: 19843 - DNA, 600 bp, Chicken  19866894229889_2
cacactgagatgaaaaataactagacaccttcctattatcatgccgtgcttgtctctggaagcttttgttccattagaaacttgttaattgctgccttagtaacaaaggaacaacatgctgtggtgggactattaggagtctacatggcttgttcatccttagaaatgcagagcgtttaattggttatctgttcttagaagatgcaataaagtgggatagtcagtggtgtcagcacatgataatggaggttctttacaatacggaagaggaaacacagaatgtagttaataaaaagctayagcatgcaaaataactggatgcagaatttgtgaagaagtcgtgcacagccaaaaaagaacaacttctaagaattttagagggtagtcatcactataactgtctgatgagacatcctccagttcaccaaacagatctggagtytcaaatgcaaaacagctaattataagtcagtttgcccagaacacccactgctcaattatatcagcttgctaataaataacgcccttagtacagaaatrcaaggactgaaatacttcttcagccctccttggcaaaacagaagctttctgtaaacctct

SEQ ID NO: 19844 - DNA, 600 bp, Chicken  19866894229889_3
acatggcttgttcatccttagaaatgcagagcgtttaattggttatctgttcttagaagatgcaataaagtgggatagtcagtggtgtcagcacatgataatggaggttctttacaatacggaagaggaaacacagaatgtagttaataaaaagctayagcatgcaaaataactggatgcagaatttgtgaagaagtcgtgcacagccaaaaaagaacaacttctaagaattttagagggtagtcatcactataactgtctgatgagacatcctccagttcaccaaacagatctggagtytcaaatgcaaaacagctaattataagtcagtttgcccagaacacccactgctcaattatatcagcttgctaataaataacgcccttagtacagaaatrcaaggactgaaatacttcttcagccctccttggcaaaacagaagctttctgtaaacctcttcagtattacctaatgcagtattttcaagctgtatgggaactgttgaaacacagcctgaaccactgattgagcaccttcggaaaggacctggtcagccctgggagcactggtgaaggcaatccgtgtgtgtgaccagaaggg

SEQ ID NO: 19845 - DNA, 600 bp, Chicken  19866894229889_4
taatggaggttctttacaatacggaagaggaaacacagaatgtagttaataaaaagctayagcatgcaaaataactggatgcagaatttgtgaagaagtcgtgcacagccaaaaaagaacaacttctaagaattttagagggtagtcatcactataactgtctgatgagacatcctccagttcaccaaacagatctggagtytcaaatgcaaaacagctaattataagtcagtttgcccagaacacccactgctcaattatatcagcttgctaataaataacgcccttagtacagaaatrcaaggactgaaatacttcttcagccctccttggcaaaacagaagctttctgtaaacctcttcagtattacctaatgcagtattttcaagctgtatgggaactgttgaaacacagcctgaaccactgattgagcaccttcggaaaggacctggtcagccctgggagcactggtgaaggcaatccgtgtgtgtgaccagaagggggggagggggggagacatggctgcacctctcttaaacctcttttaagggctgactgccactggtgaaggatctctggttggagatccatcccttgtgg

SEQ ID NO: 19846 - DNA, 600 bp, Chicken  19866894229890_1
tatagacttaatagattttatatttacagtgcaccaaatagtttacaacagtagatcaactatttctatctagaaataacaatgtattacttaagtaaaactaattatcaagtaaatggatatgtaactgataaagaggaagatattgagtgtcattgcagacactcaatcactgttatttacactgactgtaaataacatttttatttacagtatggatgtccttgacataaccactgacttcacatcctcatctacatagtagcatacagcattctttcaaacttgaaagtgttcagragtcttgtcagcagctcatgctttttctgatgaagaagtgtggttttgacagaaatcttcagtttttgtcaggtgaacagaacaaagccatgaacctgtgtcttttctgtcagcagtagaaagactaagtgcttgtgaaacaaagtcctatttcctgctctatctcagattttccattaagcacaattcatcatttggaacaactctgaggtgctttattttaaggagatactgtgttactgtcagcagtagaacattctatttctgtctataatccaaatatacttctttatgagcccg

SEQ ID NO: 19847 - DNA, 600 bp, Chicken  19866894229895_1
taaaatgtggaattattttaagtagaggaaggtttcatattcaaccctactttaaaataatcaattttctttttcattttgttttgttttatatgctgttaaaataagaaacaagtatgtactaatttaattaagctttcatggaagaaaatgagaagtggcatataaaattacttgaattatttgttattcttacattactctacacttttataatgtctcaacataattttgaaaagttaaactttactttttctgaaatgcctttgtttctacataaagagttgaagaagggaaagrggaagggtctcctatgtatctcttattctyaatcctaaaccattaattttccaagtgtttttccaatgtttggacctaatgggttatctaacttattaacattatttactayatctctaaagataacttcatcttgagagtatatgcttgcatgggctatctgtatttccttaactttgtgctgtcatttctctcaaatctatttttgatacataacatgtattgaggttcataaaaatatcagactcttcagagtgctttcacgtgacatattcacagttatttttaactgctttcaag

SEQ ID NO: 19848 - DNA, 600 bp, Chicken  19866894229895_2
ggtttcatattcaaccctactttaaaataatcaattttctttttcattttgttttgttttatatgctgttaaaataagaaacaagtatgtactaatttaattaagctttcatggaagaaaatgagaagtggcatataaaattacttgaattatttgttattcttacattactctacacttttataatgtctcaacataattttgaaaagttaaactttactttttctgaaatgcctttgtttctacataaagagttgaagaagggaaagrggaagggtctcctatgtatctcttattctyaatcctaaaccattaattttccaagtgtttttccaatgtttggacctaatgggttatctaacttattaacattatttactayatctctaaagataacttcatcttgagagtatatgcttgcatgggctatctgtatttccttaactttgtgctgtcatttctctcaaatctatttttgatacataacatgtattgaggttcataaaaatatcagactcttcagagtgctttcacgtgacatattcacagttatttttaactgctttcaagactgttttgggaastgcaaactccactctt

SEQ ID NO: 19849 - DNA, 600 bp, Chicken  19866894229895_3
aagtatgtactaatttaattaagctttcatggaagaaaatgagaagtggcatataaaattacttgaattatttgttattcttacattactctacacttttataatgtctcaacataattttgaaaagttaaactttactttttctgaaatgcctttgtttctacataaagagttgaagaagggaaagrggaagggtctcctatgtatctcttattctyaatcctaaaccattaattttccaagtgtttttccaatgtttggacctaatgggttatctaacttattaacattatttactayatctctaaagataacttcatcttgagagtatatgcttgcatgggctatctgtatttccttaactttgtgctgtcatttctctcaaatctatttttgatacataacatgtattgaggttcataaaaatatcagactcttcagagtgctttcacgtgacatattcacagttatttttaactgctttcaagactgttttgggaastgcaaactccactctttctgaatgctccaaatgccaataaatgatgcactgaaaccgcatgcagtgtccttagcatgctgtttccaggtagaaatgcg

SEQ ID NO: 19850 - DNA, 600 bp, Chicken  19866894229895_4
tgtatctcttattctyaatcctaaaccattaattttccaagtgtttttccaatgtttggacctaatgggttatctaacttattaacattatttactayatctctaaagataacttcatcttgagagtatatgcttgcatgggctatctgtatttccttaactttgtgctgtcatttctctcaaatctatttttgatacataacatgtattgaggttcataaaaatatcagactcttcagagtgctttcacgtgacatattcacagttatttttaactgctttcaagactgttttgggaastgcaaactccactctttctgaatgctccaaatgccaataaatgatgcactgaaaccgcatgcagtgtccttagcatgctgtttccaggtagaaatgcgtgcccaaataccatcccccggcagcatgtcgagaggtggtgacagcaggcattatgtgcacagcagcttcataatgtttgatgctgtaacatgctgctcatgcagttcacaggttgtgtgatgagcttttcaagcttcgttaggaggagtgtgcatactgaaaatctacctcctttggagataccattgggggatcagactg

SEQ ID NO: 19851 - DNA, 599 bp, Chicken  19866894229898_1
  misc_feature (1)..(106): n is any nucleotide
nnnnnnnnnnnnnnnnnnnnnnnnnnnnnnnnnnnnnnnnnnnnnnnnnnnnnnnnnnnnnnnnnnnnnnnnnnnnnnnnnnnnnnnnnnnnnnnnnnnnnnnnnntttgtgttcttgtactgagttttgtggaactctttaatattaacgtgcattcattccacagtaaagtacagctgcgtgtgatattgtagttataattatcagtcctgtcccagaatgatggtcatatgtgtgattctcattgtgtggttgaattttcatgctcctttgtattgtaggcgttaaaattgctgggygtttggaaaaccatatttacagccgttcctgggcctacatcaaggacctcagtggagtgacagctcaaaatgggagaccaggaggctggtgaacccttcctaggcactggggctgccagtgctacagactacgaaggagctcagccctctgatacagtgtcgctcagcgattctgattccgatgayttgggattagcagatgaagcagaagttgatacagtatctcctgargatccacctgtagatgatggggattacagaccaggggacactgctgacccatcagacaacrtcgagag

SEQ ID NO: 19852 - DNA, 600 bp, Chicken  19866894229898_2
atattgtagttataattatcagtcctgtcccagaatgatggtcatatgtgtgattctcattgtgtggttgaattttcatgctcctttgtattgtaggcgttaaaattgctgggygtttggaaaaccatatttacagccgttcctgggcctacatcaaggacctcagtggagtgacagctcaaaatgggagaccaggaggctggtgaacccttcctaggcactggggctgccagtgctacagactacgaaggagctcagccctctgatacagtgtcgctcagcgattctgattccgatgayttgggattagcagatgaagcagaagttgatacagtatctcctgargatccacctgtagatgatggggattacagaccaggggacactgctgacccatcagacaacrtcgagagatctcctgttcagccrttccatctgaggggcatgagttctacattctctctccgcagccagagtatttttgattgcttggaagaggcagccaaattgtctgtgccctcaatgtctgaagataatgttgttgatgggaggtttaaacgtcccttacctccacctaccatgtcaagtaatgtggtacca

SEQ ID NO: 19853 - DNA, 600 bp, Chicken  19866894229898_3
atgtgtgattctcattgtgtggttgaattttcatgctcctttgtattgtaggcgttaaaattgctgggygtttggaaaaccatatttacagccgttcctgggcctacatcaaggacctcagtggagtgacagctcaaaatgggagaccaggaggctggtgaacccttcctaggcactggggctgccagtgctacagactacgaaggagctcagccctctgatacagtgtcgctcagcgattctgattccgatgayttgggattagcagatgaagcagaagttgatacagtatctcctgargatccacctgtagatgatggggattacagaccaggggacactgctgacccatcagacaacrtcgagagatctcctgttcagccrttccatctgaggggcatgagttctacattctctctccgcagccagagtatttttgattgcttggaagaggcagccaaattgtctgtgccctcaatgtctgaagataatgttgttgatgggaggtttaaacgtcccttacctccacctaccatgtcaagtaatgtggtaccagaaagccttggaaagccagccaaactagtacaggctcccagaatg

SEQ ID NO: 19854 - DNA, 600 bp, Chicken  19866894229898_4
tgctgggygtttggaaaaccatatttacagccgttcctgggcctacatcaaggacctcagtggagtgacagctcaaaatgggagaccaggaggctggtgaacccttcctaggcactggggctgccagtgctacagactacgaaggagctcagccctctgatacagtgtcgctcagcgattctgattccgatgayttgggattagcagatgaagcagaagttgatacagtatctcctgargatccacctgtagatgatggggattacagaccaggggacactgctgacccatcagacaacrtcgagagatctcctgttcagccrttccatctgaggggcatgagttctacattctctctccgcagccagagtatttttgattgcttggaagaggcagccaaattgtctgtgccctcaatgtctgaagataatgttgttgatgggaggtttaaacgtcccttacctccacctaccatgtcaagtaatgtggtaccagaaagccttggaaagccagccaaactagtacaggctcccagaatgtctccagcagtgcctgactatgtggcacacccagagcgctggaccaaatacagcctagatg

SEQ ID NO: 19855 - DNA, 600 bp, Chicken  19866894229898_5
tttacagccgttcctgggcctacatcaaggacctcagtggagtgacagctcaaaatgggagaccaggaggctggtgaacccttcctaggcactggggctgccagtgctacagactacgaaggagctcagccctctgatacagtgtcgctcagcgattctgattccgatgayttgggattagcagatgaagcagaagttgatacagtatctcctgargatccacctgtagatgatggggattacagaccaggggacactgctgacccatcagacaacrtcgagagatctcctgttcagccrttccatctgaggggcatgagttctacattctctctccgcagccagagtatttttgattgcttggaagaggcagccaaattgtctgtgccctcaatgtctgaagataatgttgttgatgggaggtttaaacgtcccttacctccacctaccatgtcaagtaatgtggtaccagaaagccttggaaagccagccaaactagtacaggctcccagaatgtctccagcagtgcctgactatgtggcacacccagagcgctggaccaaatacagcctagatggggtgtcagagtccagtgacaag

SEQ ID NO: 19856 - DNA, 600 bp, Chicken  19866894229898_6
gaacaaagctcagctacccaagatagctacaccccatatttcaaccaggacccttccagctgtggagctgggaggattgtattcaccaaacctgcaaaaaggggtgttgatggactagaaaagaaaatatcggcaggagaaggtgataagaaacacatcaaaacagatctgaaaggaaaatctgtgaagactgatgacttgagggtggaggataaggtagagctgggacacttaggtggtggtagtagaaaggcaacagaggaggagggatgcttgatggtggagaacctgaatacagawggtgagcatggtgtgggtgaagagccattggcagaaaaagttggattccattgcagcaagaagagaaataggaaaaatttccgacctaaagtagatgatgaaggagaggaggaagagtcctgagtgatgaaacaaatcagaaacatgcaagaatttgtatactcttgagatatgcttggttttgttgttatgtttttggktttttttttttgtcagggacctatgtgataccattttgtctaacggtttgctttatagccacccagaccactttcatttttagaaattaagctaccagaa

SEQ ID NO: 19857 - DNA, 600 bp, Chicken  19866894229898_7
gagggtggaggataaggtagagctgggacacttaggtggtggtagtagaaaggcaacagaggaggagggatgcttgatggtggagaacctgaatacagawggtgagcatggtgtgggtgaagagccattggcagaaaaagttggattccattgcagcaagaagagaaataggaaaaatttccgacctaaagtagatgatgaaggagaggaggaagagtcctgagtgatgaaacaaatcagaaacatgcaagaatttgtatactcttgagatatgcttggttttgttgttatgtttttggktttttttttttgtcagggacctatgtgataccattttgtctaacggtttgctttatagccacccagaccactttcatttttagaaattaagctaccagaaatacattacagactttttattagtgagaactctgcaggcaaatgatagttgcagtctatcaggagagaatgaagcgtgctttgtttgcctgagcagctccctggagcttgcactggagctcaagtcatcatgagcaccacagaaaaaactgttagctagaatgctgcaaggcatcctaattaccccagatttattgcttt

SEQ ID NO: 19858 - DNA, 600 bp, Chicken  19866894229898_8
ctcaaatatttaattttcttactgttacatggaaaaaaagaggttaagaaaataccatttttcctgcagatgggcacagctttggaaaacattctagtaaagacacactgaagatcacttcagccaagtgtcttcatgttgagtgtaaatcagttacacaacaacttctcttactgctatgatgtgttgactttttgcctgcatatttgtttcgtctttccagatggcactgcttccacgtttcttggtgtacgtttggtgggaatcagggtgtttgtagaactggatgcctttttcttyggaattcaataaactttcagttgtactttgatttctccatctctttgaaccgtattgatattaatgcaaatataggagttcaaatgactactccatttatttgatttgagaactgtttagaacacctaggatctggaatgttagtctcagcttaacatcttgtaacttttccttcagcttcttaaggtttagaagctaaaattcacatttttaacattttggtgattttagaataccatagagaatcacctgatagactgaatcggatcaacaacaaatacagctgtatcacaaaggaag

SEQ ID NO: 19859 - DNA, 600 bp, Chicken  19866894229901_1
agtgttggacaggggttctccctcagctgcttccaactgtacacaggaaatatttccttgcactgtgtttacccatgagttttcgacttttctttcttaacaaagataaaattacattaaaaagaggctttaaagggcagttcaagtagacagtgaggtgatttaactaacagagcagggcacgtctgttgattcagtggatatgagagtgagcaaaaaatgatagtacataaattcccatatattttccttgacattcacggcaggaaatgacacattattgatcttcctcatttcttytgtgcacttttctgacccttaagatttaacccatcttcttagagcttggtttttgaccctgctgggaacaagcacaatagagcaactggaacacacaagtaatcaagagcaaacactgtacaaggaaaatattcagaaggatggttttgctctgcttaaamattaaaaaaaagagaattctaaaatgtgaattaaaaagagaagcccaaacactcaacacttgaggtcaaattattcattttccttatgttttgatgaaaacatgtcaaccagcaaaatgaattattgtttcttattagg

SEQ ID NO: 19860 - DNA, 600 bp, Chicken  19866894229901_2
tttaactaacagagcagggcacgtctgttgattcagtggatatgagagtgagcaaaaaatgatagtacataaattcccatatattttccttgacattcacggcaggaaatgacacattattgatcttcctcatttcttytgtgcacttttctgacccttaagatttaacccatcttcttagagcttggtttttgaccctgctgggaacaagcacaatagagcaactggaacacacaagtaatcaagagcaaacactgtacaaggaaaatattcagaaggatggttttgctctgcttaaamattaaaaaaaagagaattctaaaatgtgaattaaaaagagaagcccaaacactcaacacttgaggtcaaattattcattttccttatgttttgatgaaaacatgtcaaccagcaaaatgaattattgtttcttattaggatgctcaactcagcatgggatgattgcaactcgtggaattttgtagctgtatctctgtagctacaaagattgctgtctacataaacatatctcaactattctatgtgacatagagagataaagagaatgtgcacttctccaaagttgtttggactgcgctc

SEQ ID NO: 19861 - DNA, 600 bp, Chicken  19866894229901_3
tgttttgatgaaaacatgtcaaccagcaaaatgaattattgtttcttattaggatgctcaactcagcatgggatgattgcaactcgtggaattttgtagctgtatctctgtagctacaaagattgctgtctacataaacatatctcaactattctatgtgacatagagagataaagagaatgtgcacttctccaaagttgtttggactgcgctcatgtagagcatgagaagcttgatggttggaaaagaaagttttctcccaaaagacatgacaacaaataccagtagggtgaagattcmatttaccctgagtcttgtccttcttaggtgaactctgcttctcttcctgtcctactcctcttgcccatgatgttgggagatgacccatgaaccctttgaggttgtgttgatgcctttctcttccaaacaagggagagcacaccatcactgaagctcagctaacaagcatcaactctttaaaatccagctacctcattgctttccatgtctttttgtttcagtctaaactggaactattacagttaatttaagctgagaagcaacaggtttgtgctaactcacttaaacccaaattgaagt

SEQ ID NO: 19862 - DNA, 599 bp, Chicken  19866894229904_1
  misc_feature (1)..(90): n is any nucleotide
nnnnnnnnnnnnnnnnnnnnnnnnnnnnnnnnnnnnnnnnnnnnnnnnnnnnnnnnnnnnnnnnnnnnnnnnnnnnnnnnnnnnnnnnnncccccgcctgtccttgtgactcacaagccactgctgtctgcctcagccaagcaccagcctgaaacggggacaccgtgggccggaccaggaacacacgggccaggctggagggcagcaggacagcgaaggtcacagcccagcacctatgtgacccacctatgtgattccaccttagctcagcagagggaggcgcagcccccgtggttcccrgagctgctcctggtgcatccctgactgctgtcttctgggatcacagccttggctgacaatctcagcccctggtttgaaacgtgtgcaaacaaggctccaaagtgagcacgaagagccatcaccgtaaccctaaccctaagcctatccccgaacttaaccttaaccccaaccctaccctgaatccctgggagaaccgggctgtgtctgtgggattggggtgcagggcccatgtcacagccatgcctttggcagacgttgctgtaactgctgatgtttctggagcattgatgtgatgtgcc

SEQ ID NO: 19863 - DNA, 600 bp, Chicken  19866894229906_1
gtcagctttttcaacagcgcagcacaatgttaagcacctcaggtgggggatatgggcacggtggacatgggcttttcacatcactggtttggtcctacctaaccttttccacattctgatatgcccaagaaggaccatctgcctctgttcagtcagaagagccatctgcagagaaaccaaatgttttagtgcacatttttaattcctttaagtacctcctgctaaataatgaatgcatctcacaggcacggcacctcttttcctgctcagctgtggcttttgtgaggcatgaagacgggsccatcaagcagaagcatttgggcacatagaatcacagaatcatagaatggcttgggttggaaagtaccttaaagcccatccaagtcccagcctcggccatgtatagggttgcccccaccagctcgggctgcacaaggccccatccagcctggccctgagcacctccagggatgggcctccacagctctgggcagcagtgccagcacctcactgccctctgagtgaagaatttcctccttcagttgtgctaacagccccaagttgaggctttcattgattaacgttgcctgctgctgggcc

SEQ ID NO: 19864 - DNA, 600 bp, Chicken  19866894229906_2
gtatttggccagccagcaccaaatccagccccgcagcatctctgctgaccccgggggtgagtttgtcccgagatgtttctatcacaaagccatcaaaaccaatttcctctgatctgactgacttgaaatcccagtggaggcaattcatctactgctggatgtgcgatattacagcaaataaacatcagagacaggaatgccttgctggagatgagaaatctggtcctgtgatgagaggttatgaacctttcttatcttatctgttgggttttgtaatgagaaacctggcggagcggcagyggcagctcatgctgaacagcctgttcccaaggcccttggggagcacagggatttccaatgggcagcagctgggatggggacattggtcccatgctgctgaggccatttggtgcagcacgatgggactcatgtcttscaggatcaaagccatgtcaccarggctggctgctggcaccacagtgcatgccctcggccttgttcccttcatctcagagtcatagactcataaaggttggaaaagacctctaagatccccaagcccaaccccagtccaccccaccatgcccacaagtgccacat

SEQ ID NO: 19865 - DNA, 464 bp, Chicken  19866894229906_3
gaggcaattcatctactgctggatgtgcgatattacagcaaataaacatcagagacaggaatgccttgctggagatgagaaatctggtcctgtgatgagaggttatgaacctttcttatcttatctgttgggttttgtaatgagaaacctggcggagcggcagyggcagctcatgctgaacagcctgttcccaaggcccttggggagcacagggatttccaatgggcagcagctgggatggggacattggtcccatgctgctgaggccatttggtgcagcacgatgggactcatgtcttscaggatcaaagccatgtcaccarggctggctgctggcaccacagtgcatgccctcggccttgttcccttcatctcagagtcatagactcataaaggttggaaaagacctctaagatccccaagcccaaccccagtccaccccaccatgcccacaagtgccacat

SEQ ID NO: 19866 - DNA, 441 bp, Chicken  19866894229906_4
tgtgcgatattacagcaaataaacatcagagacaggaatgccttgctggagatgagaaatctggtcctgtgatgagaggttatgaacctttcttatcttatctgttgggttttgtaatgagaaacctggcggagcggcagyggcagctcatgctgaacagcctgttcccaaggcccttggggagcacagggatttccaatgggcagcagctgggatggggacattggtcccatgctgctgaggccatttggtgcagcacgatgggactcatgtcttscaggatcaaagccatgtcaccarggctggctgctggcaccacagtgcatgccctcggccttgttcccttcatctcagagtcatagactcataaaggttggaaaagacctctaagatccccaagcccaaccccagtccaccccaccatgcccacaagtgccacat

SEQ ID NO: 19867 - DNA, 600 bp, Chicken  19866894229910_1
tttaaatccgatcacccgtgcatcttccatctacaactttacaacacaaactgggactgcagatcccccatcacatgctgatttggtattttccctccactgtaggacaactacagaacaaacatttaagggaagtgcagaacatgaagtctctgtggatgcctctgtggatgcttatggacagcagcaggaagggctgttgtgcactgcaaatcttgctcacactgaaaatgtgctcatgtgcctatttctaccagttcaggaatgcactcggttgccttagcaactgatacatcaaarccaacaagacagtctcaggctgatgcatggaagtacactttcttatagctctataatggtaaagaagtgctaattttgctcagtctcatctttttaatgttcctcaccatcagtacagtgattgtacagtggtttactgatgcaagctgcactaagtaacttcttgcatgagtcttctattcccagactctaaagaagaagatgtacatgaaatgggagttccagacaactaatgttactgaaacccacacagctgtttctaatgagtaaaactattaactccactgatccctttctgtt

SEQ ID NO: 19868 - DNA, 600 bp, Chicken  19866894229913_1
tgaaaaaatgacacttgatgtgacatgtcaaggctaaaactgctttaagcctgatatacctgcattatttgattttttctaaatagctctagaagagagaatagaagtgtaaacatgccatataagactccattttaatgtgaagcatgatataatgggatgtgtctaaataatgtctcatatgggtaattagagttgaaatcaagatagacaatagagaagtctggttcaatagttagtctcaattttttttctcgtgatgaaaaggcagagagggtgcagtctgagtgactgcttttytgcttaaagcagtgatgaagtcaagaaattatcaaatattgtaaacaattacactgaaataagttcatcgtttttgactgatgtgaagtctggctggagagtggagacataggatagatagtttccttaaaataattttytacagcttttgcatttcagaaataaaaatacagccaagtaaatacttcattttttgcaagtctgaaagtttttgaaatgtcagctaaatgggagtcagctcacttcatattatacttgtacaactcgtagcttaatgcagtaagccataactatacagac

SEQ ID NO: 19869 - DNA, 600 bp, Chicken  19866894229913_2
tgaagcatgatataatgggatgtgtctaaataatgtctcatatgggtaattagagttgaaatcaagatagacaatagagaagtctggttcaatagttagtctcaattttttttctcgtgatgaaaaggcagagagggtgcagtctgagtgactgcttttytgcttaaagcagtgatgaagtcaagaaattatcaaatattgtaaacaattacactgaaataagttcatcgtttttgactgatgtgaagtctggctggagagtggagacataggatagatagtttccttaaaataattttytacagcttttgcatttcagaaataaaaatacagccaagtaaatacttcattttttgcaagtctgaaagtttttgaaatgtcagctaaatgggagtcagctcacttcatattatacttgtacaactcgtagcttaatgcagtaagccataactatacagacttatgcaaatcaggactgcattaacaacgtagattatcttccagggcttaattcactttgttttaaacattcaaaatgcagttttcgcagtctacaatttttaaaagataaacgcttaatttcataatgcctattatcag

SEQ ID NO: 19870 - DNA, 600 bp, Chicken  19866894229927_1
tataaaaaggctgtacataagaaactcaactcctaaagtagacttctatgcagaataatccttgaaactatggaaccagcttaaatgaagtttggataccatgagaagattttcttacagtcaaaacagtaaacagggctatttagatctgaaacatttaagtagtatgtaagttagtcgttctctctaacagtcactatgaaggaagtgagaaggaagacacacagacagacatagatacgcacaggacaatgaatgctccatattttgaacatattttaggatgaactgagttacacrctggaaaaaaaaaaaaaaaagtttatccctaactattgacttaagaaagaacataagtgatgagcttaccaaatcttgaagtgcgatagacccttatcaaaaaatatgcacgtcactgcctaaatgctcaacaataaaaatatgcgtatgacagagaagtgactatttgatatacaatgctggaagaagttgagtactctctaagtgcttctctttggagatgcagtagacaaagaaactatgcacaaaagaaaacaagacaaaaatgaacattttttggttgatctgtttgattttctc

SEQ ID NO: 19871 - DNA, 599 bp, Chicken  19866894229929_1
  misc_feature (1)..(102): n is any nucleotide
nnnnnnnnnnnnnnnnnnnnnnnnnnnnnnnnnnnnnnnnnnnnnnnnnnnnnnnnnnnnnnnnnnnnnnnnnnnnnnnnnnnnnnnnnnnnnnnnnnnnnntgctgaacagtagagttaccatcccagggatcacgacaggccagagaaatgagcctgttgtaagtccaacaaggacaaataccaagtcctgcatctgaataggaaaaattcctggcaacagcacagattggagatggactctctggctctgctgagaagtacctgggcatctcagctgatggcaggctgaacacaagmyataagtgctccctggcagaaaagaggccaacagctttctgggacgtagaaagaagagtacagccagtagatcaggggaagcgatcatctttttctactttttagaaagtatctaaattatagcatccaattttgcccatctagtagaaagacatggatgaaccatagaaagaagagtacagccagtagatcaggggaagcaatcatctttttctactttttagaaagtatctaaattatagcatccaattttgcccatctagtagaaagacatggatgaaccatagcaagtttagcag

SEQ ID NO: 19872 - DNA, 599 bp, Chicken  19866894229929_2
  misc_feature (1)..(101): n is any nucleotide
nnnnnnnnnnnnnnnnnnnnnnnnnnnnnnnnnnnnnnnnnnnnnnnnnnnnnnnnnnnnnnnnnnnnnnnnnnnnnnnnnnnnnnnnnnnnnnnnnnnnntgctgaacagtagagttaccatcccagggatcacgacaggccagagaaatgagcctgttgtaagtccaacaaggacaaataccaagtcctgcatctgaataggaaaaattcctggcaacagcacagattggagatggactctctggctctgctgagaagtacctgggcatctcagctgatggcaggctgaacacaagmyataagtgctccctggcagaaaagaggccaacagctttctgggacgtagaaagaagagtacagccagtagatcaggggaagcgatcatctttttctactttttagaaagtatctaaattatagcatccaattttgcccatctagtagaaagacatggatgaaccatagaaagaagagtacagccagtagatcaggggaagcaatcatctttttctactttttagaaagtatctaaattatagcatccaattttgcccatctagtagaaagacatggatgaaccatagcaagtttagcaga

SEQ ID NO: 19873 - DNA, 600 bp, Chicken  19866894229929_3
ccaacagctttctgggacgtagaaagaagagtacagccagtagatcaggggaagcgatcatctttttctactttttagaaagtatctaaattatagcatccaattttgcccatctagtagaaagacatggatgaaccatagaaagaagagtacagccagtagatcaggggaagcaatcatctttttctactttttagaaagtatctaaattatagcatccaattttgcccatctagtagaaagacatggatgaaccatagcaagtttagcagaggactgtgatggtcaaggctggagtgyttatcctgctagaagaaggtgtagggaggttatcattctttgaacaagaaactaagtcttygagggagatgtcacagtgtagaataataaaatcatagaatccttagagttggaagggacctttaaaggtcctttagtccaactccactgaaatgaacggagacatgcacaactagatcaggttgcccagggccttatccagcctggccttgaatgtctccagggatgggacacctagcacgtctctgggcaacctgttccattgcctcaccaccctcactgtaaaagactttttccctg

SEQ ID NO: 19874 - DNA, 600 bp, Chicken  19866894229929_4
ctttttctactttttagaaagtatctaaattatagcatccaattttgcccatctagtagaaagacatggatgaaccatagaaagaagagtacagccagtagatcaggggaagcaatcatctttttctactttttagaaagtatctaaattatagcatccaattttgcccatctagtagaaagacatggatgaaccatagcaagtttagcagaggactgtgatggtcaaggctggagtgyttatcctgctagaagaaggtgtagggaggttatcattctttgaacaagaaactaagtcttygagggagatgtcacagtgtagaataataaaatcatagaatccttagagttggaagggacctttaaaggtcctttagtccaactccactgaaatgaacggagacatgcacaactagatcaggttgcccagggccttatccagcctggccttgaatgtctccagggatgggacacctagcacgtctctgggcaacctgttccattgcctcaccaccctcactgtaaaagactttttccctgtgtctaacctaaatctatcctctttatgcttgaaaccatttccccttgttccaccaccaca

SEQ ID NO: 19875 - DNA, 600 bp, Chicken  19866894229932_1
tagaggtcggttaaccacatcacagaagtgccagtgatggtttggcaccaaagtttgagggttttatacctgttgcagtcccacagctctcatctgttggttaatttgttgcaattacttggtaataattctatagtagggcagttactgcaaccaagcttcaaagctcttaacagctcaagtcagcaaatgctctttgccactgagtcgagctcactgccagcaatactctgaatctaccataattctcttttccaatttaagtgagaagcagttctttagggcgatatcttattctcygtgtgcatcatgggtttcaagtctctttggcacacattacataatgaaaaaaagttttactgattatgaatgttctgcactgtcactgtaaaatgtacagaatgtcagacttcctttgcacatgacaccaacagcaacttacagtcacaagctacagttaccgtaagggaaggaaagaactggatgttctctgagtatgatgggcttttatagcagataagcaaaccaacctctggcagtagtaccattactgtaggtaatgcagccactgccctgcagctgttgcagccatttacagtt

SEQ ID NO: 19876 - DNA, 600 bp, Chicken  19866894229935_1
tctgtagataaataaagctctaagaggtgtatttctggctctgaaccctggcgtactgagcagttctgtgaacatagatgcaagcctgtgatgacacctggtgtttctgtctcttcaggtgctggaaaactactcggatgctcccatgaccccaaagcagattctgcaggtcatagaggctgaaggactgaaggaaatgaggttagtattgatgatctcatgtaaaacccagcatgtgcatggggcacgctgcatagaaggcttgagctgttccatgtgactctgcctcatccccagccygctttcctgcttccctttttccctttctgttgacaatacagttattgatactactttttttttyccttggtcttttttggtaacctagacttcccttcatccatctgttatgaaataaatgcccattgctgatcagactcctgcactgatttacttgctacttgcatacttctctcataagcagctcctggtgctttctcctgttgggctctagtttggtagtagtttcagttctgtctccttcgatgcttcatttctagagcagacacaacattttaggagactcagaagggtctctgt

SEQ ID NO: 19877 - DNA, 600 bp, Chicken  19866894229935_2
tctgtgaacatagatgcaagcctgtgatgacacctggtgtttctgtctcttcaggtgctggaaaactactcggatgctcccatgaccccaaagcagattctgcaggtcatagaggctgaaggactgaaggaaatgaggttagtattgatgatctcatgtaaaacccagcatgtgcatggggcacgctgcatagaaggcttgagctgttccatgtgactctgcctcatccccagccygctttcctgcttccctttttccctttctgttgacaatacagttattgatactactttttttttyccttggtcttttttggtaacctagacttcccttcatccatctgttatgaaataaatgcccattgctgatcagactcctgcactgatttacttgctacttgcatacttctctcataagcagctcctggtgctttctcctgttgggctctagtttggtagtagtttcagttctgtctccttcgatgcttcatttctagagcagacacaacattttaggagactcagaagggtctctgtatcttatagtgctctgctggcacttctggtacttctgagcactgtgaaagcgctgcttacacca

SEQ ID NO: 19878 - DNA, 600 bp, Chicken  19866894229938_1
caaatgcaaaattagtcttgctctatgcatggctctggactgagaggtaaattaatgcagggtgttctcttgttgcaagctcttgcaattgggatgggaaaatgagacacatgctcactaagccaggtctgttgcttaggtgaccaaatccagggaagacttcttttctaagaaacactgcaaatttggccttggtctgatcccaaggcttgactggagcctggggccttggccagagatgtagtcacgcacccatcacaactgaaagctctctgagaccaccagagtctgatcaataarggctttatataaataaagtaataaattatgacacacatatataactggggattgaattaggagtgtacctcaactctggcgttacgtgaatctcagtgcttggctttgcaatgttaatattttttgaatctgtaatttctgttgtataattgtatatagtacataattactcataattcattactgcacatgcgacactgcagacaatgtttagacattaaatctcagctcagtgattgaatagagggtacactaaaaataaatatccgtgtattttgtaaatatttgcataatgagcta

SEQ ID NO: 19879 - DNA, 600 bp, Chicken  19866894229945_1
aatccccaaatatttttgtaaaaccctttaacagccttcaaaaatatcacactgtaatttgtagaattctctctcacgcgtctggttttaggaatacaccaatgtacagacaatttgagagagtaaggaagccgagcctgaatttggatttgtaacttaagacagagcactcacaccaagcaataggtttcagaaaagctcagttggaaccaatgacaagtattaatgggggaagttcaaaggcatgggtggaagcaacaagaatggataggcgtgtgctccactgatacacagcaagamtaaaggaggtatacttctgtcyctctgtattttgagaatacccatcccactatatcatctgactagttaaactgcttcactcagaggagtccacaacagatgagacgtgagcatacaggctagacccagtttccactgaaattccaggagaaagcactgcagtggagttttgccttttactctatggctgccattgcaatgcagacatcccattcacttccagctgtgtgaatgccagaagacacagccctgaggcagaagagcactgttctcaccacccaacttcctggatttcctatt

SEQ ID NO: 19880 - DNA, 600 bp, Chicken  19866894229945_2
accctttaacagccttcaaaaatatcacactgtaatttgtagaattctctctcacgcgtctggttttaggaatacaccaatgtacagacaatttgagagagtaaggaagccgagcctgaatttggatttgtaacttaagacagagcactcacaccaagcaataggtttcagaaaagctcagttggaaccaatgacaagtattaatgggggaagttcaaaggcatgggtggaagcaacaagaatggataggcgtgtgctccactgatacacagcaagamtaaaggaggtatacttctgtcyctctgtattttgagaatacccatcccactatatcatctgactagttaaactgcttcactcagaggagtccacaacagatgagacgtgagcatacaggctagacccagtttccactgaaattccaggagaaagcactgcagtggagttttgccttttactctatggctgccattgcaatgcagacatcccattcacttccagctgtgtgaatgccagaagacacagccctgaggcagaagagcactgttctcaccacccaacttcctggatttcctatttgcacccaaaaaaagagatgct

SEQ ID NO: 19881 - DNA, 600 bp, Chicken  19866894229945_3
ttgaaaaagataaaagctttgtaaaaatagctctttcactacactcctgtctgacattcctaaggtttcacacctgtagatcgctaagcataaccatgctgttctaaattgatgtctttaaaagaactggaggagaatatacgatgaaataaaagtttgtgacttcagataaggacagggagacctcttacaaattgcacagtagaatgctgaatggaggctgcagtcagcccataacccttcatctctgctacttttcatggtcactctctgccactgctctgtgtgggtccttcccasgggatgctgtccttccccagctgatcctgcatggacttcccataggctgcagctttcctagcactactccattgtggggctgccccacagggcccaccgttcaggagtgcactgctccagcacagggccccacagctccttctgsggtyctccgtgggctgcagctccttcagccacgtccactgctgtcctgtgggctcctctgtggctgcacatggagctctgctccacatcgtgcctataggatgcaggaggacagtctgctccaccgtaagcctctcttcggctgcagggaacttc

SEQ ID NO: 19882 - DNA, 499 bp, Chicken  19866894229945_4
gaaataaaagtttgtgacttcagataaggacagggagacctcttacaaattgcacagtagaatgctgaatggaggctgcagtcagcccataacccttcatctctgctacttttcatggtcactctctgccactgctctgtgtgggtccttcccasgggatgctgtccttccccagctgatcctgcatggacttcccataggctgcagctttcctagcactactccattgtggggctgccccacagggcccaccgttcaggagtgcactgctccagcacagggccccacagctccttctgsggtyctccgtgggctgcagctccttcagccacgtccactgctgtcctgtgggctcctctgtggctgcacatggagctctgctccacatcgtgcctataggatgcaggaggacagtctgctccaccgtaagcctctcttcggctgcagggaacttctgctctatgcctagaacacttcctgccctctgcactgaccttgg

SEQ ID NO: 19883 - DNA, 495 bp, Chicken  19866894229945_5
taaaagtttgtgacttcagataaggacagggagacctcttacaaattgcacagtagaatgctgaatggaggctgcagtcagcccataacccttcatctctgctacttttcatggtcactctctgccactgctctgtgtgggtccttcccasgggatgctgtccttccccagctgatcctgcatggacttcccataggctgcagctttcctagcactactccattgtggggctgccccacagggcccaccgttcaggagtgcactgctccagcacagggccccacagctccttctgsggtyctccgtgggctgcagctccttcagccacgtccactgctgtcctgtgggctcctctgtggctgcacatggagctctgctccacatcgtgcctataggatgcaggaggacagtctgctccaccgtaagcctctcttcggctgcagggaacttctgctctatgcctagaacacttcctgccctctgcactgaccttgg

SEQ ID NO: 19884 - DNA, 600 bp, Chicken  19866894229948_1
ctagttaaccaaggacaaggcagctgcaccaatgcctaccatcagccaccttcccttcttccattgagtattttagcgacagttttgcaaaaatgtggcttttaagctgcactgtttctgcctctcctgtacccaccacagtcacagacagagggaccaaattcttctccacccgcatttcgtggaaccatttcaaaaattccacttgtgcaattaattgaacaaaattcaatgcaacaaagactcaaggccacagagaattaagggcaaaagaagtgatccccatcatcttatctgatytaccacacgtaacagaatttcacgtctggaatcggatttcctctctgcatgcacacacggaatggcatcagtcacccccattggccccatcccatgaaatcccagtgtgtgagtgagccacgtgcagcatcctttcgatactcagcactttgcaggacagaacctgggtgttgcgggtgacttagaggaagaaaayattaatagtcaatttgcttctaactgcagtggacggagatggtcctgggagatgggaaggacaagagatgcttggcatggcctcagtaattctttaaatacggt

SEQ ID NO: 19885 - DNA, 600 bp, Chicken  19866894229948_2
aaattccacttgtgcaattaattgaacaaaattcaatgcaacaaagactcaaggccacagagaattaagggcaaaagaagtgatccccatcatcttatctgatytaccacacgtaacagaatttcacgtctggaatcggatttcctctctgcatgcacacacggaatggcatcagtcacccccattggccccatcccatgaaatcccagtgtgtgagtgagccacgtgcagcatcctttcgatactcagcactttgcaggacagaacctgggtgttgcgggtgacttagaggaagaaaayattaatagtcaatttgcttctaactgcagtggacggagatggtcctgggagatgggaaggacaagagatgcttggcatggcctcagtaattctttaaatacggtacttatgaatagaggtgggagagatactacataggtgcacatggagtcagaaaacccacacatccccccaggtcagaaaccagcagcgattccactgcaagaatgaaggaaacatcaaatgcctttgcatagtgatggagaagagagctcaacctcacagccttctgttgggcgttcattgaccttaccaggagag

SEQ ID NO: 19886 - DNA, 600 bp, Chicken  19866894229956_1
aacccaattcaatgcatttcccactccaatccaactcaacccatttcccaacccaatccaactcaatgcatcccaacccactgcccaccccaacccattgcccaccccaccccaccccaacccaacccattgctcatcccatcccacccccaccacgcctccaatccattcgcctccacctcaccgggaagacctcgatgccaacatttcctttaccccctccttttatttgtgccccctcagctgacggatccggcagcaaatcggttcgaagtcccccatgaacacatcggtcccttyagtggttcggcggcctccaacttaaaatactcagtcaacgttcaacagaatccctttggcatcagagtgaccagagtcagcaccgggaaagtgctgtaggtgcctttggggccgtttgttggtcatcccacggcccatggtttggggtttggggttttttagggggttagagtagaaatacggtaaggtctgggattctatgattgcagcattgatcctttgggtggatgaacttaacgaaaagcctctcctggtgtaaaattttgggtgttttcttttttttttcttgcagggctcaga

SEQ ID NO: 19887 - DNA, 600 bp, Chicken  19866894229957_1
caccgtacagctcatcattagggaagtatgagaacacaggcagagtcacagagtgaatggatggctgcccctggagcaggctggcactgtaactgcatgctgcagagatccagtaagagcaataaactgaatgttactataccaggtatactataccatttttaatatgtctgcttgcaagaaatataatactttacacagaagaaaagccagagtgctcacaaagaaggacagttgtaagcagatgctctacacatgcatgcaaaaccaagaaagaccagcactttcctaggcacaccrttgggataagtaccccaaaacagaagcaggcttagagctaaagcagcagggctctgtttccccctgtaccaacaatgcttaggccataatgtcctcaagtcagacacagtcttccccaacagctacattagccaatactcccctgcatgctgctttcagctgatctttcagtcagctgagctgaacttccatgctagtactgtgtaggaagctcagcagaaacaaaaaggccaaaagatgaaagattctggtgaaaacttggatataattgcagagtgttttgagatgatgattttattt

SEQ ID NO: 19888 - DNA, 556 bp, Chicken  19866894229961_1
aatgtgtgtataacttctatgcactgcttttgggcatatttatattaatagccaataagatactgttgtcttaaaaggtgtggggttgtgtagctccaaggcctgtgagggtgtctgtcttcctgttagtattgcaccgatgaagagggaggtgctgatccagagcataccgctgagttacgaggaagcaactggtaagaggtgacataaaacctatgcagtcacaaatgaaaaggtctttttatttgatcaggctacaaggttgcagaagaatctataacatgtatatcaaaccaccgycccttgggactgagatgttgacagaaagaaaaacaacttcaaagaaattctaaagtaatattcaagacttaccaaaataaagcctatttctcatcyacagataatcctgctttctcaaccgttattaatgttgctggtaactaatttaccacttccccttgcaaatgtcaaaatgttggagtattgaccagttaacagtaatatagttatttgtgaactgcatatgataatgtaatttgccaagacacaacattct

SEQ ID NO: 19889 - DNA, 460 bp, Chicken  19866894229961_2
caaggcctgtgagggtgtctgtcttcctgttagtattgcaccgatgaagagggaggtgctgatccagagcataccgctgagttacgaggaagcaactggtaagaggtgacataaaacctatgcagtcacaaatgaaaaggtctttttatttgatcaggctacaaggttgcagaagaatctataacatgtatatcaaaccaccgycccttgggactgagatgttgacagaaagaaaaacaacttcaaagaaattctaaagtaatattcaagacttaccaaaataaagcctatttctcatcyacagataatcctgctttctcaaccgttattaatgttgctggtaactaatttaccacttccccttgcaaatgtcaaaatgttggagtattgaccagttaacagtaatatagttatttgtgaactgcatatgataatgtaatttgccaagacacaacattct

SEQ ID NO: 19890 - DNA, 576 bp, Chicken  19866894229962_1
gccttgggttggctatcaccccaaaatgaaacaaccccatggccaaccccagctttgacctttgccatcgttcacatctgcccccctctctgccctacaggcaacagagcagcgcaggaaccccatcaagaagcccccaaagcgaccaaacccacagagggtcctccttgcggccctacaaagggcaggagcagggaaccaccacgcctccaccaaacccaacccggcaccacgtgtgctgaatgcgggaagagcttcagccacaaatcggccctggtgaaacaccaaaaaatccactcyggcgaccgccctcacggctgcccccactgcggcaaagccttcatccaacgctccgacctcaccatccaccaacgggtgcacacgggcgaacggccctacgtgtgccccgactgcgggcggcgtttcagcgtcagctcctctctgctcacccaccaacgcacccatattcccggtagggagaaacccaaccgctgccctcagtgcggccgcagcttcgccgacgcggcgggtctggatcggcacctaaagagccatctggggggcaaaccctacgag

SEQ ID NO: 19891 - DNA, 599 bp, Chicken  19866894229964_1
  misc_feature (1)..(145): n is any nucleotide
nnnnnnnnnnnnnnnnnnnnnnnnnnnnnnnnnnnnnnnnnnnnnnnnnnnnnnnnnnnnnnnnnnnnnnnnnnnnnnnnnnnnnnnnnnnnnnnnnnnnnnnnnnnnnnnnnnnnnnnnnnnnnnnnnnnnnnnnnnnnnnnnnaaccagatgaaatattttttcccccaaaaactggcaataaactcaaggtgaatttttggtgaagaaaagaaaaagtaacgttctgaagaaacagtgtcagaaaggaataaatatgagaaagaatataccatttaaacacacaggatatttctagrgacctggcccagctgagaaagaaactttcatctacatagtaaaggaatttcctatttttctaggatcctgaggcaaaattggtgatgctaaaaactacaaacaatacctttatataagaaaaatattattcaaaactgcaattatttatcaggtgctatttctccttcctttccttaaacagytgtgtgagaaagcaaacgaagacatacccaagtcatacacctaacattaaataagatgacttcagaacttatcaaagcatgtttttgcatcacaaccaacattttgctgttcttct

SEQ ID NO: 19892 - DNA, 600 bp, Chicken  19866894229964_2
aaactcaaggtgaatttttggtgaagaaaagaaaaagtaacgttctgaagaaacagtgtcagaaaggaataaatatgagaaagaatataccatttaaacacacaggatatttctagrgacctggcccagctgagaaagaaactttcatctacatagtaaaggaatttcctatttttctaggatcctgaggcaaaattggtgatgctaaaaactacaaacaatacctttatataagaaaaatattattcaaaactgcaattatttatcaggtgctatttctccttcctttccttaaacagytgtgtgagaaagcaaacgaagacatacccaagtcatacacctaacattaaataagatgacttcagaacttatcaaagcatgtttttgcatcacaaccaacattttgctgttcttctaagtaggaggaataaccccttagagctgtttgaggacgtctctggggaatagagaggcaaggagtcactacaaataggcggctatataaactttgtgccacatccagcagtaggtggattgattgccagtttacaaagaagggctagaagagagagagaggatatttggctcgtgtgggagcag

SEQ ID NO: 19893 - DNA, 600 bp, Chicken  19866894229964_3
tgtttaactacaaaaattaacggaaacaaatgatcagaagacaataaatagatctgtagttatcttcaccaaggaatgctgatactctgtttacatatctaatgtttgttttgagactccacgctctctgcaggatgcttcagtgcatatggtgttgtcgctgtatttttttttcctttttaatttcttgatacagggtatgaaagtgtcccttggtttccaagcctctctttgctggggaaagagggatgctcttcaagcaaagcagccctgttgtagcctggacacagatatgtgagytcctggatcctgcagcaagaaggaggatgtgaagctcagggtccccagaaagacacctatttccactgtgttagcaaatgtataacatccaagccatactagctggtaaaaactgctatcctcaaatgttgtgcccatgttatcaaacaaaacaggacaagtcttgttgacaagtactgtcactgtgtctacatctgtatttcaagcactatcaaatcacagaatcattaaygttggaaggaccactaagatcatcgatccaaccatcaactcatccccaccatgcccattaaccacgtc

SEQ ID NO: 19894 - DNA, 600 bp, Chicken  19866894229964_4
tgctggggaaagagggatgctcttcaagcaaagcagccctgttgtagcctggacacagatatgtgagytcctggatcctgcagcaagaaggaggatgtgaagctcagggtccccagaaagacacctatttccactgtgttagcaaatgtataacatccaagccatactagctggtaaaaactgctatcctcaaatgttgtgcccatgttatcaaacaaaacaggacaagtcttgttgacaagtactgtcactgtgtctacatctgtatttcaagcactatcaaatcacagaatcattaaygttggaaggaccactaagatcatcgatccaaccatcaactcatccccaccatgcccattaaccacgtccctcagtgccacatytatcctttccttaaacacctccagggatggtgattccaccacctctgtgggcagcccattccaatatttgactgttctttgcagaagaaatacaacttgaaccctccctggtacaacttaaggctactatctcttgtcctatcattggttatctgggagaagaggcccacacctcactacagcttcctttcaggtagttgtagaaagtaataagatc

SEQ ID NO: 19895 - DNA, 589 bp, Chicken  19866894229964_5
caagaaggaggatgtgaagctcagggtccccagaaagacacctatttccactgtgttagcaaatgtataacatccaagccatactagctggtaaaaactgctatcctcaaatgttgtgcccatgttatcaaacaaaacaggacaagtcttgttgacaagtactgtcactgtgtctacatctgtatttcaagcactatcaaatcacagaatcattaaygttggaaggaccactaagatcatcgatccaaccatcaactcatccccaccatgcccattaaccacgtccctcagtgccacatytatcctttccttaaacacctccagggatggtgattccaccacctctgtgggcagcccattccaatatttgactgttctttgcagaagaaatacaacttgaaccctccctggtacaacttaaggctactatctcttgtcctatcattggttatctgggagaagaggcccacacctcactacagcttcctttcaggtagttgtagaaagtaataagatctctcagtatagaatgaactgtttgcaggagcaaggaaaaccacaatttattaagaaaaaaaaaaaacagcag

SEQ ID NO: 19896 - DNA, 600 bp, Chicken  19866894229967_1
caccaagatgccctgccacgtgctcacacagcacccaaaaggagcatggcaccagtatgtgtactggcctactggcccaaactgggctgcacagatgcagcgaccgccttcaggagctgacactcccaccctgacacccaaaaaagcaccaaaaaaccccacaaagcaacacataatcaatccctctgacttcccattgttaagaggtaaaaggatccaaagccactacccagcagtcccacagtatgactaacaacagaccttttaattgcagggtgagcctctgctctgctagagaamacaaagatctaaccacgcgttttggctggtctgaccctgcaggacaccaactgaaagcatctctctgtttcagatgaatacagttgtgtgcaagacccttttcagggagttttggtacagagctgtaagatctttgcttgcgtatgaacgcaagacatacagttttatgcagcatatggcaatgaaagaaaattgaatggcaattcaatgtctttgttttcttggaagccttcgagtagtggcagcctccctccttcacctgtggctgacaagtcagcaacacaaacatccccatgtgca

SEQ ID NO: 19897 - DNA, 600 bp, Chicken  19866894229967_2
ctccccaggccagctaaatacttggaaaagaaaaggaaactttatactctcaccacaccccatcactgcaaaaaacgaagctgctaagcagagctcttagaagaagctttgaatagggaacacaaaaggaaaatagtcagtatgctttcctgattgcaatgacaataaaattacactgtactacatagggtgctatatagttcaatgtcttattcttctgaaaaaataataaaaatccatggcttcttttggaaactatcaatatttttctttttatacaacttatagattgcgatttcmaattaagartactctgagaaggacttcattttctaggtaagcttacattcctttccaaaaatctctgtaaagtgtttcagctaggaattttagggatgtccatggagtggagagttgtgtccagtaaatgactgaactgtaagggaaagkagattataatctgttcccatgtagccacaaatgcattggcaacagacagaaaggatggagtagatagttttcaagaaattttgctatgctttacttacgtcaawctcgaggatgtgattcctaattttgtccacaattagtctgcccatt

SEQ ID NO: 19898 - DNA, 600 bp, Chicken  19866894229967_3
ccagctaaatacttggaaaagaaaaggaaactttatactctcaccacaccccatcactgcaaaaaacgaagctgctaagcagagctcttagaagaagctttgaatagggaacacaaaaggaaaatagtcagtatgctttcctgattgcaatgacaataaaattacactgtactacatagggtgctatatagttcaatgtcttattcttctgaaaaaataataaaaatccatggcttcttttggaaactatcaatatttttctttttatacaacttatagattgcgatttcmaattaagartactctgagaaggacttcattttctaggtaagcttacattcctttccaaaaatctctgtaaagtgtttcagctaggaattttagggatgtccatggagtggagagttgtgtccagtaaatgactgaactgtaagggaaagkagattataatctgttcccatgtagccacaaatgcattggcaacagacagaaaggatggagtagatagttttcaagaaattttgctatgctttacttacgtcaawctcgaggatgtgattcctaattttgtccacaattagtctgcccattagaacagcc

SEQ ID NO: 19899 - DNA, 600 bp, Chicken  19866894229967_4
tgattgcaatgacaataaaattacactgtactacatagggtgctatatagttcaatgtcttattcttctgaaaaaataataaaaatccatggcttcttttggaaactatcaatatttttctttttatacaacttatagattgcgatttcmaattaagartactctgagaaggacttcattttctaggtaagcttacattcctttccaaaaatctctgtaaagtgtttcagctaggaattttagggatgtccatggagtggagagttgtgtccagtaaatgactgaactgtaagggaaagkagattataatctgttcccatgtagccacaaatgcattggcaacagacagaaaggatggagtagatagttttcaagaaattttgctatgctttacttacgtcaawctcgaggatgtgattcctaattttgtccacaattagtctgcccattagaacagccagaagagaggaaagtcagcacgagaatgctaccaccattggagaaaggcgaagacaaccctatcatccactaagctttgargttaaagcctkgacacggaacttccaggtttgcttttttagcaatgccattcatttctga

SEQ ID NO: 19900 - DNA, 600 bp, Chicken  19866894229967_5
actatcaatatttttctttttatacaacttatagattgcgatttcmaattaagartactctgagaaggacttcattttctaggtaagcttacattcctttccaaaaatctctgtaaagtgtttcagctaggaattttagggatgtccatggagtggagagttgtgtccagtaaatgactgaactgtaagggaaagkagattataatctgttcccatgtagccacaaatgcattggcaacagacagaaaggatggagtagatagttttcaagaaattttgctatgctttacttacgtcaawctcgaggatgtgattcctaattttgtccacaattagtctgcccattagaacagccagaagagaggaaagtcagcacgagaatgctaccaccattggagaaaggcgaagacaaccctatcatccactaagctttgargttaaagcctkgacacggaacttccaggtttgcttttttagcaatgccattcatttctgattagactctgagatttccttccatcttcactgtagtatcttccatcacaggctccatgggagcccttccttcatctgaacaaccactgctcttcaaggtcctgc

SEQ ID NO: 19901 - DNA, 582 bp, Chicken  19866894229967_6
tagggatgtccatggagtggagagttgtgtccagtaaatgactgaactgtaagggaaagkagattataatctgttcccatgtagccacaaatgcattggcaacagacagaaaggatggagtagatagttttcaagaaattttgctatgctttacttacgtcaawctcgaggatgtgattcctaattttgtccacaattagtctgcccattagaacagccagaagagaggaaagtcagcacgagaatgctaccaccattggagaaaggcgaagacaaccctatcatccactaagctttgargttaaagcctkgacacggaacttccaggtttgcttttttagcaatgccattcatttctgattagactctgagatttccttccatcttcactgtagtatcttccatcacaggctccatgggagcccttccttcatctgaacaaccactgctcttcaaggtcctgcggtgccagtccttgttctcacaaaatcaggtgacgaacttccaccttctgcaaagaataataatttgggatggcagggaatgcattgcaaagacacgaggcacaaagacaatataaga

SEQ ID NO: 19902 - DNA, 571 bp, Chicken  19866894229967_7
atggagtggagagttgtgtccagtaaatgactgaactgtaagggaaagkagattataatctgttcccatgtagccacaaatgcattggcaacagacagaaaggatggagtagatagttttcaagaaattttgctatgctttacttacgtcaawctcgaggatgtgattcctaattttgtccacaattagtctgcccattagaacagccagaagagaggaaagtcagcacgagaatgctaccaccattggagaaaggcgaagacaaccctatcatccactaagctttgargttaaagcctkgacacggaacttccaggtttgcttttttagcaatgccattcatttctgattagactctgagatttccttccatcttcactgtagtatcttccatcacaggctccatgggagcccttccttcatctgaacaaccactgctcttcaaggtcctgcggtgccagtccttgttctcacaaaatcaggtgacgaacttccaccttctgcaaagaataataatttgggatggcagggaatgcattgcaaagacacgaggcacaaagacaatataaga

SEQ ID NO: 19903 - DNA, 599 bp, Chicken  19866894229970_1
  misc_feature (1)..(187): n is any nucleotide
nnnnnnnnnnnnnnnnnnnnnnnnnnnnnnnnnnnnnnnnnnnnnnnnnnnnnnnnnnnnnnnnnnnnnnnnnnnnnnnnnnnnnnnnnnnnnnnnnnnnnnnnnnnnnnnnnnnnnnnnnnnnnnnnnnnnnnnnnnnnnnnnnnnnnnnnnnnnnnnnnnnnnnnnnnnnnnnnnnnnnnnnnnntaatataaaccatagattcatgtgaaataccaccaggtatattcacagcaacaaatgttttttcttcgtgtgacactgccatgataaaacaaaatgtgttcacatcacaaagytgaaggcagggacccacatgcaggagaagttagaagtgcatgccaatctctccccattttccatcacagctacttgctccatacagaaagaacacaagaattcatttttcccccacaccagaccaatggagcctacaggtggctgcactcatggcagrttttctgatatccttaaatgggatttcaaccacccagatatctgctgggaaagcaatrcagcaagctgcaaacactccaggagactcctggagtcccttgatgacaactttcttgttcaggtattggacagactgacctga

SEQ ID NO: 19904 - DNA, 599 bp, Chicken  19866894229970_2
  misc_feature (1)..(29): n is any nucleotide
nnnnnnnnnnnnnnnnnnnnnnnnnnnnntaatataaaccatagattcatgtgaaataccaccaggtatattcacagcaacaaatgttttttcttcgtgtgacactgccatgataaaacaaaatgtgttcacatcacaaagytgaaggcagggacccacatgcaggagaagttagaagtgcatgccaatctctccccattttccatcacagctacttgctccatacagaaagaacacaagaattcatttttcccccacaccagaccaatggagcctacaggtggctgcactcatggcagrttttctgatatccttaaatgggatttcaaccacccagatatctgctgggaaagcaatrcagcaagctgcaaacactccaggagactcctggagtcccttgatgacaactttcttgttcaggtattggacagactgacctgaggggaggcaytgctggacctggtgctcatggaagtgaagaagatggttaaaggggttgagattggaggcagtctgggttgcagcaaccatgagttgctcggttggttgagttcrtgatctccaggaacaaggccctgttaaagagtggagtcaggacc

SEQ ID NO: 19905 - DNA, 600 bp, Chicken  19866894229970_3
ccaccaggtatattcacagcaacaaatgttttttcttcgtgtgacactgccatgataaaacaaaatgtgttcacatcacaaagytgaaggcagggacccacatgcaggagaagttagaagtgcatgccaatctctccccattttccatcacagctacttgctccatacagaaagaacacaagaattcatttttcccccacaccagaccaatggagcctacaggtggctgcactcatggcagrttttctgatatccttaaatgggatttcaaccacccagatatctgctgggaaagcaatrcagcaagctgcaaacactccaggagactcctggagtcccttgatgacaactttcttgttcaggtattggacagactgacctgaggggaggcaytgctggacctggtgctcatggaagtgaagaagatggttaaaggggttgagattggaggcagtctgggttgcagcaaccatgagttgctcggttggttgagttcrtgatctccaggaacaaggccctgttaaagagtggagtcaggaccctgaacttcaggagggagaacctgaggctgtttaaggaattgttggatgggattgtcat

SEQ ID NO: 19906 - DNA, 600 bp, Chicken  19866894229970_4
ggacccacatgcaggagaagttagaagtgcatgccaatctctccccattttccatcacagctacttgctccatacagaaagaacacaagaattcatttttcccccacaccagaccaatggagcctacaggtggctgcactcatggcagrttttctgatatccttaaatgggatttcaaccacccagatatctgctgggaaagcaatrcagcaagctgcaaacactccaggagactcctggagtcccttgatgacaactttcttgttcaggtattggacagactgacctgaggggaggcaytgctggacctggtgctcatggaagtgaagaagatggttaaaggggttgagattggaggcagtctgggttgcagcaaccatgagttgctcggttggttgagttcrtgatctccaggaacaaggccctgttaaagagtggagtcaggaccctgaacttcaggagggagaacctgaggctgtttaaggaattgttggatgggattgtcatgggaaactgtccttggggacagtgaaacagaacagagctggcagcactttaaggatgcctttgtgagagcacaagagctctccatctcccagc

SEQ ID NO: 19907 - DNA, 513 bp, Chicken  19866894229970_5
cacaccagaccaatggagcctacaggtggctgcactcatggcagrttttctgatatccttaaatgggatttcaaccacccagatatctgctgggaaagcaatrcagcaagctgcaaacactccaggagactcctggagtcccttgatgacaactttcttgttcaggtattggacagactgacctgaggggaggcaytgctggacctggtgctcatggaagtgaagaagatggttaaaggggttgagattggaggcagtctgggttgcagcaaccatgagttgctcggttggttgagttcrtgatctccaggaacaaggccctgttaaagagtggagtcaggaccctgaacttcaggagggagaacctgaggctgtttaaggaattgttggatgggattgtcatgggaaactgtccttggggacagtgaaacagaacagagctggcagcactttaaggatgcctttgtgagagcacaagagctctccatctcccagcataagaaatcaggcaga

SEQ ID NO: 19908 - DNA, 600 bp, Chicken  19866894229971_1
caggcttagaggggcagagtggctggaagactgtgtagaggaaatggacctgggggtattgactgatgctcaactgaacatgagccagcagtgtgcccaggtggccaagaaggccagtgacatcctggcttgtaatagaaatagtgttgccagcagaaacagggaagtaattatccccctgtactcagcactagtgaggccgcaccttcagtaatgtgtccagttttgggcccctcactgcaagaaagacatcaaggccctggagcgtgttcagaggagggcaacaaagctggtgagggrtctggagcacaggccttatgaggagcggccgaaggagctgggattgttcagtctagagaagaggaggctcaggggagacctctataactacctgaagggaggttgtagtgagttgggggtcagcctcttctctcgtgtgactagtgataggactagagggaatggcttcaagctgcgccagggaagattcaggctggacgttaggaaatactacttctctgaaagggtggtcaggcactggaatgggctgcccagcgaggtggtcgagtcactgaccctggaggtgttcaaggaacattt

SEQ ID NO: 19909 - DNA, 560 bp, Chicken  19866894229972_1
caaaacaaacaagcaaataaacaaacaaaagcttcacccaaaacaaactgaattaggtcaagcataaccctgcatttaaatcattttgaaaagtttcatttcaggcaggaatcaagtgctcacagttttctccccaaaggatttgacataggagatcaacaggaagaatctagtacctgtcaatagtttcagtaagccagcatacccaaacaaaaatctttgttaaagatcttgacaagctctaattaaccatgtataaaattatttatatgactgagaactaaagtgttcaatgcatcrgtatataaaagtgttatgacttgcatttcagcctagccctcacactatatttttacaagactttataataattttctattcatgtatttataacttctatttaatattttttgtttatattaaacagagtgcatttaactctaggtgtatgcaaaaatgcatattcctacattatttttattaaattgtttgaaaatttagaacattttatttttattttatatagttaaatttgttatggtgtactttaaaaattttta

SEQ ID NO: 19910 - DNA, 600 bp, Chicken  19866894229973_1
gcgcgtctgtggtggctgcccttgtgaaagccaacatcagcctgcccctaaagctctctgccctatggtgctgcccctccccgagttaaacactcagctctgggcacgcagatgctgctcttgtccacatctgctgagttaaatgggctacttttacaagttgttcatgagacagtctcaaattctgacgtaaaccttccaaaccctaaattgctgcattccttgcgatggccaagcgaaattctgctgtgtctgcaaaatcactatgtgtgagttttaacattaaaacatgttttcacragttggcactgcagtgaaggggtggaaaaaaccaaaacagcagaaaggcagaaataggttgttagttggctggttgttgttttggttggttctcttcaacacccgtgtctgttttctgtaaaattctagggtcccaaaggagctaagggtgaccaaggcagtgcggggatcacaggaccgaaaggagagacgggagaaatgggcttatcgggtccaccggtatgtctgctgtgctgcagcgcattggttcctgcaagtcttggtgtgtggttgggttttgttgagctgggcagaggcctg

SEQ ID NO: 19911 - DNA, 389 bp, Chicken  19866894229981_1
agatatcccctgccaaagggctttcagtcctcactgcctgtgatctgtgtgaaggccacacttactgcattataaacaccaccaatcatattagcaaggatttcagaagctgtcttaaaagagacaaaatcactcctgccattccacagtgctccttccatgcacgtgcatgtatgcaatgagatcaggatgctgctcagaggaacgtatcaccaacataagagatgaagcaagatgagtgcagcgagctagcttgttttgcggttgcatcaacgtaaaaaaataaatgacaattatccrcaaattgaaaacagatcaggggctgagcaaagacttgaataatagtaaggagtgtatctctgctcacagagaacacagggctgggggaa

SEQ ID NO: 19912 - DNA, 599 bp, Chicken  19866894229984_1
  misc_feature (1)..(63): n is any nucleotide
nnnnnnnnnnnnnnnnnnnnnnnnnnnnnnnnnnnnnnnnnnnnnnnnnnnnnnnnnnnnnnncaaagacttgaataatagtaggagtgtatctctgctcacagagaacacagggctgggggaattcagagaggttttgttgcagtgatagatgttgcccctggatatttatcctgcagtattcagctgctcaccaaaagcactgaaaacctgatagccaatgttcataaaattcctatctgttctccagcaatacactgattttcagcctcagggcccccagcgtcagcggaggggtcwtgtgccttcggaatggaaaagcagccagactcagtggccacagtccttggtgttccacttacagggcacttccatgctgcagacagatggcagctggtgtttcttgtggttcagggacatgggtcagcgtcaggactggtttaccgaagaagttcaccggmggtcatcaagaacaagtgcttgaaagccacagatatttaaatgactgtctccaaagcttggggttagacaatgcctcgaggcagaacaattttgggtggagaatgggcttcctctgcctgccactgaggctctgtgat

SEQ ID NO: 19913 - DNA, 600 bp, Chicken  19866894229984_2
tggatatttatcctgcagtattcagctgctcaccaaaagcactgaaaacctgatagccaatgttcataaaattcctatctgttctccagcaatacactgattttcagcctcagggcccccagcgtcagcggaggggtcwtgtgccttcggaatggaaaagcagccagactcagtggccacagtccttggtgttccacttacagggcacttccatgctgcagacagatggcagctggtgtttcttgtggttcagggacatgggtcagcgtcaggactggtttaccgaagaagttcaccggmggtcatcaagaacaagtgcttgaaagccacagatatttaaatgactgtctccaaagcttggggttagacaatgcctcgaggcagaacaattttgggtggagaatgggcttcctctgcctgccactgaggctctgtgatggcagggaacgcagcagggcccacatcaacagggatgttaatgagttctacccagagacaatccacaactccccacgttctttcctcgcctgcattctccttctccctagtcagttattttccaggttgttgattttgacataaaatgtttttgaaaaaact

SEQ ID NO: 19914 - DNA, 600 bp, Chicken  19866894229990_1
gattaataagcatcttcccacaaagagagaagcatctctcacttcttaatggactacatgcagtattactaactcacatcatttgcacatgaattctcagtatggcgagatgcttgaaataaagctatgaatacagtgtttgattttaaacacttcatctgagtccaaaatgtttcaattcttatttaagaaaaatgttgttttacaaaatggatttgcgtttcaagaaagggaacaaaataatcataatacagggctagaaactgtatttcagatactgatcacattttttttgtttgrataaaagtatccaatgyttttaaagattagtccaacaaaaggaagtcaataaatcccattatttacaaataaacggatggttagagttgcttcctatttcgagccctgcagaacaaattacgatgacagcatgactttcatgttgtgaatgttaagtataaacaggggtagaaattaacctgtttttttcctctgtcatctaacaygatactcaagacagcttctgtttggctgttcaatttgcatagcagactttaactcttcctgtgaaactggaatgttttcagctaagacagggtt

SEQ ID NO: 19915 - DNA, 600 bp, Chicken  19866894229990_2
ccacaaagagagaagcatctctcacttcttaatggactacatgcagtattactaactcacatcatttgcacatgaattctcagtatggcgagatgcttgaaataaagctatgaatacagtgtttgattttaaacacttcatctgagtccaaaatgtttcaattcttatttaagaaaaatgttgttttacaaaatggatttgcgtttcaagaaagggaacaaaataatcataatacagggctagaaactgtatttcagatactgatcacattttttttgtttgrataaaagtatccaatgyttttaaagattagtccaacaaaaggaagtcaataaatcccattatttacaaataaacggatggttagagttgcttcctatttcgagccctgcagaacaaattacgatgacagcatgactttcatgttgtgaatgttaagtataaacaggggtagaaattaacctgtttttttcctctgtcatctaacaygatactcaagacagcttctgtttggctgttcaatttgcatagcagactttaactcttcctgtgaaactggaatgttttcagctaagacagggttatgaaatyttctatatt

SEQ ID NO: 19916 - DNA, 600 bp, Chicken  19866894229990_3
aaaatggatttgcgtttcaagaaagggaacaaaataatcataatacagggctagaaactgtatttcagatactgatcacattttttttgtttgrataaaagtatccaatgyttttaaagattagtccaacaaaaggaagtcaataaatcccattatttacaaataaacggatggttagagttgcttcctatttcgagccctgcagaacaaattacgatgacagcatgactttcatgttgtgaatgttaagtataaacaggggtagaaattaacctgtttttttcctctgtcatctaacaygatactcaagacagcttctgtttggctgttcaatttgcatagcagactttaactcttcctgtgaaactggaatgttttcagctaagacagggttatgaaatyttctatattaaagtgcgaagtaccaaaccaatgcatcttataatttacatttctgcaagawtttttaattaatccaacacctgtttggaagaaactgtatctgatccaactacttatcaggtaacttgattgactatcattaatttcaacccctgggaactggtgaacaggaaagcagtcaggagcagcaaagtaaca

SEQ ID NO: 19917 - DNA, 600 bp, Chicken  19866894229990_4
atccaatgyttttaaagattagtccaacaaaaggaagtcaataaatcccattatttacaaataaacggatggttagagttgcttcctatttcgagccctgcagaacaaattacgatgacagcatgactttcatgttgtgaatgttaagtataaacaggggtagaaattaacctgtttttttcctctgtcatctaacaygatactcaagacagcttctgtttggctgttcaatttgcatagcagactttaactcttcctgtgaaactggaatgttttcagctaagacagggttatgaaatyttctatattaaagtgcgaagtaccaaaccaatgcatcttataatttacatttctgcaagawtttttaattaatccaacacctgtttggaagaaactgtatctgatccaactacttatcaggtaacttgattgactatcattaatttcaacccctgggaactggtgaacaggaaagcagtcaggagcagcaaagtaacagagtaagtaattttaggaaaacattgagagagagatagaattaagggtgtgaaagatgtgggatttatgattttaaagtgcaatgttttccacttactcttc

SEQ ID NO: 19918 - DNA, 600 bp, Chicken  19866894229990_5
taaacggatggttagagttgcttcctatttcgagccctgcagaacaaattacgatgacagcatgactttcatgttgtgaatgttaagtataaacaggggtagaaattaacctgtttttttcctctgtcatctaacaygatactcaagacagcttctgtttggctgttcaatttgcatagcagactttaactcttcctgtgaaactggaatgttttcagctaagacagggttatgaaatyttctatattaaagtgcgaagtaccaaaccaatgcatcttataatttacatttctgcaagawtttttaattaatccaacacctgtttggaagaaactgtatctgatccaactacttatcaggtaacttgattgactatcattaatttcaacccctgggaactggtgaacaggaaagcagtcaggagcagcaaagtaacagagtaagtaattttaggaaaacattgagagagagatagaattaagggtgtgaaagatgtgggatttatgattttaaagtgcaatgttttccacttactcttcacccccttttttcccttgcgctcctttttgtattgttccttgagtttggttattactccct

SEQ ID NO: 19919 - DNA, 600 bp, Chicken  19866894229992_1
cagtgaaatcatgccagtaaactgtgtgaagagcagagatcaacaacagtgccctggacatcgggaacaaccctgccgactgtgttaattgagtgtaagcttcactttcaaagctacacagaagcttaagcccatttatcttttcaagggatttaaaggcctatgagctttggaaagtggcactgacaggacaggaaagttcaaatcaccaattccaacttccagtagctgttaacatggattgaactatctgtgtcaagcccatatggcatcttgccaggcaagacttgtttaactgcyctctctgacatttcctggcatctttgagacttttacttaaaaacaaacaaacaaacaacaatttctctaacatgtgatttcaccycaaatccaaaatattggattcatcctaagtctgaagacagagaaaatcatttttgtggtacaggctgctttctgagctagaagcagcagctctgctgaaatacctcattctgtgttgtctgaaaggctacacaggataagcagagtctgggaagacaggaaaaactgaattataggcttgtgagatggacattgacaaaaaaaatgaagcgacaa

SEQ ID NO: 19920 - DNA, 600 bp, Chicken  19866894229992_2
taattgagtgtaagcttcactttcaaagctacacagaagcttaagcccatttatcttttcaagggatttaaaggcctatgagctttggaaagtggcactgacaggacaggaaagttcaaatcaccaattccaacttccagtagctgttaacatggattgaactatctgtgtcaagcccatatggcatcttgccaggcaagacttgtttaactgcyctctctgacatttcctggcatctttgagacttttacttaaaaacaaacaaacaaacaacaatttctctaacatgtgatttcaccycaaatccaaaatattggattcatcctaagtctgaagacagagaaaatcatttttgtggtacaggctgctttctgagctagaagcagcagctctgctgaaatacctcattctgtgttgtctgaaaggctacacaggataagcagagtctgggaagacaggaaaaactgaattataggcttgtgagatggacattgacaaaaaaaatgaagcgacaagcttgctcagatgccaactgtgtttaatccagtcatcacacagccctgtttaactaaatatttgacttcagaactgggcctgaat

SEQ ID NO: 19921 - DNA, 600 bp, Chicken  19866894229993_1
tgatcctcaagaacttttccattctaggcacagagcacggaggatcgcctccatccatggatggacttctcatctttctaaatcttcttttttccagttgtacagagtgctccaagggtaatgcaacaaaacagagcaggtatcagtgacagccttgtctgaagataccaccatgggcagaattactgacacagacaggatctggttttgttccaaagttgtaaagaagctgctgtgggtaaagctttcagttttcactacaacaaagctatcactggaactgcctattatttgtattaycaattaatctcatatctgtgtacaaaattcaaagtaaatagttccaattcagtactctgcaaaataattgatgacagaagcatacctgaatggatttatttaggttaaattgtgccatgggaatggttggaaattatgggttatttgaaagcaaaagcagagcaaatgatattgtaaggaagaattgtaataaactagtcagttgtgtatataaattacaggtttgtaatttgtgcgggtatgagtggaagctctgtgtaaaatagagttgtgctgttaagcatccgtttcagggcatgc

SEQ ID NO: 19922 - DNA, 599 bp, Chicken  19866894229995_1
  misc_feature (1)..(58): n is any nucleotide
nnnnnnnnnnnnnnnnnnnnnnnnnnnnnnnnnnnnnnnnnnnnnnnnnnnnnnnnnntaatgccacatgaacagagctccttggaaccaaggaaggcatatctaaaattaagaggaacttaaataagaattttctctaaaacaagactgagagttctcatgcatcttctatatatttaaactcccaccagcttcactgcagtttgaaatatgcaggaagggaagcgtggacaggaaaaggcagaagacaaaaatggagaagtagcaatggaataaggaatgggacaaattcagagcacrgctgagaacaaagccttgcctcctgaatttctgtttacagaatattctcttgataattctcatcactgttcactacttttatcagggtacggaaggtcagctagcagcaagcaacaagcccagcaatggcaagttcacccaggaaatgaatgtcagccaggactgcctacagctcggtaggaaagtagcagctgggctgggactaacctcttctaaagctctgctgcagtgatgtatgacattgcagacctcattcatggcccccgtaagagccccagtactttactaaagaaattatg

SEQ ID NO: 19923 - DNA, 599 bp, Chicken  19866894229996_1
  misc_feature (1)..(100): n is any nucleotide
nnnnnnnnnnnnnnnnnnnnnnnnnnnnnnnnnnnnnnnnnnnnnnnnnnnnnnnnnnnnnnnnnnnnnnnnnnnnnnnnnnnnnnnnnnnnnnnnnnnntatgtgctgcttgtcttacttaccaacagaaataactttgctactgatagtgaaatatttttttgttgattttcttgcagtcacagttattgttttcttaagtacatttatttagcgtacttcttcacagtgcaaatatctgccaacaattttcttatgttcagctagcagagattcttactcacaaaattccaaaagtwcttccatctactgtcataacttaggagataacaagttagaagacacattctctataaatttgtgcatgaatttatggatgtaaagatatgcttcagtttagagtatgacagtttccacagaagtacaaaaatatagacagaagatcattgtttagtctctaaagttggtatattgactgagaatggtatgaaaatgcattatggtatgaataacctgtaagtgactgagaagttgtatctagctgaaattgtcacttacatgtgagggagaggtcagagaagttaaaaaaataaaacaa

SEQ ID NO: 19924 - DNA, 600 bp, Chicken  19866894229996_2
tatgaaaatgcattatggtatgaataacctgtaagtgactgagaagttgtatctagctgaaattgtcacttacatgtgagggagaggtcagagaagttaaaaaaataaaacaaaaataaactatatatttcttaactttctgtctgtctctctgtctacagcatactaaaacatttgtaacatttcttctcagcagtccagcctgcttccatcctcagcaacaaaataaaagtttccatactttatgtactagaaagtaaggagaacattattcaatttacagtcccagttttcttcaaracatttgcaaagctacaggcagttataaaaataaaataaaataaagacatggaaacacaaaattctgtagatgccacaaatgtttcttcagaataataaggtgagaaagttttgctagagaaaaaaaaaaaaaaagtgcacatttatgtactggccaaaccattaatttacattgtataattcaaaattgtaggtatataggaaggtaaaaaacgagtagaatcataacacaatcagggcagtgagccagattctaaatcagtactgggtcactgataataaactgttatagctgtaaaa

SEQ ID NO: 19925 - DNA, 599 bp, Chicken  19866894229997_1
  misc_feature (1)..(89): n is any nucleotide
nnnnnnnnnnnnnnnnnnnnnnnnnnnnnnnnnnnnnnnnnnnnnnnnnnnnnnnnnnnnnnnnnnnnnnnnnnnnnnnnnnnnnnnnncacaacttgtggccatttcctcgggtcctgtttgttgcctgggaaatcaaaaatggccatagttggaaaacttctatttacataggaaaccatttttgctaccgaacagtcaatgtggtcattaactgaaatgaacataacatttgaaagcagagtatgcaattatacatgcacgtaattccaatatgtaggtaaagtgtgtataactcaraggggaaacgttcaatttatttctgccgttccaaagaggaaaaagcaatgaaaaaaatacaatctgaagcctcaaggactacagtgctactatggagttatgtaagtgttctctagtgtacttctgtaataagtttaaaatcaacatatgctttttaggcaatatatgataagtgtcaaaaaaatgttctctccacataactatatgggtcactcagcccgaaaatacaataaacccagagaattcatcactttgcttcatctgatatttgcattaaaaaaaaaaagagagagagattt

SEQ ID NO: 19926 - DNA, 600 bp, Chicken  19866894229997_2
gtgtataactcaraggggaaacgttcaatttatttctgccgttccaaagaggaaaaagcaatgaaaaaaatacaatctgaagcctcaaggactacagtgctactatggagttatgtaagtgttctctagtgtacttctgtaataagtttaaaatcaacatatgctttttaggcaatatatgataagtgtcaaaaaaatgttctctccacataactatatgggtcactcagcccgaaaatacaataaacccagagaattcatcactttgcttcatctgatatttgcattaaaaaaaaaaaragagagagatttgcttcagaacagatgcgattagaaacactctmtctgtgccacaatccctctctgcttcaaccgtggacatttaggcaggcatacagtttgctctcacgaagagacagattgcattagatttctaaaccaggtcaaaaatagccatctgtgaacagattctgatgatctggaaaatgagatttttagatgacctgttcttaatgtaagcccttgcctagcagcctctttccacgtgaaatgattattaggtacaatactcaggaaaagcacttcctcaacaaaacaata

SEQ ID NO: 19927 - DNA, 600 bp, Chicken  19866894229997_3
caaagaggaaaaagcaatgaaaaaaatacaatctgaagcctcaaggactacagtgctactatggagttatgtaagtgttctctagtgtacttctgtaataagtttaaaatcaacatatgctttttaggcaatatatgataagtgtcaaaaaaatgttctctccacataactatatgggtcactcagcccgaaaatacaataaacccagagaattcatcactttgcttcatctgatatttgcattaaaaaaaaaaagagagagagatttgcttcagaacagatgcgattagaaacactctmtctgtgccacaatccctctctgcttcaaccgtggacatttaggcaggcatacagtttgctctcacgaagagacagattgcattagatttctaaaccaggtcaaaaatagccatctgtgaacagattctgatgatctggaaaatgagatttttagatgacctgttcttaatgtaagcccttgcctagcagcctctttccacgtgaaatgattattaggtacaatactcaggaaaagcacttcctcaacaaaacaatattgatgagctgggcctttacaaccgccccacaacaacctgatag

SEQ ID NO: 19928 - DNA, 600 bp, Chicken  19866894230002_1
aacctggtacttctcatatcacttatcatctgggtgtattgcttcagtcttgcaatgtgattcatcgttccagaagagtattaattagtggtttctgtaaattcttcctgtatcagtccttactatgtattgcgctgccttgcagaaatcaggaccgaacactttctcagtactgtgaataatactagtatcttgatttaataatagataagtggatactgtaacatatttctaaaggagaatgcaatgtattcatgcagacatacctcaacaagtatgaaaatgtaaggagatttacawgagcatatttggtccagtgcctgaagttttctattctactcaaagatgaaaagattctgccaagattcagcttggagttgctttttatagcagagttgtaactccttagtagaagatttattatggtaatagttttaatatagtggcacttacataatgtaagtgtataacaagtcacttctcacctcggtcagttgttgtcaatcagctctgcatagcaggattttaacaggatataacagtttttttgtaaatggcttaaaacattaaattatttgtgtctaatattaataaccctgt

SEQ ID NO: 19929 - DNA, 600 bp, Chicken  19866894230006_1
tggcagctgcctggtttctcccaggtttcagctccaagaactaagccttcccagaaagccagtgcaatttgaaaaactgcagtataaatgggaagtagaacaccacatgtgtctaattattcctcctctgctgccctagcaattaagactaatagtgagtgatgtgtggactgtcacctgtatgccccgactgtgtgctttctcaaaggttgatttcatgctcagcatggcacatggagcacatgaaaacaaagacttctacttttccatggcagtgacagcttgtgaaaccccttgcaycgacctgttatagcccacgtcagggaaatgttgctgaagcttcccccatgcaccaagtgccactacagcctctctcagcaaaaactgataagttccccaggaaaacagcatgcatttggtggtccactgaccacctcctgttgtttctgaaagacagacgtggggatgtgcaaaaattttaaaaaagaaacaaacaaaccacaaccaaccaagcaaagacctgaaagatctgcggaaaataaaaccagtcactggggctggagttttccaagggaaattaagtgggacagccttactgaa

SEQ ID NO: 19930 - DNA, 600 bp, Chicken  19866894230007_1
tccaggacaagactatcagcacaagcttggcagttgtggacttaatagatgctatacagcctggctgcatcaactatgaccttgtaaagactggtcatctatcggaagatgacaaacaaaataatgctaagtaagtctatcatcttgaaagctgctttgctctgggagagtgcacctactatgccatgacttaaacttgcaagcatttttactgtatttctgtggttttcaatctcttttaacacttaatttttaagggaggaagtgctttttgaaactgaattgctgttctcctcagtratgcctgaggagttcttggctggactcttgcccgttgagaggaatgcagaatagcccaagcacttcttaggagagaaacagagatcactgctgtttgttcaggcttatgaaatgttcagycagcaatcagggctttgaggctgaacccttgtctgtctctcgtcttgttggatcaccatagattgtcaaggttacagtataccttttaaatcctgcctttggaatgtgtgttctgcagctcttctgcagtggcagaatgacaggaagttttcacgtaggtaatagcctctcttgattatt

SEQ ID NO: 19931 - DNA, 600 bp, Chicken  19866894230007_2
ataatgctaagtaagtctatcatcttgaaagctgctttgctctgggagagtgcacctactatgccatgacttaaacttgcaagcatttttactgtatttctgtggttttcaatctcttttaacacttaatttttaagggaggaagtgctttttgaaactgaattgctgttctcctcagtratgcctgaggagttcttggctggactcttgcccgttgagaggaatgcagaatagcccaagcacttcttaggagagaaacagagatcactgctgtttgttcaggcttatgaaatgttcagycagcaatcagggctttgaggctgaacccttgtctgtctctcgtcttgttggatcaccatagattgtcaaggttacagtataccttttaaatcctgcctttggaatgtgtgttctgcagctcttctgcagtggcagaatgacaggaagttttcacgtaggtaatagcctctcttgattattcctacaaagcaaacagaaggaggaatataaatgttagctgattagtcctcaattacgcatgctagctattagccctaacaaatattaattacaacttttaactgttgataaagtgagctt

SEQ ID NO: 19932 - DNA, 600 bp, Chicken  19866894230009_1
ccttgaggtcctgggtgcttcaggaagcagctccagctctgctcctacctggagatgctcagacctcagagtgcctgtggctaatcttaatgcagaggttactgcagttaattagtgcccaaaaccgagccccttgcacctgctgagcatggcatcatccctgcatgcacccaccattgccttgggctgggcagtgccccaggcttggctggatccagggtttgggagctctggttttccctactctgatctctaccagagttttcacttctgataaattccatggtgcattccatatayattctgataaatacctggtgcagaagcacacctgtatctgcacctgagcttgcaggacatcaggcagagagaaaccctacatyctccctgtgcccccatgtgatacagggcaggggagcagactcttggaccctgacacctctgtgggacctgcagcaggggggaagcccagtactgggagcatctctgcttcttgttgtggggtcacatctcaggcatggaccgagagttccgtcaccccacaccaatccagaaccatccccaccagcccaagcataaaggcacagaatagaaaaagca

SEQ ID NO: 19933 - DNA, 600 bp, Chicken  19866894230009_2
atcttaatgcagaggttactgcagttaattagtgcccaaaaccgagccccttgcacctgctgagcatggcatcatccctgcatgcacccaccattgccttgggctgggcagtgccccaggcttggctggatccagggtttgggagctctggttttccctactctgatctctaccagagttttcacttctgataaattccatggtgcattccatatayattctgataaatacctggtgcagaagcacacctgtatctgcacctgagcttgcaggacatcaggcagagagaaaccctacatyctccctgtgcccccatgtgatacagggcaggggagcagactcttggaccctgacacctctgtgggacctgcagcaggggggaagcccagtactgggagcatctctgcttcttgttgtggggtcacatctcaggcatggaccgagagttccgtcaccccacaccaatccagaaccatccccaccagcccaagcataaaggcacagaatagaaaaagcagaagtctatggaattcagagctgacaaacaccatatctgcatgcttgttcacatcctccttaacatcgttaccaggtagttgc

SEQ ID NO: 19934 - DNA, 600 bp, Chicken  19866894230017_1
tcataactggccagctaagggggtgaaagggtgaagaaaccagcgctaggtgaaactggcttccatcatgccaccaggatccatgctgtccgatggcaggcatccagtcatcttgatgtcatctgcatggctgctggccaagatactgagatgaatgcagaaagcccttacattctcccagttctcaccttcttccctaaagggcccacagctgcccacacacgttactgcagctctggtgcaagggcaagtcctgcagggaatctcatggtgagaagcctgtgacttgtaggggacaasgtccatccctaaaacagccttgatgcagaacttgttggcgttatactgagtgtggcaatttctttctcacagagcagtgcaatgagatgggaacacctctgacagctgtttgtaaactcattcatgctactcgggctttccactgtgtcacagaaggacaatgtggtttytctttctgctcaaattcattcttttctttttttcttttctaattctagaagtcctgatccctattacctaatgtcacatagcaggaaacacctcacgacaattatttattcactgtcttcttttgtttaa

SEQ ID NO: 19935 - DNA, 591 bp, Chicken  19866894230017_2
cattctcccagttctcaccttcttccctaaagggcccacagctgcccacacacgttactgcagctctggtgcaagggcaagtcctgcagggaatctcatggtgagaagcctgtgacttgtaggggacaasgtccatccctaaaacagccttgatgcagaacttgttggcgttatactgagtgtggcaatttctttctcacagagcagtgcaatgagatgggaacacctctgacagctgtttgtaaactcattcatgctactcgggctttccactgtgtcacagaaggacaatgtggtttytctttctgctcaaattcattcttttctttttttcttttctaattctagaagtcctgatccctattacctaatgtcacatagcaggaaacacctcacgacaattatttattcactgtcttcttttgtttaatacgtacttgggcttggccattccattttcagctgttgctgatttttttttttttactggaggactgacctaattttttctaaggaaaagttagatttagtgagtgtggaaaaaatcaccttgaaaaaaaaaaaaaccccacacaaataaagcttcgtgag

SEQ ID NO: 19936 - DNA, 600 bp, Chicken  19866894230018_1
gatggtagcttgcaatgctgctcaagtggttgaggcttcaaagaagagaaatggggtggccaaaccctggaagggtgaagtctgttccagttttaattaaaatgaaatcaactgttgagaatggagacaggtttatgtagactccccttcctgcatcgctatgaagctgagagcacctgcagagaggagagggaaaatgctctgatgaaatggcatcagagggcatggagtcactgcgaggcagatccaagacaggacatgaggaaatctgcatgcagctgctggtgggaggatgaaaasagaacgttctgkatggcatcccccctcagcctggacagtgctgccagtctgctgcaagcacagcctggaaggacccaaactgcttgaagattgctgcrcagagcagcaatgtgacacagctcaacactagaggaatctagccactgtgggaccagcactcrctgaagctttgtgctggagttccatgcttagggtgagcgtgggagttatttgatccacagaaggttttcatggcaaagatatgcattttttcccccaaaatggcatgttcccacagttaatgccacaggtacaaaacac

SEQ ID NO: 19937 - DNA, 600 bp, Chicken  19866894230018_2
caatgctgctcaagtggttgaggcttcaaagaagagaaatggggtggccaaaccctggaagggtgaagtctgttccagttttaattaaaatgaaatcaactgttgagaatggagacaggtttatgtagactccccttcctgcatcgctatgaagctgagagcacctgcagagaggagagggaaaatgctctgatgaaatggcatcagagggcatggagtcactgcgaggcagatccaagacaggacatgaggaaatctgcatgcagctgctggtgggaggatgaaaasagaacgttctgkatggcatcccccctcagcctggacagtgctgccagtctgctgcaagcacagcctggaaggacccaaactgcttgaagattgctgcrcagagcagcaatgtgacacagctcaacactagaggaatctagccactgtgggaccagcactcrctgaagctttgtgctggagttccatgcttagggtgagcgtgggagttatttgatccacagaaggttttcatggcaaagatatgcattttttcccccaaaatggcatgttcccacagttaatgccacaggtacaaaacacaacatgcacagg

SEQ ID NO: 19938 - DNA, 600 bp, Chicken  19866894230018_3
aaaatgaaatcaactgttgagaatggagacaggtttatgtagactccccttcctgcatcgctatgaagctgagagcacctgcagagaggagagggaaaatgctctgatgaaatggcatcagagggcatggagtcactgcgaggcagatccaagacaggacatgaggaaatctgcatgcagctgctggtgggaggatgaaaasagaacgttctgkatggcatcccccctcagcctggacagtgctgccagtctgctgcaagcacagcctggaaggacccaaactgcttgaagattgctgcrcagagcagcaatgtgacacagctcaacactagaggaatctagccactgtgggaccagcactcrctgaagctttgtgctggagttccatgcttagggtgagcgtgggagttatttgatccacagaaggttttcatggcaaagatatgcattttttcccccaaaatggcatgttcccacagttaatgccacaggtacaaaacacaacatgcacaggtgacattaagaaaagcccactgctttgaccatcccatgggaccatgcaaagcattacagcaggaagacacaggaacacctctaacc

SEQ ID NO: 19939 - DNA, 600 bp, Chicken  19866894230018_4
tgaagctgagagcacctgcagagaggagagggaaaatgctctgatgaaatggcatcagagggcatggagtcactgcgaggcagatccaagacaggacatgaggaaatctgcatgcagctgctggtgggaggatgaaaasagaacgttctgkatggcatcccccctcagcctggacagtgctgccagtctgctgcaagcacagcctggaaggacccaaactgcttgaagattgctgcrcagagcagcaatgtgacacagctcaacactagaggaatctagccactgtgggaccagcactcrctgaagctttgtgctggagttccatgcttagggtgagcgtgggagttatttgatccacagaaggttttcatggcaaagatatgcattttttcccccaaaatggcatgttcccacagttaatgccacaggtacaaaacacaacatgcacaggtgacattaagaaaagcccactgctttgaccatcccatgggaccatgcaaagcattacagcaggaagacacaggaacacctctaaccgtgcattgcaggtcctttaaagttgcagcagttcatatcagaatttttcctatcacacagttc

SEQ ID NO: 19940 - DNA, 600 bp, Chicken  19866894230020_1
tacagagaggcaaaacccttattgaccacatgttcaacctattaaataagcacagtacatttcagttttccatatgaagaaacatgcttttgaggtcctattttttttagtgtcttgcacttcctattatttttatgtcttggatttctcagatctgacctggctaggatatctacttgaaataattaataataggatggaagaagatgaagaaagatgatgaaaacccaagtttggatgtagcccttgtaacagttgtgcagctgttgtatgcaacagtatgcaacagttacacagcakttatataaactgagtatcttcacttactggaaatacttgggtaaagcaatcatacacaaagggatgtcattgttctttagtttcaaaccacaacatcagcacatttgagaagtttccaaatatcagtaagctaggactgctctctgctcattcaaagttcattgttagccatctgaagaattagatactttatttagtctgtactgattaacttcattcttgatgaaggcagctgctactgcatgtgatgacaaaccagactccctgctatgctgcaaagttctctgactcatgggctgg

SEQ ID NO: 19941 - DNA, 600 bp, Chicken  19866894230025_1
taacaaattccctttagtcagctattgtttgccctacttccatatgctgagagagggagcgactgtgtgactacgctttgatcaagttcgtgaaacttcagttctgtttaacttctattagatctgattcagttttggagtcccaaagttaagaaatgcttagaatgttttatttttaaagaatctgcaagtaaacactggactgaaaccaaaattacagacctaactgatggcagggcaatttccaattggctcctgcctaagaatgaaagccagcttgctgatgtgagtgcatgtgtsttgaccagccagttggtgttcgtagagctgtgccascagtcacctgagtgagcaggaagctgcaactgagttggcaatattgtgaaggactgagggaagctgtagttgacgtgaatccataacaacagtcttatctatttaacatcatgcagacatcttgatttattggtatttactaatgcagagatacctcgttctgttttgttgataaagatttaaatatttcttacccctttttggcttatatgatcattctgtctaagaagttggtgtgttaaagtctagaagcattttcttgaa

SEQ ID NO: 19942 - DNA, 600 bp, Chicken  19866894230025_2
cttccatatgctgagagagggagcgactgtgtgactacgctttgatcaagttcgtgaaacttcagttctgtttaacttctattagatctgattcagttttggagtcccaaagttaagaaatgcttagaatgttttatttttaaagaatctgcaagtaaacactggactgaaaccaaaattacagacctaactgatggcagggcaatttccaattggctcctgcctaagaatgaaagccagcttgctgatgtgagtgcatgtgtsttgaccagccagttggtgttcgtagagctgtgccascagtcacctgagtgagcaggaagctgcaactgagttggcaatattgtgaaggactgagggaagctgtagttgacgtgaatccataacaacagtcttatctatttaacatcatgcagacatcttgatttattggtatttactaatgcagagatacctcgttctgttttgttgataaagatttaaatatttcttacccctttttggcttatatgatcattctgtctaagaagttggtgtgttaaagtctagaagcattttcttgaaatattggtcttcctgcaaaaatgttaagtttgcaat

SEQ ID NO: 19943 - DNA, 599 bp, Chicken  19866894230031_1
  misc_feature (1)..(144): n is any nucleotide
nnnnnnnnnnnnnnnnnnnnnnnnnnnnnnnnnnnnnnnnnnnnnnnnnnnnnnnnnnnnnnnnnnnnnnnnnnnnnnnnnnnnnnnnnnnnnnnnnnnnnnnnnnnnnnnnnnnnnnnnnnnnnnnnnnnnnnnnnnnnnnnncaacagaactcaataaaacaactcactatgcgtcatctatgaacaaaaagcaattaccaaacaaatatgctattgtgctaagccactggatgggaaaaataaatccattatgctattataccataatggctattcctgcagtaattcacagatgtwgctgctacctcaaggaagatttacaggcttcctggcctccaccttcacgrgagcttgtgcttagtcagaataagaaatctatctaactccagctctgtgcagctgcttagataaaaattaggactacttccacctcatcccctcagacaaggtagtaggctccagtttcacttctgataattggtaacgaagaaatgaatatacagaaactgtactaagcatgtttgtggagctgttgctatttaccaacatgctctattgtatagtaccatatagtaggttttgttgttgttgttgtt

SEQ ID NO: 19944 - DNA, 599 bp, Chicken  19866894230031_2
  misc_feature (1)..(94): n is any nucleotide
nnnnnnnnnnnnnnnnnnnnnnnnnnnnnnnnnnnnnnnnnnnnnnnnnnnnnnnnnnnnnnnnnnnnnnnnnnnnnnnnnnnnnnnnnnnnnncaacagaactcaataaaacaactcactatgcgtcatctatgaacaaaaagcaattaccaaacaaatatgctattgtgctaagccactggatgggaaaaataaatccattatgctattataccataatggctattcctgcagtaattcacagatgtwgctgctacctcaaggaagatttacaggcttcctggcctccaccttcacgrgagcttgtgcttagtcagaataagaaatctatctaactccagctctgtgcagctgcttagataaaaattaggactacttccacctcatcccctcagacaaggtagtaggctccagtttcacttctgataattggtaacgaagaaatgaatatacagaaactgtactaagcatgtttgtggagctgttgctatttaccaacatgctctattgtatagtaccatatagtaggttttgttgttgttgttgttgtttttaatccctcaaatctttcctggaaagagtyctggaaacatgaaac

SEQ ID NO: 19945 - DNA, 600 bp, Chicken  19866894230031_3
gcctccaccttcacgrgagcttgtgcttagtcagaataagaaatctatctaactccagctctgtgcagctgcttagataaaaattaggactacttccacctcatcccctcagacaaggtagtaggctccagtttcacttctgataattggtaacgaagaaatgaatatacagaaactgtactaagcatgtttgtggagctgttgctatttaccaacatgctctattgtatagtaccatatagtaggttttgttgttgttgttgttgtttttaatccctcaaatctttcctggaaagagtyctggaaacatgaaacaagggctaaaagcaccttcatctatatttctaagagagcagattcagatgttagaaatcatgsattctgtgcatggaaacccttgttcaacacaaagtatcactgtgtaacactttcatctaagtgcatgcactactctctgaaaagcttttgtgtttgcaaccactttttgagcccatcccttgtgcattagtttgtgagatacctttttaatcctagagtgaaagcaaaacaaacgaaaaccagcagatgaatatgctcaggccacagtgctaccatactgct

SEQ ID NO: 19946 - DNA, 545 bp, Chicken  19866894230031_4
aaaaattaggactacttccacctcatcccctcagacaaggtagtaggctccagtttcacttctgataattggtaacgaagaaatgaatatacagaaactgtactaagcatgtttgtggagctgttgctatttaccaacatgctctattgtatagtaccatatagtaggttttgttgttgttgttgttgtttttaatccctcaaatctttcctggaaagagtyctggaaacatgaaacaagggctaaaagcaccttcatctatatttctaagagagcagattcagatgttagaaatcatgsattctgtgcatggaaacccttgttcaacacaaagtatcactgtgtaacactttcatctaagtgcatgcactactctctgaaaagcttttgtgtttgcaaccactttttgagcccatcccttgtgcattagtttgtgagatacctttttaatcctagagtgaaagcaaaacaaacgaaaaccagcagatgaatatgctcaggccacagtgctaccatactgctaccataataccacagttatgcac

SEQ ID NO: 19947 - DNA, 600 bp, Chicken  19866894230033_1
catgctaagttctcctgaactatcctgaagttttttcctaatttgcctaatcactgaggctttatggcatttgagtacaaaagggagaaagtctgaaatgagccatgatactcagtcatagcctgtgcatgtcagttttctaagagagcatcctcttctgtgtaattggttatatgatagtcatagatgaaaatggttaggctttttaagtctttatgtacttgtcagtgcatgccacatacctctctaaatagtcaccaacagtcatttattaggactaggctggatttgagctgagtyctgaggaaactgggtctgcagtgatctgaagtcctcagaacactcactgttgctggtttactgaacattagtcaacaactgaaatgagtataggaactttcatctgtcttgagatatttaagaaattctcaatgtgtatgtgaacctgaggggaacagtgaaactgcagagcatatgaaacttaacggtaatgtctcaccgagattaagcaaaatggctctcttccagacttcatttcttagaacaaaaagtatctccctccagcgctaggacttgattatgcctttagatatgcacagc

SEQ ID NO: 19948 - DNA, 600 bp, Chicken  19866894230034_1
tcatgattttgaagccttttgaccaattttaatcatgttgtaaaagattgacctctcagaagtaattaaatgtctgagaagttcaagagaagcagaagcttgatgaaaaagaatactgaggaaaatctagcacaatttagctctgctgcactttgcttttcagccattggctgtcagtcatcccagaagtcactctaaactaaataaagctttcttctgtccagggaggctgtcacaaaggatatgcataaactaggataattgcacttagtgcagttcagtagtaaaggacacaaataygtgggaagtttctacagatgtgraaaaatgaggcacagaaaagattaagaattaaatatggaaagaaacttagctgtctgaaatgagttgtagattgatattatgcacctaagctcattagcacccttctttcattcctgcacttgcttggagtctgtatgcattattgaaactccctttaatgawgttcccatgtgtctaaagtcaggttgtgttatttgaccagtacatgagtttgcccaacttgcacctttagggcttgctgcacaaaacttacagattgcttttctgatgaaatca

SEQ ID NO: 19949 - DNA, 600 bp, Chicken  19866894230034_2
caattttaatcatgttgtaaaagattgacctctcagaagtaattaaatgtctgagaagttcaagagaagcagaagcttgatgaaaaagaatactgaggaaaatctagcacaatttagctctgctgcactttgcttttcagccattggctgtcagtcatcccagaagtcactctaaactaaataaagctttcttctgtccagggaggctgtcacaaaggatatgcataaactaggataattgcacttagtgcagttcagtagtaaaggacacaaataygtgggaagtttctacagatgtgraaaaatgaggcacagaaaagattaagaattaaatatggaaagaaacttagctgtctgaaatgagttgtagattgatattatgcacctaagctcattagcacccttctttcattcctgcacttgcttggagtctgtatgcattattgaaactccctttaatgawgttcccatgtgtctaaagtcaggttgtgttatttgaccagtacatgagtttgcccaacttgcacctttagggcttgctgcacaaaacttacagattgcttttctgatgaaatcaatagctrtgatagataggaggga

SEQ ID NO: 19950 - DNA, 600 bp, Chicken  19866894230034_3
taattaaatgtctgagaagttcaagagaagcagaagcttgatgaaaaagaatactgaggaaaatctagcacaatttagctctgctgcactttgcttttcagccattggctgtcagtcatcccagaagtcactctaaactaaataaagctttcttctgtccagggaggctgtcacaaaggatatgcataaactaggataattgcacttagtgcagttcagtagtaaaggacacaaataygtgggaagtttctacagatgtgraaaaatgaggcacagaaaagattaagaattaaatatggraagaaacttagctgtctgaaatgagttgtagattgatattatgcacctaagctcattagcacccttctttcattcctgcacttgcttggagtctgtatgcattattgaaactccctttaatgawgttcccatgtgtctaaagtcaggttgtgttatttgaccagtacatgagtttgcccaacttgcacctttagggcttgctgcacaaaacttacagattgcttttctgatgaaatcaatagctrtgatagataggagggaggtccactttgtctcttctatagagtaatcaaatggtta

SEQ ID NO: 19951 - DNA, 600 bp, Chicken  19866894230034_4
aagtcactctaaactaaataaagctttcttctgtccagggaggctgtcacaaaggatatgcataaactaggataattgcacttagtgcagttcagtagtaaaggacacaaataygtgggaagtttctacagatgtgraaaaatgaggcacagaaaagattaagaattaaatatggaaagaaacttagctgtctgaaatgagttgtagattgatattatgcacctaagctcattagcacccttctttcattcctgcacttgcttggagtctgtatgcattattgaaactccctttaatgawgttcccatgtgtctaaagtcaggttgtgttatttgaccagtacatgagtttgcccaacttgcacctttagggcttgctgcacaaaacttacagattgcttttctgatgaaatcaatagctrtgatagataggagggaggtccactttgtctcttctatagagtaatcaaatggttacaaattttacccaagrgatgaaatgctctgatgaacttccttctgacttctggggcttgtgatacacaccagcttccttggaaagtaccttgacttggatacctgctcacagatctgttattgt

SEQ ID NO: 19952 - DNA, 600 bp, Chicken  19866894230034_5
gtttctacagatgtgraaaaatgaggcacagaaaagattaagaattaaatatggaaagaaacttagctgtctgaaatgagttgtagattgatattatgcacctaagctcattagcacccttctttcattcctgcacttgcttggagtctgtatgcattattgaaactccctttaatgawgttcccatgtgtctaaagtcaggttgtgttatttgaccagtacatgagtttgcccaacttgcacctttagggcttgctgcacaaaacttacagattgcttttctgatgaaatcaatagctrtgatagataggagggaggtccactttgtctcttctatagagtaatcaaatggttacaaattttacccaagrgatgaaatgctctgatgaacttccttctgacttctggggcttgtgatacacaccagcttccttggaaagtaccttgacttggatacctgctcacagatctgttattgtagttctttttttttataagaccttagacacatacagatcctgtttcagtatatttaacactctgatggcatccatgagagagtctaacttctttttgccatgtagggcaaatctaatagct

SEQ ID NO: 19953 - DNA, 600 bp, Chicken  19866894230034_6
tgaaatgagttgtagattgatattatgcacctaagctcattagcacccttctttcattcctgcacttgcttggagtctgtatgcattattgaaactccctttaatgawgttcccatgtgtctaaagtcaggttgtgttatttgaccagtacatgagtttgcccaacttgcacctttagggcttgctgcacaaaacttacagattgcttttctgatgaaatcaatagctrtgatagataggagggaggtccactttgtctcttctatagagtaatcaaatggttacaaattttacccaagrgatgaaatgctctgatgaacttccttctgacttctggggcttgtgatacacaccagcttccttggaaagtaccttgacttggatacctgctcacagatctgttattgtagttctttttttttataagaccttagacacatacagatcctgtttcagtatatttaacactctgatggcatccatgagagagtctaacttctttttgccatgtagggcaaatctaatagctaatgatataatttcagagtactggtgaatgaatttggtgattaaatgttgaacttagtactgtgttatctg

SEQ ID NO: 19954 - DNA, 599 bp, Chicken  19866894230041_1
  misc_feature (1)..(5): n is any nucleotide
nnnnnttattctctgtgatgctttattatggaatagcagctccagggaaatgatctgatgatcattcttaaccctctgcagattgtgctgcagacttccaggcggctttatgagctttttctgagtcccagcttgttttagcccttagagggagccacagacttgactatggaactggaggagaaatgatgtaacaaaatatgcctatctctgatggaggaggtggggaagggataattctcagttgctcatttctagtttttaattggcagcaatgtgcatatcagacacaaggctggwtttttgtggtgagtgctctaatgtacttaattttctagtgacaggtttgtttgtgtttagaaggcctcatacgaaatattcatttttacctttcctgtgtcacagtcagctccctcctgcaccattcagttccagcttctctgttcccattttgatgctgacrcagtgggacttgaaaaatacagatactgtgcactgcttcatcttggaaggtggggaggatgggggaaaaatgtgttaaaaaaggtacaaaacacacaccaggatgaagactacaaagttcagccacattttcattg

SEQ ID NO: 19955 - DNA, 600 bp, Chicken  19866894230041_2
tgactatggaactggaggagaaatgatgtaacaaaatatgcctatctctgatggaggaggtggggaagggataattctcagttgctcatttctagtttttaattggcagcaatgtgcatatcagacacaaggctggwtttttgtggtgagtgctctaatgtacttaattttctagtgacaggtttgtttgtgtttagaaggcctcatacgaaatattcatttttacctttcctgtgtcacagtcagctccctcctgcaccattcagttccagcttctctgttcccattttgatgctgacrcagtgggacttgaaaaatacagatactgtgcactgcttcatcttggaaggtggggaggatgggggaaaaatgtgttaaaaaaggtacaaaacacacaccaggatgaagactacaaagttcagccacattttcattgccacattcttttctttatgctttctttagtaatttcattccttcctttatggacagaggtgtattacttctgcatctttccccgtagtatgtaggttatagctgaatatttttatgtaaatgacatggctaaagtaggttaggtagctgtgttatagaatctga

SEQ ID NO: 19956 - DNA, 600 bp, Chicken  19866894230044_1
caattgtgctgcaagaaagcttctgctcagcagtgccacccccataacttgaacagaagagtacccaaagcctccaagttacttttcacatctttccagagatgacacagaggatctgccctgtagtgaaggtatcagtttcaaggttagaaggaattattcatcatcatttttctcccaaccctgtgtctagttgtctgtcagtgatggccacagcagttgagtaatggcagaagtgggctggagttgcagagtagctgatgtctacgtctctacatctttctctggccaagaacattytgtagtggggaaggagggaatgggtgaatgaacatcagtctccagctagaagccagkcagactttcacttttctcacatctcactgtagactgctgttggaagttctcttatgtgttccgtcccttgtctggattctacttacgtagttgtctccatttccctttttgtatcccttcctcccctgttactcttatctcagcaggcagctcaaacttgcttctccaaaccaggagactgaagcaagcatccaggtcacctgaatgagaagaattagggatgtcattacatctaaaaataat

SEQ ID NO: 19957 - DNA, 600 bp, Chicken  19866894230044_2
agagtacccaaagcctccaagttacttttcacatctttccagagatgacacagaggatctgccctgtagtgaaggtatcagtttcaaggttagaaggaattattcatcatcatttttctcccaaccctgtgtctagttgtctgtcagtgatggccacagcagttgagtaatggcagaagtgggctggagttgcagagtagctgatgtctacgtctctacatctttctctggccaagaacattytgtagtggggaaggagggaatgggtgaatgaacatcagtctccagctagaagccagkcagactttcacttttctcacatctcactgtagactgctgttggaagttctcttatgtgttccgtcccttgtctggattctacttacgtagttgtctccatttccctttttgtatcccttcctcccctgttactcttatctcagcaggcagctcaaacttgcttctccaaaccaggagactgaagcaagcatccaggtcacctgaatgagaagaattagggatgtcattacatctaaaaataatcccagtacctgctagggaatatatttgaccctggacttactcagcagctgtatttat

SEQ ID NO: 19958 - DNA, 600 bp, Chicken  19866894230049_1
cctagccagatggatgcctgatggaagacagcaacataacagccatgtaaataaaaatgtatttactgagggctctgccaaagcaggggaaatttcctgcctaaaagaaaaacagcaaagtttgaagggggcaggggtggtgggtggtgtaaataactgtgtcccagttttggctgggatggtgttaatttgctatttagcacctggtacattgctgtggtttggatttaggatttctagctgagggtgcacaaggagctgggaggggacacagccaggacagctgaccccaactgaccraagggacatttcatgctatatggtaccatactgaatgatagcaccaggggagctgggttagggagtgcactgctgtgggactggtcaagcattggtgggctggtagcaagcaattgtgtcatgtgttgcatgttttgggtattattattgttatcattattattactgctgttagttattgctgttattagtattttcccttcatcttccgtctcactaaagtacctttatctcagcccacaggttttatctttgtcccagtctctcctccagcccactggaggggcagcgagttgatca

SEQ ID NO: 19959 - DNA, 600 bp, Chicken  19866894230049_2
tgggctggtagcaagcaattgtgtcatgtgttgcatgttttgggtattattattgttatcattattattactgctgttagttattgctgttattagtattttcccttcatcttccgtctcactaaagtacctttatctcagcccacaggttttatctttgtcccagtctctcctccagcccactggaggggcagcgagttgatcactctgtgatgctgggctccccctgggataaaccatggcgaattgtcaaaggaatgttcccagacgtgaggctcaacagaatgctgaatagtcagwaagttgtgggaggctttgctgtgtatccaaaacactgttatctggcactcactgcaaacacaacttacttattatataaggttgctgaaagagcaccttygaaacaaatccattggtcacctgggcagaggtaatggggcaccagagaagctgttcaatatcacttaaacctaatttgccagcttaccgatatcatcatttatcttttattactttggggtctggcatgggcttcgtgccgctcagctcagcagtacctgcgggcacatgctaatccaggatgagattcagcttgttttg

SEQ ID NO: 19960 - DNA, 600 bp, Chicken  19866894230049_3
ttcccttcatcttccgtctcactaaagtacctttatctcagcccacaggttttatctttgtcccagtctctcctccagcccactggaggggcagcgagttgatcactctgtgatgctgggctccccctgggataaaccatggcgaattgtcaaaggaatgttcccagacgtgaggctcaacagaatgctgaatagtcagwaagttgtgggaggctttgctgtgtatccaaaacactgttatctggcactcactgcaaacacaacttacttattatataaggttgctgaaagagcaccttygaaacaaatccattggtcacctgggcagaggtaatggggcaccagagaagctgttcaatatcacttaaacctaatttgccagcttaccgatatcatcatttatcttttattactttggggtctggcatgggcttcgtgccgctcagctcagcagtacctgcgggcacatgctaatccaggatgagattcagcttgttttgtaacgattcagtgaattcaagctgctttcactggactcagaatatccactgtaaataaggatggtgcctgcctccttcagaagctcgcctcagtcatctc

SEQ ID NO: 19961 - DNA, 599 bp, Chicken  19866894230054_1
  misc_feature (1)..(35): n is any nucleotide
nnnnnnnnnnnnnnnnnnnnnnnnnnnnnnnnnnnataatgaactgtgacgtaaaagggttctagtttgtgggcagagaagatttatagctctgttttgctattagtcattctcatgttcagttaagatattttgtgttgtatagtgacaactatctatagtgtttctgtctttcctttctcaggttaagtacaaagaaggctgggagaagagcaagggccagggatttgaaatgaagcttgattctctgcctttacttgctgccaaagcttcaagggatcttgccagtgatgtaggttwcatttaattacctaggaattattctttacattagttgctgtagcacagggaaataaacttagctctcttcatctgggtttttaagccctgaattttactgtcatacattcatctttctcaaaggcagatgaacagctggaaacttccttcgactcttctgtgaaatttcactctctggaatttttttttatttttttttttaaatataaatgtacagaaggaagcaaagtttacaaaaggacagtgggctcaatcctcctatagtaaaattcagtgctttaaatcgtttatattttcaa

SEQ ID NO: 19962 - DNA, 600 bp, Chicken  19866894230054_2
acaaagaaggctgggagaagagcaagggccagggatttgaaatgaagcttgattctctgcctttacttgctgccaaagcttcaagggatcttgccagtgatgtaggttwcatttaattacctaggaattattctttacattagttgctgtagcacagggaaataaacttagctctcttcatctgggtttttaagccctgaattttactgtcatacattcatctttctcaaaggcagatgaacagctggaaacttccttcgactcttctgtgaaatttcactctctggaatttttttttawttttttttttaaatataaatgtacagaaggaagcaaagtttacaaaaggacagtgggctcaatcctcctatagtaaaattcagtgctttaaatcgtttatattttcaaaaatgctgttatcatccacygcatatttctttagtctgcttctttaacataaaaaaaaataaaatccaaactagctatttttaaatgatttatcccacagttcttcacctgtggaaaggaaaaggaagaaattttgcctgcagctagaaagcgctcggtactgaagatgattcaaaaatctaccgagaaaag

SEQ ID NO: 19963 - DNA, 600 bp, Chicken  19866894230054_3
tattctttacattagttgctgtagcacagggaaataaacttagctctcttcatctgggtttttaagccctgaattttactgtcatacattcatctttctcaaaggcagatgaacagctggaaacttccttcgactcttctgtgaaatttcactctctggaatttttttttatttttttttttaaatataaatgtacagaaggaagcaaagtttacaaaaggacagtgggctcaatcctcctatagtaaaattcagtgctttaaatcgtttatattttcaaaaatgctgttatcatccacygcatatttctttagtctgcttctttaacataaaaaaaaataaaatccaaactagctatttttaaatgatttatcccacagttcttcacctgtggaaaggaaaaggaagaaattttgcctgcagctagaaagcgctcggtactgaagatgattcaaaaatctaccgagaaaagaagagttttatgctcattcagctgtcttcccacctcattaagaaaatcaagtcttgcttgattttttcatgattgatttcttatctggttgttaaaccaaaaacataatttagctattcagaagacaa

SEQ ID NO: 19964 - DNA, 599 bp, Chicken  19866894230055_1
  misc_feature (1)..(122): n is any nucleotide
nnnnnnnnnnnnnnnnnnnnnnnnnnnnnnnnnnnnnnnnnnnnnnnnnnnnnnnnnnnnnnnnnnnnnnnnnnnnnnnnnnnnnnnnnnnnnnnnnnnnnnnnnnnnnnnnnnnnnnnnnnaagaggaacaggtacaaaatttggttaaattattttctaatagtgctactgttacaaaagagagcatttccatttccacttaccactcaaaattgaaaattttaggtaagtttttttatacaagtttttcataggtttttatgttccatggaagaaaacatggctcccaggatatgtytgttttccagcagaacagtaccaacaagtggagaatgtgatgatgaactgacaatgctcatgtctgacacttattacaaacccatttaaaaaccttaaaagtttcttcattttgtcatacaacacgtttcacaatataaaatctataattgttctatactacattttaaacacattatcataggttcttagttagatcctactcagaaaggtattaaatgtaaatttggatcccagcaagctgttttgactacactttgaactgggtcaaatcacagggtctataaatatcaaatcatt

SEQ ID NO: 19965 - DNA, 600 bp, Chicken  19866894230057_1
gggatggggactgctcatagccttcagtataacagcagtcctattaaaccagacatattcatgctgtgagacagcctgggcagtgcactgcactgctacagagttagctgaagctggcattttcaccagctttgggcaagtcctagatctgtccctccccagccaaggcaggccatccctgcttcgggaggttctgggccttcctcagtgctgaagagtgtcaaagttgagcacggaacaagactaagtattcctgctgcagccaccaaagcagctggtttacataccagcacaccacartgactgtggcaagggctcagcctaatcactcattgcttgcactgtgctgtccccttccaaaatagctgacatctgccaccctgctgacactggagcagatgccttattagcaaagccagaacttggaaggttggaacaggaaggacgatgagctcaggtagaaatcagcaataacagcagggacaggcagactctggaaaagcagagatctctttttcttgccagcttccccagtgaaaagcctccttacagctggaagcttgcagagcaaactcacttcatggaaatctttattagtgg

SEQ ID NO: 19966 - DNA, 600 bp, Chicken  19866894230057_2
caaaatagctgacatctgccaccctgctgacactggagcagatgccttattagcaaagccagaacttggaaggttggaacaggaaggacgatgagctcaggtagaaatcagcaataacagcagggacaggcagactctggaaaagcagagatctctttttcttgccagcttccccagtgaaaagcctccttacagctggaagcttgcagagcaaactcacttcatggaaatctttattagtggatctcatagatctttcagaaaggaaactgaaggaggcttatgcagctgccccagagygtcagcacacactgttagttttgttacccaggtgtgttgctagttccacttttctcttggttcaattcaaccttcaggattttagaatagtatagtttgcatgccacacgtaccttttctgagaggagagagaagtagaatgcacacagcagctttgagggcctgaaacaaaaaaggaaaagataaatcatctttaaagtgctcattagccaatacgctcaaagtgatacaaaagaggctttgcaaaagatctgggctgctgatcagtgatgcaaggaatgtcagtggtatgaacataca

SEQ ID NO: 19967 - DNA, 600 bp, Chicken  19866894230058_1
gcatagctgtacatatgctagaagggcactgatattcctagaacacaaatacaagttctctctttgttttctctgtttgcttagcatgagcataaacaataaaatgttaaacaggaagcaagaaagagagcatgggctgataaactgaagtcaattcatattcagattactaaacgtccttttaggtagaggggtttaaaagcccccatttctctatttctcttcttaaaaagcaaagcaaaatccttaggacaaatctacattttgagcttcagtcatctgttttcaatgcatgctggrattgaaaaaatgctgaaaccattgaaaaagtatgagctggaatgtattctkagccttttcagtatgaatgaggtttggaagaattagcacttcaaaacagaagatggattcaacagcagcaaccctgtaccttgtggctctgctccttggttctctgctccctctttacccatctgtccaacctggtaataggcactgtcagcaccacgtaagggtctccttcttctgggaagacaggtctgggctctttcctcccgtgccacggaagaaagacaaaacactagatggtttctttgctac

SEQ ID NO: 19968 - DNA, 600 bp, Chicken  19866894230058_2
caagttctctctttgttttctctgtttgcttagcatgagcataaacaataaaatgttaaacaggaagcaagaaagagagcatgggctgataaactgaagtcaattcatattcagattactaaacgtccttttaggtagaggggtttaaaagcccccatttctctatttctcttcttaaaaagcaaagcaaaatccttaggacaaatctacattttgagcttcagtcatctgttttcaatgcatgctggrattgaaaaaatgctgaaaccattgaaaaagtatgagctggaatgtattctkagccttttcagtatgaatgaggtttggaagaattagcacttcaaaacagaagatggattcaacagcagcaaccctgtaccttgtggctctgctccttggttctctgctccctctttacccatctgtccaacctggtaataggcactgtcagcaccacgtaagggtctccttcttctgggaagacaggtctgggctctttcctcccgtgccacggaagaaagacaaaacactagatggtttctttgctacagcaaaaagaataaagaagatgatattggcattaccagaagcagttaaata

SEQ ID NO: 19969 - DNA, 600 bp, Chicken  19866894230062_1
tgagcaacactactatccatattcgttatctttgagagttgatgttcaaattagagtactagttctgccacgataatatatggaaatagagacgcttttttcaataaccaagagcttcatttaagggctgtaagttgctctcaagaaaaaaactcgccttctttcttgctcatctcatcttccccagtaaaaagggaaatgtttattttatggaagatgagcagaggcaaagaaacaaagaaagaaaaagacagcagaatccaagcacagtacttggattggtagagcatgtaaccataycaccataaaacagaactgctccactcgtggactgagatgcaaggacagtatgtgggtcccgtctccaacttccccactgcagatataagcatactccttggtgtcagatccactcccctgcctgcatrtgcagtgctctggaaaacaacttccctctctacaggatctgctcctcaccaacttaaccttggcaatcacgccgcctggagygacaaattgccaggccacttctcaaactttcaacagcttgcatgcaggtgggccaaaatgaattgcttgtccataggctggctcattaat

SEQ ID NO: 19970 - DNA, 600 bp, Chicken  19866894230062_2
tgtaagttgctctcaagaaaaaaactcgccttctttcttgctcatctcatcttccccagtaaaaagggaaatgtttattttatggaagatgagcagaggcaaagaaacaaagaaagaaaaagacagcagaatccaagcacagtacttggattggtagagcatgtaaccataycaccataaaacagaactgctccactcgtggactgagatgcaaggacagtatgtgggtcccgtctccaacttccccactgcagatataagcatactccttggtgtcagatccactcccctgcctgcatrtgcagtgctctggaaaacaacttccctctctacaggatctgctcctcaccaacttaaccttggcaatcacgccgcctggagygacaaattgccaggccacttctcaaactttcaacagcttgcatgcaggtgggccaaaatgaattgcttgtccataggctggctcattaatgggctgaggcctagcctaatcttcccctcccaaacagggcaaactatatggcagaaatgcagcccggcttttccacacaggatttctgtctggtatcggcagagggacaggtcttcccataacaagct

SEQ ID NO: 19971 - DNA, 600 bp, Chicken  19866894230062_3
tggaagatgagcagaggcaaagaaacaaagaaagaaaaagacagcagaatccaagcacagtacttggattggtagagcatgtaaccataycaccataaaacagaactgctccactcgtggactgagatgcaaggacagtatgtgggtcccgtctccaacttccccactgcagatataagcatactccttggtgtcagatccactcccctgcctgcatrtgcagtgctctggaaaacaacttccctctctacaggatctgctcctcaccaacttaaccttggcaatcacgccgcctggagygacaaattgccaggccacttctcaaactttcaacagcttgcatgcaggtgggccaaaatgaattgcttgtccataggctggctcattaatgggctgaggcctagcctaatcttcccctcccaaacagggcaaactatatggcagaaatgcagcccggcttttccacacaggatttctgtctggtatcggcagagggacaggtcttcccataacaagcttggctgatatgcactccttgtttcccatgaagcagcagcttctacactttgcaaagagaaggaacagcaattaccctctgaa

SEQ ID NO: 19972 - DNA, 600 bp, Chicken  19866894230062_4
aggccacttctcaaactttcaacagcttgcatgcaggtgggccaaaatgaattgcttgtccataggctggctcattaatgggctgaggcctagcctaatcttcccctcccaaacagggcaaactatatggcagaaatgcagcccggcttttccacacaggatttctgtctggtatcggcagagggacaggtcttcccataacaagcttggctgatatgcactccttgtttcccatgaagcagcagcttctacactttgcaaagagaaggaacagcaattaccctctgaagtgtggaaacrtgactgggtgggaatttcttkaaaagacatctttctttcaacatcacagccaacctaaatgcaatctgtcagactcctgcgagggcacttgcacaaccacaactgactttatattagagaaagacaaaataactgcattaaaaatatgatttaagggaggtaaacaattwttttttttacagtaattctcacagrttctattaatctcattttttttcttaaagcagtttgtggtattaaaacacctctgaaaaaaaggatacctagcagaactctaattgaagtgcatgaaggcctctg

SEQ ID NO: 19973 - DNA, 600 bp, Chicken  19866894230062_5
acagcttgcatgcaggtgggccaaaatgaattgcttgtccataggctggctcattaatgggctgaggcctagcctaatcttcccctcccaaacagggcaaactatatggcagaaatgcagcccggcttttccacacaggatttctgtctggtatcggcagagggacaggtcttcccataacaagcttggctgatatgcactccttgtttcccatgaagcagcagcttctacactttgcaaagagaaggaacagcaattaccctctgaagtgtggaaacrtgactgggtgggaatttcttkaaaagacatctttctttcaacatcacagccaacctaaatgcaatctgtcagactcctgcgagggcacttgcacaaccacaactgactttatattagagaaagacaaaataactgcattaaaaatatgatttaagggaggtaaacaattwttttttttacagtaattctcacagrttctattaatctcattttttttcttaaagcagtttgtggtattaaaacacctctgaaaaaaaggatacctagcagaactctaattgaagtgcatgaaggcctctgcctgtatctgctgatacattt

SEQ ID NO: 19974 - DNA, 600 bp, Chicken  19866894230062_6
ggtatcggcagagggacaggtcttcccataacaagcttggctgatatgcactccttgtttcccatgaagcagcagcttctacactttgcaaagagaaggaacagcaattaccctctgaagtgtggaaacrtgactgggtgggaatttcttkaaaagacatctttctttcaacatcacagccaacctaaatgcaatctgtcagactcctgcgagggcacttgcacaaccacaactgactttatattagagaaagacaaaataactgcattaaaaatatgatttaagggaggtaaacaattwttttttttacagtaattctcacagrttctattaatctcattttttttcttaaagcagtttgtggtattaaaacacctctgaaaaaaaggatacctagcagaactctaattgaagtgcatgaaggcctctgcctgtatctgctgatacatttggagaggaaaatcccagttcagagcaactmcatctggatggcaaaaggctatctggatttaattccaagcagaaccaactaactaatttatacaacratcatgttgacaataatgatgaacacatatgtctcctttaaatgcctcaaga

SEQ ID NO: 19975 - DNA, 600 bp, Chicken  19866894230062_7
ccataacaagcttggctgatatgcactccttgtttcccatgaagcagcagcttctacactttgcaaagagaaggaacagcaattaccctctgaagtgtggaaacrtgactgggtgggaatttcttkaaaagacatctttctttcaacatcacagccaacctaaatgcaatctgtcagactcctgcgagggcacttgcacaaccacaactgactttatattagagaaagacaaaataactgcattaaaaatatgatttaagggaggtaaacaattwttttttttacagtaattctcacagrttctattaatctcattttttttcttaaagcagtttgtggtattaaaacacctctgaaaaaaaggatacctagcagaactctaattgaagtgcatgaaggcctctgcctgtatctgctgatacatttggagaggaaaatcccagttcagagcaactmcatctggatggcaaaaggctatctggatttaattccaagcagaaccaactaactaatttatacaacratcatgttgacaataatgatgaacacatatgtctcctttaaatgcctcaagagatcattcttttttcccccatttca

SEQ ID NO: 19976 - DNA, 600 bp, Chicken  19866894230062_8
aacctaaatgcaatctgtcagactcctgcgagggcacttgcacaaccacaactgactttatattagagaaagacaaaataactgcattaaaaatatgatttaagggaggtaaacaattwttttttttacagtaattctcacagrttctattaatctcattttttttcttaaagcagtttgtggtattaaaacacctctgaaaaaaaggatacctagcagaactctaattgaagtgcatgaaggcctctgcctgtatctgctgatacatttggagaggaaaatcccagttcagagcaactmcatctggatggcaaaaggctatctggatttaattccaagcagaaccaactaactaatttatacaacratcatgttgacaataatgatgaacacatatgtctcctttaaatgcctcaagagatcattcttttttcccccatttcagtaaccatggtaactttggacaaaaacagcttctgcctcagaaattgctttctgtaataaagcgtttatcatgtaacagttaactttttcttcctatacacctgagtgataaaggagagagaacctctactttgcaaagggaagagaacttctgct

SEQ ID NO: 19977 - DNA, 586 bp, Chicken  19866894230062_9
gaaagacaaaataactgcattaaaaatatgatttaagggaggtaaacaattwttttttttacagtaattctcacagrttctattaatctcattttttttcttaaagcagtttgtggtattaaaacacctctgaaaaaaaggatacctagcagaactctaattgaagtgcatgaaggcctctgcctgtatctgctgatacatttggagaggaaaatcccagttcagagcaactmcatctggatggcaaaaggctatctggatttaattccaagcagaaccaactaactaatttatacaacratcatgttgacaataatgatgaacacatatgtctcctttaaatgcctcaagagatcattcttttttcccccatttcagtaaccatggtaactttggacaaaaacagcttctgcctcagaaattgctttctgtaataaagcgtttatcatgtaacagttaactttttcttcctatacacctgagtgataaaggagagagaacctctactttgcaaagggaagagaacttctgcttctctctgaaaaagcttcaagatggatggcagtaaagtgagctacagaacata

SEQ ID NO: 19978 - DNA, 600 bp, Chicken  19866894230063_1
ttggataaaaaaccgattaacaagctatcgtcaggtagtatttagacatttaattcatctttggtatcttgagttatacttgccccgcatcctctttgcgttgttgtaagtgtaaaatacagttctctgtgtggatagcttggcttacagttttctatgggaattatcaattttcagttgttgggatggaatgaatggcatctaaaactgtttagtctaactccttcttgtaagttacggtacagacccattgctagcaataattgtgaatgtgctaacttaagcaatggaaacaacacrattgctgtgtgtactactaccccactttcactctgcctagagctagctgctgctggtgctccatgtgcttgctgctatccatgcagctatatcagtgcttaatgttctagttttagtggagcccaggcaatttgaaacgagtctcatgcccacaaaactaatagctttagaatgcatgtggcaggtactttaattatgactagtttcacagcccagcatttctactttgtaaaaataaaggtttgtcagaacacagttgtgcttctctaaatgcactgtgaatttctgggatgcattttc

SEQ ID NO: 19979 - DNA, 600 bp, Chicken  19866894230063_2
agctgctgctggtgctccatgtgcttgctgctatccatgcagctatatcagtgcttaatgttctagttttagtggagcccaggcaatttgaaacgagtctcatgcccacaaaactaatagctttagaatgcatgtggcaggtactttaattatgactagtttcacagcccagcatttctactttgtaaaaataaaggtttgtcagaacacagttgtgcttctctaaatgcactgtgaatttctgggatgcattttctgctgtctttcaaagacgtgcttaacttgtgttagaatacaagygttagtggtcacaagataagaattcactgtccagcagtgtagaattctatagagatgattatgtggtaatatgggcacgtgtgaaagcaatcgtcatagctgtctagcagcttttaggcacgttcttcttccagccaattcttacgctgttcattttaacttcagtttagttatacgaattctgtctttcagagccaacgcataatcagccaaacgggatcaagaggaagcagaatatttgagaaggctcccagcatctcatgaatgaactaacggaactcgataatgctggttctccag

SEQ ID NO: 19980 - DNA, 599 bp, Chicken  19866894230067_1
  misc_feature (1)..(122): n is any nucleotide
nnnnnnnnnnnnnnnnnnnnnnnnnnnnnnnnnnnnnnnnnnnnnnnnnnnnnnnnnnnnnnnnnnnnnnnnnnnnnnnnnnnnnnnnnnnnnnnnnnnnnnnnnnnnnnnnnnnnnnnnnnttgggctctggagagctgacccagggaatcacagaaccattaaagctggaggagacctctcagatccccaagtccaaacccgctctcaccacatccctcagtgccacatctccactgttcttgaacacgtccggggacagcgactcccccacctccctgtgcagagcctcactgctcrttcagggtttctcctaacacccaaccagctccaaagagacsgggaaggctgagcccagccatggggcaggacagtgccatgggactcacccagcctggggttggcatcagctgcgcaacggtgactcagtgcaggaacacggtgttctcaccccatagcayggtgacacctgcggcaccgccgtgtttgctcttggcagtaaatgctttgtggttgggcaggttcgatttgtgggtgctgaggtgaagcacctccaggagagaaatgcagcactggaggtgccgggctgcgcgttttgg

SEQ ID NO: 19981 - DNA, 599 bp, Chicken  19866894230067_2
  misc_feature (1)..(81): n is any nucleotide
nnnnnnnnnnnnnnnnnnnnnnnnnnnnnnnnnnnnnnnnnnnnnnnnnnnnnnnnnnnnnnnnnnnnnnnnnnnnnnnnnttgggctctggagagctgacccagggaatcacagaaccattaaagctggaggagacctctcagatccccaagtccaaacccgctctcaccacatccctcagtgccacatctccactgttcttgaacacgtccggggacagcgactcccccacctccctgtgcagagcctcactgctcrttcagggtttctcctaacacccaaccagctccaaagagacsgggaaggctgagcccagccatggggcaggacagtgccatgggactcacccagcctggggttggcatcagctgcgcaacggtgactcagtgcaggaacacggtgttctcaccccatagcayggtgacacctgcggcaccgccgtgtttgctcttggcagtaaatgctttgtggttgggcaggttcgatttgtgggtgctgaggtgaagcacctccaggagagaaatgcagcactggaggtgccgggctgcgcgttttggtgctttgcatctctttaagagcagagcgggacgttgctggg

SEQ ID NO: 19982 - DNA, 600 bp, Chicken  19866894230067_3
ttaaagctggaggagacctctcagatccccaagtccaaacccgctctcaccacatccctcagtgccacatctccactgttcttgaacacgtccggggacagcgactcccccacctccctgtgcagagcctcactgctcrttcagggtttctcctaacacccaaccagctccaaagagacsgggaaggctgagcccagccatggggcaggacagtgccatgggactcacccagcctggggttggcatcagctgcgcaacggtgactcagtgcaggaacacggtgttctcaccccatagcayggtgacacctgcggcaccgccgtgtttgctcttggcagtaaatgctttgtggttgggcaggttcgatttgtgggtgctgaggtgaagcacctccaggagagaaatgcagcactggaggtgccgggctgcgcgttttggtgctttgcatctctttaagagcagagcgggacgttgctggggctcacggtccccattaaggacccaaaatgggtcagagcttaacaccgtgctcaaggttagcagcggttgtgcagccccatcctgcggccttgccagatgttggaacagctgatggctgcg

SEQ ID NO: 19983 - DNA, 600 bp, Chicken  19866894230067_4
gtatctgtcccagcctcgtggctctggtgctgccccacacctgatttctcagttttgagtggttgagagtgaggatttgtgaataacagctggagctgggctcagtgggcatccagggttgtgggttcttcttcctctggagccacaccacaggatggtttgggttggaaggaccctaataatgccatcctaagactactgtgacccctggctgctcccttccctggctctacttccaggcagggctgtgccccatggttgggtgtcactcctctccccacacgagctgtgcctgtcctrtgcaagaggttatgcgtaggagttggaccctacgatccttatgggtcccttctgactcgggatattctatgatttgatgttgctctgaccattgtccttcagccctgttcagtggggttatgtccaaccattcttgtgtattttgggggaaaatgccccaagatagccttgtgaggcaygcarccctgcacagattcagctgcatgcagtgttggcttggggtagccatgagggatggctcacagcccacaggtcccaacagcccgtggtgttccaggtgctgggtttccaaaaaaacct

SEQ ID NO: 19984 - DNA, 600 bp, Chicken  19866894230067_5
taatgccatcctaagactactgtgacccctggctgctcccttccctggctctacttccaggcagggctgtgccccatggttgggtgtcactcctctccccacacgagctgtgcctgtcctrtgcaagaggttatgcgtaggagttggaccctacgatccttatgggtcccttctgactcgggatattctatgatttgatgttgctctgaccattgtccttcagccctgttcagtggggttatgtccaaccattcttgtgtattttgggggaaaatgccccaagatagccttgtgaggcaygcarccctgcacagattcagctgcatgcagtgttggcttggggtagccatgagggatggctcacagcccacaggtcccaacagcccgtggtgttccaggtgctgggtttccaaaaaaacctgagttgcccgtgtgctgcaagagaaaatggggtcagcccgatggcagtgtgaggatgggcaggacttgtgatgggcatttggtgtcactcccgtgctaatgggacaagtgggatggtgccgtacgccccatgtagagtttcaccaccaaggtaccccagtgggaaggaccttgcagccc

SEQ ID NO: 19985 - DNA, 600 bp, Chicken  19866894230067_6
gccatcctaagactactgtgacccctggctgctcccttccctggctctacttccaggcagggctgtgccccatggttgggtgtcactcctctccccacacgagctgtgcctgtcctrtgcaagaggttatgcgtaggagttggaccctacgatccttatgggtcccttctgactcgggatattctatgatttgatgttgctctgaccattgtccttcagccctgttcagtggggttatgtccaaccattcttgtgtattttgggggaaaatgccccaagatagccttgtgaggcaygcarccctgcacagattcagctgcatgcagtgttggcttggggtagccatgagggatggctcacagcccacaggtcccaacagcccgtggtgttccaggtgctgggtttccaaaaaaacctgagttgcccgtgtgctgcaagagaaaatggggtcagcccgatggcagtgtgaggatgggcaggacttgtgatgggcatttggtgtcactcccgtgctaatgggacaagtgggatggtgccgtacgccccatgtagagtttcaccaccaaggtaccccagtgggaaggaccttgcagcccaccc

SEQ ID NO: 19986 - DNA, 600 bp, Chicken  19866894230068_1
gaagaaaaaaagaacaagatattgttgggtagttggatattgctgggaggaagaaaataggagtgtgtcaaggagattgttgtcccaacttctctgaaactattgagaaatgctgcccttgctgctctgagtctgctgcaggcgtatgtttgcagtcctctcacatgggagggatcacggagtgtctgagctggaagggacctggggggtcactgaggccaactcctggttccacacaggaccaccttaacctcaaaacataaagatttcctattgtatgttcggtttaaatacataatygggtaaggttaaaggtgcttcacgyataacaagatgctttttcctgtcttaatgaaattttgactttgagataattaacagtgtgtgttgggggggcgcgagtgtagatytgaatgcttccatgttcctatagaaaggcaactatgtgttgtggcagctatggtgttttttggggggtgttcttcatttcttgtaggggggcagcattgagagttgtggtatgtgggttttgctgcgggttgctttggtttttttccttcctgagtctatttcagagattccccatttctgtctatcaga

SEQ ID NO: 19987 - DNA, 600 bp, Chicken  19866894230068_2
tgggtagttggatattgctgggaggaagaaaataggagtgtgtcaaggagattgttgtcccaacttctctgaaactattgagaaatgctgcccttgctgctctgagtctgctgcaggcgtatgtttgcagtcctctcacatgggagggatcacggagtgtctgagctggaagggacctggggggtcactgaggccaactcctggttccacacaggaccaccttaacctcaaaacataaagatttcctattgtatgttcggtttaaatacataatygggtaaggttaaaggtgcttcacgyataacaagatgctttttcctgtcttaatgaaattttgactttgagataattaacagtgtgtgttgggggggcgcgagtgtagatytgaatgcttccatgttcctatagaaaggcaactatgtgttgtggcagctatggtgttttttggggggtgttcttcatttcttgtaggggggcagcattgagagttgtggtatgtgggttttgctgcgggttgctttggtttttttccttcctgagtctatttcagagattccccatttctgtctatcagaaacctgccctgatctggggaggcag

SEQ ID NO: 19988 - DNA, 600 bp, Chicken  19866894230068_3
tgctgcccttgctgctctgagtctgctgcaggcgtatgtttgcagtcctctcacatgggagggatcacggagtgtctgagctggaagggacctggggggtcactgaggccaactcctggttccacacaggaccaccttaacctcaaaacataaagatttcctattgtatgttcggtttaaatacataatygggtaaggttaaaggtgcttcacgyataacaagatgctttttcctgtcttaatgaaattttgactttgagataattaacagtgtgtgttgggggggcgcgagtgtagatytgaatgcttccatgttcctatagaaaggcaactatgtgttgtggcagctatggtgttttttggggggtgttcttcatttcttgtaggggggcagcattgagagttgtggtatgtgggttttgctgcgggttgctttggtttttttccttcctgagtctatttcagagattccccatttctgtctatcagaaacctgccctgatctggggaggcagtaccaatcttactgctccccctctttgccccyagtttgttcctttgggcttcaggtgaaaagaaytcagtttgcaaaacaagtta

SEQ ID NO: 19989 - DNA, 600 bp, Chicken  19866894230068_4
ttttgactttgagataattaacagtgtgtgttgggggggcgcgagtgtagatytgaatgcttccatgttcctatagaaaggcaactatgtgttgtggcagctatggtgttttttggggggtgttcttcatttcttgtaggggggcagcattgagagttgtggtatgtgggttttgctgcgggttgctttggtttttttccttcctgagtctatttcagagattccccatttctgtctatcagaaacctgccctgatctggggaggcagtaccaatcttactgctccccctctttgccccyagtttgttcctttgggcttcaggtgaaaagaaytcagtttgcaaaacaagttaatattccaactgcatcgtgaaatgttaaaacaaaataactggctgtgcattctggtgtaagagacagaagctcttcactgaggagctatcgcccaccttcctacacacataattaatgattaatctttgagactgcggcaatttgcagattccttaatggatgcaggrttgtcagaagaatgcccgtttcccagatacttttatttctggagatgctttcattcatcttcatgactttttagtttga

SEQ ID NO: 19990 - DNA, 600 bp, Chicken  19866894230068_5
ggggggcgcgagtgtagatytgaatgcttccatgttcctatagaaaggcaactatgtgttgtggcagctatggtgttttttggggggtgttcttcatttcttgtaggggggcagcattgagagttgtggtatgtgggttttgctgcgggttgctttggtttttttccttcctgagtctatttcagagattccccatttctgtctatcagaaacctgccctgatctggggaggcagtaccaatcttactgctccccctctttgccccyagtttgttcctttgggcttcaggtgaaaagaaytcagtttgcaaaacaagttaatattccaactgcatcgtgaaatgttaaaacaaaataactggctgtgcattctggtgtaagagacagaagctcttcactgaggagctatcgcccaccttcctacacacataattaatgattaatctttgagactgcggcaatttgcagattccttaatggatgcaggrttgtcagaagaatgcccgtttcccagatacttttatttctggagatgctttcattcatcttcatgactttttagtttgagaaatgaaaactgcttttctcttccaaaatttg

SEQ ID NO: 19991 - DNA, 600 bp, Chicken  19866894230068_6
ttccccatttctgtctatcagaaacctgccctgatctggggaggcagtaccaatcttactgctccccctctttgccccyagtttgttcctttgggcttcaggtgaaaagaaytcagtttgcaaaacaagttaatattccaactgcatcgtgaaatgttaaaacaaaataactggctgtgcattctggtgtaagagacagaagctcttcactgaggagctatcgcccaccttcctacacacataattaatgattaatctttgagactgcggcaatttgcagattccttaatggatgcaggrttgtcagaagaatgcccgtttcccagatacttttatttctggagatgctttcattcatcttcatgactttttagtttgagaaatgaaaactgcttttctcttccaaaatttgtcttgtgttctcgtagctgaggaaagctgttacccaaggatgtctgcagggttcagaacatccatctgtgtgcatcggcagtctggaggttgagctgcagatctctgaccacctctatctcatctctataactccagctttgtgaatgtacctgaaaattttccagtgaattaaagacctcgtgtttt

SEQ ID NO: 19992 - DNA, 599 bp, Chicken  19866894230069_1
  misc_feature (1)..(73): n is any nucleotide
nnnnnnnnnnnnnnnnnnnnnnnnnnnnnnnnnnnnnnnnnnnnnnnnnnnnnnnnnnnnnnnnnnnnnnnnncccatccctctctctcctcagattctcttctctgaagggcccagagcatgaacgtgatgctggccagtggcagcagagagagacatcagtgctctaggaggacccaaaacaccgttatcaagcaattagtttgcttgcttaccagcagagggtcattctcatgccctccctttggatttctcctcttacttcaaaagacactatgagtatttgaagaagaaaaaaarctctcctctatacttgttaacacagaggaacttattctccagtgcgaatgtgacttgaatcagtcactaaatacataaagtaattgaactggtctgcatcttgcaagtgcttttccaacctcatcacagatttcacaacactattgggaaatttctgtcttctgaaagacttatgaaaatatktaactaattttctctattctgctgacacattctgaaggaaaattctgaaaatctccccataattaatgaaatgaagtatgaaatcaaagcagccttgtactcacccacagtttaaa

SEQ ID NO: 19993 - DNA, 600 bp, Chicken  19866894230069_2
accgttatcaagcaattagtttgcttgcttaccagcagagggtcattctcatgccctccctttggatttctcctcttacttcaaaagacactatgagtatttgaagaagaaaaaaarctctcctctatacttgttaacacagaggaacttattctccagtgcgaatgtgacttgaatcagtcactaaatacataaagtaattgaactggtctgcatcttgcaagtgcttttccaacctcatcacagatttcacaacactattgggaaatttctgtcttctgaaagacttatgaaaatatktaactaattttctctattctgctgacacattctgaaggaaaattctgaaaatctccccataattaatgaaatgaagtatgaaatcaaagcagccttgtactcacccacagtttaaatctggaagctaacattctatgttacccgtggaaaacatgagacctacagcaatgctgctgtcttacctcccttattttacctgagaaacttaagaaagaaaaccagaaaaattacaacagctcacagtactcagccatgtacaccacctrcagagcagagacctgaattagcagcatttaagtc

SEQ ID NO: 19994 - DNA, 424 bp, Chicken  19866894230069_3
aatttctgtcttctgaaagacttatgaaaatatktaactaattttctctattctgctgacacattctgaaggaaaattctgaaaatctccccataattaatgaaatgaagtatgaaatcaaagcagccttgtactcacccacagtttaaatctggaagctaacattctatgttacccgtggaaaacatgagacctacagcaatgctgctgtcttacctcccttattttacctgagaaacttaagaaagaaaaccagaaaaattacaacagctcacagtactcagccatgtacaccacctrcagagcagagacctgaattagcagcatttaagtctggggactcatgaacacatgaagctcaaaccaacaactgggaataatacttctaaacaacctgatgatgtcttggaattcaagaagaaaa

SEQ ID NO: 19995 - DNA, 600 bp, Chicken  19866894230073_1
agagagcagcaaaaattatgaataagctctcattaataaatacttgatgatgaatccaaatagatttcctcctctggagcaattattgtaaaatgggctctaatatgttgcagggacggccccaagaaaggttgggtgcatttcagggactaagtgccttccttcaatacactctaatgagcactttcaaatcatttgcatctgtctcggcaacaggtctcattaccaggttaacttattaccgagcgccgttgctgtgaacagttaataagcggctaccggaggcctcgccgtgcgccygtgcattcgtggggaaaccaacagcgggccgagcgcagggagcgtctccccacctgcaccgtgggtttgcatgacagccaggattggggtttgggggaataggggagcgcggtgcatccatccccctgctcacagcgggttcctgcagggcacggcgcagagcgcagcgtgccagcccctgcctgggctcgtccggctgcggggattgggagctggcagccacagagccggcagcgtttttgaggtgtgtgtttggctggcggagaggctgagcatcctttaataacaccaaccctgtgt

SEQ ID NO: 19996 - DNA, 600 bp, Chicken  19866894230084_1
taatacaattgaattcctccgaataatgaccgagaattgttactttgtattctcttaagtgatatcatacattcatcacacattttctttgttgctctacagtttatatgctctaaccactctccatatcctagtacagaactataaaacttcaacaagagttggagaagaaataaccttcttcctctccaaagcattataagctggcttcatagagaagaggatagtctaatgaacagtgtgatgacctatgactccagtaggaatggatttaattccttactctgtagaaaaccagcrtcactgatggatgaaacaaaaggcagagtgattcttaactcttcagtggacaattattctccagttttggagttctcaacccccaaactgtaagattgccagatgctgtcagtaaatcaaactgccagggaatgttgttaggcactggtacagcctcagttgcccttccagctgaaacaagcaatcccagcatggtagtaggatcctgccctgacaaacagtgccccagaaaatgtttagatcaagagcagtcctgttctgtggctgctgaacatggagtgaaaatgtgatgtattgtta

SEQ ID NO: 19997 - DNA, 599 bp, Chicken  19866894230092_1
  misc_feature (1)..(20): n is any nucleotide
nnnnnnnnnnnnnnnnnnnngaaaggctcgaaggaggggacccctcccgcacacgcccagcagatgacagcccctcacagccctctgctccctgactcctccagcagcagctcggcagacagcaatttctctgaagccatcattctggggtcagctctgtgtgtattacagtccattagcagcaacagagacagctgctcgcgagcaataaagatacataaccacagcactcagacaccgggaaaaatcatcgcagcgtgggctcagcgtgcaccaagcagagctgctgcctcgtgcccyrctcagctcccactgctcagtgctctgaagcacagaccacgctgccgggctgctccagcactccctcggtggccgagcactatctagtggtcagacagagctccagggagcagaaggctgcaggcacgctgcacagatccatctacagatggatggcaccgggtgaagccagcaggagggctggccaggataagtatcatcacagcacagcagtgataagtgccccagtgagtttgttttggggaatatgggaacagaaacccactgggagcccacagcttctggctgtgctgtgccac

SEQ ID NO: 19998 - DNA, 599 bp, Chicken  19866894230092_2
  misc_feature (1)..(19): n is any nucleotide
nnnnnnnnnnnnnnnnnnngaaaggctcgaaggaggggacccctcccgcacacgcccagcagatgacagcccctcacagccctctgctccctgactcctccagcagcagctcggcagacagcaatttctctgaagccatcattctggggtcagctctgtgtgtattacagtccattagcagcaacagagacagctgctcgcgagcaataaagatacataaccacagcactcagacaccgggaaaaatcatcgcagcgtgggctcagcgtgcaccaagcagagctgctgcctcgtgcccyrctcagctcccactgctcagtgctctgaagcacagaccacgctgccgggctgctccagcactccctcggtggccgagcactatctagtggtcagacagagctccagggagcagaaggctgcaggcacgctgcacagatccatctacagatggatggcaccgggtgaagccagcaggagggctggccaggataagtatcatcacagcacagcagtgataagtgccccagtgagtttgttttggggaatatgggaacagaaacccactgggagcccacagcttctggctgtgctgtgccacc

SEQ ID NO: 19999 - DNA, 600 bp, Chicken  19866894230101_1
ttgtgtgctgtgcagctactgcacataatgagaagtgacagggcagttcaatctctggggtcctttcagtccatggcctccctgctgagaaacccaacaaggtgggcagttaggctgatctttcttcctaagttgttctgacatatctcctccaggaaatgtaccgatgccccataactcgtatcatgcagctcccctggctgcatcaactggcatttacttctggtcactgataatccgagctccaatcaattcagtagcctaaatacgaaaggctccctgctggggtctccacagcaytccaaacagtcctggggaggaggtggatgttcagtaggtgatgagagaaaaggtcttacttttttcagctgtgctttgagatcttttgagggaagatggtaggaaagatggtgattactggcttctggggagagagacagcaaacttcaggcctgaattagcagctctaaaatgcagtgagatcagctatttctgcggagactgtgatgctgcaaagaaaaatcatgccagcagcagtctttgtgtagaagttgctcttgccatctccttccttcctagccatatactcaacaccctttc

SEQ ID NO: 20000 - DNA, 600 bp, Chicken  19866894230104_1
gaacctgaaggaaactctgggatctgtttacttgcttgaaactgatgcaaagcagcaagattgttgatcttgttaccattataaaattaaactgtcaatcaaagtattttcatggaagacagattttactttccaagcgttactttgaggatcacatctgtctgttctctaatctgtgtcccacaggtacttgctggaattcaccccagtgttgcttccttccttatttgattcttaaacagtcttcattctgtgacttcttttttgcttgtttcacccaatgaaagcctgttatctacytagaacaaccatcaggaaagctgagcaaaggagagtaattaagcaactcctgcagaggctcttgtgtaataccatgctttttaaattttaawcctgraattttgagagagagcattaattaccgcatactagtgtaaggaccctctgtaattacttcttcattttcagtgacttgactgatagcagagggtggaccagtaatgatctttggctacacagtgcttttctgctttcaatgaaaggacaaaggataattatagcttattaatggacaagggaacagttatatacatacagaaa

SEQ ID NO: 20001 - DNA, 600 bp, Chicken  19866894230104_2
tgtcaatcaaagtattttcatggaagacagattttactttccaagcgttactttgaggatcacatctgtctgttctctaatctgtgtcccacaggtacttgctggaattcaccccagtgttgcttccttccttatttgattcttaaacagtcttcattctgtgacttcttttttgcttgtttcacccaatgaaagcctgttatctacytagaacaaccatcaggaaagctgagcaaaggagagtaattaagcaactcctgcagaggctcttgtgtaataccatgctttttaaattttaawcctgraattttgagagagagcattaattaccgcatactagtgtaaggaccctctgtaattacttcttcattttcagtgacttgactgatagcagagggtggaccagtaatgatctttggctacacagtgcttttctgctttcaatgaaaggacaaaggataattatagcttattaatggacaagggaacagttatatacatacagaaaagaactgtaagtttcttacacaaagctacagagagaaaacattcaacgtgttgatgcattccattttacagacagacttctttttaatgttt

SEQ ID NO: 20002 - DNA, 600 bp, Chicken  19866894230104_3
atcaaagtattttcatggaagacagattttactttccaagcgttactttgaggatcacatctgtctgttctctaatctgtgtcccacaggtacttgctggaattcaccccagtgttgcttccttccttatttgattcttaaacagtcttcattctgtgacttcttttttgcttgtttcacccaatgaaagcctgttatctacytagaacaaccatcaggaaagctgagcaaaggagagtaattaagcaactcctgcagaggctcttgtgtaataccatgctttttaaattttaawcctgraattttgagagagagcattaattaccgcatactagtgtaaggaccctctgtaattacttcttcattttcagtgacttgactgatagcagagggtggaccagtaatgatctttggctacacagtgcttttctgctttcaatgaaaggacaaaggataattatagcttattaatggacaagggaacagttatatacatacagaaaagaactgtaagtttcttacacaaagctacagagagaaaacattcaacgtgttgatgcattccattttacagacagacttctttttaatgtttttcct

SEQ ID NO: 20003 - DNA, 600 bp, Chicken  19866894230104_4
tgatagcagagggtggaccagtaatgatctttggctacacagtgcttttctgctttcaatgaaaggacaaaggataattatagcttattaatggacaagggaacagttatatacatacagaaaagaactgtaagtttcttacacaaagctacagagagaaaacattcaacgtgttgatgcattccattttacagacagacttctttttaatgtttttcctcccagtgttgtctttttcagaggctcagtaactttttacatgcaacactatttgatttagcaccatatgtgcattcctgycttatgggagaggaaactgaccaaaattcagagagcttttagaatggttttattggttctacttcaaatgattctatcttttagttagccacaggtttgaaaaacaggaatttagagcataatgcaacattttcatgctgctgaataactcttgcgatctgcaagcatcccaaatgacatttcactatgcatttttgctattttaaaaactcagmttttcatagaactccagtaacaacaggtaatatttgaatttaaatagattctggaatatttaataagtcttttggctgcaaaaaa

SEQ ID NO: 20004 - DNA, 600 bp, Chicken  19866894230104_5
ttcctcccagtgttgtctttttcagaggctcagtaactttttacatgcaacactatttgatttagcaccatatgtgcattcctgycttatgggagaggaaactgaccaaaattcagagagcttttagaatggttttattggttctacttcaaatgattctatcttttagttagccacaggtttgaaaaacaggaatttagagcataatgcaacattttcatgctgctgaataactcttgcgatctgcaagcatcccaaatgacatttcactatgcatttttgctattttaaaaactcagmttttcatagaactccagtaacaacaggtaatatttgaatttaaatagattctggaatatttaataagtcttttggctgcaaaaaaaacccctgtacatattgcattaatagaactagaccatctgcttcctgccatgatcaatacattatttgttagggaagggataaatctgtatttgtaagttgtagctttttgtttgcactccaaatcctttcaatgcagttctttaaaagacagcaaagagaagcatgccctcctccccagcccctaacaaatattaccatgactcagaaatgtaa

SEQ ID NO: 20005 - DNA, 546 bp, Chicken  19866894230112_1
tggtgaccatgctttctctgggaatctatcttgaacctcttccaaaggtaaggtgaacaaatgtgcaaaaagtgcagtagcagcatcccaagctctccatgctggagaatgctcagccttgcttcagagaactcagcaagacttgcttgatgcaaaccattgcacagcatgatttgctgtgggctggggtcctgcctgtaggaaaaattgatcttgtaaaccattatgctctttgtgatcttcattatctctgctgtgctggtgggctgggaaagcatctgctgtgaaatgtagtacatyctcagcaccgtgctcagggtaacaccatgccctctcctccatagtctgtcctgggagccctcatcgccgtcaacctgaagaactccctmaagcagctggctgatcccttctacctgtggaagaagagcaagctggactgcgtgagtgcctgaggatgggtgggggggacccctggatccctcctggggaaggtgggctttgctccactgctgtgctccatccacttctgagtggtccggagccgtg

SEQ ID NO: 20006 - DNA, 457 bp, Chicken  19866894230112_2
aagctctccatgctggagaatgctcagccttgcttcagagaactcagcaagacttgcttgatgcaaaccattgcacagcatgatttgctgtgggctggggtcctgcctgtaggaaaaattgatcttgtaaaccattatgctctttgtgatcttcattatctctgctgtgctggtgggctgggaaagcatctgctgtgaaatgtagtacatyctcagcaccgtgctcagggtaacaccatgccctctcctccatagtctgtcctgggagccctcatcgccgtcaacctgaagaactccctmaagcagctggctgatcccttctacctgtggaagaagagcaagctggactgcgtgagtgcctgaggatgggtgggggggacccctggatccctcctggggaaggtgggctttgctccactgctgtgctccatccacttctgagtggtccggagccgtg

SEQ ID NO: 20007 - DNA, 600 bp, Chicken  19866894230113_1
catttttattgtaacagttgatattatgccctttccaagattgcaaaatgactggcagtagacaaaacggcagggaagcatctgtatcttagagtttgttgtgggtattaaagatgttcaatcccacaaacttgagcccagcaacttgattcattaaggtagggttcttttcttgggtgtcttcaggaagaagcgggttaggagccaataaaaggcagcaaaaacgtgtggctagtgttcagtcttcttaaaatccccctgtaactgatgtgttagtgccaccagcagtcaacctgtaargggtatttcaaagactagtttctgtttgcccatggttttaccctatgtttctttacattaaactgctgagacgtgcccagacttaagtgccttgcctgtggattataatctggtctatctacaaggcagtaggtgcccttggtacattgttatggagagcactgagggtttttgggaaggaaaagctagtgaattgctaggcaaaatcctgcatttagtaaagccagcacttggttaaatttatgactcaacaaaatgaaattgctctggttttacactgaggtaatagtgcagattgga

SEQ ID NO: 20008 - DNA, 599 bp, Chicken  19866894230115_1
  misc_feature (1)..(185): n is any nucleotide
nnnnnnnnnnnnnnnnnnnnnnnnnnnnnnnnnnnnnnnnnnnnnnnnnnnnnnnnnnnnnnnnnnnnnnnnnnnnnnnnnnnnnnnnnnnnnnnnnnnnnnnnnnnnnnnnnnnnnnnnnnnnnnnnnnnnnnnnnnnnnnnnnnnnnnnnnnnnnnnnnnnnnnnnnnnnnnnnnnnnnnnnnaattatacatttaaatatggctgcgaagcaaaaccagaagtgactccatccccacccacggccatttgctctcccggggtgattttccatagggataactcagcttcagccaaakgagagcagcacartgaacctgcttcacacactgctggaacagcrarcagckttcctttcctctaagagagagatgggtttcttaaggcttttgatttctcatggaaatactggggtcagagagctgaaaccaagcaaagcccctccattctactcatcacacattgcccaatgcatactgcatactgcactctgctttccttaagcactctcacctctcctccaggatagcgatagaggtatttctcctgatccctcaaggcaaactcgtcggggtatttggcttcaatctctgcatac

SEQ ID NO: 20009 - DNA, 599 bp, Chicken  19866894230115_2
  misc_feature (1)..(172): n is any nucleotide
nnnnnnnnnnnnnnnnnnnnnnnnnnnnnnnnnnnnnnnnnnnnnnnnnnnnnnnnnnnnnnnnnnnnnnnnnnnnnnnnnnnnnnnnnnnnnnnnnnnnnnnnnnnnnnnnnnnnnnnnnnnnnnnnnnnnnnnnnnnnnnnnnnnnnnnnnnnnnnnnnnnnnnnnnnnnaattatacatttaaatatggctgcgaagcaaaaccagaagtgactccatccccacccacggccatttgctctcccggggtgattttccatagggataactcagcttcagccaaakgagagcagcacartgaacctgcttcacacactgctggaacagcrarcagckttcctttcctctaagagagagatgggtttcttaaggcttttgatttctcatggaaatactggggtcagagagctgaaaccaagcaaagcccctccattctactcatcacacattgcccaatgcatactgcatactgcactctgctttccttaagcactctcacctctcctccaggatagcgatagaggtatttctcctgatccctcaaggcaaactcgtcggggtatttggcttcaatctctgcatacgtcatttcttcgc

SEQ ID NO: 20010 - DNA, 599 bp, Chicken  19866894230115_3
  misc_feature (1)..(141): n is any nucleotide
nnnnnnnnnnnnnnnnnnnnnnnnnnnnnnnnnnnnnnnnnnnnnnnnnnnnnnnnnnnnnnnnnnnnnnnnnnnnnnnnnnnnnnnnnnnnnnnnnnnnnnnnnnnnnnnnnnnnnnnnnnnnnnnnnnnnnnnnnnnnnaattatacatttaaatatggctgcgaagcaaaaccagaagtgactccatccccacccacggccatttgctctcccggggtgattttccatagggataactcagcttcagccaaakgagagcagcacartgaacctgcttcacacactgctggaacagcrarcagckttcctttcctctaagagagagatgggtttcttaaggcttttgatttctcatggaaatactggggtcagagagctgaaaccaagcaaagcccctccattctactcatcacacattgcccaatgcatactgcatactgcactctgctttccttaagcactctcacctctcctccaggatagcgatagaggtatttctcctgatccctcaaggcaaactcgtcggggtatttggcttcaatctctgcatacgtcatttcttcgcacaccccctgcaggaagcacaactctgtgca

SEQ ID NO: 20011 - DNA, 599 bp, Chicken  19866894230115_4
  misc_feature (1)..(139): n is any nucleotide
nnnnnnnnnnnnnnnnnnnnnnnnnnnnnnnnnnnnnnnnnnnnnnnnnnnnnnnnnnnnnnnnnnnnnnnnnnnnnnnnnnnnnnnnnnnnnnnnnnnnnnnnnnnnnnnnnnnnnnnnnnnnnnnnnnnnnnnnnnnaattatacatttaaatatggctgcgaagcaaaaccagaagtgactccatccccacccacggccatttgctctcccggggtgattttccatagggataactcagcttcagccaaakgagagcagcacartgaacctgcttcacacactgctggaacagcrarcagckttcctttcctctaagagagagatgggtttcttaaggcttttgatttctcatggaaatactggggtcagagagctgaaaccaagcaaagcccctccattctactcatcacacattgcccaatgcatactgcatactgcactctgctttccttaagcactctcacctctcctccaggatagcgatagaggtatttctcctgatccctcaaggcaaactcgtcggggtatttggcttcaatctctgcatacgtcatttcttcgcacaccccctgcaggaagcacaactctgtgcagc

SEQ ID NO: 20012 - DNA, 599 bp, Chicken  19866894230115_5
  misc_feature (1)..(134): n is any nucleotide
nnnnnnnnnnnnnnnnnnnnnnnnnnnnnnnnnnnnnnnnnnnnnnnnnnnnnnnnnnnnnnnnnnnnnnnnnnnnnnnnnnnnnnnnnnnnnnnnnnnnnnnnnnnnnnnnnnnnnnnnnnnnnnnnnnnnnnaattatacatttaaatatggctgcgaagcaaaaccagaagtgactccatccccacccacggccatttgctctcccggggtgattttccatagggataactcagcttcagccaaakgagagcagcacartgaacctgcttcacacactgctggaacagcrarcagckttcctttcctctaagagagagatgggtttcttaaggcttttgatttctcatggaaatactggggtcagagagctgaaaccaagcaaagcccctccattctactcatcacacattgcccaatgcatactgcatactgcactctgctttccttaagcactctcacctctcctccaggatagcgatagaggtatttctcctgatccctcaaggcaaactcgtcggggtatttggcttcaatctctgcatacgtcatttcttcgcacaccccctgcaggaagcacaactctgtgcagcatcac

SEQ ID NO: 20013 - DNA, 600 bp, Chicken  19866894230116_1
attggaagatttaaatagaccaggccagaagcaaccaacctttggcacaaagcatttccctcctcttcttccaatctattggctgtttaccctttttccctggcactggagtggctgccaagcctggcattaattttccttccaagcttgctaggcccatgaagtaaacagccatgtgcattccttactctatatttaacagctgcagactgtgctgggggcaactgcaacagaggggaacctttgtagcttcccaaattcacggctcgtgagggtgggcgtggggaagatttctgcagrgagaagagggatttctctccttcccggtatttgcaaagcagttcaattagagagagactgcaatgccagcatcccagacgcggtccagagcgcgagacaggaacaatgtcctcaacagggctgagttcctctccttgaaccagcccccgaaagggacccaggagagcaggagctcgggcaggaagcagagcggccaaacagcggcggctggaacccagaacagcaaccccaaggagcggaggcaatcgcagcagctgcccgaagaggactgcatgcagctcaacccctccttcaagggga

SEQ ID NO: 20014 - DNA, 600 bp, Chicken  19866894230118_1
agatcttgctgagatttagttgcgtgggcgagagggaaagaggggagaggggatatgataagtaaataatgacctgggtgtgagaaccaagggaattctcatttgcttcccatcaaatactattcatcttgccttagagactgggtctggcgctgtcttgtttcactgagttttttggtgcccagatgtcattaaaactgggaacacagggcagaaaatttgcattgaagtctcatcaccatgccttggttcagccacataaataacctcccacttctgtggtgtttcctctgcagtagyggcaagtcccaggctgaaccaaggggcaggaaggtggtattgcggctgtgtccaccttgggctctggatcatatccccaggtcagccacaacccagttaccttcaaacaaggactaycttcccctgagtccctgtaataattttttgttgctaatgtactaattttggttagaaactccacggagatkaaccacttaagctgtagcatgttgtatgtgcaaggagtcccttaggttgtgtaaggagccagtgctatcaggttgtgctagctcartgttgtgacaatagctgcatttgttc

SEQ ID NO: 20015 - DNA, 600 bp, Chicken  19866894230118_2
tactattcatcttgccttagagactgggtctggcgctgtcttgtttcactgagttttttggtgcccagatgtcattaaaactgggaacacagggcagaaaatttgcattgaagtctcatcaccatgccttggttcagccacataaataacctcccacttctgtggtgtttcctctgcagtagyggcaagtcccaggctgaaccaaggggcaggaaggtggtattgcggctgtgtccaccttgggctctggatcatatccccaggtcagccacaacccagttaccttcaaacaaggactaycttcccctgagtccctgtaataattttttgttgctaatgtactaattttggttagaaactccacggagatkaaccacttaagctgtagcatgttgtatgtgcaaggagtcccttaggttgtgtaaggagccagtgctatcaggttgtgctagctcartgttgtgacaatagctgcatttgttctgcaggacaaaaggaacatggcagctgcggcacaggttgcaagtgtcccactctggtgtcactcggccaggagcaaatgaagcccgggtggtgagggcattgtgtctttaaaaataa

SEQ ID NO: 20016 - DNA, 600 bp, Chicken  19866894230118_3
tcattaaaactgggaacacagggcagaaaatttgcattgaagtctcatcaccatgccttggttcagccacataaataacctcccacttctgtggtgtttcctctgcagtagyggcaagtcccaggctgaaccaaggggcaggaaggtggtattgcggctgtgtccaccttgggctctggatcatatccccaggtcagccacaacccagttaccttcaaacaaggactaycttcccctgagtccctgtaataattttttgttgctaatgtactaattttggttagaaactccacggagatkaaccacttaagctgtagcatgttgtatgtgcaaggagtcccttaggttgtgtaaggagccagtgctatcaggttgtgctagctcartgttgtgacaatagctgcatttgttctgcaggacaaaaggaacatggcagctgcggcacaggttgcaagtgtcccactctggtgtcactcggccaggagcaaatgaagcccgggtggtgagggcattgtgtctttaaaaataacagcaaaaatggtgaggagggttaagtgaagacctatattagtcctactctctggtgccctgcagctttta

SEQ ID NO: 20017 - DNA, 600 bp, Chicken  19866894230118_4
ttctgtggtgtttcctctgcagtagyggcaagtcccaggctgaaccaaggggcaggaaggtggtattgcggctgtgtccaccttgggctctggatcatatccccaggtcagccacaacccagttaccttcaaacaaggactaycttcccctgagtccctgtaataattttttgttgctaatgtactaattttggttagaaactccacggagatkaaccacttaagctgtagcatgttgtatgtgcaaggagtcccttaggttgtgtaaggagccagtgctatcaggttgtgctagctcartgttgtgacaatagctgcatttgttctgcaggacaaaaggaacatggcagctgcggcacaggttgcaagtgtcccactctggtgtcactcggccaggagcaaatgaagcccgggtggtgagggcattgtgtctttaaaaataacagcaaaaatggtgaggagggttaagtgaagacctatattagtcctactctctggtgccctgcagcttttaattaatcaagtccaattattcagcctatatccatttgaatagtggataatactggaaggaattcactttcaatgggatttatggcc

SEQ ID NO: 20018 - DNA, 600 bp, Chicken  19866894230118_5
gacaatagctgcatttgttctgcaggacaaaaggaacatggcagctgcggcacaggttgcaagtgtcccactctggtgtcactcggccaggagcaaatgaagcccgggtggtgagggcattgtgtctttaaaaataacagcaaaaatggtgaggagggttaagtgaagacctatattagtcctactctctggtgccctgcagcttttaattaatcaagtccaattattcagcctatatccatttgaatagtggataatactggaaggaattcactttcaatgggatttatggcccccttycctcaagtcattttcagataagagattataaatgttataaagtctgaacggatcggtgtgatccaagcagcaataattcattgctgttaatgctgcaatgagtttatttagggaacaaattggcaatcrggagagragacagttagtcttttaatatgcagaaaaacaattgtttataattattctgcctttaattcagtgaacaaacacagctgttgtttgaggctcctaatctgattacagaagtgccaccctttcagatcagagtaagccaaggggacaggcactgccctgagccag

SEQ ID NO: 20019 - DNA, 600 bp, Chicken  19866894230118_6
aaaaataacagcaaaaatggtgaggagggttaagtgaagacctatattagtcctactctctggtgccctgcagcttttaattaatcaagtccaattattcagcctatatccatttgaatagtggataatactggaaggaattcactttcaatgggatttatggcccccttycctcaagtcattttcagataagagattataaatgttataaagtctgaacggatcggtgtgatccaagcagcaataattcattgctgttaatgctgcaatgagtttatttagggaacaaattggcaatcrggagagragacagttagtcttttaatatgcagaaaaacaattgtttataattattctgcctttaattcagtgaacaaacacagctgttgtttgaggctcctaatctgattacagaagtgccaccctttcagatcagagtaagccaaggggacaggcactgccctgagccagcagacagcagttttcttttgcatgggagactcaggtgaaaaaaggactggatttgtttccagcttttgattagacccatgtgcttcagcttgtttcaaacatcctaaattccaccttctatttcttgta

SEQ ID NO: 20020 - DNA, 600 bp, Chicken  19866894230118_7
acagcaaaaatggtgaggagggttaagtgaagacctatattagtcctactctctggtgccctgcagcttttaattaatcaagtccaattattcagcctatatccatttgaatagtggataatactggaaggaattcactttcaatgggatttatggcccccttycctcaagtcattttcagataagagattataaatgttataaagtctgaacggatcggtgtgatccaagcagcaataattcattgctgttaatgctgcaatgagtttatttagggaacaaattggcaatcrggagagragacagttagtcttttaatatgcagaaaaacaattgtttataattattctgcctttaattcagtgaacaaacacagctgttgtttgaggctcctaatctgattacagaagtgccaccctttcagatcagagtaagccaaggggacaggcactgccctgagccagcagacagcagttttcttttgcatgggagactcaggtgaaaaaaggactggatttgtttccagcttttgattagacccatgtgcttcagcttgtttcaaacatcctaaattccaccttctatttcttgtattttcag

SEQ ID NO: 20021 - DNA, 600 bp, Chicken  19866894230118_8
tgtggctttgtgctgctgggtgactatttctgatgtgctgggaaagtttccaatggtttttctcacctcgcctccacctcctgcctcctctgtcaactgccaaaacatcacacttgtggtaacagcaaagaagttgaggtagcgtcccatcttacgcagctgatggtggtgtctggaagctacagcaaagctcaggaaactgtcataaggaggggttatgaaaaccagccccactcactgaaaaccttatgctgtgagggatgaggcgctctgtgagggagcaaacattgctgccccacmttgccccatgtctcctcttccattccgcccttcttgtagagatgagtgtgtaaaaagctttgacacacacaaaggaattggggaactggatcaggatgttttagctcttacaaatatgtgagctactgaagaataattcaaaaaactgttaactgcccttctgaaatgagctggtattatattccttcttattctcgtaatggaaacatgagtgactgatcagttcaaatgaacttcaatctataacgtgttaatataattatatcccacgacagctgttggtttggagagaatggaaac

SEQ ID NO: 20022 - DNA, 600 bp, Chicken  19866894230119_1
gacttccagatgttcatattcttttcttttttttcttttccttttcagatgtgaatgttcctcacttctttggacttggtgctaggaaagaaagaaatctctgcagttctctgggtagcagcactgatgaaacttcagtccagttaagtcagaaagccacactgacgtttttaatatttgctggatgcatccaattcagactgcagcaatggaaaattttctgtcctaaatcctgccctggagggaatttctatttgcagaaaagcatgttcagtcttctcttctccttggactctcttwagaggttgctaggtgtaacggggtcagagctctaggatctggtttgcatccagtcaactttgaccttctgaaggcagtggctatatcaccagccaaggttttgtggttaaaggtcagttgagattattccttaagttccaaagaatttgaggggaaaaaaaaaatgaggaagaagacaaagactgtgtttcaaagccaaaaatgaatttggtagaaaatgttttgtgtataccagattttagactccacatctcccagtcaactgtccaagtcacgcagtcctcgtaacaggcctttcct

SEQ ID NO: 20023 - DNA, 600 bp, Chicken  19866894230119_2
cttctgaaggcagtggctatatcaccagccaaggttttgtggttaaaggtcagttgagattattccttaagttccaaagaatttgaggggaaaaaaaaaatgaggaagaagacaaagactgtgtttcaaagccaaaaatgaatttggtagaaaatgttttgtgtataccagattttagactccacatctcccagtcaactgtccaagtcacgcagtcctcgtaacaggcctttcctgtaaaacagctctttctggcccggtgatgcaagctggcttttgagatgtgagctgctctcatgrgtctgtttccaacaaaaagcgtcagttttaattgaattttggtgctatctttgcacatactattctaatcagcctgccaggagggttctgtatgtgaagcaaccaagaggttcccactgaggctctgcagtgtggatacaagggataaactggagttcatgcagctgacttgcaagcaagctcactaataaaacttaactcttaaagaagatggcttggtcctgacaactctgattgccttggcacaatgttgtggaaatacaattataggattggactgctctcaatttgttccagata

SEQ ID NO: 20024 - DNA, 600 bp, Chicken  19866894230120_1
gggttggaggagtgtttatttgtcaaggactttatcagctatcagccggctgggtttaataagaaattacgctccccggcccttcagctgtgagaacgcgtttcgccatgtgatgtcaagaggtctccgatggatttttctctttattctttttctcttccccttaatctggcttcctccccgctcctgagagcagcagacatgacacatctgctggtgtgatgcctccaagaaagaaaaggcattgctgcccctccagcacccgcctgccccatgggctggggggtgaagtctggatgygtggtcaatccccacagctgggaacagctgcctctccggtttgggcagagctcctgctctcaacgtgggcttttctggcattttgggggcattgctgcatgctgagcttcacttctgtctgtgcaccaggaagggaatggggacgtgggaaaagatttcctggtgggatgcggaggtctcattgcccaccacgtccctcaccccgctgagctgttctgttgtgccgaggagtgaacagatgagggctgtccacctccacccacccatccatccatccgtctgcctgcccatgcagcctgt

SEQ ID NO: 20025 - DNA, 600 bp, Chicken  19866894230125_1
cttaactccgaaaactggaaggtctaacagtctatagcagagaccatcttccctagaatggccttggatgaagaaggctttctttcctggaggtgctgaggtttttatctagtccctttttcccttttgtggttctccaggaagctcagatcctgcccaggttttccagtagcaccaggcctagtggaggtcacaaaatcgtagaatgtcctgagttggaagggacccacaaggatcatcaagtccaactccgggtttcacataaggctaccaaaaatcaaaccatatatctgagagagytgtcattcagagggacgcaacctcagggctccccacaaagagctattgaccacagcaatctcacttgttgctgaagmatcactgaacctctgtggccaggtagtagacaatagccttactgaaggtgtctgcagacttataaacacccatgactgagttaccatgcaattaaatattgtgtgaatctctctcttgcggatgccttctgggctagagccctcagaacagtgtttcagacatgacttgcagcaactgaaaaccacagatgtataaaataaaactgagggcagcttgctgctg

SEQ ID NO: 20026 - DNA, 600 bp, Chicken  19866894230125_2
ctttctttcctggaggtgctgaggtttttatctagtccctttttcccttttgtggttctccaggaagctcagatcctgcccaggttttccagtagcaccaggcctagtggaggtcacaaaatcgtagaatgtcctgagttggaagggacccacaaggatcatcaagtccaactccgggtttcacataaggctaccaaaaatcaaaccatatatctgagagagytgtcattcagagggacgcaacctcagggctccccacaaagagctattgaccacagcaatctcacttgttgctgaagmatcactgaacctctgtggccaggtagtagacaatagccttactgaaggtgtctgcagacttataaacacccatgactgagttaccatgcaattaaatattgtgtgaatctctctcttgcggatgccttctgggctagagccctcagaacagtgtttcagacatgacttgcagcaactgaaaaccacagatgtataaaataaaactgagggcagcttgctgctggtttctcataaagtaagcacaatgtggtgagggtgaaaagagggagcttgatgtaaattacttgaatgtggcttact

SEQ ID NO: 20027 - DNA, 600 bp, Chicken  19866894230128_1
catttgcccttcagttaaatacacaagaaggcagcatgcacaggaaagaggctgaaatgcaagaaatgagctttggaaattaagtggtgcctgggcacccaatgaattcacagatgggcacctattacttcatgcttgaatgcccactgacgtcacgtatcaaatgctctgtgcgtgagcaagccagccctgccagagtgatctgttcaggagggggaccaaaactctcctgtgctggtcactgactgttgttcccttcattctccctatcagtgatgagaagtttaagttaattagcartaaattaaatttccctyagtggagaatgcagacaacagctggatgtgccaaggccataactggactgactctgagatgttggagggtgccttgaatttagtattgtgttttgaggtagcctaagtggtgtgcctgttatgcaggagggtgtagctgtgaacaaagcataaacaggtgagaaacaatgggagagtgtgagggccccaagaaagctcttcctgaacaagacgaggctgtaacacaaggcatgagtctgtgactggaagctgcatgtcgtgtcagtaccaagtgctgtgaggg

SEQ ID NO: 20028 - DNA, 600 bp, Chicken  19866894230128_2
aatacacaagaaggcagcatgcacaggaaagaggctgaaatgcaagaaatgagctttggaaattaagtggtgcctgggcacccaatgaattcacagatgggcacctattacttcatgcttgaatgcccactgacgtcacgtatcaaatgctctgtgcgtgagcaagccagccctgccagagtgatctgttcaggagggggaccaaaactctcctgtgctggtcactgactgttgttcccttcattctccctatcagtgatgagaagtttaagttaattagcartaaattaaatttccctyagtggagaatgcagacaacagctggatgtgccaaggccataactggactgactctgagatgttggagggtgccttgaatttagtattgtgttttgaggtagcctaagtggtgtgcctgttatgcaggagggtgtagctgtgaacaaagcataaacaggtgagaaacaatgggagagtgtgagggccccaagaaagctcttcctgaacaagacgaggctgtaacacaaggcatgagtctgtgactggaagctgcatgtcgtgtcagtaccaagtgctgtgagggaacattctgcagatccc

SEQ ID NO: 20029 - DNA, 599 bp, Chicken  19866894230130_1
  misc_feature (1)..(50): n is any nucleotide
nnnnnnnnnnnnnnnnnnnnnnnnnnnnnnnnnnnnnnnnnnnnnnnnnncgcactttttcttccagcgctgcgtgatggtgctgggcgccccaccatagcagagtcgggggccgtggagttttgaaacacgctgacgttaacgcaaggcgatccaccgatccgtggttttgcaccagcccgactcagtctaaggtcaaatcagaaaagttttctgatgagagctataggactgctctctgctttgctgctgacttagccggttacctttgcaagtatagcgtaaccgggaaaataatcsaaaagaaagaaaataaatcttcaaatttaggttaaaaacaaaagttatggtaacataagtgtctttaagttttgcaataatcctccagtacttttgcatcccaaaaggctccagatgtgaccagccactgcaaaatggcaagttgtttatcagcattctgtgctgtaaactggcacctgtaatttcactctccctttgcatcagcagaaggaagataactagaaaaaccccaccaagacgggtttctgcgagttgacgtgaaygtgtttacagcagaatgtcccgtctgccagcctcaa

SEQ ID NO: 20030 - DNA, 539 bp, Chicken  19866894230130_2
tacctttgcaagtatagcgtaaccgggaaaataatcsaaaagaaagaaaataaatcttcaaatttaggttaaaaacaaaagttatggtaacataagtgtctttaagttttgcaataatcctccagtacttttgcatcccaaaaggctccagatgtgaccagccactgcaaaatggcaagttgtttatcagcattctgtgctgtaaactggcacctgtaatttcactctccctttgcatcagcagaaggaagataactagaaaaaccccaccaagacgggtttctgcgagttgacgtgaaygtgtttacagcagaatgtcccgtctgccagcctcaaggtgaggtgtgcagcatcagatccttcacctctagctgcaagcatgcagcatgatcccgagtgtttctccctgctgggtgctgagggtagctgcatcaagcgaaaaagagaaaatgcatataagccagttgctgatagcactgctatctaacactttttttcctcctctttttgcaactgcctttctcaactgggcaaaccgg

SEQ ID NO: 20031 - DNA, 600 bp, Chicken  19866894230137_1
gaagtcttgttgggtgatacactttaggagctggagatgaaaccgtaactgacattacttattactgcccacctagtcagtcagggccctcacttcttggtcaagggtcagtgctctggaaccattcccatcatggaggagcaggtggctgtgattagcagtcagcatggcaccacacagtgagatgagattcctaccacatagcagcactgaaacatcagcagcaccttggcctcagggatgggatttcctgctgcatttgccagtgtcatcaggacaaggagctcagacaggagctgraccagcctctggtagtgagggcagatgagcagcagcagggaccaagatacatgcacatttaatgccatggccaaagccaatcacagtcagagagaagtgtccaggtgatgtgggctgaggcgacagcaggcatcaaggaggggagagagattgctgtcaagcccatgaggacaagtgagaaatgctggaacagagttaaatccagcaggaaagctgcatgtgatgaaagcatgtgcatggaactgagtgaaatgtggcactgctcttggggctgggccgtggagatgaaacactccatgc

SEQ ID NO: 20032 - DNA, 600 bp, Chicken  19866894230143_1
ggagtttatcttcatatcattcaatggggcaaaatattgcattgaaatactaagaaaaagaaaatatgatactacacatctcacacacctttattcatataaaaagttatatatatataagtatttcagaagtaatgcctcctatttatttccatggaaattacaacagatgtaaagaacacaataactttatttgattgtgcaaatactcaactacaaaacactaattttcaacatagtcaccacaataagctatgcattttcaccactgatgaacgaatcctgcatggtacatctatrgaaatctgttcctgaagatgcaacccactggttcacagctgctatgataatgtcactgctgaaatgcatcacccatcacctcactatgacaacacctactgttttgtctccataaacgttcagcaaatgttgatgaatttcaatgagtgtcattttttcctcatatttttgtgtggaattcaattccatacatttacttcatatgcacttccgtgtcagactgtctctctgctaccatctgacacatggcaacaaaatgtaatggaatattgtgaggaagcttcaatctctactgctttg

SEQ ID NO: 20033 - DNA, 600 bp, Chicken  19866894230143_2
cacctcactatgacaacacctactgttttgtctccataaacgttcagcaaatgttgatgaatttcaatgagtgtcattttttcctcatatttttgtgtggaattcaattccatacatttacttcatatgcacttccgtgtcagactgtctctctgctaccatctgacacatggcaacaaaatgtaatggaatattgtgaggaagcttcaatctctactgctttgcaaccaacatctgactttgatgttataaacaaacatgccgatgatacaaagctgggaggagtagctgacacaccaraagtttgagctaccattcaacaagacctggacagactggagatctaggcaggaaggaacttgatgaggtttaacaagaataagtataaattttgcaatggggagcaataactgcatgcattagtacaggttaggagatgacctgctggagaggcaactctccccttcaactctgccttggtgaggccacatttaagatactatgtcctgcgtccgggttccctagtacaaaaaagacagggatctcctggaaaggagtccagcagaaagccataaagttgattaatagcctggagcatct

SEQ ID NO: 20034 - DNA, 600 bp, Chicken  19866894230145_1
tagtgtgggagacagtgtccaaagaactttgctgaagtctaggtaaactatgtcaacagcccctttcctcatcagccaggcagaccactcaatcgtagaaggagattaggttggtcaagaaggacctgcctttcattaatccatgctgcttgggcccaatctcccaattgtcccacacatactatgtgatctccctcaagatgatctgctctataacctttcctggcaccccagtcaggctgatgaggccgcagctccctggatcctccttagaacccttcttgtagacgggagtcacaytggcaagcctccaatcctctgggacctttccagttgaccagaaatattgatgatggaaaatagcttggcaaccacctccaccagctccctcagcaccatggattccattyggcccaatgaacttgtggcagtccaaatggagtaacaggtctctagctgtttccacatgaatcacagggtttactctgctccccatccrtaacttccaggtcagggggtagagtatcctgaggataattggtctgacttttaaagacagacgtaaagaaggcattgagaacctcagccttgtccttatct

SEQ ID NO: 20035 - DNA, 600 bp, Chicken  19866894230145_2
ttggtcaagaaggacctgcctttcattaatccatgctgcttgggcccaatctcccaattgtcccacacatactatgtgatctccctcaagatgatctgctctataacctttcctggcaccccagtcaggctgatgaggccgcagctccctggatcctccttagaacccttcttgtagacgggagtcacaytggcaagcctccaatcctctgggacctttccagttgaccagaaatattgatgatggaaaatagcttggcaaccacctccaccagctccctcagcaccatggattccattyggcccaatgaacttgtggcagtccaaatggagtaacaggtctctagctgtttccacatgaatcacagggtttactctgctccccatccrtaacttccaggtcagggggtagagtatcctgaggataattggtctgacttttaaagacagacgtaaagaaggcattgagaacctcagccttgtccttatcttcagtggtcacgttcccctctgcatccagtaaaggacggagattctgttaaccctcctcttactgttattatacttgtaaaaaagttttttgtccttttactccaatggc

SEQ ID NO: 20036 - DNA, 600 bp, Chicken  19866894230145_3
gatgatctgctctataacctttcctggcaccccagtcaggctgatgaggccgcagctccctggatcctccttagaacccttcttgtagacgggagtcacaytggcaagcctccaatcctctgggacctttccagttgaccagaaatattgatgatggaaaatagcttggcaaccacctccaccagctccctcagcaccatggattccattyggcccaatgaacttgtggcagtccaaatggagtaacaggtctctagctgtttccacatgaatcacagggtttactctgctccccatccrtaacttccaggtcagggggtagagtatcctgaggataattggtctgacttttaaagacagacgtaaagaaggcattgagaacctcagccttgtccttatcttcagtggtcacgttcccctctgcatccagtaaaggacggagattctgttaaccctcctcttactgttattatacttgtaaaaaagttttttgtccttttactccaatggccagtttgagttcaagctgggcttttgcctttcagattttctccttgcatattctaaaaacttctttgtactctccccgaactgctcatc

SEQ ID NO: 20037 - DNA, 600 bp, Chicken  19866894230151_1
aggtgagtggtgagtcagctgcaggggcacaggtgaacgcaatttcacctcagtgaccggaaggggtggagcctggctgcacccctcatagaccccatttaagggctgagtcccaagcaggaaggatctctatgtggagatccctccccttggagcccttctgtgagcccaggacacgggtaagacctttatttcatttcttctttgtaacctgataatctctctgctccgatacttgtatacctgttttccatgcagaagcactaacacattacagtttaagctgaaagataaaccctsgtgtataagcaataagtcactgtaacttsttatttactgaaatcttgattgacagtgctgataaaaccaccaccacattgattaagtaaaaacaaaaaacatcactttccctccctcccccccaaggatacacaatataggggtccttgaaaagtgttattttgtagttatttcctaattcttaygtatgagatggttttgaagcagctgaaataccatgacttattccaacaacrtaagagatgatgattaaatgccactgtctagacagctgagtttagggtctccctccttgcagct

SEQ ID NO: 20038 - DNA, 600 bp, Chicken  19866894230151_2
caggtgaacgcaatttcacctcagtgaccggaaggggtggagcctggctgcacccctcatagaccccatttaagggctgagtcccaagcaggaaggatctctatgtggagatccctccccttggagcccttctgtgagcccaggacacgggtaagacctttatttcatttcttctttgtaacctgataatctctctgctccgatacttgtatacctgttttccatgcagaagcactaacacattacagtttaagctgaaagataaaccctsgtgtataagcaataagtcactgtaacttsttatttactgaaatcttgattgacagtgctgataaaaccaccaccacattgattaagtaaaaacaaaaaacatcactttccctccctcccccccaaggatacacaatataggggtccttgaaaagtgttattttgtagttatttcctaattcttaygtatgagatggttttgaagcagctgaaataccatgacttattccaacaacrtaagagatgatgattaaatgccactgtctagacagctgagtttagggtctccctccttgcagctgctatgactgaaactataagatgtacagt

SEQ ID NO: 20039 - DNA, 600 bp, Chicken  19866894230151_3
cctttatttcatttcttctttgtaacctgataatctctctgctccgatacttgtatacctgttttccatgcagaagcactaacacattacagtttaagctgaaagataaaccctsgtgtataagcaataagtcactgtaacttsttatttactgaaatcttgattgacagtgctgataaaaccaccaccacattgattaagtaaaaacaaaaaacatcactttccctccctcccccccaaggatacacaatataggggtccttgaaaagtgttattttgtagttatttcctaattcttaygtatgagatggttttgaagcagctgaaataccatgacttattccaacaacrtaagagatgatgattaaatgccactgtctagacagctgagtttagggtctccctccttgcagctgctatgactgaaactataagatgtacagtttcacagactagaaaagcatttccctccagcaaggattaactacactgcagtcaatgcccaaagcaatcactttataaatccaagaggatttcacacttgtttacactagggaagggaagaagggtcccttcagaaacagcaaaaaaacaacacaa

SEQ ID NO: 20040 - DNA, 600 bp, Chicken  19866894230151_4
tgtatacctgttttccatgcagaagcactaacacattacagtttaagctgaaagataaaccctsgtgtataagcaataagtcactgtaacttsttatttactgaaatcttgattgacagtgctgataaaaccaccaccacattgattaagtaaaaacaaaaaacatcactttccctccctcccccccaaggatacacaatataggggtccttgaaaagtgttattttgtagttatttcctaattcttaygtatgagatggttttgaagcagctgaaataccatgacttattccaacaacrtaagagatgatgattaaatgccactgtctagacagctgagtttagggtctccctccttgcagctgctatgactgaaactataagatgtacagtttcacagactagaaaagcatttccctccagcaaggattaactacactgcagtcaatgcccaaagcaatcactttataaatccaagaggatttcacacttgtttacactagggaagggaagaagggtcccttcagaaacagcaaaaaaacaacacaaaagcttgagccagtctgctattactatgttcctgtcattatcagtcagtta

SEQ ID NO: 20041 - DNA, 600 bp, Chicken  19866894230154_1
ctgttttacttactcatattagttgtgctgattttcagggatcacagatattttaggattatgattcttctcagtgatgaaagtaagttgccagtggtagacagcaattcagtttagaaaattttattctgctgtcagtatgcatagaccactgagagtgatgaaatttatgcccttcagcatcttaggtacttcatggatacctgggcaaaggatctgctgtacactatgaagtcattttcctttagaatactatagcacataaagtaaggaacacactgaaagaatatttgagcctcrgaactgcaagagaatttagtataagcttctctctacaattgtgtgaagacttaatcatttcagaaacaggatcttaaacagcaagtaagcaggagagcaacctgctgttaagcaatagagaagtgctgagcagtcaggtgggtcttaaatctacttctctgtgggatttacatgattttctcagggttgtaggggaatacttttgttcacttttccctagcagcctggaactttctgctacaggtaggatctctactatcctaattatagagcacggacacttttttaaagaacagtgac

SEQ ID NO: 20042 - DNA, 600 bp, Chicken  19866894230156_1
gaagtacataggttactctgaaagtaatttctcctgtttattatcttacagtgagggcagtgaggtgctggaacagtgtacctagtgttgtgatggatgcctagtccctggagactttcaagggaaggctggatcaggccctgggcaacctgatctagctgtggtgtccgtgttcactgcaggggagttggactagatggctttcagaggtcctttccaactctaagaattctgattcaaagatttatttcaatggaaactacaataagtaggaagagcacaataacactatttcttagrgcaaattctcagctacaaaacactatttgtcaacatagccgctgccattagctataygtttctgccaggaattaacaacagcctgcatacaacactcctaacaatctacatcagtggtggtgacctactgttgctgctgctactgctgaaaacacagcacccaccacttcactgtgctcacatccactgtttggtctccataaacattcagcaagtgtcgatgaatgtcaattggtgtcaattttccacatggaggagtggaggagttgaatgacatgcctttgctccatacgcactatt

SEQ ID NO: 20043 - DNA, 600 bp, Chicken  19866894230156_2
cagtgaggtgctggaacagtgtacctagtgttgtgatggatgcctagtccctggagactttcaagggaaggctggatcaggccctgggcaacctgatctagctgtggtgtccgtgttcactgcaggggagttggactagatggctttcagaggtcctttccaactctaagaattctgattcaaagatttatttcaatggaaactacaataagtaggaagagcacaataacactatttcttagrgcaaattctcagctacaaaacactatttgtcaacatagccgctgccattagctataygtttctgccaggaattaacaacagcctgcatacaacactcctaacaatctacatcagtggtggtgacctactgttgctgctgctactgctgaaaacacagcacccaccacttcactgtgctcacatccactgtttggtctccataaacattcagcaagtgtcgatgaatgtcaattggtgtcaattttccacatggaggagtggaggagttgaatgacatgcctttgctccatacgcactattatatcagacgtcattaagtcagaaaggtttttttgtttgtttgtttgtttgttttgt

SEQ ID NO: 20044 - DNA, 600 bp, Chicken  19866894230156_3
tgtgctcacatccactgtttggtctccataaacattcagcaagtgtcgatgaatgtcaattggtgtcaattttccacatggaggagtggaggagttgaatgacatgcctttgctccatacgcactattatatcagacgtcattaagtcagaaaggtttttttgtttgtttgtttgtttgttttgttgttttgtggttgttgttgctgtttttagtgttctccagactgaaatgatttacaagccttgaaaactggattacagtcgcaaagaatgtcacactagctagttacagaagactrgtgcagggtagtattagcaacaccatcgtaaaatattacaatagagaccatttaaggttttttaaaatgcaacaaaatattagagagacaggtgggmttaattttctattcatgcagatgtcattcctcagacctccacgcctcaactacaagaagaactaggcaaatagatggttcagggcagcacacagctttggctgtttaactagaactacagtataatctccttagactgtgattcagttccagtaggtttttaatattcactgtcagtggaagccaatctgaatcttaacactt

SEQ ID NO: 20045 - DNA, 583 bp, Chicken  19866894230156_4
aatgacatgcctttgctccatacgcactattatatcagacgtcattaagtcagaaaggtttttttgtttgtttgtttgtttgttttgttgttttgtggttgttgttgctgtttttagtgttctccagactgaaatgatttacaagccttgaaaactggattacagtcgcaaagaatgtcacactagctagttacagaagactrgtgcagggtagtattagcaacaccatcgtaaaatattacaatagagaccatttaaggttttttaaaatgcaacaaaatattagagagacaggtgggmttaattttctattcatgcagatgtcattcctcagacctccacgcctcaactacaagaagaactaggcaaatagatggttcagggcagcacacagctttggctgtttaactagaactacagtataatctccttagactgtgattcagttccagtaggtttttaatattcactgtcagtggaagccaatctgaatcttaacacttgaaaatcacatttgtcttttgcaattaccctctgttacaaaatgaacataacacatttgtgcatgtcctgctatacacat

SEQ ID NO: 20046 - DNA, 600 bp, Chicken  19866894230164_1
tgggcttctgcagacattcctgctcctcacaaacaagactattcattggcttcttattttattttatttttttcaactgacttggtagtgaaatggagtttaatgaaggaagatctaactgtctgagactgatgactttaataatgttaatgaatcctatacaagttatgcgtaaaatagacttcttaccaaggtcattgtgtatttgctttagtgaagcaacagaagtatcaatctctcctctaaactcaacttattatataaaaccaagtcagtatttaaaatctaacttagaaatawgaaagggcatgttctctcaaggtactcaaatgattctttggaattagcagatgatttagtgacattaaccttgaaggtccccaaatctatccagcaaatctaaaaggaatggaaccgatttctctggattggcgaggtataaaattacatcgtcagtgtataatagctgaaactctcttattgatgattaaccacatttattaacagcaggctataatcccgagatgttatttgtacagtgagtgagatgtagcacagtgctttaagagggaccaggtcatgaagttcactgaagttcac

SEQ ID NO: 20047 - DNA, 600 bp, Chicken  19866894230167_1
gaatttctgaaaatcttttggccaagtactcctaaagaagctaaactgtcacaagaacaaaaacaccttcgtgggctctaattaaaagctctggaataaggaaatgaattataaatcttcagacagagaagaaaggagggaacctgctggagccggctgttgcctgtgctggtacaggtgctttcagcttatttcagcatcagataaggagacaggctagctgatgtaaaatgctcaggatgctcaaactgaaaagtaatgtacagcaggcaaaacttgttctagctatacacagattayggtgaactctaaattagatactgcctcatggtatgtagctctctgaagacatcaacacagagttaccagcaatcaaggagacaatttcaggaatcggagcacaaaaaatgcatttctagtgttgtgtgtaagtctggttcactcacctcttgagggctstctagccttttcaagtcaaaagtaaaatgaggaayactaggaggaggataaaggggaagagagttcagacttatgaaacaacttccacgtgagagcagatcaaacagtctgagcctggatatctcccctgctgggctgagc

SEQ ID NO: 20048 - DNA, 600 bp, Chicken  19866894230167_2
ttgcctgtgctggtacaggtgctttcagcttatttcagcatcagataaggagacaggctagctgatgtaaaatgctcaggatgctcaaactgaaaagtaatgtacagcaggcaaaacttgttctagctatacacagattayggtgaactctaaattagatactgcctcatggtatgtagctctctgaagacatcaacacagagttaccagcaatcaaggagacaatttcaggaatcggagcacaaaaaatgcatttctagtgttgtgtgtaagtctggttcactcacctcttgagggctstctagccttttcaagtcaaaagtaaaatgaggaayactaggaggaggataaaggggaagagagttcagacttatgaaacaacttccacgtgagagcagatcaaacagtctgagcctggatatctcccctgctgggctgagctggctctccgtttactttttgatgtggaaagaaggaaatataagcagaagcatgcagcaggacaactaaatattctcaggttagcttctggatgctgacagaaaaaagacagcaggatttgtgagacttgcaggactttggtggctttggtgtggcaag

SEQ ID NO: 20049 - DNA, 600 bp, Chicken  19866894230167_3
cagcatcagataaggagacaggctagctgatgtaaaatgctcaggatgctcaaactgaaaagtaatgtacagcaggcaaaacttgttctagctatacacagattayggtgaactctaaattagatactgcctcatggtatgtagctctctgaagacatcaacacagagttaccagcaatcaaggagacaatttcaggaatcggagcacaaaaaatgcatttctagtgttgtgtgtaagtctggttcactcacctcttgagggctstctagccttttcaagtcaaaagtaaaatgaggaayactaggaggaggataaaggggaagagagttcagacttatgaaacaacttccacgtgagagcagatcaaacagtctgagcctggatatctcccctgctgggctgagctggctctccgtttactttttgatgtggaaagaaggaaatataagcagaagcatgcagcaggacaactaaatattctcaggttagcttctggatgctgacagaaaaaagacagcaggatttgtgagacttgcaggactttggtggctttggtgtggcaagcagggacagctctcagcacacttttgaagttcagc

SEQ ID NO: 20050 - DNA, 600 bp, Chicken  19866894230171_1
ttcaattggtgattatattttgctatacaacagtaggatgaatttaaaaggaagactgttgaaatactgattaaaagacatcttttagtcttagcattatttaatcacagaataacagaataatccaggttggacatgacctcaggagctctcggtgccgacctcctacttaagtagggacagccaagacagtacagcaatatatgacagctgcagaagctggcccaagtcttgagaaaatctgccttctgaagtcagtggagcaatataaatattatatcagagtaataggtagtaaayaggcagaaggctcatccttagccacaacagtggtatgcagcaaggaagagctgtaccagtcttgtagcagggggttacatctggaaggcatttggaaggggaagtggaaggagaaggaagtattctccttcccttgataacaagcaatagtgtttgctgggttgcacagtgcggtctgtgaaaaaacatgtggcctaataaaacaggaagcaatgaaatctgctgagttttgactactgaggtaatcggattattacagaaaaggggcaaagaagttctgtgccgctcctgcctcagact

SEQ ID NO: 20051 - DNA, 600 bp, Chicken  19866894230174_1
cgaggataaacgagaatatcgtggactggaattggcaaatggcattaaagcacttctcattagtgaccccaccacggataagtcttcagcagcacttgatgtgcacataggtatttaatgcgatttgtgttcattagacaattattatatcattaaaattcttgaagttttggtatgttaattgcaagtaaactggcagcagtaatatatagttgctagcctggccttctactgtaatttagagcttaattctttgacataataagttgaaaattatgagagctaattaaattctcttaktatactgtgtttactcaagtgtagaaatatgtcttttaatgagtaagtttcatgttatgaaagctcttttgtaagcaggaaaggggcgggtgtgagtacaattatttcagatggctccatctgtcacgtcagactttttttttcttgtgaaattgttgatgagttgaagtgagaaggtgctgtagtgctggaggaggtggggaggcacaccctaactgcagtgatacttaagttgcaaacagaaatacaaagaatagagaaggaagatggtatctttgaagctgtggaagaagccttctc

SEQ ID NO: 20052 - DNA, 600 bp, Chicken  19866894230177_1
aattaggctgacgctatttctgttgctgtgttttcttatcctagtatttgttgtgcaagtggtgcattatccatggcagcaaagagtttcagaagcctttactgaaagcctttgtttaatttcccatcttggatctaatgtctgaatgagtctgtacggactagaggagtttcaacacctttaccaatctttggtagcttgaggagtgctgcattttaaatataggaagaggaggtggaaggcaaatgttaaaagtacgtattggctagaaatgctttctactcctctgtgttggcctcyagcttcccatgtgagctgaaatatttcaggcagtgaaaattcacacgtgaatttccagtgcaaatgtctgtacacgagagcagatcaggagagctagctatgattaagcttcagttaactgtgatgcaacatttctggtgtgttcttatgggagttggtcataaggatcttccctgcctgaaagaaatctgacatttttagcttatgttatgctactttagtcttgaaacctccattgatgtcagtgtcaatatacaccttagggatcaaggttatggtgtcttgtagtaggtttctaac

SEQ ID NO: 20053 - DNA, 599 bp, Chicken  19866894230179_1
  misc_feature (1)..(157): n is any nucleotide
nnnnnnnnnnnnnnnnnnnnnnnnnnnnnnnnnnnnnnnnnnnnnnnnnnnnnnnnnnnnnnnnnnnnnnnnnnnnnnnnnnnnnnnnnnnnnnnnnnnnnnnnnnnnnnnnnnnnnnnnnnnnnnnnnnnnnnnnnnnnnnnnnnnnnnnnnnnnnctgagtaccccattctgcctcactaaggaagtgcaatgccctgactccataggtttcattcacttctggatagcttgtctacatcaagcacagagctgcttttccaaactgtactatcactgcaaaataaatagggcctatcyactcagatttttaatcagtgaactcctatgtgagaaacaaacttcaccagaagaattcccataatttaatttaaaaacttatttccactaaaatggctgtttttgggaatgtggctatggacagtgctgtgcagtggtgaccttcagctttgttgctactttctctyagtggtgggagcttaccagaccatttccactcatagctagcagttgtgtgcattcacaccctcttatttggttgtacaggctttctctttgtacctcccaacctgaattagagcacgatgaatcagacagct

SEQ ID NO: 20054 - DNA, 600 bp, Chicken  19866894230179_2
cattctgcctcactaaggaagtgcaatgccctgactccataggtttcattcacttctggatagcttgtctacatcaagcacagagctgcttttccaaactgtactatcactgcaaaataaatagggcctatcyactcagatttttaatcagtgaactcctatgtgagaaacaaacttcaccagaagaattcccataatttaatttaaaaacttatttccactaaaatggctgtttttgggaatgtggctatggacagtgctgtgcagtggtgaccttcagctttgttgctactttctctyagtggtgggagcttaccagaccatttccactcatagctagcagttgtgtgcattcacaccctcttatttggttgtacaggctttctctttgtacctcccaacctgaattagagcacgatgaatcagacagctaagtggcagcccactgctttcctgctgagctcccctcatgcctcatccactgctgaacttccaataaacattttgaagttactgcttctgacatcttatactgaaatattgtctttcagcagaaaagatcagcagtgcttctgcagaacacttgcactggtagctacc

SEQ ID NO: 20055 - DNA, 599 bp, Chicken  19866894230185_1
  misc_feature (1)..(109): n is any nucleotide
nnnnnnnnnnnnnnnnnnnnnnnnnnnnnnnnnnnnnnnnnnnnnnnnnnnnnnnnnnnnnnnnnnnnnnnnnnnnnnnnnnnnnnnnnnnnnnnnnnnnnnnnnnnnntgcctggctttgcgctgtgagtgtgggctgtggacatggcccagctcagtgctgtagagatcctcctgccctgtggtctcagagcaccccggtgtgacacaggccatgggattgcttcacagggattggacagatgggtgcagggcgctgttgagatccaatgcagcaggagagtctgaactagcagagaycttctctaaggccgaggtttgctgtggatgaggtgtgcctgggtttctgcttgctctgaggccacagggytggcagaaccccatctcgtgtcccgttatgccctcctgacctccttaactgagggctgatgccacaggcatgctcacaccgctctgyggccagcactgactttgaagtgcacttggagatggtctgagggagggttgggtggcctgtgcccatcaccaccctgggaccattccaaccagttccagagcctggggacaagggcagggtcactgggaggactggtctggcc

SEQ ID NO: 20056 - DNA, 599 bp, Chicken  19866894230185_2
  misc_feature (1)..(39): n is any nucleotide
nnnnnnnnnnnnnnnnnnnnnnnnnnnnnnnnnnnnnnntgcctggctttgcgctgtgagtgtgggctgtggacatggcccagctcagtgctgtagagatcctcctgccctgtggtctcagagcaccccggtgtgacacaggccatgggattgcttcacagggattggacagatgggtgcagggcgctgttgagatccaatgcagcaggagagtctgaactagcagagaycttctctaaggccgaggtttgctgtggatgaggtgtgcctgggtttctgcttgctctgaggccacagggytggcagaaccccatctcgtgtcccgttatgccctcctgacctccttaactgagggctgatgccacaggcatgctcacaccgctctgyggccagcactgactttgaagtgcacttggagatggtctgagggagggttgggtggcctgtgcccatcaccaccctgggaccattccaaccagttccagagcctggggacaagggcagggtcactgggaggactggtctggccatgtgctctccctgcaacagggcagaagtgctctgcagatgtttagggaaacrgctctaggaaatatctc

SEQ ID NO: 20057 - DNA, 600 bp, Chicken  19866894230185_3
gtgctgtagagatcctcctgccctgtggtctcagagcaccccggtgtgacacaggccatgggattgcttcacagggattggacagatgggtgcagggcgctgttgagatccaatgcagcaggagagtctgaactagcagagaycttctctaaggccgaggtttgctgtggatgaggtgtgcctgggtttctgcttgctctgaggccacagggytggcagaaccccatctcgtgtcccgttatgccctcctgacctccttaactgagggctgatgccacaggcatgctcacaccgctctgyggccagcactgactttgaagtgcacttggagatggtctgagggagggttgggtggcctgtgcccatcaccaccctgggaccattccaaccagttccagagcctggggacaagggcagggtcactgggaggactggtctggccatgtgctctccctgcaacagggcagaagtgctctgcagatgtttagggaaacrgctctaggaaatatctcctagcccctgggctgcaggggggactgagcggttgtcctttgtttttagctaattgtttcgaagctgaaacggcagctgaagtggcat

SEQ ID NO: 20058 - DNA, 432 bp, Chicken  19866894230185_4
gctctgaggccacagggytggcagaaccccatctcgtgtcccgttatgccctcctgacctccttaactgagggctgatgccacaggcatgctcacaccgctctgyggccagcactgactttgaagtgcacttggagatggtctgagggagggttgggtggcctgtgcccatcaccaccctgggaccattccaaccagttccagagcctggggacaagggcagggtcactgggaggactggtctggccatgtgctctccctgcaacagggcagaagtgctctgcagatgtttagggaaacrgctctaggaaatatctcctagcccctgggctgcaggggggactgagcggttgtcctttgtttttagctaattgtttcgaagctgaaacggcagctgaagtggcatatgcatatataatacagagtcagtgag

SEQ ID NO: 20059 - DNA, 600 bp, Chicken  19866894230189_1
aaaaaaggcctgttttgttttgttttttccctgctattgggatgtccacttattttatttcaaagggttctcccttgaagacacatcttccatgaagtaaatgaaatttcttatggactatggaagaggtggcattggattcgtgtgaatatgcttttgcacatgctaacttgggtggaaacaaacactgatcctgacaggaggcagttttatttaccttgaccatttgtgatctttggtattcagccaaggatgagagctgggatgtgtaatttttgtatgttttggcatgctattttsccttgttttagacaaattcctagtcacagcaaccaattttatttttatttttttaagagaatggtgtctatcagcaaggcttagtaaacttccygtcacacagaaattatgtgattcattagagaaggtaaaacataggataagcataatgaaaacagcattttccaggctcaaaagcattctgagggaacactggagtctgtttcctgttcctattcagctcatctaatatctctggatgtattagayactgagaacaaattcagcagggactccaaggagatattcaaaacttgtggt

SEQ ID NO: 20060 - DNA, 600 bp, Chicken  19866894230189_2
aagtaaatgaaatttcttatggactatggaagaggtggcattggattcgtgtgaatatgcttttgcacatgctaacttgggtggaaacaaacactgatcctgacaggaggcagttttatttaccttgaccatttgtgatctttggtattcagccaaggatgagagctgggatgtgtaatttttgtatgttttggcatgctattttsccttgttttagacaaattcctagtcacagcaaccaattttatttttatttttttaagagaatggtgtctatcagcaaggcttagtaaacttccygtcacacagaaattatgtgattcattagagaaggtaaaacataggataagcataatgaaaacagcattttccaggctcaaaagcattctgagggaacactggagtctgtttcctgttcctattcagctcatctaatatctctggatgtattagayactgagaacaaattcagcagggactccaaggagatattcaaaacttgtggtttcccccgcttcccctcagtgctgttcactgcagtgacacaaaaccttgtgcctgaagctaaagaagatcaaaccacayactccaggaggagta

SEQ ID NO: 20061 - DNA, 600 bp, Chicken  19866894230189_3
aggatgagagctgggatgtgtaatttttgtatgttttggcatgctattttsccttgttttagacaaattcctagtcacagcaaccaattttatttttatttttttaagagaatggtgtctatcagcaaggcttagtaaacttccygtcacacagaaattatgtgattcattagagaaggtaaaacataggataagcataatgaaaacagcattttccaggctcaaaagcattctgagggaacactggagtctgtttcctgttcctattcagctcatctaatatctctggatgtattagayactgagaacaaattcagcagggactccaaggagatattcaaaacttgtggtttcccccgcttcccctcagtgctgttcactgcagtgacacaaaaccttgtgcctgaagctaaagaagatcaaaccacayactccaggaggagtatgctgatgtcaccactggcaatattttcatttctcggctttagccaggacacagcagatagttactgttcaaatagacagatttggtaatagatgttctttttgtgcgttccatcatgccttgtaacctgcacgctactacagatgctgaaaagg

SEQ ID NO: 20062 - DNA, 527 bp, Chicken  19866894230189_4
cttagtaaacttccygtcacacagaaattatgtgattcattagagaaggtaaaacataggataagcataatgaaaacagcattttccaggctcaaaagcattctgagggaacactggagtctgtttcctgttcctattcagctcatctaatatctctggatgtattagayactgagaacaaattcagcagggactccaaggagatattcaaaacttgtggtttcccccgcttcccctcagtgctgttcactgcagtgacacaaaaccttgtgcctgaagctaaagaagatcaaaccacayactccaggaggagtatgctgatgtcaccactggcaatattttcatttctcggctttagccaggacacagcagatagttactgttcaaatagacagatttggtaatagatgttctttttgtgcgttccatcatgccttgtaacctgcacgctactacagatgctgaaaaggcagagcctgagcccttattctttcaaaggaatacatcattaattagtagaaatatcc

SEQ ID NO: 20063 - DNA, 600 bp, Chicken  19866894230195_1
tatggaagtgctcggtcagttggcaaggctgagccaagcaaccagagtccagggcgttcaccaaggctgccacggtcaccacgcttgggccatcgtcgaaccaacagcactggaggcagttctggcagtagtactgggggcggcagtgggaaaaccctctctatggaaaatattcagtccttaaatgctgcctatgctacgtctggccctatgtatctaagtgaccatgagaacgtcggtgcagacaccccgaaaagcaccatgactttgggccggtctggggggcggctgccttatggygttaggatgactgcaatgggtagcagccctaacattgccagtagtggagtcgccagtgatactatcgcgtttggagagcaccaccttcctccagtgagtatggcgtccactgtgcctcactcacttcgccaggccagggataacacaatcatggatctgcagacacaacttaaagaagtattaagggaaaatgatctgcttcgcaaggatgtggaagtgaaagaaagcaagctgagctcttccatgaacagcatcaagaccttctggagtcctgagctgaaaaaagaaagagctctgagg

SEQ ID NO: 20064 - DNA, 600 bp, Chicken  19866894230196_1
ataaaataaacaatagctaacagattaaatggggaaagcacgcgggtagggtcaggtaagttattctttccctacttgtcccaaacaactgatttattaaaaagtctttgtaaccgtattattttgcctgcgtactcaaagccagtttttgtatttgactctgctgatttctcctttaatctctccagtagctgaaagggacggcagcaaggctgaaaatttttcacgaggcttttttagagcagacatcccagtgaagggatgagaaaaggctcatcaggctcagcagccagcaacacsacactgcatcacaccaagctgtgactcactgagagcgcacacacgctccccagagggatggcctggagacacctctgcagtaccaattagtgtgaagatccttacgctgtccgtacacaaatatgcacaatcagagtttactgctygaaataccgtttggtgtttgggttttttttttttttttttgctattatcattttagttttaaaataatctatcttcaagtagtcaaacactggtaagtcacaggacagatgtctgcactgggcctctcctgtcctaccaatgacctccagtctg

SEQ ID NO: 20065 - DNA, 600 bp, Chicken  19866894230196_2
ttttgtatttgactctgctgatttctcctttaatctctccagtagctgaaagggacggcagcaaggctgaaaatttttcacgaggcttttttagagcagacatcccagtgaagggatgagaaaaggctcatcaggctcagcagccagcaacacsacactgcatcacaccaagctgtgactcactgagagcgcacacacgctccccagagggatggcctggagacacctctgcagtaccaattagtgtgaagatccttacgctgtccgtacacaaatatgcacaatcagagtttactgctygaaataccgtttggtgtttgggttttttttttttttttttgctattatcattttagttttaaaataatctatcttcaagtagtcaaacactggtaagtcacaggacagatgtctgcactgggcctctcctgtcctaccaatgacctccagtctgacagtttgggattatttactaacagggatttggtgcactgtccagtgggagaactggattgactgaaagacaattacggcggggatgagcagcacaggcttcaggcaagacggcaaagaaagaatctgtcagagatttggattcct

SEQ ID NO: 20066 - DNA, 599 bp, Chicken  19866894230199_1
  misc_feature (1)..(151): n is any nucleotide
nnnnnnnnnnnnnnnnnnnnnnnnnnnnnnnnnnnnnnnnnnnnnnnnnnnnnnnnnnnnnnnnnnnnnnnnnnnnnnnnnnnnnnnnnnnnnnnnnnnnnnnnnnnnnnnnnnnnnnnnnnnnnnnnnnnnnnnnnnnnnnnnnnnnnnnttgaggattgaactgactctctatgttctacttacatttataactccagatctgcgggagaaaaaaaaaaaggcagaggaaaaggattgataaggaattatttacagctttaacatttactggctttttacctaaatgtaacagtgctkcttatagctcaaacaaacagtgctttgagaaggaataattaccagattagtaattggcaaatgaatagcctcgtgtaaataccaagcctacagttctttgcttttgcatcgtgaggtctggtgtcctccttttcagtctgcttgtctttgaactggggtccacagaggcagggagggctgcagggctgctcttggttttgggattccctgtccagcagcttagtgccgtgctgggaacgcttcaaacctgctgaatgtcactaagagaaagtggtctctatgaaatgttgtttcgtttt

SEQ ID NO: 20067 - DNA, 600 bp, Chicken  19866894230201_1
gcttagcaatcaaaaagtccaaacgaggcattcagatgtcttattttaaatgggtttaaaaaaggcaactttagatctctctttcctacagtaaggtcacacatagatgcatcagagagaaatacgttctcctattgactgtcatgggaatccgtcttggtcatgaaatcccttcagtaaataaaggtcagtcccccacatctctctgtttttgattacttcctgcacttgatggtaactactttgccagtttgcacttctagccttccaaaagatcctacactgtgttagaggttaacrtaagctgttacctcacctccttacrctgtcacaaggccatacagtgctgatctttccaaagttagggacaaccagccagaatcagctccgtgtgagatgggaagagttgttcttttccaaaatctgagtaacgtcayccactggagagtgcaaatccataatccattcactggaagccttggcttttccaggctcccattgtgctaccatagacttagctgaccgttacatgcaccctgttcatttcaggcatttcaaggtaatagaagatctcaaatgaatggctctacatggggcatt

SEQ ID NO: 20068 - DNA, 600 bp, Chicken  19866894230201_2
aggcattcagatgtcttattttaaatgggtttaaaaaaggcaactttagatctctctttcctacagtaaggtcacacatagatgcatcagagagaaatacgttctcctattgactgtcatgggaatccgtcttggtcatgaaatcccttcagtaaataaaggtcagtcccccacatctctctgtttttgattacttcctgcacttgatggtaactactttgccagtttgcacttctagccttccaaaagatcctacactgtgttagaggttaacrtaagctgttacctcacctccttacrctgtcacaaggccatacagtgctgatctttccaaagttagggacaaccagccagaatcagctccgtgtgagatgggaagagttgttcttttccaaaatctgagtaacgtcayccactggagagtgcaaatccataatccattcactggaagccttggcttttccaggctcccattgtgctaccatagacttagctgaccgttacatgcaccctgttcatttcaggcatttcaaggtaatagaagatctcaaatgaatggctctacatggggcatttgcacaactccaaaagtaattattt

SEQ ID NO: 20069 - DNA, 600 bp, Chicken  19866894230201_3
actgtcatgggaatccgtcttggtcatgaaatcccttcagtaaataaaggtcagtcccccacatctctctgtttttgattacttcctgcacttgatggtaactactttgccagtttgcacttctagccttccaaaagatcctacactgtgttagaggttaacrtaagctgttacctcacctccttacrctgtcacaaggccatacagtgctgatctttccaaagttagggacaaccagccagaatcagctccgtgtgagatgggaagagttgttcttttccaaaatctgagtaacgtcayccactggagagtgcaaatccataatccattcactggaagccttggcttttccaggctcccattgtgctaccatagacttagctgaccgttacatgcaccctgttcatttcaggcatttcaaggtaatagaagatctcaaatgaatggctctacatggggcatttgcacaactccaaaagtaattatttcaccggagcaaggcccatgcataggctttgttagttttggctcacagtcaggtgtaccaactcacatgaggtgcaatttatgatctgactcttatttggagcaaagccccat

SEQ ID NO: 20070 - DNA, 600 bp, Chicken  19866894230201_4
attgtgctaccatagacttagctgaccgttacatgcaccctgttcatttcaggcatttcaaggtaatagaagatctcaaatgaatggctctacatggggcatttgcacaactccaaaagtaattatttcaccggagcaaggcccatgcataggctttgttagttttggctcacagtcaggtgtaccaactcacatgaggtgcaatttatgatctgactcttatttggagcaaagccccatagactgaaaaacccttcctgtggaaggaaaaaaaaaaaaaaaaaaaagcttcaagttgcscagagaggtggtatatgccctatccttggagaaactcaaggtcaggctggacagggctctgagcatctgatagagctgtagatgtccctgttcactgcatggagctggaccagatgagctttaaagatcccttcctactgaagtagttctatgattctgagttgattgagatgctgagaatcaggaggttcagcagcacaattctttatttaatgagtgagggcttcttgccacataggcacactccaaacacatttcagtgcacactgatgtgaaaaatagcttactttggggacagta

SEQ ID NO: 20071 - DNA, 600 bp, Chicken  19866894230202_1
aaatacacaaccaatactgcaaggaaggacttctcactgcaggctgattgtgcagcatgacagcacactcaataaattgtattgtagcaccagctagtggtaagaattaatgaaggcataaaaagaggaaaaataacaaatgtgtttgcaaaagaaaagcttcagattacatgtagcctcctatccaaactttttctcatgtttaaaatactttcaaaacaaagttccatatgagtttcactcagcatgcctaaaccatccaaaaagcattttcattgatgcagctgctaaaagttagawgtggtatgaacaacaaccaagcactttttctacacttacagctacttcatcctcagagccagcctgtcactgacaaatgctattcagccaaaacaaaaaataaatactattgttatgttttctcttccatggagcatcaccagcattctctctcagcataaacttactgaaacaagaaatatttaagtgattaattcagctgtaaaactcacgatcgttcattttctggacccaaacctacagcataggaattagtttacagagatagttccaaaaaaatgaatctagtttgcagtggat

SEQ ID NO: 20072 - DNA, 600 bp, Chicken  19866894230204_1
attctttagcaccatttctgcttaaagatgaagagaaaccggttagcaattctctgtgttacagctgtaatgaatctctggagtttgaactgtccagccttgattaacctcagtagaggtacaacttctacaagcttcaggtctactcctttttaaacaacatctatcatgagaaagcttcagatcaaagctgcaagaaggacagcaatgtggtgctaagtgttaactattcctcaagaagcgcagaatgcaactttctgtagtaatttatatcctagcagtaccacagctacactcttrgcttggtaagaaaagcaaattcctgattttgtgagtatcctgcataaatacaagtaagaccgatgttaaaaaggcttagccatgctcacgctactatgaggaacaagtcaacattagcataaggctatgttttattcgtagtgtatgagaaaaagactcaaacaaaatgaaagaaattatacagacacagaggagtttacactgaataccctctatgagcgcactctatggttcttgagcaccggtcaactgcagcagaactaaaactcaaccaaaatttagcactgttgggtagggact

SEQ ID NO: 20073 - DNA, 600 bp, Chicken  19866894230210_1
aggagagggaaagagaataaaagagaaaaataagaaagaagtactgtagtctactgaaaataaacacatgtaggttgaacattaatggttttccatgttcattctttcagattaccaagcaatatcccatgcagctctgccatgcttctgcatgctgcaaaaaagtggagctctgaaaagcaagctgaacatgaataaccattgtagtatttgaccctttcaaacgtctttccacatgagctgcagtgaaatacttcaacctcttaactaaatgctcaagatgtaaactaaaaaaaaatrtaataaaaaacaactcaaaccacccacttgtttttctgcttcaagtgtgtatcgatacacttttcaaaatgcrtgtttctgaagcmcctcaatgtacacatgtgaagggaagatgctgcacagcccatctcactatgcctcgatgctttcattgctttgagcacaggcctattcagttcttcatgtccaattctgtttttagattacagaataggtcctcggagctcccaccrtgcsagggaaaactgtatgcacctgatgcattgacartatgtttagaagaataaaaagacagtagtg

SEQ ID NO: 20074 - DNA, 600 bp, Chicken  19866894230210_2
gttgaacattaatggttttccatgttcattctttcagattaccaagcaatatcccatgcagctctgccatgcttctgcatgctgcaaaaaagtggagctctgaaaagcaagctgaacatgaataaccattgtagtatttgaccctttcaaacgtctttccacatgagctgcagtgaaatacttcaacctcttaactaaatgctcaagatgtaaactaaaaaaaaatrtaataaaaaacaactcaaaccacccacttgtttttctgcttcaagtgtgtatcgatacacttttcaaaatgcrtgtttctgaagcmcctcaatgtacacatgtgaagggaagatgctgcacagcccatctcactatgcctcgatgctttcattgctttgagcacaggcctattcagttcttcatgtccaattctgtttttagattacagaataggtcctcggagctcccaccrtgcsagggaaaactgtatgcacctgatgcattgacartatgtttagaagaataaaaagacagtagtgctatggacgtttcccaaggttcaggaacagttctgtattttggcccaactgaaaacgttttaccaaaagcaaa

SEQ ID NO: 20075 - DNA, 600 bp, Chicken  19866894230210_3
ggttttccatgttcattctttcagattaccaagcaatatcccatgcagctctgccatgcttctgcatgctgcaaaaaagtggagctctgaaaagcaagctgaacatgaataaccattgtagtatttgaccctttcaaacgtctttccacatgagctgcagtgaaatacttcaacctcttaactaaatgctcaagatgtaaactaaaaaaaaatrtaataaaaaacaactcaaaccacccacttgtttttctgcttcaagtgtgtatcgatacacttttcaaaatgcrtgtttctgaagcmcctcaatgtacacatgtgaagggaagatgctgcacagcccatctcactatgcctcgatgctttcattgctttgagcacaggcctattcagttcttcatgtccaattctgtttttagattacagaataggtcctcggagctcccaccrtgcsagggaaaactgtatgcacctgatgcattgacartatgtttagaagaataaaaagacagtagtgctatggacgtttcccaaggttcaggaacagttctgtattttggcccaactgaaaacgttttaccaaaagcaaaacagaaggcctgc

SEQ ID NO: 20076 - DNA, 600 bp, Chicken  19866894230210_4
acatgagctgcagtgaaatacttcaacctcttaactaaatgctcaagatgtaaactaaaaaaaaatrtaataaaaaacaactcaaaccacccacttgtttttctgcttcaagtgtgtatcgatacacttttcaaaatgcrtgtttctgaagcmcctcaatgtacacatgtgaagggaagatgctgcacagcccatctcactatgcctcgatgctttcattgctttgagcacaggcctattcagttcttcatgtccaattctgtttttagattacagaataggtcctcggagctcccaccrtgcsagggaaaactgtatgcacctgatgcattgacartatgtttagaagaataaaaagacagtagtgctatggacgtttcccaaggttcaggaacagttctgtattttggcccaactgaaaacgttttaccaaaagcaaaacagaaggcctgcaccacctcttgaaatgtttgtattcaagactgaaccaagccttactttttacaacaattacatacatcaaattaggtccaggttaaatgaaaaaaggtgttttctcaatgctctagaaataatctgtaactcttccttctcctacat

SEQ ID NO: 20077 - DNA, 600 bp, Chicken  19866894230210_5
gagctgcagtgaaatacttcaacctcttaactaaatgctcaagatgtaaactaaaaaaaaatrtaataaaaaacaactcaaaccacccacttgtttttctgcttcaagtgtgtatcgatacacttttcaaaatgcrtgtttctgaagcmcctcaatgtacacatgtgaagggaagatgctgcacagcccatctcactatgcctcgatgctttcattgctttgagcacaggcctattcagttcttcatgtccaattctgtttttagattacagaataggtcctcggagctcccaccrtgcsagggaaaactgtatgcacctgatgcattgacartatgtttagaagaataaaaagacagtagtgctatggacgtttcccaaggttcaggaacagttctgtattttggcccaactgaaaacgttttaccaaaagcaaaacagaaggcctgcaccacctcttgaaatgtttgtattcaagactgaaccaagccttactttttacaacaattacatacatcaaattaggtccaggttaaatgaaaaaaggtgttttctcaatgctctagaaataatctgtaactcttccttctcctacataaag

SEQ ID NO: 20078 - DNA, 600 bp, Chicken  19866894230210_6
aatgctcaagatgtaaactaaaaaaaaatrtaataaaaaacaactcaaaccacccacttgtttttctgcttcaagtgtgtatcgatacacttttcaaaatgcrtgtttctgaagcmcctcaatgtacacatgtgaagggaagatgctgcacagcccatctcactatgcctcgatgctttcattgctttgagcacaggcctattcagttcttcatgtccaattctgtttttagattacagaataggtcctcggagctcccaccrtgcsagggaaaactgtatgcacctgatgcattgacartatgtttagaagaataaaaagacagtagtgctatggacgtttcccaaggttcaggaacagttctgtattttggcccaactgaaaacgttttaccaaaagcaaaacagaaggcctgcaccacctcttgaaatgtttgtattcaagactgaaccaagccttactttttacaacaattacatacatcaaattaggtccaggttaaatgaaaaaaggtgttttctcaatgctctagaaataatctgtaactcttccttctcctacataaagcatccaggtcagctcatcctgtccaggtcaaaa

SEQ ID NO: 20079 - DNA, 599 bp, Chicken  19866894230214_1
  misc_feature (1)..(124): n is any nucleotide
nnnnnnnnnnnnnnnnnnnnnnnnnnnnnnnnnnnnnnnnnnnnnnnnnnnnnnnnnnnnnnnnnnnnnnnnnnnnnnnnnnnnnnnnnnnnnnnnnnnnnnnnnnnnnnnnnnnnnnnnnnnnaaaagatataggaccaatttaatgctgtgtgccagcattcatgtgtatgcaggtgtctctgagtctacataaggaccatcttgcaaggttgaaaattcacaacctgttgtgccattacccacaagatgctcagtgcacccagacctgccaaattgcacttatgcaacttctcaatrcgaaaaatagagtctcccatcacccaatctccatcagaaggaactgccatagaagagaacctgagcagtgaagtgaaattcaacccaaatygactatgtggcaatacaagctataaattgtggttattctgaccagtgcctgggcattatccagctgcctatcatcattctctttgattaaaacatcctgtgctaattccatttccaaagcccaagtttatttacacataatcaaattaattcaattcccatggtcattaatttattcccatctcctggatgaaaacacatccttaaaa

SEQ ID NO: 20080 - DNA, 599 bp, Chicken  19866894230214_2
  misc_feature (1)..(33): n is any nucleotide
nnnnnnnnnnnnnnnnnnnnnnnnnnnnnnnnnaaaagatataggaccaatttaatgctgtgtgccagcattcatgtgtatgcaggtgtctctgagtctacataaggaccatcttgcaaggttgaaaattcacaacctgttgtgccattacccacaagatgctcagtgcacccagacctgccaaattgcacttatgcaacttctcaatrcgaaaaatagagtctcccatcacccaatctccatcagaaggaactgccatagaagagaacctgagcagtgaagtgaaattcaacccaaatygactatgtggcaatacaagctataaattgtggttattctgaccagtgcctgggcattatccagctgcctatcatcattctctttgattaaaacatcctgtgctaattccatttccaaagcccaagtttatttacacataatcaaattaattcaattcccatggtcattaatttattcccatctcctggatgaaaacacatccttaaaatctgacaccaaagtgtgtctggtgaggatgtggcaccttgggaaaatcctgaggagtaggaaaagtggaataaatcatgttgttctcttca

SEQ ID NO: 20081 - DNA, 600 bp, Chicken  19866894230216_1
agagactttcaacattgacatggtctttggcatgccatcatcataagccccacaaggaaatacagccacgggaaaacatttgttaactaaatttacaagcagatggaaagtcatctttcagcagttatcaatgtttcactgttagattagatgtactgacaatgtatcaacagtagtttccaagcctaacgagcttcaggatacatacagcatttgcatttcctccaacttgcatgcacctcagttgaaaccaagaccaattggaatccagttctgtagatctaaagagagggaaacacrtttagtgtataacaygtataatatttaaaatctacycttttctgtgtacagartctctcacacaaattactttggggaagtgtgaggcaacgactatcagaagaattctaatcgttatagtactatgatcatcaggaatggattcttgaaagaccttttgtaacattctcatatacagtgacaaagcaacagaggaagaatattgagtttaagattttagctgatggaaaacacttgtttttaagtacaatccatccttaaatgcattgttctcatatacgtcaaacagtagcttccatt

SEQ ID NO: 20082 - DNA, 600 bp, Chicken  19866894230216_2
tgacatggtctttggcatgccatcatcataagccccacaaggaaatacagccacgggaaaacatttgttaactaaatttacaagcagatggaaagtcatctttcagcagttatcaatgtttcactgttagattagatgtactgacaatgtatcaacagtagtttccaagcctaacgagcttcaggatacatacagcatttgcatttcctccaacttgcatgcacctcagttgaaaccaagaccaattggaatccagttctgtagatctaaagagagggaaacacrtttagtgtataacaygtataatatttaaaatctacycttttctgtgtacagartctctcacacaaattactttggggaagtgtgaggcaacgactatcagaagaattctaatcgttatagtactatgatcatcaggaatggattcttgaaagaccttttgtaacattctcatatacagtgacaaagcaacagaggaagaatattgagtttaagattttagctgatggaaaacacttgtttttaagtacaatccatccttaaatgcattgttctcatatacgtcaaacagtagcttccatttctaatatttcaaat

SEQ ID NO: 20083 - DNA, 581 bp, Chicken  19866894230216_3
atcatcataagccccacaaggaaatacagccacgggaaaacatttgttaactaaatttacaagcagatggaaagtcatctttcagcagttatcaatgtttcactgttagattagatgtactgacaatgtatcaacagtagtttccaagcctaacgagcttcaggatacatacagcatttgcatttcctccaacttgcatgcacctcagttgaaaccaagaccaattggaatccagttctgtagatctaaagagagggaaacacrtttagtgtataacaygtataatatttaaaatctacycttttctgtgtacagartctctcacacaaattactttggggaagtgtgaggcaacgactatcagaagaattctaatcgttatagtactatgatcatcaggaatggattcttgaaagaccttttgtaacattctcatatacagtgacaaagcaacagaggaagaatattgagtttaagattttagctgatggaaaacacttgtttttaagtacaatccatccttaaatgcattgttctcatatacgtcaaacagtagcttccatttctaatatttcaaatgc

SEQ ID NO: 20084 - DNA, 564 bp, Chicken  19866894230216_4
aaggaaatacagccacgggaaaacatttgttaactaaatttacaagcagatggaaagtcatctttcagcagttatcaatgtttcactgttagattagatgtactgacaatgtatcaacagtagtttccaagcctaacgagcttcaggatacatacagcatttgcatttcctccaacttgcatgcacctcagttgaaaccaagaccaattggaatccagttctgtagatctaaagagagggaaacacrtttagtgtataacaygtataatatttaaaatctacycttttctgtgtacagartctctcacacaaattactttggggaagtgtgaggcaacgactatcagaagaattctaatcgttatagtactatgatcatcaggaatggattcttgaaagaccttttgtaacattctcatatacagtgacaaagcaacagaggaagaatattgagtttaagattttagctgatggaaaacacttgtttttaagtacaatccatccttaaatgcattgttctcatatacgtcaaacagtagcttccatttctaatatttcaaatgc

SEQ ID NO: 20085 - DNA, 600 bp, Chicken  19866894230220_1
tctggaaatcctaagcctgataaacttaactctcagggattaaaaaagaaaaaagaaaaaaggaagaaaaaaaagaaaaaggtttttggaaaattatgaggaccactgctgctcttgcagttatcacagcttgtgaataacatctgtgcatctctgtcattcatgactcactgacttcagagggtcaagatactgctcagattatccagggtgccattttgccttacagaagagagtacttagtttcttcactctttagaactggatactacctctaaattgcctgctgaaaagcaacaytgcttgtgcagactttgaaaaatgttttacagaagagttcattctttcttattttacttgactcttagactgtgtcatttaaggcattatgcattaaatgcaatgtattattgctcacacaaaatattgttgattgagctctgttcaaaactataatrgcttaatatatcctatttaatacttctttttagacataggaagtagaatgaaatggttgccattcttccccccatgagtcaggcaggggggtagtcccagatatgcatacaaactgggagaaagaagtccttgagagccacc

SEQ ID NO: 20086 - DNA, 550 bp, Chicken  19866894230220_2
attcatgactcactgacttcagagggtcaagatactgctcagattatccagggtgccattttgccttacagaagagagtacttagtttcttcactctttagaactggatactacctctaaattgcctgctgaaaagcaacaytgcttgtgcagactttgaaaaatgttttacagaagagttcattctttcttattttacttgactcttagactgtgtcatttaaggcattatgcattaaatgcaatgtattattgctcacacaaaatattgttgattgagctctgttcaaaactataatrgcttaatatatcctatttaatacttctttttagacataggaagtagaatgaaatggttgccattcttccccccatgagtcaggcaggggggtagtcccagatatgcatacaaactgggagaaagaagtccttgagagccaccacactgagaaggactttgggatcatggttgatgaaaaacttaacatgaaccagaagtgtgcatttgtggcctggaaggctgcatcaaaagaggtatggctaacaggga

SEQ ID NO: 20087 - DNA, 596 bp, Chicken  19866894230221_1
taaccccccggctgttttaataacgcctcccgcagaccccaggccctgtgtctttgctctccctgtagctctgtgctggggcagtgagaagaggctctgcacagaactgctccttgcacacagccatgtctgccgcacacccggtgcctcaaggagggggaagatgggaaactgtgtaggctgccctgtgggactgggggtccctgccttactgaagcaccccccaggtctgcagatgggtctgtggctgagtgtccccatggtcagggtgccacaagggctgtgggtgccccagcacarcacagmcaccccacaacycctgcccacagcggggctgggagaatggctacaaccatcctcaaagcatcatggaacagygaagagagatgacatcggatccagtttccatggcaacragagaggctccttaaccagttggttgccatagcgacttccatggagcccggctgcctgaggacacaggggggctctctccagggatgccccttcacaccccaagtcagataccccccacaccgccacctgcccccacttggccccgagctgccaacccacagcctgcggagcgggggtcg

SEQ ID NO: 20088 - DNA, 590 bp, Chicken  19866894230221_2
cccggctgttttaataacgcctcccgcagaccccaggccctgtgtctttgctctccctgtagctctgtgctggggcagtgagaagaggctctgcacagaactgctccttgcacacagccatgtctgccgcacacccggtgcctcaaggagggggaagatgggaaactgtgtaggctgccctgtgggactgggggtccctgccttactgaagcaccccccaggtctgcagatgggtctgtggctgagtgtccccatggtcagggtgccacaagggctgtgggtgccccagcacarcacagmcaccccacaacycctgcccacagcggggctgggagaatggctacaaccatcctcaaagcatcatggaacagygaagagagatgacatcggatccagtttccatggcaacragagaggctccttaaccagttggttgccatagcgacttccatggagcccggctgcctgaggacacaggggggctctctccagggatgccccttcacaccccaagtcagataccccccacaccgccacctgcccccacttggccccgagctgccaacccacagcctgcggagcgggggtcg

SEQ ID NO: 20089 - DNA, 578 bp, Chicken  19866894230221_3
aataacgcctcccgcagaccccaggccctgtgtctttgctctccctgtagctctgtgctggggcagtgagaagaggctctgcacagaactgctccttgcacacagccatgtctgccgcacacccggtgcctcaaggagggggaagatgggaaactgtgtaggctgccctgtgggactgggggtccctgccttactgaagcaccccccaggtctgcagatgggtctgtggctgagtgtccccatggtcagggtgccacaagggctgtgggtgccccagcacarcacagmcaccccacaacycctgcccacagcggggctgggagaatggctacaaccatcctcaaagcatcatggaacagygaagagagatgacatcggatccagtttccatggcaacragagaggctccttaaccagttggttgccatagcgacttccatggagcccggctgcctgaggacacaggggggctctctccagggatgccccttcacaccccaagtcagataccccccacaccgccacctgcccccacttggccccgagctgccaacccacagcctgcggagcgggggtcg

SEQ ID NO: 20090 - DNA, 518 bp, Chicken  19866894230221_4
gggcagtgagaagaggctctgcacagaactgctccttgcacacagccatgtctgccgcacacccggtgcctcaaggagggggaagatgggaaactgtgtaggctgccctgtgggactgggggtccctgccttactgaagcaccccccaggtctgcagatgggtctgtggctgagtgtccccatggtcagggtgccacaagggctgtgggtgccccagcacarcacagmcaccccacaacycctgcccacagcggggctgggagaatggctacaaccatcctcaaagcatcatggaacagygaagagagatgacatcggatccagtttccatggcaacragagaggctccttaaccagttggttgccatagcgacttccatggagcccggctgcctgaggacacaggggggctctctccagggatgccccttcacaccccaagtcagataccccccacaccgccacctgcccccacttggccccgagctgccaacccacagcctgcggagcgggggtcg

SEQ ID NO: 20091 - DNA, 480 bp, Chicken  19866894230221_5
cacacagccatgtctgccgcacacccggtgcctcaaggagggggaagatgggaaactgtgtaggctgccctgtgggactgggggtccctgccttactgaagcaccccccaggtctgcagatgggtctgtggctgagtgtccccatggtcagggtgccacaagggctgtgggtgccccagcacarcacagmcaccccacaacycctgcccacagcggggctgggagaatggctacaaccatcctcaaagcatcatggaacagygaagagagatgacatcggatccagtttccatggcaacragagaggctccttaaccagttggttgccatagcgacttccatggagcccggctgcctgaggacacaggggggctctctccagggatgccccttcacaccccaagtcagataccccccacaccgccacctgcccccacttggccccgagctgccaacccacagcctgcggagcgggggtcg

SEQ ID NO: 20092 - DNA, 600 bp, Chicken  19866894230222_1
caagcatacttcatgttgattatatttcttctacagagacataaaagaaaaatgcaagaagtgagaagttatggtctgatagtccttaaacatcagtatatgtggtattttggaatcttgcccttggtacccaaatgaagtgtgtactttgcatgtaaacacttctttattctcccacttgcagttctaaaacagtacatgctaggtcttcctccaagatcaggcactgataatattgtagcacccctaatttgtctggagcccagcagacaccaataggagtaacttggttctgctctktcaggatttttgtttccccatctcttaccctcatctctcttccctggctattatggtcttacttacatctcattatcttataatattagggctcaatacctaataaagcaygattatttaaaaggattgataaaatattcacctctgccacctcatgggcttttatctcctttctaatccaagtattttttttcttcattgcttatgcctctttatttctctttcactttgttatgatctctacagctctgttgactctatggcagttcatttaactctgacattttgggggcatggttt

SEQ ID NO: 20093 - DNA, 600 bp, Chicken  19866894230222_2
ggaatcttgcccttggtacccaaatgaagtgtgtactttgcatgtaaacacttctttattctcccacttgcagttctaaaacagtacatgctaggtcttcctccaagatcaggcactgataatattgtagcacccctaatttgtctggagcccagcagacaccaataggagtaacttggttctgctctktcaggatttttgtttccccatctcttaccctcatctctcttccctggctattatggtcttacttacatctcattatcttataatattagggctcaatacctaataaagcaygattatttaaaaggattgataaaatattcacctctgccacctcatgggcttttatctcctttctaatccaagtattttttttcttcattgcttatgcctctttatttctctttcactttgttatgatctctacagctctgttgactctatggcagttcatttaactctgacattttgggggcatggtttgcatgaaaggaaatacaaaacaaaaactaaatatcagcttcagaggttgagttctgaaaaactctcccgaagcaacatactgacagcaataatgatagtaattcttacatc

SEQ ID NO: 20094 - DNA, 600 bp, Chicken  19866894230228_1
cccgggaaaggctccgaccacccactggaggagctgctcactcgcagctgcctccgggcgccgtcccctcccgcccagggcccgcagccggtagggggacacctcacccaggatccccacgttgtcgtagaccccgaacaaggcccgtttctccgtccaccgatccaccttctgaggcttcgggggctccctaacgcgaaagttgcggggcagcccggccaggggggaggtgatgggcagggggcggtagggctcgtggcgctgccccccaccgctgacgctccgcactgcctgcggcarggccrcgacccgrcgcatcaaaccccgcaccagcgccgccatcttggcggcgactcggatgaaccggaaggaggcgggcggtgccgcgctaacggtcgctgagggaagggaaccgacgattggtcgaggccctggagggccgcggcgctgccgggcgctgataggccgggagaggaaatcgtgtggggcgagcgtgatccgcgcgcgcggtttcgagcgcctgtgaaggtggcgccgtgcggggctatggcggcggcgcagtgcgagttccagttgcccctcgctgctgacgacctgctg

SEQ ID NO: 20095 - DNA, 600 bp, Chicken  19866894230228_2
gaaaggctccgaccacccactggaggagctgctcactcgcagctgcctccgggcgccgtcccctcccgcccagggcccgcagccggtagggggacacctcacccaggatccccacgttgtcgtagaccccgaacaaggcccgtttctccgtccaccgatccaccttctgaggcttcgggggctccctaacgcgaaagttgcggggcagcccggccaggggggaggtgatgggcagggggcggtagggctcgtggcgctgccccccaccgctgacgctccgcactgcctgcggcarggccrcgacccgrcgcatcaaaccccgcaccagcgccgccatcttggcggcgactcggatgaaccggaaggaggcgggcggtgccgcgctaacggtcgctgagggaagggaaccgacgattggtcgaggccctggagggccgcggcgctgccgggcgctgataggccgggagaggaaatcgtgtggggcgagcgtgatccgcgcgcgcggtttcgagcgcctgtgaaggtggcgccgtgcggggctatggcggcggcgcagtgcgagttccagttgcccctcgctgctgacgacctgctgcgggg

SEQ ID NO: 20096 - DNA, 600 bp, Chicken  19866894230228_3
ccgaccacccactggaggagctgctcactcgcagctgcctccgggcgccgtcccctcccgcccagggcccgcagccggtagggggacacctcacccaggatccccacgttgtcgtagaccccgaacaaggcccgtttctccgtccaccgatccaccttctgaggcttcgggggctccctaacgcgaaagttgcggggcagcccggccaggggggaggtgatgggcagggggcggtagggctcgtggcgctgccccccaccgctgacgctccgcactgcctgcggcarggccrcgacccgrcgcatcaaaccccgcaccagcgccgccatcttggcggcgactcggatgaaccggaaggaggcgggcggtgccgcgctaacggtcgctgagggaagggaaccgacgattggtcgaggccctggagggccgcggcgctgccgggcgctgataggccgggagaggaaatcgtgtggggcgagcgtgatccgcgcgcgcggtttcgagcgcctgtgaaggtggcgccgtgcggggctatggcggcggcgcagtgcgagttccagttgcccctcgctgctgacgacctgctgcggggcgacagct

SEQ ID NO: 20097 - DNA, 600 bp, Chicken  19866894230230_1
taaagaaatcagaagaaatattatgattctgcattttccttttttcccctgatactgatttatggtatctaacgaccattttaaaagtgttctgtgcaatccttatgtgtcatggaaaaaaattcttttactgataaaacttaaaggccctgtggaagataaacttaagcaacaaatataataaaaagaatatattcgtgaaaaaaaatgttggttgatgcgttttatttattctgatttttttctgagctcattaaagtaaatgtagcactccttacatcggaaagttaacccaaggartaataaaagtgaaaaatgatgcacaaattgatatatgcacctatcatggagattaacatattctcattttacctacacagaatacctaggtttgcatgctctctggcagatgtgatcatcataaatcaaatattcaccattgtcgtctacctgatttcatcttacctcctccagatgttcgctgtctatactttaaaagcacattatggatcattatccccttttcaaccagaaatatcattacctgtatatgtaccgtgattacagttaaagtctggtcatacaaagcactgagtaacc

SEQ ID NO: 20098 - DNA, 600 bp, Chicken  19866894230236_1
tagatgtgataatgcccacgaccaataacacagtacttcatttttacatattagttataataactatggcatttatgttagtacaatgttcccatttcttaagctttcagaattatattttttctaaatgcatttgcatttaatcttataacacaattgtattttaaaaaatactttttgtacttctggcattaaaaaattactcttcaaaaattactatgccatgcaatggtatttctgtgctgaggtagtgcaagcaaaaacataagcaagttttaggtgtacagtaagctttttttwaaaaattattattttttttgtaatggttttttagcagttttgtatttattacctcatttttaatcttttgtagaacctctcaaataagagatgtttgaaaaaagtttcatggctttacactagttatgatttaaaaatactggacaaaaatcctcataaagaaaataagatataaaaaatataacataaagtacagaagtaaattgttctgacggcactcatttgaaaagtagtattttctgtagcctgttccacgatacaatttgcaatgtaattcctacctcacactgccctattaga

SEQ ID NO: 20099 - DNA, 544 bp, Chicken  19866894230236_2
aaaaatataacataaagtacagaagtaaattgttctgacggcactcatttgaaaagtagtattttctgtagcctgttccacgatacaatttgcaatgtaattcctacctcacactgccctattagagatttaatgtgaagggaataaatatgtcccaccttattgtccttcatttacatattacagtgtagattcatgcgcagtacttatgcacgcatatatattcaccaatgcaatggctgacctactaagaagggctttaaaataaggatgttgggggacagagagaacaaccagcakttctgtcggggagtgacagccgggatcaataagcaaagggtgatgtgatgggggaggaacacacaactttctcaaaacaggaatttagcaggctcagctccagaactcatgcgcaagaaaggaaatgccaacaaggcaccataatggagaaatcctccaaaaattttataagaattcattatgccagaggtgcctctctgaagggcctgtacactaatgcatgcactatggggaataaacatga

SEQ ID NO: 20100 - DNA, 480 bp, Chicken  19866894230248_1
agccattaggaaccctgaagtgccagcgtgtacttttcacagataactccacttctaagaacatgtttccaggagaaaaccgataatttataccagccccagtggtcacaaagcctaattcacaaatatccagagacattcccagggctctcactctgctcaagggctcactgcatgcactgggcctgtcgtgctgctcctgtgtccttccccacactttgccacatacctccaggctctccaccatcctatcccacctctcccacgtcctctcgtcctctctttatctgctgcactgawtctttccttgcttggccatcagcatgtttaaataatctcataccttcactcaattcaggccctcagtgagtcatttattaaacaactgagagacagttcaggtgacccagatgaacttcattaacacagcacaaataattcaaggtttctaacagaagaaggaagccctggacactctca

SEQ ID NO: 20101 - DNA, 600 bp, Chicken  19866894230252_1
aggatatttgttcttttacagtgtacactttcactaaatggctgcaatgttttgtgccttctgtcaggtggtgaatgagatgttctatgaaccctttaaacaaagcatctgttgcacaattgattttgatgaggtagggttcaagtggttctctccatcctgctgtgtatgaccgtaacattaaaataaatgatagatttttttactctcagcaaagcaactttattgccaatatgtcacttataatggaaacaacagtcaaacacatttttcccattgttctttacccatcttcttccrccttgatcatgggagattagctaaacactgccttcttgtactttttttccttctgagatgagcaaataaaagtccctgttgttgtcactacatcagatccctccatgatgaatcaatacttctctgcgagcttgtcacaggaggacagcagcaatctgaatttagattatagagctctcaggagagagacgtttcaaaataaaccaaaacaaaacagaactgcataataactgcttcccttgacagctggtgtttaaaaatattattaatcctctttatgatgtaatatcctaacaataa

SEQ ID NO: 20102 - DNA, 600 bp, Chicken  19866894230253_1
cacatagtcaaaacagacaggacactcaaagagactagccaagtcattattggaagctgtagtgcccgtcagcgcaggcaccctctgtgatggcgtacactttgaagtacctgtaggtagtgctgtagcagtctgacggctcatttctgtaagagaagagaaaaaagaatgaggatactgcagagattatatctaaacacattttattttattctgcgtactatatttcttgatgatgaaaaaaacaaaaataaattagacaaaaagaagcgaaacccaaacatacaatgcaactgtgcrtactttacaygtagaattccaactatgctccagagaacagacactggtatgacacatctaaaaaggaaagacgttctgctaactgttctaaactggaattaacctattggaagctgcagggtaaatgtgtaaagaagtactaaatgtaactgaaatcttcaaagatttttgttgttttgctggttgttgctgttgtttcctttaatagtgcacttacaaaacattccgtcaggtggttgtaacaactgggcatgctacataacaaatctaaagctgagtttaagctttatgtagaagaaa

SEQ ID NO: 20103 - DNA, 600 bp, Chicken  19866894230253_2
aaacagacaggacactcaaagagactagccaagtcattattggaagctgtagtgcccgtcagcgcaggcaccctctgtgatggcgtacactttgaagtacctgtaggtagtgctgtagcagtctgacggctcatttctgtaagagaagagaaaaaagaatgaggatactgcagagattatatctaaacacattttattttattctgcgtactatatttcttgatgatgaaaaaaacaaaaataaattagacaaaaagaagcgaaacccaaacatacaatgcaactgtgcrtactttacaygtagaattccaactatgctccagagaacagacactggtatgacacatctaaaaaggaaagacgttctgctaactgttctaaactggaattaacctattggaagctgcagggtaaatgtgtaaagaagtactaaatgtaactgaaatcttcaaagatttttgttgttttgctggttgttgctgttgtttcctttaatagtgcacttacaaaacattccgtcaggtggttgtaacaactgggcatgctacataacaaatctaaagctgagtttaagctttatgtagaagaaaccagccattt

SEQ ID NO: 20104 - DNA, 401 bp, Chicken  19866894230253_3
acactggtatgacacatctaaaaaggaaagacgttctgctaactgttctaaactggaattaacctattggaagctgcagggtaaatgtgtaaagaagtactaaatgtaactgaaatcttcaaagatttttgttgttttgctggttgttgctgttgtttcctttaatagtgcacttacaaaacattccgtcaggtggttgtaacaactgggcatgctacataacaaatctaaagctgagtttaagctttatgtagaagaaaccagccatttgaaatgaaagaagaaaaaaaagcttgaatygtatctactgtgatcatatctgctgtatctggacaattgaaaaacaacaacaaaccaccagtaacaaggaaaaacacagctaagaagattattacacaact

SEQ ID NO: 20105 - DNA, 600 bp, Chicken  19866894230256_1
tttgcccccatttaattttcttaagcaaagtctatagacagatatatctcttaggaccaggtctttattatttctcatttagaacattctgctgcctacaatgggcaccattaaaaattcagcatttgccctcatcggtaattactctgaataggaaatagcatgctattgtatagcaggatacagtggttacaagaagactaagagcatggcatggtactcctctatgtatacttttaataatggtagttctgaatctgcctttagtctgtattttctatcttgtacactttcataacwggggatgcaaatgcagacaggcaatttcttttggctttaatgggcttttcccaggaaaacagaacttcttacatcgtgtaagcttagcttgcagtaggtgcattaacagggtcagtaaaggtgttacgtctacagagtgcataagaatgaagttctaaaattctctaataggcagaaaactttcgggtgttatgaatggagatttatcttgatgagcataaatacatttcagaaagaacttactgtgtgatttatgtgtcaggagaacaaaagagctggtatgcaagcaaaagcacgttt

SEQ ID NO: 20106 - DNA, 600 bp, Chicken  19866894230256_2
ggaaaacagaacttcttacatcgtgtaagcttagcttgcagtaggtgcattaacagggtcagtaaaggtgttacgtctacagagtgcataagaatgaagttctaaaattctctaataggcagaaaactttcgggtgttatgaatggagatttatcttgatgagcataaatacatttcagaaagaacttactgtgtgatttatgtgtcaggagaacaaaagagctggtatgcaagcaaaagcacgttttgggagagggttggtttgctctttactggttgtttcttttaaggaagtttttkcaccttatattgtagaggaactgttctgctcaaacagagaaggcagatctgcatatgcatttcaaacttaggattgtacatagtggaatggatggcagaagaacttaagcattgaaaatacagacttgctaacttgaaatccaataccaaaattagatttgtaactgtgtaaggagtacattgaagtactggtaactgagatccttcaggtatgcaggattttgaaacgacaagaatggtgctgtttgtacaccacgtatctgaccatgttcctgccagagagcaaaaaaagtctactga

SEQ ID NO: 20107 - DNA, 600 bp, Chicken  19866894230258_1
atatttactgaaataaacctctgaatctttgggggtttgaacgagtcctggaaactgggagcatgcaacgctctataaagaacagaccctgaattttaataaaagcccccagagtttaacaagcaaagctctgaggccaagatgttcaaatttgactctcaaagcttgctgccagtggggaatgtttatgttctgctctgggtatgttggagcacttttggagaagaggtggcttctggctgaggttccctcttgagagaaggagaggagtcctttccctccccatacacccactacctrctaggagttagtcagacatcaggtctgggcacagaaagcaatgaggtcagctggcagcagacaggggatttcaccaggaggaggtccatgtcagcaagtggtggtgtagtatttgggaacaaggaagaaacacactgcaaatcttgcatacacactcatatctctgtgtgtatatgtaagtatatatacacacatacatatstaactcacctgtcctgacttttggatctacatagttttgcacaatttaattatctggcttaagctatcctccctatcagagttgagcactgatgatac

SEQ ID NO: 20108 - DNA, 600 bp, Chicken  19866894230258_2
tatgttggagcacttttggagaagaggtggcttctggctgaggttccctcttgagagaaggagaggagtcctttccctccccatacacccactacctrctaggagttagtcagacatcaggtctgggcacagaaagcaatgaggtcagctggcagcagacaggggatttcaccaggaggaggtccatgtcagcaagtggtggtgtagtatttgggaacaaggaagaaacacactgcaaatcttgcatacacactcatatctctgtgtgtatatgtaagtatatatacacacatacatatstaactcacctgtcctgacttttggatctacatagttttgcacaatttaattatctggcttaagctatcctccctatcagagttgagcactgatgatacttcacagctgtagaaggcacctaaagagaatgctgtcaccatgctgtagarattgctgtcacaaatagtgcatctccctattcactgccataccattcctactcacgtgaaaccattcccttgcatgtagtgaacttgctaagctgctttggaaaagcaggtacttttaatgttctgatgaatccagctcttttagttcata

SEQ ID NO: 20109 - DNA, 600 bp, Chicken  19866894230258_3
tggcagcagacaggggatttcaccaggaggaggtccatgtcagcaagtggtggtgtagtatttgggaacaaggaagaaacacactgcaaatcttgcatacacactcatatctctgtgtgtatatgtaagtatatatacacacatacatatstaactcacctgtcctgacttttggatctacatagttttgcacaatttaattatctggcttaagctatcctccctatcagagttgagcactgatgatacttcacagctgtagaaggcacctaaagagaatgctgtcaccatgctgtagarattgctgtcacaaatagtgcatctccctattcactgccataccattcctactcacgtgaaaccattcccttgcatgtagtgaacttgctaagctgctttggaaaagcaggtacttttaatgttctgatgaatccagctcttttagttcatacattatgtcaaaactggtcaaagacaggaaattaccctctctccctcccccgactgtgcacacacgcacagacacacgcatgcacatccacagccaaggccttcggcaagccatctgatagcaatcagtattttgagaagtgatagctc

SEQ ID NO: 20110 - DNA, 599 bp, Chicken  19866894230259_1
  misc_feature (1)..(159): n is any nucleotide
nnnnnnnnnnnnnnnnnnnnnnnnnnnnnnnnnnnnnnnnnnnnnnnnnnnnnnnnnnnnnnnnnnnnnnnnnnnnnnnnnnnnnnnnnnnnnnnnnnnnnnnnnnnnnnnnnnnnnnnnnnnnnnnnnnnnnnnnnnnnnnnnnnnnnnnnnnnnnnngtaaggttacccttgcattgaacctgctacacctcagactgtacagatttctcacatacagcatccttttagggttactctggtgtaaatgcaaaagaattaagcctatgggtggctcaccaaaaatgaacattcctgggrcccccccatcacaggtgaaacaagtccaacctgatgttaggatctgatgcgctttgagtaacatcagcaygtggtgtgtaggaagttcccacaacctgcagtgaacaccaataggagctgttcccaggaactcatttttaacctaaayacactatttcagatgtaagcattttgcagactatgtgtgagaatgagagcgagaagccggcaagaactgcaggctgaactctgtgtccccaaatgccaccattcaagcagaagggaatgcaggtttattgctttactatggtgacatctgg

SEQ ID NO: 20111 - DNA, 599 bp, Chicken  19866894230259_2
  misc_feature (1)..(89): n is any nucleotide
nnnnnnnnnnnnnnnnnnnnnnnnnnnnnnnnnnnnnnnnnnnnnnnnnnnnnnnnnnnnnnnnnnnnnnnnnnnnnnnnnnnnnnnnngtaaggttacccttgcattgaacctgctacacctcagactgtacagatttctcacatacagcatccttttagggttactctggtgtaaatgcaaaagaattaagcctatgggtggctcaccaaaaatgaacattcctgggccccccccatcacaggtgaaacaagtccaacctgatgttaggatctgatgcgctttgagtaacatcagcaygtggtgtgtaggaagttcccacaacctgcagtgaacaccaataggagctgttcccaggaactcatttttaacctaaayacactatttcagatgtaagcattttgcagactatgtgtgagaatgagagcgagaagccggcaagaactgcaggctgaactctgtgtccccaaatgccaccattcaagcagaagggaatgcaggtttattgctttactatggtgacatctggcagagcagaacctctacatactgccacggggtgagatcaaccccccatagcatggtcagcaccractctg

SEQ ID NO: 20112 - DNA, 599 bp, Chicken  19866894230259_3
  misc_feature (1)..(11): n is any nucleotide
nnnnnnnnnnngtaaggttacccttgcattgaacctgctacacctcagactgtacagatttctcacatacagcatccttttagggttactctggtgtaaatgcaaaagaattaagcctatgggtggctcaccaaaaatgaacattcctgggccccccccatcacaggtgaaacaagtccaacctgatgttaggatctgatgcgctttgagtaacatcagcaygtggtgtgtaggaagttcccacaacctgcagtgaacaccaataggagctgttcccaggaactcatttttaacctaaayacactatttcagatgtaagcattttgcagactatgtgtgagaatgagagcgagaagccggcaagaactgcaggctgaactctgtgtccccaaatgccaccattcaagcagaagggaatgcaggtttattgctttactatggtgacatctggcagagcagaacctctacatactgccacggggtgagatcaaccccccatagcatggtcagcaccractctggtctttctcagatgagcaatctgaaatggtgctgcataagcggcccaaggtcaaacaaacaggctcagccaagatgga

SEQ ID NO: 20113 - DNA, 600 bp, Chicken  19866894230259_4
tcagcaygtggtgtgtaggaagttcccacaacctgcagtgaacaccaataggagctgttcccaggaactcatttttaacctaaayacactatttcagatgtaagcattttgcagactatgtgtgagaatgagagcgagaagccggcaagaactgcaggctgaactctgtgtccccaaatgccaccattcaagcagaagggaatgcaggtttattgctttactatggtgacatctggcagagcagaacctctacatactgccacggggtgagatcaaccccccatagcatggtcagcaccractctggtctttctcagatgagcaatctgaaatggtgctgcataagcggcccaaggtcaaacaaacaggctcagccaagatggacaccactaaacagamgaggtggaacagccgaagatgytgacaagcattatttggtggcatccccctgccaaacatcgacgcacctttgtttactgggagagatcctcagcttttgggtttccacccccacgggacgaggcgcagattgtcgagccggttgtccacagtcactgagttcagatgtaccacctgaaagcccgggagcgatccctccgc

SEQ ID NO: 20114 - DNA, 600 bp, Chicken  19866894230259_5
gtaagcattttgcagactatgtgtgagaatgagagcgagaagccggcaagaactgcaggctgaactctgtgtccccaaatgccaccattcaagcagaagggaatgcaggtttattgctttactatggtgacatctggcagagcagaacctctacatactgccacggggtgagatcaaccccccatagcatggtcagcaccractctggtctttctcagatgagcaatctgaaatggtgctgcataagcggcccaaggtcaaacaaacaggctcagccaagatggacaccactaaacagamgaggtggaacagccgaagatgytgacaagcattatttggtggcatccccctgccaaacatcgacgcacctttgtttactgggagagatcctcagcttttgggtttccacccccacgggacgaggcgcagattgtcgagccggttgtccacagtcactgagttcagatgtaccacctgaaagcccgggagcgatccctccgcggtgtctctccctgcaggaaacaaaaccatgctgaagctcagcactgagcgatgctccacagccccaagcactgcactgagtgcagaagacctcctcgc

SEQ ID NO: 20115 - DNA, 600 bp, Chicken  19866894230259_6
gtgagaatgagagcgagaagccggcaagaactgcaggctgaactctgtgtccccaaatgccaccattcaagcagaagggaatgcaggtttattgctttactatggtgacatctggcagagcagaacctctacatactgccacggggtgagatcaaccccccatagcatggtcagcaccractctggtctttctcagatgagcaatctgaaatggtgctgcataagcggcccaaggtcaaacaaacaggctcagccaagatggacaccactaaacagamgaggtggaacagccgaagatgytgacaagcattatttggtggcatccccctgccaaacatcgacgcacctttgtttactgggagagatcctcagcttttgggtttccacccccacgggacgaggcgcagattgtcgagccggttgtccacagtcactgagttcagatgtaccacctgaaagcccgggagcgatccctccgcggtgtctctccctgcaggaaacaaaaccatgctgaagctcagcactgagcgatgctccacagccccaagcactgcactgagtgcagaagacctcctcgcctgctgctattgaaacggtgac

SEQ ID NO: 20116 - DNA, 600 bp, Chicken  19866894230260_1
ttgtcttctacatctctgctgtcactgctgaaacacaccagtcactgcctctctgtgctgacattcactgtttggactccataaacattcatcaagcatcaatgaatgtcaatgggtgcatttttttttccatatggagggattcagtgacacacctttgcttcatatgcactcccatgtcagacatcattgtgtcagactgcccctcagctacactacaacagagtgtaatagaatactggtgagaaagtttcacctctactgccataagaccaacatccacctctgatattgtcagtyaacatgataaaataggaggcattactttcagagcagtccccataaccacggaagtggttattgaataagaggaatctgttccacaagaacctcataaaaaaaaaaaaaaaagtctaaaagctccagtaaaatatttgccaatatttgtcttaataatgatctatagctctaacaaagttcaacatttttaaagaacaatagaatgaaaaagaataatatttattataaattagtgctagcaaaacaaaaccacagttacgatatgttgaaaaacagtaaaatggtgaccatcttagagtt

SEQ ID NO: 20117 - DNA, 600 bp, Chicken  19866894230265_1
cctcagggggcaccagcggcctgggcggactgtgctccccaaggccaatccctgggacaagggaaagatgaggctcagagcacccaccttctgggaacgctcccttggtataccactatgggagctgagggtgtgggcacagaggtgcaaagcagaaaggggtcctaaaaccaagatgcagtccatatggctgacaaggttccatcatctagagataaactaagcaggaattcaggaatgaaagacaaattaaggcattcaaggcatgttctgtgtaagaatttgtcagcttcagagttsctwcaatgagggtttatgaacgcacagacagaggctaacacagaaatgcttacrgacatctttccgccagcacagaagttttgggccgagccctcagaaggcaaccgtggaagctctcacatgaacacgcyccacgctttgtgattcaaaagtaaatttagcatgtgagagcgaatttctgccaaaaccaaatcattcaagcaaacctggtgctgctctgccactgattttatagtctggattaagtgaacccttgrtgtagttttctttctaactcagaggaagctgagctgcatgtat

SEQ ID NO: 20118 - DNA, 600 bp, Chicken  19866894230265_2
cagggggcaccagcggcctgggcggactgtgctccccaaggccaatccctgggacaagggaaagatgaggctcagagcacccaccttctgggaacgctcccttggtataccactatgggagctgagggtgtgggcacagaggtgcaaagcagaaaggggtcctaaaaccaagatgcagtccatatggctgacaaggttccatcatctagagataaactaagcaggaattcaggaatgaaagacaaattaaggcattcaaggcatgttctgtgtaagaatttgtcagcttcagagttsctwcaatgagggtttatgaacgcacagacagaggctaacacagaaatgcttacrgacatctttccgccagcacagaagttttgggccgagccctcagaaggcaaccgtggaagctctcacatgaacacgcyccacgctttgtgattcaaaagtaaatttagcatgtgagagcgaatttctgccaaaaccaaatcattcaagcaaacctggtgctgctctgccactgattttatagtctggattaagtgaacccttgrtgtagttttctttctaactcagaggaagctgagctgcatgtatttc

SEQ ID NO: 20119 - DNA, 600 bp, Chicken  19866894230265_3
ggacaagggaaagatgaggctcagagcacccaccttctgggaacgctcccttggtataccactatgggagctgagggtgtgggcacagaggtgcaaagcagaaaggggtcctaaaaccaagatgcagtccatatggctgacaaggttccatcatctagagataaactaagcaggaattcaggaatgaaagacaaattaaggcattcaaggcatgttctgtgtaagaatttgtcagcttcagagttsctwcaatgagggtttatgaacgcacagacagaggctaacacagaaatgcttacrgacatctttccgccagcacagaagttttgggccgagccctcagaaggcaaccgtggaagctctcacatgaacacgcyccacgctttgtgattcaaaagtaaatttagcatgtgagagcgaatttctgccaaaaccaaatcattcaagcaaacctggtgctgctctgccactgattttatagtctggattaagtgaacccttgrtgtagttttctttctaactcagaggaagctgagctgcatgtatttcctccagacggataaatcttgtgttactatggaatgttctgaaacagtcgga

SEQ ID NO: 20120 - DNA, 600 bp, Chicken  19866894230265_4
tgtgggcacagaggtgcaaagcagaaaggggtcctaaaaccaagatgcagtccatatggctgacaaggttccatcatctagagataaactaagcaggaattcaggaatgaaagacaaattaaggcattcaaggcatgttctgtgtaagaatttgtcagcttcagagttsctwcaatgagggtttatgaacgcacagacagaggctaacacagaaatgcttacrgacatctttccgccagcacagaagttttgggccgagccctcagaaggcaaccgtggaagctctcacatgaacacgcyccacgctttgtgattcaaaagtaaatttagcatgtgagagcgaatttctgccaaaaccaaatcattcaagcaaacctggtgctgctctgccactgattttatagtctggattaagtgaacccttgrtgtagttttctttctaactcagaggaagctgagctgcatgtatttcctccagacggataaatcttgtgttactatggaatgttctgaaacagtcggaagcaagcttctctgagccccgtctgtgccaggccactggggtcactgctcaccagtgcatgagaccgggagcagagc

SEQ ID NO: 20121 - DNA, 600 bp, Chicken  19866894230265_5
ttcaaggcatgttctgtgtaagaatttgtcagcttcagagttsctwcaatgagggtttatgaacgcacagacagaggctaacacagaaatgcttacrgacatctttccgccagcacagaagttttgggccgagccctcagaaggcaaccgtggaagctctcacatgaacacgcyccacgctttgtgattcaaaagtaaatttagcatgtgagagcgaatttctgccaaaaccaaatcattcaagcaaacctggtgctgctctgccactgattttatagtctggattaagtgaacccttgrtgtagttttctttctaactcagaggaagctgagctgcatgtatttcctccagacggataaatcttgtgttactatggaatgttctgaaacagtcggaagcaagcttctctgagccccgtctgtgccaggccactggggtcactgctcaccagtgcatgagaccgggagcagagccctcacaaagcagtacgttcctgcacactgtttgctctttggaatctgacctaccagcatagcaaatgttctacagcatgactgagttcgttccagaacgtcgatgcagacrttagctcccggcac

SEQ ID NO: 20122 - DNA, 600 bp, Chicken  19866894230265_6
aagtgaacccttgrtgtagttttctttctaactcagaggaagctgagctgcatgtatttcctccagacggataaatcttgtgttactatggaatgttctgaaacagtcggaagcaagcttctctgagccccgtctgtgccaggccactggggtcactgctcaccagtgcatgagaccgggagcagagccctcacaaagcagtacgttcctgcacactgtttgctctttggaatctgacctaccagcatagcaaatgttctacagcatgactgagttcgttccagaacgtcgatgcagacrttagctcccggcacgctgcacggcagctgcccctcctaagctcggtgctttgctatctacacggctcgggacgcacagccctgttagtggaggatttcctcctgtaacgttttgctcctctccatggagagccgctgcaggtccttcttgacgtcggggtggtcctccagctcctcgtacagcgagcgcacgatgtccagcttccggtagtcccccggccggaccaggctgcgcaccacctgcaggcaccgctccttcagcgtgaacactgcggggaaacagacagagcgcgggcagctg

SEQ ID NO: 20123 - DNA, 599 bp, Chicken  19866894230270_1
  misc_feature (1)..(148): n is any nucleotide
nnnnnnnnnnnnnnnnnnnnnnnnnnnnnnnnnnnnnnnnnnnnnnnnnnnnnnnnnnnnnnnnnnnnnnnnnnnnnnnnnnnnnnnnnnnnnnnnnnnnnnnnnnnnnnnnnnnnnnnnnnnnnnnnnnnnnnnnnnnnnnnnnnnnctgcgtctgcagcacctccgaaaccagcattggttctgaggaattctcaaataactgatggttgttacaaaagcacgtctgcagagcttccccccagctcacaccccaccaaaacccatgctcttaataacagggctgcattcatgcatccrgcagcgctatgaagttgtggcattatctgcgagtcaccccgctccagttgtcactcctaacctccaatgttcaggtgtgagacggagagctaaagtagatttataaatagctctgcagatgacaggctgggggtgatccaggaggaacgagcggaacgttgcagccacctcactcccacctcctgctgcggctgtacaaaaatcacagcaacaaaacagcacgtgatacacgttggcagatctgtcagaataacagttctgtcctctcstgtgggttttgactgcggtacagcggaaca

SEQ ID NO: 20124 - DNA, 600 bp, Chicken  19866894230270_2
tcttaataacagggctgcattcatgcatccrgcagcgctatgaagttgtggcattatctgcgagtcaccccgctccagttgtcactcctaacctccaatgttcaggtgtgagacggagagctaaagtagatttataaatagctctgcagatgacaggctgggggtgatccaggaggaacgagcggaacgttgcagccacctcactcccacctcctgctgcggctgtacaaaaatcacagcaacaaaacagcacgtgatacacgttggcagatctgtcagaataacagttctgtcctctcstgtgggttttgactgcggtacagcggaacacaagcacaagttaaggattctgtttggtcgtagtcaccacaaactgaattgtaggctaatacaagtaaactcagtctgatctcctgaggttattgttgtatgtgtgaaaaatgcagtgcttatttttaagagatgtgacctggtctttatagtttgatctaagaagcaactgacttctttaacagaagatttaacacgggaaaagcgcgtcttaaatctctttggctgtcaaagcacctggcagaggacagatggaccaagtgcaccaag

SEQ ID NO: 20125 - DNA, 599 bp, Chicken  19866894230274_1
  misc_feature (1)..(172): n is any nucleotide
nnnnnnnnnnnnnnnnnnnnnnnnnnnnnnnnnnnnnnnnnnnnnnnnnnnnnnnnnnnnnnnnnnnnnnnnnnnnnnnnnnnnnnnnnnnnnnnnnnnnnnnnnnnnnnnnnnnnnnnnnnnnnnnnnnnnnnnnnnnnnnnnnnnnnnnnnnnnnnnnnnnnnnnnnnnnagaactgtttaatagttttatttgctattatatgctactgcctaagttttattttaatatcatgcaaccgctgtgattgcacttttataattggtgctttaccccaaaggagaactttttgaagagtraaagtgctacctaggtgctgaatcagagaatttactgcaagagcttttggtagaaatacttagttatgaagtttcccagcaaaggttctgcagatgctaaacaattgaaactacaagatcaatgacattaattaatgattcatgcaatgtaatatgaaataaaaagaatgyagtgaattgaatttcaaaacaaaagtcctgggcagaatccaactcagacactgatgccctattttttwatatattctattagcaggttcaggcttacattatccccagaacaccaaatcttattgaca

SEQ ID NO: 20126 - DNA, 599 bp, Chicken  19866894230274_2
  misc_feature (1)..(1): n is any nucleotide
nagaactgtttaatagttttatttgctattatatgctactgcctaagttttattttaatatcatgcaaccgctgtgattgcacttttataattggtgctttaccccaaaggagaactttttgaagagtraaagtgctacctaggtgctgaatcagagaatttactgcaagagcttttggtagaaatacttagttatgaagtttcccagcaaaggttctgcagatgctaaacaattgaaactacaagatcaatgacattaattaatgattcatgcaatgtaatatgaaataaaaagaatgyagtgaattgaatttcaaaacaaaagtcctgggcagaatccaactcagacactgatgccctattttttwatatattctattagcaggttcaggcttacattatccccagaacaccaaatcttattgacagaaggaattgtttgtttttctgtcaaacaacaaatcttttattaacacttcctttaacttaagcatctctgttgcatcccaagcttctcagatgagccacagtagcacagcaatcacggcaagaaatgacagatggagagcactcaaatgacatcttcaaaaataaaaaga

SEQ ID NO: 20127 - DNA, 600 bp, Chicken  19866894230274_3
ccgctgtgattgcacttttataattggtgctttaccccaaaggagaactttttgaagagtraaagtgctacctaggtgctgaatcagagaatttactgcaagagcttttggtagaaatacttagttatgaagtttcccagcaaaggttctgcagatgctaaacaattgaaactacaagatcaatgacattaattaatgattcatgcaatgtaatatgaaataaaaagaatgyagtgaattgaatttcaaaacaaaagtcctgggcagaatccaactcagacactgatgccctattttttwatatattctattagcaggttcaggcttacattatccccagaacaccaaatcttattgacagaaggaattgtttgtttttctgtcaaacaacaaatcttttattaacacttcctttaacttaagcatctctgttgcatcccaagcttctcagatgagccacagtagcacagcaatcacggcaagaaatgacagatggagagcactcaaatgacatcttcaaaaataaaaagaactttaaagaaagagaatgttcctataattgctggggtaaagaaaataaattaatttgaacaaactctc

SEQ ID NO: 20128 - DNA, 599 bp, Chicken  19866894230275_1
  misc_feature (1)..(27): n is any nucleotide
nnnnnnnnnnnnnnnnnnnnnnnnnnncagcttgaaaatctaaacaatttctgctgttagctttgagttctcaaagaattatgctacaatgtataccagatgaataggcaagggataatacaaccactgccagttgttaggatgggtttctctgtatcattttgtatgtatatttttaagccgtaatatacacagagttcaccccccttgccctcctcaatgctttcattaaaaaacctaaatccaccatcctaccacacatttcagtgtggaagagtgaaaatataaggctctcctaawcatatattggacataagcagttacaaagaaaggtttgcatgaaagaaaatgtagatacagacagaatagtactataaagtagcaattaataggccaaaagcattctcttcacatggcaaatggagaaatgagatagcaaagtcaaacaagctgcacagcattagaaagagaatccaaaacaaaggaggcagatttcagccccagcctctcatctaaaactccttaagtaccacgctactccttctgtatacgtttgcttacatatgaagtacttgcattatgcagttagcttccgcacc

SEQ ID NO: 20129 - DNA, 444 bp, Chicken  19866894230275_2
gtactataaagtagcaattaataggccaaaagcattctcttcacatggcaaatggagaaatgagatagcaaagtcaaacaagctgcacagcattagaaagagaatccaaaacaaaggaggcagatttcagccccagcctctcatctaaaactccttaagtaccacgctactccttctgtatacgtttgcttacatatgaagtacttgcattatgcagttagcttccgcacctttgcaacccaacaatctatcaggagaaactggtgtagcataatcaaagccaacatttggtatccttamagtatgcacctaagagaaagggcttttgtttgtccctctgcagacctgaggaattagcattacggttgactaaacccagagtgtgtctcagaggtccggttccctactgaaaaagaccagaacaccagaacttcaaataagcaa

SEQ ID NO: 20130 - DNA, 600 bp, Chicken  19866894230282_1
gacaaaagtctattaatttaagtgaagtaaaatgatgatgacctggtcatgattttttaattgctctgagagtaagggtgtttttgtaggcctttgtaggccttgactgatcacattttcaaactgctggtagtttagatcagttttaatgggaacttttacacatcttagtattcatagcagtgtctgtcttttctcatagatgactacgagatcgtttctagatagaatgagcctctctgcagtactcctgaaagcaaggcaaagaatataaaatgagcaaacttatgaggtgatggstatgttgactttggcatttgataggtgcagaaaagggaagtttatatcatgttttatttcatatctgaaagcaaaatatcatttatatctgtgaaaaatatatggattgcaaaaagattttattaacattaaccattaaagtctgttgatagaataagaaaaggaagcaatgttagggacctcatgaacatgagaaagaagatatgrctgtcaggaggtaaaaccagcaaggtaaaacaagttttagatccgaagggcacattaactcaaggtcattagatctaagaatattccttaatc

SEQ ID NO: 20131 - DNA, 600 bp, Chicken  19866894230282_2
tacgagatcgtttctagatagaatgagcctctctgcagtactcctgaaagcaaggcaaagaatataaaatgagcaaacttatgaggtgatggstatgttgactttggcatttgataggtgcagaaaagggaagtttatatcatgttttatttcatatctgaaagcaaaatatcatttatatctgtgaaaaatatatggattgcaaaaagattttattaacattaaccattaaagtctgttgatagaataagaaaaggaagcaatgttagggacctcatgaacatgagaaagaagatatgrctgtcaggaggtaaaaccagcaaggtaaaacaagttttagatccgaagggcacattaactcaaggtcattagatctaagaatattccttaatcattcaatgtctttcacaatattttttccctrtaataggaaagcactgagacaactaattatgcatgcaaggtgagcaatagcactaagagattttccagacattttctgcaggcataatttaaagagggaaatatttccacttaacatacttagaagaaattgatcctagtatgagtaaaatagcacagtagtgagaacactgcaga

SEQ ID NO: 20132 - DNA, 600 bp, Chicken  19866894230282_3
aaagggaagtttatatcatgttttatttcatatctgaaagcaaaatatcatttatatctgtgaaaaatatatggattgcaaaaagattttattaacattaaccattaaagtctgttgatagaataagaaaaggaagcaatgttagggacctcatgaacatgagaaagaagatatgrctgtcaggaggtaaaaccagcaaggtaaaacaagttttagatccgaagggcacattaactcaaggtcattagatctaagaatattccttaatcattcaatgtctttcacaatattttttccctrtaataggaaagcactgagacaactaattatgcatgcaaggtgagcaatagcactaagagattttccagacattttctgcaggcataatttaaagagggaaatatttccacttaacatacttagaagaaattgatcctagtatgagtaaaatagcacagtagtgagaacactgcagaactgaagcagatattaataaataaattcttcttatagaagaggtttccttttaacgttacttaacaggaacacctgaaagagatcattcaatacagtgaaggaagttgcaacagacaaccattt

SEQ ID NO: 20133 - DNA, 600 bp, Chicken  19866894230283_1
tgcagggctggagaagctctccacgctgatccccattgctccagcatcacagagatggcgttttggtgctgaggatgctaacaattaagcagcgctcagcagggtgaacaggtcaacatgctttgggactgaactacgcctggagttcaattgtgttctccgttcttgacattcttgtcccacgtgatgccaaacccagctctgctcctgctcatctcccataggagcgaatgaggagtgaacacccccacaggcacggagttccgcagcccttggggtgactcagccccagtggctccyacccgctccctccccaccttgtttactttccaagctcttttatttatgccaggaaattattaaagcaacccacgctggaagcgagtttggctgaaaataaaactccaagctgctggcaagcgccggctgcgtaaagctctcctgtttatagctctgcttttccaaaacgccgctctgctgagggtgaatggggccaggtcagagggcagctgctcctcatccccgtttctcatggctggtggggtccagcaaagattggggtccagcagtgctaccatggcagtggatttggccaacaca

SEQ ID NO: 20134 - DNA, 599 bp, Chicken  19866894230298_1
  misc_feature (1)..(174): n is any nucleotide
nnnnnnnnnnnnnnnnnnnnnnnnnnnnnnnnnnnnnnnnnnnnnnnnnnnnnnnnnnnnnnnnnnnnnnnnnnnnnnnnnnnnnnnnnnnnnnnnnnnnnnnnnnnnnnnnnnnnnnnnnnnnnnnnnnnnnnnnnnnnnnnnnnnnnnnnnnnnnnnnnnnnnnnnnnnnnnaatcattataatatgcgtaacagcattatttgttaatttccagttacttgaaagatacagagcaaactttctgtttttaaattaagaatgaataccacaaaagaaacaaatatttcagtagttagrgtgggcataacaatgagattttaaactttaggaagaacaggcatgttatggatgctgagaacctgatacattgacttcagttagaactggtcttctattacgggaaagtagggaacttgtatctctatggaatcagagaaatcattggaaatgttaacgtcaagaaaaacttatctaaccctctgcaagttacttcatcttttataaatgatattctattgactacttcagaagacaggttgtttgtaggtgatttttggactgtataaacagatcttttttctgtttctcctgtaaaa

SEQ ID NO: 20135 - DNA, 600 bp, Chicken  19866894230298_2
ttaacgtcaagaaaaacttatctaaccctctgcaagttacttcatcttttataaatgatattctattgactacttcagaagacaggttgtttgtaggtgatttttggactgtataaacagatcttttttctgtttctcctgtaaaattttaggatgagtcttcaggagaaattacattttacatgaagggtgcagatgttgcgatgtccactattgtacagtacaatgattggttagaagaagaggtaagaaatagagccaaaatatatttttgacatatatatatatataaatctaacwgaaatatcaaatgttattggagtaggtttaagagatcctgagccaatacaatggcttttcaagttcagttaatcrtaccctgagtgagttttaatggtttagaatttttttgtattcttttataatacatagagaaaaacaaagttagtagtcagagcaaaatgtattcatacttaacacaagcaaatttgtttttcattgactgatctttcacatgaaacgaaattacttctgagaagtattttcttataaatctatttatcctgaataaaccttttataatttctgcagtgaagtatg

SEQ ID NO: 20136 - DNA, 600 bp, Chicken  19866894230298_3
cagaagacaggttgtttgtaggtgatttttggactgtataaacagatcttttttctgtttctcctgtaaaattttaggatgagtcttcaggagaaattacattttacatgaagggtgcagatgttgcgatgtccactattgtacagtacaatgattggttagaagaagaggtaagaaatagagccaaaatatatttttgacatatatatatatataaatctaacwgaaatatcaaatgttattggagtaggtttaagagatcctgagccaatacaatggcttttcaagttcagttaatcrtaccctgagtgagttttaatggtttagaatttttttgtattcttttataatacatagagaaaaacaaagttagtagtcagagcaaaatgtattcatacttaacacaagcaaatttgtttttcattgactgatctttcacatgaaacgaaattacttctgagaagtattttcttataaatctatttatcctgaataaaccttttataatttctgcagtgaagtatgattatgaattacgaaatttaatatgcaatggaggtacattgaaatagctttttacaatatttgttaaatttaata

SEQ ID NO: 20137 - DNA, 599 bp, Chicken  19866894230302_1
  misc_feature (1)..(7): n is any nucleotide
nnnnnnntatttttagcaaaggctgagagtgagcaagtggtcagcttgttctgatagctacacgctcattctgctgccatcagattcctcacacacttaactgatgagctcagattcactggatcaggagcttggatttaaacaacactttttaaatgttggttgttttctaccctgatgtttcaagtaaccaagaggttggctttgtgcaaatggaaaagtgtgaggactggagtgctttcatttgttcaggctgaacttgaaaccaggtgtgagatgggcacaacgagcagctggccrgcctgccttgaggccgaggcacacatgtcccagctgaacacacagactgccatgtgctacgaatggaacacatttcagcatgtccttatctttattttggctgtcagggtgcaagttttgcttaaatgtgaaggtgtgcaatgtcttcacggttacagccagcaggtttggagcgggtatttgcaggtgctgatgttgagaagtgcagtgggattacaacatgcragcaayggctcagaataattaattatttttgcttctgctgcagaaatttgtcagaccaagccaacactgagccc

SEQ ID NO: 20138 - DNA, 600 bp, Chicken  19866894230302_2
aggactggagtgctttcatttgttcaggctgaacttgaaaccaggtgtgagatgggcacaacgagcagctggccrgcctgccttgaggccgaggcacacatgtcccagctgaacacacagactgccatgtgctacgaatggaacacatttcagcatgtccttatctttattttggctgtcagggtgcaagttttgcttaaatgtgaaggtgtgcaatgtcttcacggttacagccagcaggtttggagcgggtatttgcaggtgctgatgttgagaagtgcagtgggattacaacatgcragcaayggctcagaataattaattatttttgcttctgctgcagaaatttgtcagaccaagccaacactgagccctccatgtgctgggcgctgtgtgcrtacgtagtgccaggcagcccctgctgtgccttagtctagcatgaggcgtagcgatgagttggtaagctgagagctggagcagaggtgtaccagcagaccatctgccaagstcagcagagcaccagtaagggtacagctggaatcactgctyacctgagctggattcagcctggggctctgcaggttgttggcaataccstga

SEQ ID NO: 20139 - DNA, 600 bp, Chicken  19866894230302_3
ggagtgctttcatttgttcaggctgaacttgaaaccaggtgtgagatgggcacaacgagcagctggccrgcctgccttgaggccgaggcacacatgtcccagctgaacacacagactgccatgtgctacgaatggaacacatttcagcatgtccttatctttattttggctgtcagggtgcaagttttgcttaaatgtgaaggtgtgcaatgtcttcacggttacagccagcaggtttggagcgggtatttgcaggtgctgatgttgagaagtgcagtgggattacaacatgcragcaayggctcagaataattaattatttttgcttctgctgcagaaatttgtcagaccaagccaacactgagccctccatgtgctgggcgctgtgtgcrtacgtagtgccaggcagcccctgctgtgccttagtctagcatgaggcgtagcgatgagttggtaagctgagagctggagcagaggtgtaccagcagaccatctgccaagstcagcagagcaccagtaagggtacagctggaatcactgctyacctgagctggattcagcctggggctctgcaggttgttggcaataccstgagacaga

SEQ ID NO: 20140 - DNA, 600 bp, Chicken  19866894230302_4
catgtcccagctgaacacacagactgccatgtgctacgaatggaacacatttcagcatgtccttatctttattttggctgtcagggtgcaagttttgcttaaatgtgaaggtgtgcaatgtcttcacggttacagccagcaggtttggagcgggtatttgcaggtgctgatgttgagaagtgcagtgggattacaacatgcragcaayggctcagaataattaattatttttgcttctgctgcagaaatttgtcagaccaagccaacactgagccctccatgtgctgggcgctgtgtgcrtacgtagtgccaggcagcccctgctgtgccttagtctagcatgaggcgtagcgatgagttggtaagctgagagctggagcagaggtgtaccagcagaccatctgccaagstcagcagagcaccagtaagggtacagctggaatcactgctyacctgagctggattcagcctggggctctgcaggttgttggcaataccstgagacagagatgaggacagcattcagcagcagttatgttcctctctgttggtttacagagtggtgaaggttttctcaggcttgcagggcgctgtgtgcag

SEQ ID NO: 20141 - DNA, 600 bp, Chicken  19866894230302_5
gtgtgcaatgtcttcacggttacagccagcaggtttggagcgggtatttgcaggtgctgatgttgagaagtgcagtgggattacaacatgcragcaayggctcagaataattaattatttttgcttctgctgcagaaatttgtcagaccaagccaacactgagccctccatgtgctgggcgctgtgtgcrtacgtagtgccaggcagcccctgctgtgccttagtctagcatgaggcgtagcgatgagttggtaagctgagagctggagcagaggtgtaccagcagaccatctgccaagstcagcagagcaccagtaagggtacagctggaatcactgctyacctgagctggattcagcctggggctctgcaggttgttggcaataccstgagacagagatgaggacagcattcagcagcagttatgttcctctctgttggtttacagagtggtgaaggttttctcaggcttgcagggcgctgtgtgcaggtacagytgygtgcattgcaaagtagaatgagacttggaatatatcatcattttatcaaatgtactgcacgtggggccaaaaatcgcctatatatggtggtagatgaggt

SEQ ID NO: 20142 - DNA, 600 bp, Chicken  19866894230302_6
gggtatttgcaggtgctgatgttgagaagtgcagtgggattacaacatgcragcaayggctcagaataattaattatttttgcttctgctgcagaaatttgtcagaccaagccaacactgagccctccatgtgctgggcgctgtgtgcrtacgtagtgccaggcagcccctgctgtgccttagtctagcatgaggcgtagcgatgagttggtaagctgagagctggagcagaggtgtaccagcagaccatctgccaagstcagcagagcaccagtaagggtacagctggaatcactgctyacctgagctggattcagcctggggctctgcaggttgttggcaataccstgagacagagatgaggacagcattcagcagcagttatgttcctctctgttggtttacagagtggtgaaggttttctcaggcttgcagggcgctgtgtgcaggtacagytgygtgcattgcaaagtagaatgagacttggaatatatcatcattttatcaaatgtactgcacgtggggccaaaaatcgcctatatatggtggtagatgaggtgatttttcttaggtaatgtgttctggagccgattacttctt

SEQ ID NO: 20143 - DNA, 600 bp, Chicken  19866894230302_7
gcragcaayggctcagaataattaattatttttgcttctgctgcagaaatttgtcagaccaagccaacactgagccctccatgtgctgggcgctgtgtgcrtacgtagtgccaggcagcccctgctgtgccttagtctagcatgaggcgtagcgatgagttggtaagctgagagctggagcagaggtgtaccagcagaccatctgccaagstcagcagagcaccagtaagggtacagctggaatcactgctyacctgagctggattcagcctggggctctgcaggttgttggcaataccstgagacagagatgaggacagcattcagcagcagttatgttcctctctgttggtttacagagtggtgaaggttttctcaggcttgcagggcgctgtgtgcaggtacagytgygtgcattgcaaagtagaatgagacttggaatatatcatcattttatcaaatgtactgcacgtggggccaaaaatcgcctatatatggtggtagatgaggtgatttttcttaggtaatgtgttctggagccgattacttctttggccattagtaattagtgtataagaagcctcgtctcccatcatctga

SEQ ID NO: 20144 - DNA, 600 bp, Chicken  19866894230302_8
tgccaggcagcccctgctgtgccttagtctagcatgaggcgtagcgatgagttggtaagctgagagctggagcagaggtgtaccagcagaccatctgccaagstcagcagagcaccagtaagggtacagctggaatcactgctyacctgagctggattcagcctggggctctgcaggttgttggcaataccstgagacagagatgaggacagcattcagcagcagttatgttcctctctgttggtttacagagtggtgaaggttttctcaggcttgcagggcgctgtgtgcaggtacagytgygtgcattgcaaagtagaatgagacttggaatatatcatcattttatcaaatgtactgcacgtggggccaaaaatcgcctatatatggtggtagatgaggtgatttttcttaggtaatgtgttctggagccgattacttctttggccattagtaattagtgtataagaagcctcgtctcccatcatctgacaggggctcagggaaatatgaaacagaaaggcctccaattgtgggcatggctgtcagtcccccccagctctgagtaccccaggatgagtcagaaacttctgggacttg

SEQ ID NO: 20145 - DNA, 600 bp, Chicken  19866894230302_9
caggcagcccctgctgtgccttagtctagcatgaggcgtagcgatgagttggtaagctgagagctggagcagaggtgtaccagcagaccatctgccaagstcagcagagcaccagtaagggtacagctggaatcactgctyacctgagctggattcagcctggggctctgcaggttgttggcaataccstgagacagagatgaggacagcattcagcagcagttatgttcctctctgttggtttacagagtggtgaaggttttctcaggcttgcagggcgctgtgtgcaggtacagytgygtgcattgcaaagtagaatgagacttggaatatatcatcattttatcaaatgtactgcacgtggggccaaaaatcgcctatatatggtggtagatgaggtgatttttcttaggtaatgtgttctggagccgattacttctttggccattagtaattagtgtataagaagcctcgtctcccatcatctgacaggggctcagggaaatatgaaacagaaaggcctccaattgtgggcatggctgtcagtcccccccagctctgagtaccccaggatgagtcagaaacttctgggacttgcag

SEQ ID NO: 20146 - DNA, 600 bp, Chicken  19866894230303_1
cctgaagcaaattaatgctgggtgaccactgcaagttctctgatggcagtggatgtgctccccactgctgcatgcacagctccacggcagagtgctacactgcatctcctcttccaggtctgtttgtgctgaatgactgcagcccattgatttaggctatccaggaggcaggatgagcgagggaagagacagagagatgtttaccagcctgctctgtcttgctgctcagcagcgacggagtgccagggcagatgacatgcagcagcatggcatgctgtgctgtcttgcacatgggatgtygcakgcagaagtggggcagctgttcctctgcttcccagtgtctmatgaggctcgtcaggctgtctggggctgatggtacagatcaccccgctccaaggctcctarcatggtctgctcatccactgccaagccaaagtcaaaccccagcactgacggaagaagcctgaaagcaaagagtgcaggaagccacctgctgtcagcacacacctcaaaactgagccctcaccatgcctggctcagctccccttggacacccaaggctgactgcacatccttgtgcacacagctgcagcacggcac

SEQ ID NO: 20147 - DNA, 600 bp, Chicken  19866894230303_2
aagcaaattaatgctgggtgaccactgcaagttctctgatggcagtggatgtgctccccactgctgcatgcacagctccacggcagagtgctacactgcatctcctcttccaggtctgtttgtgctgaatgactgcagcccattgatttaggctatccaggaggcaggatgagcgagggaagagacagagagatgtttaccagcctgctctgtcttgctgctcagcagcgacggagtgccagggcagatgacatgcagcagcatggcatgctgtgctgtcttgcacatgggatgtygcakgcagaagtggggcagctgttcctctgcttcccagtgtctmatgaggctcgtcaggctgtctggggctgatggtacagatcaccccgctccaaggctcctarcatggtctgctcatccactgccaagccaaagtcaaaccccagcactgacggaagaagcctgaaagcaaagagtgcaggaagccacctgctgtcagcacacacctcaaaactgagccctcaccatgcctggctcagctccccttggacacccaaggctgactgcacatccttgtgcacacagctgcagcacggcacatcc

SEQ ID NO: 20148 - DNA, 600 bp, Chicken  19866894230303_3
ggcagtggatgtgctccccactgctgcatgcacagctccacggcagagtgctacactgcatctcctcttccaggtctgtttgtgctgaatgactgcagcccattgatttaggctatccaggaggcaggatgagcgagggaagagacagagagatgtttaccagcctgctctgtcttgctgctcagcagcgacggagtgccagggcagatgacatgcagcagcatggcatgctgtgctgtcttgcacatgggatgtygcakgcagaagtggggcagctgttcctctgcttcccagtgtctmatgaggctcgtcaggctgtctggggctgatggtacagatcaccccgctccaaggctcctarcatggtctgctcatccactgccaagccaaagtcaaaccccagcactgacggaagaagcctgaaagcaaagagtgcaggaagccacctgctgtcagcacacacctcaaaactgagccctcaccatgcctggctcagctccccttggacacccaaggctgactgcacatccttgtgcacacagctgcagcacggcacatccatgcagaatccttacgtgatgggagctgggcgccagtctg

SEQ ID NO: 20149 - DNA, 600 bp, Chicken  19866894230303_4
ctcctcttccaggtctgtttgtgctgaatgactgcagcccattgatttaggctatccaggaggcaggatgagcgagggaagagacagagagatgtttaccagcctgctctgtcttgctgctcagcagcgacggagtgccagggcagatgacatgcagcagcatggcatgctgtgctgtcttgcacatgggatgtygcakgcagaagtggggcagctgttcctctgcttcccagtgtctmatgaggctcgtcaggctgtctggggctgatggtacagatcaccccgctccaaggctcctarcatggtctgctcatccactgccaagccaaagtcaaaccccagcactgacggaagaagcctgaaagcaaagagtgcaggaagccacctgctgtcagcacacacctcaaaactgagccctcaccatgcctggctcagctccccttggacacccaaggctgactgcacatccttgtgcacacagctgcagcacggcacatccatgcagaatccttacgtgatgggagctgggcgccagtctgcggggctacagctgtactggggaacagagggacctccccagagcatctcctgacaccgcag

SEQ ID NO: 20150 - DNA, 600 bp, Chicken  19866894230312_1
tgtatcatttttggaggatttgtttgtttgcttttcctctttcagcagttgaaaacacttctaacttagctctgtgtcttgagtaacagaacttcaccctgtttctcaccctgtgactcggaagttggaaaataatggtatcggtaggaagtggcacctgggaggctctgtaggtagtgtgatgatgcagtagtgaatccagcgttgcttttgaaaccaggcaatgtcatgatacaaccacagattctgctgataaaatgttaggattccagtagcgaattatagcataacgaggtcatkcacttgtatctataaaatgtctgagggggagaaaagggatgagcatataagtgacatccaagaatatactgagtgcatgaggaaggtggggaggtgctgatatcacagctgggaggaaatgtaaaacatttggcaccagaaggcaaatgctccaaattcagaacagaccacagtctgaagacagaggctgtacgtcgttgttccctgatcagcagggtggtacagcactgcttgagccatgacagtctgatggctggaaggagaactgttgtgttttcattgtgcgtagacaaagcgtat

SEQ ID NO: 20151 - DNA, 600 bp, Chicken  19866894230312_2
taaaatgtctgagggggagaaaagggatgagcatataagtgacatccaagaatatactgagtgcatgaggaaggtggggaggtgctgatatcacagctgggaggaaatgtaaaacatttggcaccagaaggcaaatgctccaaattcagaacagaccacagtctgaagacagaggctgtacgtcgttgttccctgatcagcagggtggtacagcactgcttgagccatgacagtctgatggctggaaggagaactgttgtgttttcattgtgcgtagacaaagcgtattaagtaagagcytcagtgtgatattcaaatggaggtaaagcattrtattacctctgaagctatgagctttccagtctaccrgttaggtgtcttacttccagtgcacttgctggtgtcaaacgagtcaaaccatacagaactcatcatatagtgtagtgatgctgcatttttataagcmgatatgaagtccaaataaattgtaaatcaaagctatggcagccaattgcataattatgttattttatgggaaaaaaatgtcccctgagaacttcgtctcagtaggcgactgcgatcagcaacttaaacaaagcc

SEQ ID NO: 20152 - DNA, 600 bp, Chicken  19866894230312_3
tataagtgacatccaagaatatactgagtgcatgaggaaggtggggaggtgctgatatcacagctgggaggaaatgtaaaacatttggcaccagaaggcaaatgctccaaattcagaacagaccacagtctgaagacagaggctgtacgtcgttgttccctgatcagcagggtggtacagcactgcttgagccatgacagtctgatggctggaaggagaactgttgtgttttcattgtgcgtagacaaagcgtattaagtaagagcytcagtgtgatattcaaatggaggtaaagcattrtattacctctgaagctatgagctttccagtctaccrgttaggtgtcttacttccagtgcacttgctggtgtcaaacgagtcaaaccatacagaactcatcatatagtgtagtgatgctgcatttttataagcmgatatgaagtccaaataaattgtaaatcaaagctatggcagccaattgcataattatgttattttatgggaaaaaaatgtcccctgagaacttcgtctcagtaggcgactgcgatcagcaacttaaacaaagccaaacaaacttcccattttgaaactgtgttatcg

SEQ ID NO: 20153 - DNA, 600 bp, Chicken  19866894230312_4
gaaggtggggaggtgctgatatcacagctgggaggaaatgtaaaacatttggcaccagaaggcaaatgctccaaattcagaacagaccacagtctgaagacagaggctgtacgtcgttgttccctgatcagcagggtggtacagcactgcttgagccatgacagtctgatggctggaaggagaactgttgtgttttcattgtgcgtagacaaagcgtattaagtaagagcytcagtgtgatattcaaatggaggtaaagcattrtattacctctgaagctatgagctttccagtctaccrgttaggtgtcttacttccagtgcacttgctggtgtcaaacgagtcaaaccatacagaactcatcatatagtgtagtgatgctgcatttttataagcmgatatgaagtccaaataaattgtaaatcaaagctatggcagccaattgcataattatgttattttatgggaaaaaaatgtcccctgagaacttcgtctcagtaggcgactgcgatcagcaacttaaacaaagccaaacaaacttcccattttgaaactgtgttatcggccgtgcacagtaacgaactaaaaggcaaacacgct

SEQ ID NO: 20154 - DNA, 600 bp, Chicken  19866894230312_5
agacagaggctgtacgtcgttgttccctgatcagcagggtggtacagcactgcttgagccatgacagtctgatggctggaaggagaactgttgtgttttcattgtgcgtagacaaagcgtattaagtaagagcytcagtgtgatattcaaatggaggtaaagcattrtattacctctgaagctatgagctttccagtctaccrgttaggtgtcttacttccagtgcacttgctggtgtcaaacgagtcaaaccatacagaactcatcatatagtgtagtgatgctgcatttttataagcmgatatgaagtccaaataaattgtaaatcaaagctatggcagccaattgcataattatgttattttatgggaaaaaaatgtcccctgagaacttcgtctcagtaggcgactgcgatcagcaacttaaacaaagccaaacaaacttcccattttgaaactgtgttatcggccgtgcacagtaacgaactaaaaggcaaacacgctcctgctagaaggggtcagtcattttcgaggggttataaatacacagatgcaccaacaaccacgcatgttcattatttcatgctggcaatgtggagtt

SEQ ID NO: 20155 - DNA, 600 bp, Chicken  19866894230312_6
atggctggaaggagaactgttgtgttttcattgtgcgtagacaaagcgtattaagtaagagcytcagtgtgatattcaaatggaggtaaagcattrtattacctctgaagctatgagctttccagtctaccrgttaggtgtcttacttccagtgcacttgctggtgtcaaacgagtcaaaccatacagaactcatcatatagtgtagtgatgctgcatttttataagcmgatatgaagtccaaataaattgtaaatcaaagctatggcagccaattgcataattatgttattttatgggmaaaaaatgtcccctgagaacttcgtctcagtaggcgactgcgatcagcaacttaaacaaagccaaacaaacttcccattttgaaactgtgttatcggccgtgcacagtaacgaactaaaaggcaaacacgctcctgctagaaggggtcagtcattttcgaggggttataaatacacagatgcaccaacaaccacgcatgttcattatttcatgctggcaatgtggagttcaatgagtaacaaagcccaagttgttgtttcacgattctgttgccaagcagtaggttttctcctagcaaca

SEQ ID NO: 20156 - DNA, 600 bp, Chicken  19866894230314_1
gcatgcaggagatgcatttcagactgcttagagatcctttctgctggcttgtctgtgggagaattattggcatgtgtttcatagactctttttgttgaagagaaaatagatggaagactaaaagatctgtaaggaagagttgcagtatagctttgtagtgttggcccagagtgcttgcctggccttgaggttaaggttttgctttccctagcagcccagtgttacagcagggtggcaggtggttttgttgcccttctaggcctgggatcagttgggaccagggtactgcttcctgagtgyctgccccagctgaagctcctggggctcagtgtttgtrggagtgacaccatagctcaagtggaagttctctaaggtgagagctcacaggtttgatctcgaagggcctagcgggagatcaacttttagtaatgtattatctcttctgaagttttcttctcacctgagttgaatatttctacaaggcttgtcctttgcagtggagggacaccaaagaggtcatccctcagcatgatgggttgtgatagtcctgtgagcatcggtgccactagctctactttggagttttatcattcaggctgc

SEQ ID NO: 20157 - DNA, 600 bp, Chicken  19866894230314_2
tttctgctggcttgtctgtgggagaattattggcatgtgtttcatagactctttttgttgaagagaaaatagatggaagactaaaagatctgtaaggaagagttgcagtatagctttgtagtgttggcccagagtgcttgcctggccttgaggttaaggttttgctttccctagcagcccagtgttacagcagggtggcaggtggttttgttgcccttctaggcctgggatcagttgggaccagggtactgcttcctgagtgyctgccccagctgaagctcctggggctcagtgtttgtrggagtgacaccatagctcaagtggaagttctctaaggtgagagctcacaggtttgatctcgaagggcctagcgggagatcaacttttagtaatgtattatctcttctgaagttttcttctcacctgagttgaatatttctacaaggcttgtcctttgcagtggagggacaccaaagaggtcatccctcagcatgatgggttgtgatagtcctgtgagcatcggtgccactagctctactttggagttttatcattcaggctgctctatatgtttkcttgtttttgttattctttagcagg

SEQ ID NO: 20158 - DNA, 600 bp, Chicken  19866894230314_3
aagctcctggggctcagtgtttgtrggagtgacaccatagctcaagtggaagttctctaaggtgagagctcacaggtttgatctcgaagggcctagcgggagatcaacttttagtaatgtattatctcttctgaagttttcttctcacctgagttgaatatttctacaaggcttgtcctttgcagtggagggacaccaaagaggtcatccctcagcatgatgggttgtgatagtcctgtgagcatcggtgccactagctctactttggagttttatcattcaggctgctctatatgtttkcttgtttttgttattctttagcaggaatcctcattgctgcaagtcacggtagctcacaaacaaaagtagagtccctgctgcctcacctaccctcagctgacatgtcttgtgggctgttttcattgtagctttgtctctgctcaccaggctgggaacttggcaggtgccggggctgcgacaagctccagcaacctctctgctaataaagaaatcagctgacccatgtcaggaagcatgggtaagagtttagagactggctctgggagctgagttccatgaaccggcatccttctctgtggg

SEQ ID NO: 20159 - DNA, 599 bp, Chicken  19866894230319_1
  misc_feature (1)..(38): n is any nucleotide
nnnnnnnnnnnnnnnnnnnnnnnnnnnnnnnnnnnnnntattgtacccaagctgaactcccttcaaacaaggccaaggttcacactgttgggtgagtccagtgatggctggtggccggagcatgcagcataacaagagttggcttcagcttggggtagagaaagctgaggggaaattgtcatgttgtttccagctgtcagagtgtaggagaagatggagatgcagagtgaaagaaagagtttttccatgaaaattttcaattcggtgttgagaaaaaattctttgtgagtttggtcacaygctggaacacattgcccatacagggcatgggatttccatcccgtgagatggtcacaactcaactggacacagccctgagcaacctgttctgactgaagaaagccctggtttgagcagatggatggaccaaattactttaagaggtctctttcaacccaaactattctgggattccgctgaaagagtggtgctatcacctggaaactgagccaggtgagctgcaaccaagaaggtaggatcctgaytgcttcaggagggggtgtggaggaaggctggagagcagctgaaggggaagwttt

SEQ ID NO: 20160 - DNA, 548 bp, Chicken  19866894230319_2
catgaaaattttcaattcggtgttgagaaaaaattctttgtgagtttggtcacaygctggaacacattgcccatacagggcatgggatttccatcccgtgagatggtcacaactcaactggacacagccctgagcaacctgttctgactgaagaaagccctggtttgagcagatggatggaccaaattactttaagaggtctctttcaacccaaactattctgggattccgctgaaagagtggtgctatcacctggaaactgagccaggtgagctgcaaccaagaaggtaggatcctgaytgcttcaggagggggtgtggaggaaggctggagagcagctgaaggggaagwtttcagagccctttcctttccaagatggcccccagcctaggagacagagttggagagcaaacatctcatgtgccatttagacaaggatgtttcttcccagcagcagatgcttctgtttggtgtgcaagtcgccagtgcagatgtgcaagtgtttgaaaccccagctgctgtattgtcacacggcaggtaaaagagca

SEQ ID NO: 20161 - DNA, 497 bp, Chicken  19866894230319_3
acaygctggaacacattgcccatacagggcatgggatttccatcccgtgagatggtcacaactcaactggacacagccctgagcaacctgttctgactgaagaaagccctggtttgagcagatggatggaccaaattactttaagaggtctctttcaacccaaactattctgggattccgctgaaagagtggtgctatcacctggaaactgagccaggtgagctgcaaccaagaaggtaggatcctgaytgcttcaggagggggtgtggaggaaggctggagagcagctgaaggggaagwtttcagagccctttcctttccaagatggcccccagcctaggagacagagttggagagcaaacatctcatgtgccatttagacaaggatgtttcttcccagcagcagatgcttctgtttggtgtgcaagtcgccagtgcagatgtgcaagtgtttgaaaccccagctgctgtattgtcacacggcaggtaaaagagca

SEQ ID NO: 20162 - DNA, 599 bp, Chicken  19866894230320_1
  misc_feature (1)..(44): n is any nucleotide
nnnnnnnnnnnnnnnnnnnnnnnnnnnnnnnnnnnnnnnnnnnnggctttatgctgacatcagatttttgcagttagcttctttgattgatcaagtagttcccaccttgcaattgttgacagatgaacttcatccaggcccatctgccacacgtaaggtccgaatgtatgcaaacctgtgcagggagatctgaattaggggcagagttccagccctgttgcaaaagcaaaccggtctggcagtgggaattctcagatctaattttgatacagtcacattcttcagtcttattaaaagagscattgcatgggagatgttgcagctgaaatcttctggcagggtttrgatgcgtgtgctggaaattctgaaggcctgcttcgccccgaaggggaaaagggattaaactgagctttagaaacagctcctctgtgctgctcaatagaagtaatttagttcccttggcaacctgtgtgtgtggggttttttttgcttgttttggggcgggatgcttggtgctggtggttgtcgttgttgttgggataaagcaaggccatttcattataaaatctagtttgtgcatgtgggcacatggcctatga

SEQ ID NO: 20163 - DNA, 600 bp, Chicken  19866894230320_2
gctttatgctgacatcagatttttgcagttagcttctttgattgatcaagtagttcccaccttgcaattgttgacagatgaacttcatccaggcccatctgccacacgtaaggtccgaatgtatgcaaacctgtgcagggagatctgaattaggggcagagttccagccctgttgcaaaagcaaaccggtctggcagtgggaattctcagatctaattttgatacagtcacattcttcagtcttattaaaagagscattgcatgggagatgttgcagctgaaatcttctggcagggtttrgatgcgtgtgctggaaattctgaaggcctgcttcgccccgaaggggaaaagggattaaactgagctttagaaacagctcctctgtgctgctcaatagaagtaatttagttcccttggcaacctgtgtgtgtggggttttttttgcttgttttggggcgggatgcttggtgctggtggttgtcgttgttgttgggataaagcaaggccatttcattataaaatctagtttgtgcatgtgggcacatggcctatgacttctggctacgtgaggtaaaaaaaacatgtactggaattacatcg

SEQ ID NO: 20164 - DNA, 600 bp, Chicken  19866894230332_1
gggtttcaggtatttaactccaaaacaccgaagtgaatacacagattctgtattcagtgactgcttccactgcagagcaatgaaagcaaacccattttgaagcattgcaaatgcctgatcccacaggtgctgcactccctgtggatgatcggatggaaaccaacgctgcccagaaggagaggccccgagtgcttcacttccatccctgcacatccagaaatgattcaaaggaatgaaaggaagagctgggaaaggcgaagcgccccagagcaaaacagcgccggcactgcaccaacagcrctggattgaactgagctctgaagttcagtcacaaagtgctgtgccccttttgctggcggtgcagcaatggtttctaaaatgccttcagcactgagtttttcaatgggtatttctgccagaccggagaaccacagctggggtgtgagctgcgtgcaggtgacggcgctgcgcttcccagctgcgctcactgcccattgaagtgaaaggccaacttgaaaagctgctctcccaactcctgcctgcrctgctcagcctcacagccctcctgggcaccactcacatcacagccctcctgccctc

SEQ ID NO: 20165 - DNA, 600 bp, Chicken  19866894230332_2
gctgggaaaggcgaagcgccccagagcaaaacagcgccggcactgcaccaacagcrctggattgaactgagctctgaagttcagtcacaaagtgctgtgccccttttgctggcggtgcagcaatggtttctaaaatgccttcagcactgagtttttcaatgggtatttctgccagaccggagaaccacagctggggtgtgagctgcgtgcaggtgacggcgctgcgcttcccagctgcgctcactgcccattgaagtgaaaggccaacttgaaaagctgctctcccaactcctgcctgcrctgctcagcctcacagccctcctgggcaccactcacatcacagccctcctgccctcaacgccaataatgaggctgaacctcgggatgggctttgctcccatgcacctcctgcagcagaagtgccagataaccacattggtaccagcgggattgcagctggggccagaaagttgttgggaaccatcactgtgctcagagccatgtgctaatatctcacgtgaagctgccaatggggtttggtacagccgccttactgcagcctcgctggcagtcatctttataaccagaatagcacgtcct

SEQ ID NO: 20166 - DNA, 415 bp, Chicken  19866894230334_1
cacagctgtgctgcgaaacggcccgcgagccgcagccgttcgttcatcgctctcctgcaaagcgcacccacacggagccgattaaatctaccgcaggtgggaattctccctgcataggttctaccccacaacagaacgcttcatccaccctatccgaatcagatcggagccttaaaagcaactttattctactgccattctgaaacacagctttctttgtttgctgctgaaacgcgttgagtcatcttcccccggcgctgatctccctgtgtgcatctgacagctcacggacagcccaaktgcaggagaggcagcgacacaccacttgcagagggtggactcaaacactcaattaacgttaaacgattctgctttagagcgtaatctacttaagcaaatgaattctaacagtctt

SEQ ID NO: 20167 - DNA, 600 bp, Chicken  19866894230336_1
ttaaacataaaaactttaattgattctgatttttattgatactttgactttttaaaattttctccctgcttattaagacataggagagctttaataatgtatctcttttgtgttaaactaattgcaattcattttgtaattcaaaaccttatatcagaaagattcacttgagtccgcagaataaagttgtcattatagtaatggtcatatttaccacatgctatatttacattaaacatcagctgtagctccactagtttcatgtaaaagtcttaattgctcactagattcaaatatatrwatatatttaaaatcaaagtcatcctcttacttttccaccaattccaaacctaatcttaaatatctgttactcattaaatttggaagatagaatagttttagtagtaaaataaattcattcatctttttctcgtcagacaacctgaaagatactacccgtgttcctgtctatgtacgaattttggatgttaatgacaatgccccacagtttgctgtattctacgatacttttgtttgtgaaaatgcaagagccggacaggtatgcctttgataaaacacttgctactgtcttatttggct

SEQ ID NO: 20168 - DNA, 600 bp, Chicken  19866894230336_2
taaacataaaaactttaattgattctgatttttattgatactttgactttttaaaattttctccctgcttattaagacataggagagctttaataatgtatctcttttgtgttaaactaattgcaattcattttgtaattcaaaaccttatatcagaaagattcacttgagtccgcagaataaagttgtcattatagtaatggtcatatttaccacatgctatatttacattaaacatcagctgtagctccactagtttcatgtaaaagtcttaattgctcactagattcaaatatatrwatatatttaaaatcaaagtcatcctcttacttttccaccaattccaaacctaatcttaaatatctgttactcattaaatttggaagatagaatagttttagtagtaaaataaattcattcatctttttctcgtcagacaacctgaaagatactacccgtgttcctgtctatgtacgaattttggatgttaatgacaatgccccacagtttgctgtattctacgatacttttgtttgtgaaaatgcaagagccggacaggtatgcctttgataaaacacttgctactgtcttatttggcta

SEQ ID NO: 20169 - DNA, 481 bp, Chicken  19866894230336_3
ggaagatagaatagttttagtagtaaaataaattcattcatctttttctcgtcagacaacctgaaagatactacccgtgttcctgtctatgtacgaattttggatgttaatgacaatgccccacagtttgctgtattctacgatacttttgtttgtgaaaatgcaagagccggacaggtatgcctttgataaaacacttgctactgtcttatttggctatggtactcaattgttgattattcttgcctgttatttgggagaaattatgtccaaaacacctttcagatgttgaaaatgaayacagcaagtagcttactaygtgaggcttacagtgaaataccaacttatttcaacaacaacactgcgtgatttagcactcttctcaacctaactctgtagtatttttgcctatttagattagctcaagaaatacggacataattagctttgtcattaccttctcagagaaagcaaaatacta

SEQ ID NO: 20170 - DNA, 462 bp, Chicken  19866894230336_4
gtagtaaaataaattcattcatctttttctcgtcagacaacctgaaagatactacccgtgttcctgtctatgtacgaattttggatgttaatgacaatgccccacagtttgctgtattctacgatacttttgtttgtgaaaatgcaagagccggacaggtatgcctttgataaaacacttgctactgtcttatttggctatggtactcaattgttgattattcttgcctgttatttgggagaaattatgtccaaaacacctttcagatgttgaaaatgaayacagcaagtagcttactaygtgaggcttacagtgaaataccaacttatttcaacaacaacactgcgtgatttagcactcttctcaacctaactctgtagtatttttgcctatttagattagctcaagaaatacggacataattagctttgtcattaccttctcagagaaagcaaaatacta

SEQ ID NO: 20171 - DNA, 599 bp, Chicken  19866894230342_1
  misc_feature (1)..(87): n is any nucleotide
nnnnnnnnnnnnnnnnnnnnnnnnnnnnnnnnnnnnnnnnnnnnnnnnnnnnnnnnnnnnnnnnnnnnnnnnnnnnnnnnnnnnnnnattttttttctgaaatcacattcaagtctttgaagaagaataatgctttcctctgtttgtgaagaagacagattctctctggtcttgacatgctttttccaaaaaagcatgtcaagctattttgtcaacctttccaaagccatcaccttttctagttttatactttcagctgctgtttgtgttgtacactttgtcttcaaacatgtacctgaragaatcacttccagtgttatttggatggtcgtaacaacaaaaatgcatttacttttgtgttgctgtagataatacagtgggattttagtataattttgttagagtgcagaagagggaagtagcaacctctgccattttcctgagcagtggagtcaggggcagactccatactttgcacaggaaccatggcaactgcataatcccactgatatttatgctgtgatgggtaagtgaagattttgtagaactggaaaggggtgatgtaaaactccagagaaaatataaagatcttgaagaaa

SEQ ID NO: 20172 - DNA, 600 bp, Chicken  19866894230350_1
agcctttacctcttcttgaagtcaaggaaattcagctcagtgtactgtccacagagctggtcggtcttttccaggaaggcaggcagctctgttcccatttgctgtcgctgtgtggcacaagagagggcaatttccataaccaggaccatacatacataggttttgtggggatgcaggagatggagagggaggcagtggacaatgtcacggaagtttatgttgtgtaaaacaaaaggcacccctcccagctaccttgccgtcaaggcagctggaagcatccttggcagagcagcactcctygatgacattttcagaggcatcatacagcttgccaagaaagacatcagggacattggtgtgcctccgtgccagctcaaacatgtacctgcagcatggcaggaaaaacaagttaatatttagcactggctgttcccatcaaagccgccagctcttggatgcagcagcaatgtacagcctgcacttctaaaaccttctcctcgtagcacatggttctctttaggctaccatgagaaaagttcaaataataattaaattacgtaatgaagagaaggagtaaggaaactagttgcagtgagtacg

SEQ ID NO: 20173 - DNA, 599 bp, Chicken  19866894230351_1
  misc_feature (1)..(34): n is any nucleotide
nnnnnnnnnnnnnnnnnnnnnnnnnnnnnnnnnntaaatgattctatgattctaagataggagctacttcggtggcacctgagtcgttttacagtttttccttcttattacaggtatgctggtggggtagattgagttcactggagcagcaaggtgtttattgatttctgctctttgaacatacttcaccgtggggttaaacatctgcccaggaattcacctttcccacacacagcagaggagccatgagcggtttgtagggttgtcctcagagcttcccttgtatggtcagagcacagrtagaggacatagagctctttgtgcttgtcagccagaccccagcccctctgcatgctagccctgctcagtggggaatgcttgcatataggccctgtgctggcaaaggctctggaagcatcatctgatgggagcaatccagtgtgttgggattaaattgaattctaatattgtctaacatagtggcatttcatcccagcatgggatcatcttcatcctttatggcactgtatttcacatttcagatggtgaatgaatgttatatccctaggtcaaaacacagctgggacatcaagctttag

SEQ ID NO: 20174 - DNA, 599 bp, Chicken  19866894230358_1
  misc_feature (1)..(12): n is any nucleotide
nnnnnnnnnnnntggtggtgagcacctgactttgcagtttgttgggaatggaagctggaaaaaaaaaaacagagctggaattatgcacccaacgcagatggtaacttctgtgtgaggcatgaaaatgcatcctttagcttgcagttctagggggttttctagaatcttctgttgaagggctccatagttcactggaatccttcagaagccaattcagttactgataagagtgagggaccctgttttctgtcagccttcatagctagacagtaactcctgaatatagcatttcccatcttytttcctggaggcagtctttgattaatttcaaaggccacctatctctttgcagaccccatgtgcaatacgtgttttctaaggttcttctcatcctgttgggtcttgttttgttcttcctcggcaagctggcccatatgagctgcctttggtaggtccctgttgggtgcttccagtccttgccctcatggttcagaactgcgtgtgagcagcctggggctcccccactcctgctcctcatgctccatgatgccgggctccacatctgtctgtctctgctcactcagccctgcccagtgcta

SEQ ID NO: 20175 - DNA, 599 bp, Chicken  19866894230365_1
  misc_feature (1)..(235): n is any nucleotide
nnnnnnnnnnnnnnnnnnnnnnnnnnnnnnnnnnnnnnnnnnnnnnnnnnnnnnnnnnnnnnnnnnnnnnnnnnnnnnnnnnnnnnnnnnnnnnnnnnnnnnnnnnnnnnnnnnnnnnnnnnnnnnnnnnnnnnnnnnnnnnnnnnnnnnnnnnnnnnnnnnnnnnnnnnnnnnnnnnnnnnnnnnnnnnnnnnnnnnnnnnnnnnnnnnnnnnnnnnnnnnnnnnnnnnnnnnnaatttcagcatttaaaaaaaaaaaaaaaaaaaaaaaacttgcttaaagtgaaatttcagaagtamatacgactgctatgaatagaaaattgcaaaattgctaggatattccaaactaaattgtcagctggtaggcagttgcctggagcatcagacttctgggtactattaagtagctgcagccttgcttctcctttgccacattagagccttggaaagtcaggtttgcttctgatactgtgtggtatggtagatgtctggaagtgctttcartatggatctctcatcttttgcagaataaaattcaatattgaatatttcactgagaagcataaatttgtaatttgagaaactacagtggcata

SEQ ID NO: 20176 - DNA, 599 bp, Chicken  19866894230365_2
  misc_feature (1)..(28): n is any nucleotide
nnnnnnnnnnnnnnnnnnnnnnnnnnnnaatttcagcatttaaaaaaaaaaaaaaaaaaaaaaaacttgcttaaagtgaaatttcagaagtamatacgactgctatgaatagaaaattgcaaaattgctaggatattccaaactaaattgtcagctggtaggcagttgcctggagcatcagacttctgggtactattaagtagctgcagccttgcttctcctttgccacattagagccttggaaagtcaggtttgcttctgatactgtgtggtatggtagatgtctggaagtgctttcartatggatctctcatcttttgcagaataaaattcaatattgaatatttcactgagaagcataaatttgtaatttgagaaactacagtggcataattccacctttgtccttttcacagttaaggtcgatgtgattcagtagcataagcccagattcttaaccaagtcggaccttaactgagttacaattgtgttgactaaaagctatgaattataaaaggatctcttactttcaatacaacccttattctgctaggataatctttgttatcgattatattctgaagacagaggaaatacag

SEQ ID NO: 20177 - DNA, 600 bp, Chicken  19866894230378_1
tagcaggtcaaacaaattagtcaaggatgctaatgtcttttaaaaaactttcagtaacaaagacaccaaataattattagctgctcgtgtaatctacctccaatacagcgtcataaaagaggaaatgtttcatatatgagcacaactatgccacagctgtctggagagttatgaagacaggaactgacaaaaaaagatttgaaccaccttctatattttttctactttgacataaatcataagaaaatttatatctacctcacaatgctttagttcacatatcaacagtaaaaggacacrtatcttacagctgaaggctataagatcaagtctgcctgcagtggagaaactcatccaatgttttttaactccttaaacacttcttcgttctgtgatcgaagtggacaatgaagaacagactataagtttatcttttaccatgtcaatcagctggaagaaaaacagcaccaaggagaatatttctaccatactttttcaagtttcatgtccttttaaaagattagaaagagacaggaacccatgcttttgcagatatctactgaaaaaagtacaaatatcattttcacaacaaaagttttg

SEQ ID NO: 20178 - DNA, 600 bp, Chicken  19866894230380_1
cgctgcgtggaactgagttcaattctggggcctcacaggaataagcacaagaagaaaacaagccccagtcccagttggagctaaaacaccaatgctccagtagctggatgtcgagtgggactattgccaagtgcccagagcggtctggaaagaggcttttgatattttcttgattaaacttttttgtccaaaggccttttggagcaccttatcctttgcccaacttgagaaacaccaaaagggggaagaaactccatgcttccttcgggcatttggagctctctgtcacgtttttgcaaygcgaggtgcctgagagtggtgctcacttaacgctcacttggctggagtttcagtctgcctctactccagtagtttgttcccactgctgagctgaactggtgagagaactgtccggccttaaattcccaacagcaacaacaacaacgaccctcaatgctttggtggcaaaaagtgctcttatggctgccttcgctctctcatcctgcttacagtacagccctgaaaacatcagtctcacaactgaggaggtggtaaactgcaggctgagaagtacatgagcttggggggaaggcaccagca

SEQ ID NO: 20179 - DNA, 600 bp, Chicken  19866894230382_1
cttcctcccagcccctgggcacttgtggcagtggtatggaagtcaccctggcagggctgctgctccctcactgcaggattttgcacctcccccataacgcacagactgaggggggagagcagtcaggatctgcgtctgcgcagatgtgctgctcattaaagctgggaagcagaaaaccacccagaatgtctggaactcggatgcccagactggaaattgaaataagttgataaaaataaacagggcagggagaactcagtgcattaggtctaatcccagcgatagcgtggcatggcctcrtttaatgctgggatctggcagaggtagccgataaggagcgagtggtgacagatgccagttggcaccacagaaggaagcttggttttatagcccacactgtgagataataatggatacaaaagaggacacgcggaccaaattgtgtgctctgatggaaaagcttcttaaaagtcagtctctccgaatggaagtggggggttttgtgtgccacagtgtagtgaccgtgctgaacagaacgcatgtagcactgctgaggtggtggccaaacactgttctgaaggttcctttgcgcctcttctt

SEQ ID NO: 20180 - DNA, 600 bp, Chicken  19866894230394_1
tattgcctcctggcatctggctgaagtggagctgaggctttttgtttggtctgtccttaagtattttttaattagaattaaagacaaaggaacatgtttatcctccgtagaaactctgtctggatgaaaagcttgacatgagcaagtggtgagcacttgcagcctggaaggtcgttcagcctggagaagagaagaccccagggatacttcatggctgctttcaaatacttaaagagaggttataaataggagggagaacaacatttttacatgatctgatagtgagaggtcaagggagaktggttttaaactaaaagagaggagatttagattagatattggaaggaaattgtttactcagagggtggtgaggcactggaacaggtttcccagagaagctgcggatggaggtatttgaggccaggttggatggggctctgagcaacctgatctagcaggaggtgttcctgccatggcatgggcattggaactagacttcccattctggtttccaaaaacatggatgctgtgctatagtgagaaatagatgcccagatttctgagctagccgttttagattctgcaagtggaaatgaaagc

SEQ ID NO: 20181 - DNA, 600 bp, Chicken  19866894230402_1
gagaaccattggtgatgggtgaatggttggactggatgatcctgtgggtcttttccaaccttagtgattctatgattctatgattccatgaatatctcagctccttctaaataagccacagcagcacaaagctgcaatctgataagtagccccacctttcccttaacactagctcaacctcctttgctccacacacagtgtgtagcacagttgtgcccttcaggataagtgcacgcagcaaaatgaaggtgtgattttatctcaggttggtaacaacgcttatgatgagcccagtccttrgcgcatgctagcaatcaaagtgggcacaaccagaaatatcaaggcaacaaaaacttgctcactgttagaatcttgtttgttgggcccttcccctcaatcctccatctccttctcagccttcccaggctgtgaggatacaaggccaggctgcaccattgtgcaggaaccagcactgggaggatataggtggcaaagggtgaaggatttatcactgtaggtaatgtaaggtggtggtggaacgtccttaagtgtaagctgatgcargagtggtgttcatctctcacctttgcctgctcacgt

SEQ ID NO: 20182 - DNA, 600 bp, Chicken  19866894230402_2
ggttggtaacaacgcttatgatgagcccagtccttrgcgcatgctagcaatcaaagtgggcacaaccagaaatatcaaggcaacaaaaacttgctcactgttagaatcttgtttgttgggcccttcccctcaatcctccatctccttctcagccttcccaggctgtgaggatacaaggccaggctgcaccattgtgcaggaaccagcactgggaggatataggtggcaaagggtgaaggatttatcactgtaggtaatgtaaggtggtggtggaacgtccttaagtgtaagctgatgcargagtggtgttcatctctcacctttgcctgctcacgttactgggctgtccrctctttcactggaagaatctgaagtctctccaggcctgttttctggcatgttctgatgctccaaacccccatgtttaatgtcctggtgctcttagtactccrctgcatccacttatgttcatttgatgctccggttgtgctgtcatccaggtggaaatatgtgtgcttgcatatcctaccagtcatgtgttcactacactggatatggagcctwttagagagactctcactcccacacagggtgaacaga

SEQ ID NO: 20183 - DNA, 600 bp, Chicken  19866894230402_3
tcaaagtgggcacaaccagaaatatcaaggcaacaaaaacttgctcactgttagaatcttgtttgttgggcccttcccctcaatcctccatctccttctcagccttcccaggctgtgaggatacaaggccaggctgcaccattgtgcaggaaccagcactgggaggatataggtggcaaagggtgaaggatttatcactgtaggtaatgtaaggtggtggtggaacgtccttaagtgtaagctgatgcargagtggtgttcatctctcacctttgcctgctcacgttactgggctgtccrctctttcactggaagaatctgaagtctctccaggcctgttttctggcatgttctgatgctccaaacccccatgtttaatgtcctggtgctcttagtactccrctgcatccacttatgttcatttgatgctccggttgtgctgtcatccaggtggaaatatgtgtgcttgcatatcctaccagtcatgtgttcactacactggatatggagcctwttagagagactctcactcccacacagggtgaacagagattcaggagagtaagtttggaggaagaattaaaatcatacttctcactc

SEQ ID NO: 20184 - DNA, 600 bp, Chicken  19866894230402_4
ccttcccaggctgtgaggatacaaggccaggctgcaccattgtgcaggaaccagcactgggaggatataggtggcaaagggtgaaggatttatcactgtaggtaatgtaaggtggtggtggaacgtccttaagtgtaagctgatgcargagtggtgttcatctctcacctttgcctgctcacgttactgggctgtccrctctttcactggaagaatctgaagtctctccaggcctgttttctggcatgttctgatgctccaaacccccatgtttaatgtcctggtgctcttagtactccrctgcatccacttatgttcatttgatgctccggttgtgctgtcatccaggtggaaatatgtgtgcttgcatatcctaccagtcatgtgttcactacactggatatggagcctwttagagagactctcactcccacacagggtgaacagagattcaggagagtaagtttggaggaagaattaaaatcatacttctcactcccaggtgagttttcctgctgctgaagttttgtacagcaagatggctgtttctctcaggtttagaagaaaggagtgaaccttcctctaacacttgctagatac

SEQ ID NO: 20185 - DNA, 600 bp, Chicken  19866894230402_5
tggtggtggaacgtccttaagtgtaagctgatgcargagtggtgttcatctctcacctttgcctgctcacgttactgggctgtccrctctttcactggaagaatctgaagtctctccaggcctgttttctggcatgttctgatgctccaaacccccatgtttaatgtcctggtgctcttagtactccrctgcatccacttatgttcatttgatgctccggttgtgctgtcatccaggtggaaatatgtgtgcttgcatatcctaccagtcatgtgttcactacactggatatggagcctwttagagagactctcactcccacacagggtgaacagagattcaggagagtaagtttggaggaagaattaaaatcatacttctcactcccaggtgagttttcctgctgctgaagttttgtacagcaagatggctgtttctctcaggtttagaagaaaggagtgaaccttcctctaacacttgctagatactgaatacctgttcatgtctgacatcttactcttgggtgtattcctcttcagaggatgaacacttgaacgtcttaagccttaggaaaaaacttaaaactaagtttttttgagt

SEQ ID NO: 20186 - DNA, 600 bp, Chicken  19866894230403_1
gcctggaatgggagtgatgcctactctggcattgccagtgaccacagagagctcggtgactgtgacctcctcctccagcagcactgacaccacggtcactctgggctttggagacaagtttaagaagccaaaaggctcttgggactgtgcaacatgctttgtatcaaataaggcagaagatagcaaatgtgtagcctgtcagtccgagaaaccaggtatggcttttttttttgttgttaacctcctgttgtttccatcttagtcggtgatattcgttatggaataaaaaaccaaaacagygcatataaaatatcttcaacagcwcagcagccagatgtggttgatgggttaagtgcctgtctgcaagaatgattgcaggcaytttcgaggtggcagcccaggttccagcctatcacataaattgaactgattgtgacatgtgttagtacagagctgagtcaaagcaaatacaccttgcattgctgttggtgaggaaaggtgattgaactgggtgacttaatttaaaaactatggactgatattttcaccagagaaaaatgtgaactccataggaagagtttaaaaaaaaaaaaaaagagg

SEQ ID NO: 20187 - DNA, 600 bp, Chicken  19866894230403_2
tctggcattgccagtgaccacagagagctcggtgactgtgacctcctcctccagcagcactgacaccacggtcactctgggctttggagacaagtttaagaagccaaaaggctcttgggactgtgcaacatgctttgtatcaaataaggcagaagatagcaaatgtgtagcctgtcagtccgagaaaccaggtatggcttttttttttgttgttaacctcctgttgtttccatcttagtcggtgatattcgttatggaataaaaaaccaaaacagygcatataaaatatcttcaacagcwcagcagccagatgtggttgatgggttaagtgcctgtctgcaagaatgattgcaggcaytttcgaggtggcagcccaggttccagcctatcacataaattgaactgattgtgacatgtgttagtacagagctgagtcaaagcaaatacaccttgcattgctgttggtgaggaaaggtgattgaactgggtgacttaatttaaaaactatggactgatattttcaccagagaaaaatgtgaactccataggaagagtttaaaaaaaaaaaaaaagaggcttttatcttctttttctttttca

SEQ ID NO: 20188 - DNA, 600 bp, Chicken  19866894230403_3
actgacaccacggtcactctgggctttggagacaagtttaagaagccaaaaggctcttgggactgtgcaacatgctttgtatcaaataaggcagaagatagcaaatgtgtagcctgtcagtccgagaaaccaggtatggcttttttttttgttgttaacctcctgttgtttccatcttagtcggtgatattcgttatggaataaaaaaccaaaacagygcatataaaatatcttcaacagcwcagcagccagatgtggttgatgggttaagtgcctgtctgcaagaatgattgcaggcaytttcgaggtggcagcccaggttccagcctatcacataaattgaactgattgtgacatgtgttagtacagagctgagtcaaagcaaatacaccttgcattgctgttggtgaggaaaggtgattgaactgggtgacttaatttaaaaactatggactgatattttcaccagagaaaaatgtgaactccataggaagagtttaaaaaaaaaaaaaaagaggcttttatcttctttttctttttcaaaaaagtaaaaatcatatttacaaaccatgagccaaagtatctccactcctcacttgt

SEQ ID NO: 20189 - DNA, 600 bp, Chicken  19866894230414_1
tcttttcttttttttcccctctacttgcacacaaacaaatgtgtgtgtaggctttttggtacttgatttctgcttatttccatcggcctcactgctacatagaggcacactgccctgctcctagctcctcacatcaccaaggtcagggcaggacctgcttctacttgctgaaaatggctctgttgtttcagagcacagagcagaatttaacaatcaaaaaactacatattaggcaggcaattgcaaacacttcagtgcttgggattttgaaagaggttattcctatggcacagttatgtrgaatattttctgaaacgttcacaagtatatttgaatccatccttggggcctggatgtgcagcagcagcagatggattacaaaatctgacttgcaactttttactatcactgctgactgcagccaaagccatctcctttgatatctctgacataatcctatcatcacttcagggaatgcaaagcgatacccgccagacgaggaaagggtggaggtgtttgaaaattacagaagtcatcaaatttcataggccagagaagaatgtaaaaagaggtgaaggaggatgaatgagcagatctgtc

SEQ ID NO: 20190 - DNA, 600 bp, Chicken  19866894230421_1
ctcttctagagccctgcccagtgtttgactctactgaatgtgatttttttctcctagtatgtagttggaattgcccttgttgcatcttttatactgttgctcataatattcatatgattttagactgttcatgccagtaggccatggagtcatgcagtcatgaatgaagtccaataaatagggcaggatcaatacctaattctacaaagaaatcctcttaagaaggacaagataccaaagtttgtattaatagagccttccaatgtatacctctgattttacatcagagagttgtcagtrtccctgatacaatttacactctatcaaaaacacaagcctcagcaagtacagaaagtgaaagcagttttgaaatgatctgtgctagagcaattccctccacaataggtctaagctaacccaaaccgatgcatgttacacaaatgattataaatagaagccaaaattttgtcagaccaatagtgcaaacttaacatattggcccccttggtgtcatttgaagaaaattaatgcagagggccaaagagacagagtctgcaatatgtaatgctccagagacatagatgagattttgttcctagt

SEQ ID NO: 20191 - DNA, 562 bp, Chicken  19866894230422_1
tgaatacacttttcttgtctgaggaggggactggtggagtttccttctgtagaaaacctgcctttgtgtgatagtgcagtttggtgtggctttgcacagcagttaggggctggtatagtaaaactgatcattatccactactgacagttttgaagataggcacggtacttggattatctgggagaatttcctagccctcatgaaagcccataaccatgtgtaccatccttcttcctcctctggcatgtgacttttcaggttattgcctctgataccaacaatgcattttacatgtgtggrtatactgctcttctcagtcagctggagaagtactgtgcaagagcttagtctataatgtctcagacagatatattgaactctggaggttttactgtgcctggacttggccatatatttattattttttaatgaagtacatgtggcatttattttttgggtgggttttgagaaaaagtattttttgttcaggcagagcgccaggctgtgaacacaactgtgcagggatctgctgctgacattgtcaaaacagccactgtgaaca

SEQ ID NO: 20192 - DNA, 402 bp, Chicken  19866894230426_1
tgactgcactggaaagacacctgagaatgtgagtgcttttcctggaattagaaagcaagggtgaatgtgaagaagactgaaggccttgatattaaggaagtcatttatatgaaatacagcatgccatcccaacaaatgataaaaactcatgactgctgaaccagaaatatctgactccttacaatatttattgcaaagtagtagtttccagtgaaaattcctgtgacaaaagtgaaggggctatctgctatttagggtatatggcagatggcaatgggtcatgtagtgtatctccctgayactgttcattttccaggccagttggttacatttgacaggtctactcagaaatcattaacctgatctgcccatgtctgtcatgtctctagcataatgcatctt

SEQ ID NO: 20193 - DNA, 599 bp, Chicken  19866894230431_1
  misc_feature (1)..(28): n is any nucleotide
nnnnnnnnnnnnnnnnnnnnnnnnnnnncaagctgctgtggtgtcaaccctaaaggacccttgttggggtgcaggattcggccactgctgccctccctgttcccttcgtcctttgagcgcatggtgctgcgcagggggggatttaatcaccctcattaagcacacaacagcatcattagggagaatgaagttctcacttcagtggagatggtgaacagctcagttggggcagtgaccatgtggggcagatggggcaaagagctgctacctccctgggtcagaacatgccaatgccatccygcygyggcatctgtgtccttgtgtccgtgtccttgtgtccatgtcctatgtccttgtgtccctgcagagcctggggagctggcaaccccatggcccatccgtggggaagctgccaccaagagggacgggcaccagatgggcatgggacagccatggtrgcttggtcactgctgttctctgmaccactgctttgtcttctggggggttttccagcctcaaggccagcaaagcaaggagctgggrtgcaccgaagcccaataatggggtcacagtgccctgcatcctcgtgttggatggga

SEQ ID NO: 20194 - DNA, 599 bp, Chicken  19866894230431_2
  misc_feature (1)..(25): n is any nucleotide
nnnnnnnnnnnnnnnnnnnnnnnnncaagctgctgtggtgtcaaccctaaaggacccttgttggggtgcaggattcggccactgctgccctccctgttcccttcgtcctttgagcgcatggtgctgcgcagggggggatttaatcaccctcattaagcacacaacagcatcattagggagaatgaagttctcacttcagtggagatggtgaacagctcagttggggcagtgaccatgtggggcagatggggcaaagagctgctacctccctgggtcagaacatgccaatgccatccygcygyggcatctgtgtccttgtgtccgtgtccttgtgtccatgtcctatgtccttgtgtccctgcagagcctggggagctggcaaccccatggcccatccgtggggaagctgccaccaagagggacgggcaccagatgggcatgggacagccatggtrgcttggtcactgctgttctctgmaccactgctttgtcttctggggggttttccagcctcaaggccagcaaagcaaggagctgggrtgcaccgaagcccaataatggggtcacagtgccctgcatcctcgtgttggatgggaacc

SEQ ID NO: 20195 - DNA, 599 bp, Chicken  19866894230431_3
  misc_feature (1)..(23): n is any nucleotide
nnnnnnnnnnnnnnnnnnnnnnncaagctgctgtggtgtcaaccctaaaggacccttgttggggtgcaggattcggccactgctgccctccctgttcccttcgtcctttgagcgcatggtgctgcgcagggggggatttaatcaccctcattaagcacacaacagcatcattagggagaatgaagttctcacttcagtggagatggtgaacagctcagttggggcagtgaccatgtggggcagatggggcaaagagctgctacctccctgggtcagaacatgccaatgccatccygcygyggcatctgtgtccttgtgtccgtgtccttgtgtccatgtcctatgtccttgtgtccctgcagagcctggggagctggcaaccccatggcccatccgtggggaagctgccaccaagagggacgggcaccagatgggcatgggacagccatggtrgcttggtcactgctgttctctgmaccactgctttgtcttctggggggttttccagcctcaaggccagcaaagcaaggagctgggrtgcaccgaagcccaataatggggtcacagtgccctgcatcctcgtgttggatgggaacccc

SEQ ID NO: 20196 - DNA, 600 bp, Chicken  19866894230431_4
agcacacaacagcatcattagggagaatgaagttctcacttcagtggagatggtgaacagctcagttggggcagtgaccatgtggggcagatggggcaaagagctgctacctccctgggtcagaacatgccaatgccatccygcygyggcatctgtgtccttgtgtccgtgtccttgtgtccatgtcctatgtccttgtgtccctgcagagcctggggagctggcaaccccatggcccatccgtggggaagctgccaccaagagggacgggcaccagatgggcatgggacagccatggtrgcttggtcactgctgttctctgmaccactgctttgtcttctggggggttttccagcctcaaggccagcaaagcaaggagctgggrtgcaccgaagcccaataatggggtcacagtgccctgcatcctcgtgttggatgggaaccccgtccctgttgccacctccccatcctgacccacttgcaggtgctctgcaggtccccgcgccacacgcaggcagtaattgcccagctgcagcggtgctcttccagagccgcttgcagtaaaattgcaaactcattattttaattatgtgcagcttt

SEQ ID NO: 20197 - DNA, 600 bp, Chicken  19866894230431_5
agaatgaagttctcacttcagtggagatggtgaacagctcagttggggcagtgaccatgtggggcagatggggcaaagagctgctacctccctgggtcagaacatgccaatgccatccygcygyggcatctgtgtccttgtgtccgtgtccttgtgtccatgtcctatgtccttgtgtccctgcagagcctggggagctggcaaccccatggcccatccgtggggaagctgccaccaagagggacgggcaccagatgggcatgggacagccatggtrgcttggtcactgctgttctctgmaccactgctttgtcttctggggggttttccagcctcaaggccagcaaagcaaggagctgggrtgcaccgaagcccaataatggggtcacagtgccctgcatcctcgtgttggatgggaaccccgtccctgttgccacctccccatcctgacccacttgcaggtgctctgcaggtccccgcgccacacgcaggcagtaattgcccagctgcagcggtgctcttccagagccgcttgcagtaaaattgcaaactcattattttaattatgtgcagctttcctgtgctaatgaagttgggaac

SEQ ID NO: 20198 - DNA, 600 bp, Chicken  19866894230431_6
ggcagatggggcaaagagctgctacctccctgggtcagaacatgccaatgccatccygcygyggcatctgtgtccttgtgtccgtgtccttgtgtccatgtcctatgtccttgtgtccctgcagagcctggggagctggcaaccccatggcccatccgtggggaagctgccaccaagagggacgggcaccagatgggcatgggacagccatggtrgcttggtcactgctgttctctgmaccactgctttgtcttctggggggttttccagcctcaaggccagcaaagcaaggagctgggrtgcaccgaagcccaataatggggtcacagtgccctgcatcctcgtgttggatgggaaccccgtccctgttgccacctccccatcctgacccacttgcaggtgctctgcaggtccccgcgccacacgcaggcagtaattgcccagctgcagcggtgctcttccagagccgcttgcagtaaaattgcaaactcattattttaattatgtgcagctttcctgtgctaatgaagttgggaacctggtaatggggctcggcgacgggcttctctgctaattaatctcattgttctacgctggggc

SEQ ID NO: 20199 - DNA, 600 bp, Chicken  19866894230439_1
aaaccagattgctcattttcatcctctacccaaggtctgcagcttcaggtgctgtatcagaacaacttttgcatcataacagtcactactgtaatttcaaaacatgacaagcaagatgtgagtaatctggcacctctttgacagtatgcacccatatttgtttgttctacagacagctaaaggagaccaaatcctctttgacaacaacagtgagttttctgttcctaaaaacacttaccctttcgtggcttgcagagaaagctttgcttaatggaatatttgtaacacttcctataggaygattrggaaayccttgaaattttgttagcaagagacaaatgcgactaccgctgctcatggaaatgcagcattttagaaaygatcagtgcgcacacacacacaaaacagggagcctcaggaaaataagcttctcaattcacagcaattctgtgttcaaaggtccaaataaaattaaatggattcctgaataccaatgtaggctctcacttgccagagtgatgtatagcgtaaaagggaaggaaatgcatcagaaaagcattcttgtttgacttcagtggacttgaagaacaagcctaaagc

SEQ ID NO: 20200 - DNA, 600 bp, Chicken  19866894230439_2
agattgctcattttcatcctctacccaaggtctgcagcttcaggtgctgtatcagaacaacttttgcatcataacagtcactactgtaatttcaaaacatgacaagcaagatgtgagtaatctggcacctctttgacagtatgcacccatatttgtttgttctacagacagctaaaggagaccaaatcctctttgacaacaacagtgagttttctgttcctaaaaacacttaccctttcgtggcttgcagagaaagctttgcttaatggaatatttgtaacacttcctataggaygattrggaaayccttgaaattttgttagcaagagacaaatgcgactaccgctgctcatggaaatgcagcattttagaaaygatcagtgcgcacacacacacaaaacagggagcctcaggaaaataagcttctcaattcacagcaattctgtgttcaaaggtccaaataaaattaaatggattcctgaataccaatgtaggctctcacttgccagagtgatgtatagcgtaaaagggaaggaaatgcatcagaaaagcattcttgtttgacttcagtggacttgaagaacaagcctaaagcactac

SEQ ID NO: 20201 - DNA, 600 bp, Chicken  19866894230439_3
ctcattttcatcctctacccaaggtctgcagcttcaggtgctgtatcagaacaacttttgcatcataacagtcactactgtaatttcaaaacatgacaagcaagatgtgagtaatctggcacctctttgacagtatgcacccatatttgtttgttctacagacagctaaaggagaccaaatcctctttgacaacaacagtgagttttctgttcctaaaaacacttaccctttcgtggcttgcagagaaagctttgcttaatggaatatttgtaacacttcctataggaygattrggaaayccttgaaattttgttagcaagagacaaatgcgactaccgctgctcatggaaatgcagcattttagaaaygatcagtgcgcacacacacacaaaacagggagcctcaggaaaataagcttctcaattcacagcaattctgtgttcaaaggtccaaataaaattaaatggattcctgaataccaatgtaggctctcacttgccagagtgatgtatagcgtaaaagggaaggaaatgcatcagaaaagcattcttgtttgacttcagtggacttgaagaacaagcctaaagcactacatggat

SEQ ID NO: 20202 - DNA, 600 bp, Chicken  19866894230439_4
agtcactactgtaatttcaaaacatgacaagcaagatgtgagtaatctggcacctctttgacagtatgcacccatatttgtttgttctacagacagctaaaggagaccaaatcctctttgacaacaacagtgagttttctgttcctaaaaacacttaccctttcgtggcttgcagagaaagctttgcttaatggaatatttgtaacacttcctataggaygattrggaaayccttgaaattttgttagcaagagacaaatgcgactaccgctgctcatggaaatgcagcattttagaaaygatcagtgcgcacacacacacaaaacagggagcctcaggaaaataagcttctcaattcacagcaattctgtgttcaaaggtccaaataaaattaaatggattcctgaataccaatgtaggctctcacttgccagagtgatgtatagcgtaaaagggaaggaaatgcatcagaaaagcattcttgtttgacttcagtggacttgaagaacaagcctaaagcactacatggatacatcagctgtaaacaaacctacctacagacatggggagatgcaaataataaaggaagtaacacaatat

SEQ ID NO: 20203 - DNA, 600 bp, Chicken  19866894230439_5
taaatggattcctgaataccaatgtaggctctcacttgccagagtgatgtatagcgtaaaagggaaggaaatgcatcagaaaagcattcttgtttgacttcagtggacttgaagaacaagcctaaagcactacatggatacatcagctgtaaacaaacctacctacagacatggggagatgcaaataataaaggaagtaacacaatattttctaggtctttgttccaaaagagaaacattcagatgcagataaagcaagttaagttcacagtaagactatgaatgataaagcaacaatarccagttcagctcccaaacaaatggaccttgaaatccttgcaccagttacagaagtttaactgttgctttctacatacagcacctgcaaggagaagaatacattgcatgttgcaaaaacagaaggcacagttagagaaatatttattccagagacaggagtgaasgaagaaagcctaccctcaaccagccactgttcccctaccactgtaagttttaagactgcattacgaaccagatcaggaactgagctaagtaaatttaatattcagtgtcttttgtggaagtagctagaggaagaaa

SEQ ID NO: 20204 - DNA, 600 bp, Chicken  19866894230439_6
acagacatggggagatgcaaataataaaggaagtaacacaatattttctaggtctttgttccaaaagagaaacattcagatgcagataaagcaagttaagttcacagtaagactatgaatgataaagcaacaatarccagttcagctcccaaacaaatggaccttgaaatccttgcaccagttacagaagtttaactgttgctttctacatacagcacctgcaaggagaagaatacattgcatgttgcaaaaacagaaggcacagttagagaaatatttattccagagacaggagtgaasgaagaaagcctaccctcaaccagccactgttcccctaccactgtaagttttaagactgcattacgaaccagatcaggaactgagctaagtaaatttaatattcagtgtcttttgtggaagtagctagaggaagaaatggtgacttgattatatttggcttacacaagctcccagatctgttcaccacacagacccacaaactgatgcaacgccatgtcaggaaggcatgtgggctgtcagaactaccaccgacaccacaagaaacactgacctgaggtacagctggaatgtgccataatt

SEQ ID NO: 20205 - DNA, 600 bp, Chicken  19866894230443_1
ggcgggaggccggagggccggcggcgagggccctggggccccgggtgagtgacccccagggctggcggtgcccctcagccgctgcgggccccgctctgcgccttctcccgggagctccgctctcctcacgggcggtgctgcgagtcgcgttgctctttgtagaggagttgggtcttgtcttgcagccgtttgcctgcacctgccttgcagccaaacgtgcgctgggaccgagtgcagcccggagccgtcacggttttacagcttcgtgcattcttttgttttcttcggaaagctgtgaayggtaacgtgtggatgcggtgtgttagctgagcctggagatgggtctgtggaagtgtcacttaaaaggttgaattcagttcgaatagtttagcgttaagaggacagattatgaggctaaacttagtcatgagtcagagagctgtgtgggttaataaatagtgggagctyctcaggagtgtaaaggcrtttgttcctttagatcagatatggaattcagggttccccctcctacacacaccttgtgttgtaaggggagatttgatgttattcctcatcaatctctaatacaaaattgatgta

SEQ ID NO: 20206 - DNA, 571 bp, Chicken  19866894230443_2
tgggtcttgtcttgcagccgtttgcctgcacctgccttgcagccaaacgtgcgctgggaccgagtgcagcccggagccgtcacggttttacagcttcgtgcattcttttgttttcttcggaaagctgtgaayggtaacgtgtggatgcggtgtgttagctgagcctggagatgggtctgtggaagtgtcacttaaaaggttgaattcagttcgaatagtttagcgttaagaggacagattatgaggctaaacttagtcatgagtcagagagctgtgtgggttaataaatagtgggagctyctcaggagtgtaaaggcrtttgttcctttagatcagatatggaattcagggttccccctcctacacacaccttgtgttgtaaggggagatttgatgttattcctcatcaatctctaatacaaaattgatgtacttaacttaacccctaaagcgttgcttttacactgtagagaaggctgtattgcaggaagcaatgattctgaatgcacaagtgtagctaagtaaacaagagcccccagcagcggataatctgtaggtgtgtgatgaggag

SEQ ID NO: 20207 - DNA, 553 bp, Chicken  19866894230443_3
cgtttgcctgcacctgccttgcagccaaacgtgcgctgggaccgagtgcagcccggagccgtcacggttttacagcttcgtgcattcttttgttttcttcggaaagctgtgaayggtaacgtgtggatgcggtgtgttagctgagcctggagatgggtctgtggaagtgtcacttaaaaggttgaattcagttcgaatagtttagcgttaagaggacagattatgaggctaaacttagtcatgagtcagagagctgtgtgggttaataaatagtgggagctyctcaggagtgtaaaggcrtttgttcctttagatcagatatggaattcagggttccccctcctacacacaccttgtgttgtaaggggagatttgatgttattcctcatcaatctctaatacaaaattgatgtacttaacttaacccctaaagcgttgcttttacactgtagagaaggctgtattgcaggaagcaatgattctgaatgcacaagtgtagctaagtaaacaagagcccccagcagcggataatctgtaggtgtgtgatgaggag

SEQ ID NO: 20208 - DNA, 600 bp, Chicken  19866894230447_1
agatggctgaggcatgctctgggttacctcacccatgaagttccccattaatggaccatgactggaggggtgcgatgtggggagcatccttcaccccctgccttgctatgcgtgtccccaaagggcgcaaagcagcagggacaggttccctgccttcccctttcccgtagggatgccactgcccatacggacctcaggctttgcacagcctctctgacctcagcacaggcaccgggccttgttcattgcatggcttttcctgtagctccatcaccgacaaacaagcacggggctgcacgrggcgtccacttccctgcccgccagcctggccctgtcacctcctggtgatttattgctcttttgggcacggggtggcaggggtcgggaggtctcgccgtcagccgccctttgtttggtgtccggcacaatgacccrgcacaggctgtttgctcggcacgccgggtaattaccgtgctggggagaatgggggtcagggaggcagagctgtgccgtgacccgccggcggcgaggccccgcgaggctggggctcgtccttcccctggcaccatctgctcgcgggcggccgctgcgagcgagcgg

SEQ ID NO: 20209 - DNA, 600 bp, Chicken  19866894230447_2
cagggacaggttccctgccttcccctttcccgtagggatgccactgcccatacggacctcaggctttgcacagcctctctgacctcagcacaggcaccgggccttgttcattgcatggcttttcctgtagctccatcaccgacaaacaagcacggggctgcacgrggcgtccacttccctgcccgccagcctggccctgtcacctcctggtgatttattgctcttttgggcacggggtggcaggggtcgggaggtctcgccgtcagccgccctttgtttggtgtccggcacaatgacccrgcacaggctgtttgctcggcacgccgggtaattaccgtgctggggagaatgggggtcagggaggcagagctgtgccgtgacccgccggcggcgaggccccgcgaggctggggctcgtccttcccctggcaccatctgctcgcgggcggccgctgcgagcgagcggcgggactgaggctccggcggcgacgcagcgctcagacggacggacagatggtggtgggtttgaagaggtagagtgtgtactttgttctggagagctcggggaaaaaaaaaaaaaatagagagaaaaagagaggag

SEQ ID NO: 20210 - DNA, 600 bp, Chicken  19866894230449_1
aggccctggcagtgctgtggttgtgtgcagggtatggccaaggtgtgtgtgcacacattgtcccgctgactttaatgcaaaagagcaaatactgaatcaaatgggtgctggtactgtgcatcgcatgtgacttacacagctgacataaggtgtgctgcatgttcctgttggtgtctttagaggaagcactcctaattaatggcacaaagtgtctctacatatttaaggcctttcctcttagagcagggagcgactgctggcagctggggctgtcccagctcagcaatgtgctcctcatamcgtccgcagcgcagatctgtgccacatgtactgtatatccccggtgacagctgagcaaacttatgaaataacaattggggatgattatattggttctgaggattagcacagcaggtagccgtgttggcacagggcagggtttgggccgaaggataaatacacattctttttattattgcagctaatgggaatctgctagactttgaagcatagaaaaggctcactggccacctgtgagctaatcacacggatttgcctcattctgtatttcagctcacttggagcctgtaatctaatttc

SEQ ID NO: 20211 - DNA, 600 bp, Chicken  19866894230453_1
tattgtattttagaagtgcgtccgctcagagaagattgtttcctaattctgtatgacctcctggaaaacatataaaagtgccatatttactcagtgattcgtgtactgctcatatgtatattcatgtgcaattgcatactagaagacttttctgtgaactatagtatttggcttggaatggatggacttcttgtggatgatgcttcaggcatggtttgtatgagttcatataattaattacactaatcaggtgcctaataactaatacaattgccagaatataagaaagtcatttaacaktattgcttaaaaataatacaagtcttccttggtagcagaagcagaggtgacagagtgcctcaaaaataagaagacaatcttaattgtgcattaagcctgaaaaacaaaactgctttgagatcaaaatcgggtggtgtgcacttctacctttgtcacagttaggatggatatcatgctgaccttgtgcatccagccagttcagcagcttctgcaaattgtgattgtgaagcgcctgctccgagtctcatatcgcatttctggcacttgcactaattcttgygttgagtggtgacakgtcct

SEQ ID NO: 20212 - DNA, 600 bp, Chicken  19866894230453_2
ataagaaagtcatttaacaktattgcttaaaaataatacaagtcttccttggtagcagaagcagaggtgacagagtgcctcaaaaataagaagacaatcttaattgtgcattaagcctgaaaaacaaaactgctttgagatcaaaatcgggtggtgtgcacttctacctttgtcacagttaggatggatatcatgctgaccttgtgcatccagccagttcagcagcttctgcaaattgtgattgtgaagcgcctgctccgagtctcatatcgcatttctggcacttgcactaattcttgygttgagtggtgacakgtcctgtaagaatgccaaggaaaaactttgagatttgaccaaatggacagacaccttaatcctgcagcaaggatcttaatttgtcgatagacctgcctagtgttacgttgcaatatagtgmacccaggaaaaagtgaaataaaacgttcttttataataatgagcatggtcagactgcaatgttgtggttatttcttgggaaacattttgtttctgggctacccacagataagcatagccatctttcaggtttaatctctcgggagggaagtcaggaaaacatgc

SEQ ID NO: 20213 - DNA, 600 bp, Chicken  19866894230453_3
aacaktattgcttaaaaataatacaagtcttccttggtagcagaagcagaggtgacagagtgcctcaaaaataagaagacaatcttaattgtgcattaagcctgaaaaacaaaactgctttgagatcaaaatcgggtggtgtgcacttctacctttgtcacagttaggatggatatcatgctgaccttgtgcatccagccagttcagcagcttctgcaaattgtgattgtgaagcgcctgctccgagtctcatatcgcatttctggcacttgcactaattcttgygttgagtggtgacakgtcctgtaagaatgccaaggaaaaactttgagatttgaccaaatggacagacaccttaatcctgcagcaaggatcttaatttgtcgatagacctgcctagtgttacgttgcaatatagtgmacccaggaaaaagtgaaataaaacgttcttttataataatgagcatggtcagactgcaatgttgtggttatttcttgggaaacattttgtttctgggctacccacagataagcatagccatctttcaggtttaatctctcgggagggaagtcaggaaaacatgcttgagaaaacatcat

SEQ ID NO: 20214 - DNA, 600 bp, Chicken  19866894230453_4
gagatcaaaatcgggtggtgtgcacttctacctttgtcacagttaggatggatatcatgctgaccttgtgcatccagccagttcagcagcttctgcaaattgtgattgtgaagcgcctgctccgagtctcatatcgcatttctggcacttgcactaattcttgygttgagtggtgacakgtcctgtaagaatgccaaggaaaaactttgagatttgaccaaatggacagacaccttaatcctgcagcaaggatcttaatttgtcgatagacctgcctagtgttacgttgcaatatagtgmacccaggaaaaagtgaaataaaacgttcttttataataatgagcatggtcagactgcaatgttgtggttatttcttgggaaacattttgtttctgggctacccacagataagcatagccatctttcaggtttaatctctcgggagggaagtcaggaaaacatgcttgagaaaacatcattaggcgtgacaggatttacagtgacacggtctggcttcctgcactccttccctcccgtggctccccgctggagggcacacaatgaagccatccctggggagcagctccctgtgctccacgg

SEQ ID NO: 20215 - DNA, 599 bp, Chicken  19866894230455_1
  misc_feature (1)..(38): n is any nucleotide
nnnnnnnnnnnnnnnnnnnnnnnnnnnnnnnnnnnnnnttttgttgttgaaaaaaataatttccttcaaaaatcctttgttttagacaaatttgctgcgcttaaaacctgacacaggcttactttatggccagatgaaagaacttaccttaatgttcatattagaaatccagttttaatggaataaaattgagataaaacttgctgtaaataaaattaacttcgcttacaactacaactagaactctttccacttaagatttctttcatatactcattttttttcacatactttaaatcratcaagaatgtcttataactttgttttatgaaatagatttaataattggtaaattctggaagccaattaatgatgtcatacttgtgtttatagagccatgaaatttaagaacctaatcacttcccttcattttcatacaataatttttcaattttataacatcaatgaaatacattaggcagttaattctagaaaatgactgccttttcaatagactaatattacttggccttcagccttgctccttacatccataaaaattacatatttcatcttgttatttaaataaggaatgtttc

SEQ ID NO: 20216 - DNA, 600 bp, Chicken  19866894230460_1
ttaaaaaagaaaaaaaaatatatagattcaaaaagagtatatctatctaatatgatgattggcagaaactgctgctcagatggaagtaccatgctgctttagcaacagtagctgacagataaaatgttacattatcatttaagtgattgcattgatatatgaaaatacaggtcaagataatatctccatcctttctatcattctttgtgtccttttttcaaatcaggtatggtagataatattgcaggtgagtaaaagagggatttaagatgacatgcaggctgctttatgaatagtttrtttcttcataaaatacaaggtggagtaatatagttatgtgttggaagagaagaggttcctctgtgtttgagaagaggcttcaaaacaaaattaagacaaagctttattttaattttcataagaattaaaaaaaaatatcttatttctaataacatagaagtgcttcttccaccttagctttttcttcttttcaaaatgtataaatacwtttgattttgaaaataaatctttttttaaaagtgatatattttcttgtgctgcggggagttctgcactcctgcaagttttctttgtcttctg

SEQ ID NO: 20217 - DNA, 600 bp, Chicken  19866894230460_2
atttaagtgattgcattgatatatgaaaatacaggtcaagataatatctccatcctttctatcattctttgtgtccttttttcaaatcaggtatggtagataatattgcaggtgagtaaaagagggatttaagatgacatgcaggctgctttatgaatagtttrtttcttcataaaatacaaggtggagtaatatagttatgtgttggaagagaagaggttcctctgtgtttgagaagaggcttcaaaacaaaattaagacaaagctttattttaattttcataagaattaaaaaaaaaratcttatttctaataacatagaagtgcttcttccaccttagctttttcttcttttcaaaatgtataaatacwtttgattttgaaaataaatctttttttaaaagtgatatattttcttgtgctgcggggagttctgcactcctgcaagttttctttgtcttctggtctaagactatgatcagactagtttttgcctcaattaacatcattgatggccctcttcatagatttttctttgctacttaacatgtagcgttttgggcagcttgaaattacacaacagataagaccatagttctg

SEQ ID NO: 20218 - DNA, 600 bp, Chicken  19866894230460_3
gtccttttttcaaatcaggtatggtagataatattgcaggtgagtaaaagagggatttaagatgacatgcaggctgctttatgaatagtttrtttcttcataaaatacaaggtggagtaatatagttatgtgttggaagagaagaggttcctctgtgtttgagaagaggcttcaaaacaaaattaagacaaagctttattttaattttcataagaattaaaaaaaaatatcttatttctaataacatagaagtgcttcttccaccttagctttttcttcttttcaaaatgtataaatacwtttgattttgaaaataaatctttttttaaaagtgatatattttcttgtgctgcggggagttctgcactcctgcaagttttctttgtcttctggtctaagactatgatcagactagtttttgcctcaattaacatcattgatggccctcttcatagatttttctttgctacttaacatgtagcgttttgggcagcttgaaattacacaacagataagaccatagttctgttttcatgtaatatttctagctccatgtagacaattatttttcaaacagaatactgttgaattttggttttt

SEQ ID NO: 20219 - DNA, 509 bp, Chicken  19866894230472_1
tcagtgtttgtgagcaaacagaacagcgcttgcttgcagaagacatattttactcatttcataagatattttctcattattatgtgacttttaaaaagttagtattctttttccctgtaagttttacaacagcaaccaaggcgaaggtgcccagagctggcggtacccgcgggccgggtggtagccgcagttccgtctgtctccaccaggtggggctggcgctgaaggctccgcggccatcggctgcggctgggggggcctcggcccggcgggggcctgaaaggcaatgcccgggctgartggtaaggaacacaccgaagcgaacgtagtcagttcccagctttcactgatcggtgtcttaatgctgtcattgctgcttgggtcagtgacataaaagttttgctttccctctgcttgctttcttaaactctggaaatgattttaatgtgaaaagaattctttcttggcaaaaaaacaaacaactgacccccccacatgaatctccaaaa

SEQ ID NO: 20220 - DNA, 599 bp, Chicken  19866894230474_1
  misc_feature (1)..(5): n is any nucleotide
nnnnntccctcgctgagagtcaggttgaaaagccatggctgcactgtgctgttcaatggcccaccagttgccatcttaattaactgcaagtgtttaggccttgagttgctatttgcatttctgagagtgcttgaacatgaaatacagagcaattaaacacgagccctttctcattcttcagcttctactccactaactgtggaggaaaaacaagtttagtcagaggtgcatattcctgtgtgagcatgcacacagtcccagacaccaactctttcaatcaaagggaagggaactgatatwcaccagatacatctctcctgatttgcaatctctaaataasaacactcagaggaatctgggcgtgggtttcaaaggaaccacagagcacaaggtgccaatctccaactgaaaacccccaaaagaaatcccggtagtgtcagtgtgactgcagaaagacttctggcccatggttaacacaggtgatcagtccatgctgtttgagacagaaggccgagagcataaaatgagtgtgtgatgataacttcaggaacccaagctgtgtctccaaaagccccggattcccaacttgacaagactga

SEQ ID NO: 20221 - DNA, 600 bp, Chicken  19866894230474_2
gcactgtgctgttcaatggcccaccagttgccatcttaattaactgcaagtgtttaggccttgagttgctatttgcatttctgagagtgcttgaacatgaaatacagagcaattaaacacgagccctttctcattcttcagcttctactccactaactgtggaggaaaaacaagtttagtcagaggtgcatattcctgtgtgagcatgcacacagtcccagacaccaactctttcaatcaaagggaagggaactgatatwcaccagatacatctctcctgatttgcaatctctaaataasaacactcagaggaatctgggcgtgggtttcaaaggaaccacagagcacaaggtgccaatctccaactgaaaacccccaaaagaaatcccggtagtgtcagtgtgactgcagaaagacttctggcccatggttaacacaggtgatcagtccatgctgtttgagacagaaggccgagagcataaaatgagtgtgtgatgataacttcaggaacccaagctgtgtctccaaaagccccggattcccaacttgacaagactgattcacctcctcagcactgaggaatctgccagtaatccctgc

SEQ ID NO: 20222 - DNA, 600 bp, Chicken  19866894230475_1
ccagtagtatgtaatacaattttttctttatatgcttgaatccttttaaatgtccttgctgctattagtgtcgttggtggcttaatggatttcttggtagctgagctcctctttttgatacagttttgttaatctgcgcgtgtgttcagaaagacagtgtgtaaaaatcactcctttcaatttgagatatctggagataatttttatacccactgtgtgaaaataacttgaacagtagtagaattatccattgtaagagaggtgattttgcttgtgaattgggtttaaagataaaatctyccccgttcctgggacctggatttcctattcattgctctctgttaagattaatcgggagcaaggcttaatccagagggtgattgaattgtccttaaacagtgatgtagaacattacccactttatcgaaatccttttacagtcttgcagtgctaagaaatcacgggcctgtgagctgcttgtgatgtgcaccacgtgaaggaggacgctgctgcttcatttgctgcctctttggaaagaaaaatgttttctgagtgtttttgtactacagttgttgtaacttttaagaattaatgccttct

SEQ ID NO: 20223 - DNA, 600 bp, Chicken  19866894230475_2
tgtccttaaacagtgatgtagaacattacccactttatcgaaatccttttacagtcttgcagtgctaagaaatcacgggcctgtgagctgcttgtgatgtgcaccacgtgaaggaggacgctgctgcttcatttgctgcctctttggaaagaaaaatgttttctgagtgtttttgtactacagttgttgtaacttttaagaattaatgccttctgtagctcctctttttcagcaagaagtgtgtagagtctgtagcttgtcttaaatctccagttatagaacacagtgatgatatctagrggctcatttgccccttttggaggcccaagaacaggttgaagcatctaattctcaagggttttcgggctgggatgcgtgaactccatattccatckcttcatttcaggactcccagctgagaatggtttgtgatcaggagcatttgggatctggtagtactcatatgagatgcatgtaccacatccaacaacaaaaaaaaaaacccagcagcttgttgtttaatggccttgctgtaaggacgctggcaggcagcacgctgctggcacgctgytccctgtagtttaggagggtagtcaaggc

SEQ ID NO: 20224 - DNA, 600 bp, Chicken  19866894230475_3
gatgtgcaccacgtgaaggaggacgctgctgcttcatttgctgcctctttggaaagaaaaatgttttctgagtgtttttgtactacagttgttgtaacttttaagaattaatgccttctgtagctcctctttttcagcaagaagtgtgtagagtctgtagcttgtcttaaatctccagttatagaacacagtgatgatatctagrggctcatttgccccttttggaggcccaagaacaggttgaagcatctaattctcaagggttttcgggctgggatgcgtgaactccatattccatckcttcatttcaggactcccagctgagaatggtttgtgatcaggagcatttgggatctggtagtactcatatgagatgcatgtaccacatccaacaacaaaaaaaaaaacccagcagcttgttgtttaatggccttgctgtaaggacgctggcaggcagcacgctgctggcacgctgytccctgtagtttaggagggtagtcaaggccaggagatttaggggcttattaaaggcactgcggcttcaggcactcctgctagctagcagtcacctagtgaataagaaagactaagaaagagtct

SEQ ID NO: 20225 - DNA, 600 bp, Chicken  19866894230475_4
cttttaagaattaatgccttctgtagctcctctttttcagcaagaagtgtgtagagtctgtagcttgtcttaaatctccagttatagaacacagtgatgatatctagrggctcatttgccccttttggaggcccaagaacaggttgaagcatctaattctcaagggttttcgggctgggatgcgtgaactccatattccatckcttcatttcaggactcccagctgagaatggtttgtgatcaggagcatttgggatctggtagtactcatatgagatgcatgtaccacatccaacaackaaaaaaaaaacccagcagcttgttgtttaatggccttgctgtaaggacgctggcaggcagcacgctgctggcacgctgytccctgtagtttaggagggtagtcaaggccaggagatttaggggcttattaaaggcactgcggcttcaggcactcctgctagctagcagtcacctagtgaataagaaagactaagaaagagtcttcggggcgttgctgagtgctgttattcctgtgctttgtgcagcctctttcttgtggccagagtgattctgaccttccgcgttaggcttttccacttt

SEQ ID NO: 20226 - DNA, 600 bp, Chicken  19866894230475_5
agttatagaacacagtgatgatatctagrggctcatttgccccttttggaggcccaagaacaggttgaagcatctaattctcaagggttttcgggctgggatgcgtgaactccatattccatckcttcatttcaggactcccagctgagaatggtttgtgatcaggagcatttgggatctggtagtactcatatgagatgcatgtaccacatccaacaacaaaaaaaaaaacccagcagcttgttgtttaatggccttgctgtaaggacgctggcaggcagcacgctgctggcacgctgytccctgtagtttaggagggtagtcaaggccaggagatttaggggcttattaaaggcactgcggcttcaggcactcctgctagctagcagtcacctagtgaataagaaagactaagaaagagtcttcggggcgttgctgagtgctgttattcctgtgctttgtgcagcctctttcttgtggccagagtgattctgaccttccgcgttaggcttttccactttgtgatatttttctagtatttgaatcctttttccaacagcttatttgcatgctttccaatcatgtttcatttcatgtttc

SEQ ID NO: 20227 - DNA, 599 bp, Chicken  19866894230478_1
  misc_feature (1)..(197): n is any nucleotide
nnnnnnnnnnnnnnnnnnnnnnnnnnnnnnnnnnnnnnnnnnnnnnnnnnnnnnnnnnnnnnnnnnnnnnnnnnnnnnnnnnnnnnnnnnnnnnnnnnnnnnnnnnnnnnnnnnnnnnnnnnnnnnnnnnnnnnnnnnnnnnnnnnnnnnnnnnnnnnnnnnnnnnnnnnnnnnnnnnnnnnnnnnnnnnnnnnnnnttttgtatattcaaaatatcattttgaggtaaacagtaaggaagaaggtcgataagtggttctttccctatctcaaatgcactacaagccacttacacgatcyttcagatatttctgccatcacaactaattcaggctggcttgtgattttgccaactgcagaaattygaagtctcatatactaccttctgtgttgaagatctctatctgtcaatgccttgaaggttgtatttcttccacttgtacgtcccgaatcgtagttcttgtcctcctgcccttctaacttgtttttattaaaactaaccacgcacattacaggatacctggttggctgcgatattctacagttaactgcctggaaggagttttgtacacattttttttgtcacctgaagctgatga

SEQ ID NO: 20228 - DNA, 599 bp, Chicken  19866894230478_2
  misc_feature (1)..(132): n is any nucleotide
nnnnnnnnnnnnnnnnnnnnnnnnnnnnnnnnnnnnnnnnnnnnnnnnnnnnnnnnnnnnnnnnnnnnnnnnnnnnnnnnnnnnnnnnnnnnnnnnnnnnnnnnnnnnnnnnnnnnnnnnnnnnnnnnnnnnttttgtatattcaaaatatcattttgaggtaaacagtaaggaagaaggtcgataagtggttctttccctatctcaaatgcactacaagccacttacacgatcyttcagatatttctgccatcacaactaattcaggctggcttgtgattttgccaactgcagaaattygaagtctcatatactaccttctgtgttgaagatctctatctgtcaatgccttgaaggttgtatttcttccacttgtacgtcccgaatcgtagttcttgtcctcctgcccttctaacttgtttttattaaaactaaccacgcacattacaggatacctggttggctgcgatattctacagttaactgcctggaaggagttttgtacacattttttttgtcacctgaagctgatgaaaggaaaggatgaaaacacatcagtagctgctgtgccactgaatttgaaccagaaaatactgaag

SEQ ID NO: 20229 - DNA, 600 bp, Chicken  19866894230478_3
tacctggttggctgcgatattctacagttaactgcctggaaggagttttgtacacattttttttgtcacctgaagctgatgaaaggaaaggatgaaaacacatcagtagctgctgtgccactgaatttgaaccagaaaatactgaagctgtggcaggcaaggaaaagaccaagtcctggtaaaacacagcaagcgtcagtggttctaggaacattacttgcttttctttcacattgataagatggaaaaatctctcagtactaaaatgatcatagagaaaaatacatcagctttatagcwacagagaaccatcattatctctggtagattaccaccaataatttccactcaaaaaaaatacaaaatgtgtgaaaacagctgaaattaacagctatcaattaaaatcaagaaaaataatatttgtaatttagcatattactagcattagcataaataatatacccrtcattcatgcwtctttattttacttctgacactgccaggaactgaaaataaatgttatcacgaattcacaatggaatatcaagcaggttctgaatcgaaacatgcataatacttcatgagaaacatacacagtga

SEQ ID NO: 20230 - DNA, 600 bp, Chicken  19866894230478_4
agaccaagtcctggtaaaacacagcaagcgtcagtggttctaggaacattacttgcttttctttcacattgataagatggaaaaatctctcagtactaaaatgatcatagagaaaaatacatcagctttatagcwacagagaaccatcattatctctggtagattaccaccaataatttccactcaaaaaaaatacaaaatgtgtgaaaacagctgaaattaacagctatcaattaaaatcaagaaaaataatatttgtaatttagcatattactagcattagcataaataatatacccrtcattcatgcwtctttattttacttctgacactgccaggaactgaaaataaatgttatcacgaattcacaatggaatatcaagcaggttctgaatcgaaacatgcataatacttcatgagaaacatacacagtgattaaattgactcaattatcttccacctggtataccaaccatgcagtgagtcatattaagtattaaggaaaaaacttttttttttaaattccaatgatttttgtgccgacagctaccaccccgtaaccgcccttcagcagaatttgcaatctactccacaagaggg

SEQ ID NO: 20231 - DNA, 600 bp, Chicken  19866894230478_5
tggtaaaacacagcaagcgtcagtggttctaggaacattacttgcttttctttcacattgataagatggaaaaatctctcagtactaaaatgatcatagagaaaaatacatcagctttatagcwacagagaaccatcattatctctggtagattaccaccaataatttccactcaaaaaaaatacaaaatgtgtgaaaacagctgaaattaacagctatcaattaaaatcaagaaaaataatatttgtaatttagcatattactagcattagcataaataatatacccrtcattcatgcwtctttattttacttctgacactgccaggaactgaaaataaatgttatcacgaattcacaatggaatatcaagcaggttctgaatcgaaacatgcataatacttcatgagaaacatacacagtgattaaattgactcaattatcttccacctggtataccaaccatgcagtgagtcatattaagtattaaggaaaaaacttttttttttaaattccaatgatttttgtgccgacagctaccaccccgtaaccgcccttcagcagaatttgcaatctactccacaagagggcaaccaaattc

SEQ ID NO: 20232 - DNA, 600 bp, Chicken  19866894230481_1
accccgcagccactgggagcaggagcaggggctgacatgacatgctggcgtcaaagtctcccctctgtaccatgagctgctctgagagcctgccataatggggagaaatgcagagagaaggaagggatgtgacatcaggattctggggggcaacagcaatacatggtggggctgtgctgcagtttctccccatcccactgccatatgacgcactgcagacacatgcacgcacccagccgtgatgctgacctgctgcttgaagccaaagcctcctccactcccaacctgttgttttgcacyctggcactcacagccagtgagtgtgcagggctgtcaccagcagtcctggcaatgctttgtgctcggatccaagcaaaaagggctgctgtgtaggttatgggagacagtgagaaaaagcctgcctctgccgctgtcagggatagggccaggctgagccagcccatatgctttaacaccaccaccccccaacattcaccagttgtgccagtgagcaattttgattcattccattgtaaaggttgaaaacattttaaaatgtaaatccaagcacaggcgataatcctcgtcaaaaaggaatgt

SEQ ID NO: 20233 - DNA, 600 bp, Chicken  19866894230483_1
tgggtgaataatgctgaagatttcctgcttgacttattagtgaaactatatggtgtttcccccttttctttctgattcttaatttaagaagatgcagttgaaggatgcaacatatacatacatttgttatcagaatgtagtgcattcaagacccacacatgtgcagatgtgaggaaaagaacatatgttcatgacagaaagaaggaaacagctttcttagaggaatctaattaatctaaactagcttggtcaggatgctcaaaggaaattatttcaacttggtagggaaaaaatacaaaycacatgcaatactcattatcacagtatatcctttccttcaaaacaaatgtgaaggttaacttgagagtatgtttcgcctaagaaaagtagagattctcaggaaaagcttttagcamgcagtatgctgtcagaacaggccactccaaatttaggtggagcattggtcaagcagctatcagagtcttaaacacagtaggcacagtggaatgtccttgaaacgtgtctgtacagattgctcatcctctttatcctccaaagcctcgcagcacgcagtcatgctcatagctgatctgtgtgagt

SEQ ID NO: 20234 - DNA, 580 bp, Chicken  19866894230483_2
catacatttgttatcagaatgtagtgcattcaagacccacacatgtgcagatgtgaggaaaagaacatatgttcatgacagaaagaaggaaacagctttcttagaggaatctaattaatctaaactagcttggtcaggatgctcaaaggaaattatttcaacttggtagggaaaaaatacaaaycacatgcaatactcattatcacagtatatcctttccttcaaaacaaatgtgaaggttaacttgagagtatgtttcgcctaagaaaagtagagattctcaggaaaagcttttagcamgcagtatgctgtcagaacaggccactccaaatttaggtggagcattggtcaagcagctatcagagtcttaaacacagtaggcacagtggaatgtccttgaaacgtgtctgtacagattgctcatcctctttatcctccaaagcctcgcagcacgcagtcatgctcatagctgatctgtgtgagtgccttgcgatcaactcagcatggtttttacacacggacagtagcacacttcttttgactaaagaaggcagcagcagttacaggcaaggcatgtttt

SEQ ID NO: 20235 - DNA, 600 bp, Chicken  19866894230485_1
ttttcttcactgcatcctttgcgacttccagacttctcagcaagcgtggtttggaatttttccagttaatttgtgtttcattggagaaagctaatccggatacagaatgtttgcccaaaacatcatgggttaaatgaaccttcctagcactgaaggtgttcgctagaaatctgggtttgtggtagattgctcaggacgtttgggcttggcagcatactgagtgctgcagggcttcctggcttccaaagatgtgagaaagggattccgagaagctcctgggctgcctgtgagtgctgcccrgctctggctgctcaggttttcaggccgcctggtggttcggccttagcccacacgaggctggctctgagccctttgtgttctacccgatccatttctaaatttgttttaatatcgatatttcaagcttacgtgctaacctgagcagttcaagtcttctctagttccgtacttcatgcattcatctctaaggttgcacgaaagagactggagtctaaataygtctgcgagaagtgaagactcagcttcttcatgcttgttgagaagcaatctgcatatggggaaaygtgtgtgcaaaagctg

SEQ ID NO: 20236 - DNA, 600 bp, Chicken  19866894230485_2
agtgctgcagggcttcctggcttccaaagatgtgagaaagggattccgagaagctcctgggctgcctgtgagtgctgcccrgctctggctgctcaggttttcaggccgcctggtggttcggccttagcccacacgaggctggctctgagccctttgtgttctacccgatccatttctaaatttgttttaatatcgatatttcaagcttacgtgctaacctgagcagttcaagtcttctctagttccgtacttcatgcattcatctctaaggttgcacgaaagagactggagtctaaataygtctgcgagaagtgaagactcagcttcttcatgcttgttgagaagcaatctgcatatggggaaaygtgtgtgcaaaagctgctctgccaacttcaaaaagaaatgcttaggaagtactgcgttgtgtgattcaaactgctggcacagaagtggatttcgtaaggtacgtgagrgaggaatttgagaagtgagagtgtcagtgtttacccatctgctttgggctgacttacagctcggagtttgtcctatccgtgtgcctcgacgccagttacgttctgtgtgtgctgcaggacggcttca

SEQ ID NO: 20237 - DNA, 600 bp, Chicken  19866894230485_3
ctgtgagtgctgcccrgctctggctgctcaggttttcaggccgcctggtggttcggccttagcccacacgaggctggctctgagccctttgtgttctacccgatccatttctaaatttgttttaatatcgatatttcaagcttacgtgctaacctgagcagttcaagtcttctctagttccgtacttcatgcattcatctctaaggttgcacgaaagagactggagtctaaataygtctgcgagaagtgaagactcagcttcttcatgcttgttgagaagcaatctgcatatggggaaaygtgtgtgcaaaagctgctctgccaacttcaaaaagaaatgcttaggaagtactgcgttgtgtgattcaaactgctggcacagaagtggatttcgtaaggtacgtgagrgaggaatttgagaagtgagagtgtcagtgtttacccatctgctttgggctgacttacagctcggagtttgtcctatccgtgtgcctcgacgccagttacgttctgtgtgtgctgcaggacggcttcacttcagcttttgtaactaaaaatagtttactgtgacacagtaaaggaactgtaaaactgaattgt

SEQ ID NO: 20238 - DNA, 600 bp, Chicken  19866894230485_4
ttctaaatttgttttaatatcgatatttcaagcttacgtgctaacctgagcagttcaagtcttctctagttccgtacttcatgcattcatctctaaggttgcacgaaagagactggagtctaaataygtctgcgagaagtgaagactcagcttcttcatgcttgttgagaagcaatctgcatatggggaaaygtgtgtgcaaaagctgctctgccaacttcaaaaagaaatgcttaggaagtactgcgttgtgtgattcaaactgctggcacagaagtggatttcgtaaggtacgtgagrgaggaatttgagaagtgagagtgtcagtgtttacccatctgctttgggctgacttacagctcggagtttgtcctatccgtgtgcctcgacgccagttacgttctgtgtgtgctgcaggacggcttcacttcagcttttgtaactaaaaatagtttactgtgacacagtaaaggaactgtaaaactgaattgtgaaagtatcgttctcttactacacagttcaaatgaatgggcataatgggaaatacagcatttacgtgaggggaatttgtgttgtgtttttggagtcatttctgcagct

SEQ ID NO: 20239 - DNA, 600 bp, Chicken  19866894230485_5
ttgggctgacttacagctcggagtttgtcctatccgtgtgcctcgacgccagttacgttctgtgtgtgctgcaggacggcttcacttcagcttttgtaactaaaaatagtttactgtgacacagtaaaggaactgtaaaactgaattgtgaaagtatcgttctcttactacacagttcaaatgaatgggcataatgggaaatacagcatttacgtgaggggaatttgtgttgtgtttttggagtcatttctgcagctccactgtaataaaggaattttttctgttctgctaaatgtatgraggtggtttacctaccatctcagcaggtaacgtgcagtacagttttaagtaggttgatttgaccaagagcaaaatcattccagaagtacttgtacagtaatctgcactttagaaaataaattgaatcctaacttttctgtaaataaagccatgagtagctggaaataaagtctgttgttcttcacttgtcagcatctcctaaagccaggcaagcagcactggcaggtggagctgagagcctaacagtgctccctgacactgcctgaacaactttcactcatggctttaatgtgatgatga

SEQ ID NO: 20240 - DNA, 599 bp, Chicken  19866894230509_1
  misc_feature (1)..(154): n is any nucleotide
nnnnnnnnnnnnnnnnnnnnnnnnnnnnnnnnnnnnnnnnnnnnnnnnnnnnnnnnnnnnnnnnnnnnnnnnnnnnnnnnnnnnnnnnnnnnnnnnnnnnnnnnnnnnnnnnnnnnnnnnnnnnnnnnnnnnnnnnnnnnnnnnnnnnnnnnnnttgaaataccaggtatatactcaagaatccaatatttatctacagaatttatgtttttgtatcaatatacagtttaattccacaagtagaagcttccaattaaagtgctgggagtgtaccaccactctctccaatcacacttaacraagaaaccaatctgatgtgagattattattactaacattacttggaaatatatacacacatacacataaaatatgcaaacagctaagtctgrgytgacagtactcactccaactaaaatttcaagtcatttcaatttgaatctgtaattatttgttataggagtgccttctgcgtggcctcagtgttcggtttctttccggtaccagtgaagttagactgaatgcattcagaaacagcagatgacatgcaatggctgggacctaattagaactggagcaaaaggtaagaaaccctggga

SEQ ID NO: 20241 - DNA, 599 bp, Chicken  19866894230509_2
  misc_feature (1)..(62): n is any nucleotide
nnnnnnnnnnnnnnnnnnnnnnnnnnnnnnnnnnnnnnnnnnnnnnnnnnnnnnnnnnnnnnttgaaataccaggtatatactcaagaatccaatatttatctacagaatttatgtttttgtatcaatatacagtttaattccacaagtagaagcttccaattaaagtgctgggagtgtaccaccactctctccaatcacacttaacraagaaaccaatctgatgtgagattattattactaacattacttggaaatatatacacacatacacataaaatatgcaaacagctaagtctgrgytgacagtactcactccaactaaaatttcaagtcatttcaatttgaatctgtaattatttgttataggagtgccttctgcgtggcctcagtgttcggtttctttccggtaccagtgaagttagactgaatgcattcagaaacagcagatgacatgcaatggctgggacctaattagaactggagcaaaaggtaagaaaccctgggagacaggggaaccacagcagacaatgtgaatttctctgaaacactaagtaaatgaaaaaatttagcttcaattgtctgttggattaaattagc

SEQ ID NO: 20242 - DNA, 599 bp, Chicken  19866894230509_3
  misc_feature (1)..(60): n is any nucleotide
nnnnnnnnnnnnnnnnnnnnnnnnnnnnnnnnnnnnnnnnnnnnnnnnnnnnnnnnnnnnttgaaataccaggtatatactcaagaatccaatatttatctacagaatttatgtttttgtatcaatatacagtttaattccacaagtagaagcttccaattaaagtgctgggagtgtaccaccactctctccaatcacacttaacraagaaaccaatctgatgtgagattattattactaacattacttggaaatatatacacacatacacataaaatatgcaaacagctaagtctgrgytgacagtactcactccaactaaaatttcaagtcatttcaatttgaatctgtaattatttgttataggagtgccttctgcgtggcctcagtgttcggtttctttccggtaccagtgaagttagactgaatgcattcagaaacagcagatgacatgcaatggctgggacctaattagaactggagcaaaaggtaagaaaccctgggagacaggggaaccacagcagacaatgtgaatttctctgaaacactaagtaaatgaaaaaatttagcttcaattgtctgttggattaaattagcca

SEQ ID NO: 20243 - DNA, 600 bp, Chicken  19866894230518_1
agtgcttgatctagcagctgcaatcctgcctgtggcaggggtgttggaccttgatggtccttgaggtcctttccaacccaagtcattctatgattccatgaatactcagaggtttttatttatagtatctgattcatccaataaatcatcaggaggtataaaaagctatcacttccttacttgtcacttctttctgtgtttagttcaggaacagtctgagaataaatcagataaatattaaaagttttgatatattggtggagttctaaaagaaaatagccagagcataagtgaaggaayataaacagacatttaaattaaagttaatgaaatgtgcagaagttttatcagtggtgtggaaaatggcacaggtgttacgacctagcttggaaattgattactggatacacagcctgaagaattcagaccatcttgaggatagatgaggtatgatacagtttttagatactatcaatggtttctgtatcatttacttscaagatacagtgttccttatttctaaaatttcacctttttaatcttgtatctattttttttctctctctctctaaaaaagaaatataggacaaaaataatatt

SEQ ID NO: 20244 - DNA, 600 bp, Chicken  19866894230518_2
gtttagttcaggaacagtctgagaataaatcagataaatattaaaagttttgatatattggtggagttctaaaagaaaatagccagagcataagtgaaggaayataaacagacatttaaattaaagttaatgaaatgtgcagaagttttatcagtggtgtggaaaatggcacaggtgttacgacctagcttggaaattgattactggatacacagcctgaagaattcagaccatcttgaggatagatgaggtatgatacagtttttagatactatcaatggtttctgtatcatttacttscaagatacagtgttccttatttctaaaatttcacctttttaatcttgtatctattttttttctctctctctctaaaaaagaaatataggacaaaaataatattagcttacacaagagattgtcctcatttaggttgtagtgtaatttaagagttacttaggtcttgtactgatactgattcatggggtaaatttcatactatgtgagtaatccttactacctgtgtctatttcacagttacttgactaagtatatgwgaaaagatttctattgtaattattcatatgaataaaggcaaaa

SEQ ID NO: 20245 - DNA, 600 bp, Chicken  19866894230518_3
acagtttttagatactatcaatggtttctgtatcatttacttscaagatacagtgttccttatttctaaaatttcacctttttaatcttgtatctattttttttctctctctctctaaaaaagaaatataggacaaaaataatattagcttacacaagagattgtcctcatttaggttgtagtgtaatttaagagttacttaggtcttgtactgatactgattcatggggtaaatttcatactatgtgagtaatccttactacctgtgtctatttcacagttacttgactaagtatatgwgaaaagatttctattgtaattattcatatgaataaaggcaaaatgtaacacctgcaattaggcacccatgtgatttacaagtttgatcctcttgaagatgaagattgatgccagaaaaatgtaaatgcatggatctgtgtagagagaaaatccaaaaagagcttgtgtacttctctctagaagacttgactggaactcagagtggaagtcatggtcttttcttagtagcatttgcttatagctcattttgatttcttttagcttttaaaatgcttacccaccaccataaataaatggata

SEQ ID NO: 20246 - DNA, 523 bp, Chicken  19866894230519_1
gttttcaaaacaagaattaccataaacaaaagtaaactggatttgttagggagatcaaatgcatctggcctcatgtggtaggacaaggaggaacaggattcagcaaaacatcctaggacaaggagatgacatggggtaaggggaattgctctggaggacaagtctgtgtgtcacaagccaaaaatgggaaggaaagtttgggcttgagagaggtgtaagggcagtgtggggagagagaggaggaacagagtttgaaggttggaactagatggtctttgaggtctgttccaacccaagccwttctatcaaatggtttctttggccactgatggtgtcacaggcagatggcaagtcaatgacagcctcaaacctggtgtctccttgatttgtgaagtttgtggaggagatgttacctcctaaatgaagtcttatcaatctaaagattcggtatctgctttggagtagtcatcaaggactcaaatccaccaagagtgaaaggcagtttcagtgggctgctcatcct

SEQ ID NO: 20247 - DNA, 600 bp, Chicken  19866894230523_1
aaaaaagaaagaaaaagaccaaagcagataagatccaaagcttgagagagacaaagcgtcctcatccctatccagcaatcttatctgatcagtgcccttgcatttcaattcccagcccgaactactgatgtgctgcagagcagccacaggccaaaagctccaaaatcagggctggagccaaggtcctttgtgtcacttcgtatttaggcaattaaataactgttcctgcaaggggacagcatggcaggtgccaaacatgcagccgcttctgctcaatgcttccttgggccgctgggttgraccccagcacaycacagctgctcaccttcagaaggtcaccgctccgtgttttctgaatttctttcccaggatttttgtagctaagcttttactttggcagaaccacaggtttttatcccctccatcatgaagtccagctccagatcagttccctaygcatgtattccttcagattagcttctcttgcttggccctttttacaccctgctctacgtgggcatgctctccaaagtctttgtccacctctyrgatgctctacataattggactgagagagtatgtatgctgggcaatcataga

SEQ ID NO: 20248 - DNA, 600 bp, Chicken  19866894230523_2
aaaagaccaaagcagataagatccaaagcttgagagagacaaagcgtcctcatccctatccagcaatcttatctgatcagtgcccttgcatttcaattcccagcccgaactactgatgtgctgcagagcagccacaggccaaaagctccaaaatcagggctggagccaaggtcctttgtgtcacttcgtatttaggcaattaaataactgttcctgcaaggggacagcatggcaggtgccaaacatgcagccgcttctgctcaatgcttccttgggccgctgggttgraccccagcacaycacagctgctcaccttcagaaggtcaccgctccgtgttttctgaatttctttcccaggatttttgtagctaagcttttactttggcagaaccacaggtttttatcccctccatcatgaagtccagctccagatcagttccctaygcatgtattccttcagattagcttctcttgcttggccctttttacaccctgctctacgtgggcatgctctccaaagtctttgtccacctctyrgatgctctacataattggactgagagagtatgtatgctgggcaatcatagaatcgttaaggtt

SEQ ID NO: 20249 - DNA, 600 bp, Chicken  19866894230523_3
gctccaaaatcagggctggagccaaggtcctttgtgtcacttcgtatttaggcaattaaataactgttcctgcaaggggacagcatggcaggtgccaaacatgcagccgcttctgctcaatgcttccttgggccgctgggttgraccccagcacaycacagctgctcaccttcagaaggtcaccgctccgtgttttctgaatttctttcccaggatttttgtagctaagcttttactttggcagaaccacaggtttttatcccctccatcatgaagtccagctccagatcagttccctaygcatgtattccttcagattagcttctcttgcttggccctttttacaccctgctctacgtgggcatgctctccaaagtctttgtccacctctyrgatgctctacataattggactgagagagtatgtatgctgggcaatcatagaatcgttaaggttggaaacaaacactaagattgccaagtccaactattcacccatcgccaccatgtccactgaccacgtccctcattgccacatctccacggttcttgaacacctgcaggggcagtgactccactatttccctgggcaactgtgcca

SEQ ID NO: 20250 - DNA, 600 bp, Chicken  19866894230523_4
tgccaaacatgcagccgcttctgctcaatgcttccttgggccgctgggttgraccccagcacaycacagctgctcaccttcagaaggtcaccgctccgtgttttctgaatttctttcccaggatttttgtagctaagcttttactttggcagaaccacaggtttttatcccctccatcatgaagtccagctccagatcagttccctaygcatgtattccttcagattagcttctcttgcttggccctttttacaccctgctctacgtgggcatgctctccaaagtctttgtccacctctyrgatgctctacataattggactgagagagtatgtatgctgggcaatcatagaatcgttaaggttggaaacaaacactaagattgccaagtccaactattcacccatcgccaccatgtccactgaccacgtccctcattgccacatctccacggttcttgaacacctgcaggggcagtgactccactatttccctgggcaactgtgccaatgcatcaccactctttttgagaagaaattctacctaatttccaatttgaacctttcttggtgcaacttaaggccatcacctcttgacaagt

SEQ ID NO: 20251 - DNA, 600 bp, Chicken  19866894230523_5
gccaaacatgcagccgcttctgctcaatgcttccttgggccgctgggttgraccccagcacaycacagctgctcaccttcagaaggtcaccgctccgtgttttctgaatttctttcccaggatttttgtagctaagcttttactttggcagaaccacaggtttttatcccctccatcatgaagtccagctccagatcagttccctaygcatgtattccttcagattagcttctcttgcttggccctttttacaccctgctctacgtgggcatgctctccaaagtctttgtccacctctyrgatgctctacataattggactgagagagtatgtatgctgggcaatcatagaatcgttaaggttggaaacaaacactaagattgccaagtccaactattcacccatcgccaccatgtccactgaccacgtccctcattgccacatctccacggttcttgaacacctgcaggggcagtgactccactatttccctgggcaactgtgccaatgcatcaccactctttttgagaagaaattctacctaatttccaatttgaacctttcttggtgcaacttaaggccatcacctcttgacaagtt

SEQ ID NO: 20252 - DNA, 600 bp, Chicken  19866894230525_1
gtacatctaacccgtttagatgtcagaatgcacagggaatgaaccataaatctacaaatgtggttatttttcaatgatgcatatgttttgtggcagatgactctctgaggttaagaagccagcttcctttgtaggctgatgaagcaccagtagcatctactgatatcctgtctagggattgccttagccaatgacaagagtacaaaattaaaaataaaaaaagatagttaaaagaaatcacttcttattttcctgtgagggcatatctgtatgtgtagatgagcaataacagaatgaatmcagtacatattccgcactgcaaagtatccatcaagaactgaaaaaacagaagttcctgtttaatatttaatttatatttaatagtatttaaatagtaaccagcacttcataagccactaggtcagtgtcactgcttcattgcagaatgtgmcctgtatgcttgcaagcatagatatactctcctaacaatgtagaaatgctcatatttatttcagtctcctgctcctcagagaacttctattcctgaataagtataacatgacaagcttctagaagacagaaaggcccttctaacagaag

SEQ ID NO: 20253 - DNA, 600 bp, Chicken  19866894230525_2
agcatctactgatatcctgtctagggattgccttagccaatgacaagagtacaaaattaaaaataaaaaaagatagttaaaagaaatcacttcttattttcctgtgagggcatatctgtatgtgtagatgagcaataacagaatgaatmcagtacatattccgcactgcaaagtatccatcaagaactgaaaaaacagaagttcctgtttaatatttaatttatatttaatagtatttaaatagtaaccagcacttcataagccactaggtcagtgtcactgcttcattgcagaatgtgmcctgtatgcttgcaagcatagatatactctcctaacaatgtagaaatgctcatatttatttcagtctcctgctcctcagagaacttctattcctgaataagtataacatgacaagcttctagaagacagaaaggcccttctaacagaagtattcatgttctccaatattaatttaaccactaagattactgttctaaaatgttccttcttaatggcatccaaatttgcaatgtaccaattatgctaccaggagcttcaagttaaacctaatcactattgacaacattagataaagtgctg

SEQ ID NO: 20254 - DNA, 555 bp, Chicken  19866894230525_3
aacaatgtagaaatgctcatatttatttcagtctcctgctcctcagagaacttctattcctgaataagtataacatgacaagcttctagaagacagaaaggcccttctaacagaagtattcatgttctccaatattaatttaaccactaagattactgttctaaaatgttccttcttaatggcatccaaatttgcaatgtaccaattatgctaccaggagcttcaagttaaacctaatcactattgacaacattagataaagtgctgtttgccttgtgcaaggaatgataattgtttcartttcagtgctattttgctggagaatcatatgcagatctgtcaggaccaattatttagcctaccaaataaaggacttcagcattyacagayagatgaatgccaagacagccagaaagtagccagacgcagtaggtgtgggaattctctatatcattctgtggactcccacactaaatgaagtgcctagtaacgtctaatgcccccaagtccagatggattctggagaggtgggaacaggaaacatatagtgcaaat

SEQ ID NO: 20255 - DNA, 471 bp, Chicken  19866894230525_4
tctagaagacagaaaggcccttctaacagaagtattcatgttctccaatattaatttaaccactaagattactgttctaaaatgttccttcttaatggcatccaaatttgcaatgtaccaattatgctaccaggagcttcaagttaaacctaatcactattgacaacattagataaagtgctgtttgccttgtgcaaggaatgataattgtttcartttcagtgctattttgctggagaatcatatgcagatctgtcaggaccaattatttagcctaccaaataaaggacttcagcattyacagayagatgaatgccaagacagccagaaagtagccagacgcagtaggtgtgggaattctctatatcattctgtggactcccacactaaatgaagtgcctagtaacgtctaatgcccccaagtccagatggattctggagaggtgggaacaggaaacatatagtgcaaat

SEQ ID NO: 20256 - DNA, 465 bp, Chicken  19866894230525_5
agacagaaaggcccttctaacagaagtattcatgttctccaatattaatttaaccactaagattactgttctaaaatgttccttcttaatggcatccaaatttgcaatgtaccaattatgctaccaggagcttcaagttaaacctaatcactattgacaacattagataaagtgctgtttgccttgtgcaaggaatgataattgtttcartttcagtgctattttgctggagaatcatatgcagatctgtcaggaccaattatttagcctaccaaataaaggacttcagcattyacagayagatgaatgccaagacagccagaaagtagccagacgcagtaggtgtgggaattctctatatcattctgtggactcccacactaaatgaagtgcctagtaacgtctaatgcccccaagtccagatggattctggagaggtgggaacaggaaacatatagtgcaaat

SEQ ID NO: 20257 - DNA, 600 bp, Chicken  19866894230531_1
taggggcttcacagacaaggcatacaggctcctgatcaagctccgcatcaggaaaatagggaaagaaatcagaaacatggcagaggagtggctgggcagtgctgctcctgctcacaaagcattccaagccaagagctgctctcctcactgcatttaacctgccctgctccctccaccctggcttcatttcacgcagcgctttgtcttacctgtgcagggcaaaaggaaattgaaaatatccttactgtaaacatttcccctctaatgccatttatgcactgctaactcacacggccccarccatccgatasgcggaatgtgatataagtacacacagcagggaaagaaaacaaataaaacatttctgcagactgcatttgacttgtatcaaaatcctaacagacwccacatttattgtactttatttacaccgtcatcacgtataatataatacaatacagcgttccatttgcagtggtaggcactatgggttttaaaaggtcacagcttttcccctgctcccatcccacccccctccccgctgaagagcacccagagctgccttctgcttgcaatgctgccccatcccagcgctggttg

SEQ ID NO: 20258 - DNA, 600 bp, Chicken  19866894230531_2
cagacaaggcatacaggctcctgatcaagctccgcatcaggaaaatagggaaagaaatcagaaacatggcagaggagtggctgggcagtgctgctcctgctcacaaagcattccaagccaagagctgctctcctcactgcatttaacctgccctgctccctccaccctggcttcatttcacgcagcgctttgtcttacctgtgcagggcaaaaggaaattgaaaatatccttactgtaaacatttcccctctaatgccatttatgcactgctaactcacacggccccarccatccgatasgcggaatgtgatataagtacacacagcagggaaagaaaacaaataaaacatttctgcagactgcatttgacttgtatcaaaatcctaacagacwccacatttattgtactttatttacaccgtcatcacgtataatataatacaatacagcgttccatttgcagtggtaggcactatgggttttaaaaggtcacagcttttcccctgctcccatcccacccccctccccgctgaagagcacccagagctgccttctgcttgcaatgctgccccatcccagcgctggttgtttttgctttg

SEQ ID NO: 20259 - DNA, 600 bp, Chicken  19866894230531_3
tcctgctcacaaagcattccaagccaagagctgctctcctcactgcatttaacctgccctgctccctccaccctggcttcatttcacgcagcgctttgtcttacctgtgcagggcaaaaggaaattgaaaatatccttactgtaaacatttcccctctaatgccatttatgcactgctaactcacacggccccarccatccgatasgcggaatgtgatataagtacacacagcagggaaagaaaacaaataaaacatttctgcagactgcatttgacttgtatcaaaatcctaacagacwccacatttattgtactttatttacaccgtcatcacgtataatataatacaatacagcgttccatttgcagtggtaggcactatgggttttaaaaggtcacagcttttcccctgctcccatcccacccccctccccgctgaagagcacccagagctgccttctgcttgcaatgctgccccatcccagcgctggttgtttttgctttgaagcctgctctgagatggctgcttcccagaaatggatggcgggagctgctgtcacatgctgacatggagagtcccacattttgggggtcatagg

SEQ ID NO: 20260 - DNA, 600 bp, Chicken  19866894230533_1
agcctctaacctcatgtttctagaaagctgctggatatttcagatgtggaagcgcttctgcctttaaatgaggagcagcaatgcttaggataacttctgaaatacatcatttacgaggatttaaaagcagaaggaacagcattttttaaatttatttcctgtttgcaaatacttttgtccaaagatggtggtttattttgttcttttctgtagtcagataaagtccctccctgacccgtgatggttttttcttttgtctgcattccttcctggacgtgaccagccccatttttctcaagytggcgttgaaattttattcaagttgtaaatatttatttgtgaatcatgccttcaggtctgtccttgccagaaagattttatcctgtcatgagacattgactccgtacctcatttctccttgcaggctctgctttggttctttgcttcacacgcagtcagttctggtttgtatttctgctcactgccattttccccacttacacgtctcatccatcctgactggtttatgggatgaataaaatgtatcacgggaggtttgggagttttggttttccacctttttgggtggacaaagcctga

SEQ ID NO: 20261 - DNA, 600 bp, Chicken  19866894230533_2
ttgagcctgtcccaaaagaagttcttcaaaatagatatatttctttatatttcattgtctctgcctaggtaccctggtagcttgagggtcacattcaagtttgttttagcagctgtgatggttgtaaaagctgggatcattctttttgttaggatttgcagagaaactgcttgactttcactgcagtccttgacaaagtgttacagcatgaaattcattgtattagatggattacaaaaaccacttcggtgtgttcccccctcaggatgctcacaaattttaatgttacataaaagtatytgtgctaagttgcatacttttcacactgttgcagttttttatgtgcactttctctgcgtgtgcatccacaaacacaactgtatgtatgtagtctatatttatttatttacattcttctgggagagatgcaaaggaatttttgccttaggattctcatctaattcagttgctaaaatgttgctgctttcttctttgctactgggattcaagagcatcacgagtggggaacatcccagggtagtacaatatttgtattctaaatatggcaaataccacaaataccagagaagcaaatgtctg

SEQ ID NO: 20262 - DNA, 600 bp, Chicken  19866894230537_1
aagtagcagtagggtggaatttcttctgcagtgtgtttcttgtggaagcaatagaagcaaagtgaattaactggcaaatctggtttagtagtagtgacattattcctgtaaattataaagccgctatattattcatttccaaactgcctcttgaaatctgcttctgtcattttcctaaagcagttcatgtcagttgtatctcatttctgtgaccctcttttatgtggataggtattgtagaattggtatctgatgacttttgcttctatgcatagcatattgtactgacttttctattgratttatacagttacataaagtgagctgtggatcattctctggctctgaaaccaccaggcatagtatggctttgaatgtgtataacatatccccagaacaggctggccatgtccaagttgcctcttgagagtggtgcctgaattatgtgaattctcaaattgtagctaaacagtatctgggagaatgctgtttgttttggtcataacttctcagagtttatactagcggtgtaaagctgtgtggtaatgttcaggtaatgttcatgcctacattccagatcctgtttgctatcatactgcc

SEQ ID NO: 20263 - DNA, 599 bp, Chicken  19866894230544_1
  misc_feature (1)..(74): n is any nucleotide
nnnnnnnnnnnnnnnnnnnnnnnnnnnnnnnnnnnnnnnnnnnnnnnnnnnnnnnnnnnnnnnnnnnnnnnnnntgcctcacaccacaaatatcctccctacaaagtcctggagggaaaggaactgctgccataggaagggaaaacaaacaacccaaggagctggagcagcagggacacgccaacagcgcagagaacaaccttggagatttcccctcttgcttccactgccagcaagggtttgtctggacacagaaggactctccctttcatggctcagccactcccctcgctgccacastgggacaggggctttgtttgcaccactgaatgtggaggaaggctgggaggagtacccrggaggtcaccggggtgcccagtgcgctactgggcatcccctgggatggggagcacagccctgagcccagctctgccctgcagtaatctcagagcatcccatggtgctcggggcattcgttgtcacagcactcacctcgtatgctgtgcagggacagaggttgcaggctctccccagggtcacacaggactcctgcgctcagctcaagctgtccatgccctgagcctgccctggagctggac

SEQ ID NO: 20264 - DNA, 599 bp, Chicken  19866894230544_2
  misc_feature (1)..(16): n is any nucleotide
nnnnnnnnnnnnnnnntgcctcacaccacaaatatcctccctacaaagtcctggagggaaaggaactgctgccataggaagggaaaacaaacaacccaaggagctggagcagcagggacacgccaacagcgcagagaacaaccttggagatttcccctcttgcttccactgccagcaagggtttgtctggacacagaaggactctccctttcatggctcagccactcccctcgctgccacastgggacaggggctttgtttgcaccactgaatgtggaggaaggctgggaggagtacccrggaggtcaccggggtgcccagtgcgctactgggcatcccctgggatggggagcacagccctgagcccagctctgccctgcagtaatctcagagcatcccatggtgctcggggcattcgttgtcacagcactcacctcgtatgctgtgcagggacagaggttgcaggctctccccagggtcacacaggactcctgcgctcagctcaagctgtccatgccctgagcctgccctggagctggacgtacctgcaggtaggttgggactgatgcacaaagttgcaggcagcccaggctggtagg

SEQ ID NO: 20265 - DNA, 559 bp, Chicken  19866894230551_1
aagataagttatgaatttaaaaactgaacaaattgtgaactgagaggcaacatagcaatggaaaggttctgtatcttagaatcttaaaaataatttcttaatagcaagccctgcatagatctcctcacctttcagtaaatacagatatatcacaaactgacaggtaaaaatattactgccttgggacataacaacagagattttttttttaataaacactgtataatttagaacaaaaaccatggaactaagctcctgagtgccttttagccatcagacttaatcatcaatagatcataygagaaaaataagtgtttagtatatgtttatttcagcagcaggctcttttgtcattttagaaagattcactactgtgttcactggttatctaaactgcgcaattagtaccttccaattcactgacttccatatcaggttggctacatatcagtctactacaggtaacattgcatcactttatgtatgtatctctcatatcaggagacaaaaacaagcttgtaattagtaccaggtaaaaaagcctgtcatagaacttaat

SEQ ID NO: 20266 - DNA, 599 bp, Chicken  19866894230577_1
  misc_feature (1)..(34): n is any nucleotide
nnnnnnnnnnnnnnnnnnnnnnnnnnnnnnnnnnactctggaggggcctgacccagcctgtgaggcaacaaatgtcagggaacagacgttgccccgaattacttgaactgtcatacttgtgattggaaaggtacacgatcagacctgaatctgagtgtcccctgagggcttcccctgacctgctgagagatgtgcgtggtgtgtttctactcttagaaccaatgggaggtgccagcagtttgccatttctctctgttcgttataaaattcattttctctgaagtgcctcttcctgagacrgtgccagaactggttttaagctgacacggtctcatttctgagaaataaattttgctcttttctttccatgggttggcaagccgttacacttgggaacattcttctttgttgagctacgtgagataaaagatcttctgtgcatttcccagcccatgatgtgcttctctgactaacctgacccacctaggctagggaccaggcagcacagtggaccctctgcttgtacctcagctccctcgttcactgtttggcctctggggttttttctcacaggagctctgtgttaagatgttgggagg

SEQ ID NO: 20267 - DNA, 599 bp, Chicken  19866894230590_1
  misc_feature (1)..(17): n is any nucleotide
nnnnnnnnnnnnnnnnnttcggcagggacggtccggagcgggctgagggcgcctcgcagcagcggaggcggcgctctccggggaccgcgatttttctcctccccggccgggggaggcgttggagtcgcggatcgggtccgggcagcggctgcttcccgcgccgacgagcaccgccggggttggggagggaaggcgatagggaacagtcggaagaatttgcccgcccttgtcgaatttgtttgagagcttccgatatttggcgccaaacaggtaaaagttcagcagctgttttatctgcastagttgcagcaacccagttttgtgccaattttgtcccaaagctccccatcaaaagaaaactcagttatcagaaactcaggtgcgtttttgcttatccatttaagaagagtagctattgctgagggagatacaggtcgattctgaaactttaaaattctcgggaatacgtcgagatgtacttgttgctccttcgtttgcgaactccccataggtcccgastgctcacctcccgtcatgcagaacggtgcgggcacgcaccaaacaatctctccgtagttgagctgggcggcgctgccggg

SEQ ID NO: 20268 - DNA, 600 bp, Chicken  19866894230590_2
cccgcccttgtcgaatttgtttgagagcttccgatatttggcgccaaacaggtaaaagttcagcagctgttttatctgcastagttgcagcaacccagttttgtgccaattttgtcccaaagctccccatcaaaagaaaactcagttatcagaaactcaggtgcgtttttgcttatccatttaagaagagtagctattgctgagggagatacaggtcgattctgaaactttaaaattctcgggaatacgtcgagatgtacttgttgctccttcgtttgcgaactccccataggtcccgastgctcacctcccgtcatgcagaacggtgcgggcacgcaccaaacaatctctccgtagttgagctgggcggcgctgccgggccgggctcactcagactcagcgtgatctgctccatgcggtgggcgccatttgcagcgtctgagacgcgctcaggtgtgaacgatccaaatagtttattacrgcttctaacatcccttaagtacattcrcaagttttctctcttaactttactaccctcctttgcgtgtcaacaaatcattccacaaacactcctcaactgtgcgtgcaggcacttatcca

SEQ ID NO: 20269 - DNA, 600 bp, Chicken  19866894230590_3
taagaagagtagctattgctgagggagatacaggtcgattctgaaactttaaaattctcgggaatacgtcgagatgtacttgttgctccttcgtttgcgaactccccataggtcccgastgctcacctcccgtcatgcagaacggtgcgggcacgcaccaaacaatctctccgtagttgagctgggcggcgctgccgggccgggctcactcagactcagcgtgatctgctccatgcggtgggcgccatttgcagcgtctgagacgcgctcaggtgtgaacgatccaaatagtttattacrgcttctaacatcccttaagtacattcrcaagttttctctcttaactttactaccctcctttgcgtgtcaacaaatcattccacaaacactcctcaactgtgcgtgcaggcacttatccaataaaagtcaggagtcattgctagccatgtactctccctccaatcagggtcattatcacacagccgtaatacagcttacacggctttgtttttttccctcttgtactgatgttcttggttctcagccttgctttctcatgccgtttatcttgctcgacagcttcccgcagaatactttttc

SEQ ID NO: 20270 - DNA, 600 bp, Chicken  19866894230590_4
atacaggtcgattctgaaactttaaaattctcgggaatacgtcgagatgtacttgttgctccttcgtttgcgaactccccataggtcccgastgctcacctcccgtcatgcagaacggtgcgggcacgcaccaaacaatctctccgtagttgagctgggcggcgctgccgggccgggctcactcagactcagcgtgatctgctccatgcggtgggcgccatttgcagcgtctgagacgcgctcaggtgtgaacgatccaaatagtttattacrgcttctaacatcccttaagtacattcrcaagttttctctcttaactttactaccctcctttgcgtgtcaacaaatcattccacaaacactcctcaactgtgcgtgcaggcacttatccaataaaagtcaggagtcattgctagccatgtactctccctccaatcagggtcattatcacacagccgtaatacagcttacacggctttgtttttttccctcttgtactgatgttcttggttctcagccttgctttctcatgccgtttatcttgctcgacagcttcccgcagaatactttttcttgtattcccacacaaggtgacgtgat

SEQ ID NO: 20271 - DNA, 600 bp, Chicken  19866894230591_1
tgtagtctacctagacttcagcaaagcctttgacactgcctcccacagtattctcctgaaagccggcaggccgtggcttggacaggtacatcctttgctgggtaaagaacaggctggggagccaggcccagagaggggtgttggatggagtcacatccagctggtgaccagtcatgaggccctacagagcaatctagacaggctgcatcactgggctgaggccaatgggatgaagatcaagtgctcggtcctgcaacattgacggtgggtggacatttggactagatgatctcagaggtsttttccaacataaggttggaaaggttgataattaaggttgattctatgattctatcaaataaaactgagagcagttttaattaacactggttggaaatcttcattcttgtccattcagaaacaacctaaatacaacttgcagccaaaataacatttgaaaatccagcttgatcccctgaagaacattttcaaagacacttttcccccgcctatgtgaaaggaagatttattttggaacacacgtgaagtctagtctcagtttgatgaagtggttagttttgtcaactaaatttttctact

SEQ ID NO: 20272 - DNA, 600 bp, Chicken  19866894230594_1
ggtgacgagcagtagttccacatcaccaaacttgctccttttagaggatgagactgtcattaaatgtggattacttcaagttggttagcagtccagagagttgcactgggcaccaatccagcagaatgaactgggagagaagggagaggcatgctatgaatcactgataatagagtgtgggcattatctttccagacacaaaagcaacaattacatctggctgctgttccagaatgacgtcttgttccttttctaccatccttctaccggcccacaactctcccaatgcagtggtgtatstacctccttgaaggggtacttcaggaccagaaacttgtttaaaaaaacagtgatttgccacagcatccatgaaacaaacaattagcatgtgtaactttacagtgataaaaagtgaacttgcaccacagcaaaacgaggtctggaaatgttaaattaaagaagcagataacagacaaccctgctgggtaatttaactgaggcttgggctctgttactgtatattaacgttcaaaaaccagtctccctgtgatactgtcttttctgcttcgtccctcttcaaaacctcatgaccttaccgaa

SEQ ID NO: 20273 - DNA, 600 bp, Chicken  19866894230595_1
actatggcaaagctctgaagtgtttgggaattcaggacaaagatctggagcaggggcatttcagtgagatttttctcgctgtctgcacacactgctttcaaagagcagcgtgttctgttcttacagaatttaatcaagcttcaggaatctaagagaactgaaataaccagaactgtggggccagtggtgccttcagaaggatcaaactagcaaagcaaacagcaaagcatctctttttcaattcgtgcttactgcaaattaactagtaatcacagtcattgcaaacaggcttttcagatrgagaggatgctgaattcaggagtgctctccttccctatcattgtggagtcatattggtggctaacatttatgcagtcctgattcatttacaaatggaaatgcgaaggagcattaggaatgaaacacaggttgcatctgggaagtaaccactaccagaactttatctgagctgaagtagtcctctttaatctgatctgttatgyaataataagttaccttaaagcaccagctaaatgttaacggtctccctatcttccatacagttgagctgtagyatgagtcagacagtaacaacccaac

SEQ ID NO: 20274 - DNA, 600 bp, Chicken  19866894230595_2
aaactagcaaagcaaacagcaaagcatctctttttcaattcgtgcttactgcaaattaactagtaatcacagtcattgcaaacaggcttttcagatrgagaggatgctgaattcaggagtgctctccttccctatcattgtggagtcatattggtggctaacatttatgcagtcctgattcatttacaaatggaaatgcgaaggagcattaggaatgaaacacaggttgcatctgggaagtaaccactaccagaactttatctgagctgaagtagtcctctttaatctgatctgttatgyaataataagttaccttaaagcaccagctaaatgttaacggtctccctatcttccatacagttgagctgtagyatgagtcagacagtaacaacccaactggtaggcacctaaaaagcagttccttactgtacctcagcagctggtccacatctcacagctaaggcatgtcccacgcagactaacagaccaatccaggcacaacagtggtgattaaggaggttccttgagctgagacctggagcaaatacagaatgcaagcataatcacagtctgcactttattttttatattatcagtaaa

SEQ ID NO: 20275 - DNA, 600 bp, Chicken  19866894230595_3
tcattgcaaacaggcttttcagatrgagaggatgctgaattcaggagtgctctccttccctatcattgtggagtcatattggtggctaacatttatgcagtcctgattcatttacaaatggaaatgcgaaggagcattaggaatgaaacacaggttgcatctgggaagtaaccactaccagaactttatctgagctgaagtagtcctctttaatctgatctgttatgyaataataagttaccttaaagcaccagctaaatgttaacggtctccctatcttccatacagttgagctgtagyatgagtcagacagtaacaacccaactggtaggcacctaaaaagcagttccttactgtacctcagcagctggtccacatctcacagctaaggcatgtcccacgcagactaacagaccaatccaggcacaacagtggtgattaaggaggttccttgagctgagacctggagcaaatacagaatgcaagcataatcacagtctgcactttattttttatattatcagtaaaatgtctgaagtggtcactatcaatgaaatccctayaggatttatactgtttaaggagtgagagaacagtcag

SEQ ID NO: 20276 - DNA, 600 bp, Chicken  19866894230595_4
aacggtctccctatcttccatacagttgagctgtagyatgagtcagacagtaacaacccaactggtaggcacctaaaaagcagttccttactgtacctcagcagctggtccacatctcacagctaaggcatgtcccacgcagactaacagaccaatccaggcacaacagtggtgattaaggaggttccttgagctgagacctggagcaaatacagaatgcaagcataatcacagtctgcactttattttttatattatcagtaaaatgtctgaagtggtcactatcaatgaaatccctayaggatttatactgtttaaggagtgagagaacagtcagttggagcagcaggttcttgaagaaaattgggtgagctgaactagtttcagggagaggtgtttttcccattcaggtgtggaaagaagcaagaacacagcttcagctgataccaagaatggaatttaacctgtttccattttattttgtagctatctattagaaagagtttatgctggttgtgtacgataaacttacaactaccaggaagatgcctctacacctacaaaaaaattaatttttcctccaaattaatttgctcaaaa

SEQ ID NO: 20277 - DNA, 599 bp, Chicken  19866894230597_1
  misc_feature (1)..(135): n is any nucleotide
nnnnnnnnnnnnnnnnnnnnnnnnnnnnnnnnnnnnnnnnnnnnnnnnnnnnnnnnnnnnnnnnnnnnnnnnnnnnnnnnnnnnnnnnnnnnnnnnnnnnnnnnnnnnnnnnnnnnnnnnnnnnnnnnnnnnnnntgatttgtgctggagaggaaggaggatgagtggaagagctcatctgggagaggggtacagggcagaaacaattgcaaaggaccagtttacagaagtttaaaggtaaatgcacttatttatagtcagtctaggttgtattgtttggcatgagctggtttctcagtrtttacagcactttcactaaaggtatctgttagggactggsagggggttgctataagggaaggagaacatgctgtaagggaaggagaacattctagtcatgctacctcagaaatcactacaccctgtgtgaaaatgccatgcactccttgctaaccaagtggcttaagttaatacaaggggactcaatgttctgacactaaatgccaagggagcaatacctgaaaggtctgagactgtagcactggactacacaatttcctatttactacatatggtatatttagtaactaatcagccaa

SEQ ID NO: 20278 - DNA, 599 bp, Chicken  19866894230597_2
  misc_feature (1)..(95): n is any nucleotide
nnnnnnnnnnnnnnnnnnnnnnnnnnnnnnnnnnnnnnnnnnnnnnnnnnnnnnnnnnnnnnnnnnnnnnnnnnnnnnnnnnnnnnnnnnnnnnntgatttgtgctggagaggaaggaggatgagtggaagagctcatctgggagaggggtacagggcagaaacaattgcaaaggaccagtttacagaagtttaaaggtaaatgcacttatttatagtcagtctaggttgtattgtttggcatgagctggtttctcagtrtttacagcactttcactaaaggtatctgttagggactggsagggggttgctataagggaaggagaacatgctgtaagggaaggagaacattctagtcatgctacctcagaaatcactacaccctgtgtgaaaatgccatgcactccttgctaaccaagtggcttaagttaatacaaggggactcaatgttctgacactaaatgccaagggagcaatacctgaaaggtctgagactgtagcactggactacacaatttcctatttactacatatggtatatttagtaactaatcagccaacctaataatttaaaatagtatttgacaaaaaggtcaagtg

SEQ ID NO: 20279 - DNA, 600 bp, Chicken  19866894230597_3
ggagaacatgctgtaagggaaggagaacattctagtcatgctacctcagaaatcactacaccctgtgtgaaaatgccatgcactccttgctaaccaagtggcttaagttaatacaaggggactcaatgttctgacactaaatgccaagggagcaatacctgaaaggtctgagactgtagcactggactacacaatttcctatttactacatatggtatatttagtaactaatcagccaacctaataatttaaaatagtatttgacaaaaaggtcaagtgtttaatattagggctgggagrgccataaaaatctgtaaggggaatgttctttggaacagagagcaggatgcagctcccggctttgctgtkgtctctctcarttcctcctttcattctgtacaggtgtcctaatttcttaagctcaaacaattccatacattttctgcttctggagaatgtaagtctatggaaatctcagttcccagatgccagaccaaacaattctgtctttggaagcttccactcttgaagtcttctggagctttttgaaaagagtcatagtttatggagtaaacaaaagttcccaggagtaggtggaga

SEQ ID NO: 20280 - DNA, 600 bp, Chicken  19866894230597_4
aaaatgccatgcactccttgctaaccaagtggcttaagttaatacaaggggactcaatgttctgacactaaatgccaagggagcaatacctgaaaggtctgagactgtagcactggactacacaatttcctatttactacatatggtatatttagtaactaatcagccaacctaataatttaaaatagtatttgacaaaaaggtcaagtgtttaatattagggctgggagrgccataaaaatctgtaaggggaatgttctttggaacagagagcaggatgcagctcccggctttgctgtkgtctctctcarttcctcctttcattctgtacaggtgtcctaatttcttaagctcaaacaattccatacattttctgcttctggagaatgtaagtctatggaaatctcagttcccagatgccagaccaaacaattctgtctttggaagcttccactcttgaagtcttctggagctttttgaaaagagtcatagtttatggagtaaacaaaagttcccaggagtaggtggagaactctatatttttatggaaatctcattagaatgcaatcaaagagacttttcaaattaaataattgcttt

SEQ ID NO: 20281 - DNA, 600 bp, Chicken  19866894230597_5
cactccttgctaaccaagtggcttaagttaatacaaggggactcaatgttctgacactaaatgccaagggagcaatacctgaaaggtctgagactgtagcactggactacacaatttcctatttactacatatggtatatttagtaactaatcagccaacctaataatttaaaatagtatttgacaaaaaggtcaagtgtttaatattagggctgggagrgccataaaaatctgtaaggggaatgttctttggaacagagagcaggatgcagctcccggctttgctgtkgtctctctcarttcctcctttcattctgtacaggtgtcctaatttcttaagctcaaacaattccatacattttctgcttctggagaatgtaagtctatggaaatctcagttcccagatgccagaccaaacaattctgtctttggaagcttccactcttgaagtcttctggagctttttgaaaagagtcatagtttatggagtaaacaaaagttcccaggagtaggtggagaactctatatttttatggaaatctcattagaatgcaatcaaagagacttttcaaattaaataattgctttataaagcttag

SEQ ID NO: 20282 - DNA, 600 bp, Chicken  19866894230598_1
ttgagtaacgtacttccaccaaaagcatatgtgcagggaagatgtgatgaaaccctatggctgacaggactgctgaagagcagctttaatgtggatctctaggaaaagccattacttgttcatcttagcttaaaagaagagctccaatgatttctaacttctgctaaaagaaaagagattcagcttgacttgcttccagccctttcatgcgttttttgctggataaatacagaaagtgaggctgtgagatgcttctgcagttcaggcgcattcacagctgtatgaaccccaaaataagcrgggcaggaaagaggatgtaatacagcacaaatcacagcaatgacagcaaaaaagcaaggtcctaggctacagcaagcargggtttgctcaaacacaacaaacacagaaataaaggaaagaaactgcttaccttcagaaggcctcaggtatacagggatctccaacaaattgctcttatttccactgccaacccttaaatgaggtctgggaaggggtggatcctgggctacacaccttctggtcactcaggtacattgcatacacctgagctcccttggcttggcyctgccttcccaccag

SEQ ID NO: 20283 - DNA, 600 bp, Chicken  19866894230598_2
gcagctttaatgtggatctctaggaaaagccattacttgttcatcttagcttaaaagaagagctccaatgatttctaacttctgctaaaagaaaagagattcagcttgacttgcttccagccctttcatgcgttttttgctggataaatacagaaagtgaggctgtgagatgcttctgcagttcaggcgcattcacagctgtatgaaccccaaaataagcrgggcaggaaagaggatgtaatacagcacaaatcacagcaatgacagcaaaaaagcaaggtcctaggctacagcaagcargggtttgctcaaacacaacaaacacagaaataaaggaaagaaactgcttaccttcagaaggcctcaggtatacagggatctccaacaaattgctcttatttccactgccaacccttaaatgaggtctgggaaggggtggatcctgggctacacaccttctggtcactcaggtacattgcatacacctgagctcccttggcttggcyctgccttcccaccaggtgctccatcactgcttcagaccatgactcmgsatttccactatagatggtttccaagtaatgggcagtgaaagggctc

SEQ ID NO: 20284 - DNA, 600 bp, Chicken  19866894230598_3
accccaaaataagcrgggcaggaaagaggatgtaatacagcacaaatcacagcaatgacagcaaaaaagcaaggtcctaggctacagcaagcargggtttgctcaaacacaacaaacacagaaataaaggaaagaaactgcttaccttcagaaggcctcaggtatacagggatctccaacaaattgctcttatttccactgccaacccttaaatgaggtctgggaaggggtggatcctgggctacacaccttctggtcactcaggtacattgcatacacctgagctcccttggcttggcyctgccttcccaccaggtgctccatcactgcttcagaccatgactcmgsatttccactatagatggtttccaagtaatgggcagtgaaagggctcaaatctgacagtaaatgttaagggccatgtgcacagatccactgcactagagaagggggtaggaaagcagaggctgaagcaaaactgagcactttaggcagtggtgtcccctaacgtctcttaaagtggaacagctggagcagggatagctcatagatagaagaaacaaatggggaaaaaggaaaaaaaaagagagctattataat

SEQ ID NO: 20285 - DNA, 600 bp, Chicken  19866894230598_4
tcacagcaatgacagcaaaaaagcaaggtcctaggctacagcaagcargggtttgctcaaacacaacaaacacagaaataaaggaaagaaactgcttaccttcagaaggcctcaggtatacagggatctccaacaaattgctcttatttccactgccaacccttaaatgaggtctgggaaggggtggatcctgggctacacaccttctggtcactcaggtacattgcatacacctgagctcccttggcttggcyctgccttcccaccaggtgctccatcactgcttcagaccatgactcmgsatttccactatagatggtttccaagtaatgggcagtgaaagggctcaaatctgacagtaaatgttaagggccatgtgcacagatccactgcactagagaagggggtaggaaagcagaggctgaagcaaaactgagcactttaggcagtggtgtcccctaacgtctcttaaagtggaacagctggagcagggatagctcatagatagaagaaacaaatggggaaaaaggaaaaaaaaagagagctattataatatatacatatataaaacagtcgtggagttactgggattaaaaacat

SEQ ID NO: 20286 - DNA, 600 bp, Chicken  19866894230598_5
acagcaatgacagcaaaaaagcaaggtcctaggctacagcaagcargggtttgctcaaacacaacaaacacagaaataaaggaaagaaactgcttaccttcagaaggcctcaggtatacagggatctccaacaaattgctcttatttccactgccaacccttaaatgaggtctgggaaggggtggatcctgggctacacaccttctggtcactcaggtacattgcatacacctgagctcccttggcttggcyctgccttcccaccaggtgctccatcactgcttcagaccatgactcmgsatttccactatagatggtttccaagtaatgggcagtgaaagggctcaaatctgacagtaaatgttaagggccatgtgcacagatccactgcactagagaagggggtaggaaagcagaggctgaagcaaaactgagcactttaggcagtggtgtcccctaacgtctcttaaagtggaacagctggagcagggatagctcatagatagaagaaacaaatggggaaaaaggaaaaaaaaagagagctattataatatatacatatataaaacagtcgtggagttactgggattaaaaacattt

SEQ ID NO: 20287 - DNA, 530 bp, Chicken  19866894230598_6
acctgagctcccttggcttggcyctgccttcccaccaggtgctccatcactgcttcagaccatgactcmgsatttccactatagatggtttccaagtaatgggcagtgaaagggctcaaatctgacagtaaatgttaagggccatgtgcacagatccactgcactagagaagggggtaggaaagcagaggctgaagcaaaactgagcactttaggcagtggtgtcccctaacgtctcttaaagtggaacagctggagcagggatagctcatagatagaagaaacaaatggggaaaaaggsaaaaaaaagagagctattataatatatacatatataaaacagtcgtggagttactgggattaaaaacatttgtgatttaggtgcttttacagaaagtgagtaggaaattttaaaaagcacaagaaagtaaatatgaagagattgatgatatgggcttggaggaaatcatggctgggaaaggaaggtgggggtgtttcagcctcagaaagctgcaactggaatcaaaggca

SEQ ID NO: 20288 - DNA, 600 bp, Chicken  19866894230603_1
tgaatgtgtttcaccaactctatatccatcctgtggcaaagaaaccaagcacactttgagatgcaacctaacagctacattgccagtgatctttccaagacaagtttgatccccaagctaaagctcctaaaaattctgaattaacaataattacggggggagcgaagggggagcgctttgaatcacctcttctcatagcatataatcacttctattgtttgaaggcttttaaagatacggaatttgggccagaaaaatgtggaaggttaactaaacttagaatgaccccaaatcaatatrcttctttgtaagtatataaatggtagagtttagagcatctggcagatgagccatgtttaggccacccttgattccttggaggggaaacttctctktaagtaacaggttgacgttctgtaggtaataacttcccatccctcacacttacaggtctcagaatccaagagtcagaaaataaacattagggaatagttcctctcctttagtaaatactgagtaacttcacgtgccacatctaataacgtcagaatgcttcagtgacttaaatgactgtcacttagccaagatgattttgttgtc

SEQ ID NO: 20289 - DNA, 600 bp, Chicken  19866894230603_2
caagacaagtttgatccccaagctaaagctcctaaaaattctgaattaacaataattacggggggagcgaagggggagcgctttgaatcacctcttctcatagcatataatcacttctattgtttgaaggcttttaaagatacggaatttgggccagaaaaatgtggaaggttaactaaacttagaatgaccccaaatcaatatrcttctttgtaagtatataaatggtagagtttagagcatctggcagatgagccatgtttaggccacccttgattccttggaggggaaacttctctktaagtaacaggttgacgttctgtaggtaataacttcccatccctcacacttacaggtctcagaatccaagagtcagaaaataaacattagggaatagttcctctcctttagtaaatactgagtaacttcacgtgccacatctaataacgtcagaatgcttcagtgacttaaatgactgtcacttagccaagatgattttgttgtctcatctaggatcacacaagttttagctgcctcagaactgcactacttttgatgtcacaggaccattcatagttcattgcttgcaaatctaagggc

SEQ ID NO: 20290 - DNA, 600 bp, Chicken  19866894230624_1
tttctgtaatgtttttatctcattgaaaattactcttctttgcttttatctattactgtgttctctcctttaacagtactttgctttcacttatagtatggattaatgttcatgcagtcacacttgcgtatccgaagtaagatctggtatgaaatacttcatggagcctagtagattatgtattgtcctgtaggtaccactttattgatactagggaaggaagaaaggaaagaaagagtaatgactgagaatgcattcgtgcactaatggaataaaaatcaaaataaaatagaaaccttygctttcttaacaatagaartggctaccaacttactttctagaatatatattttttctaagatatagtgaggaatataatgccaacatacataagagaatctctgtcatcttaaacagaatygacaacattacagtagtttatgaaacttattttggcactcatagtgaatagtagtttcyctttcatgttctggtacagaaatttcatcacaagcctgttttttttaattatttctaatcttcatctttaaaataayctattttatctatacatgtgaattagcagacaagagaacgtca

SEQ ID NO: 20291 - DNA, 600 bp, Chicken  19866894230624_2
tcattgaaaattactcttctttgcttttatctattactgtgttctctcctttaacagtactttgctttcacttatagtatggattaatgttcatgcagtcacacttgcgtatccgaagtaagatctggtatgaaatacttcatggagcctagtagattatgtattgtcctgtaggtaccactttattgatactagggaaggaagaaaggaaagaaagagtaatgactgagaatgcattcgtgcactaatggaataaaaatcaaaataaaatagaaaccttygctttcttaacaatagaartggctaccaacttactttctagaatatatattttttctaagatatagtgaggaatataatgccaacatacataagagaatctctgtcatcttaaacagaatygacaacattacagtagtttatgaaacttattttggcactcatagtgaatagtagtttcyctttcatgttctggtacagaaatttcatcacaagcctgttttttttaattatttctaatcttcatctttaaaataayctattttatctatacatgtgaattagcagacaagagaacgtcacactcctaatccatttcat

SEQ ID NO: 20292 - DNA, 600 bp, Chicken  19866894230624_3
acttgcgtatccgaagtaagatctggtatgaaatacttcatggagcctagtagattatgtattgtcctgtaggtaccactttattgatactagggaaggaagaaaggaaagaaagagtaatgactgagaatgcattcgtgcactaatggaataaaaatcaaaataaaatagaaaccttygctttcttaacaatagaartggctaccaacttactttctagaatatatattttttctaagatatagtgaggaatataatgccaacatacataagagaatctctgtcatcttaaacagaatygacaacattacagtagtttatgaaacttattttggcactcatagtgaatagtagtttcyctttcatgttctggtacagaaatttcatcacaagcctgttttttttaattatttctaatcttcatctttaaaataayctattttatctatacatgtgaattagcagacaagagaacgtcacactcctaatccatttcattttctcacctcaagcagcagcacaaatagtattgcatgttttaaaaatatcttyatatrtagatacccatagaagtaacaggattttctgatgctatcagac

SEQ ID NO: 20293 - DNA, 600 bp, Chicken  19866894230624_4
tattgtcctgtaggtaccactttattgatactagggaaggaagaaaggaaagaaagagtaatgactgagaatgcattcgtgcactaatggaataaaaatcaaaataaaatagaaaccttygctttcttaacaatagaartggctaccaacttactttctagaatatatattttttctaagatatagtgaggaatataatgccaacatacataagagaatctctgtcatcttaaacagaatygacaacattacagtagtttatgaaacttattttggcactcatagtgaatagtagtttcyctttcatgttctggtacagaaatttcatcacaagcctgttttttttaattatttctaatcttcatctttaaaataayctattttatctatacatgtgaattagcagacaagagaacgtcacactcctaatccatttcattttctcacctcaagcagcagcacaaatagtattgcatgttttaaaaatatcttyatatrtagatacccatagaagtaacaggattttctgatgctatcagacaccatttgtaaatttcaaaatactgtactgacatcaggatgatagtaagttgagaaaag

SEQ ID NO: 20294 - DNA, 600 bp, Chicken  19866894230624_5
cgtgcactaatggaataaaaatcaaaataaaatagaaaccttygctttcttaacaatagaartggctaccaacttactttctagaatatatattttttctaagatatagtgaggaatataatgccaacatacataagagaatctctgtcatcttaaacagaatygacaacattacagtagtttatgaaacttattttggcactcatagtgaatagtagtttcyctttcatgttctggtacagaaatttcatcacaagcctgttttttttaattatttctaatcttcatctttaaaataayctattttatctatacatgtgaattagcagacaagagaacgtcacactcctaatccatttcattttctcacctcaagcagcagcacaaatagtattgcatgttttaaaaatatcttyatatrtagatacccatagaagtaacaggattttctgatgctatcagacaccatttgtaaatttcaaaatactgtactgacatcaggatgatagtaagttgagaaaagagatgttgatgtgcgactctcccatctatccagagtacttgaaagattgcaatatagtaagctgacaattaggtata

SEQ ID NO: 20295 - DNA, 600 bp, Chicken  19866894230624_6
tataatgccaacatacataagagaatctctgtcatcttaaacagaatygacaacattacagtagtttatgaaacttattttggcactcatagtgaatagtagtttcyctttcatgttctggtacagaaatttcatcacaagcctgttttttttaattatttctaatcttcatctttaaaataayctattttatctatacatgtgaattagcagacaagagaacgtcacactcctaatccatttcattttctcacctcaagcagcagcacaaatagtattgcatgttttaaaaatatcttyatatrtagatacccatagaagtaacaggattttctgatgctatcagacaccatttgtaaatttcaaaatactgtactgacatcaggatgatagtaagttgagaaaagagatgttgatgtgcgactctcccatctatccagagtacttgaaagattgcaatatagtaagctgacaattaggtatatcatcttggggaattctatttttcatagaaatgtcatagctgttaacgagtgccagatatttagaagtttagtttctgtggagctctgatgtgcagacatacataatacttgtaga

SEQ ID NO: 20296 - DNA, 600 bp, Chicken  19866894230624_7
tgccaacatacataagagaatctctgtcatcttaaacagaatygacaacattacagtagtttatgaaacttattttggcactcatagtgaatagtagtttcyctttcatgttctggtacagaaatttcatcacaagcctgttttttttaattatttctaatcttcatctttaaaataayctattttatctatacatgtgaattagcagacaagagaacgtcacactcctaatccatttcattttctcacctcaagcagcagcacaaatagtattgcatgttttaaaaatatcttyatatrtagatacccatagaagtaacaggattttctgatgctatcagacaccatttgtaaatttcaaaatactgtactgacatcaggatgatagtaagttgagaaaagagatgttgatgtgcgactctcccatctatccagagtacttgaaagattgcaatatagtaagctgacaattaggtatatcatcttggggaattctatttttcatagaaatgtcatagctgttaacgagtgccagatatttagaagtttagtttctgtggagctctgatgtgcagacatacataatacttgtagaaactt

SEQ ID NO: 20297 - DNA, 599 bp, Chicken  19866894230627_1
  misc_feature (1)..(111): n is any nucleotide
nnnnnnnnnnnnnnnnnnnnnnnnnnnnnnnnnnnnnnnnnnnnnnnnnnnnnnnnnnnnnnnnnnnnnnnnnnnnnnnnnnnnnnnnnnnnnnnnnnnnnnnnnnnnnnnctctatggtctgggagcagactaaaagtcttagtgaaaattgctagcatgtaataactcaaagctgattgaaggaaattactgtgccttttaattcttcttacaagccttttctgcaatctcagttatatttcagaggtaagtgatagcatccactcttcctgcaattaatccatatgttcagtttgcwcggtgtttttwgaactccactgagaacaagaattaatgggatactggtatctccagaacgagactatctctgacagttctgagaacattctggtgtgaggctgatcatcctgctactatgataaggacatctaacagtctattagtggcctgatatactagatgacaagtgctggaattgtttgaagctggaatttagattgcatctggctgtttccttcctttctctaacagtagttcttaaaattccagagctgtgggtaatcagaaaatacgcgtgaaaaaaagacattatttatg

SEQ ID NO: 20298 - DNA, 599 bp, Chicken  19866894230627_2
  misc_feature (1)..(100): n is any nucleotide
nnnnnnnnnnnnnnnnnnnnnnnnnnnnnnnnnnnnnnnnnnnnnnnnnnnnnnnnnnnnnnnnnnnnnnnnnnnnnnnnnnnnnnnnnnnnnnnnnnnnctctatggtctgggagcagactaaaagtcttagtgaaaattgctagcatgtaataactcaaagctgattgaaggaaattactgtgccttttaattcttcttacaagccttttctgcaatctcagttatatttcagaggtaagtgatagcatccactcttcctgcaattaatccatatgttcagtttgcwcggtgtttttwgaactccactgagaacaagaattaatgggatactggtatctccagaacgagactatctctgacagttctgagaacattctggtgtgaggctgatcatcctgctactatgataaggacatctaacagtctattagtggcctgatatactagatgacaagtgctggaattgtttgaagctggaatttagattgcatctggctgtttccttcctttctctaacagtagttcttaaaattccagagctgtgggtaatcagaaaatacgcgtgaaaaaaagacattatttatgattttgttttc

SEQ ID NO: 20299 - DNA, 600 bp, Chicken  19866894230628_1
tgtcatttacatatgcagtaagttggcctgttttataaaaagaccatcttcatctaacacactgaggctggctggtgttgcatgcaatgatgcactgcatttgatgagagctttcagactgccttttgcattccttaactacagcattttaaatgtctactaaaaatctcacccaaatgtctccagaaagtgagttcatttctgaatccagagtgaaaatgtaaaaaatgtgaactcagtgtttcctgtggagccccatctggagcagcacaacatctctgtgttggctcaggagaattragtgttttcctgacttgcccttgaaaaggagtctttacttgcataatcccttcagttattgggttgcatttaatttgacttccatttgatttttgtgttttatttctttttctcatacctccaaattaaaagctactgattggcaataggtttgtgtttcctactgttatttgaaaaaacaaacaaacaaaaccacataagcaataccaaacaagtaaaatatttttaggaggcagcaagattttactctcccttgcctaaggggaggccttgtggtggcctacagctcctcgtgagggg

SEQ ID NO: 20300 - DNA, 573 bp, Chicken  19866894230630_1
cggctgcgattctcggcggggtccggccgcggctcagcttggggtctcccggcgtggaagctctgtgaaacgcgtcccacgggaaccgaggtgcaacgcagcggctccgtcccgagctccggcggagcaagagcagcgccgagcaccgggacgggcgggtggaagacggaaggggaaggctccgggaccgtgctgagcgctgcccccccgccagccctgggctcttgcgccttgggagcaggattcgatgtcagaccagtcgacgcgaatagttcttctcagggagatttctgggcttcrragcggcaagaagtcgctctgcgatgaccgtcttcgtgaggactccgctgccgggcgcttcccgagatctccccaccggcgatccgctcggcccggccaacgtatcgctccggccccggggatgtccggagcctggcagagccgtgcccgggggcagaggtgtgaaacgcggccggcgcagcccctcctgcagcgatcccgcgttaaacgcagctccggttattggtccgctctccggacccgccctcgcgctccgtcctgggacggccgctc

SEQ ID NO: 20301 - DNA, 572 bp, Chicken  19866894230630_2
ggctgcgattctcggcggggtccggccgcggctcagcttggggtctcccggcgtggaagctctgtgaaacgcgtcccacgggaaccgaggtgcaacgcagcggctccgtcccgagctccggcggagcaagagcagcgccgagcaccgggacgggcgggtggaagacggaaggggaaggctccgggaccgtgctgagcgctgcccccccgccagccctgggctcttgcgccttgggagcaggattcgatgtcagaccagtcgacgcgaatagttcttctcagggagatttctgggcttcrragcggcaagaagtcgctctgcgatgaccgtcttcgtgaggactccgctgccgggcgcttcccgagatctccccaccggcgatccgctcggcccggccaacgtatcgctccggccccggggatgtccggagcctggcagagccgtgcccgggggcagaggtgtgaaacgcggccggcgcagcccctcctgcagcgatcccgcgttaaacgcagctccggttattggtccgctctccggacccgccctcgcgctccgtcctgggacggccgctc

SEQ ID NO: 20302 - DNA, 600 bp, Chicken  19866894230634_1
ccacttcattggaaaaaaaaaataggccatggtatttgacattttaaataatagaacttggagaagcaatggctgaaccatagatggggctgagcctgccagctgcatttgtcaaatggtattgggtgttctccatgagctgcgtgttcagtgctcactgtgagtccaaaatcacctccagagagacttctgatgtctagaagtggaacaagtaaggagtaaaactgcagcctgcttgagagctgcccagcacaggagccagggatttgctccccagctggctgggttagcacagctgtrcaggacgggctgcccacctggtgctccaactcagagcttttgtctggccaaggggtgggcacagcagtgatcagtgatgggacccaggcttggccagccatgtctggggctgcaggcgggacctcaggtagccttgggtgtccacagacatttggggtcagcacgttctccttgggtgtggagggagaacttcattatgggagtcacggcgtttgccctttacaagcacttttcactcactggttgcatttgaagcagtggtcgttactgagcaaggaatgatagaatcgttattccatc

SEQ ID NO: 20303 - DNA, 600 bp, Chicken  19866894230646_1
gtgtagctgttctggtttttactattccacttgtccttatctattcaaaattatggcatttactgttgtaaccattaaaaatacaatactcaatagtcaccaacgtttgttccccctggtattcagagaggacagaagctccttcagagggtttgatgactggcagcagtaaagatctcatttatactgctgctttgtatgtatgtagcagctggagaaaatcctcagctggcgtcctgaagactgaggactccaatagggtcatatcagatttgttttgctgcactcacaacatgaccraatttacaagagttaaaattgtttacagcaaaaggcaggctgttctcrttgcttttcacaaggcagaggtttcctcctcctcacactgaaggcaaggctttccaatggttcatcttaggatagcgcaaggaaaactctcccctcctttccaatctactttagtcatgacccaacctcacaccatgatgaaagggtggagttttcattaagtacattcagggtttgatttctgtgctgaaagtcagttgccatgtttcctttcaggatttcccccaaagagatctgcatacaccagtatta

SEQ ID NO: 20304 - DNA, 600 bp, Chicken  19866894230646_2
aattatggcatttactgttgtaaccattaaaaatacaatactcaatagtcaccaacgtttgttccccctggtattcagagaggacagaagctccttcagagggtttgatgactggcagcagtaaagatctcatttatactgctgctttgtatgtatgtagcagctggagaaaatcctcagctggcgtcctgaagactgaggactccaatagggtcatatcagatttgttttgctgcactcacaacatgaccraatttacaagagttaaaattgtttacagcaaaaggcaggctgttctcrttgcttttcacaaggcagaggtttcctcctcctcacactgaaggcaaggctttccaatggttcatcttaggatagcgcaaggaaaactctcccctcctttccaatctactttagtcatgacccaacctcacaccatgatgaaagggtggagttttcattaagtacattcagggtttgatttctgtgctgaaagtcagttgccatgtttcctttcaggatttcccccaaagagatctgcatacaccagtattaacaagattttggatctctgctattccttagtttgctcttgcttgctca

SEQ ID NO: 20305 - DNA, 599 bp, Chicken  19866894230650_1
  misc_feature (1)..(92): n is any nucleotide
nnnnnnnnnnnnnnnnnnnnnnnnnnnnnnnnnnnnnnnnnnnnnnnnnnnnnnnnnnnnnnnnnnnnnnnnnnnnnnnnnnnnnnnnnnnncaagtgagagcagacacgttgcaaatttagtacctgatgtgtggtgccaccctgaaacatctaaaaccacatgctttaatgtttgggagctgaaatgtgctgaacatctctctgattcattcacagtaagacatgggatggcttgatcctgttggcaggaagaaagcctgaggggttggtaatgaaggaataatggcattcaagtggmttttccctaaagttaaccattcattcaaggtgatctcagttacctgaarctgcagatggctgtactcctggaatgaaatcagggctaagtctgccttctagcctactctgcctcacacagttccccaaaagatcaaaaattttatccacggtcacccagaaataaagtctctacatatcagcacttgtaccttcccaattctagactagataagctgaaacccaagttgcattgtattagtgacagagtcaggaaaataaactcaaggaaaaaaaatctttacctcagatgctgaaatc

SEQ ID NO: 20306 - DNA, 599 bp, Chicken  19866894230650_2
  misc_feature (1)..(43): n is any nucleotide
nnnnnnnnnnnnnnnnnnnnnnnnnnnnnnnnnnnnnnnnnnncaagtgagagcagacacgttgcaaatttagtacctgatgtgtggtgccaccctgaaacatctaaaaccacatgctttaatgtttgggagctgaaatgtgctgaacatctctctgattcattcacagtaagacatgggatggcttgatcctgttggcaggaagaaagcctgaggggttggtaatgaaggaataatggcattcaagtggmttttccctaaagttaaccattcattcaaggtgatctcagttacctgaarctgcagatggctgtactcctggaatgaaatcagggctaagtctgccttctagcctactctgcctcacacagttccccaaaagatcaaaaattttatccacggtcacccagaaataaagtctctacatatcagcacttgtaccttcccaattctagactagataagctgaaacccaagttgcattgtattagtgacagagtcaggaaaataaactcaaggaaaaaaaatctttacctcagatgctgaaatctgttagagagggaaaagtattgtcttacatctaatactaaagacacaaa

SEQ ID NO: 20307 - DNA, 600 bp, Chicken  19866894230651_1
ctgtgctggtcctgcaagagcagagcaacttgtgtgcagcactgagctctggtgctggctgctatgtcagaggtgctgcccacagagatgccacaagtccccacttcccatcctgtggtctctgtgcaagatcacacagcctcccgagaacgcatccaggaacagtgctgaactctgagacactgagcagactataaataggatcctgggaagaaaggcagacctggaagggacctttagagatcatttcatccaacacaccctctctgtggtttgccagaagggaatcagtgaaatgaytgcaaattctctgctcgtcccttgaaaacattcccacatctcaatacatgggggaaacaagcacatgtaaaagggttggggtgtcagtgggatgagccccamtgctccaagcaatgagatttgggaggggacaggcacagcaccttccatccacgcacaggaataagcagaattgcaaacctacacaagactcagactgacctccataaagcaaatcaggctgtcctgggagcaaggcttagctttccttctttttgaaataaaactgcattgaagaggagtggctttcatcttccaagt

SEQ ID NO: 20308 - DNA, 600 bp, Chicken  19866894230651_2
acttcccatcctgtggtctctgtgcaagatcacacagcctcccgagaacgcatccaggaacagtgctgaactctgagacactgagcagactataaataggatcctgggaagaaaggcagacctggaagggacctttagagatcatttcatccaacacaccctctctgtggtttgccagaagggaatcagtgaaatgaytgcaaattctctgctcgtcccttgaaaacattcccacatctcaatacatgggggaaacaagcacatgtaaaagggttggggtgtcagtgggatgagccccamtgctccaagcaatgagatttgggaggggacaggcacagcaccttccatccacgcacaggaataagcagaattgcaaacctacacaagactcagactgacctccataaagcaaatcaggctgtcctgggagcaaggcttagctttccttctttttgaaataaaactgcattgaagaggagtggctttcatcttccaagtgaaaatttctcttagaaacgtctggggtttttcatcagggattttgaagtgaaatttgtcattttttatacccatgaaccaggtctggactttctcttccct

SEQ ID NO: 20309 - DNA, 600 bp, Chicken  19866894230661_1
tgtggagacccagctacaatacagagctgactgtgggatagacctattagatcacttagtcatgctagggctgtcctcttcagatgttcttaagtgttagatctctcagattttcactccctggcagactgtgtagacccagctttgtgcttgttgtcaaactcatcttgatgacatcttgggaagcctaaaaatatgatagggaaagaagcttgacattatttatgcagttgtcttctgaagttgtctcaggcaactgcctcccaccctcaggccccaaaccaaatccccatttgtctsacatgttggctgctttctcctgctgacagttaaattgattcccatttgctatttaaagtgaggagagtgtctgtctggaattctgaaggtttaaaattcccgaggcctggacacagcatggaatggaagacagggattttctttgcatgggccccacagcctcctggcagcttcacaactctcagccatgtgatgggtttgctttcttcatgcattgttctgacagttagttgacctttcttctgagtaggttggcctgcacagggctggtgtcaccctgaagaccaaggatgtttctgg

SEQ ID NO: 20310 - DNA, 600 bp, Chicken  19866894230664_1
aaggctctggggctgcattgctcagaggtgattaacctcagtttccagccagcttccagcttaagcaattacactgctgcgcattcagactcctcctttggtcttttggcacttcactgatctgtcctgaaaagctgtgggcttccaggcaaggggaggctgtgctggtggaggtggaggctttaatagctgcatgtccaagttcacttcattctatgcagtgtcacagagcagtctgcagtcaccacactcagagacaccgtgggctcttggtcaactaagtcctgtccagatatctcragaatagggctgacacctttaatattgacttcataaactcatggaatcattaaggttggaaaagaccactaagaccatcaagtccaaccatcagcccacccccttgcaggtggatacagctgaaaactgccctttgtggagcactgctgaggaataactccctttctcctttttatgatgtaaggagggaggggagaaggacagcaactggaaagattgctctaggggatgataaaaccatggcagtttattgcctgtattttgggaaaagaatgcatgctcctacggagctaaagaaat

SEQ ID NO: 20311 - DNA, 600 bp, Chicken  19866894230665_1
tttcccagcatgaacacaaagcactgtgagttaccaatgcttttaaaaatacctaagatgactgaagcatctattaatacatgactcatttctgcacacctgagcttgctacactgcgtgtttctggtgcaagctgcaggcaagcattacacggctccaaaaagtagtaccattctgcttcgagtcgtaataatttaggatcaagagcttggaaacaaggggggtagggaaaaaaaaggacatcagaggtgttgaaaagtcaagcaaggctgttttagaacacgatacataaatatctcmagtgtatayacacacatytcctgatagcagtgyttatcacaaagatgcatgttcctctcacaatccagatgctaattctgtatttaattgcttcataaagtggtggttcagtgtcttctaaattctattactgctgctactctaacagcaattatctgttaaaagctggtaggattgtccattattacagcagtaagtcggcattatttttcttccatattgttcatcctctctggtcaatggctcgttatgaaagaaaaagtatagcatacacttattgaaatgagttaagggataaaa

SEQ ID NO: 20312 - DNA, 600 bp, Chicken  19866894230665_2
atgaacacaaagcactgtgagttaccaatgcttttaaaaatacctaagatgactgaagcatctattaatacatgactcatttctgcacacctgagcttgctacactgcgtgtttctggtgcaagctgcaggcaagcattacacggctccaaaaagtagtaccattctgcttcgagtcgtaataatttaggatcaagagcttggaaacaaggggggtagggaaaaaaaaggacatcagaggtgttgaaaagtcaagcaaggctgttttagaacacgatacataaatatctcmagtgtatayacacacatytcctgatagcagtgyttatcacaaagatgcatgttcctctcacaatccagatgctaattctgtatttaattgcttcataaagtggtggttcagtgtcttctaaattctattactgctgctactctaacagcaattatctgttaaaagctggtaggattgtccattattacagcagtaagtcggcattatttttcttccatattgttcatcctctctggtcaatggctcgttatgaaagaaaaagtatagcatacacttattgaaatgagttaagggataaaacagagtaat

SEQ ID NO: 20313 - DNA, 600 bp, Chicken  19866894230665_3
aagcactgtgagttaccaatgcttttaaaaatacctaagatgactgaagcatctattaatacatgactcatttctgcacacctgagcttgctacactgcgtgtttctggtgcaagctgcaggcaagcattacacggctccaaaaagtagtaccattctgcttcgagtcgtaataatttaggatcaagagcttggaaacaaggggggtagggaaaaaaaaggacatcagaggtgttgaaaagtcaagcaaggctgttttagaacacgatacataaatatctcmagtgtatayacacacatytcctgatagcagtgyttatcacaaagatgcatgttcctctcacaatccagatgctaattctgtatttaattgcttcataaagtggtggttcagtgtcttctaaattctattactgctgctactctaacagcaattatctgttaaaagctggtaggattgtccattattacagcagtaagtcggcattatttttcttccatattgttcatcctctctggtcaatggctcgttatgaaagaaaaagtatagcatacacttattgaaatgagttaagggataaaacagagtaattcagtcaat

SEQ ID NO: 20314 - DNA, 600 bp, Chicken  19866894230665_4
ccaatgcttttaaaaatacctaagatgactgaagcatctattaatacatgactcatttctgcacacctgagcttgctacactgcgtgtttctggtgcaagctgcaggcaagcattacacggctccaaaaagtagtaccattctgcttcgagtcgtaataatttaggatcaagagcttggaaacaaggggggtagggaaaaaaaaggacatcagaggtgttgaaaagtcaagcaaggctgttttagaacacgatacataaatatctcmagtgtatayacacacatytcctgatagcagtgyttatcacaaagatgcatgttcctctcacaatccagatgctaattctgtatttaattgcttcataaagtggtggttcagtgtcttctaaattctattactgctgctactctaacagcaattatctgttaaaagctggtaggattgtccattattacagcagtaagtcggcattatttttcttccatattgttcatcctctctggtcaatggctcgttatgaaagaaaaagtatagcatacacttattgaaatgagttaagggataaaacagagtaattcagtcaatataggttctgatgct

SEQ ID NO: 20315 - DNA, 600 bp, Chicken  19866894230672_1
tagaacacttccctaagaacttttcatgacaaaagtgtaatttaaatggagaatctaaatctgttaagaacagggttctgcaattccttagatagttcagatgtctagaccacccttgaaaacctctctattatcctatgaattaagatagttatcattttgtgctggagttattgctgctgagttatcttgagcttgctccaagtctacttacttcagcaggtcctcaggaacacaggagcatcttcccagcttttgttgatggcatgtaggtgggagatagactttcagctatcccakccaaggaaaatggcaaggactgaggaaaaattcagactacaaatgtcagaattgaggtgagatcaaggatgggtgaggagatggagtttggagcatacatgtaaactttggcaactaaaacctattttaacctcgttaaaagctctgtagctcagtagaatgggaacctactatctaaaaacataaaaaggtttgcagaaagcctggcttttactttgaaatttgtttacaaagtcctcagtattatcaatgagttttcttatgacatctgctgactttgacgtttgggttcatgagagc

SEQ ID NO: 20316 - DNA, 600 bp, Chicken  19866894230677_1
gaataaggctcagtctctggaggattatgtgaagaccttcctagatggagaggtgaagcccctatggccaaaaggctggatgcaggccaggtgagcaagaataatgtcgtactccagggattccttatgataagggacttctgaaggtcattagtcctacccctgttcaaagaacagctagtttcaaagttaggtcagattggccagggctgtgtccttctgagttttgaaagtctctgcagatggagattgcgacagcatctctgggccactgttctgataaatagtcacttttcacargtcttttctctttattttcaatcagaattgcccttgctgcactgaaatgactgtcccctctttgtctctttttactgtgtgcctttgagaaaggtaccttttatcttctttgtggccccctgtacccagaactctttggctagtggaagactgccgttagatccctccttagtcttaaggttttccaggctgaacaaactcagatcctccagcctctcctatgtcacatatccctgtccttagccatctcagtggctctggactgtctccagtttgtcagcatctctcttgtattgtttg

SEQ ID NO: 20317 - DNA, 599 bp, Chicken  19866894230679_1
  misc_feature (1)..(31): n is any nucleotide
nnnnnnnnnnnnnnnnnnnnnnnnnnnnnnnaaaaagagccagatggctttagcaacacatttgctgtcttcaaggcagaacttttgaagtaaacttgggacattaactcctattatagagtagtcaagaaccagtaggactgcattctgctttgtagtctgtaagagttgcatcttcctacacaaaaagttgaatttaacgtgaagtcaacaccaaagacaggctgcaattttctacattttaacagggttactatgctgctactaactaaatctaaggctaggaaggtagatcactgsaaagtcaaaagccaagccaaacgaaacctcacaaatgctaagctaagcagttacataaatctttttggtgaaaaggttcatatttagaggtaatacagaaatgattgaaagatgccttatacatggagatcagaactgcaaaggagaaattccatgacatatggatttatattactggagcagacaggatggaggaaattagacatctattaaatatttaagttatatgtatgtaaaatatgcatttgaaagtatcttctactgagaagagaaattggaaaagagctactctgagtagt

SEQ ID NO: 20318 - DNA, 600 bp, Chicken  19866894230679_2
gcagctttttggaaacttctccaggaacagctcctgtttccccctcccctcaatctccttgcaacatagagtaattaattaataataattactaataattattattaataataaaaaagctgagcacgttcctgctagaatggattcactcttcagagtgtagctttgtctactttgagatggtacattctttttctgaaggaatagataaatctggaagcttgttctgctgcaacatgtggaagtcccaacactgctggtttcaagcccaattactgctagaaggacagcaaatttttkgggggctacatgtattctccactgagagtttaaagggtggatgagagcagtggaatttgcacaatgcatgacagcacttgttaggcaacattcaactgcattggcatctctgtcccaggatagacacctacagcatcactctgctttttttgacttcccagccagccacattcttgaatcagaaaagaggtcaaaagccacaaaggtttttgggatgaagtacagagcagaaccattctgctccttcatacagggcatatcaagcctctggaaagcatggcagttctttaggtaacctct

SEQ ID NO: 20319 - DNA, 600 bp, Chicken  19866894230688_1
aatataaaaaaggagtttctggaactgaaataggctaccattttcatcagaaacttttttttttttcctgaacatactaaaaattataacaaaaatatctgcttgtcttgtgctgaataaggtagcctaagcaatcccatctctatacattatccatgtttatagaattcattttttcttttatggaattcatcctagcaggtaatggatcccagcagacaaatcagaatcttaaatgagcaggaaaaaaaaaaacaacaaaccactgacaaaatgaatatttatgaaaattctgattasagagagcttttgctatgaaaattgtcttgcttcaaattttctaaaaatttatagatgtttctcaaagtatctctaagttaagagttgaatagatcagttctgaaagtctgcagccatttttccactctcttgtttagtagactttggatttatatgattttatgtccaaatgaacagtgtgtggtgtgaaaattcaaagatagaaacagtcaaacatccaactcattcttcccaacctggaaaactgacctctaatatgtaagtcttacaagatttagttttgcatagttattccaaaga

SEQ ID NO: 20320 - DNA, 464 bp, Chicken  19866894230691_1
aggcttttctgattagatctgaattattctaaacatattagtaaatacacatatccaaactctgttggaggttttttaaattatcaggaaaagtcaaatatttttccctgtaagacatttttctgcattttaatcaaaagatacctcatccagcaaagctatcttagttcattttctctccagcattataagggaggaattacaggctaagtctgagaaactgcactactaactatatatagatcgccttggagatcttccaacttcaaaagtcctcagcggcttcttctcaaagcaagygagcaagcagttctcgggattaatgttaaacaaaggtttggctgtcccggtcagttttacagatggcaacacttaaaagcctgaaataaacagtacatcttagagctaacacgtccagctacaaagctctgttcctcctgggtttagttttcaacatgtactaa

SEQ ID NO: 20321 - DNA, 600 bp, Chicken  19866894230692_1
agccatatttacatcctcagacaccttttctcacccagaatactgatgctgggttacactgcagtgcatcccatgtgcttcagcagacgaagtatcttcagtactggtctgactgtgaaatgaaactgtgccaccttgtcattccatggcttcccaacttccataaacacttcagagccatgaatatgaccatgagaagaaaatgtagctgaagcacagcatgatgtagtgacctcatttctgtgtcatcttcatagcaactattagacctggtgtgtgcagcaggtccagaccctgtgratggcatgagaaacaaggcccagctggacagtgggccacttcccattcctaggrgtttctacccaacagatttcagctgcactgaaaggttgaattcagtatgcaatttaggtgatattcactgggatacagaaattgctatagcgatataggtgaagatccttactgacttcagatattcataaagggggaaacaaaactgctgggctttacaatctggtaattaacactcatatattgtgtgaaaatatcacaggccatgctctgttgtattttcatttatactttctaaagccacag

SEQ ID NO: 20322 - DNA, 600 bp, Chicken  19866894230692_2
tacactgcagtgcatcccatgtgcttcagcagacgaagtatcttcagtactggtctgactgtgaaatgaaactgtgccaccttgtcattccatggcttcccaacttccataaacacttcagagccatgaatatgaccatgagaagaaaatgtagctgaagcacagcatgatgtagtgacctcatttctgtgtcatcttcatagcaactattagacctggtgtgtgcagcaggtccagaccctgtgratggcatgagaaacaaggcccagctggacagtgggccacttcccattcctaggrgtttctacccaacagatttcagctgcactgaaaggttgaattcagtatgcaatttaggtgatattcactgggatacagaaattgctatagcgatataggtgaagatccttactgacttcagatattcataaagggggaaacaaaactgctgggctttacaatctggtaattaacactcatatattgtgtgaaaatatcacaggccatgctctgttgtattttcatttatactttctaaagccacagtaacttacttgattcactgagcagaatttagaattaaaaattctcagcaagctt

SEQ ID NO: 20323 - DNA, 600 bp, Chicken  19866894230695_1
ttgttaacaccaagggcacaatccatcttctactgttgatctacccatcttgcatcactctgttgttccaatacacttcatcagtaatgaacactccagtggtgcaagaaactgagccaagtgagactgcaaccaaagacaagacaacactgtgctattactaaatctgaaaatagctcagacatctccagacaatggtaacatgtgagactaagcactgtttccaagccaacttctatcagcctaattatcagagcccttataataaaatcacaccaaagcaagaggcaacattccttrccccccctccctccttttttacaggtataaataagctacaataaaaagcagctacataactttaaaaccttgatgtagctccttctttattatagaggaaattccactatatttgggttaaaaaaatagctctgcacactatattttggccttaaagtttccggtagcatttatgaagaaggttggtcataaatgcgttattggcattaagaactggttacacggaaaagaaaatttagtggttttagcccgttaatgacccacgaacattatgaatgctttcgccttccattgtcatga

SEQ ID NO: 20324 - DNA, 600 bp, Chicken  19866894230696_1
tttccagacattcaaatcacttcctaatgtaaggctctcttgcttctcccacataatgcctacaatgcactgttttaaatatctcatagatgaaatgcatgtgttgcacgtatctgaagacagaggtattttacagtcgccctttcttccaagaagacattaaagaggagctatctccaataccagataggaagagcatctcctggtctgccagtctcaaatctggaccaaaaccttgcatcagtccccatcagacacgcagccagcagcctgcttgtgattctcataactgcacacagyaggtcagcaaaggctcctgcttagcatagaagcagcaaaagcagctttccaaatacacaggagtctccacagaagcaaacgtcacatcatttgtgtgtgctgcaaacaacagatgatggacagcactgtgtttgaggaagggtctgacgtatggagcatgacatgcagggcaaagcaagaacctgcagagacaccaagcaaaacgcacacggaaacgagacctgctaaggaaggcaggaggaaaaaatagagtgagacagcctgcatttccccacagggttggggagcagacacagctca

SEQ ID NO: 20325 - DNA, 600 bp, Chicken  19866894230696_2
gacagcctgcatttccccacagggttggggagcagacacagctcagctgtctatgaagatacagatgctgtttttttttccccagtagaattactatgggcaaaagcctactgctcagggttgagatttggacctcagccctgccagtgctgcgaggcatcatggtgttggagataaaataaacaaacaagagcagtttccctgttcctaaccacagtctgtcgtgcacgtctggcataggataactgcagcattctggtggcagcatgcaataaacacttgcttgaatactttccacartgaacaggttacagctctgccagcgatgtgctctgcacaagcgtcccagtaaggaaatacaaacctctcccagtgccccactttagaaagaagagaggcagagccaacagcaaacaaatgacaacaaaataacccrgcacactrgcctgaaacatggcttttgctcctcaaaagtaaaatcccggtatctttaaatgatagctgtaaacactgggtctccctcttccatygctatgcgtttcatggagttctgcatactggccacttcagtacttttccagggtatgtgtcagtgatttg

SEQ ID NO: 20326 - DNA, 600 bp, Chicken  19866894230696_3
agccctgccagtgctgcgaggcatcatggtgttggagataaaataaacaaacaagagcagtttccctgttcctaaccacagtctgtcgtgcacgtctggcataggataactgcagcattctggtggcagcatgcaataaacacttgcttgaatactttccacartgaacaggttacagctctgccagcgatgtgctctgcacaagcgtcccagtaaggaaatacaaacctctcccagtgccccactttagaaagaagagaggcagagccaacagcaaacaaatgacaacaaaataacccrgcacactrgcctgaaacatggcttttgctcctcaaaagtaaaatcccggtatctttaaatgatagctgtaaacactgggtctccctcttccatygctatgcgtttcatggagttctgcatactggccacttcagtacttttccagggtatgtgtcagtgatttgtgaatgctccatcctgcctcaggctggctgcaaacaagatgtccttgcagaaggcagaccgattgcttccagggacacgggctggcttctgcatgactccacacaagtacacagacctctcttcagcatgtgcagc

SEQ ID NO: 20327 - DNA, 600 bp, Chicken  19866894230696_4
cagtgctgcgaggcatcatggtgttggagataaaataaacaaacaagagcagtttccctgttcctaaccacagtctgtcgtgcacgtctggcataggataactgcagcattctggtggcagcatgcaataaacacttgcttgaatactttccacartgaacaggttacagctctgccagcgatgtgctctgcacaagcgtcccagtaaggaaatacaaacctctcccagtgccccactttagaaagaagagaggcagagccaacagcaaacaaatgacaacaaaataacccrgcacactrgcctgaaacatggcttttgctcctcaaaagtaaaatcccggtatctttaaatgatagctgtaaacactgggtctccctcttccatygctatgcgtttcatggagttctgcatactggccacttcagtacttttccagggtatgtgtcagtgatttgtgaatgctccatcctgcctcaggctggctgcaaacaagatgtccttgcagaaggcagaccgattgcttccagggacacgggctggcttctgcatgactccacacaagtacacagacctctcttcagcatgtgcagccaccctta

SEQ ID NO: 20328 - DNA, 600 bp, Chicken  19866894230696_5
tctggcataggataactgcagcattctggtggcagcatgcaataaacacttgcttgaatactttccacartgaacaggttacagctctgccagcgatgtgctctgcacaagcgtcccagtaaggaaatacaaacctctcccagtgccccactttagaaagaagagaggcagagccaacagcaaacaaatgacaacaaaataacccrgcacactrgcctgaaacatggcttttgctcctcaaaagtaaaatcccggtatctttaaatgatagctgtaaacactgggtctccctcttccatygctatgcgtttcatggagttctgcatactggccacttcagtacttttccagggtatgtgtcagtgatttgtgaatgctccatcctgcctcaggctggctgcaaacaagatgtccttgcagaaggcagaccgattgcttccagggacacgggctggcttctgcatgactccacacaagtacacagacctctcttcagcatgtgcagccacccttattctggagctgaacacattacagcttctgagctgcaggttcctgccgctagctttgctgcagctaaggttgtggatctgtgcagtg

SEQ ID NO: 20329 - DNA, 600 bp, Chicken  19866894230712_1
ggagtctttccaggagatccctgtcttttttgtaccgaggagcccagaactggacacaaaactccaggtgaggcctgaccagagcagagcagagggggaggatcacctccccttcacctgctggccacgctccttttaatgcactgcaggatcccattggccttcatggccaccagggcacactgctggctcatgagcaccctgtcgtccacctggtccccaaggttcctcactgcagagctcctctccagcaggtcatgttccagcctgtactggtacttgcagttattccatcccagrtgcaagactctacatttgcttttggaaaacctcatctgttttcttaatcttaatcttgcattctgctatcatacgtagaaaatgagtattttctcccttagctcgttgtcactgttttgttgttaggcccatctccgtaccttctcactagctctcttcctcctttcctggggcgtgggttcgtttgtccctgcgcctcattagtcacagaaccgggctgcaccgggctggaaccgtgacaccaccccagtgccccaaagtcccgttcgacagcccacaggcttctctcagcgactttgt

SEQ ID NO: 20330 - DNA, 473 bp, Chicken  19866894230716_1
tctccattcccaggacaggtggttagtccgaaccagcagagccagctggaggtctggctcttggtctcaaccaggatctgctcctggggaaggacctggttgttgttctcgtcctcgatctcggtgggacaggcggataggccaaacctgcagagccagctggaggtctggctcttggtctcaaccaggatctgctcctggggaaggacctggtttttcttcccatccgtgatcttgatagggcaggtggttaggccaaacctgcagagccagttggaggcctggctcttggtttcaacygaacgctgctcctcgtgaaggacctggttgttgttcttgtccttgatcttggtggagcaggtggttaggccaaacctgcagagccagcttggaggtctggctctcggtctcagcggggtgctgctcctcgggaaggaccagctttttgtcccaattccggaccctgccgcgag

SEQ ID NO: 20331 - DNA, 600 bp, Chicken  19866894230728_1
aacatggatttttgacaactcagcgctttaacagccacaagtgagctgttctggtctattgaagaaatccttcctacctcatggatcagcaacctaacagacttgcagaaccaatatgcttaatcctgctgccaagactccacgttctgtccacatgctaaaaatcttcatgacatcttttgttgagaaaaggtgcagcatatgaataacagccattttctaccctcattgtctctacctctccacaaaataggacacacaagggccttggccccaaagctttcatgcatattcagaacmgaagtatacaaaattcagtcaayattggcagatctgggctcctgccttggtttcaagaaagagataagtgtcagttgctttatgtccaagactagagttattttgcacctatcgtttcaagtaatgttaaaggaaagccaaaaactaacagtgtagtaacctgaggtacagtcagtgatagtcctgcaatacatgaatcttatacatggaagagaatgtgttatattttcttttttgttgttgctgttttcaaaaggtattgcatgccacaaatctgcagccactttgagcacattgatg

SEQ ID NO: 20332 - DNA, 600 bp, Chicken  19866894230728_2
cgctttaacagccacaagtgagctgttctggtctattgaagaaatccttcctacctcatggatcagcaacctaacagacttgcagaaccaatatgcttaatcctgctgccaagactccacgttctgtccacatgctaaaaatcttcatgacatcttttgttgagaaaaggtgcagcatatgaataacagccattttctaccctcattgtctctacctctccacaaaataggacacacaagggccttggccccaaagctttcatgcatattcagaacmgaagtatacaaaattcagtcaayattggcagatctgggctcctgccttggtttcaagaaagagataagtgtcagttgctttatgtccaagactagagttattttgcacctatcgtttcaagtaatgttaaaggaaagccaaaaactaacagtgtagtaacctgaggtacagtcagtgatagtcctgcaatacatgaatcttatacatggaagagaatgtgttatattttcttttttgttgttgctgttttcaaaaggtattgcatgccacaaatctgcagccactttgagcacattgatgtagacttagtgcataaacatcaa

SEQ ID NO: 20333 - DNA, 600 bp, Chicken  19866894230728_3
ttcaagaaagagataagtgtcagttgctttatgtccaagactagagttattttgcacctatcgtttcaagtaatgttaaaggaaagccaaaaactaacagtgtagtaacctgaggtacagtcagtgatagtcctgcaatacatgaatcttatacatggaagagaatgtgttatattttcttttttgttgttgctgttttcaaaaggtattgcatgccacaaatctgcagccactttgagcacattgatgtagacttagtgcataaacatcaaacaaaaatttaagtgggatgaataaggratgaagcaattgcagtaccctctaagacttaatccatagtcacgatcaatagaaaaatgttcaggcagaggaggactgcagacatgacagmgcagtcaattgcttgcagggtaggaagtcctcagcctgcaagcctttgaccaacaaggtaggtaagcacagtaaacatttaccttgtatccaattacaagttgaagtggtgtttttccagtttcttctgcagggtcatgggcatgtggtgtcctcaagagctctgaaactctgtaatttaaaaaaaaatgtcctgagaaaggtgacaag

SEQ ID NO: 20334 - DNA, 600 bp, Chicken  19866894230728_4
aactaacagtgtagtaacctgaggtacagtcagtgatagtcctgcaatacatgaatcttatacatggaagagaatgtgttatattttcttttttgttgttgctgttttcaaaaggtattgcatgccacaaatctgcagccactttgagcacattgatgtagacttagtgcataaacatcaaacaaaaatttaagtgggatgaataaggratgaagcaattgcagtaccctctaagacttaatccatagtcacgatcaatagaaaaatgttcaggcagaggaggactgcagacatgacagmgcagtcaattgcttgcagggtaggaagtcctcagcctgcaagcctttgaccaacaaggtaggtaagcacagtaaacatttaccttgtatccaattacaagttgaagtggtgtttttccagtttcttctgcagggtcatgggcatgtggtgtcctcaagagctctgaaactctgtaatttaaaaaaaaatgtcctgagaaaggtgacaaggcatcagtggttaaattagaattatttcagcatatatagatttgttcaaaattagaccggcattgctttgacttcttactatacaaaggca

SEQ ID NO: 20335 - DNA, 518 bp, Chicken  19866894230734_1
atttgaggcagataaaagtgtttattctgcaaactgttattttaacatgcggcaggctgatcctgtaccatcatagccaggagcttataagcaacttaaacagcatgatgttcttcagggggctgttggaagggaagacttcccatgaacacgtatttgagggttagaaaaggtatttaaatgaggaagtaagtttgttgtaaaatacgagtagctgtgggaaaggaatttccacacagaagtcataaaattatttaggttggaaaataccactaggatcatctagtccaactatcaacycatacccactaacccatgtccctcattgccacatctatacgtttcttgttaccttatgtgtctattctctatgctggatgtgttttttctatatataagtgaattaaagcacaatgtttgcatcttcagttacggcgtctgtgtcaggtaatgtcccccagagtaccaatatcgtggatcatttcaatgcttaaaaaaattaaatgtattgcatatta

SEQ ID NO: 20336 - DNA, 599 bp, Chicken  19866894230736_1
  misc_feature (1)..(45): n is any nucleotide
nnnnnnnnnnnnnnnnnnnnnnnnnnnnnnnnnnnnnnnnnnnnntttttgttacctcttgctgcagtacttcctattacatattcaacaccacaaattgttactgatatcatctgggacatccttctgcagcaaaagattttccattaggaagttgcttcattgtttcctcctatttaataccaagaaaaaggggaattttcaataaattaaaaaataaaacaacgtttaaatgtaaagaatgcatttctactgctggttacccaatgtgaggtttgaaataaccaaaggattagggarattcagttcaaggagtagatttgagtgcaygatttgttcatcttccatatacacaattttgttctgtcagatacctagtctgagtttggcatagtgaaatgtgaaccctggattatttctgaaacwctcgtaacccatggaggtattattaccagtgctagctattwctttattgccagctatgaaaatgagaaacataggttgtgggcatttttattttttctttaattatttttttgctkmttctctacttgactgcttccctgaataaagtgaagaaagaaaatagtgtgagaggg

SEQ ID NO: 20337 - DNA, 599 bp, Chicken  19866894230736_2
  misc_feature (1)..(15): n is any nucleotide
nnnnnnnnnnnnnnntttttgttacctcttgctgcagtacttcctattacatattcaacaccacaaattgttactgatatcatctgggacatccttctgcagcaaaagattttccattaggaagttgcttcattgtttcctcctatttaataccaagaaaaaggggaattttcaataaattaaaaaataaaacaacgtttaaatgtaaagaatgcatttctactgctggttacccaatgtgaggtttgaaataaccaaaggattagggarattcagttcaaggagtagatttgagtgcaygatttgttcatcttccatatacacaattttgttctgtcagatacctagtctgagtttggcatagtgaaatgtgaaccctggattatttctgaaacwctcgtaacccatggaggtattattaccagtgctagctattwctttattgccagctatgaaaatgagaaacataggttgtgggcatttttattttttctttaattatttttttgctkmttctctacttgactgcttccctgaataaagtgaagaaagaaaatagtgtgagagggctatggggcaggattaggaaactggtttgc

SEQ ID NO: 20338 - DNA, 600 bp, Chicken  19866894230736_3
ctgcagcaaaagattttccattaggaagttgcttcattgtttcctcctatttaataccaagaaaaaggggaattttcaataaattaaaaaataaaacaacgtttaaatgtaaagaatgcatttctactgctggttacccaatgtgaggtttgaaataaccaaaggattagggarattcagttcaaggagtagatttgagtgcaygatttgttcatcttccatatacacaattttgttctgtcagatacctagtctgagtttggcatagtgaaatgtgaaccctggattatttctgaaacwctcgtaacccatggaggtattattaccagtgctagctattwctttattgccagctatgaaaatgagaaacataggttgtgggcatttttattttttctttaattatttttttgctkmttctctacttgactgcttccctgaataaagtgaagaaagaaaatagtgtgagagggctatggggcaggattaggaaactggtttgctacgtaggactcctatgtatgttcttgtagactgcgctcatgtcatgttatgacagttaaaagacactgattcagtctgatgaagtaaaaaagacag

SEQ ID NO: 20339 - DNA, 600 bp, Chicken  19866894230736_4
tcctcctatttaataccaagaaaaaggggaattttcaataaattaaaaaataaaacaacgtttaaatgtaaagaatgcatttctactgctggttacccaatgtgaggtttgaaataaccaaaggattagggarattcagttcaaggagtagatttgagtgcaygatttgttcatcttccatatacacaattttgttctgtcagatacctagtctgagtttggcatagtgaaatgtgaaccctggattatttctgaaacwctcgtaacccatggaggtattattaccagtgctagctattwctttattgccagctatgaaaatgagaaacataggttgtgggcatttttattttttctttaattatttttttgctkmttctctacttgactgcttccctgaataaagtgaagaaagaaaatagtgtgagagggctatggggcaggattaggaaactggtttgctacgtaggactcctatgtatgttcttgtagactgcgctcatgtcatgttatgacagttaaaagacactgattcagtctgatgaagtaaaaaagacagaattttctgacctttccaagtagcttacatttactacgaat

SEQ ID NO: 20340 - DNA, 600 bp, Chicken  19866894230736_5
tgcatttctactgctggttacccaatgtgaggtttgaaataaccaaaggattagggarattcagttcaaggagtagatttgagtgcaygatttgttcatcttccatatacacaattttgttctgtcagatacctagtctgagtttggcatagtgaaatgtgaaccctggattatttctgaaacwctcgtaacccatggaggtattattaccagtgctagctattwctttattgccagctatgaaaatgagaaacataggttgtgggcatttttattttttctttaattatttttttgctkmttctctacttgactgcttccctgaataaagtgaagaaagaaaatagtgtgagagggctatggggcaggattaggaaactggtttgctacgtaggactcctatgtatgttcttgtagactgcgctcatgtcatgttatgacagttaaaagacactgattcagtctgatgaagtaaaaaagacagaattttctgacctttccaagtagcttacatttactacgaatattttaggtaaaagtaactactagatatatctcttccaggaactctaagtctgtttggaagccaatatacatctt

SEQ ID NO: 20341 - DNA, 600 bp, Chicken  19866894230736_6
gcatttctactgctggttacccaatgtgaggtttgaaataaccaaaggattagggarattcagttcaaggagtagatttgagtgcaygatttgttcatcttccatatacacaattttgttctgtcagatacctagtctgagtttggcatagtgaaatgtgaaccctggattatttctgaaacwctcgtaacccatggaggtattattaccagtgctagctattwctttattgccagctatgaaaatgagaaacataggttgtgggcatttttattttttctttaattatttttttgctkmttctctacttgactgcttccctgaataaagtgaagaaagaaaatagtgtgagagggctatggggcaggattaggaaactggtttgctacgtaggactcctatgtatgttcttgtagactgcgctcatgtcatgttatgacagttaaaagacactgattcagtctgatgaagtaaaaaagacagaattttctgacctttccaagtagcttacatttactacgaatattttaggtaaaagtaactactagatatatctcttccaggaactctaagtctgtttggaagccaatatacatcttc

SEQ ID NO: 20342 - DNA, 413 bp, Chicken  19866894230750_1
aaaacgtggttcccctgttctcagtacagaaatcactgccacacattccaaggatgaactgtaaatgccaatggaagtgccatgccattactaaaaaacatttcttactaaaataattaaaacaaatcacaatttttcctattacttctgttattaatttatgttgtatttaataatcctttatagtttctataaagcacggattagataatcatttattatttcttggtcttccttcagcagttcggcagttacttgaggacaacaccatcactttgcattattgctactttgcattaratgactcaaggggcaactgcaagataaataattaagtacagagcaacgtagcacgaaacatcactctttaacatgactcttgatgtttttagggtttggttttttttgggggg

SEQ ID NO: 20343 - DNA, 599 bp, Chicken  19866894230755_1
  misc_feature (1)..(40): n is any nucleotide
nnnnnnnnnnnnnnnnnnnnnnnnnnnnnnnnnnnnnnnntatcttatgtgccacagaaaagcttacatttcaatggcttatgaactcatagggcattcaaacaattaaggttcagtcactttactgcctaaataaaccccaaacttggacaggaatctcagtcttatgcttcaaagtgctttgactcctttgttactctggaatggcattgtacccattggaattgctccatgagatataaatagatattcattattaaatattcataagggtaagtaattaaaactgtcctctatatmtttgatgagcatttctgtctctggaccacagagcaattattaatcatattgtcctatggggtcgtcttcatcaagaaatactcagaaagtctggcttytcttgtatgctggtggtacagcatgctcacagcttgtgacagtaaaactcagcaagcctagacctcccctgagttttgtaactataagttgaactggagtacccaacaggagagttggtacgaacacctgtcttgatgcctgtgaataccgacctgggaggagacacccaattctatttctgtagagtggtagaatccttt

SEQ ID NO: 20344 - DNA, 600 bp, Chicken  19866894230755_2
caaacaattaaggttcagtcactttactgcctaaataaaccccaaacttggacaggaatctcagtcttatgcttcaaagtgctttgactcctttgttactctggaatggcattgtacccattggaattgctccatgagatataaatagatattcattattaaatattcataagggtaagtaattaaaactgtcctctatatmtttgatgagcatttctgtctctggaccacagagcaattattaatcatattgtcctatggggtcgtcttcatcaagaaatactcagaaagtctggcttytcttgtatgctggtggtacagcatgctcacagcttgtgacagtaaaactcagcaagcctagacctcccctgagttttgtaactataagttgaactggagtacccaacaggagagttggtacgaacacctgtcttgatgcctgtgaataccgacctgggaggagacacccaattctatttctgtagagtggtagaatcctttgctcatacggggattttcatgaagttagtcagttacttataactacagttttaggtgcctaattctcataaatttaatgtagacctgttgctgttctgg

SEQ ID NO: 20345 - DNA, 600 bp, Chicken  19866894230755_3
ccctgagttttgtaactataagttgaactggagtacccaacaggagagttggtacgaacacctgtcttgatgcctgtgaataccgacctgggaggagacacccaattctatttctgtagagtggtagaatcctttgctcatacggggattttcatgaagttagtcagttacttataactacagttttaggtgcctaattctcataaatttaatgtagacctgttgctgttctggaataatgaaaattactggataaaatgaattcctccctctccatgactgaataacagacatatattrtattcttgattgtttagacttttcaaaactatgtaaataagaaaacttaagatttcctgaatgttcagaattattccctttgacataactaaggccctttgaaaactcagtttactatgttgtaaaatcttttccttttaaatttcttatttttttttcatttgtacttctaaacataagcacatagtgtctaaagaacttctgcttatagttccttattaaaagcatacagatatagacttgtgacaggccagcggtctgcatcttctcctcttggattatttataaataatctacatt

SEQ ID NO: 20346 - DNA, 600 bp, Chicken  19866894230756_1
tgccattatcctcagaaggagatctctacatgtgactgtcctgcagtaactgcggttgcgctgctttgaaactcgttatgcaagtctgctagggaagaaagactgtatctgtagcaacgcagagtcacctgctccatgtctgttggaaaagcatcttaattttccagctagagcttggacaggcagggcaagcccaggcaggttagcacagttcagacccggaggtgttataacaaacagtctctgtgtgagagcacagctccagtgcacacttcaggctcttccctccagatatccacycaagaattactgtagcagagcttgttgagcgttcccagttattcaggatgctttcaccagcatactggtgtgtgggtggacaagttgcagccagggcagcaataggaygctgagagctccagcttattaagtggagctacatgcccagctctcctaactagtgtgaattgatgttcagcattcagtgcagagcagatgttaatggaaggtcattggaggctgctctgcagcataattatgggactattttgagctttcttctttggttttaatgcagatcggtgctgtaaattgtcaaga

SEQ ID NO: 20347 - DNA, 600 bp, Chicken  19866894230756_2
ctgtagcaacgcagagtcacctgctccatgtctgttggaaaagcatcttaattttccagctagagcttggacaggcagggcaagcccaggcaggttagcacagttcagacccggaggtgttataacaaacagtctctgtgtgagagcacagctccagtgcacacttcaggctcttccctccagatatccacycaagaattactgtagcagagcttgttgagcgttcccagttattcaggatgctttcaccagcatactggtgtgtgggtggacaagttgcagccagggcagcaataggaygctgagagctccagcttattaagtggagctacatgcccagctctcctaactagtgtgaattgatgttcagcattcagtgcagagcagatgttaatggaaggtcattggaggctgctctgcagcataattatgggactattttgagctttcttctttggttttaatgcagatcggtgctgtaaattgtcaagaatcatgaagtgaaagtgtctgtgaggcgtctggacaaactgccttccagaaatgattcttgcctactgaacttaaaaatgcagcacctgagactcccagcactgaaag

SEQ ID NO: 20348 - DNA, 465 bp, Chicken  19866894230757_1
tttcctggtcaagctttgtcctgagatgatctctcagtttgtgaatgtgctctgacttggcaaaaatacagccatttaaaatatgcagcctgacagctgtgacactgtgcacactacggtctggtgactgaccggaggagtaacaaatgccctctgcagagcaatgcggtcagcactggagtcagtcctggcagtgccggccctgctagtttacaaacccagcacccctcctctcctgcagctgaggcacaaaactgtggctttggcagtgagttaaggagggtgggagatgtgaggtcrtaaaatcagccggtgacctggaatgcactggtgtttgcattgcagcctttgatgtgcatggctaaaacagggtaccaggggcagaatgctccagtgaccttccagggctgtcagcttcagatttgattgtcttttctatttgcagggtaaagaaccaaatatttg

SEQ ID NO: 20349 - DNA, 600 bp, Chicken  19866894230760_1
aatggcctgggttgaaaaggaccacagtgatcatcgagtttgaacccccctgccatgtgcagggtcaccaaccaccagaccgggctgcccagagccacatccagcctggccttgaatgcctccaggaatggggcatccacagcctccttgggcaacctgttccagtgcattaccaccctctgagtgaaaaccttcctccaaatatctaacttaaacctcccttgtctcaatttaaaaccattcccccttgtcctgtcactatccacgcttgtaaacagccattccccatgctgtttataygctcccttcaagtactggaaggccacaatgaggtctccttctcttctccgagctaaacaagcccagttccctcaacctttcctcataggagaggtgctccagccctctgatcgtcttagtggccctcctctggacccrctccgagatctccacgtccttcctgtactgggggccccaggcctggtcgcagttctccagatggggcctcacaagagctgagtagagggggacaatcacctccctctccctgctggccaccccttttttaatgcagcccagaacacagttggccttctgggc

SEQ ID NO: 20350 - DNA, 600 bp, Chicken  19866894230760_2
acagcctccttgggcaacctgttccagtgcattaccaccctctgagtgaaaaccttcctccaaatatctaacttaaacctcccttgtctcaatttaaaaccattcccccttgtcctgtcactatccacgcttgtaaacagccattccccatgctgtttataygctcccttcaagtactggaaggccacaatgaggtctccttctcttctccgagctaaacaagcccagttccctcaacctttcctcataggagaggtgctccagccctctgatcgtcttagtggccctcctctggacccrctccgagatctccacgtccttcctgtactgggggccccaggcctggtcgcagttctccagatggggcctcacaagagctgagtagagggggacaatcacctccctctccctgctggccaccccttttttaatgcagcccagaacacagttggccttctgggctgcaagcgcacactgctggctcatgcccagcttctcatccatcaggactcccaagtccttctcctcagggctgctctcaatatcttctcccartttgtataaatacctgggataaatcagacatctaacgtgcatctc

SEQ ID NO: 20351 - DNA, 600 bp, Chicken  19866894230760_3
gtgctccagccctctgatcgtcttagtggccctcctctggacccrctccgagatctccacgtccttcctgtactgggggccccaggcctggtcgcagttctccagatggggcctcacaagagctgagtagagggggacaatcacctccctctccctgctggccaccccttttttaatgcagcccagaacacagttggccttctgggctgcaagcgcacactgctggctcatgcccagcttctcatccatcaggactcccaagtccttctcctcagggctgctctcaatatcttctcccartttgtataaatacctgggataaatcagacatctaacgtgcatctcccctcttctagtctaaaaccrtccccscttgtcctgttgtgtgtaaaaagtccaactagacattcctgcaagcccaagggcaactgatctaggtggggtgctgcagactttgcttacctcttactgttaaggctgaaaagactcggggttgtattttctggtccagattaggactgtgaattacatctgcagtgcctctgctcacttgaattcacatatttgtatgtgtgaagaaggatagcatcagatggccca

SEQ ID NO: 20352 - DNA, 600 bp, Chicken  19866894230760_4
cctgtactgggggccccaggcctggtcgcagttctccagatggggcctcacaagagctgagtagagggggacaatcacctccctctccctgctggccaccccttttttaatgcagcccagaacacagttggccttctgggctgcaagcgcacactgctggctcatgcccagcttctcatccatcaggactcccaagtccttctcctcagggctgctctcaatatcttctcccartttgtataaatacctgggataaatcagacatctaacgtgcatctcccctcttctagtctaaaaccrtccccscttgtcctgttgtgtgtaaaaagtccaactagacattcctgcaagcccaagggcaactgatctaggtggggtgctgcagactttgcttacctcttactgttaaggctgaaaagactcggggttgtattttctggtccagattaggactgtgaattacatctgcagtgcctctgctcacttgaattcacatatttgtatgtgtgaagaaggatagcatcagatggcccaatggagtatatgtagcccttcaaccactgagtcactgtccagctgagtcggaaagggttgttagcg

SEQ ID NO: 20353 - DNA, 600 bp, Chicken  19866894230760_5
ctgggggccccaggcctggtcgcagttctccagatggggcctcacaagagctgagtagagggggacaatcacctccctctccctgctggccaccccttttttaatgcagcccagaacacagttggccttctgggctgcaagcgcacactgctggctcatgcccagcttctcatccatcaggactcccaagtccttctcctcagggctgctctcaatatcttctcccartttgtataaatacctgggataaatcagacatctaacgtgcatctcccctcttctagtctaaaaccrtccccscttgtcctgttgtgtgtaaaaagtccaactagacattcctgcaagcccaagggcaactgatctaggtggggtgctgcagactttgcttacctcttactgttaaggctgaaaagactcggggttgtattttctggtccagattaggactgtgaattacatctgcagtgcctctgctcacttgaattcacatatttgtatgtgtgaagaaggatagcatcagatggcccaatggagtatatgtagcccttcaaccactgagtcactgtccagctgagtcggaaagggttgttagcgagctgc

SEQ ID NO: 20354 - DNA, 600 bp, Chicken  19866894230771_1
ttacatctgtcctgaccaaagtatgggcaagtttttctgcttctggaaagtgtttcctgaaatgttgttcctcctgttcctgaaagccactgagtaaagagctttttctgtctttcattattaatctgtgtgtcttgtctgcccgtaggttcctcttatacttctttaggaagtctgaagtcgcttcagctgagcttttctctgccatgagtttgtaaaatcatctggtgcctgactcatgactcctgaatctttctcttgattttcagtcttgggtgcctctacggggttttgttgttrctgttactggtttttaaacatgtttatactagatcataaaatggtaatgatcrtaacttgtgtgaaagtttagtttatggtcttctcatttaccctgcttcaatttccattgcactgggggytgcatagttcttgtcgttcacaaaaatgagaagaaagccaagcaagggatgcagactaaagcagtgaaagcagtacactcctatagtaccctsctctccctgcatccctgaaggaaaccttggatgtatagaatgcttgcagaagcttggaggattttgtgaggtggcagaggctgaa

SEQ ID NO: 20355 - DNA, 600 bp, Chicken  19866894230771_2
ttcctgaaatgttgttcctcctgttcctgaaagccactgagtaaagagctttttctgtctttcattattaatctgtgtgtcttgtctgcccgtaggttcctcttatacttctttaggaagtctgaagtcgcttcagctgagcttttctctgccatgagtttgtaaaatcatctggtgcctgactcatgactcctgaatctttctcttgattttcagtcttgggtgcctctacggggttttgttgttrctgttactggtttttaaacatgtttatactagatcataaaatggtaatgatcrtaacttgtgtgaaagtttagtttatggtcttctcatttaccctgcttcaatttccattgcactgggggytgcatagttcttgtcgttcacaaaaatgagaagaaagccaagcaagggatgcagactaaagcagtgaaagcagtacactcctatagtaccctsctctccctgcatccctgaaggaaaccttggatgtatagaatgcttgcagaagcttggaggattttgtgaggtggcagaggctgaagagtagctaatggaaatcagctagttctttgagagtcccgtgatttttaagca

SEQ ID NO: 20356 - DNA, 600 bp, Chicken  19866894230771_3
aatctgtgtgtcttgtctgcccgtaggttcctcttatacttctttaggaagtctgaagtcgcttcagctgagcttttctctgccatgagtttgtaaaatcatctggtgcctgactcatgactcctgaatctttctcttgattttcagtcttgggtgcctctacggggttttgttgttrctgttactggtttttaaacatgtttatactagatcataaaatggtaatgatcrtaacttgtgtgaaagtttagtttatggtcttctcatttaccctgcttcaatttccattgcactgggggytgcatagttcttgtcgttcacaaaaatgagaagaaagccaagcaagggatgcagactaaagcagtgaaagcagtacactcctatagtaccctsctctccctgcatccctgaaggaaaccttggatgtatagaatgcttgcagaagcttggaggattttgtgaggtggcagaggctgaagagtagctaatggaaatcagctagttctttgagagtcccgtgatttttaagcaaaaagcttcagccagcgttgctcctctgagctctctgaggagatcagtgtgtagtgaagactctagaag

SEQ ID NO: 20357 - DNA, 600 bp, Chicken  19866894230771_4
taaaatcatctggtgcctgactcatgactcctgaatctttctcttgattttcagtcttgggtgcctctacggggttttgttgttrctgttactggtttttaaacatgtttatactagatcataaaatggtaatgatcrtaacttgtgtgaaagtttagtttatggtcttctcatttaccctgcttcaatttccattgcactgggggytgcatagttcttgtcgttcacaaaaatgagaagaaagccaagcaagggatgcagactaaagcagtgaaagcagtacactcctatagtaccctsctctccctgcatccctgaaggaaaccttggatgtatagaatgcttgcagaagcttggaggattttgtgaggtggcagaggctgaagagtagctaatggaaatcagctagttctttgagagtcccgtgatttttaagcaaaaagcttcagccagcgttgctcctctgagctctctgaggagatcagtgtgtagtgaagactctagaagtcaatatttcaagggccgtgggaatgaaagagcatgaagataggtgcagaatagcccatcaaactcagactttgtaaatctctctacattttc

SEQ ID NO: 20358 - DNA, 600 bp, Chicken  19866894230776_1
ctgaaattgtaattcagtgtataaactgaattattcagtaacactcatttcttaattattcataaccctcatttcttctgccaggcctttcagtttctctgtctgatatgtatgtatatcagactccctgaaatttccctattggttttgcttattttgcttaactgtgttgttgctcttcttagggccatctgacctccttaaatactattttctgtctcataaatcacttccaagaagaggatggactgtctctgatctagttatttttggcagtctttcagaaagcactcatctatycttactttctgaaatggcatcactgtcttcagctacctaaatcttctcttctatcccccccaaagaaaacaaacactgacaagaataagaaacaagggatgaattccattcaaaattaaaattgaattcaagtaggaaataccagtatattttttgaaaaggaatatttatttctagctgcttgttgcttgcttaaaatgctagctaggtgcctgtgaaaagtaataaagagtttgatctttactcacacagtttagctgatactgatctaagactacaattctaggtgccttgcaaatc

SEQ ID NO: 20359 - DNA, 599 bp, Chicken  19866894230779_1
  misc_feature (1)..(54): n is any nucleotide
nnnnnnnnnnnnnnnnnnnnnnnnnnnnnnnnnnnnnnnnnnnnnnnnnnnnnnaatagtgtgtctcatttctcaagaaattcctttttatattagagaaggtttaaaggtctaaaaaaaccctttacgttatggtgtttacttactctttgaatacagcattaaaaccctggtatagcttaagaatgtccatggtctcatttttttattgcttcaattgcttatgcagggttttgggaagattggaactagtagttattgcagtttttagcttgtggccatgaagaaacttaaactgtygctgtaaaaataatgtgaccaaagctgtgccaagaacatagacaaaggatgttttaggacaattgaaaaatttctggttgcagttaagttaggagagtttaatggcaagctaycaaagtgagagaaatcattttatacttagaaatttatgtaaatatgcagacaaaactagagctgaatcatttccttgttgatactgactgtcatgtgtgtttccccagtgaataccgtgctttttaaatttttagccaaaggcttagaaacaaaatccttaaaacaaaatacaatcatcatgtaaa

SEQ ID NO: 20360 - DNA, 600 bp, Chicken  19866894230779_2
aaaaaaaccctttacgttatggtgtttacttactctttgaatacagcattaaaaccctggtatagcttaagaatgtccatggtctcatttttttattgcttcaattgcttatgcagggttttgggaagattggaactagtagttattgcagtttttagcttgtggccatgaagaaacttaaactgtygctgtaaaaataatgtgaccaaagctgtgccaagaacatagacaaaggatgttttaggacaattgaaaaatttctggttgcagttaagttaggagagtttaatggcaagctaycaaagtgagagaaatcattttatacttagaaatttatgtaaatatgcagacaaaactagagctgaatcatttccttgttgatactgactgtcatgtgtgtttccccagtgaataccgtgctttttaaatttttagccaaaggcttagaaacaaaatccttaaaacaaaatacaatcatcatgtaaacatcacatacctctgttcaataggaattttgtcatttggaacttcttkatttatttgtcttttttattattattattttttaaatttaagatcttgaagatgatgtttagtttt

SEQ ID NO: 20361 - DNA, 540 bp, Chicken  19866894230779_3
gatgttttaggacaattgaaaaatttctggttgcagttaagttaggagagtttaatggcaagctaycaaagtgagagaaatcattttatacttagaaatttatgtaaatatgcagacaaaactagagctgaatcatttccttgttgatactgactgtcatgtgtgtttccccagtgaataccgtgctttttaaatttttagccaaaggcttagaaacaaaatccttaaaacaaaatacaatcatcatgtaaacatcacatacctctgttcaataggaattttgtcatttggaacttcttkatttatttgtcttttttattattattattttttaaatttaagatcttgaagatgatgtttagttttcaacttaatgagcaccattacagcagctttacataataagaatgcacgtaaaggcaaaaaagcatcaataagcacattctacatcatgctaatagctatgctggaacagagagatatgtaaagaaagagtctaggtggctaggagggaaatttaggaagagatggattataaag

SEQ ID NO: 20362 - DNA, 600 bp, Chicken  19866894230784_1
ggcagccctgggtccggctcactgctggttcacacattgggccaactctggagcaaggcagctccctgtggctttgctcccatctgttcccagcaccacgcaaaccatgctgtgtaactcctgcagggctgtcacatcctgttcttcctcgggaagatgtcagtgtgctcctatcggcggctccgtcatgtgctgcggagcagcgggtttcacagcttgcagggaagaaaatggtctgtgtgtgttttcctgaaggcatttttgggtgttttgccataaaataggacaagaggtaatggytttaagktgcacaagggcagggtcaggttggatattagaaaacatttcttctcctaaagagcagtgctgcagtggcacagctgcccagggagtggtgggatcacygtccctggaggtgttcaaggccaggttggatggggccctgggcagcccggggctggtattacatgtggaggttggtggccctacctgcggtaggagggttggagcttcgtgatcctcgaggtcccttccaagcccagccattctttgattctatgattctatgtctggatgctttattttgagtaaaccacttga

SEQ ID NO: 20363 - DNA, 600 bp, Chicken  19866894230784_2
ctgggtccggctcactgctggttcacacattgggccaactctggagcaaggcagctccctgtggctttgctcccatctgttcccagcaccacgcaaaccatgctgtgtaactcctgcagggctgtcacatcctgttcttcctcgggaagatgtcagtgtgctcctatcggcggctccgtcatgtgctgcggagcagcgggtttcacagcttgcagggaagaaaatggtctgtgtgtgttttcctgaaggcatttttgggtgttttgccataaaataggacaagaggtaatggytttaagktgcacaagggcagggtcaggttggatattagaaaacatttcttctcctaaagagcagtgctgcagtggcacagctgcccagggagtggtgggatcacygtccctggaggtgttcaaggccaggttggatggggccctgggcagcccggggctggtattacatgtggaggttggtggccctacctgcggtaggagggttggagcttcgtgatcctcgaggtcccttccaagcccagccattctttgattctatgattctatgtctggatgctttattttgagtaaaccacttgaaatgggg

SEQ ID NO: 20364 - DNA, 600 bp, Chicken  19866894230784_3
catgctgtgtaactcctgcagggctgtcacatcctgttcttcctcgggaagatgtcagtgtgctcctatcggcggctccgtcatgtgctgcggagcagcgggtttcacagcttgcagggaagaaaatggtctgtgtgtgttttcctgaaggcatttttgggtgttttgccataaaataggacaagaggtaatggytttaagktgcacaagggcagggtcaggttggatattagaaaacatttcttctcctaaagagcagtgctgcagtggcacagctgcccagggagtggtgggatcacygtccctggaggtgttcaaggccaggttggatggggccctgggcagcccggggctggtattacatgtggaggttggtggccctacctgcggtaggagggttggagcttcgtgatcctcgaggtcccttccaagcccagccattctttgattctatgattctatgtctggatgctttattttgagtaaaccacttgaaatggggtgttcttcatyccaraaggcagatgatgatttttatcacagaatcattaaggttggaaaaggcctctaagatcacctcatccaaccatcaacctatca

SEQ ID NO: 20365 - DNA, 600 bp, Chicken  19866894230784_4
agggtcaggttggatattagaaaacatttcttctcctaaagagcagtgctgcagtggcacagctgcccagggagtggtgggatcacygtccctggaggtgttcaaggccaggttggatggggccctgggcagcccggggctggtattacatgtggaggttggtggccctacctgcggtaggagggttggagcttcgtgatcctcgaggtcccttccaagcccagccattctttgattctatgattctatgtctggatgctttattttgagtaaaccacttgaaatggggtgttcttcatyccaraaggcagatgatgatttttatcacagaatcattaaggttggaaaaggcctctaagatcacctcatccaaccatcaacctatcaccattasgcccactaagctagccaagtggttgcctgttcttccttccataacatattttcggtttctttggttgaatgtatgctgtatatatgagtgctaatggctagcatcgaatccatgttgattttctttctgctcaaagcctcttttcagtcaycttgtgtgccttaatgacagaaggaaaaagaaagaagaaagttttgtggtctttt

SEQ ID NO: 20366 - DNA, 600 bp, Chicken  19866894230784_5
tcaggttggatattagaaaacatttcttctcctaaagagcagtgctgcagtggcacagctgcccagggagtggtgggatcacygtccctggaggtgttcaaggccaggttggatggggccctgggcagcccggggctggtattacatgtggaggttggtggccctacctgcggtaggagggttggagcttcgtgatcctcgaggtcccttccaagcccagccattctttgattctatgattctatgtctggatgctttattttgagtaaaccacttgaaatggggtgttcttcatyccaraaggcagatgatgatttttatcacagaatcattaaggttggaaaaggcctctaagatcacctcatccaaccatcaacctatcaccattasgcccactaagctagccaagtggttgcctgttcttccttccataacatattttcggtttctttggttgaatgtatgctgtatatatgagtgctaatggctagcatcgaatccatgttgattttctttctgctcaaagcctcttttcagtcaycttgtgtgccttaatgacagaaggaaaaagaaagaagaaagttttgtggtcttttcaga

SEQ ID NO: 20367 - DNA, 600 bp, Chicken  19866894230784_6
gaggtgttcaaggccaggttggatggggccctgggcagcccggggctggtattacatgtggaggttggtggccctacctgcggtaggagggttggagcttcgtgatcctcgaggtcccttccaagcccagccattctttgattctatgattctatgtctggatgctttattttgagtaaaccacttgaaatggggtgttcttcatyccaraaggcagatgatgatttttatcacagaatcattaaggttggaaaaggcctctaagatcacctcatccaaccatcaacctatcaccattasgcccactaagctagccaagtggttgcctgttcttccttccataacatattttcggtttctttggttgaatgtatgctgtatatatgagtgctaatggctagcatcgaatccatgttgattttctttctgctcaaagcctcttttcagtcaycttgtgtgccttaatgacagaaggaaaaagaaagaagaaagttttgtggtcttttcagagcttcttccgtagttcttgtacaacatcttccccagcttaactgtcaaatctctgcaactctgcatatagctgtgccttttcctggacct

SEQ ID NO: 20368 - DNA, 469 bp, Chicken  19866894230784_7
ctatgtctggatgctttattttgagtaaaccacttgaaatggggtgttcttcatyccaraaggcagatgatgatttttatcacagaatcattaaggttggaaaaggcctctaagatcacctcatccaaccatcaacctatcaccattasgcccactaagctagccaagtggttgcctgttcttccttccataacatattttcggtttctttggttgaatgtatgctgtatatatgagtgctaatggctagcatcgaatccatgttgattttctttctgctcaaagcctcttttcagtcaycttgtgtgccttaatgacagaaggaaaaagaaagaagaaagttttgtggtcttttcagagcttcttccgtagttcttgtacaacatcttccccagcttaactgtcaaatctctgcaactctgcatatagctgtgccttttcctggacctaaaggtgaggaattctcacc

SEQ ID NO: 20369 - DNA, 599 bp, Chicken  19866894230787_1
  misc_feature (1)..(159): n is any nucleotide
nnnnnnnnnnnnnnnnnnnnnnnnnnnnnnnnnnnnnnnnnnnnnnnnnnnnnnnnnnnnnnnnnnnnnnnnnnnnnnnnnnnnnnnnnnnnnnnnnnnnnnnnnnnnnnnnnnnnnnnnnnnnnnnnnnnnnnnnnnnnnnnnnnnnnnnnnnnnnnntcacaccagcagacctgaccaaaaaagcccctcatggtaggaagcagcaggagggagtgggcatgcacagctgtgtgtgctgctgccagggaggttgttttgcttcttgtattgatagagatgctctaattgtcatgccarctccacacaaacaccatgtctcaaactgccaaatcaagccatggggatttcagatttttttaaacattatgttataaagtctttttttttyccccctccrtgaggaaggacatggtggaacrtgacatgtttaaaaaggttttcctgatggctggaactttgggaagggcagaacttagctcaactcaaactcaacaacaagaacaacatgaaattggtaattataaacgygccttgtcctgctgaagtgattgctccatgtacttctgttcaggatatataatcattaaaaactaaca

SEQ ID NO: 20370 - DNA, 599 bp, Chicken  19866894230787_2
  misc_feature (1)..(68): n is any nucleotide
nnnnnnnnnnnnnnnnnnnnnnnnnnnnnnnnnnnnnnnnnnnnnnnnnnnnnnnnnnnnnnnnnnnntcacaccagcagacctgaccaaaaaagcccctcatggtaggaagcagcaggagggagtgggcatgcacagctgtgtgtgctgctgccagggaggttgttttgcttcttgtattgatagagatgctctaattgtcatgccarctccacacaaacaccatgtctcaaactgccaaatcaagccatggggatttcagatttttttaaacattatgttataaagtctttttttttyccccctccrtgaggaaggacatggtggaacrtgacatgtttaaaaaggttttcctgatggctggaactttgggaagggcagaacttagctcaactcaaactcaacaacaagaacaacatgaaattggtaattataaacgygccttgtcctgctgaagtgattgctccatgtacttctgttcaggatatataatcattaaaaactaacactagctgaaagtttggtaagaaagatacaagggggcataaataagggagattgttgactttgcatttaaaaaaagtacaactaattgttgc

SEQ ID NO: 20371 - DNA, 599 bp, Chicken  19866894230787_3
  misc_feature (1)..(59): n is any nucleotide
nnnnnnnnnnnnnnnnnnnnnnnnnnnnnnnnnnnnnnnnnnnnnnnnnnnnnnnnnnntcacaccagcagacctgaccaaaaaagcccctcatggtaggaagcagcaggagggagtgggcatgcacagctgtgtgtgctgctgccagggaggttgttttgcttcttgtattgatagagatgctctaattgtcatgccarctccacacaaacaccatgtctcaaactgccaaatcaagccatggggatttcagatttttttaaacattatgttataaagtctttttttttyccccctccrtgaggaaggacatggtggaacrtgacatgtttaaaaaggttttcctgatggctggaactttgggaagggcagaacttagctcaactcaaactcaacaacaagaacaacatgaaattggtaattataaacgygccttgtcctgctgaagtgattgctccatgtacttctgttcaggatatataatcattaaaaactaacactagctgaaagtttggtaagaaagatacaagggggcataaataagggagattgttgactttgcatttaaaaaaagtacaactaattgttgctgtgggttt

SEQ ID NO: 20372 - DNA, 599 bp, Chicken  19866894230787_4
  misc_feature (1)..(37): n is any nucleotide
nnnnnnnnnnnnnnnnnnnnnnnnnnnnnnnnnnnnntcacaccagcagacctgaccaaaaaagcccctcatggtaggaagcagcaggagggagtgggcatgcacagctgtgtgtgctgctgccagggaggttgttttgcttcttgtattgatagagatgctctaattgtcatgccarctccacacaaacaccatgtctcaaactgccaaatcaagccatggggatttcagatttttttaaacattatgttataaagtctttttttttyccccctccrtgaggaaggacatggtggaacrtgacatgtttaaaaaggttttcctgatggctggaactttgggaagggcagaacttagctcaactcaaactcaacaacaagaacaacatgaaattggtaattataaacgygccttgtcctgctgaagtgattgctccatgtacttctgttcaggatatataatcattaaaaactaacactagctgaaagtttggtaagaaagatacaagggggcataaataagggagattgttgactttgcatttaaaaaaagtacaactaattgttgctgtgggtttgccttttgttgctgttttcttt

SEQ ID NO: 20373 - DNA, 600 bp, Chicken  19866894230787_5
gtgtgtgctgctgccagggaggttgttttgcttcttgtattgatagagatgctctaattgtcatgccarctccacacaaacaccatgtctcaaactgccaaatcaagccatggggatttcagatttttttaaacattatgttataaagtctttttttttyccccctccrtgaggaaggacatggtggaacrtgacatgtttaaaaaggttttcctgatggctggaactttgggaagggcagaacttagctcaactcaaactcaacaacaagaacaacatgaaattggtaattataaacgygccttgtcctgctgaagtgattgctccatgtacttctgttcaggatatataatcattaaaaactaacactagctgaaagtttggtaagaaagatacaagggggcataaataagggagattgttgactttgcatttaaaaaaagtacaactaattgttgctgtgggtttgccttttgttgctgttttctttgcttcaagagcttttattctttgctataatttttaacttagatttagtataactatttttcaaccatttctgaggaatgggacaaaccttatattttctgcccatttaga

SEQ ID NO: 20374 - DNA, 599 bp, Chicken  19866894230791_1
  misc_feature (1)..(79): n is any nucleotide
nnnnnnnnnnnnnnnnnnnnnnnnnnnnnnnnnnnnnnnnnnnnnnnnnnnnnnnnnnnnnnnnnnnnnnnnnnnnnnncattctttccttaagctttggcatatgctggttactctggatctatgtggtgtagacagcaaggatgggtggtgtttgatatactgctgatgtctatggagtgccagtaaccaccagctgcttggatctatctcttaggctgggacactggaagtcttttgtcaggtaaaaaaagcttgaggatctcagcaaaagcttgaggatccctgccccactgtccygtctgaaagctggcacgcagggcagtgwcaacacctcagtgtctcactgcctcttgctctgggtggatcagtggccagatgcctcctcagtgactttttgaagggggacgctttcccactgactgtacaaacaccagaagtctctctcctctcagagagaarcaaatgaatcagctgaggatccgcaggacaagctacctatctctggcccaatcccaaccatgttccctactctctgcatcttttctgcatggctccatgctcttgcttaatgcaagaggtttcctgtatgtgcaggg

SEQ ID NO: 20375 - DNA, 599 bp, Chicken  19866894230791_2
  misc_feature (1)..(51): n is any nucleotide
nnnnnnnnnnnnnnnnnnnnnnnnnnnnnnnnnnnnnnnnnnnnnnnnnnncattctttccttaagctttggcatatgctggttactctggatctatgtggtgtagacagcaaggatgggtggtgtttgatatactgctgatgtctatggagtgccagtaaccaccagctgcttggatctatctcttaggctgggacactggaagtcttttgtcaggtaaaaaaagcttgaggatctcagcaaaagcttgaggatccctgccccactgtccygtctgaaagctggcacgcagggcagtgwcaacacctcagtgtctcactgcctcttgctctgggtggatcagtggccagatgcctcctcagtgactttttgaagggggacgctttcccactgactgtacaaacaccagaagtctctctcctctcagagagaarcaaatgaatcagctgaggatccgcaggacaagctacctatctctggcccaatcccaaccatgttccctactctctgcatcttttctgcatggctccatgctcttgcttaatgcaagaggtttcctgtatgtgcagggtggctggggtgagctcattacccgcttc

SEQ ID NO: 20376 - DNA, 600 bp, Chicken  19866894230791_3
ctgctgatgtctatggagtgccagtaaccaccagctgcttggatctatctcttaggctgggacactggaagtcttttgtcaggtaaaaaaagcttgaggatctcagcaaaagcttgaggatccctgccccactgtccygtctgaaagctggcacgcagggcagtgwcaacacctcagtgtctcactgcctcttgctctgggtggatcagtggccagatgcctcctcagtgactttttgaagggggacgctttcccactgactgtacaaacaccagaagtctctctcctctcagagagaarcaaatgaatcagctgaggatccgcaggacaagctacctatctctggcccaatcccaaccatgttccctactctctgcatcttttctgcatggctccatgctcttgcttaatgcaagaggtttcctgtatgtgcagggtggctggggtgagctcattacccgcttcccgtctgtgggcaagagtggtctgctgcctccagctgcgtgcggtgctgtagctgatgggatgcttccagtgcattttctctttgcaagcctgcagctcccagtcttgtggaggcaggcaagggaagtcacgcag

SEQ ID NO: 20377 - DNA, 599 bp, Chicken  19866894230796_1
  misc_feature (1)..(112): n is any nucleotide
nnnnnnnnnnnnnnnnnnnnnnnnnnnnnnnnnnnnnnnnnnnnnnnnnnnnnnnnnnnnnnnnnnnnnnnnnnnnnnnnnnnnnnnnnnnnnnnnnnnnnnnnnnnnnnnngggaactttgacttgctcatgaaaacccaaaggataacgtatgtgtgggattcttttgggcagacagcccttaaacttttactgcagggtgttgcagtgtaatctgggagcctgacttcatggacatctggagtgttctgttccttcccattttcacccctcctttctcacagccagtctcccccttytccctcctcttcattattttcttttttcttcacctgattagggatagtgccagtttttaaccacatcatcctttgtttaaaggaaaaaaagacatcatgaattgtattggacccagatggaaaaaaaaaaacaaaccaaaacaaacccacctcgatgaagttaaaaaaaaaaaaaaggaaaaaagaaaaggaaaaacaacaaaacttgtatatttggctgattaaaatgtaaattatcagaactgccatgtcctcgtgtaagtgaactgctacaatgcacagtgcagcagcagtgtggt

SEQ ID NO: 20378 - DNA, 600 bp, Chicken  19866894230800_1
cagcaccaatgtaaacaccttcagttgccttcaagaatgcaactcatgcactgagatctgtgtcagcacagcaaaaagagggtgctagttaagaggtcaacacagaaagatatgggactgggagcaaggagaatagtgacctctgagccctgctctcacattgactttttaatagaatcatagggttggaagggatcttaaagattatctagtttcaatcctcctgccatggtcagggttgaccttgggctatgacatcttactggatttgtgtttattgaccttctttctatatccttsgsctttttyatctgtcagcccttccagccatgaactgtctctaagtatatatatatatatgcaatgcttagcacaactaagccctaatctccactggggattactggcatttaaattacaaacacatggcttgtggttacccatatggggaccctggtcctgagctctctgtattgtttgagtgctctatcctgagaccaggacatcactatagttttcggtccttctagattagtctgaggaaggtccaaggggtaatcatacagcatatcttggcaacagagcaaggagaagaatgcc

SEQ ID NO: 20379 - DNA, 600 bp, Chicken  19866894230800_2
gcaccaatgtaaacaccttcagttgccttcaagaatgcaactcatgcactgagatctgtgtcagcacagcaaaaagagggtgctagttaagaggtcaacacagaaagatatgggactgggagcaaggagaatagtgacctctgagccctgctctcacattgactttttaatagaatcatagggttggaagggatcttaaagattatctagtttcaatcctcctgccatggtcagggttgaccttgggctatgacatcttactggatttgtgtttattgaccttctttctatatccttsgsctttttyatctgtcagcccttccagccatgaactgtctctaagtatatatatatatatgcaatgcttagcacaactaagccctaatctccactggggattactggcatttaaattacaaacacatggcttgtggttacccatatggggaccctggtcctgagctctctgtattgtttgagtgctctatcctgagaccaggacatcactatagttttcggtccttctagattagtctgaggaaggtccaaggggtaatcatacagcatatcttggcaacagagcaaggagaagaatgccca

SEQ ID NO: 20380 - DNA, 600 bp, Chicken  19866894230800_3
tgtaaacaccttcagttgccttcaagaatgcaactcatgcactgagatctgtgtcagcacagcaaaaagagggtgctagttaagaggtcaacacagaaagatatgggactgggagcaaggagaatagtgacctctgagccctgctctcacattgactttttaatagaatcatagggttggaagggatcttaaagattatctagtttcaatcctcctgccatggtcagggttgaccttgggctatgacatcttactggatttgtgtttattgaccttctttctatatccttsgsctttttyatctgtcagcccttccagccatgaactgtctctaagtatatatatatatatgcaatgcttagcacaactaagccctaatctccactggggattactggcatttaaattacaaacacatggcttgtggttacccatatggggaccctggtcctgagctctctgtattgtttgagtgctctatcctgagaccaggacatcactatagttttcggtccttctagattagtctgaggaaggtccaaggggtaatcatacagcatatcttggcaacagagcaaggagaagaatgcccaaagagac

SEQ ID NO: 20381 - DNA, 600 bp, Chicken  19866894230814_1
gtattattaaaacaaaacattttgattgtggttaccattgtcaggagaacttccgtgagtgcaatgagtatttgaatcatcaaaatgtcatatagctttaagttctctcattacaccattactggcaatcattcataatcgtgtatataatataagtaagaaatttatacatatgtctgcatatttgcatagacaaataacacagatcaatagacaaataaacattgaaagataaattatgtggctggccatttattacttatttattattattacttactatttttttacttattcagyaaggttttatcaaactagatgatcacagaatcagagaataacttgggttggaaggtaccctaaaggccatctgttttcaacctctggtgagcagggttggccatctactataacaggctgctcaggatcccttacagcctggccttgcacacctccaggaatggggtaaccacaactctgggaaacatgttccagggcctcacactctaagtaaaaaacttcgtcctaatatctaatctgaagctctactcttttagtttaaaatcattcccccttgtcctatcactatcagaccgtgca

SEQ ID NO: 20382 - DNA, 600 bp, Chicken  19866894230814_2
ggggtaaccacaactctgggaaacatgttccagggcctcacactctaagtaaaaaacttcgtcctaatatctaatctgaagctctactcttttagtttaaaatcattcccccttgtcctatcactatcagaccgtgcaaaaagacaaagaacatcagtttaatgctctaccacttcttgttttggaatatttattttactgctgttcctttacaggaacatactaacgtaagtcgtctaccctgaacaagtagaacagggctcattaaatttcacttattagctgaaatttctgaatcayatttgattcttgaattaaaaaaaaacccaaaggccaaagaatatggaagaatgaagacatggcaacactcatttgtgactgcatatttcatatgacatgttatactggttatgaccttactatcaagtacttctcatcgcaaattatgtgtctttgggctaaactctacactaacttagaaaaaaaaaaagactactgctgtctaaaaaggcaagactgcagatgaatatggaaagagaggagatcacaaatggataaktggatatggcagatagagatatgaaaacaattacaacaaca

SEQ ID NO: 20383 - DNA, 600 bp, Chicken  19866894230814_3
tttggaatatttattttactgctgttcctttacaggaacatactaacgtaagtcgtctaccctgaacaagtagaacagggctcattaaatttcacttattagctgaaatttctgaatcayatttgattcttgaattaaaaaaaaacccaaaggccaaagaatatggaagaatgaagacatggcaacactcatttgtgactgcatatttcatatgacatgttatactggttatgaccttactatcaagtacttctcatcgcaaattatgtgtctttgggctaaactctacactaacttagyaaaaaaaaaagactactgctgtctaaaaaggcaagactgcagatgaatatggaaagagaggagatcacaaatggataaktggatatggcagatagagatatgaaaacaattacaacaacaaaacataaaaaatagaaactatggatctagaatataaatgacaatatcagaaacagtaaaattgctacagtatatttttgtacacttggtaacagagagaggagctgcaattgtggcattatgagaacttagcaattactttggctgcttttttttttttttttactttactttggtcag

SEQ ID NO: 20384 - DNA, 600 bp, Chicken  19866894230814_4
ttggaatatttattttactgctgttcctttacaggaacatactaacgtaagtcgtctaccctgaacaagtagaacagggctcattaaatttcacttattagctgaaatttctgaatcayatttgattcttgaattaaaaaaaaacccaaaggccaaagaatatggaagaatgaagacatggcaacactcatttgtgactgcatatttcatatgacatgttatactggttatgaccttactatcaagtacttctcatcgcaaattatgtgtctttgggctaaactctacactaacttagayaaaaaaaaagactactgctgtctaaaaaggcaagactgcagatgaatatggaaagagaggagatcacaaatggataaktggatatggcagatagagatatgaaaacaattacaacaacaaaacataaaaaatagaaactatggatctagaatataaatgacaatatcagaaacagtaaaattgctacagtatatttttgtacacttggtaacagagagaggagctgcaattgtggcattatgagaacttagcaattactttggctgcttttttttttttttttactttactttggtcagc

SEQ ID NO: 20385 - DNA, 600 bp, Chicken  19866894230814_5
gctcattaaatttcacttattagctgaaatttctgaatcayatttgattcttgaattaaaaaaaaacccaaaggccaaagaatatggaagaatgaagacatggcaacactcatttgtgactgcatatttcatatgacatgttatactggttatgaccttactatcaagtacttctcatcgcaaattatgtgtctttgggctaaactctacactaacttagaaaaaaaaaaagactactgctgtctaaaaaggcaagactgcagatgaatatggaaagagaggagatcacaaatggataaktggatatggcagatagagatatgaaaacaattacaacaacaaaacataaaaaatagaaactatggatctagaatataaatgacaatatcagaaacagtaaaattgctacagtatatttttgtacacttggtaacagagagaggagctgcaattgtggcattatgagaacttagcaattactttggctgcttttttttttttttttactttactttggtcagctgaaatctaaggcatcctcttttgatcttagggtaaaaagggttcaaattatttatgatgacagatgtagaaggaaat

SEQ ID NO: 20386 - DNA, 600 bp, Chicken  19866894230816_1
gctgagtttgttcactgaaattacaacttctattgatttttctctgcagttcttcgtcttaccaatgcctcttcatccatttgtgttttcttgttttctagtatggtttcttcgtatttggttcatcatgggtactgttcaacagcaactgccttcgccagagtcacagacactgcaatccaggaagaacagacctcaataaagaacagacaaagtaagtctctcaggtggtcactcccaacatgtggcattctggctgttatttgactgcagcattgctatccagaacagaggtagtgmcagactggtggagaataaatccccatcacctagggcttgcactgaactgaagccactgtgtttctgagcttcctttggatttgggttcttcagtgcagtcttttgtagcaaggcagttttatgagcatggttacagggacctggacgtatcgatgtattttaactacaactctcagagttaatgagtctttcagcccctttgtattcatttggataaattgtgtggtcaaacacaggaacagacttcctagagagctgccttctgcttgccagtgtttgagaggcatttggacaatggcc

SEQ ID NO: 20387 - DNA, 482 bp, Chicken  19866894230817_1
gaaagactggcaccacatctcagctatgaagtctttttatgtcagtgtaaagcttcttttctttggagaattgtactgcttgttgcaaggacagtttttctgaaggaggattgcagctgatcatcctcattgacattactgagtctggtgaagtgcaggcacaacagaagttttgttcactgtatttaacagcaaggtaccttttattattacctttggcgtgattgaaattattgctagtaataaccttgtgagagtaagtggtacagcaattagtgtaattctgctggaacgtcattkaaaatgcagaaatttttggagcaatagatgaacacgaaacagggacttctgtgcagagctttcagaattgcctgatgaagcgagcagtttaacccagatttgttttaatgtggataaatacatgagccacacattaaggaggacaagaaacagacccttcctgcagaatgaagcattagtaa

SEQ ID NO: 20388 - DNA, 599 bp, Chicken  19866894230820_1
  misc_feature (1)..(183): n is any nucleotide
nnnnnnnnnnnnnnnnnnnnnnnnnnnnnnnnnnnnnnnnnnnnnnnnnnnnnnnnnnnnnnnnnnnnnnnnnnnnnnnnnnnnnnnnnnnnnnnnnnnnnnnnnnnnnnnnnnnnnnnnnnnnnnnnnnnnnnnnnnnnnnnnnnnnnnnnnnnnnnnnnnnnnnnnnnnnnnnnnnnnnnncgataaagaacagcatgcagcctcactgacaggggatgctcaggtgcttaaataagaaatgtgaaggtacttgaaaactaagtggtagaatgaagggctggaatcagctacagaaakccccttccaattgcctaccagcatgccagaggttgcagcactatggttgagctttgccactgtagcaaacaaactacttggaataaagaaaagatgttctcyttcaatgaaatgtctccaacgtgcaacttatgcaaacccaataagtccaaggggtgcagccaggcagaggtaaggaaggcagctaaaaacatgagtgagctcctcctgaagaagcttcactgaccagtttctccagctgaaacaatattataagatagctagaaactgtaaattacaagattttttggtgttttttt

SEQ ID NO: 20389 - DNA, 599 bp, Chicken  19866894230820_2
  misc_feature (1)..(81): n is any nucleotide
nnnnnnnnnnnnnnnnnnnnnnnnnnnnnnnnnnnnnnnnnnnnnnnnnnnnnnnnnnnnnnnnnnnnnnnnnnnnnnnnncgataaagaacagcatgcagcctcactgacaggggatgctcaggtgcttaaataagaaatgtgaaggtacttgaaaactaagtggtagaatgaagggctggaatcagctacagaaakccccttccaattgcctaccagcatgccagaggttgcagcactatggttgagctttgccactgtagcaaacaaactacttggaataaagaaaagatgttctcyttcaatgaaatgtctccaacgtgcaacttatgcaaacccaataagtccaaggggtgcagccaggcagaggtaaggaaggcagctaaaaacatgagtgagctcctcctgaagaagcttcactgaccagtttctccagctgaaacaatattataagatagctagaaactgtaaattacaagattttttggtgtttttttcttcttttaattcttcagaatagccctttatracttgcaacacrgacttctgcaataaarcactcaatttaagcaaaattagcattctgcttttaataagga

SEQ ID NO: 20390 - DNA, 545 bp, Chicken  19866894230820_3
gttgcagcactatggttgagctttgccactgtagcaaacaaactacttggaataaagaaaagatgttctcyttcaatgaaatgtctccaacgtgcaacttatgcaaacccaataagtccaaggggtgcagccaggcagaggtaaggaaggcagctaaaaacatgagtgagctcctcctgaagaagcttcactgaccagtttctccagctgaaacaatattataagatagctagaaactgtaaattacaagattttttggtgtttttttcttcttttaattcttcagaatagccctttatracttgcaacacrgacttctgcaataaarcactcaatttaagcaaaattagcattctgcttttaataaggacctttatatgggaagctggataaccatacatctgcagtccttcaaaggaaatcatcctactctatagtgctggagacctccaggtattttgcaacttgattttgtgcaatgcattattaaaaacagcaaaatacaaacaagatttaagatgttagacccccggcttcagtgattt

SEQ ID NO: 20391 - DNA, 533 bp, Chicken  19866894230820_4
tggttgagctttgccactgtagcaaacaaactacttggaataaagaaaagatgttctcyttcaatgaaatgtctccaacgtgcaacttatgcaaacccaataagtccaaggggtgcagccaggcagaggtaaggaaggcagctaaaaacatgagtgagctcctcctgaagaagcttcactgaccagtttctccagctgaaacaatattataagatagctagaaactgtaaattacaagattttttggtgtttttttcttcttttaattcttcagaatagccctttatracttgcaacacrgacttctgcaataaarcactcaatttaagcaaaattagcattctgcttttaataaggacctttatatgggaagctggataaccatacatctgcagtccttcaaaggaaatcatcctactctatagtgctggagacctccaggtattttgcaacttgattttgtgcaatgcattattaaaaacagcaaaatacaaacaagatttaagatgttagacccccggcttcagtgattt

SEQ ID NO: 20392 - DNA, 517 bp, Chicken  19866894230820_5
ctgtagcaaacaaactacttggaataaagaaaagatgttctcyttcaatgaaatgtctccaacgtgcaacttatgcaaacccaataagtccaaggggtgcagccaggcagaggtaaggaaggcagctaaaaacatgagtgagctcctcctgaagaagcttcactgaccagtttctccagctgaaacaatattataagatagctagaaactgtaaattacaagattttttggtgtttttttcttcttttaattcttcagaatagccctttatracttgcaacacrgacttctgcaataaarcactcaatttaagcaaaattagcattctgcttttaataaggacctttatatgggaagctggataaccatacatctgcagtccttcaaaggaaatcatcctactctatagtgctggagacctccaggtattttgcaacttgattttgtgcaatgcattattaaaaacagcaaaatacaaacaagatttaagatgttagacccccggcttcagtgattt

SEQ ID NO: 20393 - DNA, 564 bp, Chicken  19866894230824_1
gtacgttgcaatcttgcagatgctctttacattcagtaactttttcaggactttgcttgagatctgacagtaattactgctgtatcatttgggatgtgttgtagagtaaaggctattaaaactccatttattttatgagttagcacccaacttactttgtacggtctgttaaaacaatgtttttctggaatttccaatacagatgtgtgattgctaaaaatattcaaaatataatggtatgatactcctctagaagtttctttgctttggtccaacagctcctctagctgggggaaagarcttgcaagtgatctccttcctgagatgtgaacaatctcatacttgcgtaaggggagaagaaaaaagaacctgtttccatgcttatagttcagagatgggttcagttccctcttccaccatggctgccttctttgtgctgtatcatcttgttcctgtgaactgaatattgttaaaaccctaggtaggggtgagggtacaaacatagcatattataaaccattctagttccagagtaattcagtaattcagtgttctttcacagac

SEQ ID NO: 20394 - DNA, 600 bp, Chicken  19866894230835_1
attacttggtcttacgtatatcgtgttggttttgagatagatgatatcaaaaagaaaagtggaagcgtacagattccagccccatagataagctcaccaaacagctttgtaccaacctgggggtcctcattctgctccccaaacatgcgcttcaggatttcccgagggtccgggattggtggaagaattaatatcttaagccttcagaaaatgaagaggagaaacttcagatgaattcattataacataaaaaaatcaccatctcaaagtcacccttgggtgcagacaggaaacatgtgragtcatttttgacaccaccagctcgtttttagcttctgcgcaactgcaaccccawtccacacttcatatacgcttcatatatattaattttgaatttggacttcattgcttaaaaagagaggatgtgacacccatacagcaagaatctaactgtaagcagatacaagcaatgctaccatggggacaacagagcacctatctggcctgctactctaattctaatggatggagcacagtggtgtcgccattcttgctattggatgcatgctactgaaaaagcagctacttttgaaacatgtc

SEQ ID NO: 20395 - DNA, 600 bp, Chicken  19866894230835_2
aaagtggaagcgtacagattccagccccatagataagctcaccaaacagctttgtaccaacctgggggtcctcattctgctccccaaacatgcgcttcaggatttcccgagggtccgggattggtggaagaattaatatcttaagccttcagaaaatgaagaggagaaacttcagatgaattcattataacataaaaaaatcaccatctcaaagtcacccttgggtgcagacaggaaacatgtgragtcatttttgacaccaccagctcgtttttagcttctgcgcaactgcaaccccawtccacacttcatatacgcttcatatatattaattttgaatttggacttcattgcttaaaaagagaggatgtgacacccatacagcaagaatctaactgtaagcagatacaagcaatgctaccatggggacaacagagcacctatctggcctgctactctaattctaatggatggagcacagtggtgtcgccattcttgctattggatgcatgctactgaaaaagcagctacttttgaaacatgtcacatcaggagcaattaactggaagacagatgtgttatagcgtaaatcaaagtcca

SEQ ID NO: 20396 - DNA, 599 bp, Chicken  19866894230842_1
  misc_feature (1)..(152): n is any nucleotide
nnnnnnnnnnnnnnnnnnnnnnnnnnnnnnnnnnnnnnnnnnnnnnnnnnnnnnnnnnnnnnnnnnnnnnnnnnnnnnnnnnnnnnnnnnnnnnnnnnnnnnnnnnnnnnnnnnnnnnnnnnnnnnnnnnnnnnnnnnnnnnnnnnnnnnnnagggtgctcaaaaccccatcaaacccagctttgaacagatccaatgatgggacatccataccaaccctgggcaacctgttccagaggcttaccacccccaggttaaacacaggcccaggtcaggctggcactgatgtcctggccctgrtgcagcatgcaacacagagccatccaaggctggcatggttggggtcctcatgccgcagaggcacttgcatgtactgcaaactcttctctgatgattagataataggaattgtccatttactttcatttcaattgtgcgtgactggatcaaaggatgcatgctctctctgcttcaattacgtattttggtttaatgtagtccagatggctatttcatctcagcttttatatttattcatggcctttctatttaacttccctaaaacaaatactgactcgtaggcgtatattaattcaagg

SEQ ID NO: 20397 - DNA, 600 bp, Chicken  19866894230852_1
agatcagtacagccctcctgttctccaatacttggcatcaatactgcaacactacttccttcttccataatatctaggagaaaaacattaaaatattaaaaattatacacaacaataaaaatacaatccactactatttaaatttctttactaaatgtagaagacaaaaaccaccagctttataaaaacttccagaatggtgataaaaatagccaaatattttgaggacatgaagtaaatgatatagatgctattcaaaacagttgcacagagtatttccaaaacagcctctgtgtgtcktcaagttgtataacagcaagataaatatttttctagcataaactcattagcattgttagttattgtattttttctttacaaggattatgtctgaatgctggacacttaaatatactaatcaacaagaactggcagatttttacttaaaagctgtatgatatgatatggaaatgtatccctaacattctcactctgatacactaatgtctcctgaataggtaaatgagtaattctggaatttatattatgggaaattccaatattatattagtcatttcaccttgactgtattaaaggcca

SEQ ID NO: 20398 - DNA, 440 bp, Chicken  19866894230862_1
ttatgcacaggactgaactgtactgagtgtttctttagtgaacagaagaaaatacataatcagtggatggtaacactgagtactctgaactagatgtctttacactggcacagacaaaataggtgtgttttctctacatgtgcaggaacaagaggaattattttaaaataaatattgcatctcatgcatagagatatctagagaagattaaaagaacaaagtgaaccactatgcaggcaaaaccctgacaggcagtgtgtataaacttaataggaaatgatcattttggacttttgttcycctgttcatttagctgtgctcagttccatttgacagcaggatttgatttatcatttgatagagcaatctgtatcgtcttttcaagtctaaaaatcattccactgttcctggccaaagaggcttttttttttcctctgtga

SEQ ID NO: 20399 - DNA, 600 bp, Chicken  19866894230863_1
tgctcagagcagcacaaggaaatggactctgctctgttttcccatcagcatatactctgagacaggaatctgagcccattttgagagcgcactatgtgtgcagatccccaaggagaatctgaatgcctctgctgacacgacagcagtaacagcccatctacaaccctaggcttcatcagagaactcacagggcatgttgctgaaatgccagataaaacacagcattgggtcatcctagttttaggatcctgcctctaaggaaggcttgggtctccttcctgtgaaaacatgggcagacgsgagtttggataacaccagatactccaacaaacatttcatgctctcagaaacctgagatacttccacaggsgcattaagagggatctgaagcatctccaacttgggagcacaaatcctacaggctttggatagaggcagagacttaaacccaggccttttcaacagccaggggagcaaaccctcaagcacaggtgtgggcacacgtacgcaagcactcgttggcactttctgctgttgctctcctccacggccggtcattgaagaagggaaggcacttctcacagtcatccccaaaggtgt

SEQ ID NO: 20400 - DNA, 600 bp, Chicken  19866894230863_2
tgagcccattttgagagcgcactatgtgtgcagatccccaaggagaatctgaatgcctctgctgacacgacagcagtaacagcccatctacaaccctaggcttcatcagagaactcacagggcatgttgctgaaatgccagataaaacacagcattgggtcatcctagttttaggatcctgcctctaaggaaggcttgggtctccttcctgtgaaaacatgggcagacgsgagtttggataacaccagatactccaacaaacatttcatgctctcagaaacctgagatacttccacaggsgcattaagagggatctgaagcatctccaacttgggagcacaaatcctacaggctttggatagaggcagagacttaaacccaggccttttcaacagccaggggagcaaaccctcaagcacaggtgtgggcacacgtacgcaagcactcgttggcactttctgctgttgctctcctccacggccggtcattgaagaagggaaggcacttctcacagtcatccccaaaggtgttgtgcttgcagttgcagaccagcttcccaagctcgttccttatgcactcgctcgcatggccattgcattt

SEQ ID NO: 20401 - DNA, 600 bp, Chicken  19866894230863_3
gctttggatagaggcagagacttaaacccaggccttttcaacagccaggggagcaaaccctcaagcacaggtgtgggcacacgtacgcaagcactcgttggcactttctgctgttgctctcctccacggccggtcattgaagaagggaaggcacttctcacagtcatccccaaaggtgttgtgcttgcagttgcagaccagcttcccaagctcgttccttatgcactcgctcgcatggccattgcatttgcatctggttaacaagagacaaggaacgggtgtttaaaatccagggttccrggtctcccatggagcaatccagaaagtgcccagatataaaacttgagataaggtgtattcaggtgtaagattagaacaaaactgataacacaactcctgtggaacaagcaggtgtagcgtcctcaaggcaagtgtatagaagagcaagagtgccaacccacccctctctgaagtctgccactaaagcaggataaactaagcagaagaagcaaaaatagtactaaaatagatgctacacaattccttagtgtccctctcaggggagccctggaaaacttatacatgctgcccatatgctac

SEQ ID NO: 20402 - DNA, 600 bp, Chicken  19866894230868_1
acatagtgaatgcttttgcctttagcttacataacaccatctttacaacttttctatggtttgggaaacatctttcagccttaattcaaacacataaacttacataaatgcatgtatacacacatatctgtgtatatatgcatttacatgtatatatatatatatgtgcatacatgaaatgcatacataaagaaatatagtgtgagaatagattcctgtggtgctaagctttgaagaatgtttggaattggcaagcttaattctgtcttattttatatgaacaaaactccctttattcargaaattatgaagaaaactcattgcctttatgaaggtaattcatagactcataaaaatataggtttgaaggaggatctggaggtcacctagcccaatcacccatgaaaagaaggactgctgtttgccctagattaggttggctgtgatttttccagccaagacctaaaacatctccaaagagggcaaacacagacttcatggacagcctctaccagaactgtaccaccctctcagaaaaaaaaagcttcctcaagtccagtcaaaattcccaaggctcaagttatggttgttatccgttga

SEQ ID NO: 20403 - DNA, 600 bp, Chicken  19866894230873_1
ataattctgaaataaaagcagtcatccctttttaattcacttccactgcacttgtttggtactcagaagacagattcctctccatatccagcttctgctcacgtgcaacataggggaaaaagctatggggtagtcaccaaggtctattatatataattcttattatacaggaatgcctaaactaagattgactatttctaaggaagggacctgaaacaaaaaagtgccagagcagacatccaatatttgaagacttaggagaggaggaggctccccttttactaactctccttatcaaawgctgtggtttaagtgctatgaaatattgcagttgcttaaagataaawttccacagatcttattctgccatttcaaarggggttggtcccaacacaaggaatggratggataaggtcggaataaagcctggtttattacacttgctgaagtgtrgagtccagccaggacaagtccatacgttcttgttgctyctaaatatttctctycttttccaaaccatttccttgtatgttccttgtgcactctccttctcctggtttagcaagccttgactagaacaaaaataactaatgagagaaa

SEQ ID NO: 20404 - DNA, 600 bp, Chicken  19866894230873_2
gcacttgtttggtactcagaagacagattcctctccatatccagcttctgctcacgtgcaacataggggaaaaagctatggggtagtcaccaaggtctattatatataattcttattatacaggaatgcctaaactaagattgactatttctaaggaagggacctgaaacaaaaaagtgccagagcagacatccaatatttgaagacttaggagaggaggaggctccccttttactaactctccttatcaaawgctgtggtttaagtgctatgaaatattgcagttgcttaaagataaawttccacagatcttattctgccatttcaaarggggttggtcccaacacaaggaatggratggataaggtcggaataaagcctggtttattacacttgctgaagtgtrgagtccagccaggacaagtccatacgttcttgttgctyctaaatatttctctycttttccaaaccatttccttgtatgttccttgtgcactctccttctcctggtttagcaagccttgactagaacaaaaataactaatgagagaaaaaaaaagaaaaacaaaaccataactaatatataaacactcttctaaa

SEQ ID NO: 20405 - DNA, 600 bp, Chicken  19866894230873_3
ctctccatatccagcttctgctcacgtgcaacataggggaaaaagctatggggtagtcaccaaggtctattatatataattcttattatacaggaatgcctaaactaagattgactatttctaaggaagggacctgaaacaaaaaagtgccagagcagacatccaatatttgaagacttaggagaggaggaggctccccttttactaactctccttatcaaawgctgtggtttaagtgctatgaaatattgcagttgcttaaagataaawttccacagatcttattctgccatttcaaarggggttggtcccaacacaaggaatggratggataaggtcggaataaagcctggtttattacacttgctgaagtgtrgagtccagccaggacaagtccatacgttcttgttgctyctaaatatttctctycttttccaaaccatttccttgtatgttccttgtgcactctccttctcctggtttagcaagccttgactagaacaaaaataactaatgagagaaaaaaaaagaaaaacaaaaccataactaatatataaacactcttctaaatgatgcagaatggtgaagtctgggaagtga

SEQ ID NO: 20406 - DNA, 600 bp, Chicken  19866894230873_4
gcaacataggggaaaaagctatggggtagtcaccaaggtctattatatataattcttattatacaggaatgcctaaactaagattgactatttctaaggaagggacctgaaacaaaaaagtgccagagcagacatccaatatttgaagacttaggagaggaggaggctccccttttactaactctccttatcaaawgctgtggtttaagtgctatgaaatattgcagttgcttaaagataaawttccacagatcttattctgccatttcaaarggggttggtcccaacacaaggaatggratggataaggtcggaataaagcctggtttattacacttgctgaagtgtrgagtccagccaggacaagtccatacgttcttgttgctyctaaatatttctctycttttccaaaccatttccttgtatgttccttgtgcactctccttctcctggtttagcaagccttgactagaacaaaaataactaatgagagaaaaaaaaagaaaaacaaaaccataactaatatataaacactcttctaaatgatgcagaatggtgaagtctgggaagtgaacacaaattgtccctcccaagagccat

SEQ ID NO: 20407 - DNA, 600 bp, Chicken  19866894230873_5
taattcttattatacaggaatgcctaaactaagattgactatttctaaggaagggacctgaaacaaaaaagtgccagagcagacatccaatatttgaagacttaggagaggaggaggctccccttttactaactctccttatcaaawgctgtggtttaagtgctatgaaatattgcagttgcttaaagataaawttccacagatcttattctgccatttcaaarggggttggtcccaacacaaggaatggratggataaggtcggaataaagcctggtttattacacttgctgaagtgtrgagtccagccaggacaagtccatacgttcttgttgctyctaaatatttctctycttttccaaaccatttccttgtatgttccttgtgcactctccttctcctggtttagcaagccttgactagaacaaaaataactaatgagagaaaaaaaaagaaaaacaaaaccataactaatatataaacactcttctaaatgatgcagaatggtgaagtctgggaagtgaacacaaattgtccctcccaagagccatgcagacatgcacatcctcaaaatgactgttacagaagtagcaccatcag

SEQ ID NO: 20408 - DNA, 600 bp, Chicken  19866894230873_6
ctatttctaaggaagggacctgaaacaaaaaagtgccagagcagacatccaatatttgaagacttaggagaggaggaggctccccttttactaactctccttatcaaawgctgtggtttaagtgctatgaaatattgcagttgcttaaagataaawttccacagatcttattctgccatttcaaarggggttggtcccaacacaaggaatggratggataaggtcggaataaagcctggtttattacacttgctgaagtgtrgagtccagccaggacaagtccatacgttcttgttgctyctaaatatttctctycttttccaaaccatttccttgtatgttccttgtgcactctccttctcctggtttagcaagccttgactagaacaaaaataactaatgagagaaaaaaaaagaaaaacaaaaccataactaatatataaacactcttctaaatgatgcagaatggtgaagtctgggaagtgaacacaaattgtccctcccaagagccatgcagacatgcacatcctcaaaatgactgttacagaagtagcaccatcagttttctaaatggaagagtatgaaactacatttcttctt

SEQ ID NO: 20409 - DNA, 600 bp, Chicken  19866894230873_7
ggacctgaaacaaaaaagtgccagagcagacatccaatatttgaagacttaggagaggaggaggctccccttttactaactctccttatcaaawgctgtggtttaagtgctatgaaatattgcagttgcttaaagataaawttccacagatcttattctgccatttcaaarggggttggtcccaacacaaggaatggratggataaggtcggaataaagcctggtttattacacttgctgaagtgtrgagtccagccaggacaagtccatacgttcttgttgctyctaaatatttctctycttttccaaaccatttccttgtatgttccttgtgcactctccttctcctggtttagcaagccttgactagaacaaaaataactaatgagagaaaaaaaaagaaaaacaaaaccataactaatatataaacactcttctaaatgatgcagaatggtgaagtctgggaagtgaacacaaattgtccctcccaagagccatgcagacatgcacatcctcaaaatgactgttacagaagtagcaccatcagttttctaaatggaagagtatgaaactacatttcttcttatctttattatgggt

SEQ ID NO: 20410 - DNA, 599 bp, Chicken  19866894230874_1
  misc_feature (1)..(48): n is any nucleotide
nnnnnnnnnnnnnnnnnnnnnnnnnnnnnnnnnnnnnnnnnnnnnnnncctacatgaagttgaatgactttaattaaagctaaacatttagtcctactgtgtactgcaaacagaggacagggtagatgaagctgctgcaagcctgtgttatgaggtcagaaacaaccagagcctttattacaaaggacagaaaagctcatcagccccaatcttcctgataaattggggaagtggttgacatgctcatgtgtagggtgttgtctgccaccaatcaatcttgcacagccactatgtggatgrgatgctgcaaggagacagcttggatacagcgacatgaaatggccccacatcctgctgataggtttctgcctccttccaaggatctttgtttaccaggaatagtccctgtaatcactcagaggctgctagcagctcgctgggtttcaacaaaaagaattaaaaacaaattagaggtaatgagctcttaaattgcttctgaatccactgtgtggctgagagctttggtggatttggacaatcaaatcaagcagggcccatggcttgtagaagagtttaagaatacatccaagcttcccatt

SEQ ID NO: 20411 - DNA, 600 bp, Chicken  19866894230874_2
tgcaaggagacagcttggatacagcgacatgaaatggccccacatcctgctgataggtttctgcctccttccaaggatctttgtttaccaggaatagtccctgtaatcactcagaggctgctagcagctcgctgggtttcaacaaaaagaattaaaaacaaattagaggtaatgagctcttaaattgcttctgaatccactgtgtggctgagagctttggtggatttggacaatcaaatcaagcagggcccatggcttgtagaagagtttaagaatacatccaagcttcccattgaataytggctgcaactcagctgccctttctcgttgaaaataatagtaagaaattcactcagcgcaaaagtgaagaacaggctcagcccagagaaattgttttctcccatccaagctgcaccaaaacagctttaattgacttctgttattaattacttctcctattcttctaaaataactatgaacagttactcatctattattagttactctggaccaaaacatttacaaaggatctccagacctgggtgaggggaactaaagggctcttcagatctctccgtcctttgctgcacaattattgta

SEQ ID NO: 20412 - DNA, 600 bp, Chicken  19866894230880_1
aaggaaacctgcaccggagacactggggtgttactgtcagtgccaccacctccctcccacatgctttgtccccaccccttgtccagccactatggtggggctggcgttgtaccacaaaacgtccttaaggctatctgggatggaggaggtaatggatttcagataaatgacctttgtgcctgttatcacagctgctcctcaaaataccgaaagctgtggatcccaatctgttaattctcctgttacctagcgcagtaaatgcatgagttgatgcccttactcctcacaatattaatgagmgtacaaaaatataactgcaaaggacaactgtaacaacctgagataatgagctgcctcaatcacagcatggctgtgtttcatgtgacacatcagccctggtgagccagagcaaacgtcctttctacttctactccattttagatctttctcctccaccctcctcttcagtgacctctcccacactggaaaatagacatttagacagatgttctagtctaagcagcagtgaaggagatgcttgagtgctgcttagactggaaactgatcattgcttcaaagtccagtgctcagtcacctgta

SEQ ID NO: 20413 - DNA, 600 bp, Chicken  19866894230883_1
tcatgaagaacaaagatgtatggatttcagcaagagcacggtctagtctcaacagactatgttcttatcagcccattgaaattgctgccagtgaaaacagtttgccttaagagatggtctcccacaaagattataattactgatgatagactgtgaaaatatcaacatgtttattattgtaggctttgtttgtcagttgccaatgttttacttctgaattcactgaaattttgattgctactgtgaaatctaactctggccgaagagttaagagcacttgtaagtctgaaatgctagttytattggtgatgcaccaakaactaagtaaaaagtatgaaaagctatctttccaaattcttcttctacaaaagtttgttctatatcaaaatgcatgagataacagatcttttgatgagtccttgcagaagagcatctgttctctcataaattgtttaattaaaaccagacttctgcaaatgatgagaatgaaatagcagtctgaaaagcaatctcaccaaaaccctattgttctgccatattattctgacatatttttctatctgttacgctaatagcagaaatactggatctgaattagaa

SEQ ID NO: 20414 - DNA, 600 bp, Chicken  19866894230883_2
tatggatttcagcaagagcacggtctagtctcaacagactatgttcttatcagcccattgaaattgctgccagtgaaaacagtttgccttaagagatggtctcccacaaagattataattactgatgatagactgtgaaaatatcaacatgtttattattgtaggctttgtttgtcagttgccaatgttttacttctgaattcactgaaattttgattgctactgtgaaatctaactctggccgaagagttaagagcacttgtaagtctgaaatgctagttytattggtgatgcaccaakaactaagtaaaaagtatgaaaagctatctttccaaattcttcttctacaaaagtttgttctatatcaaaatgcatgagataacagatcttttgatgagtccttgcagaagagcatctgttctctcataaattgtttaattaaaaccagacttctgcaaatgatgagaatgaaatagcagtctgaaaagcaatctcaccaaaaccctattgttctgccatattattctgacatatttttctatctgttacgctaatagcagaaatactggatctgaattagaataactacattctagatag

SEQ ID NO: 20415 - DNA, 600 bp, Chicken  19866894230883_3
gagataacagatcttttgatgagtccttgcagaagagcatctgttctctcataaattgtttaattaaaaccagacttctgcaaatgatgagaatgaaatagcagtctgaaaagcaatctcaccaaaaccctattgttctgccatattattctgacatatttttctatctgttacgctaatagcagaaatactggatctgaattagaataactacattctagatagcatgtgtgagacagatttactttccactaagtttatggtgcccttcacagtgaaacaagtatgttcaaaatcttytttagccagttactctctccagatgaacaaatgttagctcacttattttaaaggccccctgaagacaacaagtaggccttttgcatttgctgtactgtgcacacatgacccttctcttttgagattttgtttcaaaaccaaacacatcacacacgatttttagttatgtccttgtaagaaggaatattatttctttctttaaagttactggctactctgttttcttctgcacaggaaatacccacagatattacaaggataaatgacagtgcattatccaaaaggatgtcactcatatta

SEQ ID NO: 20416 - DNA, 599 bp, Chicken  19866894230889_1
  misc_feature (1)..(66): n is any nucleotide
nnnnnnnnnnnnnnnnnnnnnnnnnnnnnnnnnnnnnnnnnnnnnnnnnnnnnnnnnnnnnnnnnntgtgaaaacttattctttctttttcacatggctcattttaatagaaatctaatactctgtaagtgaggatggaatataaatgtaaaaaatttatggcatcatcaagggatgccatcctgatctagtgccagatgtggagactagcaacccttcccgcgacaggaggctggaactagataacctttaatgttccttccaatccaagccattttatgattttacatttctatgatyaaagggtgaaatgcagccccagctgtggtcaacagcagagttcctctgtattttaacaggagcatgttttcacttaagctcttcacacagcaactgagaactgactcagttttaaaagggaaactgttgggattasatgtctgtaagaaaggcgaacttatactacgtgctaatagcgaaggaaggtctgaagcaaaatgcagtaaatgaaaagagtgctagtaagtcagacttgtactgcacatcatatgaagtctttgttacctatattatgacagtacwtggcatcatgttgaaaa

SEQ ID NO: 20417 - DNA, 600 bp, Chicken  19866894230889_2
ggaatataaatgtaaaaaatttatggcatcatcaagggatgccatcctgatctagtgccagatgtggagactagcaacccttcccgcgacaggaggctggaactagataacctttaatgttccttccaatccaagccattttatgattttacatttctatgatyaaagggtgaaatgcagccccagctgtggtcaacagcagagttcctctgtattttaacaggagcatgttttcacttaagctcttcacacagcaactgagaactgactcagttttaaaagggaaactgttgggattasatgtctgtaagaaaggcgaacttatactacgtgctaatagcgaaggaaggtctgaagcaaaatgcagtaaatgaaaagagtgctagtaagtcagacttgtactgcacatcatatgaagtctttgttacctatattatgacagtacwtggcatcatgttgaaaaacagtgacaaaaaaatcacattctttgtcagaagaccataccctgcagcaatgtcctccaaaatggaaggtttttctcttaggctggtgtctcttgctcttcagcagctatctatgcctatccatttaaaacacagg

SEQ ID NO: 20418 - DNA, 600 bp, Chicken  19866894230889_3
ttttacatttctatgatyaaagggtgaaatgcagccccagctgtggtcaacagcagagttcctctgtattttaacaggagcatgttttcacttaagctcttcacacagcaactgagaactgactcagttttaaaagggaaactgttgggattasatgtctgtaagaaaggcgaacttatactacgtgctaatagcgaaggaaggtctgaagcaaaatgcagtaaatgaaaagagtgctagtaagtcagacttgtactgcacatcatatgaagtctttgttacctatattatgacagtacwtggcatcatgttgaaaaacagtgacaaaaaaatcacattctttgtcagaagaccataccctgcagcaatgtcctccaaaatggaaggtttttctcttaggctggtgtctcttgctcttcagcagctatctatgcctatccatttaaaacacaggaagaataaattgtatacactgtgaggatccccgcttcctgctgccttgctcaggatgggctagaagatacttcccataaagccagcagacctgctgcttcacacctaaccagagtattcttgcagttgtggcagaaagtttctttc

SEQ ID NO: 20419 - DNA, 600 bp, Chicken  19866894230893_1
cacaacatgtggaaggaaaagagtgaagcaaatatttaatacaaaagttgagattgaagaaggtgctttatcttactcctaaagagatatcttatttgttttttgactataaaatattcttacgataaatctaaagcagattttaaaatgaaatgttttttaaaatgtttagaaactctactccgttttaaaaattctttttttttttccatattcttcttgtacccatcaatataacagttacagattttttttaactgaaataatttcatagagtcgtagaatcattaaggttgaaaraaaacactaagatcatctagtccaacctattagcccatccccacccygcccactaaccatgaccctcagtgccacatctgcacggttcttgaacacttcctgggacagtgattccacctcctcgctctgagaatagatttttcctaatatccaacctgaaccttccctggtgcaacttaaggccattccctcttttaatttgaggaaactaacacattttcagaaaacatcttgatctatttaaatttacatctttcaacacaaaaaaagaaggcttgaggatactgctcagttggctgc

SEQ ID NO: 20420 - DNA, 600 bp, Chicken  19866894230893_2
ttgagattgaagaaggtgctttatcttactcctaaagagatatcttatttgttttttgactataaaatattcttacgataaatctaaagcagattttaaaatgaaatgttttttaaaatgtttagaaactctactccgttttaaaaattctttttttttttccatattcttcttgtacccatcaatataacagttacagattttttttaactgaaataatttcatagagtcgtagaatcattaaggttgaaaraaaacactaagatcatctagtccaacctattagcccatccccacccygcccactaaccatgaccctcagtgccacatctgcacggttcttgaacacttcctgggacagtgattccacctcctcgctctgagaatagatttttcctaatatccaacctgaaccttccctggtgcaacttaaggccattccctcttttaatttgaggaaactaacacattttcagaaaacatcttgatctatttaaatttacatctttcaacacaaaaaaagaaggcttgaggatactgctcagttggctgcaacaaggaaataacaggtgagaatacactgccagacaagatggctta

SEQ ID NO: 20421 - DNA, 599 bp, Chicken  19866894230895_1
  misc_feature (1)..(80): n is any nucleotide
nnnnnnnnnnnnnnnnnnnnnnnnnnnnnnnnnnnnnnnnnnnnnnnnnnnnnnnnnnnnnnnnnnnnnnnnnnnnnnnngtgaatctattgctgaatgcagtttccttagccctctattgatgcctttccacaattcactagcaatgttcatcagaacaaggcaagcatgaaactgcagcttggaaaattctggcatagaagagaaatgtatgcttatctatttataaataaagtctgaagctagctttactgatcatcctataaatagttacttgccaaaatccaaagtaatgaatcygctaattcacccaaagaagtgaacccgatacctcatgcattcttgctccttatccaaagcagcactttcctgcaaagtattgcttctgccttatcaatgcagtgtttcttaaatgctttttgaaacttatgtgcttggatgcaaggcccaaatactgtttttgaatgagggaaaaaaaaactaaagtttgcagtaaggatgcgaagctaagtcttctttccccaaggctgtacctggcaatactaacttaaccacgctcactgttttcttgagcagctgcagaattccgtgatcctgtg

SEQ ID NO: 20422 - DNA, 599 bp, Chicken  19866894230898_1
  misc_feature (1)..(61): n is any nucleotide
nnnnnnnnnnnnnnnnnnnnnnnnnnnnnnnnnnnnnnnnnnnnnnnnnnnnnnnnnnnnnggcagctgtacaagaaaggaatgagcagtggatcatggagaaacatctgactggttttggagagaaatccagtcttctgcatgttaactgatgcaggaagaccacccagaagaatagcttatgggtattgtggtttaattagtgtccctagctattgccagccccctttgttcactgcatttgcaggatctaggagacagaaacacgtgccagcccacagacccagccaaaggaggagmtgaaggtctgaaggagctgaagtcacgtcctgttggatctccccaacaggtcactgccttcatactgaagggtgaggataaatgtctctgtggtagcaggctctgtttcacatcagtcccatgcagcagcttcagaaaaaggtaaaacatttgccattcctgaactggagcttggcacaatctgtcagtcccacgcattatcctgtaactaatagcttctatataaataactagttgtactggaatttcatagtgcttacatagcaaagtcattgctgtgacacgactccattactgca

SEQ ID NO: 20423 - DNA, 600 bp, Chicken  19866894230898_2
agtgcactgtgcaactataatcggcccctgtggagcagcgatgaggggacctgcacgaggccatgcaactagatactaaattacagtcaatctacctcctctttagttgcattaaaatgctaatgtcactgtaatatgggcccatttaccagtgatgactaccttgccttgcaacactacagtgaatgaggttgttgcactgcctgagagcatttaattcctcaatacagttgagcaagcaaggcccttaggggcattttatatcttaaaacaataacttgattggcttttataacactraaataatatgaggctggggatggtgtttatacgaatctgagctgctgctagaagcaccctaagtctcataaccaagcagagttctctggacaagtggaccacgttcccccctgattcttgtccacctgtttttaatgaagacatttcagcctcaaagcagctgtgcttaagagcacaccagtcacacataggaggacaaagagacctggactgaacccctttaagcttcatataaattacaccagctttgcaacaagaacaataacacaacacttagcaattaagttttatacttacagc

SEQ ID NO: 20424 - DNA, 600 bp, Chicken  19866894230901_1
gtccgcgtcaccacccggctttggtccgtccccgcagctgtggaggtgaccgcgttggtctcggggggcttcccggcacctgtctgtcccgcggcgctcggcggcacatcgctcttcagctcagccttcgcagcagctccccggaggagagccacgtcgggagagcggatcgctgtgttcccacagcctcacaacagcagccgctccgcgtccccgcggcgcggcccaccgcgcttcccgggccggacccagcagagggagctgtgacaccgggagctgagcgccgatgcattggggggytcggaccgggccgtgctgcacccagctgtggtgcccaccggtgctgcctccagtcctgggaagttctgggtgaaattccaggctcagctgctcctgcaaggacaggacagacacactgcccgcgtgggacagccatccaaccagcgcattgtaaggcagtgtcagcaacaggcaacaacccaacagaacagcgtctttgtttcagatgatgatgattcccacagcactgatcagtctcacggacacgctgagccccactggcagaaagcagggctggcaagtctcaagctgaacagcccc

SEQ ID NO: 20425 - DNA, 600 bp, Chicken  19866894230902_1
tgtacgcttgccttggactctacctttttcaagtgattttgctcaggggtttaagcacagtcacacttacgggacatttcccttccttcttaccactcagggttacttctggtctggcttagactgtaaggtctcacactgccatgcagccgtgctgaagtcagaaaggtggcctgtctgaaagctgcaaaaaacaaagtttgtttcacagtaaagctctggtctgaggtccatcatgaagcaaatggctctttgctgaccaagcattggcacaaacctgcagacaagattttctgaatrtacagcagcgtgactaagcacaaaaaaaagagatgaaaaaaaaragagagaatgcaagcattgcactattagcatttggcactgctcaatagtgtttcggggcaaggtgacacaaggttatggcaggagacatctaccaagctccagactcgctggctcrggaagcacagcagagttatctgctgttttcagagaacagattcctgcctgagccacattgctttgccatgaaataatttccattagtttcaaggctgttccagaacaccgttgtttccggtcagcgtttaattggattat

SEQ ID NO: 20426 - DNA, 600 bp, Chicken  19866894230902_2
aggggtttaagcacagtcacacttacgggacatttcccttccttcttaccactcagggttacttctggtctggcttagactgtaaggtctcacactgccatgcagccgtgctgaagtcagaaaggtggcctgtctgaaagctgcaaaaaacaaagtttgtttcacagtaaagctctggtctgaggtccatcatgaagcaaatggctctttgctgaccaagcattggcacaaacctgcagacaagattttctgaatrtacagcagcgtgactaagcacaaaaaaaagagatgaaaaaaaaragagagaatgcaagcattgcactattagcatttggcactgctcaatagtgtttcggggcaaggtgacacaaggttatggcaggagacatctaccaagctccagactcgctggctcrggaagcacagcagagttatctgctgttttcagagaacagattcctgcctgagccacattgctttgccatgaaataatttccattagtttcaaggctgttccagaacaccgttgtttccggtcagcgtttaattggattatagcctgatttgcatttgtttttcaaaatggcaaagctacagtga

SEQ ID NO: 20427 - DNA, 600 bp, Chicken  19866894230902_3
tcagaaaggtggcctgtctgaaagctgcaaaaaacaaagtttgtttcacagtaaagctctggtctgaggtccatcatgaagcaaatggctctttgctgaccaagcattggcacaaacctgcagacaagattttctgaatrtacagcagcgtgactaagcacaaaaaaaagagatgaaaaaaaaragagagaatgcaagcattgcactattagcatttggcactgctcaatagtgtttcggggcaaggtgacacaaggttatggcaggagacatctaccaagctccagactcgctggctcrggaagcacagcagagttatctgctgttttcagagaacagattcctgcctgagccacattgctttgccatgaaataatttccattagtttcaaggctgttccagaacaccgttgtttccggtcagcgtttaattggattatagcctgatttgcatttgtttttcaaaatggcaaagctacagtgagtctgygtgagcctgccagagagcacaagtgrgagagcgctccctgctccatgctgccccttagtttctacctacactcacccaaatccctctgaccctctaacagcttcccacaa

SEQ ID NO: 20428 - DNA, 552 bp, Chicken  19866894230902_4
aatgcaagcattgcactattagcatttggcactgctcaatagtgtttcggggcaaggtgacacaaggttatggcaggagacatctaccaagctccagactcgctggctcrggaagcacagcagagttatctgctgttttcagagaacagattcctgcctgagccacattgctttgccatgaaataatttccattagtttcaaggctgttccagaacaccgttgtttccggtcagcgtttaattggattatagcctgatttgcatttgtttttcaaaatggcaaagctacagtgagtctgygtgagcctgccagagagcacaagtgrgagagcgctccctgctccatgctgccccttagtttctacctacactcacccaaatccctctgaccctctaacagcttcccacaaatcaactccctacaagtatttggtgataaaaacagacatcaatatggtttttgtctgcctgtccttaattatctggcagaggcagaacgactgggaatctttaaaggcttttacatttttatcaaaatcgtttgttcttttt

SEQ ID NO: 20429 - DNA, 526 bp, Chicken  19866894230902_5
tggcactgctcaatagtgtttcggggcaaggtgacacaaggttatggcaggagacatctaccaagctccagactcgctggctcrggaagcacagcagagttatctgctgttttcagagaacagattcctgcctgagccacattgctttgccatgaaataatttccattagtttcaaggctgttccagaacaccgttgtttccggtcagcgtttaattggattatagcctgatttgcatttgtttttcaaaatggcaaagctacagtgagtctgygtgagcctgccagagagcacaagtgrgagagcgctccctgctccatgctgccccttagtttctacctacactcacccaaatccctctgaccctctaacagcttcccacaaatcaactccctacaagtatttggtgataaaaacagacatcaatatggtttttgtctgcctgtccttaattatctggcagaggcagaacgactgggaatctttaaaggcttttacatttttatcaaaatcgtttgttcttttt

SEQ ID NO: 20430 - DNA, 600 bp, Chicken  19866894230904_1
gctagtgctgggacgtgcacacatctccccatggaaatggaggatccaggtctgtagtatgtgaaggagaagaggaagagcattcaggatatttggggaggattgtattcatggctcataaatggctcacaaagaagtttagtcattgaaataccacaatactttaagaaaagtgtgttgaaatgtccatgggagaagttcctgctcttctctatagggtgagcccttccaggactggttaccgaagcaaactgtcagtgaataaggaggagagaagataccaagagagtctctaacacrggaaaagccaaggccagtctccactgtgaagtgctctgcagatgcaacctcatgtacgcagcgagggaagggtcaatgcatgcacccatgtgcgaggcaatgttgacacgtgtgcaagcgggagggaaagagcagtgcgggcatgggcgagggaaagcacttcctgcctttttgctgcttgcccacgtgatgcacacacatagagcgatcctttgtttgcagtaatcatatatttaatcccctgggggacttgctcctatcaatagaattggatggtgggaaattgctttgccgtcgctc

SEQ ID NO: 20431 - DNA, 600 bp, Chicken  19866894230914_1
aagacagtaattgccaagtgcttcgtaggtcccctaacagtgggatggagctgtagctacagggatccctgttgctgaactcagcaaacaaactgtccatgtgattccagatgtttctgttcttttggggcaggggacctcccagaatcagaatgccagcatgtctgaggcagagaagccaccctttgacactggaaactcagtggtcctaaccttaaagctctgcaagaaattgagttggatcctcaggagcagatgggctaaacagatccatgttgtcaacttccttagccaattgcrtctgccaaaaatcttgtctttaatttgcacacagacagtatatttccaaacaaaaataaaataaataaaaataaaaagaatagaaaatcttaggcagaaaaacagctgtactcatttgygctgtaaaccagctgagtcagcccctgaatcaagccctaattaatttgtgcacatggtgtagccaacaaagagtggcaacagacagaggaatggactgtgttgagggtgtttaatctctaacagaaaagacgcctgagagagggagcttgatgacagctaattgctgcccaaaggaccaaa

SEQ ID NO: 20432 - DNA, 600 bp, Chicken  19866894230914_2
ttcttttggggcaggggacctcccagaatcagaatgccagcatgtctgaggcagagaagccaccctttgacactggaaactcagtggtcctaaccttaaagctctgcaagaaattgagttggatcctcaggagcagatgggctaaacagatccatgttgtcaacttccttagccaattgcrtctgccaaaaatcttgtctttaatttgcacacagacagtatatttccaaacaaaaataaaataaataaaaataaaaagaatagaaaatcttaggcagaaaaacagctgtactcatttgygctgtaaaccagctgagtcagcccctgaatcaagccctaattaatttgtgcacatggtgtagccaacaaagagtggcaacagacagaggaatggactgtgttgagggtgtttaatctctaacagaaaagacgcctgagagagggagcttgatgacagctaattgctgcccaaaggaccaaaataatgggcagcctgtgagagagagaaaaatgaacgggctggtggaagtagtcatcaggtgtttgcagtgattaagttcattgtccacactgtttactttggtgttcagcattaatgtc

SEQ ID NO: 20433 - DNA, 600 bp, Chicken  19866894230914_3
aataagatcttagtgtgtgatgtattgatggagtcagaactctacgcaagtgcccctgtcacagtggatattcagtctgaatggcatgtagggttcatgcaccgggagccttggaaagagctggatagcctgatgttttcacaccgcagctcctgcagacacttaacatctgcacttaatacaacttcctctaatgctaactgtttaagtgagtgatggctgaagagattttttgccctttaagatttgttcagtctgttaacatcctaggttttttttaatcgcagatatatggcacastgctaccaaaccactagaagcttaaatgtttttctgcactatcttgcaagtgcctttctagaggtggactttaaatactgttctgtggctgcacctaaaattgtgataatgaatgtttagtatttgataaacagcttattatcctaaccttacgatttcttgtacaaatgtgttaatatttgttttaaaaaaaacttgcaacactactactctagtccaagtacattgccagcaataagtgacactgaaattcaagcactgaaaacagatggactgcaaaatctgaactctggtctcata

SEQ ID NO: 20434 - DNA, 600 bp, Chicken  19866894230917_1
tcctaaaagcactttatagtgaagatcttaggttttttttccaggcaagtgtttgtctcagtttttaaaatatagaggcttgaacgtggacgttggaatactgaagtcagctgtatgatgacctcctcttaaagaatcattctgaatcttttcagaagtgctgtaatgaaacctactggcatactcataaaagctaattagcatcatttgaagtagtttctgagaattatttttacttacagttgttataggagaatgtttacatggatgttgtgagagtttcaaataagaaaaaaaaargggggggggggagaaaaaaaaaaagaggagaaaaaaagcccttacgtagctgacagcccaacaactttgcatatgtgtgttaacaggagaatgtgctgtgtttaggatgaatggagaagtgggcctaaatgactttcagattagctggaacagatggaagggtcacagttgaacaactttacacaggaacataaaggcaatgttcaagtggagttcattgcctctgacagatactgtcaatcaaacaggggactctcagttaaccagcagcctgtccttttaaagattaaattaaaaaaa

SEQ ID NO: 20435 - DNA, 600 bp, Chicken  19866894230935_1
cacagctctttgtactcataacagcatttcctacagtgtagggtgaatggagccaagagtctaagacaaggtaaaatggcctaaggacttagtcaagacagaggtgttaccttgtgttaaatcatgcacaggaaaagcacatacacactttcgagcactgttctactgcatgcctcacatgaatgaaagtagtttttaatagcacaaggacttcattttcctgtttgagaaaggagaagaggattgggtgcagagaaaaacttccgttagattgggatgtatggaggtgaaatatcttcratgtcctttctgtttttttccagcctcctgaagctcacctacagatatgatattcaaaattaagcaatttgtcttctttctacttctccgtgaaggcaaagaacccctaacgcaacagatgagtataggtcaagggcaaaggccacagtgtttcagtagtgcccttggtcataaggctggaaggaaagtcaggtttaagtttattcgtacttctgaatccctttgaatacagttggatgtcatctgtcaagactgattgcaccataggcagtatgtgagctcctcaagacgactttgtcc

SEQ ID NO: 20436 - DNA, 600 bp, Chicken  19866894230939_1
ttcaggcctcaaacgggtagcagcagtacataactgtatggcaaacaggtatacagggggcaggctccaccccttccggtcactcaggtgaaattgcattcacctgtgcccctgcagctgactcagcacttgcctcaggtggtcaatcagaggttcaagccatgattcaacagttcccatacaataatattttattccatgcacagctgtctttggagatcagttatagtcaacatgagttaaagtggtagaatacactcttactgacaactatgtctctctagatgtgatccccttcamatgtactccttttagagtcaagttagaccccacaagagacacagtctatttcctatctagcatggctctgctggtgaagaaacttccttcagctcaatgctataataaataaacaaacaaacaaacaaataaataaggaaacagagctgaatacctattagttgaattaaaaagtgggaaaaaaacaacatacatcatgctttattcatgcataacatacaaagcagaatgattcaacacgggaagcagataaggaagcaacaatcagaaaacaatttaaatacaacttagtctgtggat

SEQ ID NO: 20437 - DNA, 600 bp, Chicken  19866894230942_1
tcaaatttagaaggatggaggaggtccaccgaagactaccagctctactctttaaatttgtggttggctttggtgatgcagtaacagttttttatcagtattgtgctacagtggtgagataaagccttgaagcagagtggtccagagcagatgcagaaacccacagttgacatgagatactcttctcccctctacttttatgcacacttaggtaattaacccccacaatgaaaaaataaagcatctatgaaaaagtagcaaagaagtagccaacctcatctaatctttacccaagtcagragcagccatgaagcctgkgctctggaaatcactgaaatttctttttctttttaatctgtaatttctttgctgaaataaagggcgttgaattccttgaggtgaagagacaaattccctttttgccctgaactttctgaaatactcagcacacacttccaatctccaaaccaccagtcctgctttaaaactctccctgttgggttgggtggggttgaactcacagatcaggacatgggaatgtagagaggtatccaaattcctgctgcagtcwctggaaacatagtcaacaccatcagtgaa

SEQ ID NO: 20438 - DNA, 600 bp, Chicken  19866894230942_2
aggaggtccaccgaagactaccagctctactctttaaatttgtggttggctttggtgatgcagtaacagttttttatcagtattgtgctacagtggtgagataaagccttgaagcagagtggtccagagcagatgcagaaacccacagttgacatgagatactcttctcccctctacttttatgcacacttaggtaattaacccccacaatgaaaaaataaagcatctatgaaaaagtagcaaagaagtagccaacctcatctaatctttacccaagtcagragcagccatgaagcctgkgctctggaaatcactgaaatttctttttctttttaatctgtaatttctttgctgaaataaagggcgttgaattccttgaggtgaagagacaaattccctttttgccctgaactttctgaaatactcagcacacacttccaatctccaaaccaccagtcctgctttaaaactctccctgttgggttgggtggggttgaactcacagatcaggacatgggaatgtagagaggtatccaaattcctgctgcagtcwctggaaacatagtcaacaccatcagtgaaatctgacctccccacttc

SEQ ID NO: 20439 - DNA, 600 bp, Chicken  19866894230942_3
aacctcatctaatctttacccaagtcagragcagccatgaagcctgkgctctggaaatcactgaaatttctttttctttttaatctgtaatttctttgctgaaataaagggcgttgaattccttgaggtgaagagacaaattccctttttgccctgaactttctgaaatactcagcacacacttccaatctccaaaccaccagtcctgctttaaaactctccctgttgggttgggtggggttgaactcacagatcaggacatgggaatgtagagaggtatccaaattcctgctgcagtcwctggaaacatagtcaacaccatcagtgaaatctgacctccccacttctaagatgtgtctcttgactctttttaaaaaggaaggaaaatgagagcgttcccccaaatgctacatgtgcttttctagctccagacaggaaatagcattgcatctgagccaggttaacgggggatacagagcatgactgttctcccccgaaatccatattatagccmtttttaccttgcagcatggaactaagaaatgatcagcaggtttgctcagtctatgccttaacctttggcggaaattcccccacctc

SEQ ID NO: 20440 - DNA, 596 bp, Chicken  19866894230942_4
aactctccctgttgggttgggtggggttgaactcacagatcaggacatgggaatgtagagaggtatccaaattcctgctgcagtcwctggaaacatagtcaacaccatcagtgaaatctgacctccccacttctaagatgtgtctcttgactctttttaaaaaggaaggaaaatgagagcgttcccccaaatgctacatgtgcttttctagctccagacaggaaatagcattgcatctgagccaggttaacgggggatacagagcatgactgttctcccccgaaatccatattatagccmtttttaccttgcagcatggaactaagaaatgatcagcaggtttgctcagtctatgccttaacctttggcggaaattcccccacctcacaaacagagtaggaagcacacgcacagcttgagaaccaaaggcatgaaagcacattttcatcagatcttagatgatcaagatatgctgccaagtgactatttataggtacctggttgtcgcacatgctttgcagtattccagaatgtactaaaaacagaccccaaatggaggcaataccctgcagcaccacctccgatgatagaaatat

SEQ ID NO: 20441 - DNA, 600 bp, Chicken  19866894230948_1
ccaaattcacatgcctataataatgtaaatgtgttctctctgtgtactacagaaatttgatccatctctgagtcaactaattagagctgagttgcatgcggtggtatcactatgttcttattgctggcagtggagtgtttttctggagattttctgatgcctacacagcaccttattctcctcctcacacttcagagttcactgatatgcttggatgttcatactggtgcagtgatgtcagggcagatgcggaagactgttcgcagtctggtcatgtacagggtatctggattgccatgytgcagwcatgaagttgctagctgggaatggtctcactgcagcagtgttcaggaacatcctgagagcatggtggatataatgcctagatataactgcagcctgcattcatcccttattcatctttgactgctttgctttgctgccctctgtttaccttcacctaatccagtcttcttgtcagattgccatgaattatcatttcacatccatttctagtggtgaggggccaggttctccacgtgtagttttagtcagaacaagaattttgtcccctgattggctgtttacagctgacaggta

SEQ ID NO: 20442 - DNA, 600 bp, Chicken  19866894230948_2
tcacatgcctataataatgtaaatgtgttctctctgtgtactacagaaatttgatccatctctgagtcaactaattagagctgagttgcatgcggtggtatcactatgttcttattgctggcagtggagtgtttttctggagattttctgatgcctacacagcaccttattctcctcctcacacttcagagttcactgatatgcttggatgttcatactggtgcagtgatgtcagggcagatgcggaagactgttcgcagtctggtcatgtacagggtatctggattgccatgytgcagwcatgaagttgctagctgggaatggtctcactgcagcagtgttcaggaacatcctgagagcatggtggatataatgcctagatataactgcagcctgcattcatcccttattcatctttgactgctttgctttgctgccctctgtttaccttcacctaatccagtcttcttgtcagattgccatgaattatcatttcacatccatttctagtggtgaggggccaggttctccacgtgtagttttagtcagaacaagaattttgtcccctgattggctgtttacagctgacaggtacaggtc

SEQ ID NO: 20443 - DNA, 600 bp, Chicken  19866894230950_1
tcccttggggaaaagaagcaggagagagagattccacgcatgcacaaacgtacagacgcattcacacgcacacaaaagccataacaaaacccgagcaaacaaaagcctcaaaacttgtttgctttatttttggaggttgaaaaaatgtgaacttctcagggagaagaaaatgcaactcgcttgttttgtctctgtggcctatcctgctttcgcggaatttggttctccagtttgcagccatccctccttcttcaatttctcctattaaggataatgctcacagctgccccggccattgcrcacagctgggagtgytgggcaggatggaggtgctcagcaggaacctgcggctctgctcacctctgcagggcagcagcacccggtcctcatcaccacccaacacagcccaggatgcaccaatccagatttcccccgtgtccccatgtcccctgctccttccctggcccccatccccacagcatccccagtgcttcctcctggctccacggccctttgctcccaggagcattgttatcccatagcgtgtacaagaagagagttttctgagcaccagctgctcctgtcccatttggagggatt

SEQ ID NO: 20444 - DNA, 600 bp, Chicken  19866894230950_2
aagcaggagagagagattccacgcatgcacaaacgtacagacgcattcacacgcacacaaaagccataacaaaacccgagcaaacaaaagcctcaaaacttgtttgctttatttttggaggttgaaaaaatgtgaacttctcagggagaagaaaatgcaactcgcttgttttgtctctgtggcctatcctgctttcgcggaatttggttctccagtttgcagccatccctccttcttcaatttctcctattaaggataatgctcacagctgccccggccattgcrcacagctgggagtgytgggcaggatggaggtgctcagcaggaacctgcggctctgctcacctctgcagggcagcagcacccggtcctcatcaccacccaacacagcccaggatgcaccaatccagatttcccccgtgtccccatgtcccctgctccttccctggcccccatccccacagcatccccagtgcttcctcctggctccacggccctttgctcccaggagcattgttatcccatagcgtgtacaagaagagagttttctgagcaccagctgctcctgtcccatttggagggattcttccccctcccccc

SEQ ID NO: 20445 - DNA, 599 bp, Chicken  19866894230955_1
  misc_feature (1)..(39): n is any nucleotide
nnnnnnnnnnnnnnnnnnnnnnnnnnnnnnnnnnnnnnncaaacgcagctccactgctcacagcagtgcggtgatgcacgtagcattccggccgtcaggaagagctgccccacctgcgctgcagagccgggcggttgcagccatgagcagccggggaggaaggggtacccatggaggaggaggagctgtgatgggcgctgcactgcgtgctgctcgcttgtcagaccccaaactggggggttgtgatgtggaagcgagtccaaccttatggcaatcacattggcggtataaatagcagarggattttaatatcttgctttgtgggagggggatgacaattaagctgcaaattaacattccgtaaactgccacaccagcagccatactcttctccattttccttagcacagggaagcaaacgcctcaaccaccacagcggagcacatctgagctcatcccacagcacagagcaggagctgaaygtacccacacagagcaccacaagcaacgcacctgccctgctgtctctcttcttgctggaatgaacagttgctcacaccctggcaaaacccagcaggagcctccaacctgtgcaccag

SEQ ID NO: 20446 - DNA, 600 bp, Chicken  19866894230955_2
gagctgtgatgggcgctgcactgcgtgctgctcgcttgtcagaccccaaactggggggttgtgatgtggaagcgagtccaaccttatggcaatcacattggcggtataaatagcagarggattttaatatcttgctttgtgggagggggatgacaattaagctgcaaattaacattccgtaaactgccacaccagcagccatactcttctccattttccttagcacagggaagcaaacgcctcaaccaccacagcggagcacatctgagctcatcccacagcacagagcaggagctgaaygtacccacacagagcaccacaagcaacgcacctgccctgctgtctctcttcttgctggaatgaacagttgctcacaccctggcaaaacccagcaggagcctccaacctgtgcaccaggacacgcatggggcacccccggcccccagcccaaccggagcctacagacaaacagtgggtgtgccaggggagctctgatctgcccagcagcaacgctcctgctgcccagagtggcaatgaaatgcaaccctaaagagccccacgcacagctggtgcttttcaagttgcaagagactcgcaccc

SEQ ID NO: 20447 - DNA, 600 bp, Chicken  19866894230961_1
caagacttgtcatctttaacttctgtggcaccgagaatctgtctcatctttcttctctgcctttctttccacttttacatccttcacaagtacgacatttcagtaggcactccaagagctcatgctttccctccacgtcaggctgctcacagattttctgtaccgactgtcactgtttcttccatctgcttttcaaacaaaaggaacttcagttctctcacagtcccacactggctctcacaggtacgtgtctacttgcagcatgactctgcaaaattgcctctgtgtctcattaaagcrttctaaaaactcccatgaacagtgctgtagcctgtgtctacagttctgaaactgctagggctctgtgagatgccaggctcatgcgtgaatttacaaaataaacagcacataagggtctgggccgtaccaacaagcaccacctttctagcccacagttggaaggccaggtgtccttaattcccatttgcctcagctgtaccttgattaggaccagccattaattagtgccttttgtaaggagcgatgcgtgcttattttgcacccaacctagaagaatatggcttatcaaagctgagaata

SEQ ID NO: 20448 - DNA, 600 bp, Chicken  19866894230963_1
gggcaacctgatagagccgtggatgtccctgttcatcgcaagggagctagactagatgatcattaaaggtccctttcaactctaaggattctaggacaagtcaaccaaatctctctgcaaatctgcaagaaagactgcctgcacaaattcccatgggttttcacaagggcaaacctaacagtgaatgggacaaaaagccataatagagccctggtgtgccacacttgggtgtttttaagctcaggctggttgggtgagccagctgcacactgaagctgaaagcagagccacgctgcaggyggattcaagcaggccctcttgcagaagaatcccgctgaagctggtggcagctgcagttgaggcttgtaggmtaagggaacctcacactttgaagctgaacaggccagagatcagaccaaaacatcccaagcatcaagggaaaccatggaactggttaagcacgaacatcaagaaaagaaaacaacaaaaagagacatgaaaaagtgttcatcataacccttgatggctgctttatctctgctgttgctgtagtaggctctttggaaatgtgatgctctgaaagtataagagacaggattt

SEQ ID NO: 20449 - DNA, 600 bp, Chicken  19866894230963_2
cctttcaactctaaggattctaggacaagtcaaccaaatctctctgcaaatctgcaagaaagactgcctgcacaaattcccatgggttttcacaagggcaaacctaacagtgaatgggacaaaaagccataatagagccctggtgtgccacacttgggtgtttttaagctcaggctggttgggtgagccagctgcacactgaagctgaaagcagagccacgctgcaggyggattcaagcaggccctcttgcagaagaatcccgctgaagctggtggcagctgcagttgaggcttgtaggmtaagggaacctcacactttgaagctgaacaggccagagatcagaccaaaacatcccaagcatcaagggaaaccatggaactggttaagcacgaacatcaagaaaagaaaacaacaaaaagagacatgaaaaagtgttcatcataacccttgatggctgctttatctctgctgttgctgtagtaggctctttggaaatgtgatgctctgaaagtataagagacaggatttctaggggaacgtactgccttttattagatcattcgacttagggaaaaagagtcaagccctgggaacacaaa

SEQ ID NO: 20450 - DNA, 600 bp, Chicken  19866894230968_1
agtataaagcaaaaccagtagtagcaatagcatttggtatatagctgtcaaaccaaggtttgttacagttattaagtttttcagctccatgaagacaagtggaaatacagtgtaccaataataaagcaattatttgacaaaacacagagtttaccatcctaggttcctattgactcattatgaagttttctatagtgcaaatgaagaaattatactcatgcactgaaagagcatcacttctagattagatatctaacaatacaaaagagagccaaaattatgacaatttcagtcactgtwtttcagagtatgaatgcttctatagcatartttaattaaataactcattataccttagtacttcaagcttgagacaggaatctaacctctgacacaagtattttgtcaagtcaccaacattcctgacttttctaacttaaaaattgaatggtctcattagttcaaaaagcactaggatttaactgaacatttaagcttcaattatattacaaaatcaatgattttcttatttcttttatttcatggcacagttataatttaattaaagtctgaaaaacaggatttttaaagttcattaaa

SEQ ID NO: 20451 - DNA, 600 bp, Chicken  19866894230968_2
catttggtatatagctgtcaaaccaaggtttgttacagttattaagtttttcagctccatgaagacaagtggaaatacagtgtaccaataataaagcaattatttgacaaaacacagagtttaccatcctaggttcctattgactcattatgaagttttctatagtgcaaatgaagaaattatactcatgcactgaaagagcatcacttctagattagatatctaacaatacaaaagagagccaaaattatgacaatttcagtcactgtwtttcagagtatgaatgcttctatagcatartttaattaaataactcattataccttagtacttcaagcttgagacaggaatctaacctctgacacaagtattttgtcaagtcaccaacattcctgacttttctaacttaaaaattgaatggtctcattagttcaaaaagcactaggatttaactgaacatttaagcttcaattatattacaaaatcaatgattttcttatttcttttatttcatggcacagttataatttaattaaagtctgaaaaacaggatttttaaagttcattaaaccattaaaggagtaaaatgtgaacagttgt

SEQ ID NO: 20452 - DNA, 599 bp, Chicken  19866894230970_1
  misc_feature (1)..(10): n is any nucleotide
nnnnnnnnnntgcttctctttggcattgatgtatgttagtgaaccagtgtgattcctggaggatgttggggcttttaaaggagcaggttcctaggtagaagtgtttctgagggagcaggaaaatggagttgaataagcttcctataggaagaaagtcttgctcaatgttgatctccttcaaacttgtagtgcagtgctcagctccactaattcttgctcacagctctaaaattaaacatttgtttgtgtgcttgctgcaccaaggcccaagctgctagttgaaattgatgtagtaaatcrtgacattaggaaaaatacattattctgtacatatttctcactaataatatatgcctggggaccaaataggaaagaagagatcatattacctaccccttatctgtgaaggtcttcactaagttaaaatgactaacatttccatatggactccagctgctgaacgcataactgaaataaagatataggacataaataaccagcaagatcattttccaaaatgcaaaccatcaacatcctagactggtcatgggatagatcctgcaagkaagaaaaagtagcacaggaagtttcaaaaatag

SEQ ID NO: 20453 - DNA, 515 bp, Chicken  19866894230970_2
ccaagctgctagttgaaattgatgtagtaaatcrtgacattaggaaaaatacattattctgtacatatttctcactaataatatatgcctggggaccaaataggaaagaagagatcatattacctaccccttatctgtgaaggtcttcactaagttaaaatgactaacatttccatatggactccagctgctgaacgcataactgaaataaagatataggacataaataaccagcaagatcattttccaaaatgcaaaccatcaacatcctagactggtcatgggatagatcctgcaagkaagaaaaagtagcacaggaagtttcaaaaatagatgtgagaagcaggctttccttatactgtctgctagtgattttccagagaggtgatgaggcaggggtccccacaaggcagacaaggcttcatgccactgtaccttcagcaaaccctgaagaacccatcaagttccaacagtgaaagaaagctaaaaaccagaacatgcaccaccctctcaaa

SEQ ID NO: 20454 - DNA, 600 bp, Chicken  19866894230971_1
acatacctcaagatacactgcaaaatacattatgacaacaaagccctgacagtttatactgaatgttaaaatctggaataatctattcacaatattgcatgtccctagtcttcactgacaaaaattattttggttttctctgcttttgctgtacaacatatcaatttcaaatgctggcaattacatgaagccaggcttcgattgaggactggtgccaaaactaaaatgactgctagtactgatatccattttcaagtgataaagtaactgagcacacatatcactaaatcatttatgttygttataagacccttttctattaaaatcatttgacactagaaaattcaagtgcccttttttttctgcactttggtctgtcatttacctcaatgtagtctttaagaaagtgagtaattttgaaatctttttcctttatttgctttctaacacagtgttgtctgctgataaacactatcagcaataacagcgacgccaactttttcctgttgtattcttaaacagtccttgcacaaactggtgtatcaactgcactcagaagtaccagtggtctgctgctttcatgtaactaaaggaataaaa

SEQ ID NO: 20455 - DNA, 495 bp, Chicken  19866894230977_1
gggacacaacaacacaacacggactcgatggggacacggtggggtcacagcggggacacaacgacacaacagggacacaacgacacaacagggacacaatcacaccccgacacgacgacacagcagggacaccaccgcgctcagatggcagcagcccgcagcggcacactggtgacacactgacatggtggcaccgtgacacactcacaccgcgacacactcacagcccaacactgtgacactgcaatacagtgacactgtcacacactcaccccctgacacactcacaccctcagtgarcaccctcatgcagtgacgctcacactgacacactgacacactgacacgctcaccctgacacagtgacacactgacaccctcacactgacaccctcaccccccaacacagtgacacactcaccctgacacactcaccccgacaccctccttgcacttccccaccaccgctcacccccaccaccaccacaccccccc

SEQ ID NO: 20456 - DNA, 587 bp, Chicken  19866894230978_1
gggctgggggagagggagaagttctgtcttcatttgatttagagccagtcaatagtatatagactaatttctttatctgtaaaataacttgtttcatggagactctctgatgttaattatctcaggcatcctgcatctaccagagattactatctggtgttttaaataaggaaaatgtcagtagttcattgtagactgctgtacacagcataataagggtggtaacatccctgcttgacctcatgaagagtggataataccaacatgccaccaccagcccacatccacccttaattctaygctgccagaccccacaccaaacccaaggcaagggctgtttgcagtgcagtggcatattctcactactaaggagcctttggaaggcaaaggggttcctacgctaaattaaatcctttgtaattttgtgtatgactcctgatgatgtcccacgttcaaggtcttattccatagtcatgagttcacaccgtgtcccctgtctaggaaacgagctcaggtaaagatgcatggttgaatgtaatctagcccctgacgtgttttcatggcaggaagagtaaggcattaggaaa

SEQ ID NO: 20457 - DNA, 599 bp, Chicken  19866894230982_1
  misc_feature (1)..(169): n is any nucleotide
nnnnnnnnnnnnnnnnnnnnnnnnnnnnnnnnnnnnnnnnnnnnnnnnnnnnnnnnnnnnnnnnnnnnnnnnnnnnnnnnnnnnnnnnnnnnnnnnnnnnnnnnnnnnnnnnnnnnnnnnnnnnnnnnnnnnnnnnnnnnnnnnnnnnnnnnnnnnnnnnnnnnnnnnnctcgtgttgttgttatgcctgtggctgctgaacaccaaaatcttcaagctgcatcttgcttggaaaggtaagggtcatcccttgctcttaaactgcccctctaggttttaactgcttccctatagtagaaraggcattgctatatgaagaaatgcaccctgaggtgggatctaaactatgggagctgtgtgccaaatcatgcacctacattccatgatcatatcccaggtttggcagagcggatggccagtttcttaaggggaactcctgtggagtctccttgtagtctaccttaaataatctaccttaaataatggagacatccctgtgtacygagatgaggagcaatggtgatgcagaacttattttaaattctcaatctataaatacgttatttctttactgtacagtttgccagagaaagagccaa

SEQ ID NO: 20458 - DNA, 600 bp, Chicken  19866894230982_2
ccaaaatcttcaagctgcatcttgcttggaaaggtaagggtcatcccttgctcttaaactgcccctctaggttttaactgcttccctatagtagaaraggcattgctatatgaagaaatgcaccctgaggtgggatctaaactatgggagctgtgtgccaaatcatgcacctacattccatgatcatatcccaggtttggcagagcggatggccagtttcttaaggggaactcctgtggagtctccttgtagtctaccttaaataatctaccttaaataatggagacatccctgtgtacygagatgaggagcaatggtgatgcagaacttattttaaattctcaatctataaatacgttatttctttactgtacagtttgccagagaaagagccaagagccaagaaagagccaagcccacctctcctggtagttccaaaccacactgcttagagattcccatgatgttattaaatgaatctggaatggtgctgccagtaaaacattataaatccaaaaatatatgttgaaatggcaccaacacagactgtgtacagataatatgttcagtcagtctgctccttgaagaatccaagaggat

SEQ ID NO: 20459 - DNA, 600 bp, Chicken  19866894230987_1
tcatactgtacttctctgataaagagttactttgtaagtgagagcttacaattgcagaaacactgagaaactctttttaatcctaagaggactccattctgtttcctttttaggcagtgttaggcatttattctttctgaatcatctctgagacaatgtgcttcatgatgtgcaaacactattgctctactgaactttttcaaagttgccattattgtaaatggctgcagctgagagcgagaaactgcaggattttcaaaatgatatccagcaccctccctgggcaggaatatgtacccmaaaactgaaataaattattagtggatccatttttatttatctttaatattctaaataacataaagtgagataggtgaggtgaaaagtattaaactttttgacaatatcaataaatgtttgatatcaattggaattgttactgatatcagtaattatgcataatagatatatttagatttagtgatgtaacattttaaatgttttaatgaatgtagtgctgcacataaggtaatgactgttgtcatttgtggagatattttagcttttatttttatttatttattttgactcagtttgtct

SEQ ID NO: 20460 - DNA, 600 bp, Chicken  19866894230990_1
aagtctgattctatcttcccccccaaaaaaacactcattatgaagttgaagacagcaattaaacattctttcttcattctcttctctgtactgaatgaatcgaaatccctttgtctcctctcacatgccatatgtttttgtctccaaactatcttgtttgtcattcttctggattccttccagtttatcagcatctttcctgtactgctgagccccagatcatacacaaggcatatccaacccatggcccaaaggccacatgcagtctgacatggcttgcaatgctgccctccccctgtyctgcactataaaggaggcagctcttcaatgtggagtggccccagccatgcacccatcgctcagcaacaatcaaattgactgaaaccagggcacagagaggacagtactgtgcagtgctgactcaagcaatggcaaataattgtgtttattttgatacactggttaaacacagtgctctgaacaatgaagaatatgcagctgtgcttttcatttttataaaggaatttgagaagaggtttcaagattgcaaaaaaaaataaatcatcaattgatgtttgtgacaccatttttagttgagat

SEQ ID NO: 20461 - DNA, 600 bp, Chicken  19866894230990_2
ggttggacacccataccagacaaaatgctctacacatgttctttccagtgacatattaaggagtaatcatttccctcaacctgatggctatgttccattctactgcagtctgtatgtactttgccctcatggctgcaaaggcatagtatggaacaagttggattcatatgaacctgttgagtgctggaacactgaggccattttccacaaagatgttatctagccagtgagcccactgcttgtgtttttgcataggtttttttctacatgaaatgtatttttttcctttttttttttttktgtgttaaaatttccaccatttgttgacactcctttctctagaacactgacatccctctagaaatcaaccctgttatccagcaagcttattatatccccagtttgaatttgttgtaggtgaactccatttcaatttccaagacattaatgatatgaaaacacattaacttaatatcgagtccagtggaatgtcactcataactggctactagtaggacctcaaaccagttcctactcctttagcttggtaaaacaattttttaccacagtttttgttcaacatatctactatatgaacaa

SEQ ID NO: 20462 - DNA, 600 bp, Chicken  19866894230993_1
cgtatcccacaaatgcatatgttatacatttaattaagtggtcttggtatctgcatgtgcttcatgatcatttaagatgaggagtaaatttggtctgtccatagtggagaaaatgttctccagctaaatcattgcaagtttaaaaatagtggggaagcaaacttatacctgttaaaagaagatgatataagatatttttcaaaatgaagactgtatgctgttgatcttctaaatcattaaaaagtattcatcccaaatcttaggggcaaaccaaaacccaatttggggttcatcagtgcrtatagcctcatctgataatgtgtgtacgaatgtatacatagaaatagtttacatttctagaatgaaggtagtttttaatgaacatttcctttatttgcctttttgcttcgttatccgttatatggcagattaacaaatataacctgctagaaatacgcactattggcctgattatacagtgtggaaaatgctgattttgaaatgtattaaaaaaaaaaaaaaaaaaagcttctctgagcaaagtaagtgtattgaaaggaagatatcttgaattgattttcacaagcataaacgatcatt

SEQ ID NO: 20463 - DNA, 600 bp, Chicken  19866894230995_1
agctgacctgctactaatgggagtctggagcaacgggggacctttcctatcacagaggagtcaacatctgaggatgctggggtgtgagatgctccttagcctccttggtcctgctgcccactgcttatcaaagctggagttgattaaagcccttctagctgcaagctggttcaggactggtgcaggaaggtgccagcctgtgctgtcagcaggatttgggcttgaaagtgattcctaatcatctctgtgaagagtgtgtgttggtaggttgtagctaatgagtcatttcaaagcgagggwcctggatgggaggatgaagctgtcagggcagggtatgagaaggcagggagtgggcaagcatccccccagaaatgttcttctggggggaaatagtaaccacagtatccctttcaatttcaacagtttcaacagagttgaaactctgtgatttaaaaagcatgtttctttcattcctaatggataccagatattttaactttactagccacagcaaaacaaggagaagtaatctcccttaaattcctggccagtgggttggtagagtttgttcttgggggatgacctaagagtggagggacc

SEQ ID NO: 20464 - DNA, 599 bp, Chicken  19866894231003_1
  misc_feature (1)..(53): n is any nucleotide
nnnnnnnnnnnnnnnnnnnnnnnnnnnnnnnnnnnnnnnnnnnnnnnnnnnnnaaaatgtataaaaaagatagagaaatcacacacacacacaaaaaaaaggaaaaaaaaaagatcatagctccaacttgaaattcaacaccagcatcttcttctactcttaggcattcatctagaatgtatgtatgtacacagtatgtacacggtatttaaattacaactaatatctaaggttgtcttcttctgcagtatagtttcaaaaggactaagcaaaaccaactctttcaaggtttgtcttttytttttttycttaatagtatacagttcattctaagacttggaattgaatttacttaaaatatatttcttttacaattatcttgcacctattttttactcatcattaaaagttaacttcaacctttacaagagtattcaaccygtaacaatccagcagaacatttttagtgattaactagcactgatagtttttaggatgtaacactaattcctcaactacatatattaccaacttaacagctcagctacgtgacattgaggcaataatacgcaatcattacaggaagcacctatgctagt

SEQ ID NO: 20465 - DNA, 599 bp, Chicken  19866894231003_2
  misc_feature (1)..(45): n is any nucleotide
nnnnnnnnnnnnnnnnnnnnnnnnnnnnnnnnnnnnnnnnnnnnnaaaatgtataaaaaagatagagaaatcacacacacacacaaaaaaaaggaaaaaaaaaagatcatagctccaacttgaaattcaacaccagcatcttcttctactcttaggcattcatctagaatgtatgtatgtacacagtatgtacacggtatttaaattacaactaatatctaaggttgtcttcttctgcagtatagtttcaaaaggactaagcaaaaccaactctttcaaggtttgtcttttytttttttycttaatagtatacagttcattctaagacttggaattgaatttacttaaaatatatttcttttacaattatcttgcacctattttttactcatcattaaaagttaacttcaacctttacaagagtattcaaccygtaacaatccagcagaacatttttagtgattaactagcactgatagtttttaggatgtaacactaattcctcaactacatatattaccaacttaacagctcagctacgtgacattgaggcaataatacgcaatcattacaggaagcacctatgctagtttcaraac

SEQ ID NO: 20466 - DNA, 600 bp, Chicken  19866894231003_3
cagcatcttcttctactcttaggcattcatctagaatgtatgtatgtacacagtatgtacacggtatttaaattacaactaatatctaaggttgtcttcttctgcagtatagtttcaaaaggactaagcaaaaccaactctttcaaggtttgtcttttytttttttycttaatagtatacagttcattctaagacttggaattgaatttacttaaaatatatttcttttacaattatcttgcacctattttttactcatcattaaaagttaacttcaacctttacaagagtattcaaccygtaacaatccagcagaacatttttagtgattaactagcactgatagtttttaggatgtaacactaattcctcaactacatatattaccaacttaacagctcagctacgtgacattgaggcaataatacgcaatcattacaggaagcacctatgctagtttcaraactgtaatgaagacactgacacgaagctgtgttaacaacattgtctgactccataagaaatgcactaccctcatgctagtcacaaaatgaaagtaagatcttgaatttgtcataaacttaaaaatataaatcttgc

SEQ ID NO: 20467 - DNA, 600 bp, Chicken  19866894231003_4
tttycttaatagtatacagttcattctaagacttggaattgaatttacttaaaatatatttcttttacaattatcttgcacctattttttactcatcattaaaagttaacttcaacctttacaagagtattcaaccygtaacaatccagcagaacatttttagtgattaactagcactgatagtttttaggatgtaacactaattcctcaactacatatattaccaacttaacagctcagctacgtgacattgaggcaataatacgcaatcattacaggaagcacctatgctagtttcaraactgtaatgaagacactgacacgaagctgtgttaacaacattgtctgactccataagaaatgcactaccctcatgctagtcacaaaatgaaagtaagatcttgaatttgtcataaacttaaaaatataaatcttgccagagaaagattagctctttcagcaacagtgctggtgtatgctagtttatgcagactgcagaaatgcagcatttgtttactcatccattaagtgatggaaggcaaaaaagtgtctgctgctccaaagagcttagattttttacaacgaacatggcgtaataca

SEQ ID NO: 20468 - DNA, 600 bp, Chicken  19866894231011_1
tttgcctccctagcagttaaattacaaaatgctaccaacatagtctggaaatctcctaagtagttgaagtccactgtgaggatgaggacctgtaatgaggagacttctgctacttgtagtaggagtcatcctctttatcttagaaatttgcaacgatatgtgtatgttcccttatgttcattttatatatatatagcttatatttttcataataagcaagtccaatgccttccatctcttaagtagaatgtaatatttttgaaagtgttcattttgtatcatgtgtatttaaatgcaatrtgatattattctggcacctgcacctaatcacagacactctggagattaaaaaactatcccattaatgttctttattttactatattgttgttgatgcaaagacggatattaacatttaaactttgggatttattttccaaagaacttactgaagttagatccagcagacagatacttgacagaacaatgtttgaaccatccttcatttcaaacacaaagactcttggatcgctgtgggaagttcaccttcacgatcagctaaaagaaagccttaccacgtcgacagcaacacattatcta

SEQ ID NO: 20469 - DNA, 599 bp, Chicken  19866894231015_1
  misc_feature (1)..(72): n is any nucleotide
nnnnnnnnnnnnnnnnnnnnnnnnnnnnnnnnnnnnnnnnnnnnnnnnnnnnnnnnnnnnnnnnnnnnnnnngaaaagagctgaaaagaaagaaacggataaccctggggcctggtgcactagaagtgagattgtatgtaacagggccgagaggaatgcccttgcacagagagagcaaagacacaggtctgcctccacttgtctgctactggctagtcttgaaccttcagacatagctgactggagagtgtccagagaaggacaatggagctgtgaagctctggagcacacgtcttacaragagtggctgcgggaactggggttgttcagtctggatctgaaaggaggctgtagtgaggtgagagtcagcctgttctcccatgtaacagaaataggacaagaggtaatggccttaagttgtgccgggagatgttcagattggatatttggaaaaatttcttctcagaaagagcggtgctgcattggcacagactgcccggggaggtggtgcagtcaccatccctggaggtgttcagaaccgtgtggatgtggcacagagggacgtggtcagtgggcatggtggggatgggctggtggtt

SEQ ID NO: 20470 - DNA, 600 bp, Chicken  19866894231019_1
agagtagtagttttgttgttccaatatgtacatgcctcggcataattatttaaaaatcagtgacataacgtgctgtctgtatttagtgaaaagatgttaaagattgtgacaaacaccgctgctttagaacatatgaaaaacaatctaattggactaaagaaaattttgaaaacttacgcaatagactatgtccttggaagattcagcctttactggatgcagaatctatcaactctttaaactcgtatgtttttaccatttctcatcagaagcaagactatacagaatgcagaaagatartgccatgaactgtcatggaaaattgctaattgtttgtcagtccatcaacactgttatgtgctttcaataaaaytatgacttcttaaatacttagatctcactttagaagactcaatttttgatctttaaaaaatgtctaaatttttcaagttttcttcttgcacaacttattttctggaaaggatattttttagagactgttcatacaggtattatatccaatttcaatgctatccttcaaaagtaagagtattcctttagagataaataaaaaagtgatgtaacctatcttgtttccaa

SEQ ID NO: 20471 - DNA, 600 bp, Chicken  19866894231019_2
tgtctgtatttagtgaaaagatgttaaagattgtgacaaacaccgctgctttagaacatatgaaaaacaatctaattggactaaagaaaattttgaaaacttacgcaatagactatgtccttggaagattcagcctttactggatgcagaatctatcaactctttaaactcgtatgtttttaccatttctcatcagaagcaagactatacagaatgcagaaagatartgccatgaactgtcatggaaaattgctaattgtttgtcagtccatcaacactgttatgtgctttcaataaaaytatgacttcttaaatacttagatctcactttagaagactcaatttttgatctttaaaaaatgtctaaatttttcaagttttcttcttgcacaacttattttctggaaaggatattttttagagactgttcatacaggtattatatccaatttcaatgctatccttcaaaagtaagagtattcctttagagataaataaaaaagtgatgtaacctatcttgtttccaaaaataaaaaaaaataataaaaaaatcaaccttgaaatattctgctaccacttcacttaatattgccataattt

SEQ ID NO: 20472 - DNA, 600 bp, Chicken  19866894231021_1
aatcttgttgttattaaaatgagagcattagcaagatctgactggaaaaactagtaaacacaatttgaggaaagaaaaaattgcttgtgtttcacatgttgaaatattggtaggaaactttagaaaattcataaacataatgataaaagtttcctcttagtggatagaaactgaagcatgtttgattaactgtttccatgttcctgacaaaacagaaaaacattttcatgaactgctatgcaattttggcatgttttgctgtaacctaaaaattaaaaaaaaaacaactggggatctcaygtggcctgagagctgtaatgtagattaatggatttaaataagtatatcctgcagggaataatgttgatgctgacatctgtattattcatgcagtttctacatgttcaytgggaaaggagctgtgaatagttaagaccaatagaatcatgtcaatatcactgtttttcaggcaacctctaacatgaaaaggaactgagaaattaaaaaacaatattttgatatgtttacaagaataaacacaaaaatttaagtattttcatccttatttatgttaaattgatatattactttcagtgtagc

SEQ ID NO: 20473 - DNA, 600 bp, Chicken  19866894231021_2
ggtaggaaactttagaaaattcataaacataatgataaaagtttcctcttagtggatagaaactgaagcatgtttgattaactgtttccatgttcctgacaaaacagaaaaacattttcatgaactgctatgcaattttggcatgttttgctgtaacctaaaaattaaaaaaaaaacaactggggatctcaygtggcctgagagctgtaatgtagattaatggatttaaataagtatatcctgcagggaataatgttgatgctgacatctgtattattcatgcagtttctacatgttcaytgggaaaggagctgtgaatagttaagaccaatagaatcatgtcaatatcactgtttttcaggcaacctctaacatgaaaaggaactgagaaattaaaaaacaatattttgatatgtttacaagaataaacacaaaaatttaagtattttcatccttatttatgttaaattgatatattactttcagtgtagcaaagtcagaaagattggtacctttaacacaagataatatgattttgtgataagttcattcaaactcaataattacgtatgttttatagtattatacatatcttcatgg

SEQ ID NO: 20474 - DNA, 599 bp, Chicken  19866894231023_1
  misc_feature (1)..(166): n is any nucleotide
nnnnnnnnnnnnnnnnnnnnnnnnnnnnnnnnnnnnnnnnnnnnnnnnnnnnnnnnnnnnnnnnnnnnnnnnnnnnnnnnnnnnnnnnnnnnnnnnnnnnnnnnnnnnnnnnnnnnnnnnnnnnnnnnnnnnnnnnnnnnnnnnnnnnnnnnnnnnnnnnnnnnnnatgatatagcaaattctcagctaccaaccaatattttttagcatattctcactagctgcacattttcatcactaatgagcaagagcctgcatgctttgctcataaaaaccaacaccagtagaggtacccactgktgctgttaccactgcttaaacacaccacttactgcttcactgcactcccatccactgtctggtcttcataaatattcagcaagcatagatgaatgccagtgagtgccattttttttccacatggaataatttaatgacacacttttgcttcatacacacttccatgtcagaaggcattttgttagtgtgcccctctactgctatctatcacacggcaacaacatggaatggaatattggcaggagggcaggaaggttcaacctcccacatgatgggccaacataataaaataggagaca

SEQ ID NO: 20475 - DNA, 600 bp, Chicken  19866894231027_1
acagctgaacagtaccgtcgcatttagttcactaagaaatgaatgtatttctgaaaaaagtagcaattgcagcagtcagtctttccagatgagcactggtaaattcttcctctgtaaggcacctggtgacattctctggcctgaaggctgagcaccctgtctttgatcctcccttctcccctccagcccaccttgccccccacagtatcttcctagcaatgctgaatctaacacttgcctaaatgctgtggcacttctaaaaaagggtttcctgcttctccagcacctgtattaaagatrgaaatgatactggaggagagaaagtattatcacaggaaggcattttattcaaaagggacaaaatctactagaatgatacatgatacaaaagagtcaagtacagtagctgcttttgctgaaactcagctgtaagttcatattgttgctaccagcagctttgatgtttattgctcttcaattgttcctcctttctcttttagcacatatctatagctcacctccctcccccttccacttaagcagtggaaggcctatttaaatgtctccctgaactacagcgataaagctgaaaattgactt

SEQ ID NO: 20476 - DNA, 600 bp, Chicken  19866894231029_1
gctctgaaaaagtctcctctctgttattgcttggcttttgtgtttgaaaagagtaaaacaggtgtgaacatgactgttccctgctggccaaggatgctgcttaactaattctaggaggacaatcccagcaagggcaacacgctgttggtaaataagtaaaatctatgggggaagaatggcactgccttcaaggacactttgggatatttcttccctacagccctagactgcagctctgagaggagagtgcttgaagacctccatcagcaccagcacagctccttcctcctactggccccrtggatggctgagccagaacaaggggaaggcatgacccgaggtcactgtttggggctcaactattaatcagtgcctgttctgttgtaaggatctgggggaatgttaccttgacctttggtgcttacagtgtcacaccaccagatacaaacatgagcaaagacttgtatttaaggaaaaaccctcgcctctttgttctcctttacttctagggtgttcagcgatgtcatgaagtcctgaggatgacaagtagcaaacagggattgtccttgtgggggatcttcaactgagacatgtaggtga

SEQ ID NO: 20477 - DNA, 600 bp, Chicken  19866894231030_1
gcagcacatccaaacagatataaatgcattcagggacggtggctgaaccacctccttgggaagcctattccagtgcttaaccaccccttcctataaagaagcttttcctgatatttaatctaaacctcccctggcacaacttgaggccatttacccttgtctgatcactggtcaccagtgagaagagaccaactcctctctcactgcaatcacctttcagatatttgaagagagcaaaaaggtctcccctcagcctcctcttccccagactaaacagccccagctcctttagtcactcaycatagggcatattctgtggtggtgacatccacaacctctctgggcaacctgtttctgtgtctcaccactctcacagtaaagaatttcttcctaatatctactccaaatctaccctcttccagttcagaaccatttccgcttgttctgtctctagataccctagagatacccatttggcaaccaggatgtccctgaagggaagacatttcttgactacattatctgtgacagttaacgtagttcttaaatgtagacaaaatgatttgccacttttgtgtgaaatttccctcactaaacagc

SEQ ID NO: 20478 - DNA, 600 bp, Chicken  19866894231032_1
tcttaagagcaaaagatacaggggtatagtggaaaagtactggctgagaagccttgagcatctcttgtgtaggtagaccctgcccttctgtcactcccacaaatgagaacctatgagtaattgtggtgggagatctctctcggtttagtcttggtcctaaggattatgattgtatctgacaaaaagtaatcctacatcaaggatgtaggattttgctctccccaaaactgtagtggacacttcactatgagttctcttcagaagaccacaatatggacaaaaagagtacagtacagaatrcaatagaaaacaccaattaattcaatgggtcttgacgggaaagttcttttggaaactgaaagcatacagtccctgctagctcaactgtttttatagatattattgattgcattatttttatactcctttaactacatayagcacaatcagcacaatattgagaaaaacaaactactaatgggctgtcaattgatcatgcttaattccttatgaatttttgaatgacatctttccctcctcctcatcgaaacagcccagatcccctcatgtgatacccttggttctccacagtccactctc

SEQ ID NO: 20479 - DNA, 518 bp, Chicken  19866894231032_2
tcggtttagtcttggtcctaaggattatgattgtatctgacaaaaagtaatcctacatcaaggatgtaggattttgctctccccaaaactgtagtggacacttcactatgagttctcttcagaagaccacaatatggacaaaaagagtacagtacagaatrcaatagaaaacaccaattaattcaatgggtcttgacgggaaagttcttttggaaactgaaagcatacagtccctgctagctcaactgtttttatagatattattgattgcattatttttatactcctttaactacatayagcacaatcagcacaatattgagaaaaacaaactactaatgggctgtcaattgatcatgcttaattccttatgaatttttgaatgacatctttccctcctcctcatcgaaacagcccagatcccctcatgtgatacccttggttctccacagtccactctcttcagcagtccttctcattctcccatccttcacctgtactctcagctgtctcccgtc

SEQ ID NO: 20480 - DNA, 600 bp, Chicken  19866894231037_1
caaggagataggctcggcaggacggcactgctgctgcttccgcagccgtcgctgtgcgccgcggtgtagcgggaggggtgagcggaggagtgaaactgccccttgtattggcggtcatataggggaaaagtggtggggcgagggaggctgaggcctcctccgtcgtcctgctgccctcggtgggccttcaccccgaccccgtggctccgaggagggagggcagccccagcaggatggcctgggaaggatgcgaaaagccggtgggacgtgagcagtcccggcggaaccccgcgtctgtgkgagctgcctgtgatgggagctgcttggtgggggcccttcgctccgcggccccgggtacgcacacaggtgccggtgtcagcctggcctggggcggcatcaggcagagaggtgcagcaccgcaccccacagcagcagcaccccaaaggctgccctgccgcccgccctgtgccatcgcatcccagcggcggaagtgtcgccgtgggattccaatcgcggccatcagccccggctcctcccgggctccagctgcggccccggggtttcagaagatgcctcggctgggcagtaacccccttcccc

SEQ ID NO: 20481 - DNA, 600 bp, Chicken  19866894231037_2
ggcagaggggaagggagacgttgactttgaactgtccctttgtaggagcagggcccattgtggcagtgatggttttagctgggggatgtggagcgagtcagtggggttcctcgacgtctcctgtacatttcaatggggcgatctctggggccgtacgaggtgcctggctattctgggggtcactgtgcagcagtggctcacatgtcctctccctttggggcggacatccctggagctgtgtgcctggggcaggagggatgctgcaggcaggatgccctaggctctctgtacgtggtctcyggctgcagtccctgctggcagcccaagccctataacccaccaggctggtgggatcctgctggaaaaagcttagtggagtgaactgtgcatgctcyccrggtcagtaggaaggcagcaagctgggayggcagaaatgtgtaaacatttgtctctkctctttgccaagtgttccgacttgcrctcccttggagaaaaaaggtattaggtgtgtgtgctcaaaggtgatgttttattcactgccagtcagtgacacagctatcactgctggatgccacagtttcagttggtgcagcccaggta

SEQ ID NO: 20482 - DNA, 600 bp, Chicken  19866894231037_3
agtcagtggggttcctcgacgtctcctgtacatttcaatggggcgatctctggggccgtacgaggtgcctggctattctgggggtcactgtgcagcagtggctcacatgtcctctccctttggggcggacatccctggagctgtgtgcctggggcaggagggatgctgcaggcaggatgccctaggctctctgtacgtggtctcyggctgcagtccctgctggcagcccaagccctataacccaccaggctggtgggatcctgctggaaaaagcttagtggagtgaactgtgcatgctcyccrggtcagtaggaaggcagcaagctgggayggcagaaatgtgtaaacatttgtctctkctctttgccaagtgttccgacttgcrctcccttggagaaaaaaggtattaggtgtgtgtgctcaaaggtgatgttttattcactgccagtcagtgacacagctatcactgctggatgccacagtttcagttggtgcagcccaggtagagccatgtggtgggctgcagacctgcacatgatggggatggggcctgactggatcccatgtccccatctgcacctcaggcccatctgaagggca

SEQ ID NO: 20483 - DNA, 600 bp, Chicken  19866894231037_4
cagtggggttcctcgacgtctcctgtacatttcaatggggcgatctctggggccgtacgaggtgcctggctattctgggggtcactgtgcagcagtggctcacatgtcctctccctttggggcggacatccctggagctgtgtgcctggggcaggagggatgctgcaggcaggatgccctaggctctctgtacgtggtctcyggctgcagtccctgctggcagcccaagccctataacccaccaggctggtgggatcctgctggaaaaagcttagtggagtgaactgtgcatgctcyccrggtcagtaggaaggcagcaagctgggayggcagaaatgtgtaaacatttgtctctkctctttgccaagtgttccgacttgcrctcccttggagaaaaaaggtattaggtgtgtgtgctcaaaggtgatgttttattcactgccagtcagtgacacagctatcactgctggatgccacagtttcagttggtgcagcccaggtagagccatgtggtgggctgcagacctgcacatgatggggatggggcctgactggatcccatgtccccatctgcacctcaggcccatctgaagggcataa

SEQ ID NO: 20484 - DNA, 600 bp, Chicken  19866894231037_5
atttcaatggggcgatctctggggccgtacgaggtgcctggctattctgggggtcactgtgcagcagtggctcacatgtcctctccctttggggcggacatccctggagctgtgtgcctggggcaggagggatgctgcaggcaggatgccctaggctctctgtacgtggtctcyggctgcagtccctgctggcagcccaagccctataacccaccaggctggtgggatcctgctggaaaaagcttagtggagtgaactgtgcatgctcyccrggtcagtaggaaggcagcaagctgggayggcagaaatgtgtaaacatttgtctctkctctttgccaagtgttccgacttgcrctcccttggagaaaaaaggtattaggtgtgtgtgctcaaaggtgatgttttattcactgccagtcagtgacacagctatcactgctggatgccacagtttcagttggtgcagcccaggtagagccatgtggtgggctgcagacctgcacatgatggggatggggcctgactggatcccatgtccccatctgcacctcaggcccatctgaagggcataagtgctgggttcagccccaaagtcccatc

SEQ ID NO: 20485 - DNA, 600 bp, Chicken  19866894231037_6
acgaggtgcctggctattctgggggtcactgtgcagcagtggctcacatgtcctctccctttggggcggacatccctggagctgtgtgcctggggcaggagggatgctgcaggcaggatgccctaggctctctgtacgtggtctcyggctgcagtccctgctggcagcccaagccctataacccaccaggctggtgggatcctgctggaaaaagcttagtggagtgaactgtgcatgctcyccrggtcagtaggaaggcagcaagctgggayggcagaaatgtgtaaacatttgtctctkctctttgccaagtgttccgacttgcrctcccttggagaaaaaaggtattaggtgtgtgtgctcaaaggtgatgttttattcactgccagtcagtgacacagctatcactgctggatgccacagtttcagttggtgcagcccaggtagagccatgtggtgggctgcagacctgcacatgatggggatggggcctgactggatcccatgtccccatctgcacctcaggcccatctgaagggcataagtgctgggttcagccccaaagtcccatccctgataggaaaactgccactcctccat

SEQ ID NO: 20486 - DNA, 600 bp, Chicken  19866894231037_7
cactgtgcagcagtggctcacatgtcctctccctttggggcggacatccctggagctgtgtgcctggggcaggagggatgctgcaggcaggatgccctaggctctctgtacgtggtctcyggctgcagtccctgctggcagcccaagccctataacccaccaggctggtgggatcctgctggaaaaagcttagtggagtgaactgtgcatgctcyccrggtcagtaggaaggcagcaagctgggayggcagaaatgtgtaaacatttgtctctkctctttgccaagtgttccgacttgcrctcccttggagaaaaaaggtattaggtgtgtgtgctcaaaggtgatgttttattcactgccagtcagtgacacagctatcactgctggatgccacagtttcagttggtgcagcccaggtagagccatgtggtgggctgcagacctgcacatgatggggatggggcctgactggatcccatgtccccatctgcacctcaggcccatctgaagggcataagtgctgggttcagccccaaagtcccatccctgataggaaaactgccactcctccatggcactattatttgcttggctccacc

SEQ ID NO: 20487 - DNA, 600 bp, Chicken  19866894231037_8
atctgcacctcaggcccatctgaagggcataagtgctgggttcagccccaaagtcccatccctgataggaaaactgccactcctccatggcactattatttgcttggctccaccagcagagcggccggggctgagcgtgtcagggcctacctgagctctgtgcttccatgcccctctgctcagcctgggtccccccgctccctgggctctgggagagagctgctgcagtgctgaggatgatgcaggggctgcagaaggctggcaggagctgagctgagcatcctggagggtggctgtgcycagagcactgttcttggaagggcctccccagtacagatcctggggtgtggtttggctgtcagccacaccaccgccgcatctgaacctgccagctcttccttctctgctgccttacgggtggggaaagccaaaatacctggatgtgctttgagaagctgttaggctctgggagcaaaggaaagactgaactgaggactttgggggcagtgattgtgtgagagctgcgtttcccctgggcagcacatagcacagccccagtgatgcaaggtgcgatgctgcctgcccagggctgcagctgga

SEQ ID NO: 20488 - DNA, 600 bp, Chicken  19866894231037_9
cttccttctctgctgccttacgggtggggaaagccaaaatacctggatgtgctttgagaagctgttaggctctgggagcaaaggaaagactgaactgaggactttgggggcagtgattgtgtgagagctgcgtttcccctgggcagcacatagcacagccccagtgatgcaaggtgcgatgctgcctgcccagggctgcagctggagaccacagagtcccctatagagaggggcaccaggctgtgtcgtggggagcccggcacggtgtcagggtgctggcaatgccagacatacgccagmtgtggggcggccgggagcaggggtgagccaagcaccccccgatggtacccgggtgctttggagatgagtcagccaaggaccctccggggctgcacaatagcacccgaccctgcagcgccgaaacccggaggagacaagatggtatcagcgtgagggggctgccgtgatcaaagggccgggagaggagctccagcggctacacaatggctggcgggagggggcaccgatagcccttatctgccagccccgccgaggtgcgaagggcccggccccggggggcgagagattatcagggtggga

SEQ ID NO: 20489 - DNA, 600 bp, Chicken  19866894231038_1
gctttcaatacctcccccagatttgtctgccttcctcatgcttttagtcaaatgactatgtctaaacttggtaggtgttgcatacagcacaagacaaacttcttctatgagtatacaataataatgataataatgatatgataacaaaaagactttttcatatgatgtaatatatggtagtcagagtcaataggtactaggaaaatacagctcctttgggtccacttgatgctaacttcaacatctatcccacatctgaatgctacagtgaaaggatttcacagagctgattagacagasattctgccaacagcaatgtaaaataaaacgctattgtagctaatgtataattttctggagatcagggctttgcaggcatygatatgaatatatgttatttaatttaatatttatcaatttatatatggaaaataggccatctccagcaaaagtggaatcatgcccctgaatgcccgcagttctatgaaggggaaaaagtctagcagatttctgaataaaaattcaaataggctttaagttttacagctttgagtaccaataggtagattaaaagttagcttgaaaaaatgcctgagggaa

SEQ ID NO: 20490 - DNA, 600 bp, Chicken  19866894231038_2
catacagcacaagacaaacttcttctatgagtatacaataataatgataataatgatatgataacaaaaagactttttcatatgatgtaatatatggtagtcagagtcaataggtactaggaaaatacagctcctttgggtccacttgatgctaacttcaacatctatcccacatctgaatgctacagtgaaaggatttcacagagctgattagacagasattctgccaacagcaatgtaaaataaaacgctattgtagctaatgtataattttctggagatcagggctttgcaggcatygatatgaatatatgttatttaatttaatatttatcaatttatatatggaaaataggccatctccagcaaaagtggaatcatgcccctgaatgcccgcagttctatgaaggggaaaaagtctagcagatttctgaataaaaattcaaataggctttaagttttacagctttgagtaccaataggtagattaaaagttagcttgaaaaaatgcctgagggaacaaacagttgcttaatgaggatacatggaatgaaattaaaatgcagtcttaataaagataaattcaaaatgtaatgttag

SEQ ID NO: 20491 - DNA, 600 bp, Chicken  19866894231039_1
atgggacgtgtcagttaaatagtcaggcccttgtacaccaggacactaaatagtctaggtatgtttcatctcacactaaatcaatctaaaatccgttgggggatatgtgccctcagagtgctcatttcttccaatggcccagacagggcaactaaggcgcatggtgttggcagctgatggccagggactggaatcccatcccagctctcctgcttccagaagcaggcactgtgtgaaggtgccagctgccttcagctgcacttcttgaggaggaaaggagagaggggaagaagaaacacrggggtgaaacacaggatgagggaggcactttctgagaagaaaacaaagagtctattcaatcaaaggaaaaagcaaagaaaaagtagcctgaagaaaacttagcctccaaaaaacaatggatcaagctgaagaaggaaaacacaagtagcagagtcacatggttcacttcagtccttgtgttagtacatgtaatttataggattttgaatttcctttcaaggaaatctgctattcctatcagtgccttcacttctgagaagatttccaagcttacagcaaagaagtgccagcatcctgctc

SEQ ID NO: 20492 - DNA, 600 bp, Chicken  19866894231039_2
ggaaaacacaagtagcagagtcacatggttcacttcagtccttgtgttagtacatgtaatttataggattttgaatttcctttcaaggaaatctgctattcctatcagtgccttcacttctgagaagatttccaagcttacagcaaagaagtgccagcatcctgctccttagctggcctctccaaacgtcatcgatccctcgttttcctcagaaagccactcacaggcacacactgcctgctctctgccaagcacacatcctttcaggtgatctgatcagctgggctcctggtctggagstttgaccctcaccaaccagcccctgcattttggggaggaggggagaatgttttgtttctgcagggattaaaactgaagttcggaatgagaaattcagttccctttttcttcagccttgaggttttagccgtgcattagtaataatgacattgggtcccaagagaaggcttagcagtaagccacaaatgagcaggsagcagcatgaccagtacgccagcacagcttttagtgctctgcgaggaaatcttccctgtgtgctgttggaatgcactcagcaaaatatggcatgagtgacgggga

SEQ ID NO: 20493 - DNA, 600 bp, Chicken  19866894231039_3
tccctcgttttcctcagaaagccactcacaggcacacactgcctgctctctgccaagcacacatcctttcaggtgatctgatcagctgggctcctggtctggagstttgaccctcaccaaccagcccctgcattttggggaggaggggagaatgttttgtttctgcagggattaaaactgaagttcggaatgagaaattcagttccctttttcttcagccttgaggttttagccgtgcattagtaataatgacattgggtcccaagagaaggcttagcagtaagccacaaatgagcaggsagcagcatgaccagtacgccagcacagcttttagtgctctgcgaggaaatcttccctgtgtgctgttggaatgcactcagcaaaatatggcatgagtgacggggacctcccaccactggcatgcactcagcaaaggacaccattttggtaattagctgaaagcaattttattagtgccctgtagcatactgctgcgggcatctgcatggagtcacaagttacctttgctgatcacgtgtacaggcagggttaagcaagactgagaggggatgttgtaaatttcctattccttgactccct

SEQ ID NO: 20494 - DNA, 600 bp, Chicken  19866894231043_1
acccttgcccagcagtgtccatcagtgttcctcagcaagctttgaggcagtggtgcaaaagaataatctcttaaaactctgaatgtgttcttttctcttttttccaatagccggcctgaaaaaatgtttctatctctctccctctttattacttacataaaataaattatataaatttataagtcgtgcgaaatctgcacccattagtatacacagttttacactgcttcttgagccatcttctcagaaagattcctgcttccctagtaacctaagcagcaaccgttttgctgagaacamcacaaaacrctgtttggaattcattatttggaaaacaaaacaaaacaaagactagaaaagataaacagtaatcaaaatgctgagaagagagtgccaaactttcttctagttctgttttcacttatttcacttttttgttttgttttgctgtttgtttgtttgttttacaaatatataaccacatataattgtattgcattttctacttttagttgataactggctggcgaattagcagttaaaaattccatagcacaaaatcctgcagggatagcaataaattaaaactaattatttaag

SEQ ID NO: 20495 - DNA, 600 bp, Chicken  19866894231043_2
cagcagtgtccatcagtgttcctcagcaagctttgaggcagtggtgcaaaagaataatctcttaaaactctgaatgtgttcttttctcttttttccaatagccggcctgaaaaaatgtttctatctctctccctctttattacttacataaaataaattatataaatttataagtcgtgcgaaatctgcacccattagtatacacagttttacactgcttcttgagccatcttctcagaaagattcctgcttccctagtaacctaagcagcaaccgttttgctgagaacamcacaaaacrctgtttggaattcattatttggaaaacaaaacaaaacaaagactagaaaagataaacagtaatcaaaatgctgagaagagagtgccaaactttcttctagttctgttttcacttatttcacttttttgttttgttttgctgtttgtttgtttgttttacaaatatataaccacatataattgtattgcattttctacttttagttgataactggctggcgaattagcagttaaaaattccatagcacaaaatcctgcagggatagcaataaattaaaactaattatttaagcatattagc

SEQ ID NO: 20496 - DNA, 599 bp, Chicken  19866894231044_1
  misc_feature (1)..(133): n is any nucleotide
nnnnnnnnnnnnnnnnnnnnnnnnnnnnnnnnnnnnnnnnnnnnnnnnnnnnnnnnnnnnnnnnnnnnnnnnnnnnnnnnnnnnnnnnnnnnnnnnnnnnnnnnnnnnnnnnnnnnnnnnnnnnnnnnnnnnnttaatggacttagtccatccctttcaacaaagtcttgaaacaaagtgtcccagcctgattattaagactatgggacaagtgaactgagagcattgtggtaaatggcctggatatttctaatattgcctctatcactacacaaaccatctttgacacaatgacttaartgcaactgtcatacacagtcaagaaaatcactctttaattcaacgcataatggcagcatgttgactaatttggtcaaataaactgaatatatttgctcacagtgatatactgaattacatggaagagctccaaagttagattaggaagctcagagtaagwgaggctatttatgaggatgttttttaaagtccagatttagtcaaatttactgcgaggatgagagatttgatacttaagctccccccatcaatgtggaacatcagtatagatcctaaatagtttggtgtcctcagaggcc

SEQ ID NO: 20497 - DNA, 600 bp, Chicken  19866894231044_2
caaagtcttgaaacaaagtgtcccagcctgattattaagactatgggacaagtgaactgagagcattgtggtaaatggcctggatatttctaatattgcctctatcactacacaaaccatctttgacacaatgacttaartgcaactgtcatacacagtcaagaaaatcactctttaattcaacgcataatggcagcatgttgactaatttggtcaaataaactgaatatatttgctcacagtgatatactgaattacatggaagagctccaaagttagattaggaagctcagagtaagwgaggctatttatgaggatgttttttaaagtccagatttagtcaaatttactgcgaggatgagagatttgatacttaagctccccccatcaatgtggaacatcagtatagatcctaaatagtttggtgtcctcagaggccataattcaactggctgccctattggtggccgattgaggccctcattttctcctaagatctagacacaatattcatacagaacagggaattccatccttgggaattccaagcctgatgacccactcagagggttccacaactgacacctgtaaattactcac

SEQ ID NO: 20498 - DNA, 599 bp, Chicken  19866894231044_3
cagaacagggaattccatccttgggaattccaagcctgatgacccactcagagggttccacaactgacacctgtaaattactcacaggcagatgtggaatgaccttatatgagctggcatacaattttttaaaaatgacaaccaaatcatgttctcctaaatctatggagatgactaaatgaaaagcaatgttttacaccttcctcaacaaagagggaaggtatcagaattatagatcagattcctctgcaggcatggaggttaaaagatacattaaaaacgtcagccaatccaggtagmctgggcagccatggacaggcctcttaagaaatgggacttgggagtctctcagcttatggcacaaagagggggccaaagtctcagaaggattagggcctccaaaagggaccagaggctttatgtggaaccaacaatatactggtcctgaaggaacagacaaacaataatatctctatttgacattggagctaaagtatccacattctttggtgatccatcaaggtttctgggtacatttgccattatagagggatatgagggaaaagtgatccctgtgacacaaatgtggctaaaattgg

SEQ ID NO: 20499 - DNA, 600 bp, Chicken  19866894231058_1
ttgaaacttttccaaggatcttcgtctaagtaaactgagcacttaataagcaaatcacacataagaagtaaatgagccacgataaatattggtgccacattatttttacagagtcatttcccacacaaaacttgctcagtaacacaaagataaataaaaaagaagttatcaatacctgagaaatttgaaaaaagccttgtataggtagagaacctatgcttgagcaaccactgctgcgtttcctggattgtggctgaaggatgaagctgctataagaaacaaggctggacatgaacattygtatgtagaaaaacaaaacaaaagaacagcaacaaaaaaaaagaagcacaccccaaaatactgaagcctcccttggttaaatgctttccgtcaactggtattaatgccaaagcataaataaatcaaaggtatgtctttgtgcaaatgcagccacaatcagtactaggaagcaaacacttacgtctccagacccttgagaggttccatctccttgatgatttggggaggaagaattgctacaggggaagaaaaaaaaaagtattaacatatactctgcataggctaaaactcaatgaactt

SEQ ID NO: 20500 - DNA, 599 bp, Chicken  19866894231059_1
  misc_feature (1)..(93): n is any nucleotide
nnnnnnnnnnnnnnnnnnnnnnnnnnnnnnnnnnnnnnnnnnnnnnnnnnnnnnnnnnnnnnnnnnnnnnnnnnnnnnnnnnnnnnnnnnnnntgagattttccactggtattgctgatccctttaaagtacaccagatacttctttatgaacttctttatgaagttgtatcaattggtgccattgcttgagaggcaagattttccacacatggcttacttacatatctatgtctgagtaggtcatcctatactctgtttgtagccaatggtaagaaaaggacagaatggaactcctctyacctatcttagacacttgattctccgttgcaaaatgctgcaccctagaaggactactgaatataaatggaaggggggaaagaaagaaaaagattattatagattttggcattgcatgtatctgcataaaacaaaattaatctcttccctgaaatttcttagaccagactgttgaacttaatatcactgcaagtaaaaactatttcttttaaatgggtggattaaaatgkttttaaaatcatgctcctattartrttatatataacawgaaattccgtgttaagtctgccacataaaggg

SEQ ID NO: 20501 - DNA, 600 bp, Chicken  19866894231059_2
atgtctgagtaggtcatcctatactctgtttgtagccaatggtaagaaaaggacagaatggaactcctctyacctatcttagacacttgattctccgttgcaaaatgctgcaccctagaaggactactgaatataaatggaaggggggaaagaaagaaaaagattattatagattttggcattgcatgtatctgcataaaacaaaattaatctcttccctgaaatttcttagaccagactgttgaacttaatatcactgcaagtaaaaactatttcttttaaatgggtggattaaaatgkttttaaaatcatgctcctattartrttatatataacawgaaattccgtgttaagtctgccacataaagggacaactttgcagtaaaaatattctcattagcaggctgagcacagtacagagatcatcacagctgattcacaaaagagttacttatcataaaaacttcttaaaaggtcaaagtgaaaaactcatgggaaaatgaggaaaaaaataacactaaactgagcaagaagtatgcccatgaatctgaaaaacttctaatttttcaatgtattatcttccatgtgtaaagactgctc

SEQ ID NO: 20502 - DNA, 600 bp, Chicken  19866894231059_3
ctctgtttgtagccaatggtaagaaaaggacagaatggaactcctctyacctatcttagacacttgattctccgttgcaaaatgctgcaccctagaaggactactgaatataaatggaaggggggaaagaaagaaaaagattattatagattttggcattgcatgtatctgcataaaacaaaattaatctcttccctgaaatttcttagaccagactgttgaacttaatatcactgcaagtaaaaactatttcttttaaatgggtggattaaaatgkttttaaaatcatgctcctattartrttatatataacawgaaattccgtgttaagtctgccacataaagggacaactttgcagtaaaaatattctcattagcaggctgagcacagtacagagatcatcacagctgattcacaaaagagttacttatcataaaaacttcttaaaaggtcaaagtgaaaaactcatgggaaaatgaggaaaaaaataacactaaactgagcaagaagtatgcccatgaatctgaaaaacttctaatttttcaatgtattatcttccatgtgtaaagactgctcacccatgctgctttatgtgattt

SEQ ID NO: 20503 - DNA, 600 bp, Chicken  19866894231059_4
ctgtttgtagccaatggtaagaaaaggacagaatggaactcctctyacctatcttagacacttgattctccgttgcaaaatgctgcaccctagaaggactactgaatataaatggaaggggggaaagaaagaaaaagattattatagattttggcattgcatgtatctgcataaaacaaaattaatctcttccctgaaatttcttagaccagactgttgaacttaatatcactgcaagtaaaaactatttcttttaaatgggtggattaaaatgkttttaaaatcatgctcctattartrttatatataacawgaaattccgtgttaagtctgccacataaagggacaactttgcagtaaaaatattctcattagcaggctgagcacagtacagagatcatcacagctgattcacaaaagagttacttatcataaaaacttcttaaaaggtcaaagtgaaaaactcatgggaaaatgaggaaaaaaataacactaaactgagcaagaagtatgcccatgaatctgaaaaacttctaatttttcaatgtattatcttccatgtgtaaagactgctcacccatgctgctttatgtgattttt

SEQ ID NO: 20504 - DNA, 600 bp, Chicken  19866894231059_5
atggtaagaaaaggacagaatggaactcctctyacctatcttagacacttgattctccgttgcaaaatgctgcaccctagaaggactactgaatataaatggaaggggggaaagaaagaaaaagattattatagattttggcattgcatgtatctgcataaaacaaaattaatctcttccctgaaatttcttagaccagactgttgaacttaatatcactgcaagtaaaaactatttcttttaaatgggtggattaaaatgkttttaaaatcatgctcctattartrttatatataacawgaaattccgtgttaagtctgccacataaagggacaactttgcagtaaaaatattctcattagcaggctgagcacagtacagagatcatcacagctgattcacaaaagagttacttatcataaaaacttcttaaaaggtcaaagtgaaaaactcatgggaaaatgaggaaaaaaataacactaaactgagcaagaagtatgcccatgaatctgaaaaacttctaatttttcaatgtattatcttccatgtgtaaagactgctcacccatgctgctttatgtgatttttgtttttagcttct

SEQ ID NO: 20505 - DNA, 600 bp, Chicken  19866894231060_1
ttagcttgcccatctccataactgagggatgctccctgctttcccgtagcgctgcacgagaccccatcctcctgacacctgctgccttgcctctgtgccaagtcaaagttagaccagtgaaaataaccatgctggcctcccagtgcttcccagaatttctgcattcagataattttacaagcttctccatgccactgtccttctgtcacttgaatagaacagagctcatgttggccacaaatatttcctccgaagacaagcaaaatcccacacaaaggaaggaaactctcttttcctcayttgaaatgagacaacttaatattaaatgaatacaaaattacattgtgctgatcatccacttttccttttttttttttcttattcttcttgaagacttgtctacttcctgggaaggagatactctaaaaattttctggtggtatttatttgtaggtacaatctcgaactgcattgtcctagtgcaggacttagttcaatagccttaccatcacagcagcaaaacacttcagatgaattttagatctagaggaatgcagcatctacttttaatgggattttagcacccactatttcagctgt

SEQ ID NO: 20506 - DNA, 599 bp, Chicken  19866894231063_1
  misc_feature (1)..(172): n is any nucleotide
nnnnnnnnnnnnnnnnnnnnnnnnnnnnnnnnnnnnnnnnnnnnnnnnnnnnnnnnnnnnnnnnnnnnnnnnnnnnnnnnnnnnnnnnnnnnnnnnnnnnnnnnnnnnnnnnnnnnnnnnnnnnnnnnnnnnnnnnnnnnnnnnnnnnnnnnnnnnnnnnnnnnnnnnnnnnttcctaaaccttttcaaaattgcttttgaatgtgcaggggggtagcagaaaaaaagtagaagggaagtagtatagtaatgtatgcaggtttgattttttttattgtattctgtgaggtatcagttcaytaattgaaatcattgttcatggtctgcttttgtctgtgtggaactatgaattcctcaaacatgatgaaaggtgtaagagttcagggatgttataagcagtaccaataaagtaaacattgaacttaagagaaggcctcaccttcttccctattaatatgaattggagtactgttgggttgtaagctaagctccctttggtctcctttgaagtgcaaataacgttcattagaaagataatgtatttcacagcacgattctcaccccgagctatattacggtatggttttccaaatcagtca

SEQ ID NO: 20507 - DNA, 600 bp, Chicken  19866894231063_2
ttgtctgtgtggaactatgaattcctcaaacatgatgaaaggtgtaagagttcagggatgttataagcagtaccaataaagtaaacattgaacttaagagaaggcctcaccttcttccctattaatatgaattggagtactgttgggttgtaagctaagctccctttggtctcctttgaagtgcaaataacgttcattagaaagataatgtatttcacagcacgattctcaccccgagctatattacggtatggttttccaaatcagtcacattatcaacttaaattggttccctatcckgaattatgcaaacttaactttcacaggacaccagaagctgcaacaacacgttgcagtagtgttttttcttagtataattcaagcatgggaaaagagtgtggaaattctgcatgcaccttcagaagtcttatcttcttctagtgtaatattcaagcaggatacagggtgccataacattgtatatctgatattttgctacagcgtcatatatttgatatttttcaaggtgcttaaagaggagaggtttgcatgttgggtgtaggttgtactgtctgaaaaggtacttctgttcaatgaaag

SEQ ID NO: 20508 - DNA, 600 bp, Chicken  19866894231064_1
gtcttagcagtcttgagcaaagtatctttaagacatcaccttatcagcactgtctgaattatgagagggtctctctatgtccccctgcagcaaaaggtaagatggggaaaaggcagctctctggtatccttctccagcacccggtataagcattggtcagctgcgatctgaagcgtgcaaaaaagactcctcgtctgggatagctagtactttcctttcagagatgcccagcatcttcaaattgctttgtacttctcaggagcaggggatgttcagtgcctctggaaaacaagtccctcrcagcacggtgtttcacccgctgtgttgcaaacggccttcggggttttcagccttcccatcccacatgctgccctcagagtggctggcaggatggcgtggttactggtgcagtgtataatcttcctcttctccccgacccccatgtaactcttacctttaatgttatgtatgtttaagccatacacttctgaaaaggagtgttaaaaactcaagtgaattcagaatagagagatgaaaagaagcattctgtgactctggcaaagctggcagtactaagtactaaggggagagacaatccca

SEQ ID NO: 20509 - DNA, 600 bp, Chicken  19866894231070_1
gtgcaattctctctcctgtgtatcaagtgctgaagatatttcagtggtctggttaacagggaaaactgttcaaatcaaccatggcctctcaacatgctgggctacaatgaaaggcagaaaggaaaagagaatacaacagaggagatttttctcagattctgaggtagcttaggctcataagctgccacaaaacaaacaaacaaaaaaacccttcagtatttagaaattaaagttcaattgactttcaatatgtgagtacctaacttagtcctcctgaaaactctactaagtctaataggraaaaaaaaaatgataggagccttartgccattgtttgctttttattgaatgtagatgcttcatttaccagcctggactgttgccatcatactatcatatacacatgtgcactcacggtcaggaaaaacaagcagttactatgcaggttcaatcagattaaaggttccctgtgtgagagcagaatatcaaaaaaacatattggtgtgtaagatttctcatcttgtctgatttttaacacgcataataaatgtctctgatttttttctacccaacgtttgccttctcaaaagcaattttttt

SEQ ID NO: 20510 - DNA, 600 bp, Chicken  19866894231070_2
agtgctgaagatatttcagtggtctggttaacagggaaaactgttcaaatcaaccatggcctctcaacatgctgggctacaatgaaaggcagaaaggaaaagagaatacaacagaggagatttttctcagattctgaggtagcttaggctcataagctgccacaaaacaaacaaacaaaaaaacccttcagtatttagaaattaaagttcaattgactttcaatatgtgagtacctaacttagtcctcctgaaaactctactaagtctaataggaaaaaaaaaaatgataggagccttartgccattgtttgctttttattgaatgtagatgcttcatttaccagcctggactgttgccatcatactatcatatacacatgtgcactcacggtcaggaaaaacaagcagttactatgcaggttcaatcagattaaaggttccctgtgtgagagcagaatatcaaaaaaacatattggtgtgtaagatttctcatcttgtctgatttttaacacgcataataaatgtctctgatttttttctacccaacgtttgccttctcaaaagcaattttttttcactgccaattgcagaaattatta

SEQ ID NO: 20511 - DNA, 599 bp, Chicken  19866894231071_1
  misc_feature (1)..(5): n is any nucleotide
nnnnngctttgccctgctcccctaagttactccctgctctaggatggctgttgtataagtttggaaaacatggctatgtttttgcagagattggcatcagtgtgccaatcagggatatgcagaactggcatttggagcgggaacccaacttcttgttaccccgagtaagtttaaactttctgtatcatattagcaccaggagtggtagttacttgttctttaggtaggtggactaggggattacatgagagcattttcccatcttcttttagaccgccactggcaaaaatatgttgaaayagagatgtgttgaaagccaaggagtgcttgtatatggtgtgacagtgactcactacagaaaagaacagctagatacgatggttgtgttccttatggttttctattgctaaacaatttaccgatgcttagcagtcacagcgtggtgtgstcaggcatacagtgcagcaaggagtttccatgctgccaaatactttataacaaatttaatgcatttgttgagtttttggttcttagcatgttcaaatttgatttatccatctttaaaataacaatggagtcattcagcctaaatgacctta

SEQ ID NO: 20512 - DNA, 600 bp, Chicken  19866894231071_2
cttcttgttaccccgagtaagtttaaactttctgtatcatattagcaccaggagtggtagttacttgttctttaggtaggtggactaggggattacatgagagcattttcccatcttcttttagaccgccactggcaaaaatatgttgaaayagagatgtgttgaaagccaaggagtgcttgtatatggtgtgacagtgactcactacagaaaagaacagctagatacgatggttgtgttccttatggttttctattgctaaacaatttaccgatgcttagcagtcacagcgtggtgtgstcaggcatacagtgcagcaaggagtttccatgctgccaaatactttataacaaatttaatgcatttgttgagtttttggttcttagcatgttcaaatttgatttatccatctttaaaataacaatggagtcattcagcctaaatgaccttaaaattggattttctaactcttagcttaaaaatgtatcagatttttttgttttaaaatctgaaaatgaagtccatatttgtctaaactaatgttagaatgtgagcagttaggaattagaaaatttgcatttgcaaaggagaccagtcttg

SEQ ID NO: 20513 - DNA, 600 bp, Chicken  19866894231076_1
tcacacccagccagttgttatcaggcctcacatcgtgctgacaacacctcacccccctccgtcacctctgtcctgcgcagcgtcactcgggaaaacacagaacgtgcctcaagagctctgcaataaagttataaaagagccagagagattaaatctgcatagaaaggctgctccagtggagcttggtcacactcagatatgtttaccggcactgtgatcagcactggtcaaagaagccagtggttaagcagggctaagatcagcagagccccagaccatgagcagcaccagcctccccayagcacctcccaaactgctcaccctgcatgcagccagtatcgctggaaggaaaaggggcacaagcacacagcgtgaggctgagaggtacaggaggcacagaggtatgaggcagctgtttgtaatggggcaggcactggtctcagtggatgtgttctggatacagccagcaagcagaggaactttccctggagctgtcactacacagaggaggcagcaacgcagccagggagctgagagagccacaactgacccatgcaatgtgcctcagcagtcactcatcctgatcctttcttccctgct

SEQ ID NO: 20514 - DNA, 566 bp, Chicken  19866894231076_2
cacctcccaaactgctcaccctgcatgcagccagtatcgctggaaggaaaaggggcacaagcacacagcgtgaggctgagaggtacaggaggcacagaggtatgaggcagctgtttgtaatggggcaggcactggtctcagtggatgtgttctggatacagccagcaagcagaggaactttccctggagctgtcactacacagaggaggcagcaacgcagccagggagctgagagagccacaactgacccatgcaatgtgcctcagcagtcactcatcctgatcctttcttccctgctgktgggaggctctcgcactggaggtcagagcctgagctcctgcacgtgtcctccgtgctccagcgagaggtcagaggtgcaagcaggagcacattgctcatgagcctctctctgagctcccccaagggctgggcagcctctgctgcaaggtctttggctgaggcctccccagcaggcagctgaaggtgcgcaagttacgtgttccaacctgactgggagcgctgtgctgcctcttcataaatgccctaatcccaacatgaaacaacaa

SEQ ID NO: 20515 - DNA, 600 bp, Chicken  19866894231077_1
agagggagatttaggcagggtagaaggaagaaggtttttatgagaagggcggtgaggcactggcacaggttctgcagggatatgtgggcagtggtgtcccatccttggagacacccaaggtcaggctaatgggctgagtgctgacagagctgtgggtgtccccattcatcacagggggttggaccagatggcctttaaaggtctcttccaactcaaacgattctgtgatcctctgaccttaatgagcagccagagcagcacagtatggttgggttggaaggagccctacagatcaccttyagaaccatatgacccaataaatggtttgggttgaggggaccttatccctgctcatcgcagaggggtgggaccagaaggctttaagggccccttgcaatccaaaccacagatcggtgatctgctaaggaccacccctctccccacagctgctcacaagccccgttctcagccccgctcgcaccccccgcaccgggacgcacacaaaccccaacccatcgtggcgtccctgtgctgatggcagcgcaccttctgcttcgcctgctcgcgccgctcgcccgggagctcattcggcagcgtcag

SEQ ID NO: 20516 - DNA, 600 bp, Chicken  19866894231077_2
caccttcacgctctcctgaaacaagagggtgggatttaggtcgcagccacccagcgcagctgggaagttgcagccctcagaacaacacccgactccaactgaacgagttatagcgcagcaatgacatccacccggcccattggagcttggaggagccaaggaggaggaagtgcaaaggaggaaccaccggactcataacacagccaccacgccagggacccttccagagaggagcaaagcagctcaggttctcctcctcccctgccctctccacacagccacagccagatcagcccctcwgagctgaggggggracggtggccgtcggcagcactgctgcccaaacccttcccagccttccagcgcggcgctctggtgacgttcggcaaagaggacacagaacagcgcaaagcggcgcacgacacccaaactgcyccattttggcccccaaaacccatcccacactgacctcaccaactccagggccactcatgctcccggcgaccccgcagccgaccacggtgctctggggccgctcagcaccccacacccagccccatcggtgcccgccccacaccacgcctggccacgtcaccctcg

SEQ ID NO: 20517 - DNA, 600 bp, Chicken  19866894231077_3
cctgaaacaagagggtgggatttaggtcgcagccacccagcgcagctgggaagttgcagccctcagaacaacacccgactccaactgaacgagttatagcgcagcaatgacatccacccggcccattggagcttggaggagccaaggaggaggaagtgcaaaggaggaaccaccggactcataacacagccaccacgccagggacccttccagagaggagcaaagcagctcaggttctcctcctcccctgccctctccacacagccacagccagatcagcccctcwgagctgaggggggracggtggccgtcggcagcactgctgcccaaacccttcccagccttccagcgcggcgctctggtgacgttcggcaaagaggacacagaacagcgcaaagcggcgcacgacacccaaactgcyccattttggcccccaaaacccatcccacactgacctcaccaactccagggccactcatgctcccggcgaccccgcagccgaccacggtgctctggggccgctcagcaccccacacccagccccatcggtgcccgccccacaccacgcctggccacgtcaccctcggagcagcgccaaag

SEQ ID NO: 20518 - DNA, 600 bp, Chicken  19866894231077_4
cccattggagcttggaggagccaaggaggaggaagtgcaaaggaggaaccaccggactcataacacagccaccacgccagggacccttccagagaggagcaaagcagctcaggttctcctcctcccctgccctctccacacagccacagccagatcagcccctcwgagctgaggggggracggtggccgtcggcagcactgctgcccaaacccttcccagccttccagcgcggcgctctggtgacgttcggcaaagaggacacagaacagcgcaaagcggcgcacgacacccaaactgcyccattttggcccccaaaacccatcccacactgacctcaccaactccagggccactcatgctcccggcgaccccgcagccgaccacggtgctctggggccgctcagcaccccacacccagccccatcggtgcccgccccacaccacgcctggccacgtcaccctcggagcagcgccaaaggattgtgccgctccgcttccaagcgctctgcaccgcccaagtctcgacaagccgtgggtttgtttccaaaatattggctgtacgctgctctcgctttgcctgggctcctgggagaggaggt

SEQ ID NO: 20519 - DNA, 600 bp, Chicken  19866894231079_1
accaccataagaatgttctgtgcttgctcagatgagagacaatgatcaagaaggagagaaggtgagatcgctatctcagattgagattagttcagagaggaaactgacagcattcattgcactataaaaatctcatgcacttgagtaaagtgaatctcaatgtgctatctctaaaatatgctttgctgtaaatgctagcagttggccatcagacaaaaagaaattgcttagacaaagttgttaaaaacaatatgtatttctaaccactccttgtttgcctaattttattctctcgtatcracaagccaaattgctggggagtatattggcaggggtcttcaacccttgctaataaactgctgcagtggctagaaaaaaagtctggccttttgacaatgggctaaaattggttgtacagaagttatatttctctgctaagtactcaggcatttgcagacaaataagttatgagaaccatcaatatgtaagagaaaaggtaaattttcataatcaaacataggattttatgtggaaaagcatatttgctgattgtttttgctatagtgttctcagacctttgttgctgtttgatcggggatg

SEQ ID NO: 20520 - DNA, 585 bp, Chicken  19866894231079_2
ttttggagtttccttagttaccgaccatttctacaaatatattttattaccccaacttcaactcctattcctggaaatcccccagccaccagaatgaatagagaattaaagcagtaatgaaacaccaacagtctccagaacagtaagtataaatgtaccctcctgtatggagggccaaagatgctcagagggctggagcacctctcctacgaagacaagctgagagttgggtttgttcagcctggggacaccttattgcagccttccagtacttaaaagagggcctacaagaaagctggmgtgggatttttttacaaaggcaygtagtgatagggcaaagggtaatggctttaagctaaaagtgggtaaatttatttagatattaggaaaaataaatctttattatgagggcagtgaggccctggctctggtgcccagagagctgtgggtgtgctcaggaccaggctggatggggctctgggcagcctgagcaggtgtccctgcccatggcagggttttggaactggatgggctttaagatcccttataacacaaacctgtctatcattctacagtgattattac

SEQ ID NO: 20521 - DNA, 562 bp, Chicken  19866894231079_3
accatttctacaaatatattttattaccccaacttcaactcctattcctggaaatcccccagccaccagaatgaatagagaattaaagcagtaatgaaacaccaacagtctccagaacagtaagtataaatgtaccctcctgtatggagggccaaagatgctcagagggctggagcacctctcctacgaagacaagctgagagttgggtttgttcagcctggggacaccttattgcagccttccagtacttaaaagagggcctacaagaaagctggmgtgggatttttttacaaaggcaygtagtgatagggcaaagggtaatggctttaagctaaaagtgggtaaatttatttagatattaggaaaaataaatctttattatgagggcagtgaggccctggctctggtgcccagagagctgtgggtgtgctcaggaccaggctggatggggctctgggcagcctgagcaggtgtccctgcccatggcagggttttggaactggatgggctttaagatcccttataacacaaacctgtctatcattctacagtgattattac

SEQ ID NO: 20522 - DNA, 600 bp, Chicken  19866894231088_1
tctcagccctgtgctgtggggctgggtttccaaccactaaaaatcatcttcaaaaactttgctttgggaagcactcttaaatacttgtcttacgttcatatctgcatctgtaaagctgtatgtgctatcttccctttgcctcctcttctccccagtgcatagtgttgatttaagaatctcctggtagcacatgctctatagttatccgttcatccaaattgctcctttctgctctcttcaggcagaagagagctttctgctgacaatcagaccactggtaccaagcttctccacagctgygtagagacagctacctttgtgtggagtctttgattctgttttcacatccttttaagtggtatgacattctcactgtggcactttgatattgtcaccttgtgtacagtctgactgtgactcatataaccacagactattctcttcttctcttttgcatataattgcacttgttttttttttgttttgttttttgtttttcccacagaacacctcacagttccccactttctatatgtccctatctacttctgtgttaccacccaccttagcccagcagtgccgaatggcacattccttttt

SEQ ID NO: 20523 - DNA, 600 bp, Chicken  19866894231092_1
aatggacatatactagcacatataagctagaaatctagtcgattcataattttgacttcaaacaacagaagaataaatatatataatgtgtaagtccatattagactgctgcacagtgtaaaaacaaaacagaattctatcatctcctagaaacagtggtagtagaaaatctctgtaaatgactgttctgagttctggttcagttatatttgttatccttggaaaaaaaaatcttgtagattttgtaaatgttcatggaatacaactttgctgtgtcacagatgggaacttcattgctckgtcttccttatagwgtggctgaaatagtttagaatgaatttctgatgtagaattactcatgctggagtaatgcttgcttgctcagaactagaagataatcccacagccctctgcctataaattgtgtgactgttttatgaaagcacacaaagcagctgacctctgttttgatgacagtattccttttggttactctctaaaaccacttttgaaaacatttttgttctttgaattccgacatttcatctcattagtatttttcttttttcagaactaagttcctctgcagaagcaaagtat

SEQ ID NO: 20524 - DNA, 600 bp, Chicken  19866894231092_2
agcacatataagctagaaatctagtcgattcataattttgacttcaaacaacagaagaataaatatatataatgtgtaagtccatattagactgctgcacagtgtaaaaacaaaacagaattctatcatctcctagaaacagtggtagtagaaaatctctgtaaatgactgttctgagttctggttcagttatatttgttatccttggaaaaaaaaatcttgtagattttgtaaatgttcatggaatacaactttgctgtgtcacagatgggaacttcattgctckgtcttccttatagwgtggctgaaatagtttagaatgaatttctgatgtagaattactcatgctggagtaatgcttgcttgctcagaactagaagataatcccacagccctctgcctataaattgtgtgactgttttatgaaagcacacaaagcagctgacctctgttttgatgacagtattccttttggttactctctaaaaccacttttgaaaacatttttgttctttgaattccgacatttcatctcattagtatttttcttttttcagaactaagttcctctgcagaagcaaagtatgatgcttttctaat

SEQ ID NO: 20525 - DNA, 599 bp, Chicken  19866894231096_1
  misc_feature (1)..(122): n is any nucleotide
nnnnnnnnnnnnnnnnnnnnnnnnnnnnnnnnnnnnnnnnnnnnnnnnnnnnnnnnnnnnnnnnnnnnnnnnnnnnnnnnnnnnnnnnnnnnnnnnnnnnnnnnnnnnnnnnnnnnnnnnnnagattttttttggaccttattgctctctacactgcctaaaatgaggttgtggtgaggtgagggttgggctcttctcccatgtaactagtgataggatgagaggtaatggccttaagttgagccagaagaggttcgggatggacattaggaaaagcttcttctccaaaagagcagtgargtgctggaacaggctgcccatggagatggtggagtcaccatccctggagatgttcaagaaacatttggatcytagaggtcttttccaaccttagtgattctatgtttctatggacacactccatagtgtgaggcccctcactgctatggtcttctccagtccaattctcaccaaatttatcaaaatttcctctcatcaagttattttattattattattattctcctctgaagctttcattgtttctgtcaattctcagagcatttctatgctttgaatttggcaaaaaaaagaaatga

SEQ ID NO: 20526 - DNA, 599 bp, Chicken  19866894231096_2
  misc_feature (1)..(50): n is any nucleotide
nnnnnnnnnnnnnnnnnnnnnnnnnnnnnnnnnnnnnnnnnnnnnnnnnnagattttttttggaccttattgctctctacactgcctaaaatgaggttgtggtgaggtgagggttgggctcttctcccatgtaactagtgataggatgagaggtaatggccttaagttgagccagaagaggttcgggatggacattaggaaaagcttcttctccaaaagagcagtgargtgctggaacaggctgcccatggagatggtggagtcaccatccctggagatgttcaagaaacatttggatcytagaggtcttttccaaccttagtgattctatgtttctatggacacactccatagtgtgaggcccctcactgctatggtcttctccagtccaattctcaccaaatttatcaaaatttcctctcatcaagttattttattattattattattctcctctgaagctttcattgtttctgtcaattctcagagcatttctatgctttgaatttggcaaaaaaaagaaatgaacggacctttccagcctgatgctataaggttatttctgcttagcaactgttgttttttagggtaaacttctg

SEQ ID NO: 20527 - DNA, 600 bp, Chicken  19866894231096_3
aggtcttttccaaccttagtgattctatgtttctatggacacactccatagtgtgaggcccctcactgctatggtcttctccagtccaattctcaccaaatttatcaaaatttcctctcatcaagttattttattattattattattctcctctgaagctttcattgtttctgtcaattctcagagcatttctatgctttgaatttggcaaaaaaaagaaatgaacggacctttccagcctgatgctataaggttatttctgcttagcaactgttgttttttagggtaaacttctgcaaygcttcatgagttgcacaatacaaagcatggaaggctctrtcatgtttgaacaggtttcagtggggctggcgtacaaccctgctcacagaacagtacaytgtacatcctgtgctgaagagttaatttccctgctagctgctctgccacacctaaggcgaactttctccccaagcagcaggagtcagaggctgcacccagaggtgagtgaagcatcagctggtaccctcaggtgaagtttcatgttacactgaatttgggagactgcatgtgtatctgccacagtggcacccccattgcttc

SEQ ID NO: 20528 - DNA, 600 bp, Chicken  19866894231096_4
cacactccatagtgtgaggcccctcactgctatggtcttctccagtccaattctcaccaaatttatcaaaatttcctctcatcaagttattttattattattattattctcctctgaagctttcattgtttctgtcaattctcagagcatttctatgctttgaatttggcaaaaaaaagaaatgaacggacctttccagcctgatgctataaggttatttctgcttagcaactgttgttttttagggtaaacttctgcaaygcttcatgagttgcacaatacaaagcatggaaggctctrtcatgtttgaacaggtttcagtggggctggcgtacaaccctgctcacagaacagtacaytgtacatcctgtgctgaagagttaatttccctgctagctgctctgccacacctaaggcgaactttctccccaagcagcaggagtcagaggctgcacccagaggtgagtgaagcatcagctggtaccctcaggtgaagtttcatgttacactgaatttgggagactgcatgtgtatctgccacagtggcacccccattgcttcctgtgagtcagtctttgtgtggtcatagataaactgaat

SEQ ID NO: 20529 - DNA, 600 bp, Chicken  19866894231096_5
aatttatcaaaatttcctctcatcaagttattttattattattattattctcctctgaagctttcattgtttctgtcaattctcagagcatttctatgctttgaatttggcaaaaaaaagaaatgaacggacctttccagcctgatgctataaggttatttctgcttagcaactgttgttttttagggtaaacttctgcaaygcttcatgagttgcacaatacaaagcatggaaggctctrtcatgtttgaacaggtttcagtggggctggcgtacaaccctgctcacagaacagtacaytgtacatcctgtgctgaagagttaatttccctgctagctgctctgccacacctaaggcgaactttctccccaagcagcaggagtcagaggctgcacccagaggtgagtgaagcatcagctggtaccctcaggtgaagtttcatgttacactgaatttgggagactgcatgtgtatctgccacagtggcacccccattgcttcctgtgagtcagtctttgtgtggtcatagataaactgaatccaagagagaaatgtttggtttttttttctcctcattcctgcccctgcccttacttggt

SEQ ID NO: 20530 - DNA, 600 bp, Chicken  19866894231098_1
gcacagacccctcatgctttgcctccctgaaggctcgtgccacgcacagttcccataggggcaggctgcatggtgacaagagccacccacagtgaagccatcactgggacagggacacacagctgcttcccaacctcactgctccctggacaatgggttgggagatgcccagggacagggcagaccccgtcccgtctcactggggcgtaggtgtgtgtgtgtgtgtgtgtgtgtgtgtcacagggcaggaagtcccggggctgtcactgtacagccactttgcacctgtcacagcaatcrtgcaggctaacagcactgcctgccgcatggtggggtttctctcaagcctctctgcagaagctgtgaactttgatgctgatgaagcttttactttctaaccattgagaargctttcatgtttgtttgtgcttccttgaaaacagtgctgggtttctttctcatcccaaacccttgatgctctgcgtgagtgtcctgacacagcgtggcagattcagtgttcctctgcaagcaaactgaaacattcttttctggccataaagaaaactctgcaccaagtgtaggcgactgtgtacacagagc

SEQ ID NO: 20531 - DNA, 600 bp, Chicken  19866894231098_2
cagggacacacagctgcttcccaacctcactgctccctggacaatgggttgggagatgcccagggacagggcagaccccgtcccgtctcactggggcgtaggtgtgtgtgtgtgtgtgtgtgtgtgtgtcacagggcaggaagtcccggggctgtcactgtacagccactttgcacctgtcacagcaatcrtgcaggctaacagcactgcctgccgcatggtggggtttctctcaagcctctctgcagaagctgtgaactttgatgctgatgaagcttttactttctaaccattgagaargctttcatgtttgtttgtgcttccttgaaaacagtgctgggtttctttctcatcccaaacccttgatgctctgcgtgagtgtcctgacacagcgtggcagattcagtgttcctctgcaagcaaactgaaacattcttttctggccataaagaaaactctgcaccaagtgtaggcgactgtgtacacagagcctgcacacaacacgcagagttgtgttttattttgcagccccaacggtgaacgcactttctgcagcctctgaacgctgcaaatgctagaaaagcaaggtttgaaggaaca

SEQ ID NO: 20532 - DNA, 600 bp, Chicken  19866894231099_1
tgcttgatttgctcttcacaatgaaatgctatatcaaagaatcattcctgtaactgcatgctcattcctctaacactcatcttcccttccatattttctttaccaaatccttcccatggctgaagcagaatgaacaaacgtgctcattcatgattgaagccacaagttgagtgcacacagacccttcaagtgtggatacaaaaagaagctatctctaatattattcctctacaaacacagaacagtgaacagaaaatcatgagaaatataaagtcagttctactagctacttgtcactaygtggggacgtcttttctctcttgatccaaaacttgttgctgggattaaaaaaactctggcacaaaattccttcatacaatattttcagtagcttaaaatcatttgatttaatacaatggaatgagtaaattacacatcacaaaatattcccctcccacctactctaaatatccttgagtaccatttgatctttctctacagatattctacgatatatgtttgcacatgtatgcaaatacaaggagactttttttgttgtttttgttttcttttaataatgtgtgaattccagggcagatc

SEQ ID NO: 20533 - DNA, 599 bp, Chicken  19866894231100_1
  misc_feature (1)..(187): n is any nucleotide
nnnnnnnnnnnnnnnnnnnnnnnnnnnnnnnnnnnnnnnnnnnnnnnnnnnnnnnnnnnnnnnnnnnnnnnnnnnnnnnnnnnnnnnnnnnnnnnnnnnnnnnnnnnnnnnnnnnnnnnnnnnnnnnnnnnnnnnnnnnnnnnnnnnnnnnnnnnnnnnnnnnnnnnnnnnnnnnnnnnnnnnnnnnattcatggttcggttgtggttttgttgctgttgttttttgtgggtttttttttttcacatttagttaatgagaatagtgaatgaacagtgagaatggtgaacagtcaacagtkgaaaaaatatataataatacttcagggaaagcagcgtttagttccgttcctcgaggctggttgaaatctcagttgtctgagtgcagtgagttccgcgttctcagctgctctgtgataaatgccacagccacacagcaggacgggcacgctctgttttattcggtttggtaaaaaagccgaacagacaacaacaggaaacaaccaatgctttgaggagttgatggggagactaaagtgtctcctggtagggtgaaggatagtcgtgctaggttaaggagtgatgaagaacacaataaaca

SEQ ID NO: 20534 - DNA, 600 bp, Chicken  19866894231110_1
aagtaaatgaatcaaatccgaacttcatttatgcagcctgtcattattaaaagcagaataactagatatatgcattcattattcttccttgtctaaatatgctgctattaaacaagatagcactggaaatcttaaatttgtttgaaataaaatttctctttatatacaacattttctgtgctgtaatttttgtaagccattttccaaaactcctgtttctagacagacaaatacttttctttttttatattagaacttaaatccaaataattgacatgatttgttctggtatcatcaagmactgtgttaattcaaatgctttatggttgcatttaatagaattttactcctgaatatcacattttcttccttaatatgaacactatgtaagcacaacgttttctttcaagtctttcactcatttaaaatattttaattgcacatgataagggaaaaaagttataaaacttatcatgaaagacaggtaagtaatttgttttgaaagatcttcaaaagaatcataaatgcagtgtcaagcagcttaaaaacaaacaaacaaaaaaaacccacagcctgctgcattccttttggcagagttgc

SEQ ID NO: 20535 - DNA, 600 bp, Chicken  19866894231130_1
aatgatctggtgtgttcacccatagagactccacttcctttgcttgatggttggttaacagctgtgaagttatgagagcttgtcatgatgttcaaatacagcagttcagtctttgtttaaattaatagcaggattctacctttgttgaatgttgcggttgcttttttatagcgatgtaaggaggggaggaatataaaaacataattgtgtgagctacagggcttggcagcttctgagtcctgagatgagagaagaaaatttgaaattcacactccttgttttgtttgttaggtcatgagrgaatgggaggaggcagaacgccaagcaaagaatttgccaaaggctgacaagaaagctgttatccaggtaaaggagaatacttctgcaaccttatcaactggaactgcaattaaaatgcaatggttgtgagtggtgatgtaatttcaaaacatatttacatggagatttaatgttattttctgctcttgctatctttgtttccagctgttaggggctgctggtgtctctgtacttagcacccaatccctagaacagaagtgcagaagagacagaatttgacttgtcatcagtgagaactga

SEQ ID NO: 20536 - DNA, 573 bp, Chicken  19866894231133_1
taatgaggtaatgcagtctaatgctatgcactgtggtgtttaatggtaaagcaggtaggtgtgatagcatgaattaatggagcagcagttttggggtattgctcactctagtgcatgtatagagactgagttatgattaaagactgcagcatcttatgtttttgtggcttcttacagtgctaattcttcctcccacttgttgttgtccgctttgaaatttgggctattgaagtttgatgcccattgctgtagcctgggacttgtatgggactgctgtgtgggaggatggtggcttcaaargatactgaggtgtgaagaggcactttctgattgatgcaaattatattttgagaggaacgtcaatatatccagaagcatgttatagagttgtgcatataatagtacatgcttagagcttttatctttggtacagctttctgagtttctttctcrgtgtagtaaataccaagttgtgtacttcttttctatagaatcataatatctaagggaagagacagatattgtgtttaggatatctgcctttttgatctcatgctgtgctgagaaaaagct

SEQ ID NO: 20537 - DNA, 420 bp, Chicken  19866894231133_2
ttatgtttttgtggcttcttacagtgctaattcttcctcccacttgttgttgtccgctttgaaatttgggctattgaagtttgatgcccattgctgtagcctgggacttgtatgggactgctgtgtgggaggatggtggcttcaaargatactgaggtgtgaagaggcactttctgattgatgcaaattatattttgagaggaacgtcaatatatccagaagcatgttatagagttgtgcatataatagtacatgcttagagcttttatctttggtacagctttctgagtttctttctcrgtgtagtaaataccaagttgtgtacttcttttctatagaatcataatatctaagggaagagacagatattgtgtttaggatatctgcctttttgatctcatgctgtgctgagaaaaagct

SEQ ID NO: 20538 - DNA, 600 bp, Chicken  19866894231145_1
ttttcagcctgtcctttgtaaagcttttttacaatcacaggaatcccaaaatactagatcttaaggcaacttaccaacagtaaccgaagagttttatttgagtaattccttggctaaatagatcaaagcaattttggtaacacgcacaccaagtctaccataacatatttctgtaatgtagccaacatgtaccactgaccactccaccatcccaacacatctgcattttcctttcacacccaatcccacttttctctcattgctgaacagtatgtagctatcagtatttctgacacagcmacagttgtcaccaacctctgcaaacttcaagttgctgttgatgaaggaccactccagtaactgctgrattgtcgggactccaactttctcatttttgtccataaaaatttggtagaaataacagtcttgyactttctgacctgctgatctaaaaatagatttcaaaaaaaaaaaaatcagatctaccataacaacagctgtactttgcaaagaaaatattaactacaagaaaacagtctctacagcatcctttttactttgaaatatatgtgcttaaaaaaaaaaagccagcaacaacaa

SEQ ID NO: 20539 - DNA, 600 bp, Chicken  19866894231145_2
aacttaccaacagtaaccgaagagttttatttgagtaattccttggctaaatagatcaaagcaattttggtaacacgcacaccaagtctaccataacatatttctgtaatgtagccaacatgtaccactgaccactccaccatcccaacacatctgcattttcctttcacacccaatcccacttttctctcattgctgaacagtatgtagctatcagtatttctgacacagcmacagttgtcaccaacctctgcaaacttcaagttgctgttgatgaaggaccactccagtaactgctgrattgtcgggactccaactttctcatttttgtccataaaaatttggtagaaataacagtcttgyactttctgacctgctgatctaaaaatagatttcaaaaaaaaaaaaatcagatctaccataacaacagctgtactttgcaaagaaaatattaactacaagaaaacagtctctacagcatcctttttactttgaaatatatgtgcttaaaaaaaaaaagccagcaacaacaaaatgccttcagtaacaggcaaccatgcaaccattagatgtggactgactgtagaaaaactatttaaa

SEQ ID NO: 20540 - DNA, 600 bp, Chicken  19866894231145_3
attttggtaacacgcacaccaagtctaccataacatatttctgtaatgtagccaacatgtaccactgaccactccaccatcccaacacatctgcattttcctttcacacccaatcccacttttctctcattgctgaacagtatgtagctatcagtatttctgacacagcmacagttgtcaccaacctctgcaaacttcaagttgctgttgatgaaggaccactccagtaactgctgrattgtcgggactccaactttctcatttttgtccataaaaatttggtagaaataacagtcttgyactttctgacctgctgatctaaaaatagatttcaaaaaaaaaaaaatcagatctaccataacaacagctgtactttgcaaagaaaatattaactacaagaaaacagtctctacagcatcctttttactttgaaatatatgtgcttaaaaaaaaaaagccagcaacaacaaaatgccttcagtaacaggcaaccatgcaaccattagatgtggactgactgtagaaaaactatttaaaaaacaaaagcaccgtaagtatgttttaaagatgtttttatattactgaattaccgactcaaat

SEQ ID NO: 20541 - DNA, 600 bp, Chicken  19866894231150_1
aaaatgtgtttaaatatatcaaaccaatcagccgttttctttgctaagcccaaatgtatagaaggcgatatcagaaaagagaagtaataaggaatagaggtgtgaggaggaggcaaaaataacaaaggtatacctagaatagctttggggaggcaattattatttttaattcttgggagctaatatgattgcagaattaaattgaacacgtgacttgaattaaaaccacttatttgtcattcatctgccaaataattgatatcccagggttctccctcgaggatggaatatcacaaaacrtgattacatgtacaggttgggtattttgttttaaacaaaacagaatgtgtaacatcctcaacaaaacacagcatgagatgcaatgggagctgtatccacagattcccagttctttccaagagatttctggatcatggttagaaagtaagggtaaaaggatgtatcmtcctgttgactgttcaaattatwttactatagtactggggaaaggtaccagcttgcagaactggaacagaggggttgatacattcttgcatcagatacaggctttaggaatacagctacaaaagaaaacattac

SEQ ID NO: 20542 - DNA, 600 bp, Chicken  19866894231150_2
taattcttgggagctaatatgattgcagaattaaattgaacacgtgacttgaattaaaaccacttatttgtcattcatctgccaaataattgatatcccagggttctccctcgaggatggaatatcacaaaacrtgattacatgtacaggttgggtattttgttttaaacaaaacagaatgtgtaacatcctcaacaaaacacagcatgagatgcaatgggagctgtatccacagattcccagttctttccaagagatttctggatcatggttagaaagtaagggtaaaaggatgtatcmtcctgttgactgttcaaattatwttactatagtactggggaaaggtaccagcttgcagaactggaacagaggggttgatacattcttgcatcagatacaggctttaggaatacagctacaaaagaaaacattacttctgtggtggagtatttgagaggaaaaccctgataacctaaaaaggaaaggtcaagaaaggtgcccagcagcatgggcttttgctggcatctacctgctgcaccagtgctgcttcccaggcacactggagagccccaaaggctgacactgcactcctactgcaaa

SEQ ID NO: 20543 - DNA, 600 bp, Chicken  19866894231150_3
tgcagaattaaattgaacacgtgacttgaattaaaaccacttatttgtcattcatctgccaaataattgatatcccagggttctccctcgaggatggaatatcacaaaacrtgattacatgtacaggttgggtattttgttttaaacaaaacagaatgtgtaacatcctcaacaaaacacagcatgagatgcaatgggagctgtatccacagattcccagttctttccaagagatttctggatcatggttagaaagtaagggtaaaaggatgtatcmtcctgttgactgttcaaattatwttactatagtactggggaaaggtaccagcttgcagaactggaacagaggggttgatacattcttgcatcagatacaggctttaggaatacagctacaaaagaaaacattacttctgtggtggagtatttgagaggaaaaccctgataacctaaaaaggaaaggtcaagaaaggtgcccagcagcatgggcttttgctggcatctacctgctgcaccagtgctgcttcccaggcacactggagagccccaaaggctgacactgcactcctactgcaaacttagaaaaggtagaaaattaga

SEQ ID NO: 20544 - DNA, 600 bp, Chicken  19866894231156_1
tttcccttgtgttactaccccctccagccttgatttattttgtctaaccaagccaagatcattttttaatcaaactttcttttgccttcaagtggttttgcatatttgtccatctgtactcttcagctcaaataataaaacagctctaacattaaacaagccactggaatgtctttttctttttaatttattaaatacagataaccagaatgttatgttgttatgcatgttgtattgcagatagattttaattagtgcccaatatttttttagctcacctgatatgactgagcgcagttkttactttttttctactctgcttcagcaatgactcacagacatcccagggatgtgttgttttcaaatatttgactcaaaatgcataactactacttaatttcttagacacatggctttgctttatctcctttgtttagagaaaaatcttttacttaccacaggcagcaattcctactttctgccattattagtagtgtttgcttaaaacctgtttctagaaggtcaaaatttcccataaatgcagtaaatctcccccagcactaatatttctctttctaataacattatgggcgatcttta

SEQ ID NO: 20545 - DNA, 600 bp, Chicken  19866894231157_1
tgaggtgagactgataggtctgtagctaccaggatcagctttccagccttttttgaagatgggcatcacatttgccagtctccattctgccagaacttaccatgtctattcagaagtggggttagcttctggaggtcagcagggctctggacttacataaatacataggtcagtggacttacatatatacaatagtacagattggggaaagggagaactttcgcttattgtagatgggttcgggtttcctgcaaacatccagagctgggaagcagcttgggccgttccgttatgtaaaaytgcctgttgttgaggtgactgcacaggacctgctgctctgggggcaattgaagatgagaaatgtgatacagggatgtctatggcattctgcgttccagcatgaagaggcagaatggcatctacaaatcatgctaccaccacaacatgattacagctgtagaagcaccccatcgtgcactgggttggagatcattacctcccagatcaagacaaatgcaaatgtgcttaagtagctcaaatactccacaagagaaagttcaactatgcattcacaaatgtattcggtgctgaaatttggtt

SEQ ID NO: 20546 - DNA, 600 bp, Chicken  19866894231158_1
tagagttaaagggacaagggctggaggcaatcttcaatccttcacacaaaatggagttgagtcagctaataagttaattttatagtcagtgtgtaaggacagaattgattgtaaagcataattttcctagaaaagcagatcaggaagcagattgccgctttattttgttttcagacttacctcaggcattacctgtccagagtcttccatgtcttcacggatcccatcctcagcacagcagctggaggattaagttgcatgaatgtgcagtccagaagccagtcttcaggtcaagaaagyctcttatggctttgtgaaagcagtggtagctctttctgtggttaagcaaattattatgacccgtctagatctatgggagctgcagggagtgaaaggatgggtttcctaagcttccaaacttaggaaagatagagtcactctgccagttttgccagcacctgtatccagaagaacaattggcgctcactgtgtgtatttgctgtttatattttttacatttgtaaattgcagacttggtcacataggtatctctacatgacagtgctgtacaatagggacatgttctttgggaggactcta

SEQ ID NO: 20547 - DNA, 599 bp, Chicken  19866894231159_1
  misc_feature (1)..(169): n is any nucleotide
nnnnnnnnnnnnnnnnnnnnnnnnnnnnnnnnnnnnnnnnnnnnnnnnnnnnnnnnnnnnnnnnnnnnnnnnnnnnnnnnnnnnnnnnnnnnnnnnnnnnnnnnnnnnnnnnnnnnnnnnnnnnnnnnnnnnnnnnnnnnnnnnnnnnnnnnnnnnnnnnnnnnnnnnnatgtttgtacttgatcctggctctccaggcttctgcagagagtgtagctgtctcctagcagtctctggtttgtctctacagaagtgccactggcagcaagagcagagatttttctgagaagtgcagcaacrtttgctatataacctttgttttctcttccctacagttcatggcacaggggaaagccggcggcagcagctccccaccatccaccaccccaaagcctggcagtcagctggacaccatgctgggaagtctgcagtctgacctgaacaaactgggggtagcgacggtcgccaagggtgtgtgcggagcctgcaagaagccgattgctgggcaggtgggttgaaggtgctgtctcattgccgagccttggcctgcagctgggagcagtggggagggcttctttcgtgaggctgaagagactgga

SEQ ID NO: 20548 - DNA, 599 bp, Chicken  19866894231177_1
  misc_feature (1)..(38): n is any nucleotide
nnnnnnnnnnnnnnnnnnnnnnnnnnnnnnnnnnnnnnatttcatagaatacatttagatcaggaaacttctattttcttattatgcgtttgaattctttaaggaaaataaaaaagaggaaaacgttatgtaagcactgatgtttgggtgttccttgcagtgagtggtcctaattgagaacaaatttttacaggaactaagttgaaatacaaaatatacttcccaagttgttctgatgaaaagctatggattcccacttgcttctgtgcagaatttaaaccttgtgtgagatttcaaagraagacttttgaagytgattcttttctcctgaaaattattcaccaaattyatcacctgaaaggcaatgatgyttctgactggcaatttgcatattttatcagctatctggtggaatgtagtgtccttttcattattctgtgctattctctatgcagtgtaacaactatggcaatctgaaaaatgactggtaacattaawtttttttttgtcagaaaaggagtaggagacttactcatgagaaggtcatactggaatgttaaaaatatttttaaaaaatggtgaaagtgagacacagaagc

SEQ ID NO: 20549 - DNA, 599 bp, Chicken  19866894231177_2
  misc_feature (1)..(24): n is any nucleotide
nnnnnnnnnnnnnnnnnnnnnnnnatttcatagaatacatttagatcaggaaacttctattttcttattatgcgtttgaattctttaaggaaaataaaaaagaggaaaacgttatgtaagcactgatgtttgggtgttccttgcagtgagtggtcctaattgagaacaaatttttacaggaactaagttgaaatacaaaatatacttcccaagttgttctgatgaaaagctatggattcccacttgcttctgtgcagaatttaaaccttgtgtgagatttcaaagraagacttttgaagytgattcttttctcctgaaaattattcaccaaattyatcacctgaaaggcaatgatgyttctgactggcaatttgcatattttatcagctatctggtggaatgtagtgtccttttcattattctgtgctattctctatgcagtgtaacaactatggcaatctgaaaaatgactggtaacattaawtttttttttgtcagaaaaggagtaggagacttactcatgagaaggtcatactggaatgttaaaaatatttttaaaaaatggtgaaagtgagacacagaagcaacagataatcaat

SEQ ID NO: 20550 - DNA, 600 bp, Chicken  19866894231177_3
tacatttagatcaggaaacttctattttcttattatgcgtttgaattctttaaggaaaataaaaaagaggaaaacgttatgtaagcactgatgtttgggtgttccttgcagtgagtggtcctaattgagaacaaatttttacaggaactaagttgaaatacaaaatatacttcccaagttgttctgatgaaaagctatggattcccacttgcttctgtgcagaatttaaaccttgtgtgagatttcaaagraagacttttgaagytgattcttttctcctgaaaattattcaccaaattyatcacctgaaaggcaatgatgyttctgactggcaatttgcatattttatcagctatctggtggaatgtagtgtccttttcattattctgtgctattctctatgcagtgtaacaactatggcaatctgaaaaatgactggtaacattaawtttttttttgtcagaaaaggagtaggagacttactcatgagaaggtcatactggaatgttaaaaatatttttaaaaaatggtgaaagtgagacacagaagcaacagataatcaattacctgacaagtatgtactgactagactgcagcaca

SEQ ID NO: 20551 - DNA, 600 bp, Chicken  19866894231177_4
tattttcttattatgcgtttgaattctttaaggaaaataaaaaagaggaaaacgttatgtaagcactgatgtttgggtgttccttgcagtgagtggtcctaattgagaacaaatttttacaggaactaagttgaaatacaaaatatacttcccaagttgttctgatgaaaagctatggattcccacttgcttctgtgcagaatttaaaccttgtgtgagatttcaaagraagacttttgaagytgattcttttctcctgaaaattattcaccaaattyatcacctgaaaggcaatgatgyttctgactggcaatttgcatattttatcagctatctggtggaatgtagtgtccttttcattattctgtgctattctctatgcagtgtaacaactatggcaatctgaaaaatgactggtaacattaawtttttttttgtcagaaaaggagtaggagacttactcatgagaaggtcatactggaatgttaaaaatatttttaaaaaatggtgaaagtgagacacagaagcaacagataatcaattacctgacaagtatgtactgactagactgcagcacagacttgtatcagactgcagaac

SEQ ID NO: 20552 - DNA, 600 bp, Chicken  19866894231177_5
aagttgaaatacaaaatatacttcccaagttgttctgatgaaaagctatggattcccacttgcttctgtgcagaatttaaaccttgtgtgagatttcaaagraagacttttgaagytgattcttttctcctgaaaattattcaccaaattyatcacctgaaaggcaatgatgyttctgactggcaatttgcatattttatcagctatctggtggaatgtagtgtccttttcattattctgtgctattctctatgcagtgtaacaactatggcaatctgaaaaatgactggtaacattaawtttttttttgtcagaaaaggagtaggagacttactcatgagaaggtcatactggaatgttaaaaatatttttaaaaaatggtgaaagtgagacacagaagcaacagataatcaattacctgacaagtatgtactgactagactgcagcacagacttgtatcagactgcagaactggaagtggacaatgtctatgagtatacagtgtctgatagcctgaagagatatgaataatcttttgtttccagtgaggtaatataagagtacagtattctacactgcagtagaataattaaaaacaa

SEQ ID NO: 20553 - DNA, 600 bp, Chicken  19866894231177_6
tttagctgacacggaaaagcagcaacgttctactgaaaatctgctcaaggagaaagaaaatcatattaaagaacaaaactgtaaaataagtaaaatggaggaagagttggaagctttgcagagactccttgaattcaagcagagagaatgtgaagaattaaaagaagaaacaaatgctttttctcaatggagaaatgaaaatgatcacgttataaataaactgaagttggaaaaggaagatatgctgattcatataagggacttggagagctccctccaaagccagcaaattgaaaatcrtgaacacagtgagaaattcaaaataatggaaactgaaagagacaggaagaacatagaaatcaaagagcttagagacatgctaggatgtaaaagtgcagaattagaagaacagaaaaaagtttgtgatgaacttcgacaagaagcggaatgttctgataaaaagtactgtaaagacatagaaaatatgtcctgtaaaatattacagcttaccaaccaagttagtgaactagaagaaaagatacaattagcagcaagtgaaggattgcaaagggagcaatattatcatgaactgcttggtga

SEQ ID NO: 20554 - DNA, 600 bp, Chicken  19866894231193_1
agaaagtgtcatggttagtggcccagaaatatctaaattggccaccacgacggtacactctgccctcagacaaagattatatgcgggtgtccaattccctgaaaaaaaccattctatagtcgattggctaatggcagcatgctgcatcgtatggcccaacaaatcagacttaccattaaattcaggcttatggtccaccatggaggagctttgaaattatattagcgatctgggcataagagaagcgatatatgaggactcatttgaaggtccagatatggttaagttctctgcaggcaygagagacttaattttacaacaggcccctccccatttatatgggaccttggtctccttattaaacccccggtggcctcagaggcagtggtccaggaggctgcccaactagcagctgacctgggggagacagagcgcttaaggaccaggtgcaatatctggccggtggaggaagcagaggttctcctggtaaccaaaaagccaattacgtgacaccctcaactgggacccrtaagggtctcacgaaagcaaacgtttaatgatcttatccaggctggagtccagtttgcaaaaattgatcgc

SEQ ID NO: 20555 - DNA, 600 bp, Chicken  19866894231193_2
ctgggcataagagaagcgatatatgaggactcatttgaaggtccagatatggttaagttctctgcaggcaygagagacttaattttacaacaggcccctccccatttatatgggaccttggtctccttattaaacccccggtggcctcagaggcagtggtccaggaggctgcccaactagcagctgacctgggggagacagagcgcttaaggaccaggtgcaatatctggccggtggaggaagcagaggttctcctggtaaccaaaaagccaattacgtgacaccctcaactgggacccrtaagggtctcacgaaagcaaacgtttaatgatcttatccaggctggagtccagtttgcaaaaattgatcgccaacccaatcacatcctccttcagctgtggaaacagctgaaggacgatcagaaatttcagaatcaccccagaaaaccgagggtaagaactatagacggactaccaaccacaacatggaacttagaggacaccatagtccctaataggagaaagaagccccctcaagtgtctcaggccacaatgcctgagccacctgaaacaaaagatttatccctagcacaattcatgg

SEQ ID NO: 20556 - DNA, 600 bp, Chicken  19866894231194_1
ctttgtggtttttcatcagagagattttctgttcttgaaactttgcttcaaaatttgtatcttgcagtttactaaaacagccaagctttaggagatagcgtattgtataattgcatacttctaaatgagaagcaaggaacaagcatttatcctttttggaagattgcaatgaggagtcttcctgcgtggatcttatctactataaccttacaagttcatcaaactgaagcttaaaccactttatacattaaaagaaaaagcaattaagcaaccctccctcctaagaaataatagttgtaytgttcaaaggaattcctaaatgttccttttaccttgttacagttctttctgcatattattttggcttctcatatgtattagtggctggtactgttaaggtggaatcaatgcattcttctccaacaagattttccatcaatcaatgatattacttgatgtgcattcctycctgtgatttctcactgycatctcctggtgtttattgttgattctttacttggtgcacatttgtcagctagtacagttatatttatgagcacttaaaatattatccagattgtttgttgtgtatagtgagac

SEQ ID NO: 20557 - DNA, 600 bp, Chicken  19866894231194_2
atgaggagtcttcctgcgtggatcttatctactataaccttacaagttcatcaaactgaagcttaaaccactttatacattaaaagaaaaagcaattaagcaaccctccctcctaagaaataatagttgtaytgttcaaaggaattcctaaatgttccttttaccttgttacagttctttctgcatattattttggcttctcatatgtattagtggctggtactgttaaggtggaatcaatgcattcttctccaacaagattttccatcaatcaatgatattacttgatgtgcattcctycctgtgatttctcactgycatctcctggtgtttattgttgattctttacttggtgcacatttgtcagctagtacagttatatttatgagcacttaaaatattatccagattgtttgttgtgtatagtgagacatggatcggtaaaggttgtttagcatgtccagcttgtctctggcttccctgtcccttctgtgatttttctatctaggtaaaaattagaaagtgttttgaaaagagctcccttgtccaaaggtatatttttatttcaacttttcagctctgaatggctatcccaataat

SEQ ID NO: 20558 - DNA, 600 bp, Chicken  19866894231194_3
tggatcttatctactataaccttacaagttcatcaaactgaagcttaaaccactttatacattaaaagaaaaagcaattaagcaaccctccctcctaagaaataatagttgtaytgttcaaaggaattcctaaatgttccttttaccttgttacagttctttctgcatattattttggcttctcatatgtattagtggctggtactgttaaggtggaatcaatgcattcttctccaacaagattttccatcaatcaatgatattacttgatgtgcattcctycctgtgatttctcactgycatctcctggtgtttattgttgattctttacttggtgcacatttgtcagctagtacagttatatttatgagcacttaaaatattatccagattgtttgttgtgtatagtgagacatggatcggtaaaggttgtttagcatgtccagcttgtctctggcttccctgtcccttctgtgatttttctatctaggtaaaaattagaaagtgttttgaaaagagctcccttgtccaaaggtatatttttatttcaacttttcagctctgaatggctatcccaataatcaaataatcactttccta

SEQ ID NO: 20559 - DNA, 600 bp, Chicken  19866894231200_1
gttctatgactaaatcttaatttaaactgctgtagttaatgagcaaaactcttctctgtcacattagtatacttgctgccctgaaatgtcttgatgatgaatcttacaaaatcatagaaagtgttctttttttaatttgctcctcagaagcattaagtgtggcttcaggaaaaataatgaatgtgatccctggggtgtgtaaaatcaaccgattttgtctgtgaagttgccatattgtattgaagtaacattcaaacatcccaccttgtttatgtggtaggtgtaaaaattccaaagccrtaacaggttcacatggaaacagtaaacacatgggtaaaaacaatggtttggagcatgtatatttacagaattacaattgagcaccctgatgtagctgtcaccctgctgattgcaggggagttggactatatagcccttagtggtcccttccaactcaaaatattctatgattctgtgaaataaggaaaaaaagaaaaacatatagaaaactgtgacagcaaaggatcattgaagaaaagtgaagaaaaaaattcttcattcttctaatagagaatgagatcccatagaccgtaaatgagt

SEQ ID NO: 20560 - DNA, 600 bp, Chicken  19866894231216_1
acagcctgctggttgtgccaggacgttcctaaaaggtttctaagtgtcaggcagggatggtgaacctgctgcgtgctgtattccataggtgtgggttatcccatactgtgttggtcccaaagcagagcagggacagggcgaggagctgtgacccaagggacactctgagggtgtgacagcagtgagcaggaggtgccactcagccctgctgtgaccttctgcttgtgtcaccccacagcatcacctcccgctctgagtgtctgtgtcatctgtgtcaccacagtgccctctgagtcacaycaggctgatgggcagcgtgtcagtcagaagctgaagccttaaagaagcatagaatcatagaataccagaatggcctgggttgaaaaggaccacaatgcccatcctgttccaaccccctgctatgtgcagggtcgccaaccagcagcccaggctgcccagagccacatccagcctggccttggatgcctgcagggatggggcacccacaaaagaagtttcctcccatgggcgccaccaccctgctgtccccacacagtgcccgagggccgaatcaaggcatggggcactcttgtgctgttc

SEQ ID NO: 20561 - DNA, 599 bp, Chicken  19866894231222_1
  misc_feature (1)..(98): n is any nucleotide
nnnnnnnnnnnnnnnnnnnnnnnnnnnnnnnnnnnnnnnnnnnnnnnnnnnnnnnnnnnnnnnnnnnnnnnnnnnnnnnnnnnnnnnnnnnnnnnnnntcaaatgacacatacagagcttgtaacactggccatttcctcctagctgatggcccttgcagcattccaatgggcaaaattattcctccagcaacctaactaacccacatgtttatttccttcagtggcttgatgctgagcaccaagtacctttatcagaggcagtgtggtaaccttctaaacagtctttgcatctcccctrttccctgtttccctatggactggcattccacacagccctcattagtaactttctagctccctgttttacaccacgacataaagccacagataggatgctgtaaggggaatctgattcctaatctgtacctaccgtgatcttctttgtaaagttcatttacagcttttcttctctcacattcctgcaagactgtgagcctttcaagatgcagagtgtaccatagcatgcattcacagaactgctagtgcaacagatcctgtaggcacggttatagaacaaacagcactaaaaaacacatc

SEQ ID NO: 20562 - DNA, 600 bp, Chicken  19866894231222_2
taccgtgatcttctttgtaaagttcatttacagcttttcttctctcacattcctgcaagactgtgagcctttcaagatgcagagtgtaccatagcatgcattcacagaactgctagtgcaacagatcctgtaggcacggttatagaacaaacagcactaaaaaacacatctgagtcatatttacctgaaacttagtgccaaggtagacagcagacggcagaattctgctactctacagttgattaaagtatctgatatttaagggcctcgcaagaggagatatacattatcttgcttttycaagcctcacgcaggagaaactcttaatgaatacaagagtggacaagaagcatgtacattttaaaaggtaactcacaaagctgctattagagatcatttgaggaaagcagtcgttaaaggtaatggttctgtggttgtaattatataggactgtgctaggctgtgaagacaatacaactcagacctcagtgtaaatgtgactagggcttcccacggttatatgaatttttatccatttccaggtcagatagactcaaagaagccacaaggatttcttttcacatacttaaggttaattca

SEQ ID NO: 20563 - DNA, 600 bp, Chicken  19866894231222_3
agcctcacgcaggagaaactcttaatgaatacaagagtggacaagaagcatgtacattttaaaaggtaactcacaaagctgctattagagatcatttgaggaaagcagtcgttaaaggtaatggttctgtggttgtaattatataggactgtgctaggctgtgaagacaatacaactcagacctcagtgtaaatgtgactagggcttcccacggttatatgaatttttatccatttccaggtcagatagactcaaagaagccacaaggatttcttttcacatacttaaggttaattcacyattttcctggattggggctacaatcctcataaccttgcaaatgtcagactgtgcaaaggaaaatctgtattcccctattacttagatattgccacccagraagaaaaaagttatgtgaaaatcttgcaaacaaacaaacaaaaagtcctggtcacagcaatcaatttcccctcaccccaccccttgtacgtaatttaatagtcctcaactgttccactaatataacagttataaatttggcatgtgatccaatggactaatcattcagagacataactccagtcagcagcattcattcct

SEQ ID NO: 20564 - DNA, 600 bp, Chicken  19866894231222_4
gaaagcagtcgttaaaggtaatggttctgtggttgtaattatataggactgtgctaggctgtgaagacaatacaactcagacctcagtgtaaatgtgactagggcttcccacggttatatgaatttttatccatttccaggtcagatagactcaaagaagccacaaggatttcttttcacatacttaaggttaattcacyattttcctggattggggctacaatcctcataaccttgcaaatgtcagactgtgcaaaggaaaatctgtattcccctattacttagatattgccacccagraagaaaaaagttatgtgaaaatcttgcaaacaaacaaacaaaaagtcctggtcacagcaatcaatttcccctcaccccaccccttgtacgtaatttaatagtcctcaactgttccactaatataacagttataaatttggcatgtgatccaatggactaatcattcagagacataactccagtcagcagcattcattcctcccagcatcaaaagtcctaagcaacgaatggtgctgattagtcacagctgaagactttcagagccccaacatgctggttttgtattaattttcaccaaat

SEQ ID NO: 20565 - DNA, 600 bp, Chicken  19866894231235_1
cttctcacttcatgtccattagaccaggttgaatctacagactttgaagataggcaaatggctgttacagtatgagcacacaagtagaaaacattactctgatgagaacatttattgtgtagtagtatatctatgatatctgtaccttattttgcacttgactgtataagggaggatgagtttaaaccccctcaaatctcagctttctctttaccatacttcactgtttctctaaaaactttgtctgttttgttggagatcaacctcagttttaataactaggtgagaatggtatcactrgttgatattcttatttaagacaaaagtttgaaacagtyttgattctctttttaatttggggggtggcaaaatgatatgcagcctgaacaggttgtatattttagtatgaggcaatcagaactttgattttaatcttcagtgagcctcagagaggcttaagtgtttctgagctctcaagaggatcttcatgttgtgtaatacattctggaatggaaaagcactgatgactttcattcttgcttttttgttcagtagaaatttttgttgcctttcagaaactgaggagttttatctatttat

SEQ ID NO: 20566 - DNA, 600 bp, Chicken  19866894231235_2
agactttgaagataggcaaatggctgttacagtatgagcacacaagtagaaaacattactctgatgagaacatttattgtgtagtagtatatctatgatatctgtaccttattttgcacttgactgtataagggaggatgagtttaaaccccctcaaatctcagctttctctttaccatacttcactgtttctctaaaaactttgtctgttttgttggagatcaacctcagttttaataactaggtgagaatggtatcactrgttgatattcttatttaagacaaaagtttgaaacagtyttgattctctttttaatttggggggtggcaaaatgatatgcagcctgaacaggttgtatattttagtatgaggcaatcagaactttgattttaatcttcagtgagcctcagagaggcttaagtgtttctgagctctcaagaggatcttcatgttgtgtaatacattctggaatggaaaagcactgatgactttcattcttgcttttttgttcagtagaaatttttgttgcctttcagaaactgaggagttttatctatttatttatttacttatttattttacctgaggaacctttatct

SEQ ID NO: 20567 - DNA, 600 bp, Chicken  19866894231235_3
attcttgcttttttgttcagtagaaatttttgttgcctttcagaaactgaggagttttatctatttatttatttacttatttattttacctgaggaacctttatcttatcctgcagggctgcaggcagaatacctcatctttttcacagcaccctctcttccttctgtcccccaggagccagtgctcagccaaggcagtacatctttgcgtatgggtagcaataatagagataaataatctcagatggatgcctcacaggtgttttcaccaagtttcaaagctgtcaatgttacttaatrgatgtaatttccctaattgtttatctgcctctggttttggtcttccttctcttcctgttttcttgattaaaactgttttattagttcctgaacgtgagcagtattactctcttctctgtagaaagaagcagacacaaaagagagatctgtttttgatatcccaatattcacagaagaatttctgaatcatagtaaaggtaagttaagcttttgcaggatccctcttcatgttttctggagttcttgctgctgtccacttgaagagtccttgtgctgtcccacctcagctaaataatgact

SEQ ID NO: 20568 - DNA, 599 bp, Chicken  19866894231236_1
  misc_feature (1)..(20): n is any nucleotide
nnnnnnnnnnnnnnnnnnnnacacatgagaaacctgatctggaatatgacctggcttcatggcctctgtctgtcctagttggtaccaaaatgatctgaagacatttagcgtctataggtgtaacattgcaggactctgggtctctttttcatttatgagaaccagatctaataattacactgatttctaggatatcagaaatgactgattctgtcagcgtctgctttgtaacactgagacatgtacagaacccagcaagagataaatgaagacaatctgtaaaacttaaaagctttgtgwcgtgcacgtgtgtatgwatatgtgtgtaattgtgatattaaggctactgtgggagctgatagcagttccttgttcccagatccaggtatgtactctggctttatcccagctgtatgttcggatgagatcactgtgtacacccttgtttattcacaccctagaaacatgtcatggtatctgctgaaaggacactcagctacttagtccaaaaagaagctggagtgcagttatccaagtccacatgttatccaacttgagatggagactgtgagtttagcactcagcttagatgcagttat

SEQ ID NO: 20569 - DNA, 599 bp, Chicken  19866894231236_2
  misc_feature (1)..(3): n is any nucleotide
nnnacacatgagaaacctgatctggaatatgacctggcttcatggcctctgtctgtcctagttggtaccaaaatgatctgaagacatttagcgtctataggtgtaacattgcaggactctgggtctctttttcatttatgagaaccagatctaataattacactgatttctaggatatcagaaatgactgattctgtcagcgtctgctttgtaacactgagacatgtacagaacccagcaagagataaatgaagacaatctgtaaaacttaaaagctttgtgwcgtgcacgtgtgtatgwatatgtgtgtaattgtgatattaaggctactgtgggagctgatagcagttccttgttcccagatccaggtatgtactctggctttatcccagctgtatgttcggatgagatcactgtgtacacccttgtttattcacaccctagaaacatgtcatggtatctgctgaaaggacactcagctacttagtccaaaaagaagctggagtgcagttatccaagtccacatgttatccaacttgagatggagactgtgagtttagcactcagcttagatgcagttatttggcaatggaaagagt

SEQ ID NO: 20570 - DNA, 600 bp, Chicken  19866894231240_1
tttatcttccttactagaagcattaccacagccagaatcctcaaacacaatagaggaggaggtcccttccctcacaggaacagcaggaagacagacttccagggagtgatccaattcagagtgacccaagtcattactgttgatagtactgtcttctacatcacagcctgtaagaacactgtcctgaaggtttaatagtggatcttctgactggtgcaagaccctgttgtctgaagcataaaattccagaggagagaactcactttcagatgaatcagactgactacgtggtattcccayagagaaagaccttcccttctccaatgaagtagcaataacttcattgtggtcctttgtagaaaatggctccgttctgatcttaaatgatgggacatccattggactgggagaactgagtggccaatcggtgctaagaaaacaaaatgaagaggtcagtactacagaacttcatcccactagaatgcattttcagaagactttttctgaaaataaagtaccgcaccaaaacaggaaataactacccatgtgtgggaaccactaataagcaggatttgtcacctatttttctcagcaagtaca

SEQ ID NO: 20571 - DNA, 397 bp, Chicken  19866894231252_1
ctgtgcgtaacctcacatattgtcaggaccctaaccgtaatctcactcagtggggtagagtgggcattgaatattcttacatcaaacaaagcatttgagtttgtgtgccatttaattcattgttatgcaaccacattttaagatatttttatttttttaagtagtgtattttgtttctttggaaaatgtcaagtgtgtgcaagtctgtatctatatacataaaaaaaacctcatgtagtaactgctggtgtatgtagtatatactttatgaaagtagtcaatgtgataaataccattttycttatgcaagggacactgtttgtccaagaaaataaccagctgtggaaaagtgcatccatcaggtgatattttcaccagctgtacacattattttttt

SEQ ID NO: 20572 - DNA, 600 bp, Chicken  19866894231261_1
ccaggaagactaaaatctcacttaaaaatgaaattaaagcttcaattctcatatggtcctctgaggggttgggtttcatgaaaaacacagaatactgtacagttatgctaaaaccacaggagatgcaatgtggggagtaaagcagctgcagagcatcctgagaactgtatcaatcacagcaacgtggctgctatctacgtagacgcattgctttatttattattacagatgctgctgtgcaagtctttgcatgcctgtaattatggagggctgttgtcccaagatgtcagcagcaaattracacccccctcaagttcacacactggccaggtgactgcaaacaggctggtgacctcatccaaatgtaaccaaaacctggggataaagctgaggtcaaaggactggaggcaccaccgtttttcctgcatttcaaaccctgctgtggaccccacgcagcaaactggagaactgtatgatagcactgctgacctctgctcacgtcagagctcagtgcctgacggggtgtttgctctgcacctgcacagaccttcttgcaatgcaaagcttggcaccaagcggcacagcgagcatgggaggctc

SEQ ID NO: 20573 - DNA, 600 bp, Chicken  19866894231279_1
acctcatctcgtcccttcccacgcccaggctcttgcatgttggccacatctgctgaccttatctgatttcctgactgtccgctttgcctctcatcccgtggaacttcttttggtagtatttgtgctgctataggttcttgactgcaataatttcctgtcgctggtgtgggtaagggaattctggggtctgtttttccatctattctgcagtttgtctgcatttggcaaagataatgagcttagttactgctcagtgcacagtgaattattttgctgtgctgcaactgaatgagaagtagrggagcatgagacagcacccagtctgctccatgacagaggccaggctcttctgttccatgggctgaccctccaatgcagtgtgcttatactttgtgcttccccgagggaggtattaggggcttaaaggcatgtggtatgagcattgaaacctttgcatcaagcagctgaaaacttgaagggtttcagttttaaaacaatatcacttagttcctcccctgggacaggggaggtttaggttagatattaggaggaagtttttcacacagagagtggtgacgcactggagcaggttgcccaagg

SEQ ID NO: 20574 - DNA, 600 bp, Chicken  19866894231281_1
ttcgatggcaattgatctgtcaaagtcaagaggcaaggcagccaggagggcacaactctgttgcctctcactctcttgcaatttgctgtgaataggaattattggctctttaccagaatatcttcagctgtaatgggggaaatggtagtcagaaatttttgatacctgtggcctcattgcactctacaacttcctgaagggaggttgtgatgaggaggggtttggcctcttctcccaggcaaataacaggacctgacgaaatggccagaagttgtaccagaggaggtttaggtgagacakcaggataaactttttgtctcagagggtggtcaggtactggaatggcctgcccagggaggtggtggagtcaccgtccctggcagtgttcaagaggtgtctggatgaggagctacgagatatggtttagtagcttgttgtaccaatgggaatgggaaggaggttggactagatgatgctgcaggtcgtttccaaccttgtgattctatgattctatgatttgcttatacatgattgccatgtatctccttgtccttctccctttaggattttagataagaatatcctcatatttaaatgcct

SEQ ID NO: 20575 - DNA, 600 bp, Chicken  19866894231282_1
atctacaaggaaagggcacttctgtggagctgtcctgtcttcctagtcaacatatagtgtctatttactttcttatccaggatgggggtttgcatctcagggcttcttagccaaagcttgcttacatctgttcttacttctcctacaggttctttgccttttgagggtatcacagtcaccatggattcccaacagatgaatggaacccagagggttgtgtttgacagagtcctgacagagtctgagtgtaaggacttgctccggttgacagaggtgatgcctgggtcttataggaattckatatgtgtcacttcctgagcaagcagtattgtaatgctgctgtagaggagagaaggcagcctaatgtatgtcctctgcatcattttgtttcaggcagcaagaggaacaggagatggctatcgagcgagacggtcccctcacaccccacatgagagatttgaagggttaaccgttctgaaggccatgcaggtgagtggctctgtgagcctgccatcttcttgtctggatgcaatagtcttacaggtctgcatagcttagaatagtggtgaaatttaaggtggaaggagcctccggagatct

SEQ ID NO: 20576 - DNA, 501 bp, Chicken  19866894231285_1
caccagctttacagttaagggcaaaaaaagcacttttgggctttggttaaggcatctgcacagctttgatttcatcctgaggcagccacacatctggctaagcagaattttctaaagcatctgtcctcttgtctgtgcaaaaatcaatcttcagatgatatcagactgtctgagaagtcccaggtctgttggtctcattcttttgaaagcctatcttctggaaatgaaaccttccactgaaaggcctccaccggatggttacaataaactgctttattaattggcgttgccgcatggctrgctgtgtggcagcctgctggaatatgtgtccacagagaaaccccatccctagtttgtatttcatgtcggcactcaaatgtttcccctggattcatttattttccaacagtttttctttctgtgctgcagtattgaatcctattttgggttgcagtggggtctttaaactctgttctctcctgtttgcatttgtttactttg

SEQ ID NO: 20577 - DNA, 599 bp, Chicken  19866894231289_1
  misc_feature (1)..(108): n is any nucleotide
nnnnnnnnnnnnnnnnnnnnnnnnnnnnnnnnnnnnnnnnnnnnnnnnnnnnnnnnnnnnnnnnnnnnnnnnnnnnnnnnnnnnnnnnnnnnnnnnnnnnnnnnnnnnaaatccaggatacaagcctgcacgtatatattggcaggtctgtgtatgctgagctgcagctttttccctatacaatcatctctgtgattgctcttggaccgagaactgtgcagagctgggactgcatcctgatagccaatcttccagctctgtcagagcgctgaaacagcacaataaataatacatatggaygtactctgatcaactataaagcccagaggagacacatgtaatcagtggaaacctttactagttggtggaaggttctgaccttcagagggttagtgaaatcaagtctgcgtgactggggagcagacacatctcctgaggctgacagacatgactggccccaggacaggacttggccccagcctccgtgcagcaccgccagacttctggtgttggccacagcagccrggtctctgtcacctggaggcagagcggctgccctgggctgatgctgaggagcaccaccaggctcaggtacccac

SEQ ID NO: 20578 - DNA, 600 bp, Chicken  19866894231289_2
gggactgcatcctgatagccaatcttccagctctgtcagagcgctgaaacagcacaataaataatacatatggaygtactctgatcaactataaagcccagaggagacacatgtaatcagtggaaacctttactagttggtggaaggttctgaccttcagagggttagtgaaatcaagtctgcgtgactggggagcagacacatctcctgaggctgacagacatgactggccccaggacaggacttggccccagcctccgtgcagcaccgccagacttctggtgttggccacagcagccrggtctctgtcacctggaggcagagcggctgccctgggctgatgctgaggagcaccaccaggctcaggtacccaccactgcagcctgaacagccttggccaagttatcttctagttttgtgttcctgatagtaagcccactgggtttatgtgctaggtggatggacagttaccaagctaaggctggatatagtttctaaacataygtttctgtatgtatgatatctatatctttatgaactgtgggataacctacaggtcccgtgactgtcaagaggaattttaaattaaagggagcagga

SEQ ID NO: 20579 - DNA, 600 bp, Chicken  19866894231289_3
ctcctgaggctgacagacatgactggccccaggacaggacttggccccagcctccgtgcagcaccgccagacttctggtgttggccacagcagccrggtctctgtcacctggaggcagagcggctgccctgggctgatgctgaggagcaccaccaggctcaggtacccaccactgcagcctgaacagccttggccaagttatcttctagttttgtgttcctgatagtaagcccactgggtttatgtgctaggtggatggacagttaccaagctaaggctggatatagtttctaaacataygtttctgtatgtatgatatctatatctttatgaactgtgggataacctacaggtcccgtgactgtcaagaggaattttaaattaaagggagcaggattttacctaaactcttctgtgtggtatactgtctccaaaaaagcagcacagccaaagaattcagacttctgctgcgggctgggcctcaaacagcacacgagctgtgcacgggctgaatccatggggtacacgaggactgtctgcaagctggggcagaggacaggatgtaaatctacaaggtaacagcacaagagttgagaagtc

SEQ ID NO: 20580 - DNA, 600 bp, Chicken  19866894231295_1
agacatttgtagagagtgttctttgaatttttactatgaccttcaaatttgcacccctttcttttgtcccttctctttaagctgcctcatccccatttctcttctgtcctacacatgagaggccagcagcggtggtgtaaattctgtgctggggtcctactgcttgttcttcaggtaccatggattcaaagctgacaagagctggagccatcctaagtatgttgagcagactgaaaaatgatgttttgttaaaggaaaaatggaagtgtagccagtaaccatccctcttcaaagtcatcyttttttccgatcatgtgaattgcctttaattgctatgaagaacataataaatattttgttcttctgaaaagttgttgtttgatgtctcaaacttttctttataaaaattgaggccagcttcaaaatactcagaagtgtgacttcactgaatgctcttaaaatccatatttagttcccaaataagtagcctaattttccgtaacactgtgtaatcagtaagtctcattgacctcactaagagtgtctgccttctcagcatttccaaaaatgaaagcaattttttgtagtcaaatatactca

SEQ ID NO: 20581 - DNA, 531 bp, Chicken  19866894231298_1
accgatctgtgcctggagcacacacatgttccaggaatggctccaccacggttctctgttgttttattacagatacaggacatgagcatcagctgccctggctgacagaccagccagcaccagcattgccaagaaacaaactgtacatcatctcattcttaaagaaacaaacagtaacttgctgctgagtgtctaagatgtatttccaaaagaggattactatattaagtacaaagcccctctaatcccatgtgctttctgaagacgtcataggttcatttttgtttttaatttttaaayggtacctaatggcagccctgggttcacaggaggaatctgaaaacaggaaatcccagcacagcactgcagggtgccttgggggtttttctcctgccatgaggggagcaagcagaccagtgctgctcctggggacctagtcatcagaatgactctatctcagtccttagctcttccaaccccatccacccagcagcactgttgggttagagcattctcattgcaagagttacc

SEQ ID NO: 20582 - DNA, 599 bp, Chicken  19866894231304_1
  misc_feature (1)..(93): n is any nucleotide
nnnnnnnnnnnnnnnnnnnnnnnnnnnnnnnnnnnnnnnnnnnnnnnnnnnnnnnnnnnnnnnnnnnnnnnnnnnnnnnnnnnnnnnnnnnnntcagggtatcctctagaccccatacaaaagagcagagtggtgggaaggaactggcaaatttacctttgaaatggcacttgtgtaagttttacatcacctttcttttgaaacagctgtacatgctcttatctccactccactatgttgcttgttctctggactaagtcaccgaagtgtcagaaatagagggtaaatgcagtgatcagrctattggtacttatttggacagtgaggtgtaatggaatctataggtacagtcctccagctggttctgtaggagttactatttctttaaaaattacctggggcatacayctcagtctactccaccatgcaggagctgaactgattgtggctttagagctaaaatcctgtaactggatctctgggtgactttgcaggtgctggttgctgctgtctgctccattattgtagcatctgtacagggtcaattgcctacctgatcaccattgagaacagatgctttttgctaggatgggtgaatt

SEQ ID NO: 20583 - DNA, 600 bp, Chicken  19866894231304_2
gaccccatacaaaagagcagagtggtgggaaggaactggcaaatttacctttgaaatggcacttgtgtaagttttacatcacctttcttttgaaacagctgtacatgctcttatctccactccactatgttgcttgttctctggactaagtcaccgaagtgtcagaaatagagggtaaatgcagtgatcagrctattggtacttatttggacagtgaggtgtaatggaatctataggtacagtcctccagctggttctgtaggagttactatttctttaaaaattacctggggcatacayctcagtctactccaccatgcaggagctgaactgattgtggctttagagctaaaatcctgtaactggatctctgggtgactttgcaggtgctggttgctgctgtctgctccattattgtagcatctgtacagggtcaattgcctacctgatcaccattgagaacagatgctttttgctaggatgggtgaatttgaggcacgtagctcaatgagtaggcttaattcctgagaaattcctatagtttgaagcctgtcgtgaaatgcttttgtcagagatggctgactagggactcttttattt

SEQ ID NO: 20584 - DNA, 600 bp, Chicken  19866894231304_3
tctactccaccatgcaggagctgaactgattgtggctttagagctaaaatcctgtaactggatctctgggtgactttgcaggtgctggttgctgctgtctgctccattattgtagcatctgtacagggtcaattgcctacctgatcaccattgagaacagatgctttttgctaggatgggtgaatttgaggcacgtagctcaatgagtaggcttaattcctgagaaattcctatagtttgaagcctgtcgtgaaatgcttttgtcagagatggctgactagggactcttttatttttcartctcctgcttctactatcagactttccttaaaagcaggcatggcaggggtttcttcacttctaactgaagtataggtgactatagtatgagygaggtaatagtataggtatagtatagtgaggtaaggagcctggaagcagtgagcagtctggtggtagtgaaatgctctattttcttgaagcaaagctttatttgctttcctgttaaacatgctggttggacctgyggggagctttatgaaatctttgcccttagaaggaaccttttgtgtggaatacctgtatcctgcagctgtaatt

SEQ ID NO: 20585 - DNA, 600 bp, Chicken  19866894231304_4
tgctgtctgctccattattgtagcatctgtacagggtcaattgcctacctgatcaccattgagaacagatgctttttgctaggatgggtgaatttgaggcacgtagctcaatgagtaggcttaattcctgagaaattcctatagtttgaagcctgtcgtgaaatgcttttgtcagagatggctgactagggactcttttatttttcartctcctgcttctactatcagactttccttaaaagcaggcatggcaggggtttcttcacttctaactgaagtataggtgactatagtatgagygaggtaatagtataggtatagtatagtgaggtaaggagcctggaagcagtgagcagtctggtggtagtgaaatgctctattttcttgaagcaaagctttatttgctttcctgttaaacatgctggttggacctgyggggagctttatgaaatctttgcccttagaaggaaccttttgtgtggaatacctgtatcctgcagctgtaattttttacccttctctaaccaactgttacatttttcctcatagagcaataacaagttggcaggcgtcctcttacctataatttttgtttttttt

SEQ ID NO: 20586 - DNA, 600 bp, Chicken  19866894231304_5
ttcctatagtttgaagcctgtcgtgaaatgcttttgtcagagatggctgactagggactcttttatttttcartctcctgcttctactatcagactttccttaaaagcaggcatggcaggggtttcttcacttctaactgaagtataggtgactatagtatgagygaggtaatagtataggtatagtatagtgaggtaaggagcctggaagcagtgagcagtctggtggtagtgaaatgctctattttcttgaagcaaagctttatttgctttcctgttaaacatgctggttggacctgyggggagctttatgaaatctttgcccttagaaggaaccttttgtgtggaatacctgtatcctgcagctgtaattttttacccttctctaaccaactgttacatttttcctcatagagcaataacaagttggcaggcgtcctcttacctataatttttgtttttttttccttagaatgtgcatccttaggtccatctgcagagtctcccaggcgtgggttgtgctctactgatgggcggttctgcaaccactttctatatagcagtatccaaaatgtgtgtttatttttgcagctccagaag

SEQ ID NO: 20587 - DNA, 599 bp, Chicken  19866894231310_1
  misc_feature (1)..(151): n is any nucleotide
nnnnnnnnnnnnnnnnnnnnnnnnnnnnnnnnnnnnnnnnnnnnnnnnnnnnnnnnnnnnnnnnnnnnnnnnnnnnnnnnnnnnnnnnnnnnnnnnnnnnnnnnnnnnnnnnnnnnnnnnnnnnnnnnnnnnnnnnnnnnnnnnnnnnnnntgccattgtgtaggctgcattaaataactaaccaatatttcacagacatgttaatattaagcagctttgcatccattttttttctaagctggggagatgcccctattctaacacttgcatattagcttctttacagcctgctattaggkcataagttcagtactcaaattagatagtacaggtagtgtaaaccatactctcaatgtgctgcaattagtcctagcttagctgtgcacttttctgtcttttcatgtacaaaatacatcagctgcctgcatatttmctttttttctatgctcagaggcagtgacaccctcccctccccattaacaagaaactctccttttcagtgttgagttttgggtcatggtcaattaatatacacttaaaagtgaggaaacgtgatttacccatataaaagctttgttgacgcggtgcccttctgtga

SEQ ID NO: 20588 - DNA, 599 bp, Chicken  19866894231310_2
  misc_feature (1)..(17): n is any nucleotide
nnnnnnnnnnnnnnnnntgccattgtgtaggctgcattaaataactaaccaatatttcacagacatgttaatattaagcagctttgcatccattttttttctaagctggggagatgcccctattctaacacttgcatattagcttctttacagcctgctattaggkcataagttcagtactcaaattagatagtacaggtagtgtaaaccatactctcaatgtgctgcaattagtcctagcttagctgtgcacttttctgtcttttcatgtacaaaatacatcagctgcctgcatatttmctttttttctatgctcagaggcagtgacaccctcccctccccattaacaagaaactctccttttcagtgttgagttttgggtcatggtcaattaatatacacttaaaagtgaggaaacgtgatttacccatataaaagctttgttgacgcggtgcccttctgtgaaccactttaatggggaaggatttaaatctaaaactgtaaagcaagagtgcttccacacacttatctggacaatggggctgtgaagtaagaggtgttgctgatcatcataggagcctgtcctgtttaaaaagaac

SEQ ID NO: 20589 - DNA, 600 bp, Chicken  19866894231314_1
gtgatcttgctgggacacatagcaactggagcactgtctcagactgggttctggaggaactagtggacagatgtcttgttcaacagctgagggccaattgatcgtgcactagagaatatgactattacttcatcaccttatcccataaatactcaagagtccaagagccttgtgagctctcctgctcagaaagtggctgcatgacagaatctccccctgagtagggacacctcttaggttactcctattgtagagatgctttctaccttggtgtcaagagacaccctactgatacagatmcttggtaacagactaatagtcttctaaactttgtaagctttgctatgattatacttttgattaattatgcacacacaamtcttgtagacataacctgtttaccacatctgggactaggagtggattcagcttcacctaggttccttacctcctcatttyaasgagtttagaaagcaagtggatccattctgaaccttgtgactcagaagaatcttctcctcaacctttagaaataaattattgacttggactaatattgggtcaagctgcacctagactcctctgaggagtttaggaaaa

SEQ ID NO: 20590 - DNA, 600 bp, Chicken  19866894231314_2
tcaacagctgagggccaattgatcgtgcactagagaatatgactattacttcatcaccttatcccataaatactcaagagtccaagagccttgtgagctctcctgctcagaaagtggctgcatgacagaatctccccctgagtagggacacctcttaggttactcctattgtagagatgctttctaccttggtgtcaagagacaccctactgatacagatmcttggtaacagactaatagtcttctaaactttgtaagctttgctatgattatacttttgattaattatgcacacacaamtcttgtagacataacctgtttaccacatctgggactaggagtggattcagcttcacctaggttccttacctcctcatttyaasgagtttagaaagcaagtggatccattctgaaccttgtgactcagaagaatcttctcctcaacctttagaaataaattattgacttggactaatattgggtcaagctgcacctagactcctctgaggagtttaggaaaatggggtctactctgaacctcttgattcagtaggagtctttcttgaatatgcataatttttgtgtttgaaactgtatgaa

SEQ ID NO: 20591 - DNA, 578 bp, Chicken  19866894231314_3
tccaagagccttgtgagctctcctgctcagaaagtggctgcatgacagaatctccccctgagtagggacacctcttaggttactcctattgtagagatgctttctaccttggtgtcaagagacaccctactgatacagatmcttggtaacagactaatagtcttctaaactttgtaagctttgctatgattatacttttgattaattatgcacacacaamtcttgtagacataacctgtttaccacatctgggactaggagtggattcagcttcacctaggttccttacctcctcatttyaasgagtttagaaagcaagtggatccattctgaaccttgtgactcagaagaatcttctcctcaacctttagaaataaattattgacttggactaatattgggtcaagctgcacctagactcctctgaggagtttaggaaaatggggtctactctgaacctcttgattcagtaggagtctttcttgaatatgcataatttttgtgtttgaaactgtatgaaatgctcactgtatacgagaggttttaggagtgccatctcctggaaaaaaagagcacag

SEQ ID NO: 20592 - DNA, 575 bp, Chicken  19866894231314_4
aagagccttgtgagctctcctgctcagaaagtggctgcatgacagaatctccccctgagtagggacacctcttaggttactcctattgtagagatgctttctaccttggtgtcaagagacaccctactgatacagatmcttggtaacagactaatagtcttctaaactttgtaagctttgctatgattatacttttgattaattatgcacacacaamtcttgtagacataacctgtttaccacatctgggactaggagtggattcagcttcacctaggttccttacctcctcatttyaasgagtttagaaagcaagtggatccattctgaaccttgtgactcagaagaatcttctcctcaacctttagaaataaattattgacttggactaatattgggtcaagctgcacctagactcctctgaggagtttaggaaaatggggtctactctgaacctcttgattcagtaggagtctttcttgaatatgcataatttttgtgtttgaaactgtatgaaatgctcactgtatacgagaggttttaggagtgccatctcctggaaaaaaagagcacag

SEQ ID NO: 20593 - DNA, 600 bp, Chicken  19866894231323_1
tcttatgtgaaaaatgcagaaataaaagaatccatagtcttctacagatatcattagatttataattagttttgcatcagagaaaactaggctggaaaatatctttaaagatcacttagttgagctctttggctcaaatcattgtaaattatacagttgatatctgatcagttgtcagatataaccaaaatatttcctgatgtataagagacttaagaatattaaacaatggagatactgctgcttccttatgttttgtagttcaatttgaatatcattatttgtatatcattaaatggytgttttcagtgtcaaagataaatgtgccctgctgcaatttgtatgattactctttatgaaatcccccagaaagcagggaagcagtgtacaactttcctctttgcaacaactttttacatgtttgaaggttgctaacaactgtcctttcagtattctcttctctagagtataagagcacagctgcttcagtatcttcaataggtcatattttatataacctccaatgagccatattttaagaaataatttcttgaggatatggtaagcctatttttttaattggaaaatcagaatacagtg

SEQ ID NO: 20594 - DNA, 600 bp, Chicken  19866894231325_1
tcccagcctagatctccgcagtgtcttatcctctcgttgcaaagcaagcagggaggaaaatgtgctttaattgtttcgtgcagcaagagcaaacccaatttagctcctgtgccagaagacatgctgctggtggtgacgcaggtttccatctctcagaatcgcagctcgtctgctgcaaagaggtttgctgggtctgagtcacagacgtcaggcagcggggaagtgagaagtgcctgcaagtcggggaaggcaggagaggagcccaggtgagcggaaccgggcaaggggaaggtgagagcrccgtgaagagaaataaaaatgaaggtggaaaagtgagaagaacttaatgctaagatctgttaaacctccctcttgcaaagccttctgcaggtacttaactttgcaggctgtgagtaatccaattaaagttgttaaatcccgcagaggcttaaattcaggggaattaatgatagtgcgcaaagttaagcacacgcttacggggtggaatagtgagaaaaggacttttggagagagagcttcatgacttggaacttttagaagtggggaaaaaaaaccaccatcaaatgcctcaagaaataa

SEQ ID NO: 20595 - DNA, 600 bp, Chicken  19866894231330_1
aaaggtggtttttttttttctcctttctacataacaattgtatagaattattatacattatacaacacacacaagccctcaagcaaagcactttaaagtccaagttgccgatgtcttgctgaaggatcacagcaggcccttctgaagacaagtagtgctacttgaatccagatctctgccagcttggacagttactgtcacaaaatactgctctggtaatgagagaattgcctacaaacactggatttaggtgtacaacccatacagcctatcatttttgctactactgatgaggtgaawaagtatcccagctcagaaaaagtgaaggacgtgtctgtgtacttcttggtccaccaaggaatcagtcaaatgcaattatttccatatcaacaaaacaattctgcctattccaggagtacaaaaaatggttgtgctttgctgtgagccagaaataagtgttccttctctgaaatcaaaagcaaaaacatgagggtgaacaattcagagaaaaggaacagatagaagatttggtttmaaaaatattgatgtcttaagaattggtaattgggtcacccagaactcgcattgataggaaaattc

SEQ ID NO: 20596 - DNA, 600 bp, Chicken  19866894231330_2
aaacactggatttaggtgtacaacccatacagcctatcatttttgctactactgatgaggtgaawaagtatcccagctcagaaaaagtgaaggacgtgtctgtgtacttcttggtccaccaaggaatcagtcaaatgcaattatttccatatcaacaaaacaattctgcctattccaggagtacaaaaaatggttgtgctttgctgtgagccagaaataagtgttccttctctgaaatcaaaagcaaaaacatgagggtgaacaattcagagaaaaggaacagatagaagatttggtttmaaaaatattgatgtcttaagaattggtaattgggtcacccagaactcgcattgataggaaaattcacaatgtgacctgtgcactcttccaatccacttctgtgttctccacactcctcatccacttcaagcaggaagaggtcattttgccaccagtgtcaccatacacagacgtgatggatacaggacagtggacagggacacaagcaaacgcttggtccgaacaaaaagtcatcaccagcttttcttcccttcttgatcccaaacccagagacaggctgtaattatcacacaagtctgc

SEQ ID NO: 20597 - DNA, 599 bp, Chicken  19866894231332_1
  misc_feature (1)..(2): n is any nucleotide
nnatttctatgtttttaagttaaagtagaaaagcagttaatattactgagtggcttcttggaattatatcacagctttctactctctagcagtggtaattaattgatgaagttgtgaatatgggaatgtgcaccatcttaactgttctgtaattaagcttcagaaatgagtgtttcggtgtggtacagcccaaatcatttggctgtcttgctttcctcctgtatttcatctttctggtgactgaaagcagctcagtgaagccgtgcaggctgtgcagcatgctgcaggcatgcaggtaawacagcatacactcaggttgtagcaaaaaagaagctacagtatcaagtcygtcttgctgaccttcctatcacttggaagtggacgttggtggtggggtaggtggcatcttgattagtgatgcacagtaacgagaaacagacacccacctttttctgaaagttggtgataagtttgataaagagctgtatgtgaaacttgcagctggatagttttgatgcttaagagatagttggtatagcagctaatggatgttcccacagatgagtataktttactagccatagtcttttggctactgt

SEQ ID NO: 20598 - DNA, 600 bp, Chicken  19866894231332_2
gtggcttcttggaattatatcacagctttctactctctagcagtggtaattaattgatgaagttgtgaatatgggaatgtgcaccatcttaactgttctgtaattaagcttcagaaatgagtgtttcggtgtggtacagcccaaatcatttggctgtcttgctttcctcctgtatttcatctttctggtgactgaaagcagctcagtgaagccgtgcaggctgtgcagcatgctgcaggcatgcaggtaawacagcatacactcaggttgtagcaaaaaagaagctacagtatcaagtcygtcttgctgaccttcctatcacttggaagtggacgttggtggtggggtaggtggcatcttgattagtgatgcacagtaacgagaaacagacacccacctttttctgaaagttggtgataagtttgataaagagctgtatgtgaaacttgcagctggatagttttgatgcttaagagatagttggtatagcagctaatggatgttcccacagatgagtataktttactagccatagtcttttggctactgtggaacaatyggtggaccctatctctcatcaaactgtcaatggggttaata

SEQ ID NO: 20599 - DNA, 600 bp, Chicken  19866894231332_3
tgtgcagcatgctgcaggcatgcaggtaawacagcatacactcaggttgtagcaaaaaagaagctacagtatcaagtcygtcttgctgaccttcctatcacttggaagtggacgttggtggtggggtaggtggcatcttgattagtgatgcacagtaacgagaaacagacacccacctttttctgaaagttggtgataagtttgataaagagctgtatgtgaaacttgcagctggatagttttgatgcttaagagatagttggtatagcagctaatggatgttcccacagatgagtataktttactagccatagtcttttggctactgtggaacaatyggtggaccctatctctcatcaaactgtcaatggggttaatatcattacaaagaaaagaaaaaatacgcatgttctactgtagtaatttcattagtaattaggtgggaatcaagttgttaaacaatcaaaatttgtgtaagtatctgccttctccactaacatgcacggggaatcaggcctccagtactrtaaggagttgtgtaatctgcacagatatattctcatagtctcaatttcataaatgaaatgaattttgtaagct

SEQ ID NO: 20600 - DNA, 600 bp, Chicken  19866894231332_4
cactcaggttgtagcaaaaaagaagctacagtatcaagtcygtcttgctgaccttcctatcacttggaagtggacgttggtggtggggtaggtggcatcttgattagtgatgcacagtaacgagaaacagacacccacctttttctgaaagttggtgataagtttgataaagagctgtatgtgaaacttgcagctggatagttttgatgcttaagagatagttggtatagcagctaatggatgttcccacagatgagtataktttactagccatagtcttttggctactgtggaacaatyggtggaccctatctctcatcaaactgtcaatggggttaatatcattacaaagaaaagaaaaaatacgcatgttctactgtagtaatttcattagtaattaggtgggaatcaagttgttaaacaatcaaaatttgtgtaagtatctgccttctccactaacatgcacggggaatcaggcctccagtactrtaaggagttgtgtaatctgcacagatatattctcatagtctcaatttcataaatgaaatgaattttgtaagctggcttccagtactgcaaacctgttgtgttctctggagg

SEQ ID NO: 20601 - DNA, 600 bp, Chicken  19866894231332_5
gcagctggatagttttgatgcttaagagatagttggtatagcagctaatggatgttcccacagatgagtataktttactagccatagtcttttggctactgtggaacaatyggtggaccctatctctcatcaaactgtcaatggggttaatatcattacaaagaaaagaaaaaatacgcatgttctactgtagtaatttcattagtaattaggtgggaatcaagttgttaaacaatcaaaatttgtgtaagtatctgccttctccactaacatgcacggggaatcaggcctccagtactrtaaggagttgtgtaatctgcacagatatattctcatagtctcaatttcataaatgaaatgaattttgtaagctggcttccagtactgcaaacctgttgtgttctctggaggcctttttgaaatggcagctgtacacagtgcaggctctgagaacagggaggatttccttcccactcagaggaagtgctgcattcctcagattgcacaaaattgaactaggactgcaaatatgaggggtaaaaccttcaggacatgctaagtgcatcagcatcaccatttggaaccaaacgatagtctcca

SEQ ID NO: 20602 - DNA, 600 bp, Chicken  19866894231336_1
gagaaagataaaggaaaaccaggggatctggagtacttacagcactacctaagagcaaaggtatcccagagggatactttattttgcagatgaaatgtgtagtagaaggagcacagactgggacactaataccatttcaaagagtacagctacaggcagaacctaaaaggtgggaagaaacgaagcagagtataaagtgaggaagcaaagaaaaaaaaagatctgagaaggtcttaacagataggaaagtcttgaatgtgcactcttcccttaaaaaagaaggtatgaatttaatgcatrtttgatggagaaatttaagaggatagcaagacatgaggaatgggaatgaaaatggacagagcagtagcaggacagatatttacacatgctaatctttactgcagagcaagctaggtgtatactgtaaagaaacatttcaattaaaagtgcaagtggttgctttaaatgatgttgcctcagtgtttgttttctagtttgaacacatcaccaaatgggtggacaaaaactagattagttaaaaaagcaaaatccctcccctaaaaggtttcaggtgtgggcagaaattgttgggcttttttt

SEQ ID NO: 20603 - DNA, 599 bp, Chicken  19866894231341_1
  misc_feature (1)..(154): n is any nucleotide
nnnnnnnnnnnnnnnnnnnnnnnnnnnnnnnnnnnnnnnnnnnnnnnnnnnnnnnnnnnnnnnnnnnnnnnnnnnnnnnnnnnnnnnnnnnnnnnnnnnnnnnnnnnnnnnnnnnnnnnnnnnnnnnnnnnnnnnnnnnnnnnnnnnnnnnnnnatgaaatctctcatttggggcagtgctgttcctgtgtggaaacaggtgcaaatgttggcagctgaatgagtgcatttgtcccaccctgaagcagttttctgggctatgtggcttatctggtaactctggccaggagatgaatcagrgaaacaatggatctggctaactgctccagattgtgaaggcagaagaatctgctgcaagtgcatttgggagcagcttgctattatggtaatgagatgaacagttggctttcaagggggctcaacttccaaaagataaagcattttggagtgctgctactttttttctgttcatggctcagaaaaattaaaaaaaaaaaaaaaagtaaatccacaaagtactagagaagatgaggggaaaaaaaaaatgcttttcccccttctttgttcygtaatgatgattgagttttagaatgcagaga

SEQ ID NO: 20604 - DNA, 600 bp, Chicken  19866894231341_2
atctggtaactctggccaggagatgaatcagrgaaacaatggatctggctaactgctccagattgtgaaggcagaagaatctgctgcaagtgcatttgggagcagcttgctattatggtaatgagatgaacagttggctttcaagggggctcaacttccaaaagataaagcattttggagtgctgctactttttttctgttcatggctcagaaaaattaaaaaaaaaaaaaaaagtaaatccacaaagtactagagaagatgaggggaaaaaaaaaatgcttttcccccttctttgttcygtaatgatgattgagttttagaatgcagagattgctattccgtgcatggcaatagagatgtattgacttgatgttctcatcctcttatatttctttgcttgttgcttttagtcgttccccttcaaaataaaggagaggcacccactggagtatgtccgacagttcccacacttgcgatgcagaaccaatgcagttggagccctcctgagaatccgcagtgaagccacagcagcaatccactcattcttccaggtagtccttgttgtcctgagccttatatgtagatcactacctgggtta

SEQ ID NO: 20605 - DNA, 600 bp, Chicken  19866894231349_1
tgttaccacctgctcactcagcaagtcagctgaaaagatgcctctggaagcatgaaaggtgcagaaagagcatgcagttagctcatctggagtccagcaacttttagggacctgcggccagaagaaggaactctcccagcccaaacaactcaatgtagcagcagccacagaggtgccttgtgttgggctgaggtctggcttctctgcatacaacatctgccaggtctgaggctattttaagacatccacccacacgcagccccagtacggcggtctgtaaacaggaaaggataaaagtgygatctgaaaacatagaaggaattttgggaaactcacacttgtcctctgcttcatctagtgcatgcactgctcagtgctggtacttagaaaagcagggcaacagctctcagaatatgggaaaaataataaagarcaagaccaccatccttcaagtggcctaaaagctccatgatggtaaggagtaagggaatctggctgggaatatagctggtacaagcggccctctccatcctcgctccatgctgtcctgctaawccaggtactcacttccctgaggctctttttgtcaccagaaccacc

SEQ ID NO: 20606 - DNA, 600 bp, Chicken  19866894231349_2
tcccagcccaaacaactcaatgtagcagcagccacagaggtgccttgtgttgggctgaggtctggcttctctgcatacaacatctgccaggtctgaggctattttaagacatccacccacacgcagccccagtacggcggtctgtaaacaggaaaggataaaagtgygatctgaaaacatagaaggaattttgggaaactcacacttgtcctctgcttcatctagtgcatgcactgctcagtgctggtacttagaaaagcagggcaacagctctcagaatatgggaaaaataataaagarcaagaccaccatccttcaagtggcctaaaagctccatgatggtaaggagtaagggaatctggctgggaatatagctggtacaagcggccctctccatcctcgctccatgctgtcctgctaawccaggtactcacttccctgaggctctttttgtcaccagaaccacccaagaggcccrctactcctggcatacaccttagctgcaagccacggacccacgggagatcaggccagaaggtccagatgtgcaaccagggtgaggcccttccagcctatttgttggaagggtccactctcctc

SEQ ID NO: 20607 - DNA, 600 bp, Chicken  19866894231349_3
gcagccccagtacggcggtctgtaaacaggaaaggataaaagtgygatctgaaaacatagaaggaattttgggaaactcacacttgtcctctgcttcatctagtgcatgcactgctcagtgctggtacttagaaaagcagggcaacagctctcagaatatgggaaaaataataaagarcaagaccaccatccttcaagtggcctaaaagctccatgatggtaaggagtaagggaatctggctgggaatatagctggtacaagcggccctctccatcctcgctccatgctgtcctgctaawccaggtactcacttccctgaggctctttttgtcaccagaaccacccaagaggcccrctactcctggcatacaccttagctgcaagccacggacccacgggagatcaggccagaaggtccagatgtgcaaccagggtgaggcccttccagcctatttgttggaagggtccactctcctctttgaaataatctgcggtccgcactggttttcctcacacaagtcagaaataggctaaaacctttatatactactattaattttcatttttatttgctggttttattgtttttaaaagcatga

SEQ ID NO: 20608 - DNA, 600 bp, Chicken  19866894231349_4
atagaaggaattttgggaaactcacacttgtcctctgcttcatctagtgcatgcactgctcagtgctggtacttagaaaagcagggcaacagctctcagaatatgggaaaaataataaagarcaagaccaccatccttcaagtggcctaaaagctccatgatggtaaggagtaagggaatctggctgggaatatagctggtacaagcggccctctccatcctcgctccatgctgtcctgctaawccaggtactcacttccctgaggctctttttgtcaccagaaccacccaagaggcccrctactcctggcatacaccttagctgcaagccacggacccacgggagatcaggccagaaggtccagatgtgcaaccagggtgaggcccttccagcctatttgttggaagggtccactctcctctttgaaataatctgcggtccgcactggttttcctcacacaagtcagaaataggctaaaacctttatatactactattaattttcatttttatttgctggttttattgtttttaaaagcatgaacatgcttcgttcttggacagcaatcgttgcattagacattttcaagccctctcac

SEQ ID NO: 20609 - DNA, 600 bp, Chicken  19866894231354_1
tcatgagttaagttctgttgcaattgcagctcactttgtcctgtccatctcatagtctcattagctgctgggccacagaggaattgaggagagagagttgagggttttatctgcatgccgttccagcgtggaggattcaatgagacgatgacttgtcattttttattaatgagctggagcctgattcattatagatgtgtggaatgagctcagggtggctgcagggggagggctgccattgaagatgcaccttccaacgtgagttttcttctgcttggtcttacgcaaattggctgagcrcattgccggcgtgctaygagacagctgaggtagcgcctagctcctgtttcccactgcccaagactgtgtgtttcagctcctgatgagcagcctcagaggaggaatgaatattcagtgwtgttcagcaattagccaattagccatcgcgaggaggtttctcagggrctrtcccatagggcctggatggctgacacaccgggggctgaagagaaggtttccatatttctygagctatttctgtgggccaaaggaacacaaataaatacccaagctttaggaggtgtcagtgacagtaatcta

SEQ ID NO: 20610 - DNA, 600 bp, Chicken  19866894231354_2
ttgcaattgcagctcactttgtcctgtccatctcatagtctcattagctgctgggccacagaggaattgaggagagagagttgagggttttatctgcatgccgttccagcgtggaggattcaatgagacgatgacttgtcattttttattaatgagctggagcctgattcattatagatgtgtggaatgagctcagggtggctgcagggggagggctgccattgaagatgcaccttccaacgtgagttttcttctgcttggtcttacgcaaattggctgagcrcattgccggcgtgctaygagacagctgaggtagcgcctagctcctgtttcccactgcccaagactgtgtgtttcagctcctgatgagcagcctcagaggaggaatgaatattcagtgwtgttcagcaattagccaattagccatcgcgaggaggtttctcagggrctrtcccatagggcctggatggctgacacaccgggggctgaagagaaggtttccatatttctygagctatttctgtgggccaaaggaacacaaataaatacccaagctttaggaggtgtcagtgacagtaatctagccttttggaaagtcac

SEQ ID NO: 20611 - DNA, 600 bp, Chicken  19866894231354_3
cgttccagcgtggaggattcaatgagacgatgacttgtcattttttattaatgagctggagcctgattcattatagatgtgtggaatgagctcagggtggctgcagggggagggctgccattgaagatgcaccttccaacgtgagttttcttctgcttggtcttacgcaaattggctgagcrcattgccggcgtgctaygagacagctgaggtagcgcctagctcctgtttcccactgcccaagactgtgtgtttcagctcctgatgagcagcctcagaggaggaatgaatattcagtgwtgttcagcaattagccaattagccatcgcgaggaggtttctcagggrctrtcccatagggcctggatggctgacacaccgggggctgaagagaaggtttccatatttctygagctatttctgtgggccaaaggaacacaaataaatacccaagctttaggaggtgtcagtgacagtaatctagccttttggaaagtcacaaattgcagctagaggcaggatgggcatcactgaactcagctgttgtactgcgtatattatgtgtttaaatttgtaagctctttgctctttacagagatag

SEQ ID NO: 20612 - DNA, 600 bp, Chicken  19866894231354_4
ttaatgagctggagcctgattcattatagatgtgtggaatgagctcagggtggctgcagggggagggctgccattgaagatgcaccttccaacgtgagttttcttctgcttggtcttacgcaaattggctgagcrcattgccggcgtgctaygagacagctgaggtagcgcctagctcctgtttcccactgcccaagactgtgtgtttcagctcctgatgagcagcctcagaggaggaatgaatattcagtgwtgttcagcaattagccaattagccatcgcgaggaggtttctcagggrctrtcccatagggcctggatggctgacacaccgggggctgaagagaaggtttccatatttctygagctatttctgtgggccaaaggaacacaaataaatacccaagctttaggaggtgtcagtgacagtaatctagccttttggaaagtcacaaattgcagctagaggcaggatgggcatcactgaactcagctgttgtactgcgtatattatgtgtttaaatttgtaagctctttgctctttacagagataggcaaccgttcagcattaatctcagcgcagactgtcagagaaagacat

SEQ ID NO: 20613 - DNA, 600 bp, Chicken  19866894231354_5
atgagctggagcctgattcattatagatgtgtggaatgagctcagggtggctgcagggggagggctgccattgaagatgcaccttccaacgtgagttttcttctgcttggtcttacgcaaattggctgagcrcattgccggcgtgctaygagacagctgaggtagcgcctagctcctgtttcccactgcccaagactgtgtgtttcagctcctgatgagcagcctcagaggaggaatgaatattcagtgwtgttcagcaattagccaattagccatcgcgaggaggtttctcagggrctrtcccatagggcctggatggctgacacaccgggggctgaagagaaggtttccatatttctygagctatttctgtgggccaaaggaacacaaataaatacccaagctttaggaggtgtcagtgacagtaatctagccttttggaaagtcacaaattgcagctagaggcaggatgggcatcactgaactcagctgttgtactgcgtatattatgtgtttaaatttgtaagctctttgctctttacagagataggcaaccgttcagcattaatctcagcgcagactgtcagagaaagacatgca

SEQ ID NO: 20614 - DNA, 600 bp, Chicken  19866894231354_6
agggctgccattgaagatgcaccttccaacgtgagttttcttctgcttggtcttacgcaaattggctgagcrcattgccggcgtgctaygagacagctgaggtagcgcctagctcctgtttcccactgcccaagactgtgtgtttcagctcctgatgagcagcctcagaggaggaatgaatattcagtgwtgttcagcaattagccaattagccatcgcgaggaggtttctcagggrctrtcccatagggcctggatggctgacacaccgggggctgaagagaaggtttccatatttctygagctatttctgtgggccaaaggaacacaaataaatacccaagctttaggaggtgtcagtgacagtaatctagccttttggaaagtcacaaattgcagctagaggcaggatgggcatcactgaactcagctgttgtactgcgtatattatgtgtttaaatttgtaagctctttgctctttacagagataggcaaccgttcagcattaatctcagcgcagactgtcagagaaagacatgcaattggagtagtccttcgtgttcttcttaatctaaagggaaggtcattcagattgaagtta

SEQ ID NO: 20615 - DNA, 412 bp, Chicken  19866894231355_1
tgtttaaaaatgccctcaaaatttgtggctgaaggctgtgactttgtagacaataggttcataagcttgcataaatgaaaaaaaagagatctagaccaagtttcagtgttgatttttgacgttgaataatattaattattaaattttcaggcctagaatccacctttaaattacagggaagatgttatggtcccatcaaagaatcgaagacaaattctgctaatccttctgagaggcgagataatggtaatagggggtaaggaatggtgtctgggtgggcaatattgcctgttcatttcytcggcttagctactgattgtcactcttgtgcctttgagatgcccataagcttccagggagactacacaaaggtacagtagcttaattatgtaggctgctatttactaggttt

SEQ ID NO: 20616 - DNA, 600 bp, Chicken  19866894231357_1
atcttcaggctcatgaaggaaaagagtgacacatttggagagatgtctgaaggagacatgaaggagcagcttaaattgtatgatatataaccatacagccagtgaagacgatgcccaaaagtcatcttggccgttattatgcaggactgtggagattgtagtgctataaatgtgtttcagtagttattttgcatttccaggttattttgcaaatgcatacagtgatatgtatttcttaagacttgcaatttttcatccttttaaatcattttttcttgaagaactgtaatggtactttcrattcgtatagagattttatctctttcyggctgagccataggtctcagtcacataaactagttaaacttgtaagttcttcctggtcgtgttctgtaggaatgaactctcaaacctagtaatgtattggtgtgatagctgaaggaagccaaagatgatagaacagcacatttaaaatggatggaaaggatastatcattgaataattcaggttggaagggrcatgggttggaagggacgtaaagaggtgtgtagttcaacctcctgctcaaagcagcatcagctrtgagattaggccaggtt

SEQ ID NO: 20617 - DNA, 600 bp, Chicken  19866894231357_2
gacacatttggagagatgtctgaaggagacatgaaggagcagcttaaattgtatgatatataaccatacagccagtgaagacgatgcccaaaagtcatcttggccgttattatgcaggactgtggagattgtagtgctataaatgtgtttcagtagttattttgcatttccaggttattttgcaaatgcatacagtgatatgtatttcttaagacttgcaatttttcatccttttaaatcattttttcttgaagaactgtaatggtactttcrattcgtatagagattttatctctttcyggctgagccataggtctcagtcacataaactagttaaacttgtaagttcttcctggtcgtgttctgtaggaatgaactctcaaacctagtaatgtattggtgtgatagctgaaggaagccaaagatgatagaacagcacatttaaaatggatggaaaggatastatcattgaataattcaggttggaagggrcatgggttggaagggacgtaaagaggtgtgtagttcaacctcctgctcaaagcagcatcagctrtgagattaggccaggttactcagggctttatcctgtagggtctt

SEQ ID NO: 20618 - DNA, 600 bp, Chicken  19866894231357_3
gcatttccaggttattttgcaaatgcatacagtgatatgtatttcttaagacttgcaatttttcatccttttaaatcattttttcttgaagaactgtaatggtactttcrattcgtatagagattttatctctttcyggctgagccataggtctcagtcacataaactagttaaacttgtaagttcttcctggtcgtgttctgtaggaatgaactctcaaacctagtaatgtattggtgtgatagctgaaggaagccaaagatgatagaacagcacatttaaaatggatggaaaggatastatcattgaataattcaggttggaagggrcatgggttggaagggacgtaaagaggtgtgtagttcaacctcctgctcaaagcagcatcagctrtgagattaggccaggttactcagggctttatcctgtagggtcttgaaaacctccacagatggagactgcacaaactctcttggcagrgagacttccaatsctacagttagaaaacaaatagccaaagccaaagcattagtgctgagattagatgtgagctgccattctcatctccttgaaaggaatacttcatcctccttcacactg

SEQ ID NO: 20619 - DNA, 600 bp, Chicken  19866894231357_4
cagtgatatgtatttcttaagacttgcaatttttcatccttttaaatcattttttcttgaagaactgtaatggtactttcrattcgtatagagattttatctctttcyggctgagccataggtctcagtcacataaactagttaaacttgtaagttcttcctggtcgtgttctgtaggaatgaactctcaaacctagtaatgtattggtgtgatagctgaaggaagccaaagatgatagaacagcacatttaaaatggatggaaaggatastatcattgaataattcaggttggaagggrcatgggttggaagggacgtaaagaggtgtgtagttcaacctcctgctcaaagcagcatcagctrtgagattaggccaggttactcagggctttatcctgtagggtcttgaaaacctccacagatggagactgcacaaactctcttggcagrgagacttccaatsctacagttagaaaacaaatagccaaagccaaagcattagtgctgagattagatgtgagctgccattctcatctccttgaaaggaatacttcatcctccttcacactggctttttgaaacaaatccaagacggttcc

SEQ ID NO: 20620 - DNA, 600 bp, Chicken  19866894231357_5
ctgtaatggtactttcrattcgtatagagattttatctctttcyggctgagccataggtctcagtcacataaactagttaaacttgtaagttcttcctggtcgtgttctgtaggaatgaactctcaaacctagtaatgtattggtgtgatagctgaaggaagccaaagatgatagaacagcacatttaaaatggatggaaaggatastatcattgaataattcaggttggaagggrcatgggttggaagggacgtaaagaggtgtgtagttcaacctcctgctcaaagcagcatcagctrtgagattaggccaggttactcagggctttatcctgtagggtcttgaaaacctccacagatggagactgcacaaactctcttggcagrgagacttccaatsctacagttagaaaacaaatagccaaagccaaagcattagtgctgagattagatgtgagctgccattctcatctccttgaaaggaatacttcatcctccttcacactggctttttgaaacaaatccaagacggttccggctgaccccgctgagctcagcttcatgcctgtgaaaacagcagctaactgcatcctgggagca

SEQ ID NO: 20621 - DNA, 600 bp, Chicken  19866894231357_6
aagttcttcctggtcgtgttctgtaggaatgaactctcaaacctagtaatgtattggtgtgatagctgaaggaagccaaagatgatagaacagcacatttaaaatggatggaaaggatastatcattgaataattcaggttggaagggrcatgggttggaagggacgtaaagaggtgtgtagttcaacctcctgctcaaagcagcatcagctrtgagattaggccaggttactcagggctttatcctgtagggtcttgaaaacctccacagatggagactgcacaaactctcttggcagrgagacttccaatsctacagttagaaaacaaatagccaaagccaaagcattagtgctgagattagatgtgagctgccattctcatctccttgaaaggaatacttcatcctccttcacactggctttttgaaacaaatccaagacggttccggctgaccccgctgagctcagcttcatgcctgtgaaaacagcagctaactgcatcctgggagcagagacatctcttcgcctcttgacactggtaaaagcagtgcagaaaagtggctggtatttttacaaggacaactgtgttccactcaga

SEQ ID NO: 20622 - DNA, 600 bp, Chicken  19866894231357_7
tcgtgttctgtaggaatgaactctcaaacctagtaatgtattggtgtgatagctgaaggaagccaaagatgatagaacagcacatttaaaatggatggaaaggatastatcattgaataattcaggttggaagggrcatgggttggaagggacgtaaagaggtgtgtagttcaacctcctgctcaaagcagcatcagctrtgagattaggccaggttactcagggctttatcctgtagggtcttgaaaacctccacagatggagactgcacaaactctcttggcagrgagacttccaatsctacagttagaaaacaaatagccaaagccaaagcattagtgctgagattagatgtgagctgccattctcatctccttgaaaggaatacttcatcctccttcacactggctttttgaaacaaatccaagacggttccggctgaccccgctgagctcagcttcatgcctgtgaaaacagcagctaactgcatcctgggagcagagacatctcttcgcctcttgacactggtaaaagcagtgcagaaaagtggctggtatttttacaaggacaactgtgttccactcagatcctgttcctgta

SEQ ID NO: 20623 - DNA, 600 bp, Chicken  19866894231357_8
caaatagccaaagccaaagcattagtgctgagattagatgtgagctgccattctcatctccttgaaaggaatacttcatcctccttcacactggctttttgaaacaaatccaagacggttccggctgaccccgctgagctcagcttcatgcctgtgaaaacagcagctaactgcatcctgggagcagagacatctcttcgcctcttgacactggtaaaagcagtgcagaaaagtggctggtatttttacaaggacaactgtgttccactcagatcctgttcctgtaatgcaaaaatcatrtgagaatctatgtacttaggaaatctctgtgaagctatcaagtgttttgaacagttttgaccaaaccttggtggtttagacagagtaaatcagtcagcattcctaatttaaactgaatgttttcttgtgtacctctcatatgaaatcctgttaaatactttaacggaaaggattttcttggttttataactgttcacaagtttcctgacctggttttagggaatgatctcttcggatgaggttttctttattttgtgcaattctttagagcctgataatagcaccaagtaccacattctg

SEQ ID NO: 20624 - DNA, 600 bp, Chicken  19866894231360_1
ggagtgcaagcacagtcctgcaggactgaagatgacctcctggctctcgggtgtcagttgagctgcacaggtaggggcacagccactgtgggtgtgttcacatccccgctaggaaaatgcactaacaacagccctgctgccagctctgctcacaaagcacagggcatttgctggactctgcttggtctctcattaatgtgcaaagctctcacacgtttccggcaatgtgccaagcatattttctggcagaatttctgcaaagctctctgcagcacacactaaacttgccttagatctgcytgtactgtctgtgttcctaacagcttgatatgggcgctccctttggagaaagyggtgggcagcatgctgtgagtttttgttgcctgccttggagttgtgtgttacgctcctgctggggactagaaattcccaacctttctaaccctgtcaaaacagctccctctcagaaaggtatttctagtgaaatgtgatactgcaaaaaccctaaacacttcgaagatgaatgtatgatatctgtgtttgtatttggatacaaagaactcttgtagatgcctctgtattaggcccagtctttgtttc

SEQ ID NO: 20625 - DNA, 600 bp, Chicken  19866894231360_2
tcagttgagctgcacaggtaggggcacagccactgtgggtgtgttcacatccccgctaggaaaatgcactaacaacagccctgctgccagctctgctcacaaagcacagggcatttgctggactctgcttggtctctcattaatgtgcaaagctctcacacgtttccggcaatgtgccaagcatattttctggcagaatttctgcaaagctctctgcagcacacactaaacttgccttagatctgcytgtactgtctgtgttcctaacagcttgatatgggcgctccctttggagaaagyggtgggcagcatgctgtgagtttttgttgcctgccttggagttgtgtgttacgctcctgctggggactagaaattcccaacctttctaaccctgtcaaaacagctccctctcagaaaggtatttctagtgaaatgtgatactgcaaaaaccctaaacacttcgaagatgaatgtatgatatctgtgtttgtatttggatacaaagaactcttgtagatgcctctgtattaggcccagtctttgtttcatactgatgtagctccttagatactttgtcactttggagcttgttgataaaaa

SEQ ID NO: 20626 - DNA, 599 bp, Chicken  19866894231362_1
  misc_feature (1)..(88): n is any nucleotide
nnnnnnnnnnnnnnnnnnnnnnnnnnnnnnnnnnnnnnnnnnnnnnnnnnnnnnnnnnnnnnnnnnnnnnnnnnnnnnnnnnnnnnnnctttctttcttataatcattgtcttttagaatccagcctcctaactcttatttataagggaagctcctgaagcagtggtaattgagaagcaattttcctctgatccagctgttgctcagctactgtctaatctctgtagctagtagatgggaaatgcgtcttactaaacaaactgtagttgtatccttgtgtgaaaatgggtatgattaagyagaggtgtcacaagcattctgctattaatactgatctcttgcctaaaagtaattagcctattaaaaacaaaccatcacttaaacttactgaaatatatggaagagaccaactccagaagtgtagtttggagctcagcaggaaacaaactcaggaattgagacctcattgaagtttckgctccaagggattcagaycacttagtaagattaatacttgcctcaaggtagtcagtaacagacaaaataaagcacattcaaacagaatacttttctggatcagaattggtgccgaaatgaaa

SEQ ID NO: 20627 - DNA, 600 bp, Chicken  19866894231362_2
caattttcctctgatccagctgttgctcagctactgtctaatctctgtagctagtagatgggaaatgcgtcttactaaacaaactgtagttgtatccttgtgtgaaaatgggtatgattaagyagaggtgtcacaagcattctgctattaatactgatctcttgcctaaaagtaattagcctattaaaaacaaaccatcacttaaacttactgaaatatatggaagagaccaactccagaagtgtagtttggagctcagcaggaaacaaactcaggaattgagacctcattgaagtttckgctccaagggattcagaycacttagtaagattaatacttgcctcaaggtagtcagtaacagacaaaataaagcacattcaaacagaatacttttctggatcagaattggtgccgaaatgaaagtattccacaaatacacaaagtgatttggagttgcccatttactttttctctgatttcagtactaaaagcagttagttacaagtttttaaaagcgtaattttttctttgcttatttttaactgcaaatgctgtttattctgggctctgggtctctggagtctggaaatcaagggtgaa

SEQ ID NO: 20628 - DNA, 600 bp, Chicken  19866894231362_3
gctgttgctcagctactgtctaatctctgtagctagtagatgggaaatgcgtcttactaaacaaactgtagttgtatccttgtgtgaaaatgggtatgattaagyagaggtgtcacaagcattctgctattaatactgatctcttgcctaaaagtaattagcctattaaaaacaaaccatcacttaaacttactgaaatatatggaagagaccaactccagaagtgtagtttggagctcagcaggaaacaaactcaggaattgagacctcattgaagtttckgctccaagggattcagaycacttagtaagattaatacttgcctcaaggtagtcagtaacagacaaaataaagcacattcaaacagaatacttttctggatcagaattggtgccgaaatgaaagtattccacaaatacacaaagtgatttggagttgcccatttactttttctctgatttcagtactaaaagcagttagttacaagtttttaaaagcgtaattttttctttgcttatttttaactgcaaatgctgtttattctgggctctgggtctctggagtctggaaatcaagggtgaagtttgtctctcctcattg

SEQ ID NO: 20629 - DNA, 575 bp, Chicken  19866894231368_1
tctggaatcagaattactgatgctcgttatactgatctggctgtctccacattttatattatatagttcagactaaaagtttgtcgatatagagcaattaagtggaaagatatgccaaatgcaattataccaccaccagtttaaggacataaattgtaatgcggatactggaatcaaagtagaagtggtttttctaatttggggaaaacaggacagagaatcatgcatttcataataaaagaaggcatatgatgaattatatcagtatataatttattgtggcttaacttcctatatcaraaagaattatgttgctctaaaaagctatgtagtcaatcaagtgaaaaaaatttcagtctatacaggcatagataattcaaatccttatagagattttatctgggaatgaaagtctactggaataaagttcggtagcttagaagaagtcaggacccatttgctttgaaaagaaacctacaaagtaagtgcagtggcagctatggtggatgtaaaaaaggctatgtttgcagagaggcaagttaaaaagggataagcttactcatttctttcagcta

SEQ ID NO: 20630 - DNA, 600 bp, Chicken  19866894231370_1
agaattaaagcaaattctagttaaactagtgtactgacccttgaaataataaaaaagagtgcatatatttgtttcatgtgcaactatgttgcaaaagcaggtataattgtgaacatttcaggtagtacaacgttatgacaaagcttgatggatttgctattccactttaaaagaggttattcgacttaagcactgtctttttcaatatgcttttaaggttcgtctcagtggaaatagctatactgaatagctggacagcaattcacatactcaaagcactgcacaaacattaactaatayacttacaacatctaaataactataatactggctgtcaaggcaatgaagaagcagacaaatgcactgtgcacagtcctggaatagattttacagagaatgagggcaatgcctttcaacagggtgaggtgcagcctgccagtatgctcaagatttgcattgttctctttcaaccacctgcaatgctatgtttaaagtgttaattagcaggtagcagatgctggtcctttgccagttcagccttggaaatgtactttggtctgtacatcaaaatataatagttccagtttcaggtttctggtg

SEQ ID NO: 20631 - DNA, 600 bp, Chicken  19866894231370_2
atagattttacagagaatgagggcaatgcctttcaacagggtgaggtgcagcctgccagtatgctcaagatttgcattgttctctttcaaccacctgcaatgctatgtttaaagtgttaattagcaggtagcagatgctggtcctttgccagttcagccttggaaatgtactttggtctgtacatcaaaatataatagttccagtttcaggtttctggtgattagttccctattaaatatctttaactttaaacatattaaacattgggtacaattttgggtactgacttcttgagaaaytgttctttgactcttcctcttttttttcttcatgytgtgtgtttatttaaacaagctgctggcaagaatgaaaaaaaggatggatttggtgtcttgggtgacagcagcctgtcactgtcatttttagatgttagctggcctgtggcaataacagcagaatatggtgatgagtttattggagtgcttgaaacatacagctggagacataattctttggaccttctagttaatttctagtttaaaaactgttgcttctggggtctgttaaacaaactaaaatctcattgctgccagttacag

SEQ ID NO: 20632 - DNA, 589 bp, Chicken  19866894231370_3
gggcaatgcctttcaacagggtgaggtgcagcctgccagtatgctcaagatttgcattgttctctttcaaccacctgcaatgctatgtttaaagtgttaattagcaggtagcagatgctggtcctttgccagttcagccttggaaatgtactttggtctgtacatcaaaatataatagttccagtttcaggtttctggtgattagttccctattaaatatctttaactttaaacatattaaacattgggtacaattttgggtactgacttcttgagaaaytgttctttgactcttcctcytttttttcttcatgytgtgtgtttatttaaacaagctgctggcaagaatgaaaaaaaggatggatttggtgtcttgggtgacagcagcctgtcactgtcatttttagatgttagctggcctgtggcaataacagcagaatatggtgatgagtttattggagtgcttgaaacatacagctggagacataattctttggaccttctagttaatttctagtttaaaaactgttgcttctggggtctgttaaacaaactaaaatctcattgctgccagttacagatacatttt

SEQ ID NO: 20633 - DNA, 574 bp, Chicken  19866894231370_4
acagggtgaggtgcagcctgccagtatgctcaagatttgcattgttctctttcaaccacctgcaatgctatgtttaaagtgttaattagcaggtagcagatgctggtcctttgccagttcagccttggaaatgtactttggtctgtacatcaaaatataatagttccagtttcaggtttctggtgattagttccctattaaatatctttaactttaaacatattaaacattgggtacaattttgggtactgacttcttgagaaaytgttctttgactcttcctcttttttttcttcatgytgtgtgtttatttaaacaagctgctggcaagaatgaaaaaaaggatggatttggtgtcttgggtgacagcagcctgtcactgtcatttttagatgttagctggcctgtggcaataacagcagaatatggtgatgagtttattggagtgcttgaaacatacagctggagacataattctttggaccttctagttaatttctagtttaaaaactgttgcttctggggtctgttaaacaaactaaaatctcattgctgccagttacagatacatttt

SEQ ID NO: 20634 - DNA, 600 bp, Chicken  19866894231371_1
aaatccgtatatttctaatttagagatgaggatgtggtgcagcaccatgtcatagtccaggtagacgatatcagctgcccttcctttgtccaccaatgccattactctattatagaaggccaccagactggtcaggcatgatctgcgcttggtgaagccatgctggctctctcagatcacctcctctcttatttcagtcactgtcaacttagcctctcagctgtgacttttcagaaatgatggagtgtggcttggcaaccacatcatccagttccttcaggacccatagacttgaacacmtgcagtctcatgatgctgtctctgacttgctctgtacttatggtgggcggaggggggtgagaattgttcccttgatctccatctagagattcagggatgtgagagacattctgacattgtgtcaaatttcagtgtaccttttccaaaagcagtggttaaactttctgtgttgtacaaagataacttactgtgtgatgagctaagtaccctattgagatttattaagttaaatctgttataccacttgagcaatggtacagaaacatgcactttagtttcaattggaaaaaaacatgagag

SEQ ID NO: 20635 - DNA, 599 bp, Chicken  19866894231373_1
  misc_feature (1)..(148): n is any nucleotide
nnnnnnnnnnnnnnnnnnnnnnnnnnnnnnnnnnnnnnnnnnnnnnnnnnnnnnnnnnnnnnnnnnnnnnnnnnnnnnnnnnnnnnnnnnnnnnnnnnnnnnnnnnnnnnnnnnnnnnnnnnnnnnnnnnnnnnnnnnnnnnnnnnnnggatgtataaaacgtacaaacttatagaaatatacaatcactgggctgattaatccatgcaaaagcatgaaagaaacccaaaacagcagtcctcaccaaaccaagaaactccttgttctctccgactgtccccagactttaaatctcatagygcatacagcttctcctgagccacctttcagaccacatctgagttcasggctcatgcaaagccttatacattctgcagggacaatgacaaaaaaaagatcataatgaatgcaatcaagggattaatatctcagtagacatcatctgtaattagcagtacaccatttatgagttaaaacatctggggctaacagaaatgagaagaatgaagtgattatctctgttattgcattcgccttccatttccaaaagtgttctctaataaaatcctaaacaaggtgcaggcatgcactagtctgtc

SEQ ID NO: 20636 - DNA, 599 bp, Chicken  19866894231373_2
  misc_feature (1)..(101): n is any nucleotide
nnnnnnnnnnnnnnnnnnnnnnnnnnnnnnnnnnnnnnnnnnnnnnnnnnnnnnnnnnnnnnnnnnnnnnnnnnnnnnnnnnnnnnnnnnnnnnnnnnnnnggatgtataaaacgtacaaacttatagaaatatacaatcactgggctgattaatccatgcaaaagcatgaaagaaacccaaaacagcagtcctcaccaaaccaagaaactccttgttctctccgactgtccccagactttaaatctcatagygcatacagcttctcctgagccacctttcagaccacatctgagttcasggctcatgcaaagccttatacattctgcagggacaatgacaaaaaaaagatcataatgaatgcaatcaagggattaatatctcagtagacatcatctgtaattagcagtacaccatttatgagttaaaacatctggggctaacagaaatgagaagaatgaagtgattatctctgttattgcattcgccttccatttccaaaagtgttctctaataaaatcctaaacaaggtgcaggcatgcactagtctgtcaagctactgttatgttgccaaacaggtagcatgaatttccctcagca

SEQ ID NO: 20637 - DNA, 600 bp, Chicken  19866894231373_3
catctggggctaacagaaatgagaagaatgaagtgattatctctgttattgcattcgccttccatttccaaaagtgttctctaataaaatcctaaacaaggtgcaggcatgcactagtctgtcaagctactgttatgttgccaaacaggtagcatgaatttccctcagcaagctataaaaagtgcagaagtcaatgaagcaggatttatggttagagaacgagattacagaatgagacttaagcacatgcttaactgctttgctgagctaaggcatatatggggacactgataactttamcatttgcaaaatccttcatgatagcaaaccaccattaaacctaaagtagttrtgtaaaatgacatcatgattccagcagcttattaatgaaggttttgtttttaatggaactgcttctttactgtatgctgcttcatattttgtgaaggctttggtttctgtcactgtactgcacagattgtttagactgatatcagttcttgccttgacagcccagttctgcagtacagtacagccctttgattcctaaccagtagatgatgaacttaaaataagttggggaaaaaaaaaaataaatgt

SEQ ID NO: 20638 - DNA, 600 bp, Chicken  19866894231373_4
attcgccttccatttccaaaagtgttctctaataaaatcctaaacaaggtgcaggcatgcactagtctgtcaagctactgttatgttgccaaacaggtagcatgaatttccctcagcaagctataaaaagtgcagaagtcaatgaagcaggatttatggttagagaacgagattacagaatgagacttaagcacatgcttaactgctttgctgagctaaggcatatatggggacactgataactttamcatttgcaaaatccttcatgatagcaaaccaccattaaacctaaagtagttrtgtaaaatgacatcatgattccagcagcttattaatgaaggttttgtttttaatggaactgcttctttactgtatgctgcttcatattttgtgaaggctttggtttctgtcactgtactgcacagattgtttagactgatatcagttcttgccttgacagcccagttctgcagtacagtacagccctttgattcctaaccagtagatgatgaacttaaaataagttggggaaaaaaaaaaataaatgtgagcgttgaaatcattgtctttttgaagaaatagatgtaaaattgaaacaca

SEQ ID NO: 20639 - DNA, 600 bp, Chicken  19866894231376_1
aggtacagatgaacacgtgcatggacagatggatggatggacggacagacctatggatggacagttggatggacagatgtagagatggacatgtgggtggatggatggacagatggatggacagacagacacacggatgggcagatggacaaatggatggagggatgggcagacggacagaagaacaccgagatggatggatggacacacgtatggggcaggagatgtacctctcagaatccagcttcccacccagcgcggctccctgggactccaggagctgcttggcagaggcagagmagcatcgacccttccacgaacgattactgtagagttctgctcagcacacgcacctactggggctgacttgcagagtacaaagctatctattgatttgcaagtgatgcaattgcctgcgcacccagccaagtgcttggccacgcagaggccttccattcactgcctttttttctggccacactgattcaccatgatgacattcccatttgcaactctaatttccttcttgttgggaagcaggcaaccagtgtgctaccttaccattgcctcaactacctgcatcctctggctaaggctgaa

SEQ ID NO: 20640 - DNA, 599 bp, Chicken  19866894231380_1
  misc_feature (1)..(172): n is any nucleotide
nnnnnnnnnnnnnnnnnnnnnnnnnnnnnnnnnnnnnnnnnnnnnnnnnnnnnnnnnnnnnnnnnnnnnnnnnnnnnnnnnnnnnnnnnnnnnnnnnnnnnnnnnnnnnnnnnnnnnnnnnnnnnnnnnnnnnnnnnnnnnnnnnnnnnnnnnnnnnnnnnnnnnnnnnnnntgcttaaacaatggagactttctgataggcagcagtgattctgctcagcactgtataatgcatgtctccttttcctgagagatgggaagtataaggacaggaaggctgccctgctccagttgtgtaakcgtaactgtgtcacagataagatgggasgtggtgcagtgtagctagggcagtcggttgcattagcccagatgcttttgcttgttggtytttttagctgggaacatggtaygtcagcaagaggactcttacggtcctctgtaaacagagatgcttgcaatatgtgttagtcctgcctgtcatgatagcctaaagcwacagataagcaatggagatkattcttttagtcacttctcacaactgcgggtctttgtctttgaagagcttttgggtgctctttgccagtctctgctgagagagt

SEQ ID NO: 20641 - DNA, 487 bp, Chicken  19866894231380_10
ccagtccttcagattgtgaaggaatcccagcagcagcacggtttacgacatggggacttccagaggtacaggtcagtaagcagtgtggatgtcttggagttgctgtctgtcacacagctgctgtgacttgctttgyttyattggcacaataacatttcaaatgtaaacctgctgtagcagtcagcaaaatcaatctggcaagtaaatatctcttgtcaggttgctccatgcttttttttttcctaatgaagcctaatatrttatgactgttccattgaggagtataaatactgcttctcrttttagagttgctttttaagagcttgttaacacctcgctgtgctcttacacacgttttcagtgaatgaacataaagacattagacgataggaattctaatttttcaagatcaagacttgttgcatgtcttcctacctttctattctgtttattaaccactgatttgcaggttgtttcttaaatacat

SEQ ID NO: 20642 - DNA, 599 bp, Chicken  19866894231380_2
  misc_feature (1)..(144): n is any nucleotide
nnnnnnnnnnnnnnnnnnnnnnnnnnnnnnnnnnnnnnnnnnnnnnnnnnnnnnnnnnnnnnnnnnnnnnnnnnnnnnnnnnnnnnnnnnnnnnnnnnnnnnnnnnnnnnnnnnnnnnnnnnnnnnnnnnnnnnnnnnnnnnnntgcttaaacaatggagactttctgataggcagcagtgattctgctcagcactgtataatgcatgtctccttttcctgagagatgggaagtataaggacaggaaggctgccctgctccagttgtgtaakcgtaactgtgtcacagataagatgggasgtggtgcagtgtagctagggcagtcggttgcattagcccagatgcttttgcttgttggtytttttagctgggaacatggtaygtcagcaagaggactcttacggtcctctgtaaacagagatgcttgcaatatgtgttagtcctgcctgtcatgatagcctaaagcwacagataagcaatggagatkattcttttagtcacttctcacaactgcgggtctttgtctttgaagagcttttgggtgctctttgccagtctctgctgagagagtacttgcttcgtggaacttgtagagtttt

SEQ ID NO: 20643 - DNA, 599 bp, Chicken  19866894231380_3
  misc_feature (1)..(84): n is any nucleotide
nnnnnnnnnnnnnnnnnnnnnnnnnnnnnnnnnnnnnnnnnnnnnnnnnnnnnnnnnnnnnnnnnnnnnnnnnnnnnnnnnnnntgcttaaacaatggagactttctgataggcagcagtgattctgctcagcactgtataatgcatgtctccttttcctgagagatgggaagtataaggacaggaaggctgccctgctccagttgtgtaakcgtaactgtgtcacagataagatgggasgtggtgcagtgtagctagggcagtcggttgcattagcccagatgcttttgcttgttggtytttttagctgggaacatggtaygtcagcaagaggactcttacggtcctctgtaaacagagatgcttgcaatatgtgttagtcctgcctgtcatgatagcctaaagcwacagataagcaatggagatkattcttttagtcacttctcacaactgcgggtctttgtctttgaagagcttttgggtgctctttgccagtctctgctgagagagtacttgcttcgtggaacttgtagagttttcctccattcttttgggatagaatgtagaactgatctaatgctgtactgtcagtctgcctt

SEQ ID NO: 20644 - DNA, 599 bp, Chicken  19866894231380_4
  misc_feature (1)..(62): n is any nucleotide
nnnnnnnnnnnnnnnnnnnnnnnnnnnnnnnnnnnnnnnnnnnnnnnnnnnnnnnnnnnnnntgcttaaacaatggagactttctgataggcagcagtgattctgctcagcactgtataatgcatgtctccttttcctgagagatgggaagtataaggacaggaaggctgccctgctccagttgtgtaakcgtaactgtgtcacagataagatgggasgtggtgcagtgtagctagggcagtcggttgcattagcccagatgcttttgcttgttggtytttttagctgggaacatggtaygtcagcaagaggactcttacggtcctctgtaaacagagatgcttgcaatatgtgttagtcctgcctgtcatgatagcctaaagcwacagataagcaatggagatkattcttttagtcacttctcacaactgcgggtctttgtctttgaagagcttttgggtgctctttgccagtctctgctgagagagtacttgcttcgtggaacttgtagagttttcctccattcttttgggatagaatgtagaactgatctaatgctgtactgtcagtctgccttaacacgaatcccagtccttcag

SEQ ID NO: 20645 - DNA, 600 bp, Chicken  19866894231380_5
gataggcagcagtgattctgctcagcactgtataatgcatgtctccttttcctgagagatgggaagtataaggacaggaaggctgccctgctccagttgtgtaakcgtaactgtgtcacagataagatgggasgtggtgcagtgtagctagggcagtcggttgcattagcccagatgcttttgcttgttggtytttttagctgggaacatggtaygtcagcaagaggactcttacggtcctctgtaaacagagatgcttgcaatatgtgttagtcctgcctgtcatgatagcctaaagcwacagataagcaatggagatkattcttttagtcacttctcacaactgcgggtctttgtctttgaagagcttttgggtgctctttgccagtctctgctgagagagtacttgcttcgtggaacttgtagagttttcctccattcttttgggatagaatgtagaactgatctaatgctgtactgtcagtctgccttaacacgaatcccagtccttcagattgtgaaggaatcccagcagcagcacggtttacgacatggggacttccagaggtacaggtcagtaagcagtgtggatgtcttgga

SEQ ID NO: 20646 - DNA, 600 bp, Chicken  19866894231380_6
ctcagcactgtataatgcatgtctccttttcctgagagatgggaagtataaggacaggaaggctgccctgctccagttgtgtaakcgtaactgtgtcacagataagatgggasgtggtgcagtgtagctagggcagtcggttgcattagcccagatgcttttgcttgttggtytttttagctgggaacatggtaygtcagcaagaggactcttacggtcctctgtaaacagagatgcttgcaatatgtgttagtcctgcctgtcatgatagcctaaagcwacagataagcaatggagatkattcttttagtcacttctcacaactgcgggtctttgtctttgaagagcttttgggtgctctttgccagtctctgctgagagagtacttgcttcgtggaacttgtagagttttcctccattcttttgggatagaatgtagaactgatctaatgctgtactgtcagtctgccttaacacgaatcccagtccttcagattgtgaaggaatcccagcagcagcacggtttacgacatggggacttccagaggtacaggtcagtaagcagtgtggatgtcttggagttgctgtctgtcacacagc

SEQ ID NO: 20647 - DNA, 600 bp, Chicken  19866894231380_7
cacaactgcgggtctttgtctttgaagagcttttgggtgctctttgccagtctctgctgagagagtacttgcttcgtggaacttgtagagttttcctccattcttttgggatagaatgtagaactgatctaatgctgtactgtcagtctgccttaacacgaatcccagtccttcagattgtgaaggaatcccagcagcagcacggtttacgacatggggacttccagaggtacaggtcagtaagcagtgtggatgtcttggagttgctgtctgtcacacagctgctgtgacttgctttgyttyattggcacaataacatttcaaatgtaaacctgctgtagcagtcagcaaaatcaatctggcaagtaaatatctcttgtcaggttgctccatgcttttttttttcctaatgaagcctaatatrttatgactgttccattgaggagtataaatactgcttctcrttttagagttgctttttaagagcttgttaacacctcgctgtgctcttacacacgttttcagtgaatgaacataaagacattagacgataggaattctaatttttcaagatcaagacttgttgcatgtcttcctacc

SEQ ID NO: 20648 - DNA, 600 bp, Chicken  19866894231380_8
aactgcgggtctttgtctttgaagagcttttgggtgctctttgccagtctctgctgagagagtacttgcttcgtggaacttgtagagttttcctccattcttttgggatagaatgtagaactgatctaatgctgtactgtcagtctgccttaacacgaatcccagtccttcagattgtgaaggaatcccagcagcagcacggtttacgacatggggacttccagaggtacaggtcagtaagcagtgtggatgtcttggagttgctgtctgtcacacagctgctgtgacttgctttgyttyattggcacaataacatttcaaatgtaaacctgctgtagcagtcagcaaaatcaatctggcaagtaaatatctcttgtcaggttgctccatgcttttttttttcctaatgaagcctaatatrttatgactgttccattgaggagtataaatactgcttctcrttttagagttgctttttaagagcttgttaacacctcgctgtgctcttacacacgttttcagtgaatgaacataaagacattagacgataggaattctaatttttcaagatcaagacttgttgcatgtcttcctaccttt

SEQ ID NO: 20649 - DNA, 527 bp, Chicken  19866894231380_9
tgatctaatgctgtactgtcagtctgccttaacacgaatcccagtccttcagattgtgaaggaatcccagcagcagcacggtttacgacatggggacttccagaggtacaggtcagtaagcagtgtggatgtcttggagttgctgtctgtcacacagctgctgtgacttgctttgyttyattggcacaataacatttcaaatgtaaacctgctgtagcagtcagcaaaatcaatctggcaagtaaatatctcttgtcaggttgctccatgcttttttttttcctaatgaagcctaatatrttatgactgttccattgaggagtataaatactgcttctcrttttagagttgctttttaagagcttgttaacacctcgctgtgctcttacacacgttttcagtgaatgaacataaagacattagacgataggaattctaatttttcaagatcaagacttgttgcatgtcttcctacctttctattctgtttattaaccactgatttgcaggttgtttcttaaatacat

SEQ ID NO: 20650 - DNA, 600 bp, Chicken  19866894231382_1
aaagctgtcatgctatcaacgtaaaatgtagtttaactcttcagaaatttgtttggaaaaaaacaatcaaaaaacataacagagttagttctgccagttgttctgctgaagtgttgggcctgttgactctgggagccagcagctgagatgcaaaaacaacccagaggactggttgttaccagtctcaagtattctgaactagttgcatccaacactgttgtgaaaagagatgaccaaatggctattaacatcttattttgcttttgagaatgaaatgaaatgcagatatttttccttgcrtttttttcctttttttttcttttttggtactgtgtcaatattgatttaaatgaaagacatggctattagtttaakagtttttagggggagaaagaacaagcgtgcagtgtacctgctggagaagctgcttatgtcaggtgttttatttctatgctttgcctaaactgagaatctgtcttcgtaagatttcagtcgttgttgccttggcagcccagatttcaaatctgatctcttctggcagtatgttatatcgctaactaaccatgggagaggccacatgcaatctgcggagttctgtga

SEQ ID NO: 20651 - DNA, 600 bp, Chicken  19866894231382_2
tgctatcaacgtaaaatgtagtttaactcttcagaaatttgtttggaaaaaaacaatcaaaaaacataacagagttagttctgccagttgttctgctgaagtgttgggcctgttgactctgggagccagcagctgagatgcaaaaacaacccagaggactggttgttaccagtctcaagtattctgaactagttgcatccaacactgttgtgaaaagagatgaccaaatggctattaacatcttattttgcttttgagaatgaaatgaaatgcagatatttttccttgcttttttttccrttttttttcttttttggtactgtgtcaatattgatttaaatgaaagacatggctattagtttaakagtttttagggggagaaagaacaagcgtgcagtgtacctgctggagaagctgcttatgtcaggtgttttatttctatgctttgcctaaactgagaatctgtcttcgtaagatttcagtcgttgttgccttggcagcccagatttcaaatctgatctcttctggcagtatgttatatcgctaactaaccatgggagaggccacatgcaatctgcggagttctgtgatgtgccctgt

SEQ ID NO: 20652 - DNA, 600 bp, Chicken  19866894231382_3
ataacagagttagttctgccagttgttctgctgaagtgttgggcctgttgactctgggagccagcagctgagatgcaaaaacaacccagaggactggttgttaccagtctcaagtattctgaactagttgcatccaacactgttgtgaaaagagatgaccaaatggctattaacatcttattttgcttttgagaatgaaatgaaatgcagatatttttccttgcttttttttcctttttttttcttttttggtactgtgtcaatattgatttaaatgaaagacatggctattagtttaakagtttttagggggagaaagaacaagcgtgcagtgtacctgctggagaagctgcttatgtcaggtgttttatttctatgctttgcctaaactgagaatctgtcttcgtaagatttcagtcgttgttgccttggcagcccagatttcaaatctgatctcttctggcagtatgttatatcgctaactaaccatgggagaggccacatgcaatctgcggagttctgtgatgtgccctgtggccctctgtctttttataaggagatatggccttcagagactacgggtccctgcaagcagagctc

SEQ ID NO: 20653 - DNA, 600 bp, Chicken  19866894231390_1
acatcgttgtcagaaaaaagatgcccatctcctctttatggtctactataaacacacttcatttgcagctgaaaaaggcagaagcttgctcttttttgatgactctgggaaggatctccatgcttgggtacctttggggccttcagctgcctccacacagcagcagctggctggcactcccaacatgtgattgtctgctgttgaaaactgctatcaataaaattttgctattttcttccaaacacaataacctgtcccagtcccattagcctgaacagaaaccaaggctcttgtagctgytccccaggwactaatggcctgaagccataaactgctacttcgtgctaatctctccatctaagagactttgggtcagtttatcttyggtaagmgacctccaggcactggaggaaagaagttgttgagtaacgttccttcctctggggctattcaatcagcacaggacaattatggtggagttccgtctctctagtgagggattaagccagagcaatgaccacttacagtcttaaaagacaacattacctctttttattatattgacattagagggttgttcaggctaaattccagtttgga

SEQ ID NO: 20654 - DNA, 600 bp, Chicken  19866894231390_2
tcagaaaaaagatgcccatctcctctttatggtctactataaacacacttcatttgcagctgaaaaaggcagaagcttgctcttttttgatgactctgggaaggatctccatgcttgggtacctttggggccttcagctgcctccacacagcagcagctggctggcactcccaacatgtgattgtctgctgttgaaaactgctatcaataaaattttgctattttcttccaaacacaataacctgtcccagtcccattagcctgaacagaaaccaaggctcttgtagctgytccccaggwactaatggcctgaagccataaactgctacttcgtgctaatctctccatctaagagactttgggtcagtttatcttyggtaagmgacctccaggcactggaggaaagaagttgttgagtaacgttccttcctctggggctattcaatcagcacaggacaattatggtggagttccgtctctctagtgagggattaagccagagcaatgaccacttacagtcttaaaagacaacattacctctttttattatattgacattagagggttgttcaggctaaattccagtttggataatcacat

SEQ ID NO: 20655 - DNA, 600 bp, Chicken  19866894231390_3
ttgctcttttttgatgactctgggaaggatctccatgcttgggtacctttggggccttcagctgcctccacacagcagcagctggctggcactcccaacatgtgattgtctgctgttgaaaactgctatcaataaaattttgctattttcttccaaacacaataacctgtcccagtcccattagcctgaacagaaaccaaggctcttgtagctgytccccaggwactaatggcctgaagccataaactgctacttcgtgctaatctctccatctaagagactttgggtcagtttatcttyggtaagmgacctccaggcactggaggaaagaagttgttgagtaacgttccttcctctggggctattcaatcagcacaggacaattatggtggagttccgtctctctagtgagggattaagccagagcaatgaccacttacagtcttaaaagacaacattacctctttttattatattgacattagagggttgttcaggctaaattccagtttggataatcacattctgctctgcaattagagaagcagtctggcaggcaggtaaatgtggagatgacctcaggagactgactcagctcta

SEQ ID NO: 20656 - DNA, 600 bp, Chicken  19866894231390_4
tttttgatgactctgggaaggatctccatgcttgggtacctttggggccttcagctgcctccacacagcagcagctggctggcactcccaacatgtgattgtctgctgttgaaaactgctatcaataaaattttgctattttcttccaaacacaataacctgtcccagtcccattagcctgaacagaaaccaaggctcttgtagctgytccccaggwactaatggcctgaagccataaactgctacttcgtgctaatctctccatctaagagactttgggtcagtttatcttyggtaagmgacctccaggcactggaggaaagaagttgttgagtaacgttccttcctctggggctattcaatcagcacaggacaattatggtggagttccgtctctctagtgagggattaagccagagcaatgaccacttacagtcttaaaagacaacattacctctttttattatattgacattagagggttgttcaggctaaattccagtttggataatcacattctgctctgcaattagagaagcagtctggcaggcaggtaaatgtggagatgacctcaggagactgactcagctctacctctgt

SEQ ID NO: 20657 - DNA, 600 bp, Chicken  19866894231402_1
gacatatgatctttgtttacttttgtctgttcatcttaacacatcaaagaaactgagaattagtcttgaccccagtcctcagctggggcatattaatatttgttttcactctgttttacataagtagatgaccaattcccaggctaacaggacaaaacaaaatctcccaaatctaattttaaagactaaattcaaaagtatataaaacaaggaaaatctatttgaaattattgttgatgtgattcagctctgtgaacctaaaggctctttgttatctctatttaaaaataaaattgataygttttaattaacttagtaccatttcatgtttcagaataaatttgtaaatctggtaaaactcatctctgctgaaagctgaatgtaggcatacattgcaacagaagaagtgtcttttctattttcaactagctacagttttagctggtgtacctatgttactcactgctttatatatacttactgaacaatactaggtaaagctattttcttaaattccaaaataacattttytacagggaagaaaaactgcttttgctggagactacagctaggtagacctgtaagggagggaagagagag

SEQ ID NO: 20658 - DNA, 600 bp, Chicken  19866894231402_2
tgttgatgtgattcagctctgtgaacctaaaggctctttgttatctctatttaaaaataaaattgataygttttaattaacttagtaccatttcatgtttcagaataaatttgtaaatctggtaaaactcatctctgctgaaagctgaatgtaggcatacattgcaacagaagaagtgtcttttctattttcaactagctacagttttagctggtgtacctatgttactcactgctttatatatacttactgaacaatactaggtaaagctattttcttaaattccaaaataacattttytacagggaagaaaaactgcttttgctggagactacagctaggtagacctgtaagggagggaagagagagtctaccggtagcttgtgaatatacgtatcttgtatcatttccatctcttgtttccctagggaagtttctgtatgtgtttttcctctttgtgtactagcatttcttcccacagtgcaattttcagcgtactcatatattgttctgaacatctttggatcacttggcgggtccccagatgttcgtgtgggttgagaaagtcgtagacacttcagttgagattcttcatagact

SEQ ID NO: 20659 - DNA, 600 bp, Chicken  19866894231410_1
tccacacagaagagataatttctatagaaggttctacacactgttttgcagggtttaacttcctttgtttctcaaggagtgaattttgctagaactaggggtgtttgttagagttgagacatcttctgagtgttatttatggtggggataagatagaaaactgtaggattttaagtggtgagcagttctcgagacagactgtaatactccttcaaattcctgcctcccaggcatgaatccatctctgccctatcctctgtgccagcactttcgtcagacagcgacaaggatggtgaagaygaagggaacgacgaagatgaattaagtgggctgcagtctttccatgttcagtccaactgcaacactgagagagactcaggtaataatggaagaggggcatgcryagaggtggagaaaaaatgtcatgagygtgaagtggggaagagacaagatgctgagttagggacaacaaggtatgggcagaargagaaagtccaaaacagaaatgggtggttcagcaacactaggtaatgttgccaattccagcatctaaagaggggtgtatttcagagctcagttgttaaattgccaagtttcctg

SEQ ID NO: 20660 - DNA, 600 bp, Chicken  19866894231410_2
tttgttagagttgagacatcttctgagtgttatttatggtggggataagatagaaaactgtaggattttaagtggtgagcagttctcgagacagactgtaatactccttcaaattcctgcctcccaggcatgaatccatctctgccctatcctctgtgccagcactttcgtcagacagcgacaaggatggtgaagaygaagggaacgacgaagatgaattaagtgggctgcagtctttccatgttcagtccaactgcaacactgagagagactcaggtaataatggaagaggggcatgcryagaggtggagaaaaaatgtcatgagygtgaagtggggaagagacaagatgctgagttagggacaacaaggtatgggcagaargagaaagtccaaaacagaaatgggtggttcagcaacactaggtaatgttgccaattccagcatctaaagaggggtgtatttcagagctcagttgttaaattgccaagtttcctgctagttccagctggtcaggcagttttttaattagtgccctggggcttggttctactgcccacagaaatccagtgtactggaacattttttttcccccaagctt

SEQ ID NO: 20661 - DNA, 600 bp, Chicken  19866894231410_3
ttgttagagttgagacatcttctgagtgttatttatggtggggataagatagaaaactgtaggattttaagtggtgagcagttctcgagacagactgtaatactccttcaaattcctgcctcccaggcatgaatccatctctgccctatcctctgtgccagcactttcgtcagacagcgacaaggatggtgaagaygaagggaacgacgaagatgaattaagtgggctgcagtctttccatgttcagtccaactgcaacactgagagagactcaggtaataatggaagaggggcatgcryagaggtggagaaaaaatgtcatgagygtgaagtggggaagagacaagatgctgagttagggacaacaaggtatgggcagaargagaaagtccaaaacagaaatgggtggttcagcaacactaggtaatgttgccaattccagcatctaaagaggggtgtatttcagagctcagttgttaaattgccaagtttcctgctagttccagctggtcaggcagttttttaattagtgccctggggcttggttctactgcccacagaaatccagtgtactggaacattttttttcccccaagcttt

SEQ ID NO: 20662 - DNA, 600 bp, Chicken  19866894231410_4
tgttatttatggtggggataagatagaaaactgtaggattttaagtggtgagcagttctcgagacagactgtaatactccttcaaattcctgcctcccaggcatgaatccatctctgccctatcctctgtgccagcactttcgtcagacagcgacaaggatggtgaagaygaagggaacgacgaagatgaattaagtgggctgcagtctttccatgttcagtccaactgcaacactgagagagactcaggtaataatggaagaggggcatgcryagaggtggagaaaaaatgtcatgagygtgaagtggggaagagacaagatgctgagttagggacaacaaggtatgggcagaargagaaagtccaaaacagaaatgggtggttcagcaacactaggtaatgttgccaattccagcatctaaagaggggtgtatttcagagctcagttgttaaattgccaagtttcctgctagttccagctggtcaggcagttttttaattagtgccctggggcttggttctactgcccacagaaatccagtgtactggaacattttttttcccccaagcttttgatggaccaccacacagtggcaaat

SEQ ID NO: 20663 - DNA, 579 bp, Chicken  19866894231410_5
tctcgagacagactgtaatactccttcaaattcctgcctcccaggcatgaatccatctctgccctatcctctgtgccagcactttcgtcagacagcgacaaggatggtgaagaygaagggaacgacgaagatgaattaagtgggctgcagtctttccatgttcagtccaactgcaacactgagagagactcaggtaataatggaagaggggcatgcryagaggtggagaaaaaatgtcatgagygtgaagtggggaagagacaagatgctgagttagggacaacaaggtatgggcagaargagaaagtccaaaacagaaatgggtggttcagcaacactaggtaatgttgccaattccagcatctaaagaggggtgtatttcagagctcagttgttaaattgccaagtttcctgctagttccagctggtcaggcagttttttaattagtgccctggggcttggttctactgcccacagaaatccagtgtactggaacattttttttcccccaagcttttgatggaccaccacacagtggcaaatgttctgctgagtcagagaaaatcatatgtcaaatt

SEQ ID NO: 20664 - DNA, 599 bp, Chicken  19866894231419_1
  misc_feature (1)..(157): n is any nucleotide
nnnnnnnnnnnnnnnnnnnnnnnnnnnnnnnnnnnnnnnnnnnnnnnnnnnnnnnnnnnnnnnnnnnnnnnnnnnnnnnnnnnnnnnnnnnnnnnnnnnnnnnnnnnnnnnnnnnnnnnnnnnnnnnnnnnnnnnnnnnnnnnnnnnnnnnnnnnnntttaaaaccagcagactctctttgaaaacacttaaataaatattcttgacttgcaagcttcaaaacaaagcactcaaatctgagctgacagagttaagtattcataaccatcagatgaaaagttgtaattagttttcagattytgacttactgagcaggatctgaccaaactcttactcaatgattagtgggtaagtagagaagggatcatccataacctttaaaactttcacataaayggttatgggggaaaaaaacaaaaaactgaagaggagaggtggatgattaaaaagaaaaaagagtagcagcaagttgttcagaagccttgattcttccattagtaatttcataatctccagtgactgtcttgagtagttactcaagataaatacatacggattcaagaaaccagatgactctgaagataaaagcacaactcagg

SEQ ID NO: 20665 - DNA, 599 bp, Chicken  19866894231419_2
  misc_feature (1)..(61): n is any nucleotide
nnnnnnnnnnnnnnnnnnnnnnnnnnnnnnnnnnnnnnnnnnnnnnnnnnnnnnnnnnnnntttaaaaccagcagactctctttgaaaacacttaaataaatattcttgacttgcaagcttcaaaacaaagcactcaaatctgagctgacagagttaagtattcataaccatcagatgaaaagttgtaattagttttcagattytgacttactgagcaggatctgaccaaactcttactcaatgattagtgggtaagtagagaagggatcatccataacctttaaaactttcacataaayggttatgggggaaaaaaacaaaaaactgaagaggagaggtggatgattaaaaagaaaaaagagtagcagcaagttgttcagaagccttgattcttccattagtaatttcataatctccagtgactgtcttgagtagttactcaagataaatacatacggattcaagaaaccagatgactctgaagataaaagcacaactcagggtagcttttactgtgttcattagagagtttccgaagragaataggaggaggaaagcaaggtggtcaraattcaggacaccatattaaagtcaaccc

SEQ ID NO: 20666 - DNA, 600 bp, Chicken  19866894231419_3
aatgattagtgggtaagtagagaagggatcatccataacctttaaaactttcacataaayggttatgggggaaaaaaacaaaaaactgaagaggagaggtggatgattaaaaagaaaaaagagtagcagcaagttgttcagaagccttgattcttccattagtaatttcataatctccagtgactgtcttgagtagttactcaagataaatacatacggattcaagaaaccagatgactctgaagataaaagcacaactcagggtagcttttactgtgttcattagagagtttccgaagragaataggaggaggaaagcaaggtggtcaraattcaggacaccatattaaagtcaacccaaatagttacattactgcaagggaagaataattctgaacacactaatgcttcygcttactatttaatctttttgaaattcacacatatgccatccacctagcagatgccaaggtactgccattttttgtcttttgcagtcattctacaatactatcgtatctttttaggaatttggtgaagagatgggcagtgactagaatctcaaggaagacctgtgccctccagtaagcagtgtcatgg

SEQ ID NO: 20667 - DNA, 600 bp, Chicken  19866894231419_4
atccataacctttaaaactttcacataaayggttatgggggaaaaaaacaaaaaactgaagaggagaggtggatgattaaaaagaaaaaagagtagcagcaagttgttcagaagccttgattcttccattagtaatttcataatctccagtgactgtcttgagtagttactcaagataaatacatacggattcaagaaaccagatgactctgaagataaaagcacaactcagggtagcttttactgtgttcattagagagtttccgaagragaataggaggaggaaagcaaggtggtcaraattcaggacaccatattaaagtcaacccaaatagttacattactgcaagggaagaataattctgaacacactaatgcttcygcttactatttaatctttttgaaattcacacatatgccatccacctagcagatgccaaggtactgccattttttgtcttttgcagtcattctacaatactatcgtatctttttaggaatttggtgaagagatgggcagtgactagaatctcaaggaagacctgtgccctccagtaagcagtgtcatggataatggcttctggcttcattttcaacaat

SEQ ID NO: 20668 - DNA, 600 bp, Chicken  19866894231419_5
agaaaaaagagtagcagcaagttgttcagaagccttgattcttccattagtaatttcataatctccagtgactgtcttgagtagttactcaagataaatacatacggattcaagaaaccagatgactctgaagataaaagcacaactcagggtagcttttactgtgttcattagagagtttccgaagragaataggaggaggaaagcaaggtggtcaraattcaggacaccatattaaagtcaacccaaatagttacattactgcaagggaagaataattctgaacacactaatgcttcygcttactatttaatctttttgaaattcacacatatgccatccacctagcagatgccaaggtactgccattttttgtcttttgcagtcattctacaatactatcgtatctttttaggaatttggtgaagagatgggcagtgactagaatctcaaggaagacctgtgccctccagtaagcagtgtcatggataatggcttctggcttcattttcaacaatgttcagtatatgggattatttatttatttatttattttaaacccctttaagtaagcttcatggtctcactgtcaggaattaa

SEQ ID NO: 20669 - DNA, 600 bp, Chicken  19866894231422_1
gagaaaacaaaaacaaaaaaatatgccatataacttaactgttggtgagaaatttatagcttacacacaaaggaaaaaaaaacctgaaaaatgcttctctgtggaggtgatcatagcacggcaagctgtaaataaagcaaacaaatacaaaaatctgtgcaagtgagaaggtgaaagctgaacaaaagccaggtggagggtcaaattgagagaaacagattgctgacaggtaatccagtgctttgttgcagtgtttgtaataaaagctaaatttaccataaaagcactgacagagagatrgtaaaacatgagtattgcagctgaaacaaaggaaatcggtgaaataaaatctgaactggagccagtttaaatagatcattgtgatggagaaatatagctttgagcaaacaaagacaaaagaagacttgttcaaattaaagcttaccatgatattactgaaatcaataaaactgcacacttggtatgtaatgccctgagttgctgagcagagtccagtgacctcaatcacaagattaagctgttacacagattgaaaattcgattgtgagaaacatacacaaaagactgcttgggaaaaaa

SEQ ID NO: 20670 - DNA, 600 bp, Chicken  19866894231427_1
atgtggatacggcccaaagggccatgctgtggtagtgggacatggtaggttgtgccgactgctggacttgctgatctttaaggtcctttccaacctgggtgattctatgattttaagtcgctgaacttattgaaaatataagcaatgtttataccaaaaccgtcactaaaattgataaaacaagtttgcctgctatcaagtctctcatctttgcactctgatctgctttggtgtagaggaagaaagctgtgtgcattgcttgacttgagatctgctgtttttcagtaacacctaagcttkcaggcttttagcaccggaatttgaatgaaagcaaaaggatcagtagaaacacaacactgaactttattgctccagaaccaccaatgcttacttgacatatatgctactccagtttacatcagtctgctttaaaacatgtcagttgtctaatcttctttcactgcttatgagaacacacgaattcaatccaaacctgcaaactctaaacgaatacattttctctactcctgaactctttctatggttacagcatagtgccatctgctgtacatttgcctatgtacaatcgttccaaccacc

SEQ ID NO: 20671 - DNA, 600 bp, Chicken  19866894231434_1
cttattgaaaggtatggtgaacacatttcataagacctatctattttaattaaaagatgatattttcctttcccgttagttttacagacctaacacagccataagaaggtgatattttgctgattcacgtctattacacatggacaaatctactatttcctttttcaaccagtgatcacattccaagtctttactgacacctcaaattttggcactgccttttttaatcatagaatggcttgagttgggaggaaccctacaggcaggctgtcagcaactagactagatcaagcactagayctggtttcccggggccccatccaacctggccttaattacctccaaggatggggcatccaacagcctctctgggtatcctgtgccaggacctcactactctctcaataaagatcttccccctaacgtctaatctaaacctcctttcatttagtttaaagccattcccccatgtgctatcactatcaacccatgtaaaaagttgatttatctcatcaarctttgaaatctttccttgatttaggtcttaatttaggtcaagtttctgctaattttggtcactggtaatgctgaaggatctga

SEQ ID NO: 20672 - DNA, 513 bp, Chicken  19866894231434_2
ccttttttaatcatagaatggcttgagttgggaggaaccctacaggcaggctgtcagcaactagactagatcaagcactagayctggtttcccggggccccatccaacctggccttaattacctccaaggatggggcatccaacagcctctctgggtatcctgtgccaggacctcactactctctcaataaagatcttccccctaacgtctaatctaaacctcctttcatttagtttaaagccattcccccatgtgctatcactatcaacccatgtaaaaagttgatttatctcatcaarctttgaaatctttccttgatttaggtcttaatttaggtcaagtttctgctaattttggtcactggtaatgctgaaggatctgacctatcagatgttttacagttatgttcctcaactgtataaatgcaatcaacttgtcttagtgcattaacctaaaatcagctataatactttcttttcctcccaggtgtttgttgttcctgacaatgacag

SEQ ID NO: 20673 - DNA, 600 bp, Chicken  19866894231437_1
gtaaattgaaagagctgtaagggaaaaaaaaaattcactagagaagttgtgcactctgaagtgaaacataatcctcttttgtctggagagaaaccactacaaggtataagatactactgttctttcagtccctagaacatgtatggcagtccatgctgtgggggtgaatgatttctcccaaagaactgacagatccatgctcagtcacttaaatactgtacatcttcagtcttcactgccaacatttctcttttattcccttagttcttttatttatttagttcgtttctaaacaatttwtctacaaaattattatccagtttgcaaatggatagaaacacgagttttgtgtagcttgctttttattgtttgcattccttcccactcatacattgtagcacctttgtagcaattgtagttgaagtgtattactttttcagctgtttaaaagtatgattttacttgtaaaatctactttaagtgttgttgattttgatgttaattcctagaaaaggaccaggctcagaacagccaattatgtagtctgggggctgttcatccactgttgagtagtagacattttccattgctgtcatcctg

SEQ ID NO: 20674 - DNA, 600 bp, Chicken  19866894231441_1
gaggctgtccatctgcttctgagcaaaaaacaagctgttatgattttttgttgaatcatctttaagttcaaattagtaatttctaatttcataattttgaatattctgtgagaccttatgaaactatcacgcaaaacaccatcaaaaaatagatttaaacctcgaagttgacatgcacatcatacaaaactgaaggatttggctcttctgaccagctgaaatcattcacgtcttaacatgaatgtctttcaaagtgacctccaacgtggtttatctatgtagaaaatgataaattattcwgttgaaaatagcatttcccagggatgttttcagttaattcctcaactcagaacaagaatttcatgcaataagtgaataacaagaactaatatgtgtgtctgaatctgaagttacaactttgtttgaagctttctccagtaataaacaaattaaacagaatatctttcttattttaaccatgctttaaaggttattacagatcactgctaatgtttgctggccatgaatactggygcattacttttcttgttatggactattggtttatatgcaatttaaaatgcaaagccaaattacgca

SEQ ID NO: 20675 - DNA, 600 bp, Chicken  19866894231441_2
aacatgaatgtctttcaaagtgacctccaacgtggtttatctatgtagaaaatgataaattattcwgttgaaaatagcatttcccagggatgttttcagttaattcctcaactcagaacaagaatttcatgcaataagtgaataacaagaactaatatgtgtgtctgaatctgaagttacaactttgtttgaagctttctccagtaataaacaaattaaacagaatatctttcttattttaaccatgctttaaaggttattacagatcactgctaatgtttgctggccatgaatactggygcattacttttcttgttatggactattggtttatatgcaatttaaaatgcaaagccaaattacgcactgctgaaacatcacacaggaaatgaaatattttatgagtaatggaataaaggaaagtattatacactctagaaccatagaatactgtttctatcctgtagttcattaaatctgtctttaataaagacagatattaatgtctagaaacacttayaatgcctgttgctcatgtattagtaacaaactgaaacattgatttagaaaataagatcttgttatgcttgaaatgtggaa

SEQ ID NO: 20676 - DNA, 600 bp, Chicken  19866894231441_3
cagaatatctttcttattttaaccatgctttaaaggttattacagatcactgctaatgtttgctggccatgaatactggygcattacttttcttgttatggactattggtttatatgcaatttaaaatgcaaagccaaattacgcactgctgaaacatcacacaggaaatgaaatattttatgagtaatggaataaaggaaagtattatacactctagaaccatagaatactgtttctatcctgtagttcattaaatctgtctttaataaagacagatattaatgtctagaaacacttayaatgcctgttgctcatgtattagtaacaaactgaaacattgatttagaaaataagatcttgttatgcttgaaatgtggaaagaaatccagcttcagtttaagctaacatatggtatgggctatacaatttcctgaaaagagtttatatgtcatagaaataatattatgttctgacttgatagcagaaatagtgttgagttggttggttgttttattattaaagactaagggataggtgactaactgcccttctcaaggcaaaatttactatttggtattatacagggcttggatatcaat

SEQ ID NO: 20677 - DNA, 600 bp, Chicken  19866894231449_1
aaagaatgatttccagaatttggactgcaacgatgtaccaaaattgacactgcgcaaatgtattatttcatcatatttgcaactggaatgtggaaatgtcaaatgtttcttgtgaacattttcctctgaaactgaagtggcttttccagccactacaaactgccaccagtgaggaaaaatgatgctgccattactttttcttgagaccttatttcagccactttccatgcatgagtaggtgtctatcagtgacatctactgaccaagttaaaaaacacaaccttgataaatgccaactgyattcagttgtgtgtttgaacgctaaacgyatcagatgatagaaaaattagaaacatcctctatatcagtgactccaaatccaaacccatagtgtggtattactacattgcactcagagggtggtgtcacactggaacaggttgccccaggaggttgtggatgccccatccttagaggcattcaaggccaggctggatgtagctctgggcagcctggtctggtggttggaaaccctgcacacagcagggggattgaaactagatgatctttgagggccttttctatccagggcattccatg

SEQ ID NO: 20678 - DNA, 582 bp, Chicken  19866894231449_2
acgatgtaccaaaattgacactgcgcaaatgtattatttcatcatatttgcaactggaatgtggaaatgtcaaatgtttcttgtgaacattttcctctgaaactgaagtggcttttccagccactacaaactgccaccagtgaggaaaaatgatgctgccattactttttcttgagaccttatttcagccactttccatgcatgagtaggtgtctatcagtgacatctactgaccaagttaaaaaacacaaccttgataaatgccaactgyattcagttgtgtgtttgaacgctaaacgyatcagatgatagaaaaattagaaacatcctctatatcagtgactccaaatccaaacccatagtgtggtattactacattgcactcagagggtggtgtcacactggaacaggttgccccaggaggttgtggatgccccatccttagaggcattcaaggccaggctggatgtagctctgggcagcctggtctggtggttggaaaccctgcacacagcagggggattgaaactagatgatctttgagggccttttctatccagggcattccatgattctacagtt

SEQ ID NO: 20679 - DNA, 600 bp, Chicken  19866894231457_1
aatcaactgctacatggagaattgattgctcctttgctgattgaaacagtggtgatttgctgggccatgactttatggcctttttcctgtttgcttttcaattactctctacaggaaaaaaaagaaagggttttccaccacgaccatccctgagaaagcaatgcctgctggaggctgccttgccttcatctgcatgcactgagttgctgcaaagcattcagctacttaaaaccaatcctgcacttattattttcaaagactgacttctaaacctgagattttgtgggcccagaggagtgraaatgactggtgtgagcggaataacctgacttgcttacattgaaggctttatctccactgggatcagggccttcagcattgctgtcttgggacgatggagatgcatccattccattttgaacagcagtataattgttttcattgctgtttcccactgtttgagtgggatggctttaaggcagcgcagcagagaggaaaagaagctcaaaactgctctgctcaacaggacgtgcgctgaggaaagcaaggtaagcagtgctgtgtgcagggcaatccttcattgctgactgctctaccagg

SEQ ID NO: 20680 - DNA, 599 bp, Chicken  19866894231458_1
  misc_feature (1)..(95): n is any nucleotide
nnnnnnnnnnnnnnnnnnnnnnnnnnnnnnnnnnnnnnnnnnnnnnnnnnnnnnnnnnnnnnnnnnnnnnnnnnnnnnnnnnnnnnnnnnnnnnncatgaaagaagtatgacttagcacaactcaccatgaatagataccctctctaacctgcctctcccttcacaaactaatctcaaactcttctaaaagtattattttattcattttcatttatttatttattaataaaatacaaatttggcaatctttacaggcagtaaaatatattctgttccacaagtataaaaactgtccagaragtaaactagtaatgaaaatgagtagraaaattatatctacaagataaaagctgtcaggaaagcttgtgcaaattgtcttggccctttatttctatttctgctccatctggaaagtatcttttgtgagaacaagtgagtgattcaagctgttaaactggtcctttgagtaagaacttacggaactgaatcaaagtataaaatgaagaagtggtagtcctatttaaagaatatcatamtattcactgtggatatcagcagacctttgcaaagggtcagttttttttccttacttgattag

SEQ ID NO: 20681 - DNA, 599 bp, Chicken  19866894231458_2
  misc_feature (1)..(68): n is any nucleotide
nnnnnnnnnnnnnnnnnnnnnnnnnnnnnnnnnnnnnnnnnnnnnnnnnnnnnnnnnnnnnnnnnnnncatgaaagaagtatgacttagcacaactcaccatgaatagataccctctctaacctgcctctcccttcacaaactaatctcaaactcttctaaaagtattattttattcattttcatttatttatttattaataaaatacaaatttggcaatctttacaggcagtaaaatatattctgttccacaagtataaaaactgtccagaragtaaactagtaatgaaaatgagtagraaaattatatctacaagataaaagctgtcaggaaagcttgtgcaaattgtcttggccctttatttctatttctgctccatctggaaagtatcttttgtgagaacaagtgagtgattcaagctgttaaactggtcctttgagtaagaacttacggaactgaatcaaagtataaaatgaagaagtggtagtcctatttaaagaatatcatamtattcactgtggatatcagcagacctttgcaaagggtcagttttttttccttacttgattagcatgcatagttttttcaaactgttagt

SEQ ID NO: 20682 - DNA, 600 bp, Chicken  19866894231458_3
atttggcaatctttacaggcagtaaaatatattctgttccacaagtataaaaactgtccagaragtaaactagtaatgaaaatgagtagraaaattatatctacaagataaaagctgtcaggaaagcttgtgcaaattgtcttggccctttatttctatttctgctccatctggaaagtatcttttgtgagaacaagtgagtgattcaagctgttaaactggtcctttgagtaagaacttacggaactgaatcaaagtataaaatgaagaagtggtagtcctatttaaagaatatcatamtattcactgtggatatcagcagacctttgcaaagggtcagttttttttccttacttgattagcatgcatagttttttcaaactgttagtctatgtatttctatgagtgtgaacacagagtaacttgaatatccagattaaaaaacataaaastgtttacttataccttatttcacatagtacaagaattgaaatgttactgttctagtaaagttctaaagagtagatttaccttagtagttttttctgaaactacctgggtagcaaatctgcgtttgattacagttactggatttggaat

SEQ ID NO: 20683 - DNA, 487 bp, Chicken  19866894231458_4
tttctatttctgctccatctggaaagtatcttttgtgagaacaagtgagtgattcaagctgttaaactggtcctttgagtaagaacttacggaactgaatcaaagtataaaatgaagaagtggtagtcctatttaaagaatatcatamtattcactgtggatatcagcagacctttgcaaagggtcagttttttttccttacttgattagcatgcatagttttttcaaactgttagtctatgtatttctatgagtgtgaacacagagtaacttgaatatccagattaaaaaacataaaastgtttacttataccttatttcacatagtacaagaattgaaatgttactgttctagtaaagttctaaagagtagatttaccttagtagttttttctgaaactacctgggtagcaaatctgcgtttgattacagttactggatttggaatccactcaaggacttttaataggcagaacaatatgtacag

SEQ ID NO: 20684 - DNA, 600 bp, Chicken  19866894231461_1
ttgtgtatgtgaatgaaactcaggatcctcctctgtatctgtttagtcctcaccccatagatgatggggttgagcacagctggcacaaggatgtagatgttccccatgatgatatggacaagcggggcgaggtcccttccaaaccggtgcaccacggacagcccaatcagtggtacatagaaggccaagaccacacagatatgggcaatgcaggtgctgaacgccttgagcctctccttccacgatgccagccgcaagacagccttgaggatcaggaggtaggagatgcagatgaggagrgcgtccagccccatgaccagcaggatggcagtgaggccatacaccacactgggagtggtgttggcgcaggccaggttcatcacgtcctggtgcagacagaaggagtgtgacagcacccgtgagctgcagaaaggaagcggcaggaggagcaaaggcaagggcaggaagaagagaactcccctgatcatggctgccagccctatttttgctgttgtggcattggtgaggatggcagcatgtctcagtgggtggcagatggccacatagcggtccacagccatggccaggaggatggtagac

SEQ ID NO: 20685 - DNA, 600 bp, Chicken  19866894231471_1
gacatgttcaaggaaaaagagctgcctgggtccatgagcgacgactccacttttggttacacaccactgctctactcaaagggtaatccaggcattatgtcacccctggcaaagaaaaagctgctgtcgcaggtcagtggggcagccttatcatgtagctatccttacggttctcctccacctttgattagcaaaaagaaattgaacagcagagatgaactgtcatcaagcctatcacagggtccccacgtccctaattctgatcccatagcaattaataggccatcggtcatacagcaygtgcagagttttaaatccaaggaagaaaggaaatcaattaatgatgttttcaaacatgacatgctaagtaaagtggatcctcagcgctgtgatttttcacaacaccgcctcagttctcttgctgagtcgtacgtaccgaagacagatatccaggactgcaaagataaaatgactgagaaaagggcactgcagcactcccgtgtgcccactttcttggcagatttttattcatcacctcatctgcacaacctttataggcacacggagcaccaccttaataatgaacagacatcaaagtac

SEQ ID NO: 20686 - DNA, 600 bp, Chicken  19866894231482_1
ctgtttgtagtactttggtttccattctcatcaaagcccagggtgctgctggctgcacctttgtcatatgaggctggaagagatggagagtagccactttctttggccagagctggaaaaagagtcccattattgcttgcagaaggctggggcacctgggcatagtgtggctctggagaaggtactgggtagaccccagtaggcagcaggggctgccctggctgggaatagctctgcttgggcttcactgtggggctgctctccgggctcttctccaccactgtatgcagctgcccttcyccatagtgggtcttcagcagaggtccctgggagagggggctgacaagaggagaccaggaccctttcagctggcttcggctaggcttgttcagatcaaggccagaacaygagctgggtctctcgtgatgcctgatggctgcgtagctgtcgctgcgagtgggaggcaagggaggtcccttgtggggtttactttcgctgtctgagcagccctggcctggctgcatccaggagggagctgtgttgttccggctgaagttgtggagtctgccatggccacggccgtccagagaggcccgggcc

SEQ ID NO: 20687 - DNA, 600 bp, Chicken  19866894231482_2
agagctggaaaaagagtcccattattgcttgcagaaggctggggcacctgggcatagtgtggctctggagaaggtactgggtagaccccagtaggcagcaggggctgccctggctgggaatagctctgcttgggcttcactgtggggctgctctccgggctcttctccaccactgtatgcagctgcccttcyccatagtgggtcttcagcagaggtccctgggagagggggctgacaagaggagaccaggaccctttcagctggcttcggctaggcttgttcagatcaaggccagaacaygagctgggtctctcgtgatgcctgatggctgcgtagctgtcgctgcgagtgggaggcaagggaggtcccttgtggggtttactttcgctgtctgagcagccctggcctggctgcatccaggagggagctgtgttgttccggctgaagttgtggagtctgccatggccacggccgtccagagaggcccgggcctcactgcttggaagcaaagcagaggatttcacctcgtactcctcagaaatccttcgctgggaatcatagactgtcttgacatacctgatgtcagcttgcttcatgccc

SEQ ID NO: 20688 - DNA, 599 bp, Chicken  19866894231485_1
  misc_feature (1)..(206): n is any nucleotide
nnnnnnnnnnnnnnnnnnnnnnnnnnnnnnnnnnnnnnnnnnnnnnnnnnnnnnnnnnnnnnnnnnnnnnnnnnnnnnnnnnnnnnnnnnnnnnnnnnnnnnnnnnnnnnnnnnnnnnnnnnnnnnnnnnnnnnnnnnnnnnnnnnnnnnnnnnnnnnnnnnnnnnnnnnnnnnnnnnnnnnnnnnnnnnnnnnnnnnnnnnnnnnaggagctccaagagctccatgtccttcctgtactggggaccccaggcctggatgcagtactccggatggggactcaaaagagctgagtagaggrgcacaatcacctccttctccctgctggccaccccttctttaatgcagcccagaacacagttggccttctgggctgcaagcgcacactgctggctcacgtccagcttctcatccaccaggatccccaagtccttctccgcagggctgctctcaaggagatcttccyccagtttgtattaatacctgggattgccccgacccaagtgcagcaccctgcacttggccttattgaacctcattaggttttcatgggcccacttctccagcctgtccaggtccctgtggatggcttccctgcct

SEQ ID NO: 20689 - DNA, 599 bp, Chicken  19866894231485_2
  misc_feature (1)..(41): n is any nucleotide
nnnnnnnnnnnnnnnnnnnnnnnnnnnnnnnnnnnnnnnnnaggagctccaagagctccatgtccttcctgtactggggaccccaggcctggatgcagtactccggatggggactcaaaagagctgagtagaggrgcacaatcacctccttctccctgctggccaccccttctttaatgcagcccagaacacagttggccttctgggctgcaagcgcacactgctggctcacgtccagcttctcatccaccaggatccccaagtccttctccgcagggctgctctcaaggagatcttccyccagtttgtattaatacctgggattgccccgacccaagtgcagcaccctgcacttggccttattgaacctcattaggttttcatgggcccacttctccagcctgtccaggtccctgtggatggcttccctgccttccaatgtatcgactgcactgctcagcttggtgtcatctgcaaacttgctgagggtgcactcgacaccatcgtctatgtcattaaggaagatgctgaacaataccggtcccaagactgagtcctgggggacaccacttgtggtcagcctccaccctgacacagaa

SEQ ID NO: 20690 - DNA, 599 bp, Chicken  19866894231491_1
  misc_feature (1)..(18): n is any nucleotide
nnnnnnnnnnnnnnnnnncagatgaggcctgtatgttttttaggagaacaattctcacgtttgcagatttttaagaaagcataccccaccccaatatcccaagcaaacatttgttccttctctttcaattcatttatatagtacttgtcagctggtcttaaatgcagtaccaaaagtagcatttgtaatttctatgttaatttctttctgtgaattggagtgagttttctcatctttggaatagtcccagacaccagtctgaaagaggagattaaatcagtattgctaattatttagatrgtgaaaaaatgaagactggtgagcagatcttagttctgattttgcctcagttgctctatatccttttacaagaatcctttgtcagtgtgaagcactggcaaaaattgttacctactgcagggagggaaggaagaaacctgcaagcaaaamgattttctagagcaagaaagagacttaagcctaagatggcctcatccatggctcttgcaggtatgtcagcatccccaygttgcagggcacaagtcagaggcagcaggaaattctcatgtgaagtgctaaattcattcttggtttgaatg

SEQ ID NO: 20691 - DNA, 600 bp, Chicken  19866894231491_2
gctggtcttaaatgcagtaccaaaagtagcatttgtaatttctatgttaatttctttctgtgaattggagtgagttttctcatctttggaatagtcccagacaccagtctgaaagaggagattaaatcagtattgctaattatttagatrgtgaaaaaatgaagactggtgagcagatcttagttctgattttgcctcagttgctctatatccttttacaagaatcctttgtcagtgtgaagcactggcaaaaattgttacctactgcagggagggaaggaagaaacctgcaagcaaaamgattttctagagcaagaaagagacttaagcctaagatggcctcatccatggctcttgcaggtatgtcagcatccccaygttgcagggcacaagtcagaggcagcaggaaattctcatgtgaagtgctaaattcattcttggtttgaatgcagttgcagtttagggttatgttcttcactgcagtgccttaaagtcagaataaccaataaatttatttaaaacagaacaaagatattgttccatgcattagagctttttgatttttaaattactacttttgctgccgtgacccctagttaa

SEQ ID NO: 20692 - DNA, 600 bp, Chicken  19866894231491_3
ctcatctttggaatagtcccagacaccagtctgaaagaggagattaaatcagtattgctaattatttagatrgtgaaaaaatgaagactggtgagcagatcttagttctgattttgcctcagttgctctatatccttttacaagaatcctttgtcagtgtgaagcactggcaaaaattgttacctactgcagggagggaaggaagaaacctgcaagcaaaamgattttctagagcaagaaagagacttaagcctaagatggcctcatccatggctcttgcaggtatgtcagcatccccaygttgcagggcacaagtcagaggcagcaggaaattctcatgtgaagtgctaaattcattcttggtttgaatgcagttgcagtttagggttatgttcttcactgcagtgccttaaagtcagaataaccaataaatttatttaaaacagaacaaagatattgttccatgcattagagctttttgatttttaaattactacttttgctgccgtgacccctagttaaactgtttaggcaaacaattatgcaaatgagttactataatggcaaaaaaccatgtatgtgtgtgcagaaatgaataga

SEQ ID NO: 20693 - DNA, 332 bp, Chicken  19866894231499_1
taagggagagtttttgaggtaagagttctcattctgtgtaaaatacacccttcctcttcctcccttcccccccccaccattttcaaatgtgaatcacggcaggaactgctgaaagactgaagcttgctaggcatagccactcagcttaacactgacttatctaatattcaggcataataggtacctgaaaaggttacattgggcacaggttttaatttactgcaagagaaaactcagatttaatgtgatctcacctggataggtggaaatgtcaaaggaattcatttcattaccacagaygaaaggaatcttgagtagcatgtaaaaatgtt

SEQ ID NO: 20694 - DNA, 600 bp, Chicken  19866894231502_1
aataaactatcctaatcctttagctcccattattgctttgtaagtgataagcagagcaagtaaaaaaaaatcaatgttactttttgctaaaaatgcactctcttgattaaaaaacaaaacaaaacaaaaaccaaaatacacaccaaaatttttagtcacatttgctttgatcagaaacttttaatatgacttccttaagcctgtacaataaaatatatgcttttattttcattctgaatgtgtttgcaactaagttcaccattccatgttgtttgtttggtttgtttattttcctggagyctgaatcatkctgtcctacattccctcagctagagtagtgtctttctagaagtgcaaagatttcaaaggattctggaagcaaggtgtttatattccactcaggagtgctttcacaggttgtgaaccaaattaatgaatccgaataagcattagaaggttttctgcttaatggcacgctctgagatttgtttttccatytcaaatcacaaaatttttcacaaaatggtaaatctgttttcagtcggctcgcaggcttttcagtcttttttgcaggtgcacttgacacgacaggaaaagaat

SEQ ID NO: 20695 - DNA, 600 bp, Chicken  19866894231502_2
cctaatcctttagctcccattattgctttgtaagtgataagcagagcaagtaaaaaaaaatcaatgttactttttgctaaaaatgcactctcttgattaaaaaacaaaacaaaacaaaaaccaaaatacacaccaaaatttttagtcacatttgctttgatcagaaacttttaatatgacttccttaagcctgtacaataaaatatatgcttttattttcattctgaatgtgtttgcaactaagttcaccattccatgttgtttgtttggtttgtttattttcctggagyctgaatcatkctgtcctacattccctcagctagagtagtgtctttctagaagtgcaaagatttcaaaggattctggaagcaaggtgtttatattccactcaggagtgctttcacaggttgtgaaccaaattaatgaatccgaataagcattagaaggttttctgcttaatggcacgctctgagatttgtttttccatytcaaatcacaaaatttttcacaaaatggtaaatctgttttcagtcggctcgcaggcttttcagtcttttttgcaggtgcacttgacacgacaggaaaagaatagatgtgaga

SEQ ID NO: 20696 - DNA, 600 bp, Chicken  19866894231502_3
gcctgtacaataaaatatatgcttttattttcattctgaatgtgtttgcaactaagttcaccattccatgttgtttgtttggtttgtttattttcctggagyctgaatcatkctgtcctacattccctcagctagagtagtgtctttctagaagtgcaaagatttcaaaggattctggaagcaaggtgtttatattccactcaggagtgctttcacaggttgtgaaccaaattaatgaatccgaataagcattagaaggttttctgcttaatggcacgctctgagatttgtttttccatytcaaatcacaaaatttttcacaaaatggtaaatctgttttcagtcggctcgcaggcttttcagtcttttttgcaggtgcacttgacacgacaggaaaagaatagatgtgagaaaggaaatgcatcagttttatttagtagtctcctaaaaagaaagtagacatctctgttgttactcttccatgacaaagaaataagagagttctcttctcttctgcttttttagtctttgtttctctgtatgccttttgctgttttatttgccatctcttgtccgctgaagggaaagcaatcaccatcc

SEQ ID NO: 20697 - DNA, 512 bp, Chicken  19866894231503_1
ttgcaagggagcttgattttactggctccaagcacatgacaatcacgtgtaaagtctgaaaatatcctgtgtctgacatgaaactctcaggattaaaaaagaacctaataaaattagacaagggaaaaaaatagtttacatgtattttttatttatgatttcagagcttctaggctaaacaaaggttacatgttgaagatctttttttaagctaagacaggcaagatttaggttagatattaggaaggagtttttcacacagagggtggtgaagcactgggacaggttgcccaaggaggytgaggatgatccatccctagaggcactcaaggccaggctgttgcactgggcagcctggtctagtggttggtgatcctgcccatagcaggtgggttgaagctagatgatctttaatgtccttttcagcccaagacattctggattatatgattctcttttccacatatgtttggattaaagcaatgcactgtcataatcaatactcaagttct

SEQ ID NO: 20698 - DNA, 600 bp, Chicken  19866894231506_1
ttaaagctattacagtttcacctaattagaaggttacctacacgtagtaactaatttagtacagaatcacagaatggcttgggttggaagggacctcaaggatcatgaagctccaatcccctgctgcaagcagggctgccaatctccatgtctaatactagaccaggctacccagggcctcacacatccctccagagatggacaggttatagacacaaaccacaagctattttggccttttctccttcacatattcagatactgggaaacagaagtggtgtcagtcgttctcaccaggakttgattcacttcagggagcaaagcctgtcagaacaagcagctgaccagaactcctcagctgctttctacggcctatcctgagagcagacacatacccacttgctataacattaacagcagyggggcaaaactcctagccccaaattaaaataattatgcaattggattattattattttttattattattattatttcccttgcaatacaaagtattggaatcctcgtcaaaataagcatttcatttaggaatccaggaattccagtttgggcgataattttcttaatattcagttatcc

SEQ ID NO: 20699 - DNA, 530 bp, Chicken  19866894231506_2
tgctgcaagcagggctgccaatctccatgtctaatactagaccaggctacccagggcctcacacatccctccagagatggacaggttatagacacaaaccacaagctattttggccttttctccttcacatattcagatactgggaaacagaagtggtgtcagtcgttctcaccaggakttgattcacttcagggagcaaagcctgtcagaacaagcagctgaccagaactcctcagctgctttctacggcctatcctgagagcagacacatacccacttgctataacattaacagcagyggggcaaaactcctagccccaaattaaaataattatgcaattggattattattattttttattattattattatttcccttgcaatacaaagtattggaatcctcgtcaaaataagcatttcatttaggaatccaggaattccagtttgggcgataattttcttaatattcagttatccagcagacaaaacatactccattggtcggctcccttccataaccccacccag

SEQ ID NO: 20700 - DNA, 600 bp, Chicken  19866894231510_1
tgctttggaagcaagaaaggcaagtcaggatggaaagaaaaaagggagaaactgacagttacagagattgagggggtggctggggcaagtctagcacaaaatgttactgtcatctaaacctgatctgtgctgcaagtggaaggaaagaaaggagcaagagaatacgaagagacgacaaagtagtcactctttgttcagccaaggctctgacttcacagctttagttcacatctacgggcagcactctggtagctgcaccgtgctttgtcccggtattgcactcgtacgttccctgtgctygtactggggctgcactttcacttgtgctgtgccttggggccagctccagcttccgatccagctcaaggaatctgctgaacaagctgtgttacaagaatgcctttgctgctatgcttgcttacattcattttgctgctgctttgtttgcagtctaactactgcaagcttgaccttagctcctacttaacaaataaatattttgctctgttgctgttgatctatctggcgttgcaagataaagcagatttagggtcggaccgataaagctgggctgcacctccttttgtacgcccacacgga

SEQ ID NO: 20701 - DNA, 600 bp, Chicken  19866894231510_2
agcagctgagatggctttgagttctggatatcatatttctaaaaggactgactgacttgtggagaatttgggataggaggaaaggaaaacggtgatggagaaggaaaacccttcacatagacactggcacggaacgaggagacagagaagggaggaaggaaaggcagggccatgcagtgtcccagagatggtcggagtcatcagctgccatcaacctttcctcatcgcagagggaaaaaggaaaattaaagtgaatggcaacacatttcagctaataaaggaaacagatcttttctgccygttaaaaacyctaacaccrcagaagggatacagctccgtgttctccaaggtaaaagccaggccaggaagaaatgcggatgcattgcctcgcagtgctcacctggagcccacgcggtgctgctgcctggcagggctctgtgctggtgccgggcagggcagcacgtagcagtgtggctctggagcagaacacgtaccagacgggttattgagacaggaatttcttgtcatcrcaacagcttgacttacctttgtcatcttaatgcattgcactcagasgttggtaggtttaaaaaaacccaa

SEQ ID NO: 20702 - DNA, 600 bp, Chicken  19866894231510_3
atggctttgagttctggatatcatatttctaaaaggactgactgacttgtggagaatttgggataggaggaaaggaaaacggtgatggagaaggaaaacccttcacatagacactggcacggaacgaggagacagagaagggaggaaggaaaggcagggccatgcagtgtcccagagatggtcggagtcatcagctgccatcaacctttcctcatcgcagagggaaaaaggaaaattaaagtgaatggcaacacatttcagctaataaaggaaacagatcttttctgccygttaaaaacyctaacaccrcagaagggatacagctccgtgttctccaaggtaaaagccaggccaggaagaaatgcggatgcattgcctcgcagtgctcacctggagcccacgcggtgctgctgcctggcagggctctgtgctggtgccgggcagggcagcacgtagcagtgtggctctggagcagaacacgtaccagacgggttattgagacaggaatttcttgtcatcrcaacagcttgacttacctttgtcatcttaatgcattgcactcagasgttggtaggtttaaaaaaacccaaggtgctctcc

SEQ ID NO: 20703 - DNA, 600 bp, Chicken  19866894231510_4
agttctggatatcatatttctaaaaggactgactgacttgtggagaatttgggataggaggaaaggaaaacggtgatggagaaggaaaacccttcacatagacactggcacggaacgaggagacagagaagggaggaaggaaaggcagggccatgcagtgtcccagagatggtcggagtcatcagctgccatcaacctttcctcatcgcagagggaaaaaggaaaattaaagtgaatggcaacacatttcagctaataaaggaaacagatcttttctgccygttaaaaacyctaacaccrcagaagggatacagctccgtgttctccaaggtaaaagccaggccaggaagaaatgcggatgcattgcctcgcagtgctcacctggagcccacgcggtgctgctgcctggcagggctctgtgctggtgccgggcagggcagcacgtagcagtgtggctctggagcagaacacgtaccagacgggttattgagacaggaatttcttgtcatcrcaacagcttgacttacctttgtcatcttaatgcattgcactcagasgttggtaggtttaaaaaaacccaaggtgctctccccctcccgg

SEQ ID NO: 20704 - DNA, 600 bp, Chicken  19866894231510_5
agagaagggaggaaggaaaggcagggccatgcagtgtcccagagatggtcggagtcatcagctgccatcaacctttcctcatcgcagagggaaaaaggaaaattaaagtgaatggcaacacatttcagctaataaaggaaacagatcttttctgccygttaaaaacyctaacaccrcagaagggatacagctccgtgttctccaaggtaaaagccaggccaggaagaaatgcggatgcattgcctcgcagtgctcacctggagcccacgcggtgctgctgcctggcagggctctgtgctrgtgccgggcagggcagcacgtagcagtgtggctctggagcagaacacgtaccagacgggttattgagacaggaatttcttgtcatcrcaacagcttgacttacctttgtcatcttaatgcattgcactcagasgttggtaggtttaaaaaaacccaaggtgctctccccctcccggcctttcagacataatttaaatctctctctgaaaggcttttttatgattttggcagctcccagggcagggatgacataccaggagcacggcagtggcacgtagctcaggtcagaccgagccctgc

SEQ ID NO: 20705 - DNA, 600 bp, Chicken  19866894231510_6
agggaaaaaggaaaattaaagtgaatggcaacacatttcagctaataaaggaaacagatcttttctgccygttaaaaacyctaacaccrcagaagggatacagctccgtgttctccaaggtaaaagccaggccaggaagaaatgcggatgcattgcctcgcagtgctcacctggagcccacgcggtgctgctgcctggcagggctctgtgctggtgccgggcagggcagcacgtagcagtgtggctctggagcagaacacgtaccagacgggttattgagacaggaatttcttgtcatcrcaacagcttgacttacctttgtcatcttaatgcattgcactcagasgttggtaggtttaaaaaaacccaaggtgctctccccctcccggcctttcagacataatttaaatctctctctgaaaggcttttttatgattttggcagctcccagggcagggatgacataccaggagcacggcagtggcacgtagctcaggtcagaccgagccctgcaggagcacacgcggagcacagcgccgtgcccctgctctgcaccctgtgccatcccggccccatttgcccgcttcacacccctgctgc

SEQ ID NO: 20706 - DNA, 600 bp, Chicken  19866894231510_7
aaaggaaacagatcttttctgccygttaaaaacyctaacaccrcagaagggatacagctccgtgttctccaaggtaaaagccaggccaggaagaaatgcggatgcattgcctcgcagtgctcacctggagcccacgcggtgctgctgcctggcagggctctgtgctggtgccgggcagggcagcacgtagcagtgtggctctggagcagaacacgtaccagacgggttattgagacaggaatttcttgtcatcrcaacagcttgacttacctttgtcatcttaatgcattgcactcagasgttggtaggtttaaaaaaacccaaggtgctctccccctcccggcctttcagacataatttaaatctctctctgaaaggcttttttatgattttggcagctcccagggcagggatgacataccaggagcacggcagtggcacgtagctcaggtcagaccgagccctgcaggagcacacgcggagcacagcgccgtgcccctgctctgcaccctgtgccatcccggccccatttgcccgcttcacacccctgctgctctgtgcttgctgcagcagggctgagtcacacaaggcatgctctag

SEQ ID NO: 20707 - DNA, 600 bp, Chicken  19866894231510_8
gacagacctttcttccctgagcaaacgtattccatggatggtttattcccagcatccctctaacggccacggctcagcctgacagacctcagtccttctgcaggggatgggaaccttcaggaggaatgcatgctccaggtgtttcatacctttgactcacaatagttccattctccatcatgctcaggttctgcagccccccagctcagctagcttcattaacttcattaatttctcccctctgtctcttagaagttgctctttccaaatgacgaatctcccagcaacttaagatccaawtttgccttcccatttaatttacactgaatccactcatgatcacttgacccgtgctaattttccatggccagctcctacacgtcctgcacctcagaagtctgcaatcccatcccctcagggcactccgcagccgctctgtgagctttatgggcttcagcaccctgggatacatggccgttaccatcattaacaacctttgatctccacttgacacaaagtcaaagcctccccttctccgcttctctctttagcagccccaagatcccaagccccaaccaaagccagtccaaacccaggttt

SEQ ID NO: 20708 - DNA, 599 bp, Chicken  19866894231512_1
  misc_feature (1)..(172): n is any nucleotide
nnnnnnnnnnnnnnnnnnnnnnnnnnnnnnnnnnnnnnnnnnnnnnnnnnnnnnnnnnnnnnnnnnnnnnnnnnnnnnnnnnnnnnnnnnnnnnnnnnnnnnnnnnnnnnnnnnnnnnnnnnnnnnnnnnnnnnnnnnnnnnnnnnnnnnnnnnnnnnnnnnnnnnnnnnnntgggtttgcactgattggctttggcgtagtttacaatccacaagaagaacccagttgatttgattcctgagatagaaagaaataatctctggaaaggagacagaaaagctactgttgctaactaggaygtccttatcagcatggtcctcgagtcatccagccttgtttactgtagcaagattgatgtggttcaaaatggtacttagttttcattatctcattttcctttttaaatgtttctttcttttccctagcaggtgttgtttaactggcagtgtgctggaggaggttggtatgaggttttgtactatcagctgatgagttcctggaagataaaaaaaaggatgaatgctgctcctgcaaaggtctatccaartccttagaagaggcacccaatgctcaaccttcccttccaggagggctttgg

SEQ ID NO: 20709 - DNA, 600 bp, Chicken  19866894231512_2
aagaaataatctctggaaaggagacagaaaagctactgttgctaactaggaygtccttatcagcatggtcctcgagtcatccagccttgtttactgtagcaagattgatgtggttcaaaatggtacttagttttcattatctcattttcctttttaaatgtttctttcttttccctagcaggtgttgtttaactggcagtgtgctggaggaggttggtatgaggttttgtactatcagctgatgagttcctggaagataaaaaaaaggatgaatgctgctcctgcaaaggtctatccaartccttagaagaggcacccaatgctcaaccttcccttccaggagggctttggtgaagcagcccaagaaagatagatccagagtacactgaacagtaagacttcagcaaaggctgtgacttatccagtgctcaaagctgatgtggtggtgaggaggatggtgatacaagccgtttctctgccctgagaacaaaccaactgctttggatttcagttgggttttgtagtcagttcatacgtctgattgatgctataggaaatagctgcagggaaagtagctgaggaacacatggaatttgccaa

SEQ ID NO: 20710 - DNA, 600 bp, Chicken  19866894231517_1
gaacaacaagatggtgcagcgatgttcctctgtgtgcatctgtgtgtctgattttgtaacccaggctcagatgcagtcaggtttggtcacccagcccctccagaggggctgcttgcataaggagctgacctctgttcaactcaaggtgagtttacagggctgtgtatttcagctggatgatcaggaaacagcagttgtctgtgtattaaagcactacttttttttttttcctgctttttataacctactactgatgattagaaattgaaagttattacggttttctgccatagaaatcgytcccatccaaagtgcagaaaatttgtactgaggagggaaccagtcaatgatatgtggatttgttggactgttgattatttcaaagaacttcctacttggaagaagtatctaggtgactaagaatgactgtgtcttgtcatctagcaacaagcatatgcaatgcaaggagctgaaggaytgcagttgtgatacaaggaagattcacactgagagtcatattaaaaccctctgcatcctttgttgtgctgacttctattttatgtcttgtaactccatttgctcaccaaagttttgtctgtg

SEQ ID NO: 20711 - DNA, 600 bp, Chicken  19866894231517_2
gatcaggaaacagcagttgtctgtgtattaaagcactacttttttttttttcctgctttttataacctactactgatgattagaaattgaaagttattacggttttctgccatagaaatcgytcccatccaaagtgcagaaaatttgtactgaggagggaaccagtcaatgatatgtggatttgttggactgttgattatttcaaagaacttcctacttggaagaagtatctaggtgactaagaatgactgtgtcttgtcatctagcaacaagcatatgcaatgcaaggagctgaaggaytgcagttgtgatacaaggaagattcacactgagagtcatattaaaaccctctgcatcctttgttgtgctgacttctattttatgtcttgtaactccatttgctcaccaaagttttgtctgtgatgcacagaattgagcttgtgagataattgttagatgaatggcaagcactccccttctgcctactgggatcctgggcttcagaaatgagcattaaatgagaagaaaatgtgtgctgtacattttcagaggctatcaactgcttttttgatctgttaggatgttttctcctgagatgca

SEQ ID NO: 20712 - DNA, 600 bp, Chicken  19866894231526_1
accacatgcaagttgtctcctcctgggaaacagagaaagcagatgctgggacaaacccaccccagctgagcccagctctgtccttaccagatggttgtggccatagagccaatgcgctgggggaccaggaaatgcttccagggctttgaggatcttcttcctcccctgatagaatctgaccaccttcagtaggacaaagatgacaccaagcaccacagacagctgcagaatgacagcagaaggtctggctatgttgtccaggagagacaccatgctggcctgagtctggggtgcctgacrctgccttgttttccctgcttctcttctacagctcsttcagcagagctggcaaagtgctgctcatgcaaggtctggatgagttttatagcagaagtgtaccaataagcagtgtgtcagcttgacccacagccagaattcctacagtcccygttgacccttttacccacttgcaataacctgtggatggaaatggcttgttagcaaacaccctgtaaacatttactttttctgaaggttgttacatcccaactgtgaatgaaaatgcttgcagcagcacagaactccatctctrcccccttc

SEQ ID NO: 20713 - DNA, 600 bp, Chicken  19866894231526_2
aaagcagatgctgggacaaacccaccccagctgagcccagctctgtccttaccagatggttgtggccatagagccaatgcgctgggggaccaggaaatgcttccagggctttgaggatcttcttcctcccctgatagaatctgaccaccttcagtaggacaaagatgacaccaagcaccacagacagctgcagaatgacagcagaaggtctggctatgttgtccaggagagacaccatgctggcctgagtctggggtgcctgacrctgccttgttttccctgcttctcttctacagctcsttcagcagagctggcaaagtgctgctcatgcaaggtctggatgagttttatagcagaagtgtaccaataagcagtgtgtcagcttgacccacagccagaattcctacagtcccygttgacccttttacccacttgcaataacctgtggatggaaatggcttgttagcaaacaccctgtaaacatttactttttctgaaggttgttacatcccaactgtgaatgaaaatgcttgcagcagcacagaactccatctctrcccccttcacataygcccaggtagatgaatgataagggctagt

SEQ ID NO: 20714 - DNA, 600 bp, Chicken  19866894231526_3
ggatcttcttcctcccctgatagaatctgaccaccttcagtaggacaaagatgacaccaagcaccacagacagctgcagaatgacagcagaaggtctggctatgttgtccaggagagacaccatgctggcctgagtctggggtgcctgacrctgccttgttttccctgcttctcttctacagctcsttcagcagagctggcaaagtgctgctcatgcaaggtctggatgagttttatagcagaagtgtaccaataagcagtgtgtcagcttgacccacagccagaattcctacagtcccygttgacccttttacccacttgcaataacctgtggatggaaatggcttgttagcaaacaccctgtaaacatttactttttctgaaggttgttacatcccaactgtgaatgaaaatgcttgcagcagcacagaactccatctctrcccccttcacataygcccaggtagatgaatgataagggctagtagtccccagcgcacccacatgaggtgagaagcatacagattacttctctctgactgatccagccaccctcagctgtaaaaacagtgctcttagtgactgtaacaacacacagct

SEQ ID NO: 20715 - DNA, 600 bp, Chicken  19866894231526_4
gcctgacrctgccttgttttccctgcttctcttctacagctcsttcagcagagctggcaaagtgctgctcatgcaaggtctggatgagttttatagcagaagtgtaccaataagcagtgtgtcagcttgacccacagccagaattcctacagtcccygttgacccttttacccacttgcaataacctgtggatggaaatggcttgttagcaaacaccctgtaaacatttactttttctgaaggttgttacatcccaactgtgaatgaaaatgcttgcagcagcacagaactccatctctrcccccttcacataygcccaggtagatgaatgataagggctagtagtccccagcgcacccacatgaggtgagaagcatacagattacttctctctgactgatccagccaccctcagctgtaaaaacagtgctcttagtgactgtaacaacacacagctgggctgtaatcaaaggaacagccaaaacctgaccagcacacaagggattgtgatatgctttccaagtggtcctatatagatgagacaggagacaaaagtattgccttgaagagttgactgtcaagacataagtcaaagaggga

SEQ ID NO: 20716 - DNA, 600 bp, Chicken  19866894231526_5
tgttttccctgcttctcttctacagctcsttcagcagagctggcaaagtgctgctcatgcaaggtctggatgagttttatagcagaagtgtaccaataagcagtgtgtcagcttgacccacagccagaattcctacagtcccygttgacccttttacccacttgcaataacctgtggatggaaatggcttgttagcaaacaccctgtaaacatttactttttctgaaggttgttacatcccaactgtgaatgaaaatgcttgcagcagcacagaactccatctctrcccccttcacataygcccaggtagatgaatgataagggctagtagtccccagcgcacccacatgaggtgagaagcatacagattacttctctctgactgatccagccaccctcagctgtaaaaacagtgctcttagtgactgtaacaacacacagctgggctgtaatcaaaggaacagccaaaacctgaccagcacacaagggattgtgatatgctttccaagtggtcctatatagatgagacaggagacaaaagtattgccttgaagagttgactgtcaagacataagtcaaagagggaagagcagcaaaaat

SEQ ID NO: 20717 - DNA, 599 bp, Chicken  19866894231528_1
  misc_feature (1)..(39): n is any nucleotide
nnnnnnnnnnnnnnnnnnnnnnnnnnnnnnnnnnnnnnnaagagcataacaaggagaaccataggatcattaaggttggaaaacacctccaagttcatcaaatccaaccatcagtccattcccaccatgcccactgagccatgtcactaaatgagacatgggacactgggaccaaagcatgggttaaattggttaaatatggggcctctgatgcttttgcaccaattcagaaagcattcaccatctggaagtctgggacagagttaggctggaaaggaaaatatgagtgaagaacacackgcaaagagtggggtccatccagatcaggtggaggatgtgggcataggaacagcagcagcccagtcctgaagtgggcctttatcaatgccctgttgatagccagcagtgaagcactgctgccccccttcaccatatgcaaacagtggtgattaagcaccagattaaacatcttcatgaatatttcaaaggctgtttttgaaagtttcctgtccttttacactaatagccccattaaaacctgtttacaagccagtcgtgagagtaactgcgtgcacttaaaacacgagagagttccccta

SEQ ID NO: 20718 - DNA, 600 bp, Chicken  19866894231530_1
cagcacacctcgagcaccaacatgaagcacctggcaaactctcccaaacaccagcctgaactcgaggcgaattgcttttgctgaacagcgattataattcctgctgaatatccagattttgacaagtaaatctcatattttaaacacaggattaaaaaaatttattactacagtggggattaagttgtaaagcctcagaatgtaagtctgcaaagtaggaaatacagaaaaatcaagtgaaatctattgttcaaaataactcgggcttaaccctttgccacctggtgcagaccccgactrcagttggaacagccctgtaataattatccccgggtctcttgtaacgtttcactaaggcaggtaggggatatggaatttcttcctgttgtttttcaaatccctccatttccagacttggctgcaccttcgtgctcagaaataacagtggcattgaatagcatccgaatgagaaattcaagccagacggtcttgtttgtggcatcaacttgtctgattgctctgcagttcatttccgttcattttaagaggaaagtctccttattaagaactccattgtgaaagtgcagtaaaggtaatagt

SEQ ID NO: 20719 - DNA, 600 bp, Chicken  19866894231530_2
atttccagacttggctgcaccttcgtgctcagaaataacagtggcattgaatagcatccgaatgagaaattcaagccagacggtcttgtttgtggcatcaacttgtctgattgctctgcagttcatttccgttcattttaagaggaaagtctccttattaagaactccattgtgaaagtgcagtaaaggtaatagtttcccagctgagttttcaccctttgtactgagctccaaggcaaagctccaatgccatgggagtcagcagatgcccgtcccctttctatagcaagccgtgatttkatctgacatgtgtggttttgaacctgyrgcccagaagtgtgaccttaggagtgaggcagaggactgagccagaaagcacggcttgtctcctaggtgtgcactgcctgacaacctccctttcccaccattagggatgatgattctgtactgccagaaggaagtttagttcatccgtggctggaaggtgatgtgaagcccttagccgaaagctggatggaaatggaaattataatggtgattcttccagggttatttgaatgcagaagtgtagaggctgccacctcacagctccggctgcag

SEQ ID NO: 20720 - DNA, 600 bp, Chicken  19866894231530_3
ctcagaaataacagtggcattgaatagcatccgaatgagaaattcaagccagacggtcttgtttgtggcatcaacttgtctgattgctctgcagttcatttccgttcattttaagaggaaagtctccttattaagaactccattgtgaaagtgcagtaaaggtaatagtttcccagctgagttttcaccctttgtactgagctccaaggcaaagctccaatgccatgggagtcagcagatgcccgtcccctttctatagcaagccgtgatttkatctgacatgtgtggttttgaacctgyrgcccagaagtgtgaccttaggagtgaggcagaggactgagccagaaagcacggcttgtctcctaggtgtgcactgcctgacaacctccctttcccaccattagggatgatgattctgtactgccagaaggaagtttagttcatccgtggctggaaggtgatgtgaagcccttagccgaaagctggatggaaatggaaattataatggtgattcttccagggttatttgaatgcagaagtgtagaggctgccacctcacagctccggctgcagcaggtgagcacacagaaagctctgctg

SEQ ID NO: 20721 - DNA, 600 bp, Chicken  19866894231530_4
tcagaaataacagtggcattgaatagcatccgaatgagaaattcaagccagacggtcttgtttgtggcatcaacttgtctgattgctctgcagttcatttccgttcattttaagaggaaagtctccttattaagaactccattgtgaaagtgcagtaaaggtaatagtttcccagctgagttttcaccctttgtactgagctccaaggcaaagctccaatgccatgggagtcagcagatgcccgtcccctttctatagcaagccgtgatttkatctgacatgtgtggttttgaacctgyrgcccagaagtgtgaccttaggagtgaggcagaggactgagccagaaagcacggcttgtctcctaggtgtgcactgcctgacaacctccctttcccaccattagggatgatgattctgtactgccagaaggaagtttagttcatccgtggctggaaggtgatgtgaagcccttagccgaaagctggatggaaatggaaattataatggtgattcttccagggttatttgaatgcagaagtgtagaggctgccacctcacagctccggctgcagcaggtgagcacacagaaagctctgctgt

SEQ ID NO: 20722 - DNA, 600 bp, Chicken  19866894231533_1
atcctctctttagaatttagcacttattatgagcacaaaaaaaaatccctacattttttttctcgcattttataaattttatcctatctatttatgttgaactgaacccacccacaacactcctaatacactccgaaataggcatttttctgtgtttccctcctgagaacaaataagtgcaatctttgacaaatctgctcgccatggcacacaagataaaactatgtaccttctctgcagtcttagaggatctctgatacatgtgtgtgcttctgttctatttctcccttatttttaaamatactgcataaaactattcaactttctcccaaatgtttgttccctggcaactgctgagttttcatcagcagttttaatgcagaagattagctaaaaccaacggataacagaagcaactaactggttatgctggcaaggcaatccaartagctttattagcagctgttgagactgtcgagtccaaattttctgcagcaaaagatctcatcaacagagctatgtggggaagtcaccctccccacataaagggggcagggggtgaattgtgatgaaggaagtattaaaagagaaggaactctg

SEQ ID NO: 20723 - DNA, 600 bp, Chicken  19866894231533_2
ttctgtgtttccctcctgagaacaaataagtgcaatctttgacaaatctgctcgccatggcacacaagataaaactatgtaccttctctgcagtcttagaggatctctgatacatgtgtgtgcttctgttctatttctcccttatttttaaamatactgcataaaactattcaactttctcccaaatgtttgttccctggcaactgctgagttttcatcagcagttttaatgcagaagattagctaaaaccaacggataacagaagcaactaactggttatgctggcaaggcaatccaartagctttattagcagctgttgagactgtcgagtccaaattttctgcagcaaaagatctcatcaacagagctatgtggggaagtcaccctccccacataaagggggcagggggtgaattgtgatgaaggaagtattaaaagagaaggaactctggtatcaagagcacaaagtgccaatttatggacttccaagatctttctgaatgtaagatacccatgtgggaggatcatgtagatggctgcaaagagcttgtaggatgagctgggtgtttgggtgatygcttagcttttcaagtatgat

SEQ ID NO: 20724 - DNA, 600 bp, Chicken  19866894231533_3
atgctggcaaggcaatccaartagctttattagcagctgttgagactgtcgagtccaaattttctgcagcaaaagatctcatcaacagagctatgtggggaagtcaccctccccacataaagggggcagggggtgaattgtgatgaaggaagtattaaaagagaaggaactctggtatcaagagcacaaagtgccaatttatggacttccaagatctttctgaatgtaagatacccatgtgggaggatcatgtagatggctgcaaagagcttgtaggatgagctgggtgtttgggtgatygcttagcttttcaagtatgatgttagtacttgtcagaacagccagcaaagcaacaaaagataaaaagaatatttcctcttgatagccttcttcagatgttgtgaatatttatatacagtcagtagtcacagaagtggacttctttttgtaaggtgatggtttgagacatctgagatttggaaaacaaaggttaagggatcattttggttaaattgcttgtcagtttagctgtaagcttagctctgctttagtctactgtgtcttagtccatatctgatacaacttcttgaatcaaaataa

SEQ ID NO: 20725 - DNA, 599 bp, Chicken  19866894231538_1
  misc_feature (1)..(198): n is any nucleotide
nnnnnnnnnnnnnnnnnnnnnnnnnnnnnnnnnnnnnnnnnnnnnnnnnnnnnnnnnnnnnnnnnnnnnnnnnnnnnnnnnnnnnnnnnnnnnnnnnnnnnnnnnnnnnnnnnnnnnnnnnnnnnnnnnnnnnnnnnnnnnnnnnnnnnnnnnnnnnnnnnnnnnnnnnnnnnnnnnnnnnnnnnnnnnnnnnnnnnnaaaacaataacagcagttcttatacccatggatcaacttcacttaaactttttaattgataaatacacaccaaaaaaaatagagcccctgctaaccacaaargcatgaaacagtttttataacacaatttgattacaatttaaaytatgcctattactgaaaatactgacttgtcataatctgatccatcaagaattgcagcaccacagatacctttcaacattacgtgaaargtgcataactggaaacacccatttcacaagaaaaacagatgagaaaataaaagtttcttgtgaaccaatattatgcatggaagttatggaaatcaataatcaaaaagacaacttttgtaccttgatttcagattattacagttcamctaaactaaggtgacttttttt

SEQ ID NO: 20726 - DNA, 599 bp, Chicken  19866894231538_2
  misc_feature (1)..(155): n is any nucleotide
nnnnnnnnnnnnnnnnnnnnnnnnnnnnnnnnnnnnnnnnnnnnnnnnnnnnnnnnnnnnnnnnnnnnnnnnnnnnnnnnnnnnnnnnnnnnnnnnnnnnnnnnnnnnnnnnnnnnnnnnnnnnnnnnnnnnnnnnnnnnnnnnnnnnnnnnnnnaaaacaataacagcagttcttatacccatggatcaacttcacttaaactttttaattgataaatacacaccaaaaaaaatagagcccctgctaaccacaaargcatgaaacagtttttataacacaatttgattacaatttaaaytatgcctattactgaaaatactgacttgtcataatctgatccatcaagaattgcagcaccacagatacctttcaacattacgtgaaargtgcataactggaaacacccatttcacaagaaaaacagatgagaaaataaaagtttcttgtgaaccaatattatgcatggaagttatggaaatcaataatcaaaaagacaacttttgtaccttgatttcagattattacagttcamctaaactaaggtgacttttttttttttgcacttggccaaacccamtatatataatttatcattaa

SEQ ID NO: 20727 - DNA, 599 bp, Chicken  19866894231538_3
  misc_feature (1)..(67): n is any nucleotide
nnnnnnnnnnnnnnnnnnnnnnnnnnnnnnnnnnnnnnnnnnnnnnnnnnnnnnnnnnnnnnnnnnnaaaacaataacagcagttcttatacccatggatcaacttcacttaaactttttaattgataaatacacaccaaaaaaaatagagcccctgctaaccacaaargcatgaaacagtttttataacacaatttgattacaatttaaaytatgcctattactgaaaatactgacttgtcataatctgatccatcaagaattgcagcaccacagatacctttcaacattacgtgaaargtgcataactggaaacacccatttcacaagaaaaacagatgagaaaataaaagtttcttgtgaaccaatattatgcatggaagttatggaaatcaataatcaaaaagacaacttttgtaccttgatttcagattattacagttcamctaaactaaggtgacttttttttttttgcacttggccaaacccamtatatataatttatcattaaatccaactgtgctgtcagcttaaaacaaagctgtagtaagtacatgaaaagaatagcacagagatttcaattcaagattttcaartga

SEQ ID NO: 20728 - DNA, 600 bp, Chicken  19866894231538_4
tagagcccctgctaaccacaaargcatgaaacagtttttataacacaatttgattacaatttaaaytatgcctattactgaaaatactgacttgtcataatctgatccatcaagaattgcagcaccacagatacctttcaacattacgtgaaargtgcataactggaaacacccatttcacaagaaaaacagatgagaaaataaaagtttcttgtgaaccaatattatgcatggaagttatggaaatcaataatcaaaaagacaacttttgtaccttgatttcagattattacagttcamctaaactaaggtgacttttttttttttgcacttggccaaacccamtatatataatttatcattaaatccaactgtgctgtcagcttaaaacaaagctgtagtaagtacatgaaaagaatagcacagagatttcaattcaagattttcaartgacatgccaattagaccacttctaatatgctcacaaacagtaagtacatggtgattttaaataaacgctttcatagtagaaataattctttctttcctagaaaagcaccttaccttcttgttctactttttgacctcgatctttgagac

SEQ ID NO: 20729 - DNA, 600 bp, Chicken  19866894231538_5
caatttgattacaatttaaaytatgcctattactgaaaatactgacttgtcataatctgatccatcaagaattgcagcaccacagatacctttcaacattacgtgaaargtgcataactggaaacacccatttcacaagaaaaacagatgagaaaataaaagtttcttgtgaaccaatattatgcatggaagttatggaaatcaataatcaaaaagacaacttttgtaccttgatttcagattattacagttcamctaaactaaggtgacttttttttttttgcacttggccaaacccamtatatataatttatcattaaatccaactgtgctgtcagcttaaaacaaagctgtagtaagtacatgaaaagaatagcacagagatttcaattcaagattttcaartgacatgccaattagaccacttctaatatgctcacaaacagtaagtacatggtgattttaaataaacgctttcatagtagaaataattctttctttcctagaaaagcaccttaccttcttgttctactttttgacctcgatctttgagacctgtaggattttcctctgccccttgatcggctgcgactgcgtttt

SEQ ID NO: 20730 - DNA, 600 bp, Chicken  19866894231538_6
aaargtgcataactggaaacacccatttcacaagaaaaacagatgagaaaataaaagtttcttgtgaaccaatattatgcatggaagttatggaaatcaataatcaaaaagacaacttttgtaccttgatttcagattattacagttcamctaaactaaggtgacttttttttttttgcacttggccaaacccamtatatataatttatcattaaatccaactgtgctgtcagcttaaaacaaagctgtagtaagtacatgaaaagaatagcacagagatttcaattcaagattttcaartgacatgccaattagaccacttctaatatgctcacaaacagtaagtacatggtgattttaaataaacgctttcatagtagaaataattctttctttcctagaaaagcaccttaccttcttgttctactttttgacctcgatctttgagacctgtaggattttcctctgccccttgatcggctgcgactgcgttttcttctagagccatatgaagaactactgctcgatctgtgcctgcgcctgaaacaaaaccatgttatcagtacaccagtgcttctaaaacaaaaaacagcaacagga

SEQ ID NO: 20731 - DNA, 600 bp, Chicken  19866894231538_7
atggtgattttaaataaacgctttcatagtagaaataattctttctttcctagaaaagcaccttaccttcttgttctactttttgacctcgatctttgagacctgtaggattttcctctgccccttgatcggctgcgactgcgttttcttctagagccatatgaagaactactgctcgatctgtgcctgcgcctgaaacaaaaccatgttatcagtacaccagtgcttctaaaacaaaaaacagcaacaggaaaaggaataaacagttcgctcaaaattatgtgcatgcaaaactatttsttgcattacagcatgtcataaaagcctcaacatattccactaytgcacgctaataagtaactcatacatacttgagcaaagcctgtcttaaagagcttgcattcaaaaatatatgtcccaagggtagaaggcaaaacagaagttaactgatatgccccaaatcatacaacacttgaagggctaagccaggaacacaactcagctctcaatgaactgcagtctcgtgaccggtgtattggaactcactgactctttgccaaatctgaagttaaagaaatatttagacctatattctcagca

SEQ ID NO: 20732 - DNA, 600 bp, Chicken  19866894231538_8
tctttcctagaaaagcaccttaccttcttgttctactttttgacctcgatctttgagacctgtaggattttcctctgccccttgatcggctgcgactgcgttttcttctagagccatatgaagaactactgctcgatctgtgcctgcgcctgaaacaaaaccatgttatcagtacaccagtgcttctaaaacaaaaaacagcaacaggaaaaggaataaacagttcgctcaaaattatgtgcatgcaaaactatttsttgcattacagcatgtcataaaagcctcaacatattccactaytgcacgctaataagtaactcatacatacttgagcaaagcctgtcttaaagagcttgcattcaaaaatatatgtcccaagggtagaaggcaaaacagaagttaactgatatgccccaaatcatacaacacttgaagggctaagccaggaacacaactcagctctcaatgaactgcagtctcgtgaccggtgtattggaactcactgactctttgccaaatctgaagttaaagaaatatttagacctatattctcagcagcacttaactcaggaatacaatctatgggactgcttttcagtg

SEQ ID NO: 20733 - DNA, 600 bp, Chicken  19866894231539_1
aagtatgtgtgtgtgtgcttaggtaaatatttttatagtgtgagaatgcttttcagtgcagggcaatgtcatctttctaaattttaattgaatatacagcagttattggggtagaccctctgtcagttcaaactggcgcagcattgctgtggacagtgggagctcatttatatccacaagatctgacctattgttcaggcctaggtggacagtttcaagataaaatatgttttattaaaataatatgtagagctactgctattgtcactagaaatggtctgaagaggtcctctgtatcaraaatactaaagacaaagtctacagctagtaattgtcgcaactcatgctcattgcttgttcttacaaatttactcagttcttttctgtaatacattagtagtgttagtagcaaataacatcagtatttttatttaaaaacttgtatctgacatttaaaagctcaaacataggaagattattcgtgtaaacaggtgtaggacagaaaactttaatcttatgcccactgtcgagacattgaactagattattgtttcatcccgtttattgtatatatcagtattaacacaaagatttccaaat

SEQ ID NO: 20734 - DNA, 599 bp, Chicken  19866894231541_1
  misc_feature (1)..(45): n is any nucleotide
nnnnnnnnnnnnnnnnnnnnnnnnnnnnnnnnnnnnnnnnnnnnnatggcatgcagcaaaagaaatggaataaaacaaagcagacccacactgttttttctttttatctttatcactcccctcttccaaatagatcaaataataacaacacctgctcagtgttatatttctcagctttcagtaacatgttagaaagcttctaagttgcttccagtaatcttgaaaaaaataaaatgaaagcttcaaacttgtaacatgctcaaattacatcaattaacaaacttgagtcttttttttttkttkttgttggatagttggtataaacaagtgattgtgcccctatcagtgccatacatttttccataagttcatgacctactgacctgttccaggcaaatgtaatgaaagataaaagtctgcaagatattagttcagcgttaataggaagagataaaagagaaagcaacaggccccaagggaaagacagttgtatctttatcagttccaaacagcaatcaaccaactgaccaagaagcagacaagtagccccacagcatctcacagacatacattggccgtaaagtgcccagtcagatagg

SEQ ID NO: 20735 - DNA, 599 bp, Chicken  19866894231541_2
  misc_feature (1)..(42): n is any nucleotide
nnnnnnnnnnnnnnnnnnnnnnnnnnnnnnnnnnnnnnnnnnatggcatgcagcaaaagaaatggaataaaacaaagcagacccacactgttttttctttttatctttatcactcccctcttccaaatagatcaaataataacaacacctgctcagtgttatatttctcagctttcagtaacatgttagaaagcttctaagttgcttccagtaatcttgaaaaaaataaaatgaaagcttcaaacttgtaacatgctcaaattacatcaattaacaaacttgagtcttttttttttkttkttgttggatagttggtataaacaagtgattgtgcccctatcagtgccatacatttttccataagttcatgacctactgacctgttccaggcaaatgtaatgaaagataaaagtctgcaagatattagttcagcgttaataggaagagataaaagagaaagcaacaggccccaagggaaagacagttgtatctttatcagttccaaacagcaatcaaccaactgaccaagaagcagacaagtagccccacagcatctcacagacatacattggccgtaaagtgcccagtcagataggtac

SEQ ID NO: 20736 - DNA, 600 bp, Chicken  19866894231546_1
acttcagttttcacaaagcataaatggaaaatttcagtgactgggatggctctcaaaagagaagacaaaaagttcaagtcttaaaaaaacatggattccttctgcaagctgtagcattagaactgcaaatacaagacatatttagagagaccagaagtggtcaatgaacttcataatggagagacataggaactggatggagcaaatacacacaacacactgttccagtctgtttaaacaaacaggactactcgattactagatgttaactctctttcagcaaatcctcagctctcttayggatccagggagagtctttggcatttcaccttctataaactgtgccattgtggtttcttttcagtctttgatttcttctggcaaaacccaagtcttctgcttactctttctgtttccatttkcctcctgctctgrtcacaagctttgttacctaactctaaaccactaagcagagaataaagctttacatttgttcccgggacaactagatttgcagagcatcagtattttcttattgttttctgtctccactgttagcatacatcagtgggttttatatctggattactcacatgacct

SEQ ID NO: 20737 - DNA, 600 bp, Chicken  19866894231546_2
ctgcaaatacaagacatatttagagagaccagaagtggtcaatgaacttcataatggagagacataggaactggatggagcaaatacacacaacacactgttccagtctgtttaaacaaacaggactactcgattactagatgttaactctctttcagcaaatcctcagctctcttayggatccagggagagtctttggcatttcaccttctataaactgtgccattgtggtttcttttcagtctttgatttcttctggcaaaacccaagtcttctgcttactctttctgtttccatttkcctcctgctctgrtcacaagctttgttacctaactctaaaccactaagcagagaataaagctttacatttgttcccgggacaactagatttgcagagcatcagtattttcttattgttttctgtctccactgttagcatacatcagtgggttttatatctggattactcacatgacctaagaagtgatggacagtaaaatccctcaggactcattgcgtaccatagtaacaaacaggagttgccatgaaaccagtctctcaaacaagaaatgtatgccttgctctacacagcatcacttg

SEQ ID NO: 20738 - DNA, 600 bp, Chicken  19866894231546_3
acatatttagagagaccagaagtggtcaatgaacttcataatggagagacataggaactggatggagcaaatacacacaacacactgttccagtctgtttaaacaaacaggactactcgattactagatgttaactctctttcagcaaatcctcagctctcttayggatccagggagagtctttggcatttcaccttctataaactgtgccattgtggtttcttttcagtctttgatttcttctggcaaaacccaagtcttctgcttactctttctgtttccatttkcctcctgctctgrtcacaagctttgttacctaactctaaaccactaagcagagaataaagctttacatttgttcccgggacaactagatttgcagagcatcagtattttcttattgttttctgtctccactgttagcatacatcagtgggttttatatctggattactcacatgacctaagaagtgatggacagtaaaatccctcaggactcattgcgtaccatagtaacaaacaggagttgccatgaaaccagtctctcaaacaagaaatgtatgccttgctctacacagcatcacttgctacccagacatt

SEQ ID NO: 20739 - DNA, 600 bp, Chicken  19866894231546_4
ataatggagagacataggaactggatggagcaaatacacacaacacactgttccagtctgtttaaacaaacaggactactcgattactagatgttaactctctttcagcaaatcctcagctctcttayggatccagggagagtctttggcatttcaccttctataaactgtgccattgtggtttcttttcagtctttgatttcttctggcaaaacccaagtcttctgcttactctttctgtttccatttkcctcctgctctgrtcacaagctttgttacctaactctaaaccactaagcrgagaataaagctttacatttgttcccgggacaactagatttgcagagcatcagtattttcttattgttttctgtctccactgttagcatacatcagtgggttttatatctggattactcacatgacctaagaagtgatggacagtaaaatccctcaggactcattgcgtaccatagtaacaaacaggagttgccatgaaaccagtctctcaaacaagaaatgtatgccttgctctacacagcatcacttgctacccagacattaaaaacattaagtctcttttgacagaatatctcattc

SEQ ID NO: 20740 - DNA, 600 bp, Chicken  19866894231546_5
taatggagagacataggaactggatggagcaaatacacacaacacactgttccagtctgtttaaacaaacaggactactcgattactagatgttaactctctttcagcaaatcctcagctctcttayggatccagggagagtctttggcatttcaccttctataaactgtgccattgtggtttcttttcagtctttgatttcttctggcaaaacccaagtcttctgcttactctttctgtttccatttkcctcctgctctgrtcacaagctttgttacctaactctaaaccactaagcaragaataaagctttacatttgttcccgggacaactagatttgcagagcatcagtattttcttattgttttctgtctccactgttagcatacatcagtgggttttatatctggattactcacatgacctaagaagtgatggacagtaaaatccctcaggactcattgcgtaccatagtaacaaacaggagttgccatgaaaccagtctctcaaacaagaaatgtatgccttgctctacacagcatcacttgctacccagacattaaaaacattaagtctcttttgacagaatatctcattct

SEQ ID NO: 20741 - DNA, 600 bp, Chicken  19866894231548_1
tccctagttttaaggtccaaatccagaaacaaatggcgtgattcttattgtttccactttttcagtgagtcagttgtaagaattatttttacaggtgcaagaagttatttttcttcagtctcatttttatcaatgacaaatctgctttggaatttccaccatcgcccttaaaaagaagaaaaaagcactcccaactggaggcgaacgtccagcaggaggggtgtgagcctgagcagtgctattggattctgtcttatcctaaagttgaggtagaggcattgccccatctgtaacaacttyatcaccgtggtgtgaaattaaccttgtggtttgacaagttcattacacgcgtctgttgatatcagctttttatgtgagagtgtttctactcggggagaaatccatagcgagtgctatttttagaggctagcaaccccccacatttacagttgggtttttttttttttttgcctacgtattgatggcaagtgcttgcagaacttgatacagattgaaaagtccaaaaatacagcttttgtgcacggagatttgctactgcaaatgtcatgtttgcatatttttaaattaaaaatcaataca

SEQ ID NO: 20742 - DNA, 600 bp, Chicken  19866894231549_1
ggatggcagagagcatgtatgaatgcatgtacgtgtgcacataagcacaaatccacacaatagcaatatgtgatttttttaatgcatatcagaatcacttaatgaggggttttcccactttctgaatctgcactacgtggcccatcagcattacatcagctcttaacacaagcaggatataaaccaggtacctctgctggtagtgctgtggtgctggagaaagcaggagcaatttctcagcacacacacagacaaccattgcagtacgaaataggcacacagtgatgggcaaggtggaaygggaggtgaacacaataactccaaggtgaaacacgtggagagctaatgaaactcagctcataccacagatgaaatgagttgacccaaacatcagtttggctcgtaygatagagcagaacaatctggtctccggatatgaaatactaagagtgggatcagacaaggttcatcaacagcaaaacctacccatatttccmasagaggatttcagtgcagggctcttgcaggacacagtgggacctgygggttaaaggagacgctgtgcctgaacccaggaaggctgcactgtgccatctgcga

SEQ ID NO: 20743 - DNA, 600 bp, Chicken  19866894231549_2
gggttttcccactttctgaatctgcactacgtggcccatcagcattacatcagctcttaacacaagcaggatataaaccaggtacctctgctggtagtgctgtggtgctggagaaagcaggagcaatttctcagcacacacacagacaaccattgcagtacgaaataggcacacagtgatgggcaaggtggaaygggaggtgaacacaataactccaaggtgaaacacgtggagagctaatgaaactcagctcataccacagatgaaatgagttgacccaaacatcagtttggctcgtaygatagagcagaacaatctggtctccggatatgaaatactaagagtgggatcagacaaggttcatcaacagcaaaacctacccatatttccmasagaggatttcagtgcagggctcttgcaggacacagtgggacctgygggttaaaggagacgctgtgcctgaacccaggaaggctgcactgtgccatctgcgagcactaaaatccakccatcctccacaggtggcctcacctaatgacagcccaacagcaggcacgccgctggggatgggagcattgtgtctcacccagagcacccaac

SEQ ID NO: 20744 - DNA, 600 bp, Chicken  19866894231549_3
tggtagtgctgtggtgctggagaaagcaggagcaatttctcagcacacacacagacaaccattgcagtacgaaataggcacacagtgatgggcaaggtggaaygggaggtgaacacaataactccaaggtgaaacacgtggagagctaatgaaactcagctcataccacagatgaaatgagttgacccaaacatcagtttggctcgtaygatagagcagaacaatctggtctccggatatgaaatactaagagtgggatcagacaaggttcatcaacagcaaaacctacccatatttccmasagaggatttcagtgcagggctcttgcaggacacagtgggacctgygggttaaaggagacgctgtgcctgaacccaggaaggctgcactgtgccatctgcgagcactaaaatccakccatcctccacaggtggcctcacctaatgacagcccaacagcaggcacgccgctggggatgggagcattgtgtctcacccagagcacccaacacacatcaccatacgttgtaagctggatgaccacactcccatgatcacaaggaaggagatggagctgatcccattcaaagaactcttgctt

SEQ ID NO: 20745 - DNA, 600 bp, Chicken  19866894231549_4
gtagtgctgtggtgctggagaaagcaggagcaatttctcagcacacacacagacaaccattgcagtacgaaataggcacacagtgatgggcaaggtggaaygggaggtgaacacaataactccaaggtgaaacacgtggagagctaatgaaactcagctcataccacagatgaaatgagttgacccaaacatcagtttggctcgtaygatagagcagaacaatctggtctccggatatgaaatactaagagtgggatcagacaaggttcatcaacagcaaaacctacccatatttccmasagaggatttcagtgcagggctcttgcaggacacagtgggacctgygggttaaaggagacgctgtgcctgaacccaggaaggctgcactgtgccatctgcgagcactaaaatccakccatcctccacaggtggcctcacctaatgacagcccaacagcaggcacgccgctggggatgggagcattgtgtctcacccagagcacccaacacacatcaccatacgttgtaagctggatgaccacactcccatgatcacaaggaaggagatggagctgatcccattcaaagaactcttgcttat

SEQ ID NO: 20746 - DNA, 559 bp, Chicken  19866894231549_5
cacacagacaaccattgcagtacgaaataggcacacagtgatgggcaaggtggaaygggaggtgaacacaataactccaaggtgaaacacgtggagagctaatgaaactcagctcataccacagatgaaatgagttgacccaaacatcagtttggctcgtaygatagagcagaacaatctggtctccggatatgaaatactaagagtgggatcagacaaggttcatcaacagcaaaacctacccatatttccmasagaggatttcagtgcagggctcttgcaggacacagtgggacctgygggttaaaggagacgctgtgcctgaacccaggaaggctgcactgtgccatctgcgagcactaaaatccakccatcctccacaggtggcctcacctaatgacagcccaacagcaggcacgccgctggggatgggagcattgtgtctcacccagagcacccaacacacatcaccatacgttgtaagctggatgaccacactcccatgatcacaaggaaggagatggagctgatcccattcaaagaactcttgcttatttct

SEQ ID NO: 20747 - DNA, 489 bp, Chicken  19866894231549_6
ataactccaaggtgaaacacgtggagagctaatgaaactcagctcataccacagatgaaatgagttgacccaaacatcagtttggctcgtaygatagagcagaacaatctggtctccggatatgaaatactaagagtgggatcagacaaggttcatcaacagcaaaacctacccatatttccmasagaggatttcagtgcagggctcttgcaggacacagtgggacctgygggttaaaggagacgctgtgcctgaacccaggaaggctgcactgtgccatctgcgagcactaaaatccakccatcctccacaggtggcctcacctaatgacagcccaacagcaggcacgccgctggggatgggagcattgtgtctcacccagagcacccaacacacatcaccatacgttgtaagctggatgaccacactcccatgatcacaaggaaggagatggagctgatcccattcaaagaactcttgcttatttct

SEQ ID NO: 20748 - DNA, 600 bp, Chicken  19866894231551_1
ccaagacaagtcaaaatctttgtacacgccactttcttctctacggaactaataagcaaacttctttttagcccattcttcatctgtggtatctacttagacacgaagatcttcagaataagcttccttattaaacattctgcagtgcttagtacagtagacttcaaatttctgttaaggcttctggaagcctatacagtacaagtaataaaaccgatttccatgttggtacttaaggtattataaaatctttcaagtctttcaaacagttgatcattttattttgaggattaaggctartgtttttttcccctgcagaagaaaaagaagttttatatatactccagaaacccagataacactatctacaggcaactggccatcagaggtgtaaatcacccagagaagagtgatgtgctacagagagtttgcacttctactggtcagattaaagatacagcatcaggctgagacaaggacagaattcagcccttaagttattatgtagctgaaatgctttcagactaggtgagtcagcattctttctctaattcttttcaccttttatactcagacttcctaaagaagttccaaacttgt

SEQ ID NO: 20749 - DNA, 599 bp, Chicken  19866894231566_1
  misc_feature (1)..(3): n is any nucleotide
nnngggatgcaggtagttttgcagcaagaaatcttagattttatgtctgagagctggacaaggtagactgatgatcataacatttttaaatattttttttttcctcagctcagtttgtttggtcagaaatgcatttgactcagtgatatattgcatttaaatctggtatgtggccaacaactaggagcaacaaggaatctgagagtgtggggagagtttctgaattgggctagtctgtcagatatttacatcagggtagttgatgtaacagatgaatgtgccacattaatatttcgattmtttttccttggtttctgtttattactgtttttttggtaacataccatgtttgctacacatttacaatagattatattctgagttcctttacagtaatataaaacaaagcatgatttgcctggaagatgtcaatatattcaaatcagggcctacagcagaaggctcccctacagcttgtgttcttttacatgcacgtgcttggaaaacacttgcgcctgtcattagtcttctctcataaatttcagccatgagatttttgtgaacgaaagggaaaaaaatcaattctttgtggattcata

SEQ ID NO: 20750 - DNA, 600 bp, Chicken  19866894231570_1
ctcagaatggacgacccctttgacactgcaagtatatgcgatgtggtcaccgtacccatgaaggttatgaagttctcatagtccaccttgcactgcagctcctcgccggccacacgaggagcttcccttaaacacccacccgtgccccaacacctccttcgttctcttcattgttaactttttcatgttattgcttcatagtgttgtttgttcaagatatagttacttctttaggtatagctattcaaattacattgtttcagtatagaaaagtcactgttatatattaaattaactttmcgttatataagaaatcagaactacacgtcgtttctttgggagatgggactgaaggaggcacatggttatgttgtttctgtggttgtcaataaaatgaattgaaaatgagaaggttgggtcggatgatctctgtggtcttttcccacctctataagtaagtctcatccccatggtctgggtatccaaatagatatccatgatatgtatccatgaaagatacatggatgagtgcatcccaacactgaacacatcctgaaagtaagcaaaagaagtgctgggagaaaggatttctcagcagtc

SEQ ID NO: 20751 - DNA, 600 bp, Chicken  19866894231575_1
cagctgatgccacagatgctgttgtcccagcagcagcagcttggatgctgcttgtgggcacagagctgggtgctctcagctatggacgtgtccctgatgtgccccaggagcgctcctgggacagcccacagctgctctgtgctctcccatcactgccacaagcagtgggacacaggacatcacctcccttagcacagagcattgcaatacacctcacatcccccccacgctcagggggaggaaagctgctatggaaagggaaccacagagggagggagggtaactccaggtgtcccaaaygcatcccaagcatcgtcaccaacctccccaaagcacgcattcagcacccagatcccaaggcacaggatgcagcagcgcgctgcctccacgcagagcagtccccatccctgtcacgacttctggcagctcagaaatgttgtttctggaaaaatatttatcctgctaatgaagccgaggcagcagcagagccccagaaggtcagagcagcgcctgctgcaatcagctcccttcacagctcccgctgaatggggctctgattgcagatgccaatcagagcactcaattttgcctgcttatttg

SEQ ID NO: 20752 - DNA, 600 bp, Chicken  19866894231577_1
acaaacatatcccagaactggaaattcaatctggaaatcggttcagatacataatgttaactatgtatagggaggatgagttaaccctggaacaagtttccagttctgagatagatgtcatgttaataagaatttaataaaatcacaggatctttctctaaaagctatgccttattttaatctgaactcatttaagtgacacatgtggcatgtgttacctaggggtttaggttagttcattacactgtattcttgtagcctgaacacctattgctctaaaaaattttccatttatcaggyaaaaatgcaacagtgatgcaaatttcctttgaaaaaaagaatcccttttccttttttctcctcctggaaaagttccttttcccatttgaaaaccctttctattatctttctttttcactcactcccagatttttaagtggtcagttctaaacaaatgattctgaatcccaatggccaaaagggcccaaagccctgatgaaaatgaggacttggagaagagtagaatgaggggggatcttatcaacacttataaatatctaaagggagggtgtcaagtaggtggggccaggccctttttgg

SEQ ID NO: 20753 - DNA, 600 bp, Chicken  19866894231586_1
ctcgcggctgacgcccatgaggggcatttctgtgcatcatggaagccgtcccggtgcgggacattgcactgtgccagggcgcacccgtgggctccgcaggggaaatccgcgctgcaaacactcagcagcacaggatgtgcaggatgggcggtgagggcagaggggggttggcttcaatgggaccccaccgcgaggagcccattgcaaggaacccaccacaaagatcccaccatggggaccccattgcaaggaacccaccacaaagatcccaccatggggaccccattgcaaggaacccaycacaaagatcccaccatggggaccccattgcaaggaacccaaccacaaagatcccaccatgaggagcccactgcaaggagcctatcacaaagatcccattgctcagtgctggctgtgctgggaggcagcctggggggtgcaggcacagcacgctcagcccagccagaacacctgcatggatgtggccctgacgtgaagccaacgtgtttggattttatatgcagagtggaagcagctgaaaaggagaacataaaaataaaggaacatgaactcacagtgtttgacgtcagcttccagttc

SEQ ID NO: 20754 - DNA, 600 bp, Chicken  19866894231591_1
tacttgttcaaagatttttgcctgggaaaaatatattttttgttatggttaagggttactggttcccctttttggttagtgttgagggttattattttgggttagggttaagggtttagggctaacaatttgtgctaggtttaagggttacccttttgggttagggttaagggtcaagggttatccttttggattagggttaagggttaccatttggtgttagggttaagggatgatgcttaccaatttgcaataggtttaagagttgcacttttgggttaagatttagggttaccaatytgtgyttactgttaagggttatcctttttggttaggrttaatggttaaccttgtgtgttagtgtaaaggggctcagggtctgagtcccagttctcctgggtttctgggctgttgcctttgtgctcagcctggtggcaatgtttccaaaccaacagctttgcttacattgggctggcatgggaaaagtgggctgggctgaaatgtccccagcccaagcttcctcccttctgctgtggaagcattttgtgtttttggcactgccaaagttctgcaaaacgatggtgaggcaagaagatcaca

SEQ ID NO: 20755 - DNA, 598 bp, Chicken  19866894231591_2
gttcaaagatttttgcctgggaaaaatatattttttgttatggttaagggttactggttcccctttttggttagtgttgagggttattattttgggttagggttaagggtttagggctaacaatttgtgctaggtttaagggttacccttttgggttagggttaagggtcaagggttatccttttggattagggttaagggttaccatttggtgttagggttaagggatgatgcttaccaatttgcaataggtttaagagttgcacttttgggttaagatttagggttaccaatytgtgyttactgttaagggttatcctttttggttaggrttaatggttaaccttgtgtgttagtgtaaaggggctcagggtctgagtcccagttctcctgggtttctgggctgttgcctttgtgctcagcctggtggcaatgtttccaaaccaacagctttgcttacattgggctggcatgggaaaagtgggctgggctgaaatgtccccagcccaagcttcctcccttctgctgtggaagcattttgtgtttttggcactgccaaagttctgcaaaacgatggtgaggcaagaagatcacaggg

SEQ ID NO: 20756 - DNA, 566 bp, Chicken  19866894231591_3
ttttgttatggttaagggttactggttcccctttttggttagtgttgagggttattattttgggttagggttaagggtttagggctaacaatttgtgctaggtttaagggttacccttttgggttagggttaagggtcaagggttatccttttggattagggttaagggttaccatttggtgttagggttaagggatgatgcttaccaatttgcaataggtttaagagttgcacttttgggttaagatttagggttaccaatytgtgyttactgttaagggttatcctttttggttaggrttaatggttaaccttgtgtgttagtgtaaaggggctcagggtctgagtcccagttctcctgggtttctgggctgttgcctttgtgctcagcctggtggcaatgtttccaaaccaacagctttgcttacattgggctggcatgggaaaagtgggctgggctgaaatgtccccagcccaagcttcctcccttctgctgtggaagcattttgtgtttttggcactgccaaagttctgcaaaacgatggtgaggcaagaagatcacaggg

SEQ ID NO: 20757 - DNA, 600 bp, Chicken  19866894231601_1
cagggcacttccatcacgtacccacaggtatgagagctcagaggttatcacagcatgccttaccatggcatcagcctcgtgcttcatcttcttggcctcttccaggtaatattctgacaaatgctgtctgaaatggagacaggcagaggaaaacaaatgtcagagaagaagggtaggtgaagtaacaatgttaaccttctcatccaggtgatgttgtgactccagtacaagctgatactgctatcaaacacacatcagattagaagaatcactacatgaatgtcatctgcctgtttagaygttcatatcctagactgacctgccacccaccaggacttagagaaactaacaccatcccttgctgttaggcacactgcacagagtgggatgtctccgagttaaacaagtacctgacttccacagcagcttccctcaaactgggagctgctaaaaggagagaccattgctctgtggggacatcccrgaggtgacaaggcaggtgtaacaaaagcaatgctcagtacaaagcaggagccacagtggctgcatggctagcattgcctggcatcttcagaggggcacagaacaaaatctcacctt

SEQ ID NO: 20758 - DNA, 600 bp, Chicken  19866894231601_10
aagatggtcaaggttttccctgaagagaagcagctgagtcaggatgcaaacctcaacaaatccaagccaatacctcaagctcaggccttgagtaagcagaaaatgactgcggcagctcatgatggatgcaccagtctcctctctcgggagcgctgcccatcaagatacattcttggaagctctcacacagacctagccaaaatgctagtggtatgctkttgtgcaaatcatggggggagtktcagcagaactaccagaagcactgcccacgcaattgctgcaataaaggagacatttttrgctttgaaggccacctgaaattcctggtgtggttcacaagacacagtggatgtgcacccattcagctacacaatgggacaatttggggggagaaaggaaatgctcctgacaagggattaccactgcaktgagacagggtcccagcaggcaggcagkctgccgcattatttccaactccaacaccagactccacgcaatcattttgttgcacagcatccccttctgaaagatggcagtgccactgtgtggctatcagcctrgaaggaaaagcagcactggcacaaccagcaatttcatttc

SEQ ID NO: 20759 - DNA, 600 bp, Chicken  19866894231601_11
caccagtctcctctctcgggagcgctgcccatcaagatacattcttggaagctctcacacagacctagccaaaatgctagtggtatgctkttgtgcaaatcatggggggagtktcagcagaactaccagaagcactgcccacgcaattgctgcaataaaggagacatttttrgctttgaaggccacctgaaattcctggtgtggttcacaagacacagtggatgtgcacccattcagctacacaatgggacaatttggggggagaaaggaaatgctcctgacaagggattaccactgcaktgagacagggtcccagcaggcaggcagkctgccgcattatttccaactccaacaccagactccacgcaatcattttgttgcacagcatccccttctgaaagatggcagtgccactgtgtggctatcagcctrgaaggaaaagcagcactggcacaaccagcaatttcatttcctgcagcctcaacagattttttgagcgatgtgtaatggagggatcagttcagcaatctgaactgcaggatggatacatctgtgtttcaaatggccaagtcttcatttcgtttcaactgctagaaatca

SEQ ID NO: 20760 - DNA, 600 bp, Chicken  19866894231601_12
ccatcaagatacattcttggaagctctcacacagacctagccaaaatgctagtggtatgctkttgtgcaaatcatggggggagtktcagcagaactaccagaagcactgcccacgcaattgctgcaataaaggagacatttttrgctttgaaggccacctgaaattcctggtgtggttcacaagacacagtggatgtgcacccattcagctacacaatgggacaatttggggggagaaaggaaatgctcctgacaagggattaccactgcaktgagacagggtcccagcaggcaggcagkctgccgcattatttccaactccaacaccagactccacgcaatcattttgttgcacagcatccccttctgaaagatggcagtgccactgtgtggctatcagcctrgaaggaaaagcagcactggcacaaccagcaatttcatttcctgcagcctcaacagattttttgagcgatgtgtaatggagggatcagttcagcaatctgaactgcaggatggatacatctgtgtttcaaatggccaagtcttcatttcgtttcaactgctagaaatcaggacaggtgccaccacatgcagttttac

SEQ ID NO: 20761 - DNA, 600 bp, Chicken  19866894231601_13
cactgcccacgcaattgctgcaataaaggagacatttttrgctttgaaggccacctgaaattcctggtgtggttcacaagacacagtggatgtgcacccattcagctacacaatgggacaatttggggggagaaaggaaatgctcctgacaagggattaccactgcaktgagacagggtcccagcaggcaggcagkctgccgcattatttccaactccaacaccagactccacgcaatcattttgttgcacagcatccccttctgaaagatggcagtgccactgtgtggctatcagcctrgaaggaaaagcagcactggcacaaccagcaatttcatttcctgcagcctcaacagattttttgagcgatgtgtaatggagggatcagttcagcaatctgaactgcaggatggatacatctgtgtttcaaatggccaagtcttcatttcgtttcaactgctagaaatcaggacaggtgccaccacatgcagttttacagcaacataatgcaagcacgggaggaggccaagcaccaaaacatcaaaacatcaccttgagcattacagagggagaggaaggtgggggacactaagggcaactg

SEQ ID NO: 20762 - DNA, 600 bp, Chicken  19866894231601_14
aactgctagaaatcaggacaggtgccaccacatgcagttttacagcaacataatgcaagcacgggaggaggccaagcaccaaaacatcaaaacatcaccttgagcattacagagggagaggaaggtgggggacactaagggcaactgcacatctgcaacaaataaaaaggcaaattatgctcctatagccacgtggcacacaaatttgcagcagattatgtttctaaaggcacattatattaagcaaactcacaggaagaacagaaggtacagctccttgtcttaaggttgtaaagaaaygctcagttcaatgcatttttctaccatcccaccacagtatactcacttcaatttacaggagtctttgttaggtgaagactgcaatgattttgcctctttgcccaacttccttttcttcctatcgacgtccttctccttttctctctaacaaacacaaacagaacaatcaaatgtcatgtaaagtacagaccaaaccagctaagtttgatggtttcacattaaaaaagacagattggaactggcaaagtggaaaggcagagtacagcagatttcaggctcactgacgagtatcctgaaatg

SEQ ID NO: 20763 - DNA, 600 bp, Chicken  19866894231601_2
acaatgttaaccttctcatccaggtgatgttgtgactccagtacaagctgatactgctatcaaacacacatcagattagaagaatcactacatgaatgtcatctgcctgtttagaygttcatatcctagactgacctgccacccaccaggacttagagaaactaacaccatcccttgctgttaggcacactgcacagagtgggatgtctccgagttaaacaagtacctgacttccacagcagcttccctcaaactgggagctgctaaaaggagagaccattgctctgtggggacatcccrgaggtgacaaggcaggtgtaacaaaagcaatgctcagtacaaagcaggagccacagtggctgcatggctagcattgcctggcatcttcagaggggcacagaacaaaatctcacctttcaaacttgatctgaggtctccttggtttggaggtaccatttggcacagaaggcactggtaaaggatttgtgacatcccctgcagatccctgaaaaatcaggagcagacagaaagctgatcagagagatccatttagaacagttctaaaacatggctttcttaaatttgaagtgaagtttattt

SEQ ID NO: 20764 - DNA, 600 bp, Chicken  19866894231601_3
agagatccatttagaacagttctaaaacatggctttcttaaatttgaagtgaagtttatttgtctgagatagaagctacttctcaaggttcctccccctcttctttcccagaccccagaccaatactggaaatgaaaacctggcttcccaccagcctgctgctgaggttttaatgccattcaaacattccctgagcaggcagaaattaggcagcaggtttccttgtacaatagctaagacagcagtaaggctgccagcagcacatttttcacagccactggaaaagacaggaactggtartatccactcacacttacatctagcttaaccacagcaactgctgattctgcattattgactacaatgtcaggaaaaagaaagyagtgagaagccagctaatacagcatgcacagtctccattagtgtgcatgcacatggaagttctggaccacaaatatacaggcactcagaaatggcagtagacttgaattttctaacccactaatacgacgatctagctgcaagaatcattaacaatattttttaatgcaagctataataacttctacacaggttacagccaaaaccagagtttggtta

SEQ ID NO: 20765 - DNA, 600 bp, Chicken  19866894231601_4
tcaaggttcctccccctcttctttcccagaccccagaccaatactggaaatgaaaacctggcttcccaccagcctgctgctgaggttttaatgccattcaaacattccctgagcaggcagaaattaggcagcaggtttccttgtacaatagctaagacagcagtaaggctgccagcagcacatttttcacagccactggaaaagacaggaactggtartatccactcacacttacatctagcttaaccacagcaactgctgattctgcattattgactacaatgtcaggaaaaagaaagyagtgagaagccagctaatacagcatgcacagtctccattagtgtgcatgcacatggaagttctggaccacaaatatacaggcactcagaaatggcagtagacttgaattttctaacccactaatacgacgatctagctgcaagaatcattaacaatattttttaatgcaagctataataacttctacacaggttacagccaaaaccagagtttggttatttcctacttgcaaacaatcamcttgtttttgttagttcgtgtaaacacacttctctttacacctatcayattgtactggca

SEQ ID NO: 20766 - DNA, 600 bp, Chicken  19866894231601_5
gcttaaccacagcaactgctgattctgcattattgactacaatgtcaggaaaaagaaagyagtgagaagccagctaatacagcatgcacagtctccattagtgtgcatgcacatggaagttctggaccacaaatatacaggcactcagaaatggcagtagacttgaattttctaacccactaatacgacgatctagctgcaagaatcattaacaatattttttaatgcaagctataataacttctacacaggttacagccaaaaccagagtttggttatttcctacttgcaaacaatcamcttgtttttgttagttcgtgtaaacacacttctctttacacctatcayattgtactggcagttgtctacagtcagaaccagttcctgtcataaacaccattctttttttcacatggtcaccccttcacactgagtttcaccagtgagatgagaacaggcgatggaaagtgggcagcagtaacaacagcatgcccattcaagctagcaagatacagtcacagattgccaccaaaaggacaaatatgtttcaaagagctctctccagaggctggtttactgttcttcccacttaatatccta

SEQ ID NO: 20767 - DNA, 600 bp, Chicken  19866894231601_6
gaaaaagaaagyagtgagaagccagctaatacagcatgcacagtctccattagtgtgcatgcacatggaagttctggaccacaaatatacaggcactcagaaatggcagtagacttgaattttctaacccactaatacgacgatctagctgcaagaatcattaacaatattttttaatgcaagctataataacttctacacaggttacagccaaaaccagagtttggttatttcctacttgcaaacaatcamcttgtttttgttagttcgtgtaaacacacttctctttacacctatcayattgtactggcagttgtctacagtcagaaccagttcctgtcataaacaccattctttttttcacatggtcaccccttcacactgagtttcaccagtgagatgagaacaggcgatggaaagtgggcagcagtaacaacagcatgcccattcaagctagcaagatacagtcacagattgccaccaaaaggacaaatatgtttcaaagagctctctccagaggctggtttactgttcttcccacttaatatcctacagacaggtttctaaagagaatcacgtggcagccccaagttgcaggac

SEQ ID NO: 20768 - DNA, 600 bp, Chicken  19866894231601_7
gcaggcctcagcagaattaagcccagttggtcctttaggacttgccaactctactacacaacgcatgtgaggattcaagggagaaagacttaaaatgctgtgcttttacacggcagagctgatcatatttaataatactgtgccaaatttctgatcatctcgggttgggattacaagggaattcctgcagctataagcagaactcagtagctctatatctaatttcactgacactcatttacatcattttctttcagttcctgaaagctcccaagaaaacacaaagtgtctagagcaacragtgctaaacatgggccctgacagcttggtgctgcaagatggtcaaggttttccctgaagagaagcagctgagtcaggatgcaaacctcaacaaatccaagccaatacctcaagctcaggccttgagtaagcagaaaatgactgcggcagctcatgatggatgcaccagtctcctctctcgggagcgctgcccatcaagatacattcttggaagctctcacacagacctagccaaaatgctagtggtatgctkttgtgcaaatcatggggggagtktcagcagaactaccagaagcactg

SEQ ID NO: 20769 - DNA, 600 bp, Chicken  19866894231601_8
tcagttcctgaaagctcccaagaaaacacaaagtgtctagagcaacragtgctaaacatgggccctgacagcttggtgctgcaagatggtcaaggttttccctgaagagaagcagctgagtcaggatgcaaacctcaacaaatccaagccaatacctcaagctcaggccttgagtaagcagaaaatgactgcggcagctcatgatggatgcaccagtctcctctctcgggagcgctgcccatcaagatacattcttggaagctctcacacagacctagccaaaatgctagtggtatgctkttgtgcaaatcatggggggagtktcagcagaactaccagaagcactgcccacgcaattgctgcaataaaggagacatttttrgctttgaaggccacctgaaattcctggtgtggttcacaagacacagtggatgtgcacccattcagctacacaatgggacaatttggggggagaaaggaaatgctcctgacaagggattaccactgcaktgagacagggtcccagcaggcaggcagkctgccgcattatttccaactccaacaccagactccacgcaatcattttgttgcacagcatcc

SEQ ID NO: 20770 - DNA, 600 bp, Chicken  19866894231601_9
aaacacaaagtgtctagagcaacragtgctaaacatgggccctgacagcttggtgctgcaagatggtcaaggttttccctgaagagaagcagctgagtcaggatgcaaacctcaacaaatccaagccaatacctcaagctcaggccttgagtaagcagaaaatgactgcggcagctcatgatggatgcaccagtctcctctctcgggagcgctgcccatcaagatacattcttggaagctctcacacagacctagccaaaatgctagtggtatgctkttgtgcaaatcatggggggagtktcagcagaactaccagaagcactgcccacgcaattgctgcaataaaggagacatttttrgctttgaaggccacctgaaattcctggtgtggttcacaagacacagtggatgtgcacccattcagctacacaatgggacaatttggggggagaaaggaaatgctcctgacaagggattaccactgcaktgagacagggtcccagcaggcaggcagkctgccgcattatttccaactccaacaccagactccacgcaatcattttgttgcacagcatccccttctgaaagatggcagtgcca

SEQ ID NO: 20771 - DNA, 600 bp, Chicken  19866894231610_1
tatactatgttttgctgtttttttaattattattattttttatttttttctgcttctctctctactttacagcaaggtaaggtttagaaacacttttcctcaggaaataaatgtacatgttagaacacaagcagcaagcaagagaagattggaaaggtgaagaagctcatcagtgaagcataggactggttaataaaattaaggtttgaaactgtcttttcagggttacaggaacatgctttggtacatcctcaaagaaaaattctacactttgctttgactatgccttcaatgatattyttccttgacagctatacgcacattattcatgcagtgctaattactttcctgagaatgtaattgacttgttaagttagaatgtgaattaattggtggtatagaaaagtaaatgatacaaagtcaggcctggtcttaatctgtgtttggcatattatctcttggtattaagtaaatttttaatttatatatacaaatatacttctaatttgaatgaatcaaagatttcagactaactaatgaaagatggctacattcatctggaagtgctgataacttaattttattcatatgtgagcagac

SEQ ID NO: 20772 - DNA, 600 bp, Chicken  19866894231614_1
tggtgtttgggtactcaagagttccatttcattttttgcatcagcagccaaacctgtgacagagccctcgtgcagtgcctatgcttttcttgtctctgcagccatgacttgatagataagatcttaaatatcattctgcatccagtttattctgaagcctactaccaaaacctgtaaaaaaaaaattcactgcatatgtcctttaaaataaaaggacgcaaagaagaagagaatgaaaaagctttcttgaaaaagaaaggagtaataaaaatatcttctttaccaatttctttcccaccwatggcacattgcatgaaattatgggtcatttctgtttccttatttagcttgcagtagagtgcattgagctgttctgtgtcacgctgaagtgtgttgtacctgtaggatggcaccatgtaacatgattcaaggtggcatttttatctaagctcactgctactgtttcagacaagcatgcagtaattacagaatatttaagctttacacataagtagtacagccttgaaagtagcgaggaagaaaattagtgagaaaggcagacaggaaagagctccttaagacattactaacatctgtttt

SEQ ID NO: 20773 - DNA, 599 bp, Chicken  19866894231615_1
  misc_feature (1)..(210): n is any nucleotide
nnnnnnnnnnnnnnnnnnnnnnnnnnnnnnnnnnnnnnnnnnnnnnnnnnnnnnnnnnnnnnnnnnnnnnnnnnnnnnnnnnnnnnnnnnnnnnnnnnnnnnnnnnnnnnnnnnnnnnnnnnnnnnnnnnnnnnnnnnnnnnnnnnnnnnnnnnnnnnnnnnnnnnnnnnnnnnnnnnnnnnnnnnnnnnnnnnnnnnnnnnnnnnnnnnggggcaatgggggcaatgggggtaatgggggtattgggggtaatgggggtaatggcggtattgggggcaatgggggcaatggacgctatrgggtaatgtgggcgatgggggcaatggggtcaatgagatatggggacattggggtcagtgggatatggggtcagtgggatatggggacattggggtcaatgggatatggggtcaatgtgacattggggtcaatgggatatggggtcaatgggatatggggacatgggggtcaaagggacatgatggtcaatgggacatgatggtcaatggggcattggggtcaatgggatatggggtcagtggggtcaatgggatatggggtcaatggggcattggggtcaatggggcattggggtcaa

SEQ ID NO: 20774 - DNA, 581 bp, Chicken  19866894231628_1
cacacacgttcctgtttatttatttcagtatatttatccgtttgctccgtggcagccccccgtttcggtgggctctgtggagcagtgctgggggcacggtgtgcatcgggcctgtgttgttctgacaggtctccgagaagaaccagtggggagagatcgtggaggagttcaactttcccagaagttgttctaacgctgccttcgctttaaaacagtattacttgcggtgagtgctaccaagctgttgctgtggtattcgtgagtgtgggattgtatttggttttcgttgcgtgcaataasaaaaatacccctsctctttaaaaatgctgtaacgtagacttgaaaatacttccaattccttgtttgtctggtgcagtggtcagttaaaggtaattatgttttgcggctattttatttctattttacatctgcaagccttaaactttgaagggatcctcagtgtataracgagataggtgggaggcatttctgctgatcgtttcagaacggtggtactaaaggacagttactaagggatcctgttattgtagttacagaaacttagcttaatttttgaagcg

SEQ ID NO: 20775 - DNA, 568 bp, Chicken  19866894231628_2
gtttatttatttcagtatatttatccgtttgctccgtggcagccccccgtttcggtgggctctgtggagcagtgctgggggcacggtgtgcatcgggcctgtgttgttctgacaggtctccgagaagaaccagtggggagagatcgtggaggagttcaactttcccagaagttgttctaacgctgccttcgctttaaaacagtattacttgcggtgagtgctaccaagctgttgctgtggtattcgtgagtgtgggattgtatttggttttcgttgcgtgcaataasaaaaatacccctsctctttaaaaatgctgtaacgtagacttgaaaatacttccaattccttgtttgtctggtgcagtggtcagttaaaggtaattatgttttgcggctattttatttctattttacatctgcaagccttaaactttgaagggatcctcagtgtataracgagataggtgggaggcatttctgctgatcgtttcagaacggtggtactaaaggacagttactaagggatcctgttattgtagttacagaaacttagcttaatttttgaagcg

SEQ ID NO: 20776 - DNA, 414 bp, Chicken  19866894231628_3
ttcaactttcccagaagttgttctaacgctgccttcgctttaaaacagtattacttgcggtgagtgctaccaagctgttgctgtggtattcgtgagtgtgggattgtatttggttttcgttgcgtgcaataasaaaaatacccctsctctttaaaaatgctgtaacgtagacttgaaaatacttccaattccttgtttgtctggtgcagtggtcagttaaaggtaattatgttttgcggctattttatttctattttacatctgcaagccttaaactttgaagggatcctcagtgtataracgagataggtgggaggcatttctgctgatcgtttcagaacggtggtactaaaggacagttactaagggatcctgttattgtagttacagaaacttagcttaatttttgaagcg

SEQ ID NO: 20777 - DNA, 599 bp, Chicken  19866894231633_1
  misc_feature (1)..(17): n is any nucleotide
nnnnnnnnnnnnnnnnnttgttgaaaatatagaactttcagaaagttctgaatgaagaataagaatcttcatttttccattttgagtaagctttgtggttgcaaagctctttgccagagcagtgatgatctacttctcgctgccattggtagttcttaagacgctttgcaactgccttgaaaaatagattttcaaaggtgtttatcactgtgctcttttttagcattgaaggaacagtagatacaaatgaaaactcaagtcactaggttgtatctgtaccaggtcccctgaatgtgtttragaaaggtatcagcaaccactttttttaaatactctgaaattgtactgtaaaatagcagtaccttaaaaataacactaattgtgattaagagtaatgttagtatgatttttatagggcagttgttctgttgaaaccttttattgcttggttaaaacttgaaggaaaaatatttcctgttatatctttatatgttttatgaatgatggaaaagatctatacaagattctactcttgtaatatgagaaaactaagctttgcgagtatgtaagttaatggtaaataggcaccaagtatgttt

SEQ ID NO: 20778 - DNA, 600 bp, Chicken  19866894231637_1
accaggctgagggaatgatttctgcgatcgtaaacacagaaataagtgctgacaccagggatgccatgcattaggattagccaaggtgaacagcaatccctgggacttgaagaaagtgtggctaacatgaggtaacccgttgccagctgtcagttcccattgctttgtttgttcttcagctccaaaccggaacctgaattaggtcatggaaaatccctggtacacagctctctggtgagagggcagggattcagcacggcactgctgcagcacgctgcttgggcagcaaagggaccctgkggggaagccagatgcctttaagcagcttcagtgcagggcagaattccaggcaggcgttgaatgctgcagagcaccatggagtaaacccagctcccagcatagtgtcctccaagcagcctttcccatgaacctccagcaacaaacgtacagttctactcatgtgatctcagaggttattctgtgcttgaccagtggtttaacagctgtaaacaactcccctccctgagaactggatactacgcaacaggcctggaggactgacccttcccagcacagactgttggccaatgatttcttggt

SEQ ID NO: 20779 - DNA, 600 bp, Chicken  19866894231641_1
aatcttactttagtccttgagtttttcagcatctggctgtaaactttgaaccctgctgtcagtaaccctattccctattaatactgaaaactgaagttaaacctccctccctgtagggtattcatattgctttttccttaccataaaccagacttcactctctgctttgctaaatactaactctaatcttagccctaatcctggtctaagcagtaatactgtcaccccagtctgaactggtgctggctttatgccaaatgacattgaatgtttttggagccggctacctaattattattwttwttttttttaaagtacactcactgtagctcattgtattcagtgccatttattttctcattttttgccamttctcttattgatgctaatgagcarctaaaaatcatacctgctctggcctagctgtcacgytatggtcatgacagtgattaagatttggggtgcattaaccttcaaagccaacagaactggaatttggggatgcaattttgtgtcaaaagtaggactgccactaactgatggccagaccaaatcccatccaggaagacagtcagtctgacttggtgtcccagaagagag

SEQ ID NO: 20780 - DNA, 600 bp, Chicken  19866894231641_2
cttactttagtccttgagtttttcagcatctggctgtaaactttgaaccctgctgtcagtaaccctattccctattaatactgaaaactgaagttaaacctccctccctgtagggtattcatattgctttttccttaccataaaccagacttcactctctgctttgctaaatactaactctaatcttagccctaatcctggtctaagcagtaatactgtcaccccagtctgaactggtgctggctttatgccaaatgacattgaatgtttttggagccggctacctaattattattwttwttttttttaaagtacactcactgtagctcattgtattcagtgccatttattttctcattttttgccamttctcttattgatgctaatgagcarctaaaaatcatacctgctctggcctagctgtcacgytatggtcatgacagtgattaagatttggggtgcattaaccttcaaagccaacagaactggaatttggggatgcaattttgtgtcaaaagtaggactgccactaactgatggccagaccaaatcccatccaggaagacagtcagtctgacttggtgtcccagaagagagtcc

SEQ ID NO: 20781 - DNA, 600 bp, Chicken  19866894231641_3
tccctattaatactgaaaactgaagttaaacctccctccctgtagggtattcatattgctttttccttaccataaaccagacttcactctctgctttgctaaatactaactctaatcttagccctaatcctggtctaagcagtaatactgtcaccccagtctgaactggtgctggctttatgccaaatgacattgaatgtttttggagccggctacctaattattattwttwttttttttaaagtacactcactgtagctcattgtattcagtgccatttattttctcattttttgccamttctcttattgatgctaatgagcarctaaaaatcatacctgctctggcctagctgtcacgytatggtcatgacagtgattaagatttggggtgcattaaccttcaaagccaacagaactggaatttggggatgcaattttgtgtcaaaagtaggactgccactaactgatggccagaccaaatcccatccaggaagacagtcagtctgacttggtgtcccagaagagagtccttcctcccttcctagtctccattttctcctggtccctagcaatctgatgactctaatccaccctttcc

SEQ ID NO: 20782 - DNA, 600 bp, Chicken  19866894231641_4
ttaaacctccctccctgtagggtattcatattgctttttccttaccataaaccagacttcactctctgctttgctaaatactaactctaatcttagccctaatcctggtctaagcagtaatactgtcaccccagtctgaactggtgctggctttatgccaaatgacattgaatgtttttggagccggctacctaattattattwttwttttttttaaagtacactcactgtagctcattgtattcagtgccatttattttctcattttttgccamttctcttattgatgctaatgagcarctaaaaatcatacctgctctggcctagctgtcacgytatggtcatgacagtgattaagatttggggtgcattaaccttcaaagccaacagaactggaatttggggatgcaattttgtgtcaaaagtaggactgccactaactgatggccagaccaaatcccatccaggaagacagtcagtctgacttggtgtcccagaagagagtccttcctcccttcctagtctccattttctcctggtccctagcaatctgatgactctaatccaccctttcctaggctttggcaaaggaatgggatg

SEQ ID NO: 20783 - DNA, 600 bp, Chicken  19866894231641_5
tttccttaccataaaccagacttcactctctgctttgctaaatactaactctaatcttagccctaatcctggtctaagcagtaatactgtcaccccagtctgaactggtgctggctttatgccaaatgacattgaatgtttttggagccggctacctaattattattwttwttttttttaaagtacactcactgtagctcattgtattcagtgccatttattttctcattttttgccamttctcttattgatgctaatgagcarctaaaaatcatacctgctctggcctagctgtcacgytatggtcatgacagtgattaagatttggggtgcattaaccttcaaagccaacagaactggaatttggggatgcaattttgtgtcaaaagtaggactgccactaactgatggccagaccaaatcccatccaggaagacagtcagtctgacttggtgtcccagaagagagtccttcctcccttcctagtctccattttctcctggtccctagcaatctgatgactctaatccaccctttcctaggctttggcaaaggaatgggatgtccatgggttggacaactcatggaggtgtgccacta

SEQ ID NO: 20784 - DNA, 600 bp, Chicken  19866894231641_6
tgagcgcctccagggatggggcataatgctccccacctctgctgggaccatttgtgtactaaaaaaattatacaaacatattaccatgatacctttaaaacctgaatgcaagtctgttgaaacatgtcatgttggcaagctcagaaaatgaattcactagttctatacggctagcagcaatttatttactgcagttcacaatgcagccagtgtgaaggctgaattcatcaaggtgggcttaaaggcagcctgcacacatctcagcagcagtgtgagttttctgagtgatgacgaaaccargggtttaaaaggcaacttccgttcccttttttttyccccctatttgcacttcagaatccctgtgctgttgccagagagggggcagaaggccatgctgtgaggccaggtttcagaccgagacattacatacagtgtctaatcctgtaaaccataaaaatctcacgtgaatagtgccattgataaagtttgcaggtaaggggctgcttgtgtgaatgactgcttgaagggcagagccctcttaatttggtctataggaaactttcctagctgtgttttgtgtaaaaacacctaaaaatcaga

SEQ ID NO: 20785 - DNA, 600 bp, Chicken  19866894231641_7
cctctgctgggaccatttgtgtactaaaaaaattatacaaacatattaccatgatacctttaaaacctgaatgcaagtctgttgaaacatgtcatgttggcaagctcagaaaatgaattcactagttctatacggctagcagcaatttatttactgcagttcacaatgcagccagtgtgaaggctgaattcatcaaggtgggcttaaaggcagcctgcacacatctcagcagcagtgtgagttttctgagtgatgacgaaaccargggtttaaaaggcaacttccgttcccttttttttyccccctatttgcacttcagaatccctgtgctgttgccagagagggggcagaaggccatgctgtgaggccaggtttcagaccgagacattacatacagtgtctaatcctgtaaaccataaaaatctcacgtgaatagtgccattgataaagtttgcaggtaaggggctgcttgtgtgaatgactgcttgaagggcagagccctcttaatttggtctataggaaactttcctagctgtgttttgtgtaaaaacacctaaaaatcagaccctaataacgctcttggcagagttgctctatggt

SEQ ID NO: 20786 - DNA, 600 bp, Chicken  19866894231641_8
tgctgttgccagagagggggcagaaggccatgctgtgaggccaggtttcagaccgagacattacatacagtgtctaatcctgtaaaccataaaaatctcacgtgaatagtgccattgataaagtttgcaggtaaggggctgcttgtgtgaatgactgcttgaagggcagagccctcttaatttggtctataggaaactttcctagctgtgttttgtgtaaaaacacctaaaaatcagaccctaataacgctcttggcagagttgctctatggtgtaggaggtcttgctgatagctgtgtraaatgcaatgaagtgattaagggctctgccagagccaacatgctgcacccagagcagaagctgctcctgaacaccggtggagctgggcactgggctagaaacatgaggcacagaccacccttgaaaacctgtgaacacagcaaagcacaccttccaatccccatcctgtgctcagggaaaaaagggaggtgggtgagagggggcgaaggggaaagaaacgctgctgttagtaaggctgtctgttaatgacatgagtcattcctccaatgtcagcaaagaagcacttaattcatccgccaa

SEQ ID NO: 20787 - DNA, 600 bp, Chicken  19866894231662_1
aacaaacaaacaaacaaaaaaacaaagcaaaacaaaaaatcttaaagaaataaagtgaaatcttctgttggaaaaatgtgagtggcttgatgggagatcttgatctgtatatgcttcctcacataacattgcctagttgattgatgcatggatgaagtatgaactgctggctttggcctagaaatcttgaaacattcagtatcagtgagctgacttggggcctcccaagcagcaaataccaagctgtttcctgcaggcttgtacagcagaacctgctggctgaaaggcattttggtgctycatggttccctgtggagtttggtctgttgggacacaccatcagtttgagtatgtgctgttgtatgctgttttggagttctcaaaaagatttcccaaaaagatgagtgcttttggtgggactgacccatgcttgcagattatgttaggagatatttcttcaaattgtgttttcacaagcttcctttgatttcatgatccagcctctgttataatttctaaaactgacagcattgtttgagttgtacaacgaagcacaaccccccaagcctctcccatgcaagcatatgcacaaacactttc

SEQ ID NO: 20788 - DNA, 600 bp, Chicken  19866894231662_2
gtctgttgggacacaccatcagtttgagtatgtgctgttgtatgctgttttggagttctcaaaaagatttcccaaaaagatgagtgcttttggtgggactgacccatgcttgcagattatgttaggagatatttcttcaaattgtgttttcacaagcttcctttgatttcatgatccagcctctgttataatttctaaaactgacagcattgtttgagttgtacaacgaagcacaaccccccaagcctctcccatgcaagcatatgcacaaacactttcattcttgtttaaaactaagcycttgtgtgtacctgatrctttattcacccattaaagagcattgtctgtcatcttatagtaatgcctggcagtgcctcagatcatggggaaactagtggattggtgccatgaaatggcatcattatagcccatcagtgtgtacaagttatggctggaaagctgctgtttccagattttttacatctgttgcattgcagactcttagccaggattattcagggctaatcttgcttctttgcactttagtaaataaagcaatattcaggaaagtggaacaaacacagttctctgtcaatagag

SEQ ID NO: 20789 - DNA, 600 bp, Chicken  19866894231662_3
atcagtttgagtatgtgctgttgtatgctgttttggagttctcaaaaagatttcccaaaaagatgagtgcttttggtgggactgacccatgcttgcagattatgttaggagatatttcttcaaattgtgttttcacaagcttcctttgatttcatgatccagcctctgttataatttctaaaactgacagcattgtttgagttgtacaacgaagcacaaccccccaagcctctcccatgcaagcatatgcacaaacactttcattcttgtttaaaactaagcycttgtgtgtacctgatrctttattcacccattaaagagcattgtctgtcatcttatagtaatgcctggcagtgcctcagatcatggggaaactagtggattggtgccatgaaatggcatcattatagcccatcagtgtgtacaagttatggctggaaagctgctgtttccagattttttacatctgttgcattgcagactcttagccaggattattcagggctaatcttgcttctttgcactttagtaaataaagcaatattcaggaaagtggaacaaacacagttctctgtcaatagaggcttgcaggagttggaa

SEQ ID NO: 20790 - DNA, 600 bp, Chicken  19866894231677_1
actcctatggtaaagccttttaaattaccctccattaccataaagggaatcaggtgccctacagaaaacaagctgatgttaacaatgccacagaagtggaaattacataaagcaggtttcagttaaaggtgtcttaccttgtagattggtttttgtgcatcagggttcttgaaagagattttcctttctgaacaggaaggaaaacagccaatgcaacttttctgcaggcttttctagtaaaaaatcttacgtacctatatcatttgaaatatttattggatgctaattccctatgaagcwatttggagtgttaggttgctttatttctatttttcctagtacttgagatgctggtacaggtgatgaattagcatttcctgcttgcttgttctccagaaattttctccaggacgttaagagaatgtggttttatccagatagttgggaaggaagttgcagtccttagaagagagagttgtgatttgcatgcagattcatgggaattagtctcttgcattttctggccttttggtctggtggcagtttagtcaattaaatagaaatgagttcttccatgggatatcttgggctggtgaggtg

SEQ ID NO: 20791 - DNA, 600 bp, Chicken  19866894231687_1
taatgtattagtttgttaactccatgtcactgtcacttctggggctgtgatggtcaagaaaaaagaagtatgtttttgtagcatagaaaatcctgagacttgcttagagaaggtaatccatgagttgtatcttgcaggcgtcagtaaagtagaactaactcgcacaaggcagctgccaggaaaacaatgactaaacttggcaaaagcacactatgttcagatgcgtttctacttgtataatgaagcaagcaggtccctgagattggtatgttgcacatcgtgctaagagtgccggatttytatataacatcagtgaatattcattttactcagttacctgatgttacatactccggatgggttaaagtttaaaaaagaagttcactgcattgcatttaaatctatcgattcagaagagcttttactgttttatcttctctcttcaactcttgagaattttcattctttcagtatatttctatgattgtgactgattcaggatgtgtcaagaaaaaggagtgaccaagaaaactgacrctatattttgatgaatgtcaaatattcaaactcccagaggaaatgactgttgctcttgttgca

SEQ ID NO: 20792 - DNA, 568 bp, Chicken  19866894231687_2
taatgaagcaagcaggtccctgagattggtatgttgcacatcgtgctaagagtgccggatttytatataacatcagtgaatattcattttactcagttacctgatgttacatactccggatgggttaaagtttaaaaaagaagttcactgcattgcatttaaatctatcgattcagaagagcttttactgttttatcttctctcttcaactcttgagaattttcattctttcagtatatttctatgattgtgactgattcaggatgtgtcaagaaaaaggagtgaccaagaaaactgacrctatattttgatgaatgtcaaatattcaaactcccagaggaaatgactgttgctcttgttgcatgcttccctgcacagcagtggtcctggtggcatgtatagcataatagtatctttcagtgctaaagaggaatgtgatggacaaattgtagagattaagtatattatgtaaattattttagtgcaagactgaaaagcagtcttgacttctggcttgattaatttttcatgaaaattatctgtcttagtgtgtgtctgcttagtatat

SEQ ID NO: 20793 - DNA, 599 bp, Chicken  19866894231696_1
  misc_feature (1)..(173): n is any nucleotide
nnnnnnnnnnnnnnnnnnnnnnnnnnnnnnnnnnnnnnnnnnnnnnnnnnnnnnnnnnnnnnnnnnnnnnnnnnnnnnnnnnnnnnnnnnnnnnnnnnnnnnnnnnnnnnnnnnnnnnnnnnnnnnnnnnnnnnnnnnnnnnnnnnnnnnnnnnnnnnnnnnnnnnnnnnnnnacctggtagtttgtagactctgccattctaaacttcgttgtagcacctgtgcagcccagcccttttgcttctttaactcagggctacttgtaacactgagaagtaaggatttttttcccacgtgttrcttggatgtattggacttcagtttgctcctgcgtgcactgctcttgctacacatgggttcatgcagagaccagccctttatccttcctttgctgagtcctttcttatcccctctgtcccactgttgctcagttctgcttcaggtgagctccatccctaaaatttgttagggaaaccaggyggcggggtgacctgctcagagttcccggggagacgggtggccagagctccatctctgtggccctggggctttctgctgccttgcagatgccgttggaaagcactgcttccaytgcagca

SEQ ID NO: 20794 - DNA, 600 bp, Chicken  19866894231696_2
agtttgtagactctgccattctaaacttcgttgtagcacctgtgcagcccagcccttttgcttctttaactcagggctacttgtaacactgagaagtaaggatttttttcccacgtgttrcttggatgtattggacttcagtttgctcctgcgtgcactgctcttgctacacatgggttcatgcagagaccagccctttatccttcctttgctgagtcctttcttatcccctctgtcccactgttgctcagttctgcttcaggtgagctccatccctaaaatttgttagggaaaccaggyggcggggtgacctgctcagagttcccggggagacgggtggccagagctccatctctgtggccctggggctttctgctgccttgcagatgccgttggaaagcactgcttccaytgcagcactacggccggtaccasygtgcagccatgcttccmcccgtgcgggcacaatgctgccgcagcatccctgtgcggctcagcatggaaaaagcgttttcagttgggtgagaagacctttgggttgacaaagaatggggggtgggggcaggaggaagggatccctgggcatggagaacggggctc

SEQ ID NO: 20795 - DNA, 600 bp, Chicken  19866894231696_3
acgtgttrcttggatgtattggacttcagtttgctcctgcgtgcactgctcttgctacacatgggttcatgcagagaccagccctttatccttcctttgctgagtcctttcttatcccctctgtcccactgttgctcagttctgcttcaggtgagctccatccctaaaatttgttagggaaaccaggyggcggggtgacctgctcagagttcccggggagacgggtggccagagctccatctctgtggccctggggctttctgctgccttgcagatgccgttggaaagcactgcttccaytgcagcactacggccggtaccasygtgcagccatgcttccmcccgtgcgggcacaatgctgccgcagcatccctgtgcggctcagcatggaaaaagcgttttcagttgggtgagaagacctttgggttgacaaagaatggggggtgggggcaggaggaagggatccctgggcatggagaacggggctctaatcctgttgcagataacatgtctgcgggctaggtttgtgtgtgtttgggggagctgcaggggcagagattgttaggcagtatttgtttgtaaagccacttgctctgaaga

SEQ ID NO: 20796 - DNA, 600 bp, Chicken  19866894231696_4
cttcagtttgctcctgcgtgcactgctcttgctacacatgggttcatgcagagaccagccctttatccttcctttgctgagtcctttcttatcccctctgtcccactgttgctcagttctgcttcaggtgagctccatccctaaaatttgttagggaaaccaggyggcggggtgacctgctcagagttcccggggagacgggtggccagagctccatctctgtggccctggggctttctgctgccttgcagatgccgttggaaagcactgcttccaytgcagcactacggccggtaccasygtgcagccatgcttccmcccgtgcgggcacaatgctgccgcagcatccctgtgcggctcagcatggaaaaagcgttttcagttgggtgagaagacctttgggttgacaaagaatggggggtgggggcaggaggaagggatccctgggcatggagaacggggctctaatcctgttgcagataacatgtctgcgggctaggtttgtgtgtgtttgggggagctgcaggggcagagattgttaggcagtatttgtttgtaaagccacttgctctgaagataatgcttgcactaacttctatt

SEQ ID NO: 20797 - DNA, 600 bp, Chicken  19866894231696_5
ttcagtttgctcctgcgtgcactgctcttgctacacatgggttcatgcagagaccagccctttatccttcctttgctgagtcctttcttatcccctctgtcccactgttgctcagttctgcttcaggtgagctccatccctaaaatttgttagggaaaccaggyggcggggtgacctgctcagagttcccggggagacgggtggccagagctccatctctgtggccctggggctttctgctgccttgcagatgccgttggaaagcactgcttccaytgcagcactacggccggtaccasygtgcagccatgcttccmcccgtgcgggcacaatgctgccgcagcatccctgtgcggctcagcatggaaaaagcgttttcagttgggtgagaagacctttgggttgacaaagaatggggggtgggggcaggaggaagggatccctgggcatggagaacggggctctaatcctgttgcagataacatgtctgcgggctaggtttgtgtgtgtttgggggagctgcaggggcagagattgttaggcagtatttgtttgtaaagccacttgctctgaagataatgcttgcactaacttctattg

SEQ ID NO: 20798 - DNA, 600 bp, Chicken  19866894231696_6
tgcactgctcttgctacacatgggttcatgcagagaccagccctttatccttcctttgctgagtcctttcttatcccctctgtcccactgttgctcagttctgcttcaggtgagctccatccctaaaatttgttagggaaaccaggyggcggggtgacctgctcagagttcccggggagacgggtggccagagctccatctctgtggccctggggctttctgctgccttgcagatgccgttggaaagcactgcttccaytgcagcactacggccggtaccasygtgcagccatgcttccmcccgtgcgggcacaatgctgccgcagcatccctgtgcggctcagcatggaaaaagcgttttcagttgggtgagaagacctttgggttgacaaagaatggggggtgggggcaggaggaagggatccctgggcatggagaacggggctctaatcctgttgcagataacatgtctgcgggctaggtttgtgtgtgtttgggggagctgcaggggcagagattgttaggcagtatttgtttgtaaagccacttgctctgaagataatgcttgcactaacttctattgagagagcggtgtgagtc

SEQ ID NO: 20799 - DNA, 600 bp, Chicken  19866894231697_1
tacaggcttctatggggataacaggtgtcttcctagattttagagcatgtgagcaagttttctgagtgcttcattccttagctatgtttttcattttctagtgtacaaatacaaggagacatagaatcagcaaaactcccttaactttccttttttttttttttttttcacctatcagagaattatcagtcaacaagtgtctgttaaaagtagaccagcgtaacaggtaacctttgtgcttttctgaacagacataaattcacaggttctaattttaaagcaaaggtgatgtctgcaacsaagggatgaacacatcttcctggctggctaacattttctctaagactcagcattaacacatatgttttcctaggtcttgctagarttctctctttttttttttcatctgcatgtgtgtaacattgaagtgtcttgcattttcaaggacctgtgctgtgtcattctgatctgctagccaaatcatgcttattgaaaacattgctttctccacatgcacgctctcctacttagacttttaccttgaagaggaaaaaagaaaggtgctccaaggtcttctatttcatttttgcatcccatcca

SEQ ID NO: 20800 - DNA, 600 bp, Chicken  19866894231697_2
gtttttcattttctagtgtacaaatacaaggagacatagaatcagcaaaactcccttaactttccttttttttttttttttttcacctatcagagaattatcagtcaacaagtgtctgttaaaagtagaccagcgtaacaggtaacctttgtgcttttctgaacagacataaattcacaggttctaattttaaagcaaaggtgatgtctgcaacsaagggatgaacacatcttcctggctggctaacattttctctaagactcagcattaacacatatgttttcctaggtcttgctagarttctctctttttttttttcatctgcatgtgtgtaacattgaagtgtcttgcattttcaaggacctgtgctgtgtcattctgatctgctagccaaatcatgcttattgaaaacattgctttctccacatgcacgctctcctacttagacttttaccttgaagaggaaaaaagaaaggtgctccaaggtcttctatttcatttttgcatcccatccaagaacccctcagagctgctctctaaagaggaggaaatccaaacaattgttagctgatggcaacaacaacagcagctgacaatcag

SEQ ID NO: 20801 - DNA, 600 bp, Chicken  19866894231697_3
aaacctcctgtggtgtctgatagaaacatggcacgcttactttggtattcgtatgtcatcaggaattgctgaaaacatgagagaaaagattagtactggctatgagaaataggaggaaaagatgcacttaatgtaaacaaagtcagaaggaccttgtaaataattgttgaaatcagctcgggaagctgatggaatgtaatagttctggagtcttcttggcaggagtagtatttattggctggatttagtatagtactgagcatgtcaactaggtataaagttgttagcgctggaaaactstgtgtgttgtgaaaargcataaaatgcaataagctgtgtggtgtggacacaaacacagtatgccaggaaacagagaactctacagcaggtcaacatggacacagccagcttcatctgagcgtgcatattttatacatgcacgtttattaggcacgtccaatggtgctttttaggacaggtttaccttaacaagatgaarcaaggatgtatcacagggttttcatgcactgagagttgtctcctaagtcctgtgctgactaaattctgaacgtggacttcaagtctggatttgtgggaggg

SEQ ID NO: 20802 - DNA, 600 bp, Chicken  19866894231697_4
ctgatagaaacatggcacgcttactttggtattcgtatgtcatcaggaattgctgaaaacatgagagaaaagattagtactggctatgagaaataggaggaaaagatgcacttaatgtaaacaaagtcagaaggaccttgtaaataattgttgaaatcagctcgggaagctgatggaatgtaatagttctggagtcttcttggcaggagtagtatttattggctggatttagtatagtactgagcatgtcaactaggtataaagttgttagcgctggaaaactstgtgtgttgtgaaaargcataaaatgcaataagctgtgtggtgtggacacaaacacagtatgccaggaaacagagaactctacagcaggtcaacatggacacagccagcttcatctgagcgtgcatattttatacatgcacgtttattaggcacgtccaatggtgctttttaggacaggtttaccttaacaagatgaarcaaggatgtatcacagggttttcatgcactgagagttgtctcctaagtcctgtgctgactaaattctgaacgtggacttcaagtctggatttgtgggagggatttctgagttgactg

SEQ ID NO: 20803 - DNA, 579 bp, Chicken  19866894231697_5
tagttctggagtcttcttggcaggagtagtatttattggctggatttagtatagtactgagcatgtcaactaggtataaagttgttagcgctggaaaactstgtgtgttgtgaaaargcataaaatgcaataagctgtgtggtgtggacacaaacacagtatgccaggaaacagagaactctacagcaggtcaacatggacacagccagcttcatctgagcgtgcatattttatacatgcacgtttattaggcacgtccaatggtgctttttaggacaggtttaccttaacaagatgaarcaaggatgtatcacagggttttcatgcactgagagttgtctcctaagtcctgtgctgactaaattctgaacgtggacttcaagtctggatttgtgggagggatttctgagttgactgtctatgaaactgtgcatgaaggaaaatggaaaccatatgcaattcactacacagatctgtttttcatttaaatcttttcctgtattatattttttgctggtaggagagagaaacacactgctagatgaatagtatggagcttaaaataaaaggcagtgcatt

SEQ ID NO: 20804 - DNA, 600 bp, Chicken  19866894231699_1
tggttatgatgcttctcttaaataaacattctgtgaaacacaatcaggaatgatccttaaacctcaccagatttcttctgaagctgcagtttggaattaaaacagacaacattttcttccaactgcttaacaaagcagcaccctcttatgtggtctcacgcattaatttctcttgattcttataagcacgatgctgctatgattttataaccgtgtgtgtgtgcagaacctcaactccagcaccacacagctgaagaaagagccttcaggggatggcagaaggcaggggatgggctcagycacactcagagcctttcaccaacatctggatctaagacaggttcttccagtgcaaagaacccgaataggcaacttctattaaacacaactctttctgctttgatcctgatgcaaaacttgccggtatccagcatcaccaatcacccaaattcagcatgcaacatcaaccacctttgtaaattcatctaatccagagatattatagcatttaaatgacagatacttgagttttttaatcctatcacacaattctccatctaagccaagttcctctggaattcaacaacatgccttgaggct

SEQ ID NO: 20805 - DNA, 600 bp, Chicken  19866894231703_1
atgccacctttttcatggaaaatcttagaatagttaaactgccaacatatacattgccataattcattgcttaccaatcgttatttttgatggtgctgttctgttgtcttgactatctcttgattgcgatctgttcatgttacaatttaaccttgcagcattctaattttaacaccacaacactacagaaaatacaaacatgctagactctggtttcagattatgtttattttcattgcccagcttgatcccagagggagaatgagaactcttccttttgtgaagggcagacacctagcrgatatctttcagtatttccagaaatagaggtgtcctaaatcgcaagttacttttgaaaagataagccattatagatgaaactaaacatgagtaaaaccctgacaaaattgacttcgttatcactgaagtcagtgcaagcctttctattggtttaaatagaactaggattaaactctgtgtttatacagaaaatgaagagctctcacttttttcatgcatacgcatgcacgccttctattccttattccagtacaagtgtattgtactgggaaagaggcacttaaagttcacaacctttat

SEQ ID NO: 20806 - DNA, 599 bp, Chicken  19866894231704_1
  misc_feature (1)..(166): n is any nucleotide
nnnnnnnnnnnnnnnnnnnnnnnnnnnnnnnnnnnnnnnnnnnnnnnnnnnnnnnnnnnnnnnnnnnnnnnnnnnnnnnnnnnnnnnnnnnnnnnnnnnnnnnnnnnnnnnnnnnnnnnnnnnnnnnnnnnnnnnnnnnnnnnnnnnnnnnnnnnnnnnnnnnnnntttgggatgcacacatgtgtaggagccttaagctgaacacacttctgctaacactgtaattttcagaaagattacagtggggaaagacgtcaaatatacccactctatttatagagctaaatgcaatttggccmgaaagcttgttccagcagcacagacagatgcctgaacacaaccaacccccccccgcagtgccaggcacagccttcccctgcctccctgaagcacagaacccagcaagcagcgtcctgctgcaacagcttcaccctgagtcgtgacacctacagccccccggcacagacaaaagacctcagacacgagatgaatgggaacagacacgagcagcaagataaaacgataccatccgctttaggaaacgagcaccattttctaacagaggactgctayggggcggagggggttttgaaagcag

SEQ ID NO: 20807 - DNA, 600 bp, Chicken  19866894231704_2
ttatagagctaaatgcaatttggccmgaaagcttgttccagcagcacagacagatgcctgaacacaaccaacccccccccgcagtgccaggcacagccttcccctgcctccctgaagcacagaacccagcaagcagcgtcctgctgcaacagcttcaccctgagtcgtgacacctacagccccccggcacagacaaaagacctcagacacgagatgaatgggaacagacacgagcagcaagataaaacgataccatccgctttaggaaacgagcaccattttctaacagaggactgctayggggcggagggggttttgaaagcagaagccctggtgcagagcagaggctgcgggagctcagcccacccactccgcgccgttccaaagttaaacttcaaagccaaaagcaatgtgaggctcacccacttgccaggcacacgagaagcgctctttgcagcgctcgcagtgtttatactgcaagcaaacaagtaaagttcacgtgcaattaaagtctggcatctgggaatttccttcggatctgaagcactcgaagattcacctcctgctttagaccaactttgaaaacctccctatcagatc

SEQ ID NO: 20808 - DNA, 600 bp, Chicken  19866894231704_3
aaaagcaatgtgaggctcacccacttgccaggcacacgagaagcgctctttgcagcgctcgcagtgtttatactgcaagcaaacaagtaaagttcacgtgcaattaaagtctggcatctgggaatttccttcggatctgaagcactcgaagattcacctcctgctttagaccaactttgaaaacctccctatcagatcacaccaacacaaagctctgctgcgcttctttctcccctccttttcatttctgaggggggtggcataagaggttggaaagttgtaccctcactttaaaagagrctctgaatcraaatgactttaacttctgccaaataggagacaaaaataaaatccacctaagctgacaccatctgttcctttcrctttttttccacaagcattgggaggcagtgccggcttgtagttaacgagatggagacctaaattgcttcctgtaacctcagaaatcactctgatctctcagttaatcttggctaaaaaaatatagaaattatgagtagtggaaacaagcccttacttcagcagcgcttccagagatcacagcaaacccctgtgcttctcctggcagtggcagcacag

SEQ ID NO: 20809 - DNA, 600 bp, Chicken  19866894231704_4
tgaggctcacccacttgccaggcacacgagaagcgctctttgcagcgctcgcagtgtttatactgcaagcaaacaagtaaagttcacgtgcaattaaagtctggcatctgggaatttccttcggatctgaagcactcgaagattcacctcctgctttagaccaactttgaaaacctccctatcagatcacaccaacacaaagctctgctgcgcttctttctcccctccttttcatttctgaggggggtggcataagaggttggaaagttgtaccctcactttaaaagagrctctgaatcraaatgactttaacttctgccaaataggagacaaaaataaaatccacctaagctgacaccatctgttcctttcrctttttttccacaagcattgggaggcagtgccggcttgtagttaacgagatggagacctaaattgcttcctgtaacctcagaaatcactctgatctctcagttaatcttggctaaaaaaatatagaaattatgagtagtggaaacaagcccttacttcagcagcgcttccagagatcacagcaaacccctgtgcttctcctggcagtggcagcacaggttggtgcat

SEQ ID NO: 20810 - DNA, 600 bp, Chicken  19866894231704_5
caagtaaagttcacgtgcaattaaagtctggcatctgggaatttccttcggatctgaagcactcgaagattcacctcctgctttagaccaactttgaaaacctccctatcagatcacaccaacacaaagctctgctgcgcttctttctcccctccttttcatttctgaggggggtggcataagaggttggaaagttgtaccctcactttaaaagagrctctgaatcraaatgactttaacttctgccaaataggagacaaaaataaaatccacctaagctgacaccatctgttcctttcrctttttttccacaagcattgggaggcagtgccggcttgtagttaacgagatggagacctaaattgcttcctgtaacctcagaaatcactctgatctctcagttaatcttggctaaaaaaatatagaaattatgagtagtggaaacaagcccttacttcagcagcgcttccagagatcacagcaaacccctgtgcttctcctggcagtggcagcacaggttggtgcatcctcagcaatgctgcagtgccagcacccacagtccgggctatgggggcagtatggggcagagggatggctgca

SEQ ID NO: 20811 - DNA, 599 bp, Chicken  19866894231707_1
  misc_feature (1)..(186): n is any nucleotide
nnnnnnnnnnnnnnnnnnnnnnnnnnnnnnnnnnnnnnnnnnnnnnnnnnnnnnnnnnnnnnnnnnnnnnnnnnnnnnnnnnnnnnnnnnnnnnnnnnnnnnnnnnnnnnnnnnnnnnnnnnnnnnnnnnnnnnnnnnnnnnnnnnnnnnnnnnnnnnnnnnnnnnnnnnnnnnnnnnnnnnnnnnaatatgaaaatgaattcttggcacttaaaaaactatattcactactttccaaactcaacagtactacagatctctgaacccacaaggagatctttgtgttctctgagctgcatyaatgggcttgatgagccacgattcgccaatccccctgctaaataatattcttcaaatgatatgtacaagcacaaaaatagttactcagtatcagcagtggcctcaaaygttttactatttctctttgtttcccccagagcttttttccacagctcaaattacatatggaagtgatgacctcacgctacattaaagaagactggaagccttcaagagctgttgttaaaaagaaaycactgcagatttgctgtctgcagactgcatggcaaagagcatctgccttaacaccatagcttgga

SEQ ID NO: 20812 - DNA, 599 bp, Chicken  19866894231707_2
  misc_feature (1)..(78): n is any nucleotide
nnnnnnnnnnnnnnnnnnnnnnnnnnnnnnnnnnnnnnnnnnnnnnnnnnnnnnnnnnnnnnnnnnnnnnnnnnnnnnaatatgaaaatgaattcttggcacttaaaaaactatattcactactttccaaactcaacagtactacagatctctgaacccacaaggagatctttgtgttctctgagctgcatyaatgggcttgatgagccacgattcgccaatccccctgctaaataatattcttcaaatgatatgtacaagcacaaaaatagttactcagtatcagcagtggcctcaaaygttttactatttctctttgtttcccccagagcttttttccacagctcaaattacatatggaagtgatgacctcacgctacattaaagaagactggaagccttcaagagctgttgttaaaaagaaaycactgcagatttgctgtctgcagactgcatggcaaagagcatctgccttaacaccatagcttggattcagctgcaaatttccttaaatatatgtgccaaagtttaatgtaaagaccaaccaaccaamcaaacaaacaaaaaccctaaaacaacccagcaactaagaatataca

SEQ ID NO: 20813 - DNA, 600 bp, Chicken  19866894231707_3
ccaaactcaacagtactacagatctctgaacccacaaggagatctttgtgttctctgagctgcatyaatgggcttgatgagccacgattcgccaatccccctgctaaataatattcttcaaatgatatgtacaagcacaaaaatagttactcagtatcagcagtggcctcaaaygttttactatttctctttgtttcccccagagcttttttccacagctcaaattacatatggaagtgatgacctcacgctacattaaagaagactggaagccttcaagagctgttgttaaaaagaaaycactgcagatttgctgtctgcagactgcatggcaaagagcatctgccttaacaccatagcttggattcagctgcaaatttccttaaatatatgtgccaaagtttaatgtaaagaccaaccaaccaamcaaacaaacaaaaaccctaaaacaacccagcaactaagaatatacaggggtatgctaagcatgagggccttagctatggctgttcatccccaccatgcacagcctcctgggcaatgtgttggaacagccacagtcttccaagcaaacaatgctgtctgtgagacaaactatcc

SEQ ID NO: 20814 - DNA, 600 bp, Chicken  19866894231707_4
tgtacaagcacaaaaatagttactcagtatcagcagtggcctcaaaygttttactatttctctttgtttcccccagagcttttttccacagctcaaattacatatggaagtgatgacctcacgctacattaaagaagactggaagccttcaagagctgttgttaaaaagaaaycactgcagatttgctgtctgcagactgcatggcaaagagcatctgccttaacaccatagcttggattcagctgcaaatttccttaaatatatgtgccaaagtttaatgtaaagaccaaccaaccaamcaaacaaacaaaaaccctaaaacaacccagcaactaagaatatacaggggtatgctaagcatgagggccttagctatggctgttcatccccaccatgcacagcctcctgggcaatgtgttggaacagccacagtcttccaagcaaacaatgctgtctgtgagacaaactatcctgcaggcaacacttggtgaaggtaagaatctgaaagaaactgcaaataaaccatacacatgcaccatgctccttagggaagcttcctcaaggcattaccagtaagcagctccaactatgctggggag

SEQ ID NO: 20815 - DNA, 600 bp, Chicken  19866894231709_1
gtgacttaaaatctgtatattttgataaatgctaacatgaatggatcaaggagaggagggagcagggcagaggagtgcagtaatatggctgtgtctgtgacagcagcagacaactcacactggtggccatgtcaggaggctgtaagagaggcagcactgcagcactttggcctaggccttcaacgagtgcagtacgcacctgctagcggctatggctcaggtggtcttcatcactctggtgttgatgggaatcatccctttgggaattcacctcatgcatggtgatatgtatgagcgtgygcggctgtgtgcagaacagctgagtctggacatggctcagccactgtacagcatggagcaggggagccaygggcagagcgaggcagccaagagagccctgctcgttgctgctctacagtactggcagctctgggcctttgctggagtccttttcctgctctttggcctctgttggtgaaacaagaaaaggggatgtaggccagagaggagcagcaagatttgggcctgtgctgcaatccttgatgtcttctttggactctgcttctgcctcaggaacatggactgtaatctggtctgcag

SEQ ID NO: 20816 - DNA, 600 bp, Chicken  19866894231709_2
aggagtgcagtaatatggctgtgtctgtgacagcagcagacaactcacactggtggccatgtcaggaggctgtaagagaggcagcactgcagcactttggcctaggccttcaacgagtgcagtacgcacctgctagcggctatggctcaggtggtcttcatcactctggtgttgatgggaatcatccctttgggaattcacctcatgcatggtgatatgtatgagcgtgygcggctgtgtgcagaacagctgagtctggacatggctcagccactgtacagcatggagcaggggagccaygggcagagcgaggcagccaagagagccctgctcgttgctgctctacagtactggcagctctgggcctttgctggagtccttttcctgctctttggcctctgttggtgaaacaagaaaaggggatgtaggccagagaggagcagcaagatttgggcctgtgctgcaatccttgatgtcttctttggactctgcttctgcctcaggaacatggactgtaatctggtctgcagcagcagcaaccaggaaagctccagaagcaaggaggaggaggaagaggatgagaaggtcaaagaaggcagt

SEQ ID NO: 20817 - DNA, 600 bp, Chicken  19866894231710_1
aattggacatgaatggttttcacatagtttaaattgtcttggcaatttgtccattttgtgtaaacttcaagaagctattttaatacagatgtggttatacctaggaatccaactatttaaagtctaggaaaaaaaagcagcagtatctaaaaccttgtcagatactagctttagtgcctgagttgcctcaaaaaatgttacagaaatacaccatttttcagtgtctttaaattctggtttcagatgaaattgtaggtggtggtgtgtattataaccagtgtagtcactgttgaaagttaygtttgttcttttgtaggatggatatttaagatttgtattgtaacacactgtacagatgatgaaaaaaaaatgtcatgtatttctcatttaagtgatttgtgtgggctcttttgacaaacaaagagagatgtgggcactggacagccttttcgttggcaagttcatcacacagctgcctaagcatgacttggttacacgtttatgtgcaagattcagtgcacctcaagaaatagatgctgattcccaggcaatgttgcaattaagccaaaatggccagaagtggcatttccttacctgtgt

SEQ ID NO: 20818 - DNA, 600 bp, Chicken  19866894231710_2
ttttttcatatttgtgtaatcttttttctgtgtctaaactgaaggccaagtttttgagaaagtatttaagaatactgagtgaagtcttgtgaagaaagtggaatttgacactcaagtcagtatcctcattccaatttcctgtgtaaggaaagtaagttctgtgaattacagtcattattttgaagaagctgtaattgaaagtcactgccagattctgtcagttcagggacccagagcattctgaaatgaggtcagtctgtttctgatggtcaagagaattaccaggttaagaaagcgaaytcgctttcctcttctggtcccccatctttgccatatggtagcattcagactgtatcagcattcctaagaaagctctgttgagacagactgaattacttctttgtccagagaacaaggcaccaacaccaactgaaaaatacctgaaatatctttgttgtgggactgcgtgtgacagttttgatgcagacatcttgtttgaatttgggagtgctgggaacgtgttgcctctatgctgtttttctcatccacagacctgagctaacgacgggcacaagaactgaatttgtttgtttctcattt

SEQ ID NO: 20819 - DNA, 600 bp, Chicken  19866894231714_1
tctgagcaacaggttggcgaacagaacaaagactcaaacatgtgtaagagatcgggcgccagcaggccagctgaaggcagcaaactcaccgccctctttcctcaaaaccagaaatgctgagctagtttcccctccgctaccaacagcacagtctgacactgcatccagacatccatcccactcccccctacatttttaacatcacctctgagatacacgctcaagccttacatctcctttccccagataatcccatttattgcttgtttcaatccagccatggcctgtgcacatctggcrtgctactgctcacctcagtcttccctgcaacaaaacagtattgcttcttggagtcctaataaagtgcctgacccagaagctaggctatcacacagactactttgccttgccacccatcactgtgagccagccagcaggaaatacccttagctgccaatacctttcattcgtgcaaatggttgaactctttactttaaagccagaggccttaataagggctggctggaaattcattcctggcatttaatggctgattacagtgattcataatagctttttgaaacacaggacaaattgctt

SEQ ID NO: 20820 - DNA, 600 bp, Chicken  19866894231714_2
gactactttgccttgccacccatcactgtgagccagccagcaggaaatacccttagctgccaatacctttcattcgtgcaaatggttgaactctttactttaaagccagaggccttaataagggctggctggaaattcattcctggcatttaatggctgattacagtgattcataatagctttttgaaacacaggacaaattgcttcaaaaatagaagatacatgttcaataatttttgaaatcactttccctcttaagccaacattttggaaacatcttcacagccaaccaattggcaytaacatttcagaagcatatatttatctgtctaactaagcatcttattgattttgacattaaatrcttgattcccactggctgtacaattcctctgttttgggagatcccttgcatgcatttcttcatttcactctgaagtctactcctttcactctcttccccatccttaccaggactagctttaataagcttcttctaaagtatctgcttcaggggctgatagcatgatattactgaaggttgaggtccctaagctgtctaaataactaggatcattaagggggaaatgatcatctcct

SEQ ID NO: 20821 - DNA, 540 bp, Chicken  19866894231714_3
acctttcattcgtgcaaatggttgaactctttactttaaagccagaggccttaataagggctggctggaaattcattcctggcatttaatggctgattacagtgattcataatagctttttgaaacacaggacaaattgcttcaaaaatagaagatacatgttcaataatttttgaaatcactttccctcttaagccaacattttggaaacatcttcacagccaaccaattggcaytaacatttcagaagcatatatttatctgtctaactaagcatcttattgattttgacattaaatrcttgattcccactggctgtacaattcctctgttttgggagatcccttgcatgcatttcttcatttcactctgaagtctactcctttcactctcttccccatccttaccaggactagctttaataagcttcttctaaagtatctgcttcaggggctgatagcatgatattactgaaggttgaggtccctaagctgtctaaataactaggatcattaagggggaaatgatcatctcctatga

SEQ ID NO: 20822 - DNA, 600 bp, Chicken  19866894231727_1
cagggctttgttcagcaaacattcacagatgacagtgtatgctggcataaccacacatgaccccagtaaagacagatgtataatctgttaaaatacatctgggatgtgatttcttaccactctggcctttttcgtatcttacccttgggacataagcaaggagagaaaagacagatcctgtgggctaatgaggtgcaaacctgtcatttaaatacttaaatcagcaggcttgaggccttcatcattgctctctaggtacaagattaagtgaaacagagataggcatcactgatatcttgrgcagaacatcaggctggagggatgacctggggatttactcttactgccagcactgcagtcgcaacatgaagtcccagtactgggctagtgctgtactgtattggaagagcctcattaaatgctgttttgagcttcgacattctttctgttgcaggtccttttgggaggattttgttcagttctcaatcatattgacagggtcaaagtgctttccatactctataaatttcagtatgcacatggatgacttcctctgcttttcatattttaattgctttgtcaaaaagagtaactcagggt

SEQ ID NO: 20823 - DNA, 599 bp, Chicken  19866894231734_1
  misc_feature (1)..(264): n is any nucleotide
nnnnnnnnnnnnnnnnnnnnnnnnnnnnnnnnnnnnnnnnnnnnnnnnnnnnnnnnnnnnnnnnnnnnnnnnnnnnnnnnnnnnnnnnnnnnnnnnnnnnnnnnnnnnnnnnnnnnnnnnnnnnnnnnnnnnnnnnnnnnnnnnnnnnnnnnnnnnnnnnnnnnnnnnnnnnnnnnnnnnnnnnnnnnnnnnnnnnnnnnnnnnnnnnnnnnnnnnnnnnnnnnnnnnnnnnnnnnnnnnnnnnnnnnnnnnnnnnnnnnnnnncggcagctgtgcagaggcccttctgctcccagcccwccwgagaggctggggaaaagcacggcagcaatacgcaaacttcctgatcagccactgaccaacatgaaagaaacacaaaaatgtgattttgcacccataatatttgccataagggctacatgctttatattgaatctgctcaggtttttaaaactcacatttctttggtgagagacaaagcaggcaytagacatctcagcattcttcatgaatgtctgctttagaccaggttaactaaaatctgtcaatcatatccttacacttcagtactgatgtctgtgtccagttccatgttacat

SEQ ID NO: 20824 - DNA, 599 bp, Chicken  19866894231734_2
  misc_feature (1)..(261): n is any nucleotide
nnnnnnnnnnnnnnnnnnnnnnnnnnnnnnnnnnnnnnnnnnnnnnnnnnnnnnnnnnnnnnnnnnnnnnnnnnnnnnnnnnnnnnnnnnnnnnnnnnnnnnnnnnnnnnnnnnnnnnnnnnnnnnnnnnnnnnnnnnnnnnnnnnnnnnnnnnnnnnnnnnnnnnnnnnnnnnnnnnnnnnnnnnnnnnnnnnnnnnnnnnnnnnnnnnnnnnnnnnnnnnnnnnnnnnnnnnnnnnnnnnnnnnnnnnnnnnnnnnnnncggcagctgtgcagaggcccttctgctcccagcccwccwgagaggctggggaaaagcacggcagcaatacgcaaacttcctgatcagccactgaccaacatgaaagaaacacaaaaatgtgattttgcacccataatatttgccataagggctacatgctttatattgaatctgctcaggtttttaaaactcacatttctttggtgagagacaaagcaggcaytagacatctcagcattcttcatgaatgtctgctttagaccaggttaactaaaatctgtcaatcatatccttacacttcagtactgatgtctgtgtccagttccatgttacatgtt

SEQ ID NO: 20825 - DNA, 599 bp, Chicken  19866894231734_3
  misc_feature (1)..(77): n is any nucleotide
nnnnnnnnnnnnnnnnnnnnnnnnnnnnnnnnnnnnnnnnnnnnnnnnnnnnnnnnnnnnnnnnnnnnnnnnnnnnncggcagctgtgcagaggcccttctgctcccagcccwccwgagaggctggggaaaagcacggcagcaatacgcaaacttcctgatcagccactgaccaacatgaaagaaacacaaaaatgtgattttgcacccataatatttgccataagggctacatgctttatattgaatctgctcaggtttttaaaactcacatttctttggtgagagacaaagcaggcaytagacatctcagcattcttcatgaatgtctgctttagaccaggttaactaaaatctgtcaatcatatccttacacttcagtactgatgtctgtgtccagttccatgttacatgttttctaaatgccaccatagaagtcctgatttttgagcaatgtagccttcccagaaacaatcttgaggagccctgggtctgtacaacagaggttagtttgtctttcaaaaacagcagcctctgctgcagtacaggaagatatttttctgctgtgagttccagatacttgagtccaaagtaaagtta

SEQ ID NO: 20826 - DNA, 600 bp, Chicken  19866894231734_4
tccttacacttcagtactgatgtctgtgtccagttccatgttacatgttttctaaatgccaccatagaagtcctgatttttgagcaatgtagccttcccagaaacaatcttgaggagccctgggtctgtacaacagaggttagtttgtctttcaaaaacagcagcctctgctgcagtacaggaagatatttttctgctgtgagttccagatacttgagtccaaagtaaagttatagctaacatttcagttcaacgtgtagtttaaacatgagtgtgattccagtcagatagatgcttgamacatgaccaaagtaagtttgtcycatgaatatgagtgatgctacgggtatggaaataactcacaaatcagccacgcagcattctgacctggttaaaattctgaacactgtggagtgaaggaaatcatttatatgtgaaaacatgatcggtcataagatcaaccctcgtgctaaacaatagaaattaaggatataatgaaagaaatgatgtgttggcttacgttgcctatttttctctctgcttacaggtgtgtctatgatattctgtgtacctacagtattttcccaacggtttgaacta

SEQ ID NO: 20827 - DNA, 600 bp, Chicken  19866894231734_5
ctgtgtccagttccatgttacatgttttctaaatgccaccatagaagtcctgatttttgagcaatgtagccttcccagaaacaatcttgaggagccctgggtctgtacaacagaggttagtttgtctttcaaaaacagcagcctctgctgcagtacaggaagatatttttctgctgtgagttccagatacttgagtccaaagtaaagttatagctaacatttcagttcaacgtgtagtttaaacatgagtgtgattccagtcagatagatgcttgamacatgaccaaagtaagtttgtcycatgaatatgagtgatgctacgggtatggaaataactcacaaatcagccacgcagcattctgacctggttaaaattctgaacactgtggagtgaaggaaatcatttatatgtgaaaacatgatcggtcataagatcaaccctcgtgctaaacaatagaaattaaggatataatgaaagaaatgatgtgttggcttacgttgcctatttttctctctgcttacaggtgtgtctatgatattctgtgtacctacagtattttcccaacggtttgaactaggcatgacataggtttattgaca

SEQ ID NO: 20828 - DNA, 600 bp, Chicken  19866894231735_1
tgagccccaggaaggagtcccgtcaagcccagagcagacactataatactggctaattactagatgcatgttaactatgtcataattaggtcagcggtgtttttaagcaatactatagagagacgtactctggagaatcacctggttccaagcactgcagtctgctctgtttattctgtgcagttcccaacagcttgaaagtcagtttaatcaatgcaaatctttctcttcacacagtttgtaattaagtgaagaacagacgaggccgttcccaagcgatacacgaggagctgggaaaayctcrgctctgcayttctgtccagagtttgcatccttgagctccatgggctccttcatggcacayggagcacctgtgctccctcacagcagtcagcatggaacacaaggagcatctttcagctcttccctaagtgtttatacactgtgagaatacaagtgcctggctcttggatgacttcttggccacattttgaagagatgcaagttgagcccactgagagccgcttccaaactctttgcttctccaagtgagagcctgggattgctgcaagcaggcatcgataaatcctggtcaattgg

SEQ ID NO: 20829 - DNA, 600 bp, Chicken  19866894231735_2
ccccaggaaggagtcccgtcaagcccagagcagacactataatactggctaattactagatgcatgttaactatgtcataattaggtcagcggtgtttttaagcaatactatagagagacgtactctggagaatcacctggttccaagcactgcagtctgctctgtttattctgtgcagttcccaacagcttgaaagtcagtttaatcaatgcaaatctttctcttcacacagtttgtaattaagtgaagaacagacgaggccgttcccaagcgatacacgaggagctgggaaaayctcrgctctgcayttctgtccagagtttgcatccttgagctccatgggctccttcatggcacayggagcacctgtgctccctcacagcagtcagcatggaacacaaggagcatctttcagctcttccctaagtgtttatacactgtgagaatacaagtgcctggctcttggatgacttcttggccacattttgaagagatgcaagttgagcccactgagagccgcttccaaactctttgcttctccaagtgagagcctgggattgctgcaagcaggcatcgataaatcctggtcaattggcaga

SEQ ID NO: 20830 - DNA, 600 bp, Chicken  19866894231735_3
ggagtcccgtcaagcccagagcagacactataatactggctaattactagatgcatgttaactatgtcataattaggtcagcggtgtttttaagcaatactatagagagacgtactctggagaatcacctggttccaagcactgcagtctgctctgtttattctgtgcagttcccaacagcttgaaagtcagtttaatcaatgcaaatctttctcttcacacagtttgtaattaagtgaagaacagacgaggccgttcccaagcgatacacgaggagctgggaaaayctcrgctctgcayttctgtccagagtttgcatccttgagctccatgggctccttcatggcacayggagcacctgtgctccctcacagcagtcagcatggaacacaaggagcatctttcagctcttccctaagtgtttatacactgtgagaatacaagtgcctggctcttggatgacttcttggccacattttgaagagatgcaagttgagcccactgagagccgcttccaaactctttgcttctccaagtgagagcctgggattgctgcaagcaggcatcgataaatcctggtcaattggcagaggtgtcctg

SEQ ID NO: 20831 - DNA, 600 bp, Chicken  19866894231735_4
tgcatgttaactatgtcataattaggtcagcggtgtttttaagcaatactatagagagacgtactctggagaatcacctggttccaagcactgcagtctgctctgtttattctgtgcagttcccaacagcttgaaagtcagtttaatcaatgcaaatctttctcttcacacagtttgtaattaagtgaagaacagacgaggccgttcccaagcgatacacgaggagctgggaaaayctcrgctctgcayttctgtccagagtttgcatccttgagctccatgggctccttcatggcacayggagcacctgtgctccctcacagcagtcagcatggaacacaaggagcatctttcagctcttccctaagtgtttatacactgtgagaatacaagtgcctggctcttggatgacttcttggccacattttgaagagatgcaagttgagcccactgagagccgcttccaaactctttgcttctccaagtgagagcctgggattgctgcaagcaggcatcgataaatcctggtcaattggcagaggtgtcctgtttgatctctgaaaacaaatctagtctatttagggaaacaggacccagctc

SEQ ID NO: 20832 - DNA, 600 bp, Chicken  19866894231735_5
cctcacagcagtcagcatggaacacaaggagcatctttcagctcttccctaagtgtttatacactgtgagaatacaagtgcctggctcttggatgacttcttggccacattttgaagagatgcaagttgagcccactgagagccgcttccaaactctttgcttctccaagtgagagcctgggattgctgcaagcaggcatcgataaatcctggtcaattggcagaggtgtcctgtttgatctctgaaaacaaatctagtctatttagggaaacaggacccagctctccactactccactrttctttcactgctgggtgcagaataggcactaagtgttttcacgttgagttcctattgcttaattgcttcgtaccagcttcaatyatctcrgaagtcagtgctgcagagaaccaggcatgtccccatgccatatgcagcgtcaaagaacagactttaccatccatcatgaatgttaaggttaagctattttttttcttaaattcttttaagggtatttaaatagtaataatagatctttttttttttttttaataaacaagaacaagctgagatttttattttaatatctaagataaagc

SEQ ID NO: 20833 - DNA, 600 bp, Chicken  19866894231735_6
ctcttggatgacttcttggccacattttgaagagatgcaagttgagcccactgagagccgcttccaaactctttgcttctccaagtgagagcctgggattgctgcaagcaggcatcgataaatcctggtcaattggcagaggtgtcctgtttgatctctgaaaacaaatctagtctatttagggaaacaggacccagctctccactactccactrttctttcactgctgggtgcagaataggcactaagtgttttcacgttgagttcctattgcttaattgcttcgtaccagcttcaatyatctcrgaagtcagtgctgcagagaaccaggcatgtccccatgccatatgcagcgtcaaagaacagactttaccatccatcatgaatgttaaggttaagctattttttttcttaaattcttttaagggtatttaaatagtaataatagatctttttttttttttttaataaacaagaacaagctgagatttttattttaatatctaagataaagccaaaatgtcagctggagttgaagaaggtggaaaacggttctttctttctgtaaatatatttttatctagtaaaatactgaagctc

SEQ ID NO: 20834 - DNA, 600 bp, Chicken  19866894231735_7
gatgacttcttggccacattttgaagagatgcaagttgagcccactgagagccgcttccaaactctttgcttctccaagtgagagcctgggattgctgcaagcaggcatcgataaatcctggtcaattggcagaggtgtcctgtttgatctctgaaaacaaatctagtctatttagggaaacaggacccagctctccactactccactrttctttcactgctgggtgcagaataggcactaagtgttttcacgttgagttcctattgcttaattgcttcgtaccagcttcaatyatctcrgaagtcagtgctgcagagaaccaggcatgtccccatgccatatgcagcgtcaaagaacagactttaccatccatcatgaatgttaaggttaagctattttttttcttaaattcttttaagggtatttaaatagtaataatagatctttttttttttttttaataaacaagaacaagctgagatttttattttaatatctaagataaagccaaaatgtcagctggagttgaagaaggtggaaaacggttctttctttctgtaaatatatttttatctagtaaaatactgaagctctataaa

SEQ ID NO: 20835 - DNA, 599 bp, Chicken  19866894231739_1
  misc_feature (1)..(114): n is any nucleotide
nnnnnnnnnnnnnnnnnnnnnnnnnnnnnnnnnnnnnnnnnnnnnnnnnnnnnnnnnnnnnnnnnnnnnnnnnnnnnnnnnnnnnnnnnnnnnnnnnnnnnnnnnnnnnnnnnntgttgtgcaaacacagcagaaaactcaagcccctcccctccttcattcctgtagtagaaccctatcagttcctacagatcacagaatggtttgagttgaaagatatcttaaagaccatctaggttcaacacccctgccacgggtggggatatctccagacatctcccaccagagcaggttgctctragttccatccaacctggccttgaatgcttccagggtggggatctccacaacctacctgggcacactattccagtatctacatcctcacagtaaagattttcttccttatacctaatctaaatctcttttagtttaaaaccatgcctcttgtcctatcaccacacagcctggtaaagactctttctccatctttcctgtagaccatttttaagatttggaaggccacaataagatttttccrcagccttctcttttctaggctaaataatcccaactctctcagcctgttttcaagggtg

SEQ ID NO: 20836 - DNA, 600 bp, Chicken  19866894231739_2
acacccctgccacgggtggggatatctccagacatctcccaccagagcaggttgctctragttccatccaacctggccttgaatgcttccagggtggggatctccacaacctacctgggcacactattccagtatctacatcctcacagtaaagattttcttccttatacctaatctaaatctcttttagtttaaaaccatgcctcttgtcctatcaccacacagcctggtaaagactctttctccatctttcctgtagaccatttttaagatttggaaggccacaataagatttttccrcagccttctcttttctaggctaaataatcccaactctctcagcctgttttcaagggtgaagtgctccagtcctctgaccatttcagtggccctcctctggatccatcccaataggtctgtctctstcttatactggaatccctaaagccraatgcagtgctccaggtgaggtctcacaagagtggagcagaaggggagaatcacctccctaaacccacaggtcatgcttcttttgatacagcccaggataygactggctttctaggctgcaaaatttgaatttcatttcaagtgacacaa

SEQ ID NO: 20837 - DNA, 600 bp, Chicken  19866894231739_3
attccagtatctacatcctcacagtaaagattttcttccttatacctaatctaaatctcttttagtttaaaaccatgcctcttgtcctatcaccacacagcctggtaaagactctttctccatctttcctgtagaccatttttaagatttggaaggccacaataagatttttccrcagccttctcttttctaggctaaataatcccaactctctcagcctgttttcaagggtgaagtgctccagtcctctgaccatttcagtggccctcctctggatccatcccaataggtctgtctctstcttatactggaatccctaaagccraatgcagtgctccaggtgaggtctcacaagagtggagcagaaggggagaatcacctccctaaacccacaggtcatgcttcttttgatacagcccaggataygactggctttctaggctgcaaaatttgaatttcatttcaagtgacacaaggtgatgctaaaccaagtcctgtatctcagttcagtgaaagaggaaagagtrtctttcagcaccattagyttggttgggctaacatgcgcttgtcttagcaagaaattttcaggtcaaaaatccc

SEQ ID NO: 20838 - DNA, 600 bp, Chicken  19866894231739_4
aaagattttcttccttatacctaatctaaatctcttttagtttaaaaccatgcctcttgtcctatcaccacacagcctggtaaagactctttctccatctttcctgtagaccatttttaagatttggaaggccacaataagatttttccrcagccttctcttttctaggctaaataatcccaactctctcagcctgttttcaagggtgaagtgctccagtcctctgaccatttcagtggccctcctctggatccatcccaataggtctgtctctstcttatactggaatccctaaagccraatgcagtgctccaggtgaggtctcacaagagtggagcagaaggggagaatcacctccctaaacccacaggtcatgcttcttttgatacagcccaggataygactggctttctaggctgcaaaatttgaatttcatttcaagtgacacaaggtgatgctaaaccaagtcctgtatctcagttcagtgaaagaggaaagagtrtctttcagcaccattagyttggttgggctaacatgcgcttgtcttagcaagaaattttcaggtcaaaaatcccatggagtgttatactgcagaaaggc

SEQ ID NO: 20839 - DNA, 600 bp, Chicken  19866894231739_5
tcctgtagaccatttttaagatttggaaggccacaataagatttttccrcagccttctcttttctaggctaaataatcccaactctctcagcctgttttcaagggtgaagtgctccagtcctctgaccatttcagtggccctcctctggatccatcccaataggtctgtctctstcttatactggaatccctaaagccraatgcagtgctccaggtgaggtctcacaagagtggagcagaaggggagaatcacctccctaaacccacaggtcatgcttcttttgatacagcccaggataygactggctttctaggctgcaaaatttgaatttcatttcaagtgacacaaggtgatgctaaaccaagtcctgtatctcagttcagtgaaagaggaaagagtrtctttcagcaccattagyttggttgggctaacatgcgcttgtcttagcaagaaattttcaggtcaaaaatcccatggagtgttatactgcagaaaggcacctttccaacacgtgcgttcatagaaggacctatttattcataattattattaattaaagaacaagaaaggtttgaaagcttctgtaatctgtgcctagt

SEQ ID NO: 20840 - DNA, 600 bp, Chicken  19866894231739_6
agggtgaagtgctccagtcctctgaccatttcagtggccctcctctggatccatcccaataggtctgtctctstcttatactggaatccctaaagccraatgcagtgctccaggtgaggtctcacaagagtggagcagaaggggagaatcacctccctaaacccacaggtcatgcttcttttgatacagcccaggataygactggctttctaggctgcaaaatttgaatttcatttcaagtgacacaaggtgatgctaaaccaagtcctgtatctcagttcagtgaaagaggaaagagtrtctttcagcaccattagyttggttgggctaacatgcgcttgtcttagcaagaaattttcaggtcaaaaatcccatggagtgttatactgcagaaaggcacctttccaacacgtgcgttcatagaaggacctatttattcataattattattaattaaagaacaagaaaggtttgaaagcttctgtaatctgtgcctagtatctcatcataaatgcagagggcaacctatgtgatgcaacagaacaacgcattgcactgtctcagagcattcagctctgagtttattatctgtcctcttat

SEQ ID NO: 20841 - DNA, 582 bp, Chicken  19866894231739_7
cctctgaccatttcagtggccctcctctggatccatcccaataggtctgtctctstcttatactggaatccctaaagccraatgcagtgctccaggtgaggtctcacaagagtggagcagaaggggagaatcacctccctaaacccacaggtcatgcttcttttgatacagcccaggataygactggctttctaggctgcaaaatttgaatttcatttcaagtgacacaaggtgatgctaaaccaagtcctgtatctcagttcagtgaaagaggaaagagtrtctttcagcaccattagyttggttgggctaacatgcgcttgtcttagcaagaaattttcaggtcaaaaatcccatggagtgttatactgcagaaaggcacctttccaacacgtgcgttcatagaaggacctatttattcataattattattaattaaagaacaagaaaggtttgaaagcttctgtaatctgtgcctagtatctcatcataaatgcagagggcaacctatgtgatgcaacagaacaacgcattgcactgtctcagagcattcagctctgagtttattatctgtcctcttat

SEQ ID NO: 20842 - DNA, 599 bp, Chicken  19866894231740_1
  misc_feature (1)..(104): n is any nucleotide
nnnnnnnnnnnnnnnnnnnnnnnnnnnnnnnnnnnnnnnnnnnnnnnnnnnnnnnnnnnnnnnnnnnnnnnnnnnnnnnnnnnnnnnnnnnnnnnnnnnnnnnnaaaaagctcaacataacccaattcggtacaccgctatgaccaaccgactggagcaaatcatcttacaaacgacacgatgtgctctaatatctccagttgtgctctttggaagagtctggcacaagagattgtaatttgtattgaaatatctgcatacaatgaattaaagtcagttctacgtgacttattttttttwaaatacaatctcacacatcgctttaacctgttgacaaagtcttctctactttctgtacttgtgtcaacagtactaggaacgactggaatttttgaaatatttcagaagaatagtgtggtgacagataaccgcattatcaatttcagtgagagattagaagatgattgcaaatgagacaaaatattttcatttcagcaataatactcaaattttttccagacaccatagcgaatkcatcacttctccagatcacataaaaagtaaatggagctaycacagttccartaccgggccaawac

SEQ ID NO: 20843 - DNA, 596 bp, Chicken  19866894231740_2
gtaatttgtattgaaatatctgcatacaatgaattaaagtcagttctacgtgacttattttttttwaaatacaatctcacacatcgctttaacctgttgacaaagtcttctctactttctgtacttgtgtcaacagtactaggaacgactggaatttttgaaatatttcagaagaatagtgtggtgacagataaccgcattatcaatttcagtgagagattagaagatgattgcaaatgagacaaaatattttcatttcagcaataatactcaaattttttccagacaccatagcgaatkcatcacttctccagatcacataaaaagtaaatggagctaycacagttccartaccgggccaawaccacagccaatgcacatagctccaccagtattaacaaagagatgtctgctcacgccagctatgtgtttggctgaccgaatgggacgcttcagtttagatttggactgtgtcaccgagtcccgcaggctcgctatgccaccagtgcaaccactctgctgggaggacaggatctggccatactgctctaccactagtccacttggtctggcagattgcacctgacagcacccaa

SEQ ID NO: 20844 - DNA, 556 bp, Chicken  19866894231740_3
cagttctacgtgacttattttttttwaaatacaatctcacacatcgctttaacctgttgacaaagtcttctctactttctgtacttgtgtcaacagtactaggaacgactggaatttttgaaatatttcagaagaatagtgtggtgacagataaccgcattatcaatttcagtgagagattagaagatgattgcaaatgagacaaaatattttcatttcagcaataatactcaaattttttccagacaccatagcgaatkcatcacttctccagatcacataaaaagtaaatggagctaycacagttccartaccgggccaawaccacagccaatgcacatagctccaccagtattaacaaagagatgtctgctcacgccagctatgtgtttggctgaccgaatgggacgcttcagtttagatttggactgtgtcaccgagtcccgcaggctcgctatgccaccagtgcaaccactctgctgggaggacaggatctggccatactgctctaccactagtccacttggtctggcagattgcacctgacagcacccaa

SEQ ID NO: 20845 - DNA, 545 bp, Chicken  19866894231740_4
gacttattttttttwaaatacaatctcacacatcgctttaacctgttgacaaagtcttctctactttctgtacttgtgtcaacagtactaggaacgactggaatttttgaaatatttcagaagaatagtgtggtgacagataaccgcattatcaatttcagtgagagattagaagatgattgcaaatgagacaaaatattttcatttcagcaataatactcaaattttttccagacaccatagcgaatkcatcacttctccagatcacataaaaagtaaatggagctaycacagttccartaccgggccaawaccacagccaatgcacatagctccaccagtattaacaaagagatgtctgctcacgccagctatgtgtttggctgaccgaatgggacgcttcagtttagatttggactgtgtcaccgagtcccgcaggctcgctatgccaccagtgcaaccactctgctgggaggacaggatctggccatactgctctaccactagtccacttggtctggcagattgcacctgacagcacccaa

SEQ ID NO: 20846 - DNA, 533 bp, Chicken  19866894231740_5
ttwaaatacaatctcacacatcgctttaacctgttgacaaagtcttctctactttctgtacttgtgtcaacagtactaggaacgactggaatttttgaaatatttcagaagaatagtgtggtgacagataaccgcattatcaatttcagtgagagattagaagatgattgcaaatgagacaaaatattttcatttcagcaataatactcaaattttttccagacaccatagcgaatkcatcacttctccagatcacataaaaagtaaatggagctaycacagttccartaccgggccaawaccacagccaatgcacatagctccaccagtattaacaaagagatgtctgctcacgccagctatgtgtttggctgaccgaatgggacgcttcagtttagatttggactgtgtcaccgagtcccgcaggctcgctatgccaccagtgcaaccactctgctgggaggacaggatctggccatactgctctaccactagtccacttggtctggcagattgcacctgacagcacccaa

SEQ ID NO: 20847 - DNA, 600 bp, Chicken  19866894231747_1
agagaacttaattctataagagatgcgtctcagtctcaaagaacaagtgagaccttaacttgcaaaccaaaatgaggtaaagaaagatcctatgtactaaagaagaacctaaaaatcattttaaaaatgcatgaagttttggacttatagaggcaggcagcttgcacaatcctacttgcaagtcttgctggactaacactcctcaactggcacacaacatttgagatgccaaaacccctgggttacatcagtctttgccgtgtgctttgtgtaagagaaaaacgctggagcaccactctytcaagagtaatgcaatgctgcaaggatttcccctctggggcatggcacggacttggtggaggtggctgctccaagagccagcaacagctacccctagggtggccacaagaggctgtgcaagagccatgcagagcccttccagtaaaggctgagctctgatcccagcacttcattatcctgaaatgccaagaaagtaaaaaaaaccaacgcattgtttccatagtgccacattcacttatttgtgagacctcagcagggattgtgtgcattcagtgcctttcagaagctttcatggccagg

SEQ ID NO: 20848 - DNA, 599 bp, Chicken  19866894231757_1
  misc_feature (1)..(102): n is any nucleotide
nnnnnnnnnnnnnnnnnnnnnnnnnnnnnnnnnnnnnnnnnnnnnnnnnnnnnnnnnnnnnnnnnnnnnnnnnnnnnnnnnnnnnnnnnnnnnnnnnnnnnnttctctttcttgtgcctactcagacttccctttgtttcctttgtagttttgagttgtgctctggaacaggatgtacagctggatctagaacagttgccaaagaggtgtccatgggcaaacggtgctggatttcccaggtggagatcatgaagttccttgcctccttgcaaagtgttctcatattattcttatacagckttgtatgttactgctgtactaagmtttttactacaaatccattatctgtttcccaaaggtaatggtgatgctgagaagcatgcctcatgatgacttacacatccctcatgcttcatattaattcttcctttgggtcaaaagtagactgaaattcttgaaaccttgcctgggaatcctgctgttgctaaaatggttcagccgtggtgcctgtggtcagaataccttgtggcagacyctggcactggctgtgaatgaaagaactgacgacaaattgctcaatatcgaaagcgagccagtac

SEQ ID NO: 20849 - DNA, 599 bp, Chicken  19866894231757_2
  misc_feature (1)..(78): n is any nucleotide
nnnnnnnnnnnnnnnnnnnnnnnnnnnnnnnnnnnnnnnnnnnnnnnnnnnnnnnnnnnnnnnnnnnnnnnnnnnnnnttctctttcttgtgcctactcagacttccctttgtttcctttgtagttttgagttgtgctctggaacaggatgtacagctggatctagaacagttgccaaagaggtgtccatgggcaaacggtgctggatttcccaggtggagatcatgaagttccttgcctccttgcaaagtgttctcatattattcttatacagckttgtatgttactgctgtactaagmtttttactacaaatccattatctgtttcccaaaggtaatggtgatgctgagaagcatgcctcatgatgacttacacatccctcatgcttcatattaattcttcctttgggtcaaaagtagactgaaattcttgaaaccttgcctgggaatcctgctgttgctaaaatggttcagccgtggtgcctgtggtcagaataccttgtggcagacyctggcactggctgtgaatgaaagaactgacgacaaattgctcaatatcgaaagcgagccagtacatacttacaagccttgggtgagcc

SEQ ID NO: 20850 - DNA, 600 bp, Chicken  19866894231757_3
ccaggtggagatcatgaagttccttgcctccttgcaaagtgttctcatattattcttatacagckttgtatgttactgctgtactaagmtttttactacaaatccattatctgtttcccaaaggtaatggtgatgctgagaagcatgcctcatgatgacttacacatccctcatgcttcatattaattcttcctttgggtcaaaagtagactgaaattcttgaaaccttgcctgggaatcctgctgttgctaaaatggttcagccgtggtgcctgtggtcagaataccttgtggcagacyctggcactggctgtgaatgaaagaactgacgacaaattgctcaatatcgaaagcgagccagtacatacttacaagccttgggtgagccagatggaatctaagagggggaggccgggtaggaaagctgttactatgatgtttcttagaagacttgcacggctgttttgcattgctctgttaattgttccaaggcacccttggcttcactgtgtgcaattcataccatgttttttcatcacctcagatgctggctgaaacatgtatatacatgtgtatatataaatgtatacacatacacat

SEQ ID NO: 20851 - DNA, 600 bp, Chicken  19866894231763_1
tgttttgggactgctgggtgtgcggtgcggcatatcaccaggcagggagcccctctctgccagccccagggctaaccctcaccactgcactgcaggaacatggcactgcctcactcacaccagtttcttggtggcttacctttggcattacgtaagccccttgaaactactaggcaaccagatcatccataaaaatattttctcttttaatttttttttaatgaacaaactaagtatctgacagcaaagaataattttgaatcaatcagtacgttatatttttcagaaagaagggagcaygtttcattttaccgcatcaaaattcatgagacaacagcaaaaacgtctatttactcaatatgctatactacaaaacacaatttgaggagtagaataccatcagaaaatatgtgccttgcactttgataataaacatctttattataacttcatttgtagcacaaacctcaatatgttaactagcagcacaaatgtgtcactgttgcagcaattttatcatatagcaatcgccttacactcttatgaaaaatgcacagtaaccgctcctgtccatctcaccccgttaagtgccacattagt

SEQ ID NO: 20852 - DNA, 600 bp, Chicken  19866894231766_1
cataactttaccagtgcaaaaacacatggaaacttgaacggggagaaatgtcagttccaatgagaagctttcccctttctcttatgatggtcagtcccaaatatcctacactgaaaagctaagtacgaacataccacaggaaaacaaagctgtgtgtattacgcatacactgtttattcccacatacaatcagaagtgtttcataaaagtgtctgtattcattatcttgaagtgtatattgattttacatattattacaacagctgtagaaagctactgaaaaaccgtaatgaaagctaytggaaaacaccattgtcaagcaaactagatgagtcccaaagtaaattgatgttgctaccaatggagctcttaatctgtttttttaatcttttatacatacaaatatttacagagcaaatcagttttcctgcctttcccttactgtaatgaagatatatgttataataaaagatccatctttctctatgatagctatgacatgttcttaagtagaatactcataaatcttgaacaaaatttgaaatagatggatataatgaaatattatgactctcccaaactcattaattcaaattcact

SEQ ID NO: 20853 - DNA, 600 bp, Chicken  19866894231766_2
tttcctgcctttcccttactgtaatgaagatatatgttataataaaagatccatctttctctatgatagctatgacatgttcttaagtagaatactcataaatcttgaacaaaatttgaaatagatggatataatgaaatattatgactctcccaaactcattaattcaaattcactcaactgtttttgctttaattccctttactgaaacttacacttttggcttccaaaagcctttacagtaaatttcaccactagttaagtgcctcaacagctatcttttgttttccataactctcrtataacacataaaaattcaatgtaaagcrgtacatcagaagatctgaagcaaaaattgtgtgggagagtttgattcaaatgcttcttttccatttcctacaaatatgaacaagtacaatagagaattaactttaaatttatttttatttttatttttttaaacaacactcttcagtcattcttgaaatactgagctcaagaattttttggactgatgatttattaattttcagaaaacctgctttggtgagagctatctgcattcagtcatcttagacttgctcctggctggcaaaagct

SEQ ID NO: 20854 - DNA, 600 bp, Chicken  19866894231766_3
atatatgttataataaaagatccatctttctctatgatagctatgacatgttcttaagtagaatactcataaatcttgaacaaaatttgaaatagatggatataatgaaatattatgactctcccaaactcattaattcaaattcactcaactgtttttgctttaattccctttactgaaacttacacttttggcttccaaaagcctttacagtaaatttcaccactagttaagtgcctcaacagctatcttttgttttccataactctcrtataacacataaaaattcaatgtaaagcrgtacatcagaagatctgaagcaaaaattgtgtgggagagtttgattcaaatgcttcttttccatttcctacaaatatgaacaagtacaatagagaattaactttaaatttatttttatttttatttttttaaacaacactcttcagtcattcttgaaatactgagctcaagaattttttggactgatgatttattaattttcagaaaacctgctttggtgagagctatctgcattcagtcatcttagacttgctcctggctggcaaaagctgtaattcaggcttaacctcattcacacga

SEQ ID NO: 20855 - DNA, 599 bp, Chicken  19866894231768_1
  misc_feature (1)..(140): n is any nucleotide
nnnnnnnnnnnnnnnnnnnnnnnnnnnnnnnnnnnnnnnnnnnnnnnnnnnnnnnnnnnnnnnnnnnnnnnnnnnnnnnnnnnnnnnnnnnnnnnnnnnnnnnnnnnnnnnnnnnnnnnnnnnnnnnnnnnnnnnnnnnntgtgcccatgataacctccccagcctcagctgtgcttggggagaacagtttggcgctgctctgtaccccactaccttatagagcacaggcttgcagaagcaaggccccattttgatgtgaagtgaagctaattaaatgggatgcatgcagagagatagargctcattgactaggtaaagagcgggagcctgagtggcagtgataaaagtgaagtgcgaggggtggcaccccaacccgctgtaagttcatttcaattccataatatttcattggcatggcagctgcttgtctgtggcacttctaatcagctgcaaatgcctggaggctgtcgtgctttcctttgtcatcactgtcttctccctgttcacacacagcaatgctagcatctctgctcctctgccatgttagttgcagtgtttcccttgctgtttgggggtgggggtgttttgggtttttttc

SEQ ID NO: 20856 - DNA, 600 bp, Chicken  19866894231769_1
aaaaatccagcaatttttcaagtcctttttgcaccataacacagtgttactcctctagtgcttgagcttacactgagaaaagagaacaaatacaatcaattctgtaccttttgattacatagaaaatgaaaaagacaaatcccacagcacacaagactggatgctatagctttgtaacccatgctagtacattacaatgcatcaagagtagtaatggaaactctctggggtgctacagcatgcacaataagccttcactcttactgtctattccactccttgtccaaccagatgtcaggytttcccaaattccaggtggaagtaggtctacagcacattctgcagtcatctacactagtctaccaacttagaactctataaaattctgcaagctaccatcaaggatatcaaaagcatagaacagactaatagaatggcctgggttgaaaaaaacctcaaaagttaattgagtttcaaaccccctgttgtgggcaggggcaccaaccactagaccaggctgcccagagccacatccagcctggccctgaatgtctccagggatggggcatccacaaccttcttgggcaacctgttccagtg

SEQ ID NO: 20857 - DNA, 600 bp, Chicken  19866894231769_2
tacactagtctaccaacttagaactctataaaattctgcaagctaccatcaaggatatcaaaagcatagaacagactaatagaatggcctgggttgaaaaaaacctcaaaagttaattgagtttcaaaccccctgttgtgggcaggggcaccaaccactagaccaggctgcccagagccacatccagcctggccctgaatgtctccagggatggggcatccacaaccttcttgggcaacctgttccagtgcgtcaccaccctctgagtgaaaagcttcctcctagtatctaacctaaacmtcccctgtcttagtttaaaactattccctcttgtcctatcactgtctatccatgttggccttcagctgagctgcaatttaaatccttcctatcagcaatacagtaacatgtgactcaaactgtctatgaaaatgtatgccatgtacctatgacaagattggtacwactaccacaaaacccattactacagatgtagggacaataagaacaggctgaggaaaagtgtgccattacatttctaggactacattttagcaggtcatcactcttgggacaaagaacatctgagttgcctcatgg

SEQ ID NO: 20858 - DNA, 600 bp, Chicken  19866894231769_3
ggctgcccagagccacatccagcctggccctgaatgtctccagggatggggcatccacaaccttcttgggcaacctgttccagtgcgtcaccaccctctgagtgaaaagcttcctcctagtatctaacctaaacmtcccctgtcttagtttaaaactattccctcttgtcctatcactgtctatccatgttggccttcagctgagctgcaatttaaatccttcctatcagcaatacagtaacatgtgactcaaactgtctatgaaaatgtatgccatgtacctatgacaagattggtacwactaccacaaaacccattactacagatgtagggacaataagaacaggctgaggaaaagtgtgccattacatttctaggactacattttagcaggtcatcactcttgggacaaagaacatctgagttgcctcatggtgaacctgcaaaaactttaggccttttaacccaggaggacctgaagtgacttctgacaagacttccagcccttgcttctcctttttggcgcaggaaactcctcccataccacaggaaagcaattctatttcatagcagcaatgaatgatgaagggaaaaaaatgc

SEQ ID NO: 20859 - DNA, 600 bp, Chicken  19866894231773_1
tagaaggtatttttcatgtattcagatttagctctattttcagacttgttagggataactcttgcttttttatattacttagttaatgtggtgggtttagtcattcccttacttatgacaaagatagaccagcccttgttctcctatttatgaaggttgttccaaatataaagcctcctattttttaccatgaccgctgcagtcacttcagctgaaatgcaccacacaggacctcactgtgctcacatccactgtttggactctataaatattcagcaagcaaaaatgaatgtcaaaacrtgtcacatttttccacatggaggaattcaacgacacacctttacttcatatgtacttccatgtcagactcctttttttcagattgcccctctgctgccatttgtcacacagcaacgaaatgtaatggaatattggcaggaagattcagtcgatactgtcataccaccaacatttgcctctgatgttatgggccgacataataaaatagggaataatacttctggagcagccttcgtgtattcattcttggtgaacattcatgtatgttactgctcagaagtctccaatttcagttaaaaa

SEQ ID NO: 20860 - DNA, 581 bp, Chicken  19866894231793_1
ttaagctgcaggtccttgcacagccacaacggtcgcctgcctttcctgctcgactgcttctgctgggggatggagagccgttgcgctctcagaagggtgtccttaaagagctgccagctctgttctgtacccgttcccttaaggacagtttcccaggggatcccactcagcagttccttgagcagctggatgtttgctctcctaaagcacagggtcctagctctgctttttgccaggccaacattcttcaagatcacaaactccactttgagtgttaatgcacatttgatttcctttaaygtttatcatttatgcttctacctaagaaggagaatacatctctcagtcctttgtacaactggaatctcagttgcaaaatacatttggttgttggttgcacctttgggggaaaaaattacaaatactttcctccagttgttttttttttgttgttgttgtcattgtttgtttatattaaaatttcgcctttttattactaacattaaaaatgaggtttatgttttgagttagtgctgtattcaattttgtatctgtaatgaatgtttaaaatatgcatatgt

SEQ ID NO: 20861 - DNA, 600 bp, Chicken  19866894231794_1
ctatgggcaccattcccagccctggccgtggcaggggagagttccagcacagctcaccccagtgcgcagcagccttcagctggctcatcgggtttcaattaaaccaaccacaaggcacgtcatccgattgttctccaaaattacagatgagcactaactgcaattaatcacaaccgagaatgaaagctaagcttggggggaacctctcagtccccatctcctccattttcccatccctgcctgctacagcaccagcaccctgctctggtccccatgctgggctggcagaaccccgcaggsaaaaactaacaaattagacagagagcacagagtacttttccttcttctttttttcttctttctttttttcaagcaagcattaactgagcattaactgcaacactgagacaaagatgaacgtgggcaacactaaccactgcgctgccagatgcagcttgcacgaacagattgatggctgggatgagttctctgcgagcgctgtctgtgactggcaaagggccagccactgatattcatgatttatcactgtgttttgtccttacaccaagcacttcaccctgactgctacatgggggtgga

SEQ ID NO: 20862 - DNA, 600 bp, Chicken  19866894231794_2
attaactgagcattaactgcaacactgagacaaagatgaacgtgggcaacactaaccactgcgctgccagatgcagcttgcacgaacagattgatggctgggatgagttctctgcgagcgctgtctgtgactggcaaagggccagccactgatattcatgatttatcactgtgttttgtccttacaccaagcacttcaccctgactgctacatgggggtggaggaatcacatgctctccctctctttggcacaaattgcttggaggggtccagctggaaatgtgcaaaaacactgacagygttttgctcggaaactgagttttctaactttgccacgatatattttacccttcgctccattcaactgtggctcttccagccactgcgcatgaagtggagttaacactcaaagcagaggagatctccattagcagagacagytttatgacacaggctggccccagytaaagcttgtaatattttactgtagcctcctaacagtagccagagggctgcagcctgcaggcttgctcacactcccaccaagccatggccttgcaggctgggatgcaccaccccatgaggacggctgcaaagctg

SEQ ID NO: 20863 - DNA, 600 bp, Chicken  19866894231794_3
ccagccactgatattcatgatttatcactgtgttttgtccttacaccaagcacttcaccctgactgctacatgggggtggaggaatcacatgctctccctctctttggcacaaattgcttggaggggtccagctggaaatgtgcaaaaacactgacagygttttgctcggaaactgagttttctaactttgccacgatatattttacccttcgctccattcaactgtggctcttccagccactgcgcatgaagtggagttaacactcaaagcagaggagatctccattagcagagacagytttatgacacaggctggccccagytaaagcttgtaatattttactgtagcctcctaacagtagccagagggctgcagcctgcaggcttgctcacactcccaccaagccatggccttgcaggctgggatgcaccaccccatgaggacggctgcaaagctgactcagcacccgatgcctggctttgccatgctgactggaaccttccagctctgagcctctctccatctgctggaagactggcttaagggatgactgatcccagagcagggccctgctgtgcttggaagctgctgctctcct

SEQ ID NO: 20864 - DNA, 585 bp, Chicken  19866894231794_4
tcactgtgttttgtccttacaccaagcacttcaccctgactgctacatgggggtggaggaatcacatgctctccctctctttggcacaaattgcttggaggggtccagctggaaatgtgcaaaaacactgacagygttttgctcggaaactgagttttctaactttgccacgatatattttacccttcgctccattcaactgtggctcttccagccactgcgcatgaagtggagttaacactcaaagcagaggagatctccattagcagagacagytttatgacacaggctggccccagytaaagcttgtaatattttactgtagcctcctaacagtagccagagggctgcagcctgcaggcttgctcacactcccaccaagccatggccttgcaggctgggatgcaccaccccatgaggacggctgcaaagctgactcagcacccgatgcctggctttgccatgctgactggaaccttccagctctgagcctctctccatctgctggaagactggcttaagggatgactgatcccagagcagggccctgctgtgcttggaagctgctgctctcctgccgtgcca

SEQ ID NO: 20865 - DNA, 600 bp, Chicken  19866894231795_1
tctctaatgagatcagaaagaatatgaaataaaaataggagaactgctcctgttccgtagaagtgcaataacatcagtattacttgccagctgagaaaagagatcaacaccctcctcactgcagtgtcttttcaggtagctgtagggagcaatgcagtcactcctcagcaggattttcaaatttaaactttcttttttttttttcagtactgaatgaaatctcactgggtgcagttaatgagagtgcatacactcatggagctacaaactaatttagagataattcactacaatgtacamcatcagggtctaaaatcatcttccagaaactgacgctgacctcttggggagggggggtgatctctgtgggagagagtcttatcaaagacaaagatctccctgagtacaggacggatatagagctcttggagcgggtccagaggagggccactaagatatcaaagggctggagcacctctcctatgaggaaaggttgagggaactgggattgtttagcttggagaagagaaggctctggggagacctcattgtggccttccagtacttgaagagagcatgtaaacaggaaggggagtggct

SEQ ID NO: 20866 - DNA, 600 bp, Chicken  19866894231796_1
ctctacttggctacttgtccttgtctggctcttcccccaccatgctagctcagtcttgagcagaaatgttgaataaattggactggggaacagttccagctaaaaaaaaaaaaaaaaaagattattgtactggaggtccagattatatttcagctgaatcacttccttaggagactacacaaatgtttgtgctgggaaggcagcgcgagaagcaggattggatgtgaagtaggaaaggcttcagttggcaaaaatatcatggctgccaaaacctcagtcccagtaaagtgctctcagacygagggcgagtgagattgagatctcagattgagatcaagtgacctgtattgaytgttggcagcagacctgctttgagcagggaattagacttggcgacctgcagagaawcccttccaacctgtattattctgtggttctatgattcaaacttaaatcctgtttcagacatcctttggctttgtaaattttgcactttcatcctttaaatgcatccatcatgctgttcttcaagagcacaaacacaaagctaagatcaatatcattcagtggaggcagaggccctttgaccatttggtttac

SEQ ID NO: 20867 - DNA, 600 bp, Chicken  19866894231796_2
gtcttgagcagaaatgttgaataaattggactggggaacagttccagctaaaaaaaaaaaaaaaaaagattattgtactggaggtccagattatatttcagctgaatcacttccttaggagactacacaaatgtttgtgctgggaaggcagcgcgagaagcaggattggatgtgaagtaggaaaggcttcagttggcaaaaatatcatggctgccaaaacctcagtcccagtaaagtgctctcagacygagggcgagtgagattgagatctcagattgagatcaagtgacctgtattgaytgttggcagcagacctgctttgagcagggaattagacttggcgacctgcagagaawcccttccaacctgtattattctgtggttctatgattcaaacttaaatcctgtttcagacatcctttggctttgtaaattttgcactttcatcctttaaatgcatccatcatgctgttcttcaagagcacaaacacaaagctaagatcaatatcattcagtggaggcagaggccctttgaccatttggtttactgaacatagtaaaagacagatcccatgcaccccagttttccttagtaagagg

SEQ ID NO: 20868 - DNA, 600 bp, Chicken  19866894231796_3
aaaaaaaaaaagattattgtactggaggtccagattatatttcagctgaatcacttccttaggagactacacaaatgtttgtgctgggaaggcagcgcgagaagcaggattggatgtgaagtaggaaaggcttcagttggcaaaaatatcatggctgccaaaacctcagtcccagtaaagtgctctcagacygagggcgagtgagattgagatctcagattgagatcaagtgacctgtattgaytgttggcagcagacctgctttgagcagggaattagacttggcgacctgcagagaawcccttccaacctgtattattctgtggttctatgattcaaacttaaatcctgtttcagacatcctttggctttgtaaattttgcactttcatcctttaaatgcatccatcatgctgttcttcaagagcacaaacacaaagctaagatcaatatcattcagtggaggcagaggccctttgaccatttggtttactgaacatagtaaaagacagatcccatgcaccccagttttccttagtaagaggagtacaattgtgacttttctttattcttatttgctttatcttaaataagaattgca

SEQ ID NO: 20869 - DNA, 600 bp, Chicken  19866894231797_1
ttctgtctcacgtttcttacatttctttttccctggtgcccttgccctgtactgcatacaaggtgggttgtctgatcactcatcagagaaagaggaagtgctcagtagttgctcaaaatgccacgggaattttggtaggtatgatctaacaggaaatgaaaagcctaagaattgtgtgatttgcacattccatgaggtagcacatatgactgatgcatcctactgtgaattccgggatttgaatgtctcaaacagctttaaacaacctagttccatagcacaaggtagccaacttattcygactttcctgtaaattttactactgtaaattgaacgctgctccaatgactgcccatttaggagtgcaccagtcaaatgyagatttttgtacgtggcagtagaaattgagttttcttttactwctggcatagcttctgcttagtaagccctggaataacttaatttttgtgttctaacatgtggcatgtaagacttgaagtggtgagtagcagttttgtttcttatttataaaaacatgagttcttaggattaacatacccaaactcaatatatttccaggagtcagtgggctgagatatc

SEQ ID NO: 20870 - DNA, 551 bp, Chicken  19866894231797_2
tcatcagagaaagaggaagtgctcagtagttgctcaaaatgccacgggaattttggtaggtatgatctaacaggaaatgaaaagcctaagaattgtgtgatttgcacattccatgaggtagcacatatgactgatgcatcctactgtgaattccgggatttgaatgtctcaaacagctttaaacaacctagttccatagcacaaggtagccaacttattcygactttcctgtaaattttactactgtaaattgaacgctgctccaatgactgcccatttaggagtgcaccagtcaaatgyagatttttgtacgtggcagtagaaattgagttttcttttactwctggcatagcttctgcttagtaagccctggaataacttaatttttgtgttctaacatgtggcatgtaagacttgaagtggtgagtagcagttttgtttcttatttataaaaacatgagttcttaggattaacatacccaaactcaatatatttccaggagtcagtgggctgagatatctttgaagacagcagtttcaaaattaatttt

SEQ ID NO: 20871 - DNA, 508 bp, Chicken  19866894231797_3
acgggaattttggtaggtatgatctaacaggaaatgaaaagcctaagaattgtgtgatttgcacattccatgaggtagcacatatgactgatgcatcctactgtgaattccgggatttgaatgtctcaaacagctttaaacaacctagttccatagcacaaggtagccaacttattcygactttcctgtaaattttactactgtaaattgaacgctgctccaatgactgcccatttaggagtgcaccagtcaaatgyagatttttgtacgtggcagtagaaattgagttttcttttactwctggcatagcttctgcttagtaagccctggaataacttaatttttgtgttctaacatgtggcatgtaagacttgaagtggtgagtagcagttttgtttcttatttataaaaacatgagttcttaggattaacatacccaaactcaatatatttccaggagtcagtgggctgagatatctttgaagacagcagtttcaaaattaatttt

SEQ ID NO: 20872 - DNA, 599 bp, Chicken  19866894231802_1
  misc_feature (1)..(167): n is any nucleotide
nnnnnnnnnnnnnnnnnnnnnnnnnnnnnnnnnnnnnnnnnnnnnnnnnnnnnnnnnnnnnnnnnnnnnnnnnnnnnnnnnnnnnnnnnnnnnnnnnnnnnnnnnnnnnnnnnnnnnnnnnnnnnnnnnnnnnnnnnnnnnnnnnnnnnnnnnnnnnnnnnnnnnnntcataaacacacatgttctttgcatatagatgtttcactgagaattctaaaataagtcttgaaataatcacgtgatccaatctgtgaggcagtgtaaataaatgattattttgtaagggatttccaggggtaygaaacagacctggctatagccggtaagaactcacaggacatgcttgttggactcagttgttgatttacagcctgatgggaacctacgagatttacattccctttcattttgcctgtatttcaacaatgcatggcttagtatctgtgcttaacttggttaattgtcccccacacagtctgacggtgcattctctcagttcctctgaattttgatagctatcagaatgtcaactgaaataaaatcrttatcagaagcacatttgctcagtgcttatgcaaagagatctaagttcatactaa

SEQ ID NO: 20873 - DNA, 600 bp, Chicken  19866894231802_2
caatctgtgaggcagtgtaaataaatgattattttgtaagggatttccaggggtaygaaacagacctggctatagccggtaagaactcacaggacatgcttgttggactcagttgttgatttacagcctgatgggaacctacgagatttacattccctttcattttgcctgtatttcaacaatgcatggcttagtatctgtgcttaacttggttaattgtcccccacacagtctgacggtgcattctctcagttcctctgaattttgatagctatcagaatgtcaactgaaataaaatcrttatcagaagcacatttgctcagtgcttatgcaaagagatctaagttcatactaaaaaggaaaactctttccttgaaggactattcccaaaaatgttttcacagaggctggagagcatataatgcacaaaacacagatcatgtgggacttctggagtctcactcaacaacagactgaatccaaaagcggggacaaaaacctgcatgtgtgtcagtgggatgatcagcatatggattgtgagatgtgtgtcgcgtgtttattaggcaggtttggatagctcaaaaaaggtgatggaagagc

SEQ ID NO: 20874 - DNA, 600 bp, Chicken  19866894231802_3
atctaagttcatactaaaaaggaaaactctttccttgaaggactattcccaaaaatgttttcacagaggctggagagcatataatgcacaaaacacagatcatgtgggacttctggagtctcactcaacaacagactgaatccaaaagcggggacaaaaacctgcatgtgtgtcagtgggatgatcagcatatggattgtgagatgtgtgtcgcgtgtttattaggcaggtttggatagctcaaaaaaggtgatggaagagcggagtacaaagatgggattgtttaggctgctaagaacrggagctgctgggaagttctggagtacattggaaagatattacagggtagtgatcagcaaagcttctcagaatatcaccttgctgcagggaaatcaagcatgagagaattgaattgttaacacaagtcttttttagtaaactcagaaaaaataaagccaaactacagacacagtttgtagatgttgcccacgcccaaaggatcagtgaatgaattttcagcaataacaggtatacaaagcaaaaagacctgcagagagataatggatgggttaaagcttggagtccttagaggggggaaac

SEQ ID NO: 20875 - DNA, 600 bp, Chicken  19866894231809_1
attgctaggctacaaggcctatacgtgaactaaaatcctgttgagctaggctcagtatgcatttgcattaacagaatacagacttatgggcatctaaatataagacaggagatgacagagagacaaacacagatggagaagcatcactttgcttagtgttacagccagtggtctcagtacaccagcaagcttactgttatcaaatctcaccacaagaggtgatcattacagagtgtttgaagaagaaatatggtatacctttgtggatacttagaaggcactggatatcaaaagtgaagraaaaaataaaaaataaaataaaatataaagtaaaaagacagtggaaaatattgagattattttctgaaaattcagcaagtggctataaaacgttaatatattcagctgatattcatctattcaggagcatgctacttggcactagaatagatgacaatgtgtgaaaagtacaggctggaaagcttgcagttaatgtaagacatttgcaaagaccaaagaaaacaatgttccaagagctaggatgaaagaggagtggtatgaatggataggaaggactacaaaatagagatcttgtagaga

SEQ ID NO: 20876 - DNA, 600 bp, Chicken  19866894231813_1
gatggggataatccaggatggaaaccaggacaaagtggagtcaacaaatggtatatttttcatatcaaatctattcagttcttagagcatcagcagtaagaaatttggatgagattaaatttctgtagtaaccattttgaaaatggtcctcagagatccctagttggaaagcactgggcctattcatcctattttaaatctatgggaagaaattattctgagtgttgaaagagtgtacaaaaaaattataatttgttcaactccttttcaagtacttttagacatgtgatacttttagaygtgtgataggtctgtgatactaccttagatgtctttgtacatttaaatgaggatggtttgatgctggcacaatcaccttgaaagattattgcctctgtcttagaaatctatcaaaaatgccaagaattaaactgtaggattaggaagcctgccatttctaagatttgtggtgctagcaattgacttacttaatgccttggtggagaacaggctgtgcatggacaaatacatatgattactctaattgtttgcaaaggaaagaatttcctcaatctttgcaaaagccagattaagtatcaa

SEQ ID NO: 20877 - DNA, 600 bp, Chicken  19866894231817_1
tatttttctgtcactcgaaaagcacctcaaccaagataaaagtcatgtacattcttgtctgaattaacaaatgacaatttaacttcattagtttatattaattataaggaaactcttgtgagcaattttaataatgcactagtaatattgtcgtatgtggaaatattggtagtgagcagttaacagcattagctatatgcacataaggctgctaatttatcactgtatttggaattcaaagtatttataattctcaaacaaagatttgtggtaatattaagtcagtaagttgtgaacaartgaaaaaaaagaacaagtaaatggattgtgttaataacccattgtagctaacacattatagcagaacaacaaaaaacactttatctgtggtatgcctggaatcatctcaaacacttgcaagataagaccattgccatgacaacagcgtaaaggctgaagatgtggtmtgaggagagagccctgtggakataggactgccttgctctggccaaagctcctctgttcaagcagagttatttactgcacagtttttactgcagcgaactgcacagtttttactgcagttttgttgacagcgaa

SEQ ID NO: 20878 - DNA, 600 bp, Chicken  19866894231817_2
ggtagtgagcagttaacagcattagctatatgcacataaggctgctaatttatcactgtatttggaattcaaagtatttataattctcaaacaaagatttgtggtaatattaagtcagtaagttgtgaacaartgaaaaaaaagaacaagtaaatggattgtgttaataacccattgtagctaacacattatagcagaacaacaaaaaacactttatctgtggtatgcctggaatcatctcaaacacttgcaagataagaccattgccatgacaacagcgtaaaggctgaagatgtggtmtgaggagagagccctgtggakataggactgccttgctctggccaaagctcctctgttcaagcagagttatttactgcacagtttttactgcagcgaactgcacagtttttactgcagttttgttgacagcgaacttgatggcaaacttgttgacgacagactccacaaactagcagacatagaaggatgcccaagagaagcttggggatttcagaactttggaaattctggacaagtgctctcacagaccaaggactccttcccctrttgactggaccaatgcrggaacccagacaagtg

SEQ ID NO: 20879 - DNA, 600 bp, Chicken  19866894231817_3
ttagctatatgcacataaggctgctaatttatcactgtatttggaattcaaagtatttataattctcaaacaaagatttgtggtaatattaagtcagtaagttgtgaacaartgaaaaaaaagaacaagtaaatggattgtgttaataacccattgtagctaacacattatagcagaacaacaaaaaacactttatctgtggtatgcctggaatcatctcaaacacttgcaagataagaccattgccatgacaacagcgtaaaggctgaagatgtggtmtgaggagagagccctgtggakataggactgccttgctctggccaaagctcctctgttcaagcagagttatttactgcacagtttttactgcagcgaactgcacagtttttactgcagttttgttgacagcgaacttgatggcaaacttgttgacgacagactccacaaactagcagacatagaaggatgcccaagagaagcttggggatttcagaactttggaaattctggacaagtgctctcacagaccaaggactccttcccctrttgactggaccaatgcrggaacccagacaagtgatctctttctcttcccatccc

SEQ ID NO: 20880 - DNA, 600 bp, Chicken  19866894231817_4
catgacaacagcgtaaaggctgaagatgtggtmtgaggagagagccctgtggakataggactgccttgctctggccaaagctcctctgttcaagcagagttatttactgcacagtttttactgcagcgaactgcacagtttttactgcagttttgttgacagcgaacttgatggcaaacttgttgacgacagactccacaaactagcagacatagaaggatgcccaagagaagcttggggatttcagaactttggaaattctggacaagtgctctcacagaccaaggactccttcccctrttgactggaccaatgcrggaacccagacaagtgatctctttctcttcccatccctcattctctgcccccctcccttttcactctcttttcttttaackttcctcttattattgtcaagtaatgcttggtttattttgatttcttataaagtttaaccacacagcttagacagattcaattgtaatgatataggctagtaagagtgccagtacttttaagagaagtgtagtacagaggttctcattacaactgatgattgtgtttggacttcgcctgttgtttcatcttaatctaatggaa

SEQ ID NO: 20881 - DNA, 600 bp, Chicken  19866894231817_5
ggctgaagatgtggtmtgaggagagagccctgtggakataggactgccttgctctggccaaagctcctctgttcaagcagagttatttactgcacagtttttactgcagcgaactgcacagtttttactgcagttttgttgacagcgaacttgatggcaaacttgttgacgacagactccacaaactagcagacatagaaggatgcccaagagaagcttggggatttcagaactttggaaattctggacaagtgctctcacagaccaaggactccttcccctrttgactggaccaatgcrggaacccagacaagtgatctctttctcttcccatccctcattctctgcccccctcccttttcactctcttttcttttaackttcctcttattattgtcaagtaatgcttggtttattttgatttcttataaagtttaaccacacagcttagacagattcaattgtaatgatataggctagtaagagtgccagtacttttaagagaagtgtagtacagaggttctcattacaactgatgattgtgtttggacttcgcctgttgtttcatcttaatctaatggaaggtatttatgaatctag

SEQ ID NO: 20882 - DNA, 566 bp, Chicken  19866894231817_6
gttatttactgcacagtttttactgcagcgaactgcacagtttttactgcagttttgttgacagcgaacttgatggcaaacttgttgacgacagactccacaaactagcagacatagaaggatgcccaagagaagcttggggatttcagaactttggaaattctggacaagtgctctcacagaccaaggactccttcccctrttgactggaccaatgcrggaacccagacaagtgatctctttctcttcccatccctcattctctgcccccctcccttttcactctcttttcttttaackttcctcttattattgtcaagtaatgcttggtttattttgatttcttataaagtttaaccacacagcttagacagattcaattgtaatgatataggctagtaagagtgccagtacttttaagagaagtgtagtacagaggttctcattacaactgatgattgtgtttggacttcgcctgttgtttcatcttaatctaatggaaggtatttatgaatctagtcatctttctctccctttagagccaggacatgacaagtactcatctc

SEQ ID NO: 20883 - DNA, 600 bp, Chicken  19866894231819_1
ggaggttgggtaaatattatttgtactcgaggtgcagatgctgagggatggcaccactgagggaaaaaagtccaggagcagaaatgggggggggggggtcacgttgggttcctcagcagtgcccaacagtggccggaggctgctgcctgcttctcagcgttgctgcaagatgggtgttctgacaaattctgccttgcagagcatttgcagtgctgctttgcggcacggtgctgagcggggcagacctgcagagcctggggtcaggtgggagcacagcactgcagctcaccaccacatttmggttttcgaagctcttcttttcttgcttgaaatcccgtgtctctgctctcagggtggaagcagaagccttgctttcttttcttgataygaaagcaaaagttatttagtttggccccctccgtatcttactgctaacaaaaatagatgctgctcgctctaataacagtccgatttggaaattatttaccatttagactttgtccaccctaattgcttttgatacttcagaatatatgtaatggaaaccagctgaaaggccgtggtttaaaaatgggctcttgcacattggaagtaaatttt

SEQ ID NO: 20884 - DNA, 600 bp, Chicken  19866894231819_2
ggggggggggtcacgttgggttcctcagcagtgcccaacagtggccggaggctgctgcctgcttctcagcgttgctgcaagatgggtgttctgacaaattctgccttgcagagcatttgcagtgctgctttgcggcacggtgctgagcggggcagacctgcagagcctggggtcaggtgggagcacagcactgcagctcaccaccacatttmggttttcgaagctcttcttttcttgcttgaaatcccgtgtctctgctctcagggtggaagcagaagccttgctttcttttcttgataygaaagcaaaagttatttagtttggccccctccgtatcttactgctaacaaaaatagatgctgctcgctctaataacagtccgatttggaaattatttaccatttagactttgtccaccctaattgcttttgatacttcagaatatatgtaatggaaaccagctgaaaggccgtggtttaaaaatgggctcttgcacattggaagtaaattttatcctgcaatcagcccacaagatcttaactgcagctctcacgtctcctaactctgtaattgctgtggagcctttctggtctgctggtt

SEQ ID NO: 20885 - DNA, 599 bp, Chicken  19866894231820_1
  misc_feature (1)..(248): n is any nucleotide
nnnnnnnnnnnnnnnnnnnnnnnnnnnnnnnnnnnnnnnnnnnnnnnnnnnnnnnnnnnnnnnnnnnnnnnnnnnnnnnnnnnnnnnnnnnnnnnnnnnnnnnnnnnnnnnnnnnnnnnnnnnnnnnnnnnnnnnnnnnnnnnnnnnnnnnnnnnnnnnnnnnnnnnnnnnnnnnnnnnnnnnnnnnnnnnnnnnnnnnnnnnnnnnnnnnnnnnnnnnnnnnnnnnnnnnnnnnnnnnnnnnnnnnncacttgacactttgctaaactgggggccttgtagtctgctttgaaacacttkggaaatttttcatgcatgggaaattttgttttagatcctcttgaactgaactgaaagtggtggcagctggaataatgtggctttcctcttctctgctcctctttcccttctttaacgcacrtaagtctaactgtgagaaaagagtgcaagaaggaaacagacgtggtagaatggacagattctaaaaaccttgttctgagatctcctcttgtcctgaacagctccaccaaaagctagcagtaaggtgaaacacacacttcgtgttacctaacctgattgtgggcttgctcartgccgca

SEQ ID NO: 20886 - DNA, 599 bp, Chicken  19866894231820_2
  misc_feature (1)..(127): n is any nucleotide
nnnnnnnnnnnnnnnnnnnnnnnnnnnnnnnnnnnnnnnnnnnnnnnnnnnnnnnnnnnnnnnnnnnnnnnnnnnnnnnnnnnnnnnnnnnnnnnnnnnnnnnnnnnnnnnnnnnnnnnnnnnnnnncacttgacactttgctaaactgggggccttgtagtctgctttgaaacacttkggaaatttttcatgcatgggaaattttgttttagatcctcttgaactgaactgaaagtggtggcagctggaataatgtggctttcctcttctctgctcctctttcccttctttaacgcacrtaagtctaactgtgagaaaagagtgcaagaaggaaacagacgtggtagaatggacagattctaaaaaccttgttctgagatctcctcttgtcctgaacagctccaccaaaagctagcagtaaggtgaaacacacacttcgtgttacctaacctgattgtgggcttgctcartgccgcagtcttgggctgcttgctgtctcctctcatgactcccacttgctgaaagaggctgagagcagcagcagcagcagagggaagtggcttttggtgagaaaggctggaggaggacggggtttctg

SEQ ID NO: 20887 - DNA, 600 bp, Chicken  19866894231820_3
aacacttkggaaatttttcatgcatgggaaattttgttttagatcctcttgaactgaactgaaagtggtggcagctggaataatgtggctttcctcttctctgctcctctttcccttctttaacgcacrtaagtctaactgtgagaaaagagtgcaagaaggaaacagacgtggtagaatggacagattctaaaaaccttgttctgagatctcctcttgtcctgaacagctccaccaaaagctagcagtaaggtgaaacacacacttcgtgttacctaacctgattgtgggcttgctcartgccgcagtcttgggctgcttgctgtctcctctcatgactcccacttgctgaaagaggctgagagcagcagcagcagcagagggaagtggcttttggtgagaaaggctggaggaggacggggtttctgggtatgagaaggcaagcttgtacgtgactcagttattgtagttccaaatccactttcattctttctctacccaagagctcactgctgtccactcagaaaatgtcagtgaaccgaagcagaacttyggtgcgttcagkctctaagatttgaaacagcccttggaactgccagt

SEQ ID NO: 20888 - DNA, 600 bp, Chicken  19866894231820_4
tgaaacacacacttcgtgttacctaacctgattgtgggcttgctcartgccgcagtcttgggctgcttgctgtctcctctcatgactcccacttgctgaaagaggctgagagcagcagcagcagcagagggaagtggcttttggtgagaaaggctggaggaggacggggtttctgggtatgagaaggcaagcttgtacgtgactcagttattgtagttccaaatccactttcattctttctctacccaagagctcactgctgtccactcagaaaatgtcagtgaaccgaagcagaacttyggtgcgttcagkctctaagatttgaaacagcccttggaactgccagttttaccttttggagcctgacaggaggtggcccaataaaaataataggtctggagcctcagagactaaccatcggcttaggttagtccacctcttctttttctgaagtgtattccagcatccctgctaacacacaaagcagggcatggtgagtggaagattttctgttgagtcccggaggcgtcctcataaactgtgtgtggattccatataattagctttacgggggaaggaagaagtctggcaacaaatggc

SEQ ID NO: 20889 - DNA, 600 bp, Chicken  19866894231820_5
ttcgtgttacctaacctgattgtgggcttgctcartgccgcagtcttgggctgcttgctgtctcctctcatgactcccacttgctgaaagaggctgagagcagcagcagcagcagagggaagtggcttttggtgagaaaggctggaggaggacggggtttctgggtatgagaaggcaagcttgtacgtgactcagttattgtagttccaaatccactttcattctttctctacccaagagctcactgctgtccactcagaaaatgtcagtgaaccgaagcagaacttyggtgcgttcagkctctaagatttgaaacagcccttggaactgccagttttaccttttggagcctgacaggaggtggcccaataaaaataataggtctggagcctcagagactaaccatcggcttaggttagtccacctcttctttttctgaagtgtattccagcatccctgctaacacacaaagcagggcatggtgagtggaagattttctgttgagtcccggaggcgtcctcataaactgtgtgtggattccatataattagctttacgggggaaggaagaagtctggcaacaaatggcgtgattgaggaa

SEQ ID NO: 20890 - DNA, 599 bp, Chicken  19866894231821_1
  misc_feature (1)..(46): n is any nucleotide
nnnnnnnnnnnnnnnnnnnnnnnnnnnnnnnnnnnnnnnnnnnnnnctgagctgctggctgcagcagaggatgggtttgtgctgcaaggagcagtgctcagcggaagcccatctggtgcaaggttttcaagctgctttgctcagccacttgagtgtgccactccattcccagcacttctctgcatggagagactgggctgggcattgcagagatgttttcttcatgagaaggactttcccgagacactgcagctggtggaagggctgagtaaaggtggtaatgccactagttctgggagrcgtattgcttcactctgtcagtgagtgtaaatccaccactgctatgaacattgcacaagcacatcccttcttggaaaataaaagtccgtctttatctcagtctcaggaattttgtagtatttaaatctccagtttgcgtaccaggctctctgatactcctgtgccactcagtaaagtaaatccaaagcagattttgtttggctttcccatgcctcagtagtccccaaaaagtgtttttttattattataagtattaggcatgtgcatgggaaagaattttgttagttcagctcgaccac

SEQ ID NO: 20891 - DNA, 599 bp, Chicken  19866894231823_1
  misc_feature (1)..(241): n is any nucleotide
nnnnnnnnnnnnnnnnnnnnnnnnnnnnnnnnnnnnnnnnnnnnnnnnnnnnnnnnnnnnnnnnnnnnnnnnnnnnnnnnnnnnnnnnnnnnnnnnnnnnnnnnnnnnnnnnnnnnnnnnnnnnnnnnnnnnnnnnnnnnnnnnnnnnnnnnnnnnnnnnnnnnnnnnnnnnnnnnnnnnnnnnnnnnnnnnnnnnnnnnnnnnnnnnnnnnnnnnnnnnnnnnnnnnnnnnnnnnnnnnnatgaggaaagaacggtatttcccactgttgttcctgtctaagcacagagatgttcaatytgaagattagacaaacgccttttccattcccaggaaaatccttccagacctgttgtggttatgagatctcaggagaagagccagctgcagcagctccatgcacttggacagcaaccctggcagcctggcatgctcctgtgcccaccctcactccactggggccaagaacaccatgcaactgtgtacctgggttgccccatcatttcagaccatggcaagagctccaggtctcaccagaagagcatggagccarygcttcaaacaaaaaggaccttccactattattattttttttagta

SEQ ID NO: 20892 - DNA, 600 bp, Chicken  19866894231823_2
cggtatttcccactgttgttcctgtctaagcacagagatgttcaatytgaagattagacaaacgccttttccattcccaggaaaatccttccagacctgttgtggttatgagatctcaggagaagagccagctgcagcagctccatgcacttggacagcaaccctggcagcctggcatgctcctgtgcccaccctcactccactggggccaagaacaccatgcaactgtgtacctgggttgccccatcatttcagaccatggcaagagctccaggtctcaccagaagagcatggagccarygcttcaaacaaaaaggaccttccactattattattttttttagtactatttttattctattccatacctgtcagcagatacagtaactctgcatgttccctcatgcttggttcacactttactattgatcttcttaataactagtcccgaggaattgcactgttaaatcttttagaaacaaaatctttctgaacakgtcagctattaggaaaaatgagaatcctcataaaatacatgtctgcttccctcagcatctttaaacacagaaagtaccatgaagtcaggggaggtaaatacct

SEQ ID NO: 20893 - DNA, 600 bp, Chicken  19866894231823_3
ggtatttcccactgttgttcctgtctaagcacagagatgttcaatytgaagattagacaaacgccttttccattcccaggaaaatccttccagacctgttgtggttatgagatctcaggagaagagccagctgcagcagctccatgcacttggacagcaaccctggcagcctggcatgctcctgtgcccaccctcactccactggggccaagaacaccatgcaactgtgtacctgggttgccccatcatttcagaccatggcaagagctccaggtctcaccagaagagcatggagccarygcttcaaacaaaaaggaccttccactattattattttttttagtactatttttattctattccatacctgtcagcagatacagtaactctgcatgttccctcatgcttggttcacactttactattgatcttcttaataactagtcccgaggaattgcactgttaaatcttttagaaacaaaatctttctgaacakgtcagctattaggaaaaatgagaatcctcataaaatacatgtctgcttccctcagcatctttaaacacagaaagtaccatgaagtcaggggaggtaaatacctt

SEQ ID NO: 20894 - DNA, 534 bp, Chicken  19866894231823_4
ctccactggggccaagaacaccatgcaactgtgtacctgggttgccccatcatttcagaccatggcaagagctccaggtctcaccagaagagcatggagccarygcttcaaacaaaaaggaccttccactattattattttttttagtactatttttattctattccatacctgtcagcagatacagtaactctgcatgttccctcatgcttggttcacactttactattgatcttcttaataactagtcccgaggaattgcactgttaaatcttttagaaacaaaatctttctgaacakgtcagctattaggaaaaatgagaatcctcataaaatacatgtctgcttccctcagcatctttaaacacagaaagtaccatgaagtcaggggaggtaaataccttgatattttccttggtcagaaaattaacatagatgtttgttggtttgttttctcttgctatgtttcttaagtaaatgtctgaaaacaaagccagttcccagtttaaaagtaaatgatacaaccatacttaa

SEQ ID NO: 20895 - DNA, 600 bp, Chicken  19866894231825_1
gtgttgcagatgaagtcatcttgttcatctccccagactctctctgcagccacaaccaggatcatgatacggaagatgaacaggactgtgagccatatcttcccaatgctggtggagtgtttatttacacctcctaagatggtctgcagagctccccaatccattgtcttgtcttaaaggtatgacctaagatgagaaaaagattaatcaggatgggaaacaaatactattaagcatacagtataaaataaaggcaacattgtaaatataattgcagtacgttcataccctgtggtaacstcttgttgacgcagtagtctttctcacaagcagtcaaagtgacacagtaaccacatatcagcaggtcacattttgttgcttgataaggcagctgcaatccgcctgactgctaggtgtatttggcaactgaaaacttctatccacatcagtaagaaaaagtagacaagggaaattggtaaaagatgaccttatttaaaagctacaatttctagaagctttgataacaggagcaaagaacagaagatgatatcaacagtcaaaagtgaggtaggtrttatggtgraatgtaaccagaaggag

SEQ ID NO: 20896 - DNA, 600 bp, Chicken  19866894231825_2
cagtacgttcataccctgtggtaacstcttgttgacgcagtagtctttctcacaagcagtcaaagtgacacagtaaccacatatcagcaggtcacattttgttgcttgataaggcagctgcaatccgcctgactgctaggtgtatttggcaactgaaaacttctatccacatcagtaagaaaaagtagacaagggaaattggtaaaagatgaccttatttaaaagctacaatttctagaagctttgataacaggagcaaagaacagaagatgatatcaacagtcaaaagtgaggtaggtrttatggtgraatgtaaccagaaggagagattcctcagagcctctggaattctcaaggtaaacaaaaaaaagcaggtggtgaggtggaagctgcattgtacagtcacagaaaatcaaagaaactgaaaaatgaaacctgtatgggcatttagttactttatttgagaagaaaatagctaaactcgttaggaaattaagatgagtttgcccactcttggcttcagggcataaacaacattttcatgagtacatcattccagcaataaagacagaccttgaggagctgctgtggaagctctgc

SEQ ID NO: 20897 - DNA, 600 bp, Chicken  19866894231825_3
cataccctgtggtaacstcttgttgacgcagtagtctttctcacaagcagtcaaagtgacacagtaaccacatatcagcaggtcacattttgttgcttgataaggcagctgcaatccgcctgactgctaggtgtatttggcaactgaaaacttctatccacatcagtaagaaaaagtagacaagggaaattggtaaaagatgaccttatttaaaagctacaatttctagaagctttgataacaggagcaaagaacagaagatgatatcaacagtcaaaagtgaggtaggtrttatggtgraatgtaaccagaaggagagattcctcagagcctctggaattctcaaggtaaacaaaaaaaagcaggtggtgaggtggaagctgcattgtacagtcacagaaaatcaaagaaactgaaaaatgaaacctgtatgggcatttagttactttatttgagaagaaaatagctaaactcgttaggaaattaagatgagtttgcccactcttggcttcagggcataaacaacattttcatgagtacatcattccagcaataaagacagaccttgaggagctgctgtggaagctctgcaccttccat

SEQ ID NO: 20898 - DNA, 513 bp, Chicken  19866894231826_1
agttcacagaggacttactgtcacaactgcaaaaatgaggaaccattttcttcaggaaacacaggtggccaagcccaagtacgaccattttttcagaagcaattactctaattacccagtaaactgcacgagagtaaacaggccacagaaggggagagactgcaaaggaggaggaggaacatcccccactgaggctcattcaccttgagtgataaacttcagaagtaattatgactactttcaaatatagcaggctgtagattgagacctcctggtataccaagtgctgggttgtgcatragaggtcataaacacatgtactgctttgaagactatcatgaaaggattgcctagctgcctccmaggattatattttggtctgaataatttgtctgaatagtacagtctaatgtctctgaaatttctggaatcaagacttggactgtgctggggggaccctctgcaaggagctgatcaggtgaaaggtgtttaaaggagccatagcagatagtt

SEQ ID NO: 20899 - DNA, 450 bp, Chicken  19866894231826_2
ggtggccaagcccaagtacgaccattttttcagaagcaattactctaattacccagtaaactgcacgagagtaaacaggccacagaaggggagagactgcaaaggaggaggaggaacatcccccactgaggctcattcaccttgagtgataaacttcagaagtaattatgactactttcaaatatagcaggctgtagattgagacctcctggtataccaagtgctgggttgtgcatragaggtcataaacacatgtactgctttgaagactatcatgaaaggattgcctagctgcctccmaggattatattttggtctgaataatttgtctgaatagtacagtctaatgtctctgaaatttctggaatcaagacttggactgtgctggggggaccctctgcaaggagctgatcaggtgaaaggtgtttaaaggagccatagcagatagtt

SEQ ID NO: 20900 - DNA, 600 bp, Chicken  19866894231829_1
gcccatctgtccccagcacagccgcctctgtgctgtcccggggactctgcccagccggcactcagccataacacctctgcatcccagtgggtttgagcagccccgagtccttaggactcacagatgggccgggacagtgacaggcacacagacctggcttcctgcaggaacttggccttcagctcgggcggcagggtttcccggcaggatttcaccgccacgggggtgttgtcagcacgcaggcggccgctgaacacctccccgaagttcccctgcagagggacacggaggtgttggccragctgccaatgcgcacccgtggctgtactgctgccaggacccagcacccaactcacccggccaatgcgctcccccagcagcacgtcctcatggttgagcacccacttgtcctgcgggcagcagacccgaggtcggtgagcagcccccagccccagcagcatttccccctgccctgcagctccccctcacggggatccgtcacgcaggtggatggaggcagctgctggagctgcgctctgcgcagggctctgctgcctcctgctgcccaccctcaccttgagcacggctcggtcaggacga

SEQ ID NO: 20901 - DNA, 600 bp, Chicken  19866894231832_1
ggttggatatcaggaagcacttctttacagaaagggttgttaagcactggaataggctccccagggaggaggttgagtcaccattgcttgatgtgtttaaaaaccactcagatgtggtgctcagggacatgatttagtggagagttgtcagttagggtagtacggttaggtcatgtttggacttgatgatctttaagatcttttccaacctgagcaattctataattctatgaatttaagtattgtgttagagaggatatatataaaaaaaaatcagtatcaagcacacaagaaaaagcyataaaatgatcaaagttaaaatcacctgatacctgacagatcatgtatttctcatgtaactccagcctcttcctttcactctcagccctatctcatgggcccttcttgtttggtagctgtccagagttgtataagggtgtacggcaaacagrtatacagctattggaccagagagattattgcattacaaaagagaaatgaaataaagaccttacccgtgycctrggcttgcagaaggattccaagagaagtaatctccagatagagatccttcctccttgggagtcagcccttaaatgg

SEQ ID NO: 20902 - DNA, 600 bp, Chicken  19866894231832_2
tagggtagtacggttaggtcatgtttggacttgatgatctttaagatcttttccaacctgagcaattctataattctatgaatttaagtattgtgttagagaggatatatataaaaaaaaatcagtatcaagcacacaagaaaaagcyataaaatgatcaaagttaaaatcacctgatacctgacagatcatgtatttctcatgtaactccagcctcttcctttcactctcagccctatctcatgggcccttcttgtttggtagctgtccagagttgtataagggtgtacggcaaacagrtatacagctattggaccagagagattattgcattacaaaagagaaatgaaataaagaccttacccgtgycctrggcttgcagaaggattccaagagaagtaatctccagatagagatccttcctccttgggagtcagcccttaaatggggtctaggaggggtggagcctggctcttccagttactcaggtgaaattgcgttcacctgtgtccctgcagctgactcagcgcttgcctcaggtgatcactgaggttcaggccrtgattcaacagttcctatacaaagggttggcaggcacct

SEQ ID NO: 20903 - DNA, 600 bp, Chicken  19866894231832_3
ataattctatgaatttaagtattgtgttagagaggatatatataaaaaaaaatcagtatcaagcacacaagaaaaagcyataaaatgatcaaagttaaaatcacctgatacctgacagatcatgtatttctcatgtaactccagcctcttcctttcactctcagccctatctcatgggcccttcttgtttggtagctgtccagagttgtataagggtgtacggcaaacagrtatacagctattggaccagagagattattgcattacaaaagagaaatgaaataaagaccttacccgtgycctrggcttgcagaaggattccaagagaagtaatctccagatagagatccttcctccttgggagtcagcccttaaatggggtctaggaggggtggagcctggctcttccagttactcaggtgaaattgcgttcacctgtgtccctgcagctgactcagcgcttgcctcaggtgatcactgaggttcaggccrtgattcaacagttcctatacaaagggttggcaggcacctgctaattatcatgatgtacactgggcaccattctaggaatagccagtagataagcaccaggatgattga

SEQ ID NO: 20904 - DNA, 600 bp, Chicken  19866894231832_4
ttctatgaatttaagtattgtgttagagaggatatatataaaaaaaaatcagtatcaagcacacaagaaaaagcyataaaatgatcaaagttaaaatcacctgatacctgacagatcatgtatttctcatgtaactccagcctcttcctttcactctcagccctatctcatgggcccttcttgtttggtagctgtccagagttgtataagggtgtacggcaaacagrtatacagctattggaccagagagattattgcattacaaaagagaaatgaaataaagaccttacccgtgycctrggcttgcagaaggattccaagagaagtaatctccagatagagatccttcctccttgggagtcagcccttaaatggggtctaggaggggtggagcctggctcttccagttactcaggtgaaattgcgttcacctgtgtccctgcagctgactcagcgcttgcctcaggtgatcactgaggttcaggccrtgattcaacagttcctatacaaagggttggcaggcacctgctaattatcatgatgtacactgggcaccattctaggaatagccagtagataagcaccaggatgattgaggaa

SEQ ID NO: 20905 - DNA, 600 bp, Chicken  19866894231832_5
tagctgtccagagttgtataagggtgtacggcaaacagrtatacagctattggaccagagagattattgcattacaaaagagaaatgaaataaagaccttacccgtgycctrggcttgcagaaggattccaagagaagtaatctccagatagagatccttcctccttgggagtcagcccttaaatggggtctaggaggggtggagcctggctcttccagttactcaggtgaaattgcgttcacctgtgtccctgcagctgactcagcgcttgcctcaggtgatcactgaggttcaggccrtgattcaacagttcctatacaaagggttggcaggcacctgctaattatcatgatgtacactgggcaccattctaggaatagccagtagataagcaccaggatgattgaggaattggagcacttctacaaggaaagacaaagagaaatgggaaagtttggcctggagaagatgaagtttagggaagattatattcgtgtctataaatacctgaagggagagtatcaagatgctcttttcagtggtgctcagtatcaagacaagaggcaatgagtacaaacaggaacacaggagattcatgg

SEQ ID NO: 20906 - DNA, 600 bp, Chicken  19866894231834_1
ctcgtgaccaaaataaggctttgctttcactgtgaatacagcctgtttgaattcagatatgtaatccaactgcagctgatcttcagtatgacagtcactgcagtagtgctgcttatatcgtctgaattcagcctgactgctttatgtcatgttttgacaatgtcccaacagacatgcaaggaagatcttaatttccttttatatgcggatctcatgaaaagcagaaggatacaaacttctggggatatgacatagtactggttttattagtagaattgtatcagcctgtgttcaacctcrtggttctctctcatttccactgcctgtgctcccatcactggatgaaattccyttcttctaaactgcctctcacctttgctgcttattacagggactggaagttgctgcttcaggaagtagcagatgtcagatgctgtaagcctgaatgctttcttcctgcctcctcttgggatttcccagcatcrtggactcatggggatagcgactgatgagctacatgtccctctgctcactcatccatgaggtacgtaagagaagttatctttcgtgacaaaactaaggacaggctaagccaaaaga

SEQ ID NO: 20907 - DNA, 600 bp, Chicken  19866894231834_2
tcagatatgtaatccaactgcagctgatcttcagtatgacagtcactgcagtagtgctgcttatatcgtctgaattcagcctgactgctttatgtcatgttttgacaatgtcccaacagacatgcaaggaagatcttaatttccttttatatgcggatctcatgaaaagcagaaggatacaaacttctggggatatgacatagtactggttttattagtagaattgtatcagcctgtgttcaacctcrtggttctctctcatttccactgcctgtgctcccatcactggatgaaattccyttcttctaaactgcctctcacctttgctgcttattacagggactggaagttgctgcttcaggaagtagcagatgtcagatgctgtaagcctgaatgctttcttcctgcctcctcttgggatttcccagcatcrtggactcatggggatagcgactgatgagctacatgtccctctgctcactcatccatgaggtacgtaagagaagttatctttcgtgacaaaactaaggacaggctaagccaaaagagaaacaccacataaatgatgggcagtagtcacagcctgctattcaacttcag

SEQ ID NO: 20908 - DNA, 600 bp, Chicken  19866894231834_3
tcttaatttccttttatatgcggatctcatgaaaagcagaaggatacaaacttctggggatatgacatagtactggttttattagtagaattgtatcagcctgtgttcaacctcrtggttctctctcatttccactgcctgtgctcccatcactggatgaaattccyttcttctaaactgcctctcacctttgctgcttattacagggactggaagttgctgcttcaggaagtagcagatgtcagatgctgtaagcctgaatgctttcttcctgcctcctcttgggatttcccagcatcrtggactcatggggatagcgactgatgagctacatgtccctctgctcactcatccatgaggtacgtaagagaagttatctttcgtgacaaaactaaggacaggctaagccaaaagagaaacaccacataaatgatgggcagtagtcacagcctgctattcaacttcagcactgtacttttgttcactgtccagattatggtctagctaactagaggcaacagcaagtgagctcagacmtgcagaactgcaatcagaggaagtgccaggatgtagtgtgcctccctcctcaaagacacgttc

SEQ ID NO: 20909 - DNA, 600 bp, Chicken  19866894231834_4
gatgtcagatgctgtaagcctgaatgctttcttcctgcctcctcttgggatttcccagcatcrtggactcatggggatagcgactgatgagctacatgtccctctgctcactcatccatgaggtacgtaagagaagttatctttcgtgacaaaactaaggacaggctaagccaaaagagaaacaccacataaatgatgggcagtagtcacagcctgctattcaacttcagcactgtacttttgttcactgtccagattatggtctagctaactagaggcaacagcaagtgagctcagacmtgcagaactgcaatcagaggaagtgccaggatgtagtgtgcctccctcctcaaagacacgttcatgcaaggagatgcttacaggtgagtaggatttccaagggcagggtatcccttatctttgttacactccacgawgttgctgaaatacttagctcaaagacactacaataaaaatgccagatctacataacatggttggatagtattctgcataaggtcaattgcagcagtgagataaatgtgaaattccttgtatttggtgagtaatagattactgttcccaaaggtctgatataaa

SEQ ID NO: 20910 - DNA, 600 bp, Chicken  19866894231834_5
tatctttcgtgacaaaactaaggacaggctaagccaaaagagaaacaccacataaatgatgggcagtagtcacagcctgctattcaacttcagcactgtacttttgttcactgtccagattatggtctagctaactagaggcaacagcaagtgagctcagacmtgcagaactgcaatcagaggaagtgccaggatgtagtgtgcctccctcctcaaagacacgttcatgcaaggagatgcttacaggtgagtaggatttccaagggcagggtatcccttatctttgttacactccacgawgttgctgaaatacttagctcaaagacactacaataaaaatgccagatctacataacatggttggatagtattctgcataaggtcaattgcagcagtgagataaatgtgaaattccttgtatttggtgagtaatagattactgttcccaaaggtctgatataaatatttatatacagacctaaatgtttaaagcagcagctgccaaagcactttcatacaagtttaggaaactaatcactacagttcacrtggtttgtaagtggtgaactgttgttagactttgtttcaggaagaaatgtc

SEQ ID NO: 20911 - DNA, 600 bp, Chicken  19866894231834_6
agtaggatttccaagggcagggtatcccttatctttgttacactccacgawgttgctgaaatacttagctcaaagacactacaataaaaatgccagatctacataacatggttggatagtattctgcataaggtcaattgcagcagtgagataaatgtgaaattccttgtatttggtgagtaatagattactgttcccaaaggtctgatataaatatttatatacagacctaaatgtttaaagcagcagctgccaaagcactttcatacaagtttaggaaactaatcactacagttcacrtggtttgtaagtggtgaactgttgttagactttgtttcaggaagaaatgtccacgttcagatgaaaatgagactttatctcaacagtattctgtttgcatgttggcataatttactgagccattcaaatgctcgtacttttaactttagggatttatacaaaggaggaagattacctactgttacatgtctgttttggagctgccatatacttttarttgcctcagcaactccagattgcaactgtctgtaaggacatggatcctagtgggcatggtggagatgggttgatggttgcctg

SEQ ID NO: 20912 - DNA, 600 bp, Chicken  19866894231834_7
ttatatacagacctaaatgtttaaagcagcagctgccaaagcactttcatacaagtttaggaaactaatcactacagttcacrtggtttgtaagtggtgaactgttgttagactttgtttcaggaagaaatgtccacgttcagatgaaaatgagactttatctcaacagtattctgtttgcatgttggcataatttactgagccattcaaatgctcgtacttttaactttagggatttatacaaaggaggaagattacctactgttacatgtctgttttggagctgccatatacttttarttgcctcagcaactccagattgcaactgtctgtaaggacatggatcctagtgggcatggtggagatgggttgatggttgcctgaatgtccatgttgcattaatgttttagtagagggtatttaagtaaaaccactgtcagattttatgtgcaaatatagcaaaagagggggttcttctacactgtgcaattcagcagtacagcaggatgtgggtacatgatcgagtttatcctagaactgcttcttctcgtacaggtttctttgttcccaacttgcccacagcctgctttctctcttcca

SEQ ID NO: 20913 - DNA, 600 bp, Chicken  19866894231845_1
atgtcttgagtcacattcccactgcttaacacctacaattccccctgataccacagaatcacagaatagcaatcgtaattcccacaatcgcagcgctctgtctgaagagcagcactctgtaactctcctgttctggtgggagtctctccaacccaccagaacaagcatctctgttacaattcttgtacataccagcagaaagagaatgagctgttttatatttgatgtttaaaacccactgacattcatcttttctgctggtgtgtgcattagattatcagacagttacgcaagaaatgycgttacttgcttctcagcatgcatgtgccacaacttgaatcargttggtttgcctgctctgcttatatatacacacaagttttaattagtaagccaggtaactttatgaagcaatgagaagagagaagagaagcttrcacaggtactgcagaaagcaacagctagcagtagttcttagacaaatttaaatcacaagtactcaagaacagcaggcatacaatcatctycctgcttgcagcaagaagcaggctgacatgatagaagtgcaacccttccaagcagggcaccccaacttaacgc

SEQ ID NO: 20914 - DNA, 600 bp, Chicken  19866894231845_2
cctgataccacagaatcacagaatagcaatcgtaattcccacaatcgcagcgctctgtctgaagagcagcactctgtaactctcctgttctggtgggagtctctccaacccaccagaacaagcatctctgttacaattcttgtacataccagcagaaagagaatgagctgttttatatttgatgtttaaaacccactgacattcatcttttctgctggtgtgtgcattagattatcagacagttacgcaagaaatgycgttacttgcttctcagcatgcatgtgccacaacttgaatcargttggtttgcctgctctgcttatatatacacacaagttttaattagtaagccaggtaactttatgaagcaatgagaagagagaagagaagcttrcacaggtactgcagaaagcaacagctagcagtagttcttagacaaatttaaatcacaagtactcaagaacagcaggcatacaatcatctycctgcttgcagcaagaagcaggctgacatgatagaagtgcaacccttccaagcagggcaccccaacttaacgctgaggtgaactgcaaaccatggacaccataagcactactgttt

SEQ ID NO: 20915 - DNA, 600 bp, Chicken  19866894231845_3
gggagtctctccaacccaccagaacaagcatctctgttacaattcttgtacataccagcagaaagagaatgagctgttttatatttgatgtttaaaacccactgacattcatcttttctgctggtgtgtgcattagattatcagacagttacgcaagaaatgycgttacttgcttctcagcatgcatgtgccacaacttgaatcargttggtttgcctgctctgcttatatatacacacaagttttaattagtaagccaggtaactttatgaagcaatgagaagagagaagagaagcttrcacaggtactgcagaaagcaacagctagcagtagttcttagacaaatttaaatcacaagtactcaagaacagcaggcatacaatcatctycctgcttgcagcaagaagcaggctgacatgatagaagtgcaacccttccaagcagggcaccccaacttaacgctgaggtgaactgcaaaccatggacaccataagcactactgttttttttctgctggtgaatccagctataaacaacctggggaaggatttgagtaagcgtatgagatactgatcacacttcttcctcaggtgatcaca

SEQ ID NO: 20916 - DNA, 600 bp, Chicken  19866894231845_4
tttaaaacccactgacattcatcttttctgctggtgtgtgcattagattatcagacagttacgcaagaaatgycgttacttgcttctcagcatgcatgtgccacaacttgaatcargttggtttgcctgctctgcttatatatacacacaagttttaattagtaagccaggtaactttatgaagcaatgagaagagagaagagaagcttrcacaggtactgcagaaagcaacagctagcagtagttcttagacaaatttaaatcacaagtactcaagaacagcaggcatacaatcatctycctgcttgcagcaagaagcaggctgacatgatagaagtgcaacccttccaagcagggcaccccaacttaacgctgaggtgaactgcaaaccatggacaccataagcactactgttttttttctgctggtgaatccagctataaacaacctggggaaggatttgagtaagcgtatgagatactgatcacacttcttcctcaggtgatcacagagcagcattaagttactaaatttcaggctgaaagaagcttagagtcttacttctcaccacaaagagctcagccaatgcctcattcctgg

SEQ ID NO: 20917 - DNA, 600 bp, Chicken  19866894231845_5
tcacagagcagcattaagttactaaatttcaggctgaaagaagcttagagtcttacttctcaccacaaagagctcagccaatgcctcattcctggctggccagctgagcagctcataagtctcaggatattctatgattctaagtttcacaattgttattacaaacagaataaaaaaaaacaacacaaaaaacctttcagtgctagatgcttaacacagctgctttgttccattactgtataccagatgatggaatcatcaatttctccctgatttccacaagtacagggagaacataargaaagaagctcccatgaagtcacttgcttactgttcactttccctaagagcacctactgttacctattgtaaagcctgttcaatttcattttccactcccaacaagctgcwrgatgccaagayactgatatgaagtccaacttgaggtttggcacgtggggtccctgaaccacgaataacccacgtgttttaaaaacagactttattttgatgaggcaaaatacttcagcatgcagtaacctgtaactcaatcacttttggaattagaagagaaatatgtaagtaaaaatagtccagtca

SEQ ID NO: 20918 - DNA, 600 bp, Chicken  19866894231845_6
ctcataagtctcaggatattctatgattctaagtttcacaattgttattacaaacagaataaaaaaaaacaacacaaaaaacctttcagtgctagatgcttaacacagctgctttgttccattactgtataccagatgatggaatcatcaatttctccctgatttccacaagtacagggagaacataargaaagaagctcccatgaagtcacttgcttactgttcactttccctaagagcacctactgttacctattgtaaagcctgttcaatttcattttccactcccaacaagctgcwrgatgccaagayactgatatgaagtccaacttgaggtttggcacgtggggtccctgaaccacgaataacccacgtgttttaaaaacagactttattttgatgaggcaaaatacttcagcatgcagtaacctgtaactcaatcacttttggaattagaagagaaatatgtaagtaaaaatagtccagtcacaccgtactgcattataacgtagtggagctcaggacatcaatcccattagagatttgcacaaatctttgcttaagctgctgagaactttaattacttgtcacactggaaca

SEQ ID NO: 20919 - DNA, 600 bp, Chicken  19866894231845_7
tcataagtctcaggatattctatgattctaagtttcacaattgttattacaaacagaataaaaaaaaacaacacaaaaaacctttcagtgctagatgcttaacacagctgctttgttccattactgtataccagatgatggaatcatcaatttctccctgatttccacaagtacagggagaacataargaaagaagctcccatgaagtcacttgcttactgttcactttccctaagagcacctactgttacctattgtaaagcctgttcaatttcattttccactcccaacaagctgcwrgatgccaagayactgatatgaagtccaacttgaggtttggcacgtggggtccctgaaccacgaataacccacgtgttttaaaaacagactttattttgatgaggcaaaatacttcagcatgcagtaacctgtaactcaatcacttttggaattagaagagaaatatgtaagtaaaaatagtccagtcacaccgtactgcattataacgtagtggagctcaggacatcaatcccattagagatttgcacaaatctttgcttaagctgctgagaactttaattacttgtcacactggaacag

SEQ ID NO: 20920 - DNA, 600 bp, Chicken  19866894231845_8
aggatattctatgattctaagtttcacaattgttattacaaacagaataaaaaaaaacaacacaaaaaacctttcagtgctagatgcttaacacagctgctttgttccattactgtataccagatgatggaatcatcaatttctccctgatttccacaagtacagggagaacataargaaagaagctcccatgaagtcacttgcttactgttcactttccctaagagcacctactgttacctattgtaaagcctgttcaatttcattttccactcccaacaagctgcwrgatgccaagayactgatatgaagtccaacttgaggtttggcacgtggggtccctgaaccacgaataacccacgtgttttaaaaacagactttattttgatgaggcaaaatacttcagcatgcagtaacctgtaactcaatcacttttggaattagaagagaaatatgtaagtaaaaatagtccagtcacaccgtactgcattataacgtagtggagctcaggacatcaatcccattagagatttgcacaaatctttgcttaagctgctgagaactttaattacttgtcacactggaacagtaagtctcctc

SEQ ID NO: 20921 - DNA, 600 bp, Chicken  19866894231848_1
aaagggtaaacaagcagtaatgtgcagggtttaatgagaaattgggagtaaccatataggaagatgcatctgtgctgtagcatgcaaatacattatgcactataaaagtttgttttctgagaactctaattcaggtatataacagagggggtgggggaggaaggcaataaatgaatttctagcattaaattgtgcatcataactgctgggattgtgctggttggctgttcctatcttcccctgccctgtaccttgagagcgtgtggtgactgcctgcaggcactgctagctctgcatacmgagcagtagggctgtacaacctgtggacatcccaggctgggcttgggaaggcggtgaggcagagtgctgccatgrcccggagcctcccacttacctgggcagctgtgttgctgggaaggagcacgaggtggcggggtaaagagagtgaggtttcctgctgtcaatgggacggccgatttcagtttgtgttgggatcacttctgagctcagtgctggtattytgtgctcctaaatcaactgagtttgcaatgtgcacttttgtattggttaagcattgcatttagttggtagaaacggatg

SEQ ID NO: 20922 - DNA, 600 bp, Chicken  19866894231848_2
tgtagcatgcaaatacattatgcactataaaagtttgttttctgagaactctaattcaggtatataacagagggggtgggggaggaaggcaataaatgaatttctagcattaaattgtgcatcataactgctgggattgtgctggttggctgttcctatcttcccctgccctgtaccttgagagcgtgtggtgactgcctgcaggcactgctagctctgcatacmgagcagtagggctgtacaacctgtggacatcccaggctgggcttgggaaggcggtgaggcagagtgctgccatgrcccggagcctcccacttacctgggcagctgtgttgctgggaaggagcacgaggtggcggggtaaagagagtgaggtttcctgctgtcaatgggacggccgatttcagtttgtgttgggatcacttctgagctcagtgctggtattytgtgctcctaaatcaactgagtttgcaatgtgcacttttgtattggttaagcattgcatttagttggtagaaacggatggctgtagcagttcaattttctaggtggggcaaaaaacaaccctaagggtttcccgatgggattccaatagctctg

SEQ ID NO: 20923 - DNA, 529 bp, Chicken  19866894231848_3
tggctgttcctatcttcccctgccctgtaccttgagagcgtgtggtgactgcctgcaggcactgctagctctgcatacmgagcagtagggctgtacaacctgtggacatcccaggctgggcttgggaaggcggtgaggcagagtgctgccatgrcccggagcctcccacttacctgggcagctgtgttgctgggaaggagcacgaggtggcggggtaaagagagtgaggtttcctgctgtcaatgggacggccgatttcagtttgtgttgggatcacttctgagctcagtgctggtattytgtgctcctaaatcaactgagtttgcaatgtgcacttttgtattggttaagcattgcatttagttggtagaaacggatggctgtagcagttcaattttctaggtggggcaaaaaacaaccctaagggtttcccgatgggattccaatagctctgttagagaatactgctttcaccaggtggcaggagacggccactttcatacagccccacaaagctcctacaggcaca

SEQ ID NO: 20924 - DNA, 600 bp, Chicken  19866894231851_1
tttaagttcagacatttagtatcttcagggaagaaacataattccttgtgatcttgctcatctgtgttgctggctttaaactgaatgccagaaaatagctaaattgcaggcatctatctgttgtgtttgacttttttagcagtgtttcagcaggctgaggacttgagacaaaactgttatagaaatgtctgacccagctccagctgcagtcagtggaaaaagagtaactgacttcagtgggagctggattagaacctaaaacagtgagtgcagtggtgctgcggtgtctttcatctcaargctgctgggtggaatccagactaggctggtaatggttgggaagctgccaggtgctaatgatgtggaacaagttggtgagtccttgctccagtttgtaggaagccaccagacaaaacaagtcccgtgaacagccagctcaaccctttcctgattgggtttgtgctatactggcaaaagagtacttcaggaacttaccctgatgtggctcctgtggtgtctgatttgctgaggccacagtgcttctgtgcacatttatcgtcatgaaattccctagaaatattctgcatgctataaaaacag

SEQ ID NO: 20925 - DNA, 599 bp, Chicken  19866894231865_1
  misc_feature (1)..(12): n is any nucleotide
nnnnnnnnnnnnaaaatgatatttgaaagtgttgcatgattaactttgctggttttgttcattttcttcatgtctcctagcagaccatacctaactttggagctcaagacagactgtgaaaattggtcagtgtttggaaaacctctctgtgtgagcacaaatacaagtgattggatgtttcaagccttgtctctttatggaaacattgcatttctgtgtcatgcattatagttagtacttgttattccagctaggaagaatcatgctcacattctttcccttccctcattttcctccccyagaacaggtatttcagctgtagaagggcattttgtataacttccagataaccaaagtctggtgaattgctcttttgcaacagggaggccagtaaggtattcttagcatgctgttgtcagatccaatttgcctttacaagaggagaggtatacagaaattccatcaactggcagaagttgggtacaatgtacgtgacagctgatttcatggtgagggcagtgcaggtgaggacagtgcagagmgtcagtatggataattgcatggcacttctcaaaagggagtgaaggtgcccgcaggaa

SEQ ID NO: 20926 - DNA, 581 bp, Chicken  19866894231865_2
tattccagctaggaagaatcatgctcacattctttcccttccctcattttcctccccyagaacaggtatttcagctgtagaagggcattttgtataacttccagataaccaaagtctggtgaattgctcttttgcaacagggaggccagtaaggtattcttagcatgctgttgtcagatccaatttgcctttacaagaggagaggtatacagaaattccatcaactggcagaagttgggtacaatgtacgtgacagctgatttcatggtgagggcagtgcaggtgaggacagtgcagagmgtcagtatggataattgcatggcacttctcaaaagggagtgaaggtgcccgcaggaaatgtatgtgtgcagagggatatggcgactgagtcagtcctcgcagtcatggtcctttgaggcttgtacagggtcatcttcatctctaacagcacagttcttctctacaatttcattaatataaattaggttaccattgaggtaaaaaaaaaaaaactcacaaattttaactagaatacagagaaaaatcgtacctctatggtggagtatctgtgcagaattcta

SEQ ID NO: 20927 - DNA, 599 bp, Chicken  19866894231868_1
  misc_feature (1)..(70): n is any nucleotide
nnnnnnnnnnnnnnnnnnnnnnnnnnnnnnnnnnnnnnnnnnnnnnnnnnnnnnnnnnnnnnnnnnnnnntagattattagatttttctttttctctgcagcacttttcagcagaagtcaatactgttgactgatctgattaaaagcacctgcttccaagtagttcttggtaaatagttttgctgatttaggaaagatagctggaaaaaaaatatcagaagaacagatctgtaaattgcatgtaaaacaaatatcttttctctgtacttatgaacacatgatctgagtaatacctctatsactttgagccaggatatccacctccttcttagtacgtgcccccattgcttgtgttacttccctttggaaggcagatgtccctctcatgyrttcctggaggtatttawgtgatgtgtggatktgacactaagggatatggtataattaygggacttggtaggtcagcttgatggttggacttgatctagaaggtcttttctaacctaaataatgactctcattccttccaagcaaaagcagggtgagatgatgatttcccccagagttgcttggacactggcttctttcttgtgggagtt

SEQ ID NO: 20928 - DNA, 600 bp, Chicken  19866894231868_2
ttttctctgcagcacttttcagcagaagtcaatactgttgactgatctgattaaaagcacctgcttccaagtagttcttggtaaatagttttgctgatttaggaaagatagctggaaaaaaaatatcagaagaacagatctgtaaattgcatgtaaaacaaatatcttttctctgtacttatgaacacatgatctgagtaatacctctatsactttgagccaggatatccacctccttcttagtacgtgcccccattgcttgtgttacttccctttggaaggcagatgtccctctcatgyrttcctggaggtatttawgtgatgtgtggatktgacactaagggatatggtataattaygggacttggtaggtcagcttgatggttggacttgatctagaaggtcttttctaacctaaataatgactctcattccttccaagcaaaagcagggtgagatgatgatttcccccagagttgcttggacactggcttctttcttgtgggagttgagaggtaaattcgaatcctcgtagtctgaaggagacggataacaaagatctttcattctctgggtgcatttgctgcagcatgaatttgt

SEQ ID NO: 20929 - DNA, 600 bp, Chicken  19866894231868_3
tttctctgcagcacttttcagcagaagtcaatactgttgactgatctgattaaaagcacctgcttccaagtagttcttggtaaatagttttgctgatttaggaaagatagctggaaaaaaaatatcagaagaacagatctgtaaattgcatgtaaaacaaatatcttttctctgtacttatgaacacatgatctgagtaatacctctatsactttgagccaggatatccacctccttcttagtacgtgcccccattgcttgtgttacttccctttggaaggcagatgtccctctcatgyrttcctggaggtatttawgtgatgtgtggatktgacactaagggatatggtataattaygggacttggtaggtcagcttgatggttggacttgatctagaaggtcttttctaacctaaataatgactctcattccttccaagcaaaagcagggtgagatgatgatttcccccagagttgcttggacactggcttctttcttgtgggagttgagaggtaaattcgaatcctcgtagtctgaaggagacggataacaaagatctttcattctctgggtgcatttgctgcagcatgaatttgtt

SEQ ID NO: 20930 - DNA, 600 bp, Chicken  19866894231868_4
tcagcagaagtcaatactgttgactgatctgattaaaagcacctgcttccaagtagttcttggtaaatagttttgctgatttaggaaagatagctggaaaaaaaatatcagaagaacagatctgtaaattgcatgtaaaacaaatatcttttctctgtacttatgaacacatgatctgagtaatacctctatsactttgagccaggatatccacctccttcttagtacgtgcccccattgcttgtgttacttccctttggaaggcagatgtccctctcatgyrttcctggaggtatttawgtgatgtgtggatktgacactaagggatatggtataattaygggacttggtaggtcagcttgatggttggacttgatctagaaggtcttttctaacctaaataatgactctcattccttccaagcaaaagcagggtgagatgatgatttcccccagagttgcttggacactggcttctttcttgtgggagttgagaggtaaattcgaatcctcgtagtctgaaggagacggataacaaagatctttcattctctgggtgcatttgctgcagcatgaatttgttactgcaaagttggcaat

SEQ ID NO: 20931 - DNA, 600 bp, Chicken  19866894231868_5
tactgttgactgatctgattaaaagcacctgcttccaagtagttcttggtaaatagttttgctgatttaggaaagatagctggaaaaaaaatatcagaagaacagatctgtaaattgcatgtaaaacaaatatcttttctctgtacttatgaacacatgatctgagtaatacctctatsactttgagccaggatatccacctccttcttagtacgtgcccccattgcttgtgttacttccctttggaaggcagatgtccctctcatgyrttcctggaggtatttawgtgatgtgtggatktgacactaagggatatggtataattaygggacttggtaggtcagcttgatggttggacttgatctagaaggtcttttctaacctaaataatgactctcattccttccaagcaaaagcagggtgagatgatgatttcccccagagttgcttggacactggcttctttcttgtgggagttgagaggtaaattcgaatcctcgtagtctgaaggagacggataacaaagatctttcattctctgggtgcatttgctgcagcatgaatttgttactgcaaagttggcaatatcacaaatccgac

SEQ ID NO: 20932 - DNA, 600 bp, Chicken  19866894231868_6
cctgcttccaagtagttcttggtaaatagttttgctgatttaggaaagatagctggaaaaaaaatatcagaagaacagatctgtaaattgcatgtaaaacaaatatcttttctctgtacttatgaacacatgatctgagtaatacctctatsactttgagccaggatatccacctccttcttagtacgtgcccccattgcttgtgttacttccctttggaaggcagatgtccctctcatgyrttcctggaggtatttawgtgatgtgtggatktgacactaagggatatggtataattaygggacttggtaggtcagcttgatggttggacttgatctagaaggtcttttctaacctaaataatgactctcattccttccaagcaaaagcagggtgagatgatgatttcccccagagttgcttggacactggcttctttcttgtgggagttgagaggtaaattcgaatcctcgtagtctgaaggagacggataacaaagatctttcattctctgggtgcatttgctgcagcatgaatttgttactgcaaagttggcaatatcacaaatccgacttccttttcctgatagatttaaagcta

SEQ ID NO: 20933 - DNA, 600 bp, Chicken  19866894231870_1
aaattctcttatttgaaaaccaacagaacgtacattgctttcagtaaaggaggtgttggaaagggctttcttcttcaacaacttttgtgaagggagttataaacacaacagtaaatcttccctttgcatccattaaatatcagaggacaaaacactgttatctaattcccgcccatgcaacagcattgcatttccaacacagctggtgaaaataaacaagtagcagggaaataagttaaaaatcactcttgtgaacagctctgaatccagaaacaagcaagaatgtgaggtttcatctcrgattcagtcaaaggagaaatcagtcttgctgaaatttttttctggacaaaatacagtggcaagaaatagtcacatgttacatgctgatcacattccctactctagcagagaatttagttctcgttcaccgtactagaatcttttttcatttattcacctgagaaatcagtcccttcactactaccrggaagtctatcatattaccttatccacagaaaatattacaatctttttttccctttctatcttttatatttactggggagacaaaaagaaaataaacataccaacctgtggact

SEQ ID NO: 20934 - DNA, 534 bp, Chicken  19866894231870_2
tgcatttccaacacagctggtgaaaataaacaagtagcagggaaataagttaaaaatcactcttgtgaacagctctgaatccagaaacaagcaagaatgtgaggtttcatctcrgattcagtcaaaggagaaatcagtcttgctgaaatttttttctggacaaaatacagtggcaagaaatagtcacatgttacatgctgatcacattccctactctagcagagaatttagttctcgttcaccgtactagaatcttttttcatttattcacctgagaaatcagtcccttcactactaccrggaagtctatcatattaccttatccacagaaaatattacaatctttttttccctttctatcttttatatttactggggagacaaaaagaaaataaacataccaacctgtggactctaggcaattgtgaaaaagtgacacctcccctaaaggctgaaagtaaagatttaaaaacaaagattaaccaaccaaatgcctagaagtattgaattttcttagataatttcacgtgtgta

SEQ ID NO: 20935 - DNA, 600 bp, Chicken  19866894231872_1
ttagcaatatttagggaaaataacctttaaattagtgatgttacaagataagtttgaatgtaataggcaagaaacggttactggtcagtgccttcttaggcaaatattgcctgcttataggaatttcaagctgcctgcttaaatttctgccagcattaatatcattgacttattttcccagtaaaggaatctataagccaattcaaccaattttgctatgattgctgtcaaaggtacagtgacattcactgatttttccccgtgatctaaatgtgaggaattttgagcagttgcctcaakagaaatgatggtcaaagagcaataaggtgaaggaaaaaaaaaaaaaaaaaaaaaggataaaagaaaatcacaatcctctatctctttactatgagttgaagtggatcagaaacagacaatgacaggtatcatctgtagggtatcaaagaactgtttctgtcaatattcatatgttagggtttgttattacaagatctgaaaatagacaaggtttcaagagaacaaaactgaggtactggtaagacgtttgtgtatgtgccttttttgttttcccagtgttagataatttaaagcaaccaa

SEQ ID NO: 20936 - DNA, 600 bp, Chicken  19866894231882_1
tgctatttaaattaggacattttgactagaaatatattaaaatacatagaaaatgaagctgtggataggtttgggtccctctttactgctagtttctcagaccatgcttgagcttgttctcttttcgtcttcctctcctgctctccaagatttctttgactagctctgtcttagcaggggtaattatttatagacaagggaaaaatcataccttgtagaattctgtggctgtctgactgattcttgggtgaaaaaaagctgcttattctcttccatcttctcaagtctgcttgttacaamtatctggttacgagggaaggaaaaagccaactcatttagcctagtcttcagtggcaggaagacagagtctctgggaatctcagcattcatacccacaaaaccaccccttctaaaattatgcctccaaatagtgcctactgcattttgatctacagtacacaaaatgtcagcaaaaactatgatatcatgacataaggctaaggctgggaattttgctgttttttatgaggcatggaaaaatgaggtaaagaagtcctatcactgggtactgtgatggaacgtggtatgcttgtgagttgg

SEQ ID NO: 20937 - DNA, 600 bp, Chicken  19866894231886_1
atctgtaatatttgtctctctgctgaacagtggcttacagtgccagtcaagtaatgttataccttaaatgttttaaaatagggtggagagcctttagggcattgaccaaaattataagatgctgaccagaagtaactgagtgtacggttcgtggttgctgattgcagcctccagcagcagcccccctctggagacgagtagcctcttgtccatttccttttgccatctctttcataggatttaacaagttttctgtttgaaggtgatattgcatctcatacttctctaacctttcctgcrctatctcactgaggggtcactttcagtttagctttattttgaaatctaatggcatttaaagccagctctgtacatatccctcagtctgtcaacactaagggcggcgtttaaaaataatacctgcacttccttctgtcccacacccaagctgatgacaagctcccattgcttcggagagcagagcttcacctggggaacgtaccggggtgtacgcggagtgcccatgccttcctggtgcacgtacctctggcttccaaagggcagcagggcggctcagcttgctctgttaaaccatcccgc

SEQ ID NO: 20938 - DNA, 600 bp, Chicken  19866894231887_1
caactatttgctggcattaataaaaaccttgatgttaacttttagcattaatgaacaaggtcccactgaaaagcatttaacagtgttaaatgttaaatgctaaacagcagtctccttgttttgttgaaaatacagcttgacctccactagatcattgtcatgtgagatgcctactacttggcatgcaggtcacagtgtggctaggagcaaaaccaggctctctcactccagccttttgcagcttagaagatgtgatagctttggaggctttctgtttaacaataacatagtcatttttgytaaagacttctgttataagtgacacttaattaagtaatcctttaaaaattgtataatttttcctatcwatatttgggaagttgtactaagtctttacagacagtttgagagagaatcttctctttttcatttccattcaaaactacagtagcctaaaaactgtaaatgtctatttgattgttcactgttcctgtttgattcctcatcatataattayaagcatgcaaacttgtcagcactgccatgaagaggtggcacaaaaagaaaactgagtagaaaatagttctagaatacatagat

SEQ ID NO: 20939 - DNA, 600 bp, Chicken  19866894231887_2
aaaagcatttaacagtgttaaatgttaaatgctaaacagcagtctccttgttttgttgaaaatacagcttgacctccactagatcattgtcatgtgagatgcctactacttggcatgcaggtcacagtgtggctaggagcaaaaccaggctctctcactccagccttttgcagcttagaagatgtgatagctttggaggctttctgtttaacaataacatagtcatttttgytaaagacttctgttataagtgacacttaattaagtaatcctttaaaaattgtataatttttcctatcwatatttgggaagttgtactaagtctttacagacagtttgagagagaatcttctctttttcatttccattcaaaactacagtagcctaaaaactgtaaatgtctatttgattgttcactgttcctgtttgattcctcatcatataattayaagcatgcaaacttgtcagcactgccatgaagaggtggcacaaaaagaaaactgagtagaaaatagttctagaatacatagataatgaataagaggactctgaaaagctttatgcccattttccatcaatgactgaagacccatctccaaa

SEQ ID NO: 20940 - DNA, 600 bp, Chicken  19866894231887_3
ctctctcactccagccttttgcagcttagaagatgtgatagctttggaggctttctgtttaacaataacatagtcatttttgytaaagacttctgttataagtgacacttaattaagtaatcctttaaaaattgtataatttttcctatcwatatttgggaagttgtactaagtctttacagacagtttgagagagaatcttctctttttcatttccattcaaaactacagtagcctaaaaactgtaaatgtctatttgattgttcactgttcctgtttgattcctcatcatataattayaagcatgcaaacttgtcagcactgccatgaagaggtggcacaaaaagaaaactgagtagaaaatagttctagaatacatagataatgaataagaggactctgaaaagctttatgcccattttccatcaatgactgaagacccatctccaaaattgccactgaggtacatttcactttcagagagttcattaaaaagcagtagcataagattatggtaatggcaattatttcacagcggggatggttactggtttactctagtactataaatgtggaactgttatcaatacaaaattaaat

SEQ ID NO: 20941 - DNA, 600 bp, Chicken  19866894231891_1
gtacaattaaaaaaaaatctgctctctttattgagcgagtgatttctgcagagaacagtgtgaaatattaaaatgtctgtgtagagaggtcccacgggagaaattcaggagaagaaagattgaatcactaaaagagagagaaaccaggagtcgctaatgtgaggctgaagggagaagaccaaatctagtttgagggtcttctaaccagaatggcttctccatcatcatcacagaggatctttgccaaaggacacttatgacttccctaccaatgtacatgccaccagacgcaaatccctyaagagctaacgcaatgacacgccgactaaaaccggtaggcagaagctcagtttgatttccagtgtgtcagcagcccgggagctgcggttggtgggacagctcgggatgcgtttggggctggcggtggggggccaagccctgggacccaccaggctcttgggcaccacctgtgtgggctgcaaaacgctgagcaaagcggtgttgaaagaagctcggagtgcgtcctggagcgcggcgcttgggcttcgtggcaaaaatgataaatctcaccaaaaatatcgctgagatgaaaagcacgaa

SEQ ID NO: 20942 - DNA, 599 bp, Chicken  19866894231892_1
  misc_feature (1)..(101): n is any nucleotide
nnnnnnnnnnnnnnnnnnnnnnnnnnnnnnnnnnnnnnnnnnnnnnnnnnnnnnnnnnnnnnnnnnnnnnnnnnnnnnnnnnnnnnnnnnnnnnnnnnnnnatgtcccagcttccccaaaatgcagcatccagcttggttcaacatctccctccagacatatcacatcaaagccctgcatttgatgtgcagctctgtgcatttgatgtgcaaagctctgcacttgctcctcactgtctggaatcagtgatgatcatacagctgaagtctggatactcagaaaccactgcaagatgaaacygagctccttgaaagcatccatcctcgcattcacttacacacacagatatgaatacataattaaaacactgcagaagttaaccatgctgttcttcctatacaatggggatcagacacacaaagatagctacttttgatttaaaataggtagtgctcaagcccacatgcttaaaggcatttaaggaagttaagcttctttaggraagggagtttaaataacaccaaggtgcacactgacatggtttagctgctacagacatgaaaaaaacattttttggaaagtggtatttcacatagagc

SEQ ID NO: 20943 - DNA, 600 bp, Chicken  19866894231892_2
tgatgtgcaaagctctgcacttgctcctcactgtctggaatcagtgatgatcatacagctgaagtctggatactcagaaaccactgcaagatgaaacygagctccttgaaagcatccatcctcgcattcacttacacacacagatatgaatacataattaaaacactgcagaagttaaccatgctgttcttcctatacaatggggatcagacacacaaagatagctacttttgatttaaaataggtagtgctcaagcccacatgcttaaaggcatttaaggaagttaagcttctttaggraagggagtttaaataacaccaaggtgcacactgacatggtttagctgctacagacatgaaaaaaacattttttggaaagtggtatttcacatagagccattctggagtgatattaataggaagaaaattgttaaaatcacacaaagaactgggccttagatcccatgctgaggagtatgaggtgcctagataaacagatgttattctttttcttcctcaggcaacactttggaatggtgaaatactactcttaataaactctaattagtttagagtctttggtaaagcatttcatacttc

SEQ ID NO: 20944 - DNA, 468 bp, Chicken  19866894231901_1
  misc_feature (1)..(75): n is any nucleotide
nnnnnnnnnnnnnnnnnnnnnnnnnnnnnnnnnnnnnnnnnnnnnnnnnnnnnnnnnnnnnnnnnnnnnnnnnnnactgcaacaacatgaatagctcaccacaagctaaagccagaatacttcctcaagtctggagagattgagaaaacagagcacactatgttaacttcattcatttaagtagatgttaactctgatgctaatgaagacactaaaactcagcagtaacatttagagttttactactaagcaaaataaatacaaacttgaagacaatctaaggttatggaaaactgcttygcttatttcagccacaggaacctctctcctcttacctgtgtttactggctaaatgtgctgttagccactacaaggaactggggaaaacaccttaaacacctttatcaacaacataaacagtggatctgagtgaaccctcaacaagtttgaagatgacaccaagctgag

SEQ ID NO: 20945 - DNA, 546 bp, Chicken  19866894231906_1
atgtgaagaggcatacctcaggactcgcagtagctttatttgtttctcactgaaataaacagtggttgggatttttgattgataggaagggcattcttgctatcctctcgtaactccccaaaagctcaagagattttgcagaatgttctggcatggagtaactccataaaaaacactcattgccccaaatggagtattttggaaatatgcatgtgtgctgtgcgtggggaaccacggggctgggatggaagctgctctgtaatcttagctctcgtggcaaaagctgctcccacagggccstgtgatgtgggcgcatgcaagctgagttacaagcctccatggatgcagcttattgttacaaaaaatctcgtggcaaaagttggttaactcttcctgtaacgtttgacagtggctttgctttcaagagttttcagcccacctactttacaaaataaagctaagtagtcagcagagcacaatagaaatcgaccataccctaagatgcactaagtaagtccagcactgccagatgggtgaggacaggga

SEQ ID NO: 20946 - DNA, 600 bp, Chicken  19866894231907_1
tcttgcccgactactctgatgaggtgagacctcatctggagtactgtgtccagatgtggggtcctcagtacaagagagacatggacctgttggagcacatccagaggagggccacaaaaatgatccaagggatggagcacctctcctaagaggatggggctgtttatcctggagaagactccagagaccttctagagtggcctccagtatccaaaggagggggagaaaagaaagggacagactccttagtggtgtctgttgtggtaaggcaaggggaaatggtttcaaactgaaagagarcagatttagtttagatataaggaaaaagtctgtgggtttttcttttgtttgcttgtttttacattgagggtagtgagatggtggaacaggttgcccagagagatggtagatgtcccccatccctgaagacagtccaggtcagccagtacagggctctgagcacctgatggagctgtaggtgcccctgtccattgcaggtgatttggactagacggcctttgattctaaattactttttgtttagggaaaaagtcttcagagacaaaagaaaaatcagtatttaagaactgtcagagcaat

SEQ ID NO: 20947 - DNA, 600 bp, Chicken  19866894231912_1
attgctgccagtgactgaagtggcacaggcaaaaatcacagccagatgagtgggactgtgccagatgggatctgtatcactttgaccccgttcttgatggatgcaaatactgtaatagattcactgagtttgttgaagcaaatatttaggaatagagttgctttaagctccctgaggtgctgctaaatcttgtattgcagaagtttgctgtttaccagaaacctgaacgactttaaggctcccaggagttctctcacctcttctgcaatgaagaccttttcaggcagagatgcccagtgratttctgccaagatcaactttcctacctacactacatgcagggaggagagagcacctggagtgctgatgctccagtctctggctgaggtatgggtagggctctgctgcttcatctctgcatgtgtaggagagcaaggaacaggaacagctgaggctcctgtacaagagccctaattgcccctaggtaaatattatgttcatggggggataagccctcgtttccccgcaggcagtaccccctttccacatatcccacctcctgcacatggagcatgtctgaggtcttgggtccaggctgtt

SEQ ID NO: 20948 - DNA, 507 bp, Chicken  19866894231912_2
aacaggaacagctgaggctcctgtacaagagccctaattgcccctaggtaaatattatgttcatggggggataagccctcgtttccccgcaggcagtaccccctttccacatatcccacctcctgcacatggagcatgtctgaggtcttgggtccaggctgttgctgtaacacaaggagacgccatgtgtgctcacatttgggtgagtatggccacatgggtagcatcctgggctcaggagagctcaaagagttggtttatttttccttctacttatgtgaagttcatttttggattctrtcctgcagcgctggtgcagttgctaagagctggtgtcttcagttgtctacccttgtggtcccagaatctttgcagccttcagcagcaaacagaggttatgtgttaaaggggatgagaagagctgctctaactaactaagctaactcttgtggcttccacaactctgtgatgacagtgcagtgtgctggtacagaaggggggatttct

SEQ ID NO: 20949 - DNA, 600 bp, Chicken  19866894231913_1
aaagtgtgatgtgaaaaaagtcttttcagccaatccagcttggcatcatactgaacatcattatcgagtatgccgtatacgacaagatttgcatttgaaaagaggaaagttaatacatgagacaaaggccaaatatttaaaatcctactcagccagggtgagactccacctattatgatagctggtttcagagatgacagtttaagaaaaacttactaaaaacaaaggaattatgcaatatttatttcacgctaacacctccctttctattagttttcagtttaggtatgtgctgagctrgagtttgcatgtagatctggatacacagaaggcactgatgagcctcttagtaatggatttgtcattagtaagtcatctgtacttgtggtttctgtgtgttccacagttcaactatgctttaggtatgtaaaaaaatattcacccatatcattaacgcagaaacccactgtccacagtaaaatggacataaaagttgttgttgaaacagagttgtgaacttaggtttcaatttttgctaacattttcctcctttttgtgatcaagctaactgttttagaatgctaaaaatgggagaggtgg

SEQ ID NO: 20950 - DNA, 600 bp, Chicken  19866894231916_1
atgaatatggatgtaattaagaaaagctgatttatgcggaactgtaaaaccagggacatagagtgaaaaatttcctgtaaatgtcaattcagagttttgtggtggccaaaaacaaggcaagcagagtattgcaatgttattaagaaaggaactgaaacctaaaatgctgctgtataaatccccagtacacatttaagacattgcatggagttctgggcacttgacccctaacaacaatagaattgtaatctgttactaatagtttgagaataggtggtgggttctgtctgaggaacttaraaaaaaaaaaaacaagcaggactaagtacaatgtggagaaaaagcagtgtctataaaataaagcacaagaaaacagggaaacagtggggaacatctgatgaacttattaggtgataagtttaaaatagagtacttcacaaaatacttgtacaaattgctgaacttgctgccacaggatgctgcagcggactacaaagactaaaaagcaaccagactaatccacaaaccatgaccatgtctagaactttgtgatctctggccctagaagaccccatattgctgactgctggtatgtttggg

SEQ ID NO: 20951 - DNA, 599 bp, Chicken  19866894231918_1
  misc_feature (1)..(51): n is any nucleotide
nnnnnnnnnnnnnnnnnnnnnnnnnnnnnnnnnnnnnnnnnnnnnnnnnnncttgtcatgtcttggggcactcctcgtgctggcgcttgtttttcattatattttgcctctgaagatgtgttgacttgctaatttttttcttccctcctcttgctctttttattttattacagactttaggctcttcaagaaacgtcccccagcttttagggagtgcagagctttttccctgagtacagatttccaaccacagggctgactgatggtgattcccttattaaattgcacttagaggcagcractgtcaggcaggaatggagagagcttctccgataagttggagctattcattattaaattatcttcattcactcaaacagctcattttcattgaattagatgaaaagtgctcaaagccagctgctgcagcggctcggaggctgccaggagcactgtgcacatgtcaccactggctttagtgggggatggccgtgctctggmcatccttcagctggtgtgactgtcttggatgtgctgggcattgcttcagccaatggcccatccctgggaaccctgacagagcagctctgggagatgga

SEQ ID NO: 20952 - DNA, 600 bp, Chicken  19866894231918_2
agcttttagggagtgcagagctttttccctgagtacagatttccaaccacagggctgactgatggtgattcccttattaaattgcacttagaggcagcractgtcaggcaggaatggagagagcttctccgataagttggagctattcattattaaattatcttcattcactcaaacagctcattttcattgaattagatgaaaagtgctcaaagccagctgctgcagcggctcggaggctgccaggagcactgtgcacatgtcaccactggctttagtgggggatggccgtgctctggmcatccttcagctggtgtgactgtcttggatgtgctgggcattgcttcagccaatggcccatccctgggaaccctgacagagcagctctgggagatggagctggtgggaacccccccagggctgggctctgctggctggggtgaccaagaagtgggtgtgagggctggtgtgaactctggggagttctgtgtctccaaggttgaaygggtctcccartggggcttctttagtgtgaaggtctctgctttggaatctaggtgcacggagaaggagggtttttgtcacctctgtcccaacaaa

SEQ ID NO: 20953 - DNA, 467 bp, Chicken  19866894231918_3
gtgctcaaagccagctgctgcagcggctcggaggctgccaggagcactgtgcacatgtcaccactggctttagtgggggatggccgtgctctggmcatccttcagctggtgtgactgtcttggatgtgctgggcattgcttcagccaatggcccatccctgggaaccctgacagagcagctctgggagatggagctggtgggaacccccccagggctgggctctgctggctggggtgaccaagaagtgggtgtgagggctggtgtgaactctggggagttctgtgtctccaaggttgaaygggtctcccartggggcttctttagtgtgaaggtctctgctttggaatctaggtgcacggagaaggagggtttttgtcacctctgtcccaacaaagcaccaacttgcaccttcaccccatcctccccttctcctgctccatccctctcttccttctgtgcaaggtag

SEQ ID NO: 20954 - DNA, 456 bp, Chicken  19866894231918_4
cagctgctgcagcggctcggaggctgccaggagcactgtgcacatgtcaccactggctttagtgggggatggccgtgctctggmcatccttcagctggtgtgactgtcttggatgtgctgggcattgcttcagccaatggcccatccctgggaaccctgacagagcagctctgggagatggagctggtgggaacccccccagggctgggctctgctggctggggtgaccaagaagtgggtgtgagggctggtgtgaactctggggagttctgtgtctccaaggttgaaygggtctcccartggggcttctttagtgtgaaggtctctgctttggaatctaggtgcacggagaaggagggtttttgtcacctctgtcccaacaaagcaccaacttgcaccttcaccccatcctccccttctcctgctccatccctctcttccttctgtgcaaggtag

SEQ ID NO: 20955 - DNA, 600 bp, Chicken  19866894231925_1
ttgacagcactaaagaatttttctgtattccacactgtcatcttcccttcctgatccattcagagcctcttgtacatatttaatcactcctagccaggtctggctaatgaaaggcagggccttgccctgacctgaccttgctatttctagtttggctcagcacatcctctgctagctggtttaaaaaaaaaaaaaaaagatgtttctctcctctcttggacttaaaggccctgttattggcagggagtatggtcaaggacactgctgaaaacagaatgaatgattgtgagcgctgatttrcagaactcctgcaagtcctaaaagaacaacaacttaagcacaaagttttttttccctttttctmtttggctggcaaagactggagatcactgttcatctatggagaatggcttatagctagaaaagtcagtaagaaaaatggaccgctcaaatggtttgcagtactctttcataaagcactggtattcattctatggttttgggcacttactgcaactgaagatattgttcttggttttccccttctgccctttttatttgccagtattgcaatttaaaatctattttccctttcwgagt

SEQ ID NO: 20956 - DNA, 600 bp, Chicken  19866894231925_2
gcctcttgtacatatttaatcactcctagccaggtctggctaatgaaaggcagggccttgccctgacctgaccttgctatttctagtttggctcagcacatcctctgctagctggtttaaaaaaaaaaaaaaaagatgtttctctcctctcttggacttaaaggccctgttattggcagggagtatggtcaaggacactgctgaaaacagaatgaatgattgtgagcgctgatttrcagaactcctgcaagtcctaaaagaacaacaacttaagcacaaagttttttttccctttttctmtttggctggcaaagactggagatcactgttcatctatggagaatggcttatagctagaaaagtcagtaagaaaaatggaccgctcaaatggtttgcagtactctttcataaagcactggtattcattctatggttttgggcacttactgcaactgaagatattgttcttggttttccccttctgccctttttatttgccagtattgcaatttaaaatctattttccctttcwgagtgctcataaagaagtgtgatcccatttacgatcacgtaggaaacactgaatgttgggctagccct

SEQ ID NO: 20957 - DNA, 500 bp, Chicken  19866894231925_3
tttrcagaactcctgcaagtcctaaaagaacaacaacttaagcacaaagttttttttccctttttctmtttggctggcaaagactggagatcactgttcatctatggagaatggcttatagctagaaaagtcagtaagaaaaatggaccgctcaaatggtttgcagtactctttcataaagcactggtattcattctatggttttgggcacttactgcaactgaagatattgttcttggttttccccttctgccctttttatttgccagtattgcaatttaaaatctattttccctttcwgagtgctcataaagaagtgtgatcccatttacgatcacgtaggaaacactgaatgttgggctagcccttttgtcacgatgttggttgtagtttatcaacatgccaatcaaaagtcagaaatgtttccagcgtacaacaggacaacattcacatggtgattcatatggtctctttaaactgagtttgttttcacacggttt

SEQ ID NO: 20958 - DNA, 600 bp, Chicken  19866894231930_1
agccctttatgtactgctgtcgcctttcttcacaagaccacttaagcaacaacgtgataatccagtgtagaagaaccaaatttatcacacttcaccaaagcctgctatagtaacgtgtggcatgacaaggcggcaggctcaagtgcagttcttcctgagtgatctcttaatacttccactgtgctacctcttgtgcgggttttgtcaatgactttcagacgtggcctctgtcccttccccagacacatgcacaggcacaaatggcagcacagcaaagcatcggggaattggaagtcagcrcagggctctctgctagttcatacattgttttcaacaagactgcagaggtgaacctgaaggtagcatttggctttgggatcagaatttcggttatttatttatttgcaatgatagtgatggaagaccccgaagactgctgctcattcccctttcctacgctctgctggctccaggcacagcagacagccagcagacacactttgccctctgcagcaagcacaagtaacactgacgtgcacaaatctttttagaatgaaagtagagtttgaaggcagcctttgaaatacacatcatacacac

SEQ ID NO: 20959 - DNA, 600 bp, Chicken  19866894231930_2
acaagactgcagaggtgaacctgaaggtagcatttggctttgggatcagaatttcggttatttatttatttgcaatgatagtgatggaagaccccgaagactgctgctcattcccctttcctacgctctgctggctccaggcacagcagacagccagcagacacactttgccctctgcagcaagcacaagtaacactgacgtgcacaaatctttttagaatgaaagtagagtttgaaggcagcctttgaaatacacatcatacacactgcgtgtcccatatgacacaatattgagccctygttgatttcaaaagttactgcgatttacagctatgcagctccacatgcgcatccccttcaagtccactacacacattatcaccgaataaacttacagtgcagtagcttcaaatcatagcgcctttgtgaagagctgttacggctacatccttaataacaaacatcatggctggctataattatctgtacagatcaaggagaacggtggcagtgatgaactaggagagatggcaaacaaaaatcacagcagcagtaaatatcccatactgttgttgcacagaacggctcaacaaaaggctc

SEQ ID NO: 20960 - DNA, 600 bp, Chicken  19866894231937_1
tttattaattgcactgctgcttatgctgaagctacatggcatcattcacactgtgatgcgtatgtacgcgtaagttatgttttatacataaaaagacgtaattcattctatgggatctgaagagctaatatcatattgtcttagactggtctttatctttcatcacatggaacagagttaagttgtggttttgcattatgcataagcagtgaatacaattagactgaaaagcaagctgatcttctctgatctcaagcggaaagagtgaactctgatctttacaggtgacagctttgtgcrttacttcaatttattagttagcttccttgaatccaccacatctgcaaaagaaaactcaaaacacaaagttgtggccaatctcgcacaatccactaatgctgtaatgaacaagagcatcaaaaaaaagggagcaaagcagttacattactttgtttggcataaagaaactacaagtagttcttccttttgcatttcaagaacgatgctaaagaagtggaagaaaaataaaatgcctgcaaaaagaatgtaggragtaagggaggaaacaaacctgatctttcatctagcaggctagaaatg

SEQ ID NO: 20961 - DNA, 513 bp, Chicken  19866894231937_2
caagcggaaagagtgaactctgatctttacaggtgacagctttgtgcrttacttcaatttattagttagcttccttgaatccaccacatctgcaaaagaaaactcaaaacacaaagttgtggccaatctcgcacaatccactaatgctgtaatgaacaagagcatcaaaaaaaagggagcaaagcagttacattactttgtttggcataaagaaactacaagtagttcttccttttgcatttcaagaacgatgctaaagaagtggaagaaaaataaaatgcctgcaaaaagaatgtaggragtaagggaggaaacaaacctgatctttcatctagcaggctagaaatgaggctgcttttgctctgggagagacagaatcctttaaggattgcccactgccaaattcccagaaatattttcattcaaacgggacacttcccaaataaatcctgtaattcaactaaggatatttgttttcaagcatgaatttaggaaattttatggtcaatgcag

SEQ ID NO: 20962 - DNA, 600 bp, Chicken  19866894231940_1
acacagccctcacatgagacagaaggcagcaacaggagggaaggctaagtgagataatactgccctctacattactacataatgggagtgaaaggagatggagccaagctcttgatggtgcacagtaaacaaggaagaagccctacagacaaaagttctaataatagaatttttaatttttcacattgaaggttaaagatggtcaaaggaagagatttcccagagaaattctggggtccccatccctgaagactgactaatcttctaccttctctaatgctgaagttggcccatattctrgagaatatttagtcagaagatatccagaggttccttgcaaaacaaattattctgaatttatgattttagcagggtcattggtaagtttctgctattgactcagatgtgtgtttcagccttattcttgctttgtctgaaacctattccacagccttaccccacacatcatggcagctaatcctctgtgactccagacttctacattcctacagaactatgttcacgaaagccatctaagcatgcatagtccttgatttatcattgttgagctgacatgctgtatgtacagattaaaattga

SEQ ID NO: 20963 - DNA, 600 bp, Chicken  19866894231944_1
actccctgttacatacagaaatatctgtcaacccattcagaatgctaatttctgaaaatttaacatcagtttaacagaaccaacttactgcgttagtacagtctctcggagaaaataaaccctgtcatttaaaccatttagtaataaataacagctttgtttcaattgtctaacattatgcaatctggccatggtgcagcttattcaggtctcacttttaaaaactgtcatttccataaatttccatattgtaattttttctcttgttcaaaaacaagacactttcaaccatctaccacrgtacctgtgaggtatttaagcactcaaaggatgtagccgttcaagtgcaaagcatctcaacctcacaggcttcaacacctggaaaagcagatttatttaactttcattgcctatcatgtatataatttttccatacatcatatgttatttatcaaggagacagacgccctgttttcacagtttattccttagtatgcaaatatttggaatcattctatttatgaataatatggtatgtccatataattacagtttttcaaatattttttttctcaactgagaaaatttgttttctgaaaa

SEQ ID NO: 20964 - DNA, 565 bp, Chicken  19866894231949_1
aggatggttaggctgtgcatcatccactgggaagcttgaaattccacctagtgattttcatgccattctgtaggtttgacagctccaagaggcatcaactcctaatgactctaaatttgggatttattcttgcttgtcagcttattcctaacatcttggtcttgagcaggagggtgtagataactgacatagggctcagataggaaaaatctgaaaccctgttctaccacaaaagtgccaaagaccatgccagtcacttcataatttctcagtttgaatgcctgcctctcacattattgytgctctgtttctttttgaagtttttatttgtggtcattcccattcaaaatgtgtttaaaagccccataaatcaacagtcccagcaggttaagctgttcaaaggggcagaatgcttctggccacagcccacatacatgggctgcacaacagacagcatggcgttatgtttgcacaattacctgtgtcttgtgttacaagggggaacggtgattgatcctcgtgtgacttgcaatttatcaaagattagatatgatttctcctgtat

SEQ ID NO: 20965 - DNA, 600 bp, Chicken  19866894231950_1
ttatgctcacccatgccagtggggtgtaagcagccctaccatatgggaagttgtccagctccctccctgcttatcagaggtttagtttcgacctttgattgctggtgcatgacagggaaaacattctttctccctcataatgcaacttctgtggagtggagaactgaaggcacaaacccttccttgtggcactaaaagcaggaatccgagtgtcttaggtaatgcgtccaaaaacaaaaccaaccaccaaacctccccacaaaaaaacacacctgaaacagactttccactaacaacaamaaaaraaatcactgtattgtgacagttggtgtaaacactcatctcactttttcagtcaccccaaagctggcagccacccaatccaccggtgcatcatcacggatgggaatgtcagtcctgcagacaggtgggatgcgagggcagcttgcamcacactaagctcaaatcctgctctgggtgaggactcagacaatcatgtttttcttcatgacaagcgtctccacttccttcatgaaccggaggcacagctcctcctgccatggcaaggccacgcactgcacggccaccggcatcccctca

SEQ ID NO: 20966 - DNA, 600 bp, Chicken  19866894231950_2
ctcacccatgccagtggggtgtaagcagccctaccatatgggaagttgtccagctccctccctgcttatcagaggtttagtttcgacctttgattgctggtgcatgacagggaaaacattctttctccctcataatgcaacttctgtggagtggagaactgaaggcacaaacccttccttgtggcactaaaagcaggaatccgagtgtcttaggtaatgcgtccaaaaacaaaaccaaccaccaaacctccccacaaaaaaacacacctgaaacagactttccactaacaacaamaaaaraaatcactgtattgtgacagttggtgtaaacactcatctcactttttcagtcaccccaaagctggcagccacccaatccaccggtgcatcatcacggatgggaatgtcagtcctgcagacaggtgggatgcgagggcagcttgcamcacactaagctcaaatcctgctctgggtgaggactcagacaatcatgtttttcttcatgacaagcgtctccacttccttcatgaaccggaggcacagctcctcctgccatggcaaggccacgcactgcacggccaccggcatcccctcagcact

SEQ ID NO: 20967 - DNA, 600 bp, Chicken  19866894231950_3
tggagtggagaactgaaggcacaaacccttccttgtggcactaaaagcaggaatccgagtgtcttaggtaatgcgtccaaaaacaaaaccaaccaccaaacctccccacaaaaaaacacacctgaaacagactttccactaacaacaamaaaaraaatcactgtattgtgacagttggtgtaaacactcatctcactttttcagtcaccccaaagctggcagccacccaatccaccggtgcatcatcacggatgggaatgtcagtcctgcagacaggtgggatgcgagggcagcttgcamcacactaagctcaaatcctgctctgggtgaggactcagacaatcatgtttttcttcatgacaagcgtctccacttccttcatgaaccggaggcacagctcctcctgccatggcaaggccacgcactgcacggccaccggcatcccctcagcactgctaaaagcctatggcaaaaagaaaagggagagggtaggggatatggcacagatgggatggggacacctgtaaccccccagggggcctggggcaactcaccgttgccagggtccgatcccaccagtcttggaaatagccctggtag

SEQ ID NO: 20968 - DNA, 600 bp, Chicken  19866894231956_1
gcataaaccaggaaaaagtaatctagttctagcttgctaatgaaggagattaaagctttattgcactgagatttggtgaggcttttacaagtttactgcaaggcagcacagctaggaggacaaggaggagctttctaaaccagaactgtaagtcctacacctgaggaattatggttcttgtcctctgaagacaggctttgatgaacactgcctggcttatatacatatccatgaagataataacaactgtttttcttgacggaggacaaaaagttcctttggttttcctgaatggcattmtatcataaattaatgtcattccacatatccaataagatttctgattttccttttaaatctctggttcttacgctgccctcttacattctgtcagccactgtcagaggaagaacaacagataacactgacctatagtctgagccaacgtggtcaaccttttgtactgaggagctccaagattaaaagccacactccattttttttctttttaaacaagtatcttatatttcaggtgtattttcacctagtgaatctgaaactgtggcagaaaaatgtctccataagacatcagtaagtcag

SEQ ID NO: 20969 - DNA, 600 bp, Chicken  19866894231960_1
tactatgaggctactaacatcttaaacaagtatttaaaacagttgcattggtacctcaaagtcgttcaccatcaatgaatttgctcctgtgagccccagaatggatatctctagcctcactttcctgagtgtaaactaagcacaaagattaaatgactttctcagagttgcacaggaagcttgtggcccagcttgggagctgaacatagcaacaaagccacaagccttttgcttcctctctaaaccatttctaaccatcagcataaagctacaacagttctgttgagagagagatgtttygttaccgagatgctcttgagatgcacaaagtagcaggaccatctcaactgtgtcatatacaggtatttattacaaagtgttctaaaaacaaagtgaaaatcaaacctacagccaagaagcccggggtgtaataagatgaactctgagctataattgcaattgtaattcagaggttgagaggtgaaatgcacaactcgagattactggaacaacctgtctctagtgcagactggtgcacttacatgcattatgtgccaccaaaagatcttagtaagcaaaaaacaactgccagcataattt

SEQ ID NO: 20970 - DNA, 600 bp, Chicken  19866894231960_2
agataacaagcatttgcagggcaggaggggaaggaacaaactatattcacattgcctgtacatctaaccaacagaaaacatttaccaatacacaatactaatggctttctttcacatagttgagacttctcacggattctgaacaatcccaaatgagtttattctagagtaaatgaactctagaataaatgaaggcattgcagcacaatgaggaaaggataaaggcatgattttatactcatccagagggcaagatggagtccatctgagtttagttcactcatactgcaaatgtggtgraaataaaaaaaagcaaaagatttgttaatttaagcaagtgataaatttaataaagcagcatagtttacaaattccttaggttaaagaaaaaaatatctgaaacattacctacaaaatacatcacgactcacagtaattattgctttacacacacggaacactatttccatatcatacaaattatagatgttttagtgggcatttctagatcattttgatttgtatgggaaaaatggttttgcttaataattgaaatgctaaccatgccttatttaaccaacacaaatacagtaatagatt

SEQ ID NO: 20971 - DNA, 600 bp, Chicken  19866894231961_1
acacaatatctccctactctgaattacacatcagttaatagaaagaacaaaattttccaacaatccagccaaaacctggcatctgacagaagaacttcatcaatgtgtcctattccttgggctcctccctctcaccattacatcctgaagaaatatagtgcaataatggacatgaagactagctcttaaattaagaaaatgacagcaggggaatgatgaatggtgaggacctcttttcctttaatggtggtgggctttcattagctttcttcatcgcatttgcaccataagaagataaaytaaggaaattcagtgacagaggagggaagtttagctttgtgtttcagatcagatccaagcatttgcaaaatcaaagtctctctgggacttctgtgttagccagtatttcagaatggttggggcagctgcaaaactcacagccaaatttcagacagaaagcacatctccagagtcctggggacgtgcactgaatgttgactttcttctcttacactaagtctgctcagcttcatatctacctggactgcttactcctccttgcaccagtttatttccttctgatctattccgacacagacg

SEQ ID NO: 20972 - DNA, 600 bp, Chicken  19866894231962_1
gaaagtgactgcaacctttaccttctctcacattcctgccatccatggtgcaaagtttagcatcttcaaagagtaaaagttcagacagagggaacataaatgtgtctcaaacagctcttgaagtagtaggttattagtttgttgacatgacactggctttggctttgtttactaatggcattctacaaaaataaattaggcctttaatttagatgctaactttatgccttcagtatgcccttcgcatatcttcatcaaagacattcaagtacctgttggtttggggttttttacagatcrtataattagatagtaataataacaatatcacctgattgtccttcttttggttaatgcatatttctctcatcccggtgattagtataaagtatgttgattgttgcacaagaaaagaactaagaactttaatactacaatggagttttattcctacttaggtgtgaaactatttgttcagacacaggtttctgaaactggagttcagtgttgtcccagtcaaactaaaactgccataacttttgagcagtctctgaaagttgctggctttttttcttttgagagcaaacgtggaacactgct

SEQ ID NO: 20973 - DNA, 600 bp, Chicken  19866894231964_1
tgcccttcataactgctgcatgttatctaactgctcttccaaagccagaaaggggaattgccggcccttgtgtaacactgcagcaaagcccaggacagcctgggagagacagcctgctgaagacagcagttcttctgttggctttaatggaacctggcggagctccgtgggtcatgacaggtaactctcactaccaggcaggttccccaccttccttacacattcttgtaaagagccccaggattcgcccacagaccttcaagaggtggcaagtaccaaaaccaaacacgggcatcatcrcgtgcccattgtgactgagggagcctgcagtcagagcgatgccacgttaaccatgagtgcttcttgtggcagcatatgagaaaccaaaaaaaaaagtgcattttttaataaaactggtgaaaacattaccaaaaactatacagatttggaggccagaaaggagcacggcagtcatgtgctcraaataagccatacaaccttatttactaatttctgtcttgtccttccactatgtgtttgctccaaagacctgacctggaagagcagtccatctccatgagaaaggacgtgtcaagagga

SEQ ID NO: 20974 - DNA, 543 bp, Chicken  19866894231964_2
aactctcactaccaggcaggttccccaccttccttacacattcttgtaaagagccccaggattcgcccacagaccttcaagaggtggcaagtaccaaaaccaaacacgggcatcatcrcgtgcccattgtgactgagggagcctgcagtcagagcgatgccacgttaaccatgagtgcttcttgtggcagcatatgagaaaccaaaaaaaaaagtgcattttttaataaaactggtgaaaacattaccaaaaactatacagatttggaggccagaaaggagcacggcagtcatgtgctcraaataagccatacaaccttatttactaatttctgtcttgtccttccactatgtgtttgctccaaagacctgacctggaagagcagtccatctccatgagaaaggacgtgtcaagaggaagccgtcataaccctttgttttttccaaaggttgatttacccttttagtaagaagaaggaaaaaaaaaaaaagataaaatgtgccctattcctcacccaaatgcattttcagctaaaggtctctg

SEQ ID NO: 20975 - DNA, 599 bp, Chicken  19866894231988_1
  misc_feature (1)..(139): n is any nucleotide
nnnnnnnnnnnnnnnnnnnnnnnnnnnnnnnnnnnnnnnnnnnnnnnnnnnnnnnnnnnnnnnnnnnnnnnnnnnnnnnnnnnnnnnnnnnnnnnnnnnnnnnnnnnnnnnnnnnnnnnnnnnnnnnnnnnnnnnnnnntttctgtgacaaaacacgtgaactataaaccctttcatcggcgttgatgttacatgcatgtaaccaccatccaccctgtccgtaactcaagtgctgagggtgcattaacacttcacaagagttctcctgacagtttatttaagcctggcaggaagttagcragcaggtgtgccatccttgtcaataaagcatttgccatgcttattctgtgagcctctgcgataggagcacacactcacagtttgtcaggctgcctgggttatgtgtcagatgcctcttctctgagacaatatgccacttcttcatggatcctcaggttggttttttttttttccttstccgaatcctgtaattatctgttcaggagtcagaagctctccagcttctgctgagcccaagccgttctgtaagctgctgcagggcgaaaatgggagcagaagtgagtggatgggaagttcaa

SEQ ID NO: 20976 - DNA, 600 bp, Chicken  19866894231988_2
cggcgttgatgttacatgcatgtaaccaccatccaccctgtccgtaactcaagtgctgagggtgcattaacacttcacaagagttctcctgacagtttatttaagcctggcaggaagttagcragcaggtgtgccatccttgtcaataaagcatttgccatgcttattctgtgagcctctgcgataggagcacacactcacagtttgtcaggctgcctgggttatgtgtcagatgcctcttctctgagacaatatgccacttcttcatggatcctcaggttggttttttttttttccttstccgaatcctgtaattatctgttcaggagtcagaagctctccagcttctgctgagcccaagccgttctgtaagctgctgcagggcgaaaatgggagcagaagtgagtggatgggaagttcaagtcacttaaatgcagaaagggaaggtgcttagacaggattcagatgtatgcactggtcttcaaaatgaaggtgcttcccctgtatcccctcgttccccacagcctctgcttcccagcacccgtggaagaagctaagttggctttgctttcaggtactttgggtagagattgctgcaaa

SEQ ID NO: 20977 - DNA, 504 bp, Chicken  19866894231997_1
ggccattgggtttctcctggcaccattacaaaaggtattcactggctttactctgcacttcctcctgctggaggactcacttggagtgctcatgaatttcagtaagagataaatagaatttttgcaaaactaggttctttctccaagattatgaccccactacacagggtcaaagggaaggtgggtgccctacaccaaacattatagcaccagctttaaggtaccagaaatgagtggggtttgcagctgcaggtcaggtacctgctgcaccacagctggggaggctgtagaacaaccaaygaggtacacccaaccacagtaacgccatatcactggcagctgcctggcctttccgcggcactttggctctgcttccatgatgtcttaagccttaacattcaatgtatgctttgtttgcttcaaaactgagtacgtgttttactcttctcaacagtcagtccttgcatccttggctcttggcaacttgaagggaatgctcatgca

SEQ ID NO: 20978 - DNA, 600 bp, Chicken  19866894232010_1
gctcaggtggtcaggtccccgtgggcaggcactgatactggggttgggagaatgcaggctgtgggctgtcctgtctctgggctcagggccaccccgcaccccaaatgctcaccctgcagtgtttccttcctcagcacagtgctgcaaagagcccaaggggctgacgtggtgctcaacccctagggctgtgcttgtgggctctgcatgctgctgggaacagagcgacatgccagcacctcgccagccccgctgcacggcaccggggaccccagctgatggaggccgtctggtgcaagccgygcgtctgtgctgtttggggaagctgaacgtggctytgagagcctcagcagcgacatttctggccacggaggcaggaagacacctgcagcctgcctggaggcgggggacgatgcttcctggcagtcctccacccgcacaacctatggtgttgacaagccccactgagcgctgggcgtgagccagcgcctggctgccgaccatctccctcctccttggctccagcagcacaaattgccagtgagaaatggtgaatgtgcgcacactgtatgtccccgtcctctggggacaccctgtcacctt

SEQ ID NO: 20979 - DNA, 600 bp, Chicken  19866894232010_2
tactggggttgggagaatgcaggctgtgggctgtcctgtctctgggctcagggccaccccgcaccccaaatgctcaccctgcagtgtttccttcctcagcacagtgctgcaaagagcccaaggggctgacgtggtgctcaacccctagggctgtgcttgtgggctctgcatgctgctgggaacagagcgacatgccagcacctcgccagccccgctgcacggcaccggggaccccagctgatggaggccgtctggtgcaagccgygcgtctgtgctgtttggggaagctgaacgtggctytgagagcctcagcagcgacatttctggccacggaggcaggaagacacctgcagcctgcctggaggcgggggacgatgcttcctggcagtcctccacccgcacaacctatggtgttgacaagccccactgagcgctgggcgtgagccagcgcctggctgccgaccatctccctcctccttggctccagcagcacaaattgccagtgagaaatggtgaatgtgcgcacactgtatgtccccgtcctctggggacaccctgtcaccttgtcaccacggtgcagccacggcttgctgctctgct

SEQ ID NO: 20980 - DNA, 600 bp, Chicken  19866894232013_1
tgaaacataaaaaagggaaggagcagagagaagcaatgaaaaaagaggaacaaagtccttgagtcactggtttctgatctctctgggcccacatccctatcctacacacctacttggcccaagatcttcactcagattacctcacacctgtttggagatccttgaagaaattagcgctccagttctacctcaaagacagccctaagccagaggagttcctcaaaactccacaaaaagttcaatgttctagcacatatatctaatttcatatttctgttcaattgatataggaaaacaacrgcacacaaacaaacaaacaaaaaaaaaacagaagtgaaagacactgtcaggctccgttgtgggttaccatcctcccctctgctccactgtatcttgactgtctatcccacacgaccttgccaccagcascactcaacatctgagcacattgggtgatgccagctctctcccataaaaccccagacaggtagagagactcttctttcacgtcacacaactgacatggaacagcacagagacaatccaggtctgctcaagtacagcagagtacctgttactggtgtccagcttccacagttc

SEQ ID NO: 20981 - DNA, 600 bp, Chicken  19866894232013_2
actcagattacctcacacctgtttggagatccttgaagaaattagcgctccagttctacctcaaagacagccctaagccagaggagttcctcaaaactccacaaaaagttcaatgttctagcacatatatctaatttcatatttctgttcaattgatataggaaaacaacrgcacacaaacaaacaaacaaaaaaaaaacagaagtgaaagacactgtcaggctccgttgtgggttaccatcctcccctctgctccactgtatcttgactgtctatcccacacgaccttgccaccagcascactcaacatctgagcacattgggtgatgccagctctctcccataaaaccccagacaggtagagagactcttctttcacgtcacacaactgacatggaacagcacagagacaatccaggtctgctcaagtacagcagagtacctgttactggtgtccagcttccacagttctgcagacacatgaattgtttctgtggaagatgactgaagatgccaaggcaaccagagtaaycttcaaatacagccagatgccccaagagtagaaatgtttctgtgtatctataattcacctgcactgat

SEQ ID NO: 20982 - DNA, 534 bp, Chicken  19866894232013_3
ggttaccatcctcccctctgctccactgtatcttgactgtctatcccacacgaccttgccaccagcascactcaacatctgagcacattgggtgatgccagctctctcccataaaaccccagacaggtagagagactcttctttcacgtcacacaactgacatggaacagcacagagacaatccaggtctgctcaagtacagcagagtacctgttactggtgtccagcttccacagttctgcagacacatgaattgtttctgtggaagatgactgaagatgccaaggcaaccagagtaaycttcaaatacagccagatgccccaagagtagaaatgtttctgtgtatctataattcacctgcactgatagctcaagacttctgctcctgcccatctcctctccctccccctcctgacctgccctcaccttgatgtgtttgtaggggggaggtttcttgtcattcttcttgtcttcctgaagctgtctcagttccttctgtgccttgagttcttcaaatcttactgcagcttcgt

SEQ ID NO: 20983 - DNA, 599 bp, Chicken  19866894232023_1
  misc_feature (1)..(33): n is any nucleotide
nnnnnnnnnnnnnnnnnnnnnnnnnnnnnnnnncatccagttccattaacacagacacacgagatattaattttcaatcaatatattttagcaaactcattagccaacaatcaactagaacacattgcctcatacagacctcctgcagttagtgcagctgttgcaaagcattgctggaagcacacattttagttactcactgcagaacagtcattctgtggcttccaaatacatcccacagtgtgaatggtctcatccctactcacactaagtctgttaacccttcaagaaacagaacaytgcacagagctgtaatagtttcatacttgctgtacctactaaatacaacattaatgatgkgaggcatgaacacacacttgtctaggtaagacttgcatctccatccagaaattaagagcttaaaacttgtctcccatgattcactgagttttggaaactgttactattcttactacatactaggaggggcaaggaaaggcctagtaaaataatggattaagaatacttgttttgtttctagaagaaacatcagtgaaacacagcataaacacttcatttgatggctaaattttggacca

SEQ ID NO: 20984 - DNA, 600 bp, Chicken  19866894232023_2
gagatattaattttcaatcaatatattttagcaaactcattagccaacaatcaactagaacacattgcctcatacagacctcctgcagttagtgcagctgttgcaaagcattgctggaagcacacattttagttactcactgcagaacagtcattctgtggcttccaaatacatcccacagtgtgaatggtctcatccctactcacactaagtctgttaacccttcaagaaacagaacaytgcacagagctgtaatagtttcatacttgctgtacctactaaatacaacattaatgatgkgaggcatgaacacacacttgtctaggtaagacttgcatctccatccagaaattaagagcttaaaacttgtctcccatgattcactgagttttggaaactgttactattcttactacatactaggaggggcaaggaaaggcctagtaaaataatggattaagaatacttgttttgtttctagaagaaacatcagtgaaacacagcataaacacttcatttgatggctaaattttggaccacttgtcactaaacacagctttgctctgaaatttcttccatcagcttaaatgaactcattgt

SEQ ID NO: 20985 - DNA, 600 bp, Chicken  19866894232023_3
agttgtagactggtaggtcatagagatgattaaatactagcatgtcatttgtaggaagaaattccacaaaggaaactaatacaacttcccttgacacgcaagtacaatggttatacataggttgctccaaaagtaatgactcctattaatttaatggaaactacaacaaaatgaaaagcagctatacaacactgtttttcaacataagcatcattagcattttcatgagtgatgagaataggcaccagcatgccatgcctgcctggccaaccaaaacagggcttgtttctcacatcaccrcccycactgctgaaacaccacccaccacctcactgtgctcacatccaccatttggtctccagaattgttcagcagggatcagtaggtgtcaatggataccattttctcctgcatggaggaattcagtgacacacctttgcttcaaatgcacttccatgacagacaccattctgtcagatttccactctgctgcctgccatctgcctcatggcaacaaaatgtgatggaataccaggtgggatgtccagcctctacttcaataccaccactatctacctccaataactctgggacaccata

SEQ ID NO: 20986 - DNA, 600 bp, Chicken  19866894232023_4
gtagactggtaggtcatagagatgattaaatactagcatgtcatttgtaggaagaaattccacaaaggaaactaatacaacttcccttgacacgcaagtacaatggttatacataggttgctccaaaagtaatgactcctattaatttaatggaaactacaacaaaatgaaaagcagctatacaacactgtttttcaacataagcatcattagcattttcatgagtgatgagaataggcaccagcatgccatgcctgcctggccaaccaaaacagggcttgtttctcacatcaccrcccycactgctgaaacaccacccaccacctcactgtgctcacatccaccatttggtctccagaattgttcagcagggatcagtaggtgtcaatggataccattttctcctgcatggaggaattcagtgacacacctttgcttcaaatgcacttccatgacagacaccattctgtcagatttccactctgctgcctgccatctgcctcatggcaacaaaatgtgatggaataccaggtgggatgtccagcctctacttcaataccaccactatctacctccaataactctgggacaccatattac

SEQ ID NO: 20987 - DNA, 600 bp, Chicken  19866894232028_1
aacctctctaggcaacctgttccagcgtgtcaccaccctctgagtgaaaatatatggaactttctgtgttcaagttttaggccattgctccttgtcctgtcactacacatcaccaagaagagcctggcctcatccatttgcctcccacctccttttaaataaacattaatcagatcccccctcggttttcttttcctcaggctgaacatacccaggttatccagcctttcctcatataggagatgctccaggccctttatcatctttgtgacccttcactggactccttctaggagatcyctgttttttcaaactagagagcccagaactggacacagtattctaaatgtggcctcaccagggcagagtagagggggaggatcaccaccctcaacctgctggccacactctttttaatgcacccccagataccattcgccttcttggccacaagtgcacactgctggctcatggccagcatgttgtccaccaggacacccaggtccctctctgcaaaactgctctccagcagatcactccctaacctgtactgatgcatgtgattatttcttcccaggtgcaagagtctacacttcctct

SEQ ID NO: 20988 - DNA, 600 bp, Chicken  19866894232029_1
ttgggctgcacaatctccttagttcccttccatcctgtcctaccctatgatcctatgaacatgtgtttgagatgacaatggatactctagatggaagaatcactggaacttaattcagtatagattcatagtctgctcctttttcctgcacagccactctgccatttttgtattcccctctgtagccctgattgagaatctctttaatagttttatgtcctttttattttgtgccacccaaaaccgtatacaccctggtgaggcctccaaggcacagagttggtcatactgcttgctttyagaagtgtgtactctgaatataaccagtgcaaagcagaattgtatgaagctgcttaccaggtatttagaaagggaggagctggtctttatgcagttttcttggatgaatatatgaaagaaatgttttgtcctggtggcatacctttatgttgaaggaatgggcagttttgaaggaagtgagagaacagttttgaaagccatgcacaagaaggatgtgtctggtgagacagctttatgcgggaattagcactttgcagatacattaagtaccacacctgcattatacagtgaagaattaag

SEQ ID NO: 20989 - DNA, 600 bp, Chicken  19866894232045_1
atttatattaaacaaaaagaatttgttgcatttaaaagtagtttctcagcatatgcaaactgtgcatcttcccttgagtattatttagaatacattaattcagcctataaaaatacagtatggacaagttcttctcattccctgacatatgagttcacgattttgacacaaaaattgtaaacttttattacattcaaaatacatttcttaagtctttagaatttaagttctgaggtgacggcagttggagctcttggtatacagcagaagtacattattgcagagcctttacacagaagwagcttaccgaagttagagaagcttactctctcccacatatttttgttgctaccaggaggaaaagaaaggcttcctgctatgaaaggtctgtgtgaaagcattactcagatgaacaattcggccctgacttccagtgctacttcgctccacaatcacacgtggcatctgaacaagctgaatggggctttttccatcctttaacgcctgagtaagggttagtatctacaagagtagaaagcaggtaagttgtgggcatacaagttaagtttgtggttaacaggattgtaaatatagctatca

SEQ ID NO: 20990 - DNA, 600 bp, Chicken  19866894232048_1
ggaaacctgtgtccttctaactcatgaaaaagagttactgttaattgggaaaagaatttaagggactttatttcactggaaaaggaggctggatgcagaataaactagcaacaatacagatggtatcaagctacctcctgaaatttttatcagttgtatactgaaagtagaagtactgaaagtaagattagagaagtagtgctcctctaattcccatccctctgcatggtaatgtgtgaataaagccgtgttaaaccttagttttgtacaaccacaacctatgacatcatgtcatcaggwaaaaaaaccaaaacaacacctttgtcactactgaaaatcaattattaacagaagaacagttttatttacaagtatrcaagtagtatgcacacagttaagtattgctagactcgctttaatctatccaacatagctaaatatagcactggctatagcagtggcttcagtgtgctgggaagcactgagaacagaagttatattcatagagaatcataccatagtccattcctctgggtttctacttccatctttacccacactaatacacacacactaacacatgcactgcaggcactttgc

SEQ ID NO: 20991 - DNA, 600 bp, Chicken  19866894232048_2
tggaaaaggaggctggatgcagaataaactagcaacaatacagatggtatcaagctacctcctgaaatttttatcagttgtatactgaaagtagaagtactgaaagtaagattagagaagtagtgctcctctaattcccatccctctgcatggtaatgtgtgaataaagccgtgttaaaccttagttttgtacaaccacaacctatgacatcatgtcatcaggaaaaaaaaccaaaacaacacctttgtcactactgaaaatcaattattaacagaagaacagttttatttacaagtatrcaagtagtatgcacacagttaagtattgctagactcgctttaatctatccaacatagctaaatatagcactggctatagcagtggcttcagtgtgctgggaagcactgagaacagaagttatattcatagagaatcataccatagtccattcctctgggtttctacttccatctttacccacactaatacacacacactaacacatgcactgcaggcactttgcagctctctaatcagaacagtgcctgcttgccccatcaattgataacgagtatcattcagaacacagatatctcaag

SEQ ID NO: 20992 - DNA, 599 bp, Chicken  19866894232050_1
  misc_feature (1)..(5): n is any nucleotide
nnnnncagtgatgcatctgctgatgaggtctttgtgccacacacaggagtaactgaagttacaatcatcatttgtttacccttgattaaggaattattcatttactaatttaataaattgtgtgatatcaaggcagtaggctgaattcaaacttgattacatctacattttggctctctataccacatacactagctcaagcttttgctgggtcctggagtccctgctaggtaactcagtcccactgcaagcagtaaggtgtggcacttaaaaaaaaaagtcagagctaaaggttttaawgcttcctttttaggttttagtttttgcttagtatgcattttgtatggatttttcaaaacagaaaataatatcagtttaaaagmtttatgtyaataaaggaaggtcagagwaataaagagaaagaacacacgtttcttctgttgctgctactccagctttgaaggcttctcagagaacctcagatttaaatgtgcttgatttaatacagacgctgacctacctttatgttcactcactgggcttgctgacactccatatatcatgccctctattgccttcttcaagcacaggtcagcaat

SEQ ID NO: 20993 - DNA, 600 bp, Chicken  19866894232050_2
gattaaggaattattcatttactaatttaataaattgtgtgatatcaaggcagtaggctgaattcaaacttgattacatctacattttggctctctataccacatacactagctcaagcttttgctgggtcctggagtccctgctaggtaactcagtcccactgcaagcagtaaggtgtggcacttaaaaaaaaaagtcagagctaaaggttttaawgcttcctttttaggttttagtttttgcttagtatgcattttgtatggatttttcaaaacagaaaataatatcagtttaaaagmtttatgtyaataaaggaaggtcagagwaataaagagaaagaacacacgtttcttctgttgctgctactccagctttgaaggcttctcagagaacctcagatttaaatgtgcttgatttaatacagacgctgacctacctttatgttcactcactgggcttgctgacactccatatatcatgccctctattgccttcttcaagcacaggtcagcaatgcctttggcatcacagccaccagtatctttgagcaggttgccaggcagcccataaatgctactaatgctccgggactggatggc

SEQ ID NO: 20994 - DNA, 600 bp, Chicken  19866894232050_3
aattattcatttactaatttaataaattgtgtgatatcaaggcagtaggctgaattcaaacttgattacatctacattttggctctctataccacatacactagctcaagcttttgctgggtcctggagtccctgctaggtaactcagtcccactgcaagcagtaaggtgtggcacttaaaaaaaaaagtcagagctaaaggttttaawgcttcctttttaggttttagtttttgcttagtatgcattttgtatggatttttcaaaacagaaaataatatcagtttaaaagmtttatgtyaataaaggaaggtcagagwaataaagagaaagaacacacgtttcttctgttgctgctactccagctttgaaggcttctcagagaacctcagatttaaatgtgcttgatttaatacagacgctgacctacctttatgttcactcactgggcttgctgacactccatatatcatgccctctattgccttcttcaagcacaggtcagcaatgcctttggcatcacagccaccagtatctttgagcaggttgccaggcagcccataaatgctactaatgctccgggactggatggcccttgtca

SEQ ID NO: 20995 - DNA, 600 bp, Chicken  19866894232050_4
taataaattgtgtgatatcaaggcagtaggctgaattcaaacttgattacatctacattttggctctctataccacatacactagctcaagcttttgctgggtcctggagtccctgctaggtaactcagtcccactgcaagcagtaaggtgtggcacttaaaaaaaaaagtcagagctaaaggttttaawgcttcctttttaggttttagtttttgcttagtatgcattttgtatggatttttcaaaacagaaaataatatcagtttaaaagmtttatgtyaataaaggaaggtcagagwaataaagagaaagaacacacgtttcttctgttgctgctactccagctttgaaggcttctcagagaacctcagatttaaatgtgcttgatttaatacagacgctgacctacctttatgttcactcactgggcttgctgacactccatatatcatgccctctattgccttcttcaagcacaggtcagcaatgcctttggcatcacagccaccagtatctttgagcaggttgccaggcagcccataaatgctactaatgctccgggactggatggcccttgtcagctgctctggggagcagaa

SEQ ID NO: 20996 - DNA, 366 bp, Chicken  19866894232050_5
ggcagcccataaatgctactaatgctccgggactggatggcccttgtcagctgctctggggagcagaaagcaagagacctttcagaaagtagcttgcctcagtggcacagtgagtttggcatgaggtccatgagcatccgagatgcataaggtcctggaggaagggaagtgggacagcagctgaataaagagaaaatatatcacactgtgtctgggaacggcagtaattccttcattcagtcctgtactgatctggcagatgggtgtatctcttggactgaatggagagaagaacataaraaatgagagagaaggcggctactggggcctaaactaatatccaagggaaaagtcatacacagcaca

SEQ ID NO: 20997 - DNA, 600 bp, Chicken  19866894232051_1
aggcttctctgggggaaaatagaaatattttattcttggagccagagggagaaaaccatctagactcaccatcaacatgttttcttaactttaaataaggttagaaaaagaagtaattcaaccgtggcaactctaattggctacaagtataatccaataacctcgtttcacccatattgttagttgagttaattggacctgcacagctaccagctaaatatattggtgtatgcaaatggtgaaactaattttcttcataaaccttccttgtgccgaaataggaactgggaagaaggagtrggggagaaagaaggctgtgctgacgttgctacttcaaaagatcaattctcttccaattatttgctctctctagatggacaggacagaaaatataattaattccttgaaatagagaaggggagggaagtaatttcattcccacttgaaaagactgcaaaacaaaagtgattgagccttcagtttctgggtgccttgaatccagagtcccctctacctctcactcccccagtttcacagtccctgggtcaagcagccccattttatttgcaagatacagggaagagggatcctgcaccaaaa

SEQ ID NO: 20998 - DNA, 600 bp, Chicken  19866894232064_1
catggaccgctgtggggaggcgagagctgagcaaaatctccacgctcggcggagcagcttcccctgtccctcctgagcctgcagccccccatggcagatgcaaaccagcagcagccctgtgggcactcaccatgcggacgttgtcgctggggtcctccagggcccgactgagcagctccagcaccacctcgcagttcagcagcccgcacctggcacagagacagcggttacggacacatgcagcaccccacaagcactttggccctgtagccagggccagcagagtgtgtggggctcacrctgccccaccaagcccacagcacagacacccacgctcctggggagcgtccacctcgggcacttactccttgaggaagtgctgtgcctcctccctggtcaggaagactctggcaccctgtgtcagtgccgacaccaggctcacctccctcaggcaatcacccaggctgtcagcatccaccctgcagagggaaagcacagcgatggggacagccctgctccctcctgtgtatgcagcatccctacagtcagctctatctggctgagggctgcccaggccaggaggacaaatggccccagagg

SEQ ID NO: 20999 - DNA, 599 bp, Chicken  19866894232087_1
  misc_feature (1)..(52): n is any nucleotide
nnnnnnnnnnnnnnnnnnnnnnnnnnnnnnnnnnnnnnnnnnnnnnnnnnnncctttaatatcacgcttgttagcggggagtgatttgtttctgcctccgggctgacacttccaaaccttctgcttttattttgtgatttccagattcaggctcccggtgaagggctgctgagcatcactcacccggagatgcctttgatgggtttcatggttgcctttttttttgccgctccctctaccagcttctggaggacatcgctctcattcagcacggtggagacggctggaatattcacacarggggctcagcagtgatgccccagggtggggagggacagcactggagcagagggaactcatcacctccatagagcagggttgggagcacacccctgctgcgacaagcacgtgtccctgcatccctgccccagcttaccacggctgatggttccaacgtccatcctaaggatggcctccgggcccccagcgctttgtgatgctgacaggcagccccccagcagcaaaacgcaccacagcatggtcgtggatgcacccagctctgcaggctgaagggacacaaagaggcaatcagcgggagg

SEQ ID NO: 21000 - DNA, 600 bp, Chicken  19866894232101_1
ttcttaatgtggagaaggtgttgcttcagatgcagttagacatactaatgtctccttcaagcacacttctttcccttttaactactttcatattgtcccagttgtgtttatgttcttctgatataaggcaaacagaacacatatttgtgtggaaaaacagatgcattacttctgtaagaatgcccataaatgttgtaatatgtgtgcaaacatatttaaatattcacctggagctttatgatgaagctgatgtaggcaccacagtctgaaacttaatttcaaataggcataggaacagtygcttacaaacactgcaaaataaggaaaayaaaaacaaatacatcatacctttttgttttaaggattttcaaatactgcttaatgtttttttaaatgatatacaaacattagctaacaaatacattaatgaaattctccctttgagagtacccaccagctgttgctgacatctctgttcagctggcatcctgtgcctgactcaggatttctggtacatgccacttgcatgtgccttgcaaaatgacaaattcagttaaatgccaaggtaagtacttaaaggctgccttaaataaggatctg

SEQ ID NO: 21001 - DNA, 600 bp, Chicken  19866894232101_2
atgcagttagacatactaatgtctccttcaagcacacttctttcccttttaactactttcatattgtcccagttgtgtttatgttcttctgatataaggcaaacagaacacatatttgtgtggaaaaacagatgcattacttctgtaagaatgcccataaatgttgtaatatgtgtgcaaacatatttaaatattcacctggagctttatgatgaagctgatgtaggcaccacagtctgaaacttaatttcaaataggcataggaacagtygcttacaaacactgcaaaataaggaaaayaaaaacaaatacatcatacctttttgttttaaggattttcaaatactgcttaatgtttttttaaatgatatacaaacattagctaacaaatacattaatgaaattctccctttgagagtacccaccagctgttgctgacatctctgttcagctggcatcctgtgcctgactcaggatttctggtacatgccacttgcatgtgccttgcaaaatgacaaattcagttaaatgccaaggtaagtacttaaaggctgccttaaataaggatctgctcaactacagtggactggcatttatcct

SEQ ID NO: 21002 - DNA, 600 bp, Chicken  19866894232112_1
tggtatgacagcatgtgttgaatgcacacttgaactttatccaccacaggtaattagcatggatgtttcctttttttatatgtattccattttctggtttgattgtttcttttccaagtactacatgtaatagattaaatcttttttttctgtttttctccccacccccgaccactcaggtcaattttcccatgtgtactattgcatctatgcccagactaccagagcattgtattgagtatgtcagaatattgcagtggccaaaggagcaaccattcggaggtaattactatgttgcaytgacactaaggtaaagtttctagtttcaacagttctgttttgagttcagtgtacacacttacaatctgaccttctaaccaatgtgatgcactatactttggaaatyggaccttctctgagctggtgataaatctttttcttctcagactcgctcttcagtccattatttgttcataggtattaataggtgtctgtttctcctactgtacaatatctttcctgacacagaatgtagcacgtaacctctctataaacctgtgaaattaagacagatggtagataaaatgtgttacaatatag

SEQ ID NO: 21003 - DNA, 600 bp, Chicken  19866894232112_2
ttcttttccaagtactacatgtaatagattaaatcttttttttctgtttttctccccacccccgaccactcaggtcaattttcccatgtgtactattgcatctatgcccagactaccagagcattgtattgagtatgtcagaatattgcagtggccaaaggagcaaccattcggaggtaattactatgttgcaytgacactaaggtaaagtttctagtttcaacagttctgttttgagttcagtgtacacacttacaatctgaccttctaaccaatgtgatgcactatactttggaaatyggaccttctctgagctggtgataaatctttttcttctcagactcgctcttcagtccattatttgttcataggtattaataggtgtctgtttctcctactgtacaatatctttcctgacacagaatgtagcacgtaacctctctataaacctgtgaaattaagacagatggtagataaaatgtgttacaatatagtatgtttatagaaattatgttttggttatttgaagtgtcaaagtgtcaagctttggtatttaaatggaatactattttatacacaaataaaaacaaaggaagtttt

SEQ ID NO: 21004 - DNA, 600 bp, Chicken  19866894232112_3
agcagaaaggagctgaagcttcaagttttgatggatgttttcttgggtatgaagggaatacagtaagtcaataacagcaagccagacttcttaggaatttgctgtcttttttggaagacctgaaaaatgaaaagggaacctctttctttcttagtacaaacctgtgtgtataggaaagcttgcttggtattggtccacgtactgtgctgtttggatggactgactaagaattggatgaaagtatggatacagtttggcaagcttgctcttgcacagggaatgccaaatacaagttttttycttcatgcatttctccagttaaccagcaatagaactgagttttacattaatttctggtgctaaataaatacagcatacttgtatttagagtttatttactaaaataaataatatgccaaagtacttgagcagcctgccattataccttattggtagagaaattcttggaaagtgcttaaagtccctttgggtacacccttctgtaattattctagctaaaaataatstttctgtatagttctggaaaaagacaaagctatttgttttgtttttacaggagttgtaaaacgaattattccg

SEQ ID NO: 21005 - DNA, 600 bp, Chicken  19866894232112_4
gaattggatgaaagtatggatacagtttggcaagcttgctcttgcacagggaatgccaaatacaagttttttycttcatgcatttctccagttaaccagcaatagaactgagttttacattaatttctggtgctaaataaatacagcatacttgtatttagagtttatttactaaaataaataatatgccaaagtacttgagcagcctgccattataccttattggtagagaaattcttggaaagtgcttaaagtccctttgggtacacccttctgtaattattctagctaaaaataatstttctgtatagttctggaaaaagacaaagctatttgttttgtttttacaggagttgtaaaacgaattattccggcagtagcttctacaaatgcagtaattgcaggtaggctgaaagaaccagaatgtcatttcttactcatttcacgtatcctttattttctgtgaggtagaagtttggaatagggaacttgggaaggataactatagttttcaaatggatgcaacttatacttacagtcttgctgttgtttcccacttggagtaactgaattattgtgtacgaattctaagcttatgta

SEQ ID NO: 21006 - DNA, 600 bp, Chicken  19866894232112_5
cggcagtagcttctacaaatgcagtaattgcaggtaggctgaaagaaccagaatgtcatttcttactcatttcacgtatcctttattttctgtgaggtagaagtttggaatagggaacttgggaaggataactatagttttcaaatggatgcaacttatacttacagtcttgctgttgtttcccacttggagtaactgaattattgtgtacgaattctaagcttatgtatgacagggagtgagcaaaagcatttcagacttgaggggaaaaaaaaaaaaagaaaggaaatacaatatatrrgtttaacataatctcagattagtgccaattctgtggtggtagtgcatggaactaccagctgccttcaggtgcttgtttttccctttctgaagttttttttggtctcttctttgttacaagtttgtgcactaatgtctgcatgttctaagatggatgtagaaaacaaacaaattggtttttgtttctttttctgatttcagctgtttgtgccactgaagtttttaaaatagccacgaggtatttcatttcttattaattacatacatggcttccaatgtaaggacatgtattaacattaa

SEQ ID NO: 21007 - DNA, 600 bp, Chicken  19866894232112_6
ggcagtagcttctacaaatgcagtaattgcaggtaggctgaaagaaccagaatgtcatttcttactcatttcacgtatcctttattttctgtgaggtagaagtttggaatagggaacttgggaaggataactatagttttcaaatggatgcaacttatacttacagtcttgctgttgtttcccacttggagtaactgaattattgtgtacgaattctaagcttatgtatgacagggagtgagcaaaagcatttcagacttgaggggaaaaaaaaaaaaagaaaggaaatacaatatatrrgtttaacataatctcagattagtgccaattctgtggtggtagtgcatggaactaccagctgccttcaggtgcttgtttttccctttctgaagttttttttggtctcttctttgttacaagtttgtgcactaatgtctgcatgttctaagatggatgtagaaaacaaacaaattggtttttgtttctttttctgatttcagctgtttgtgccactgaagtttttaaaatagccacgaggtatttcatttcttattaattacatacatggcttccaatgtaaggacatgtattaacattaaa

SEQ ID NO: 21008 - DNA, 600 bp, Chicken  19866894232118_1
tgattccaagaaccagctgagcatcggcagcgcacacccatgggcacttctgagcgccccgcagctcacacacctcacacacagcaactccaggcagctcacctggaagagcccagcgctgcaggccactccacagaagctgatcaaataaaaccactgttgaggtgtggctgcacgctgccattatttcaacctaaaatctgatcacagtgaattgagggggtctctgcccatttcagcaggaccaaaacgctgaccttcaggcagtcccagccaccacacggtagaggcattcatacygaaagctgttctgattcagaatgactgaagtgaaaattttatgctgccagaaactgtggaaaaaaatgttactgactccttgtgaaggcctaaccacaacgctggcagcgcataaactaatcccaggttggggagatgggaatgcggacagccaccgtcagcccagaagcctttatgaacaaaagataggagtaagttactgctgctggaaacctccttcccctcccacagcagctctcctgtcaccgaactgtgagctgaaatgaagcacgagctcttgggggcagaggactcagtaaa

SEQ ID NO: 21009 - DNA, 552 bp, Chicken  19866894232118_2
gaatgactgaagtgaaaattttatgctgccagaaactgtggaaaaaaatgttactgactccttgtgaaggcctaaccacaacgctggcagcgcataaactaatcccaggttggggagatgggaatgcggacagccaccgtcagcccagaagcctttatgaacaaaagataggagtaagttactgctgctggaaacctccttcccctcccacagcagctctcctgtcaccgaactgtgagctgaaatgaagcacgagctcttgggggcagaggactcagtaaacacgtcaaagtttaacgsgaggctttgccagtgaaagaggagtcagcagcagcctccgtgaccacggctccgctgtcagatggatggaagaatctccctttttaccacgtctcataaaaggacaaagcagcagttgtaaaccagtcataaatgcttgcataaaaaaagataaaccattcgccctctgctgtgctctcagcaagcttcccagagaaaccctctagcatttccccaggagaagctgcaggttgagcccagcaggtgtttcca

SEQ ID NO: 21010 - DNA, 600 bp, Chicken  19866894232119_1
taatactgcattgttcatattttaaaaccatgagcttaaatgttaattctatcataacaaaacactcggcatgatgcaaattatctgaaatccattttccagagattagactaaatagattttctcagccttaatattcagatagaaaagagaaagaaaacaccagccttttgttttaagtcgcggctttaaaaagatgctacaaaaaaaatcaccctatctatctcgttaatctaagatttaagctctgtgcctttaaagtgctcaccaggtctttttttttaaatccaaagatagaaygcatgtgcctaacatggcttttgcccttctaaataatttgctgctcggtagacayattcagtaaacaggtggggcaccatccaagagcaaacctgatgaattctggtaagagaatccatgaattgatcaatttaggaggtctgtgtgctgccgctggccgctatagggattattttgcattagttgtctggctgacagtagagatcaaataactcaatggactcactggagaaggtaaagtaggaacaacaccaaataattctcaagaatgaagtaatggactgtgaaatactgtgttag

SEQ ID NO: 21011 - DNA, 600 bp, Chicken  19866894232119_2
aacaaaacactcggcatgatgcaaattatctgaaatccattttccagagattagactaaatagattttctcagccttaatattcagatagaaaagagaaagaaaacaccagccttttgttttaagtcgcggctttaaaaagatgctacaaaaaaaatcaccctatctatctcgttaatctaagatttaagctctgtgcctttaaagtgctcaccaggtctttttttttaaatccaaagatagaaygcatgtgcctaacatggcttttgcccttctaaataatttgctgctcggtagacayattcagtaaacaggtggggcaccatccaagagcaaacctgatgaattctggtaagagaatccatgaattgatcaatttaggaggtctgtgtgctgccgctggccgctatagggattattttgcattagttgtctggctgacagtagagatcaaataactcaatggactcactggagaaggtaaagtaggaacaacaccaaataattctcaagaatgaagtaatggactgtgaaatactgtgttagaaaggagaaaaatgtgagcacttttgggacaggtaaatttgacaaaaagtgttga

SEQ ID NO: 21012 - DNA, 600 bp, Chicken  19866894232121_1
acttcttactactgtcttgagaatcttttttccttcaaaatgaatccctgatgttgagaacctcttctccatcacctgtgaaacacacaaactctccccacttccagttttgtcacattcattttgcctgaaacatgggatttctgttttcgttccagtgagagtatttattatagttataaacagcaggtatcatgttggcctaataaatgaaatacagactaaattatacagattcagttcagtaaatagtactgcaaactgtgttgtgatgtaagggtgaaacttagcttttttctsttgtccagagttctgctgcagtagtgctttaaagaaaatactttcatgagagaattggaattcggatgatataggcacacaattctgaatctctgtcagctagtcttattacttattggtctagcttaggactatcttcaggaaagagctttcaaaagataacaggcaactcttcattaatactttaattaaactctcagtctctgctattagcgtcttttatgttatctcagtgttgtatatttgggaagtgacagcatgaagacatttagattgttcagtgctctacagcattattgt

SEQ ID NO: 21013 - DNA, 600 bp, Chicken  19866894232126_1
tttctatacgagctaaaactgaaattgactttgaatctctgaactgtcaacaaattcttctacgaaaaggcttgctttacagagattataaagtaggtgtcatccttgacacttgctttctatattcatactccaggcctggaagaaaaatgctgcagaacgccaggaaggatcttagagggctcagctgtcacactgcgtgcctccctcacttgctttgcagtcagatacggtgctgtagatgtcaaaggttctctatttaaactcactgacaagaaaaggaagaatactgggagaatrtgttagcagctactatgaacttgtctctagtatcaggtcatcctgacacttaattcaggatgctagaaacaaacgctctgattctaktcaaattaaaaaacacacaatatgcccccatcagatatacaagttcaagacttactatgraaaaatccagcattaggagtacatacaacaaagcactgctttcagtcacaatgacaaactagaaagccatatatgattatgttaatttctcatttcagatctctctctctcacaattgcataccactgctctctgtagttcatgtaaaagtca

SEQ ID NO: 21014 - DNA, 600 bp, Chicken  19866894232126_2
ataaagtaggtgtcatccttgacacttgctttctatattcatactccaggcctggaagaaaaatgctgcagaacgccaggaaggatcttagagggctcagctgtcacactgcgtgcctccctcacttgctttgcagtcagatacggtgctgtagatgtcaaaggttctctatttaaactcactgacaagaaaaggaagaatactgggagaatrtgttagcagctactatgaacttgtctctagtatcaggtcatcctgacacttaattcaggatgctagaaacaaacgctctgattctaktcaaattaaaaaacacacaatatgcccccatcagatatacaagttcaagacttactatgraaaaatccagcattaggagtacatacaacaaagcactgctttcagtcacaatgacaaactagaaagccatatatgattatgttaatttctcatttcagatctctctctctcacaattgcataccactgctctctgtagttcatgtaaaagtcacagtttactaaccacttaatgaagctgcattcctcaaatccctgacagattatgtgaggttgtttggattagaaataagaatttgcc

SEQ ID NO: 21015 - DNA, 600 bp, Chicken  19866894232126_3
aaatgctgcagaacgccaggaaggatcttagagggctcagctgtcacactgcgtgcctccctcacttgctttgcagtcagatacggtgctgtagatgtcaaaggttctctatttaaactcactgacaagaaaaggaagaatactgggagaatrtgttagcagctactatgaacttgtctctagtatcaggtcatcctgacacttaattcaggatgctagaaacaaacgctctgattctaktcaaattaaaaaacacacaatatgcccccatcagatatacaagttcaagacttactatgraaaaatccagcattaggagtacatacaacaaagcactgctttcagtcacaatgacaaactagaaagccatatatgattatgttaatttctcatttcagatctctctctctcacaattgcataccactgctctctgtagttcatgtaaaagtcacagtttactaaccacttaatgaagctgcattcctcaaatccctgacagattatgtgaggttgtttggattagaaataagaatttgccattccactgcccactgccccaattacattttagtcataaacacctgtgccatgggatgtt

SEQ ID NO: 21016 - DNA, 600 bp, Chicken  19866894232128_1
agaatgttgttctaattgttatgttagtaccttctgcagcaaattaatgcatgaaacattttcatttcggtacataagtttgtgtgtgtctgagttaaacatttatgttaatggaccttctggcagatctgtaatgtttcacatactcttgtagaacagctttttctaaatacatcatttagcagttctttccccattttctacctggtctgggggcatgcaggaagggaaactatttcacagttttaaaaacctcctgcttgagtaactacaaaactgaaccgcattcaggcaaggtarcaattaagcctgtaccgccactagcaatgtaaactgcattaaaaaagaaaaaaaaaattaaataaaagacaaactaacggccagcatatgctccacacataacaccctgctgctgctggaactgcacccgtgcccagcccacatcccacagggttcgcggtgcttggcagtgcctagagcccccctgggatggcagctgccccatccccacagcgcggccctggacaccgtcactgcaccagctgccctggaagcccggcccccatctccaccccaaagacctgctggaaccctgcatgg

SEQ ID NO: 21017 - DNA, 600 bp, Chicken  19866894232128_2
ggtaaaagcattctctttcttgaattaatcacatttcactttttcccctgctttccaggtgaaggctcccactgcccactgaagaggccctcctctccccagcagacaggaatttggcaagcctcatttatcccagaatttataattcaacagacgcttccgctaacagttcccaataacgctgcggcagacacacaagtcttaattcctgggcacgggatgcagaacacgagtgctaccactgcgtggttttttttaattgtgcttttaaatactacgctctgcatggctcccgagtcrgtataaactttccctgaaagttttataataaacagtcctgctacataatttgatgtttttaaatgaaagcatccaagctaatctatacaaattaacagatgtcctcccgaaacagttagaaacaaagaaatgcagatgcgaacatcatcagcatccaaatgagcttattgtaggaccctttaaggcacatctgagcatagctccagcccgtagtctacctttcaacttgcaaatgacagtgtcaccaaacgccgtccttccatcaatcaagctgggtcatgaatatacacgaggcgcgga

SEQ ID NO: 21018 - DNA, 600 bp, Chicken  19866894232129_1
ggcacactgctggctcatgttcagccgaatatcagccaacagtgccagctccatttcctctacacagtcttccagctactcggccccaagcctgtggcactgcctggggttattgtagccaaagttcaggacccaacacttggtcttgctgaacctcatcccattggcttcagcccagtgatccagcctgtccagatctctctacagggccttgctacccccaggcagatcaacacttcctgccaacttggtgtcatctgcaaacttactgagggtgaaaaagaaaatacattgctttcragaagccatctgagagaggttttcttcagttgtcaacttgcacatacatacctggaatgggccaatggctgagctcaaagacaaaagcatattgatccaagagctgaaaaggataacaatcttcaacagccaggacttactgactttttttttccattattgactgattactcaaattgacttcccagagatttaagtctgactgaccaagaagaatgatctatgtaaacagaaacatcagaaacatatctgtgtgacagtttatttacccagacccttcagcactcactttcttctctg

SEQ ID NO: 21019 - DNA, 600 bp, Chicken  19866894232135_1
catgtttgcaactggttttttttttcagcagaaataaacccggatgatgtgaatgctggaagttatgaacttgatgcgtgcaatgaggcagaatgctgtatgttagagacgtgttcatttagaaaacaagaaatgatggatgaacagtgctgttcttgaataaatattattccgtttccttcgctaattcctgacttgctgcaaaatctctctttacaaaaacaataccactgcattttgcagttagcttcaggaggtccatccctgtgccagcacagtctttggcctctcccagcaagracacgaggctccatgctccccttaatgcacattaaaaatgcatcctttttaggttcttgcttcaccgctgtgtcagctgccgtggggaagggaggacggctgtgctgggtgtcaggcaggcggctggaagcgctcgtccccccaggggttctcagaaggaaggctttgcagcgctgcgctaatcgctttgggaggagagaytgagcgctcctctgccgggaggaaaattataaatacagatatcagagcaaaagcatttttgatgctggaagctttaagaccccctggaggcaggagatc

SEQ ID NO: 21020 - DNA, 521 bp, Chicken  19866894232135_2
caaaatctctctttacaaaaacaataccactgcattttgcagttagcttcaggaggtccatccctgtgccagcacagtctttggcctctcccagcaagracacgaggctccatgctccccttaatgcacattaaaaatgcatcctttttaggttcttgcttcaccgctgtgtcagctgccgtggggaagggaggacggctgtgctgggtgtcaggcaggcggctggaagcgctcgtccccccaggggttctcagaaggaaggctttgcagcgctgcgctaatcgctttgggaggagagaytgagcgctcctctgccgggaggaaaattataaatacagatatcagagcaaaagcatttttgatgctggaagctttaagaccccctggaggcaggagatcaaagtcgtgatagggtgcacctcgtctctgaaattaattgaagggcaaatgagagggaacgctgatgtcagtggagcattgatatggcacatggttgctgcgttcccgggaagcatgtggca

SEQ ID NO: 21021 - DNA, 600 bp, Chicken  19866894232141_1
agctatttcctatgaattttaagaccaatttcattcaagaagtatgtgacatacatttgaaaattaatttcttactaaatttttgttgaaaatgggaagggataaaggacttgtcttagaagtgcaatgtgtaatatttagaggacatttgctttaacaatctaacatgcaagcagaaatattttcaatcatctatcaacattttgattatttatcttaaattcctatttcttagtactgaccttaagctcagagttctgctttttcagagcttccacagtataggaaatttctttccaygactcaagctttgcttttgcttgttcaagaacctgttcagcttcttgtttagcttctagccactgtgttgaatccttttgcatctcatgaagctgttgtcttcggttttggaggtatccgtgcacatcatcccactggctctgtatcttttcaactgttgaaacataaaggaaaaacaatagttgagtaacgtaaaacacttttctttttttctttttaaagtggagtaaatatttctgggaagttaccacatttggagagctcttgtacttttcagctgtaattgcaactaaattcagt

SEQ ID NO: 21022 - DNA, 600 bp, Chicken  19866894232145_1
attacttgtctttttgacggataatatctgactgcaaagattaaaaacttatatccctgccaagagttgttggcaggtgttctccattgttcttcgtatgtatgtttacggaagtggattttctctatttctcagtaaaagtaaagttgcagcaaatagtctgagcagtaaaagactgtttagggaaacttcataacttgttagtgattactttcaacacttgacaaagcgaaatataaaagctgcagccacatacctacaaggatacatgaaaacataggtagctgtatgatttgcatygtgtgttaattcaaattcattgcaatgttacaaagattgatgacctttagttgaacgtgctataaaagtgataaatctgagttagatctactttttggcctcttgggattagatcttttgaagggatcaattaatgtgctttaaatctattgattcatagtagaaacacaaaatttaaactcagaagtcactgagtgaactttccattaagttagggaggctgtggtcacagctcatttgatctttatgaagtagaaaatgtgatgtaggccacactggcattctattagaggaaatcat

SEQ ID NO: 21023 - DNA, 600 bp, Chicken  19866894232145_2
gatgacctttagttgaacgtgctataaaagtgataaatctgagttagatctactttttggcctcttgggattagatcttttgaagggatcaattaatgtgctttaaatctattgattcatagtagaaacacaaaatttaaactcagaagtcactgagtgaactttccattaagttagggaggctgtggtcacagctcatttgatctttatgaagtagaaaatgtgatgtaggccacactggcattctattagaggaaatcatgcatttaaccatgtagcgaagtactgtagaccaattakgtgaacatacacctattttacacatggctaatcttcagagcataaaatattaacagtgtacctactagcttgtttttagggctatttatttttaagcatttaaaagatatgagataatgtgtagaataaaagatgaattaaaacttatatcagttttctacctggaggtcagcatcctatagaagatgagtcaaattcctttggttgacatctgcacattgtaattgtgctaatagtaatcctgttctatttaaaatgcctttgaaaaggaaaggaaaaccttctgtttcaaaatcgatt

SEQ ID NO: 21024 - DNA, 600 bp, Chicken  19866894232147_1
tcttacagttgtttagtagacaatattaagatagcatcacttcaagagttttatattctgtttgtgcaaccaaaagttacataggtccaaggtgtataaaaccatctaagccaatacagcagtccaagaggtcaaaaacccagtctgaaactggaggccacgtaaaacaatcatcagcatggattttttttcttctagtctgtactccagttgcattctgcttatcttctgttatatcagcttcaacctgtacaggaatatcaattactttgcacagatagccctcactttgcagcttcmaaattgacaagtgatagcagcatatgttgattttcttatctttcgcaccaaaatagtcccaatttaacataaaacactaaccttgcatctcacagagtaaaggacatttatttactggaatatttttgaatgtacaaaattcaatttaataagcatattaaataacaaagatttagaaaaatatatgcaattagatgacaacatagtcatttaaatagatatttctattgaatctttgcaagattacactcatcactaaattagatgttgtcccatggtatgcattataaattaggtggt

SEQ ID NO: 21025 - DNA, 600 bp, Chicken  19866894232157_1
aagcctttattttttcagtattttttctttataaaacatttaacttgtactaaaggaactcccccaccaccaccaatcatctttttttgtatgcaagttaaccaacagcagcgagaattcagtggacttctgggggtgtgtatcagactctatatttatagcttcttttggcccaaagcacttctgcagtagaaggatttatagatgaagattttttttttcttcttgttcttcattcaaatagttcttcggtcagttctattacttttttgcaacttacctacatttctgctgcatgtrtagaacagaaagtagaatgtttagtgtaaaatgcatctatgtaaatgaagagctgctcctacatccgtagttgaaagatattcttcaaagtcttacagttacaaaattagagtaataccattttgatttatcatattgcctaaaactgaatggtttggtttctacagcaaaagacgttttccaagcaattttgcaaggggcatacaaatggcctacaagcaaaatagtccatttgtgacaatgtattcatgtgcttttattagcaaatataattaacattaacatgtttgcattccagtg

SEQ ID NO: 21026 - DNA, 599 bp, Chicken  19866894232158_1
  misc_feature (1)..(11): n is any nucleotide
nnnnnnnnnnntatggcagtagaggatgaacattgcccatgaatttgatattacatttcgttgtgtgtgccagatggcagcagtgatgcagtctgaaaaaatggcatctgactttggagtgtgtatgaagcaaaagtatgctattgaattcctccacgcagaaaaaatggcacccactgacatgtgtcaatgcttgctgaaaatgtatggagatcaaatagagagtttgagcacactgaggcagtgggtggtttgtttctgcagaggcaatagcaatgtgaaagacaatccacatggtgratgtccatgcagatttctacaaccctcacttccagtatggcagagggagccggcagctcctcaaagacctccttgtactctaggagtgatgagtacctcatgatacagatggtaatggatgatgaaggaatagagtccaccctctgcacgtttgctgattttatgratctggcaggagcrgctgacacatcagattcagcaagacttggataggctggagggaagggaagccatccagaggcacttggacaggctggagaagtggacgcatgtgaacctaatgagattcaacaaggtca

SEQ ID NO: 21027 - DNA, 600 bp, Chicken  19866894232158_2
atggcacccactgacatgtgtcaatgcttgctgaaaatgtatggagatcaaatagagagtttgagcacactgaggcagtgggtggtttgtttctgcagaggcaatagcaatgtgaaagacaatccacatggtgratgtccatgcagatttctacaaccctcacttccagtatggcagagggagccggcagctcctcaaagacctccttgtactctaggagtgatgagtacctcatgatacagatggtaatggatgatgaaggaatagagtccaccctctgcacgtttgctgattttatgratctggcaggagcrgctgacacatcagattcagcaagacttggataggctggagggaagggaagccatccagaggcacttggacaggctggagaagtggacgcatgtgaacctaatgagattcaacaaggtcaagtgcaaggtgttgcacttgggccaggacaatcccaggtatttatacaactgrgcaaagaaccccttgagagcagccccatgaagaaggacttgcaggtcctggtggatgataatctggacatgctccagcagtgtgcacttgcagccccaaaggccaagtgtgttc

SEQ ID NO: 21028 - DNA, 600 bp, Chicken  19866894232158_3
catgtgtcaatgcttgctgaaaatgtatggagatcaaatagagagtttgagcacactgaggcagtgggtggtttgtttctgcagaggcaatagcaatgtgaaagacaatccacatggtgratgtccatgcagatttctacaaccctcacttccagtatggcagagggagccggcagctcctcaaagacctccttgtactctaggagtgatgagtacctcatgatacagatggtaatggatgatgaaggaatagagtccaccctctgcacgtttgctgattttatgratctggcaggagcrgctgacacatcagattcagcaagacttggataggctggagggaagggaagccatccagaggcacttggacaggctggagaagtggacgcatgtgaacctaatgagattcaacaaggtcaagtgcaaggtgttgcacttgggccaggacaatcccaggtatttatacaactgrgcaaagaaccccttgagagcagccccatgaagaaggacttgcaggtcctggtggatgataatctggacatgctccagcagtgtgcacttgcagccccaaaggccaagtgtgttctgggctgcattaaa

SEQ ID NO: 21029 - DNA, 600 bp, Chicken  19866894232158_4
gcagctcctcaaagacctccttgtactctaggagtgatgagtacctcatgatacagatggtaatggatgatgaaggaatagagtccaccctctgcacgtttgctgattttatgratctggcaggagcrgctgacacatcagattcagcaagacttggataggctggagggaagggaagccatccagaggcacttggacaggctggagaagtggacgcatgtgaacctaatgagattcaacaaggtcaagtgcaaggtgttgcacttgggccaggacaatcccaggtatttatacaactgrgcaaagaaccccttgagagcagccccatgaagaaggacttgcaggtcctggtggatgataatctggacatgctccagcagtgtgcacttgcagccccaaaggccaagtgtgttctgggctgcattaaaaatggggtgaccagcagagagagagaggcgattgtccccctctaatcggctcttgtgaggccccatctggagtactcagttcaggcttggggcccccagtacaggaaggacatggagctcttggagtgggtccagaggagcgccactaagatgatcagagggctggagcacc

SEQ ID NO: 21030 - DNA, 600 bp, Chicken  19866894232160_1
ttaaattcatctctatgtatctgtgtgtgtttatgtacatacatacttaacatataaaatctctgttcaagtaactaacaagtcttaagtctttcgtattgttaagtaattcatgtttggtgactcaagtatctaaaaatatacttccttagtacgttaagcagactggaagttaggataactacatgctacaggttgtaacttcttagaattgtgataaagcatgggtataacaaaacccgggctcaggctcagaaagatgctttactcgaggagttcctaagtggaatgtttgacagraatgtaaattaacatgacatgattctctagcagtgttatgatcctcccttctcctattgttgcataagacagatcgtggcttacagaactctcactgaatccatcggatttttgcattaaaatcastggtaggctatgatccaaatatttytagtaatragagtttggtcttctgtacwgtgatctttaatttctgaatacatttttgaagattcactaacagtatattgatttgaacgctctcatagttacaaatatggaaggatgggaaaaaggacttctctagatcttcttatgtat

SEQ ID NO: 21031 - DNA, 600 bp, Chicken  19866894232160_2
aagtatctaaaaatatacttccttagtacgttaagcagactggaagttaggataactacatgctacaggttgtaacttcttagaattgtgataaagcatgggtataacaaaacccgggctcaggctcagaaagatgctttactcgaggagttcctaagtggaatgtttgacagraatgtaaattaacatgacatgattctctagcagtgttatgatcctcccttctcctattgttgcataagacagatcgtggcttacagaactctcactgaatccatcggatttttgcattaaaatcastggtaggctatgatccaaatatttytagtaatragagtttggtcttctgtacwgtgatctttaatttctgaatacatttttgaagattcactaacagtatattgatttgaacgctctcatagttacaaatatggaaggatgggaaaaaggacttctctagatcttcttatgtattttcacacatacagaaaatctgatcatgtagcttatgagccccacaagtattcttcacatctatcatgaacttatttgttctgttttggaatgtacagcatgaatcatgtggggaagtatacttac

SEQ ID NO: 21032 - DNA, 600 bp, Chicken  19866894232160_3
gtacgttaagcagactggaagttaggataactacatgctacaggttgtaacttcttagaattgtgataaagcatgggtataacaaaacccgggctcaggctcagaaagatgctttactcgaggagttcctaagtggaatgtttgacagraatgtaaattaacatgacatgattctctagcagtgttatgatcctcccttctcctattgttgcataagacagatcgtggcttacagaactctcactgaatccatcggatttttgcattaaaatcastggtaggctatgatccaaatatttytagtaatragagtttggtcttctgtacwgtgatctttaatttctgaatacatttttgaagattcactaacagtatattgatttgaacgctctcatagttacaaatatggaaggatgggaaaaaggacttctctagatcttcttatgtattttcacacatacagaaaatctgatcatgtagcttatgagccccacaagtattcttcacatctatcatgaacttatttgttctgttttggaatgtacagcatgaatcatgtggggaagtatacttacttcccactgctgcctgatacaagag

SEQ ID NO: 21033 - DNA, 600 bp, Chicken  19866894232160_4
agcagactggaagttaggataactacatgctacaggttgtaacttcttagaattgtgataaagcatgggtataacaaaacccgggctcaggctcagaaagatgctttactcgaggagttcctaagtggaatgtttgacagraatgtaaattaacatgacatgattctctagcagtgttatgatcctcccttctcctattgttgcataagacagatcgtggcttacagaactctcactgaatccatcggatttttgcattaaaatcastggtaggctatgatccaaatatttytagtaatragagtttggtcttctgtacwgtgatctttaatttctgaatacatttttgaagattcactaacagtatattgatttgaacgctctcatagttacaaatatggaaggatgggaaaaaggacttctctagatcttcttatgtattttcacacatacagaaaatctgatcatgtagcttatgagccccacaagtattcttcacatctatcatgaacttatttgttctgttttggaatgtacagcatgaatcatgtggggaagtatacttacttcccactgctgcctgatacaagagcaaactca

SEQ ID NO: 21034 - DNA, 600 bp, Chicken  19866894232160_5
aactacatgctacaggttgtaacttcttagaattgtgataaagcatgggtataacaaaacccgggctcaggctcagaaagatgctttactcgaggagttcctaagtggaatgtttgacagraatgtaaattaacatgacatgattctctagcagtgttatgatcctcccttctcctattgttgcataagacagatcgtggcttacagaactctcactgaatccatcggatttttgcattaaaatcastggtaggctatgatccaaatatttytagtaatragagtttggtcttctgtacwgtgatctttaatttctgaatacatttttgaagattcactaacagtatattgatttgaacgctctcatagttacaaatatggaaggatgggaaaaaggacttctctagatcttcttatgtattttcacacatacagaaaatctgatcatgtagcttatgagccccacaagtattcttcacatctatcatgaacttatttgttctgttttggaatgtacagcatgaatcatgtggggaagtatacttacttcccactgctgcctgatacaagagcaaactcatccattaaaatatacaagcc

SEQ ID NO: 21035 - DNA, 600 bp, Chicken  19866894232169_1
aatccttagtagtgctataatttggatgtatagaaatcatagctttttccatttattctatcacagtccattgccattactttctctcagcttaaaaactgtagggaaaggttttttttttaaaaaaaaaagtcttatttgtcttatgtctttatttcatgttatctttttaggtaggacttcaaactcatcacaaaatttccagttttctactgaaaagacagtatgtacatagagcagtttaaaatatcttgtgcccattttagctattgatgaatgctatctgcagtgagccacaaytttttattttttagagttaattagtctgataggtaaaaatgattccttaactacttctaaaaatcaagaccataataatccagtaagatgtggctttcttttttagaaggaaaaaaaggaataaagcttttgactaaatgtttaacttcttaaaaagctcaccagagagttaacttctgtcacagagtaacaaaagcattaaatattggctactatgcttcagatatctggaaagtgctaaatattcggaagaaagccctctagaactataaggtagcataagtcaagttgtaaatgtgt

SEQ ID NO: 21036 - DNA, 600 bp, Chicken  19866894232170_1
tgatgaacataagtttataactcagatctcaatcacaaaaaatgtcctaccttggagtagtatttttgtgttttgctgatctgatgtcataatgacaaattgcaccaaagataaaacaaacaatgagggtgtgcctagattagcacttcaattttcctcagaacgctagtgaaacaaacatcccagtagtgcccatttacttattctgattcacaccacaaacggtcacagagagcatacactgtgttcccctcagaggaaacaaaaacataaggtgagctccagctattaatgagcatycagctcatggaccaggcaagagcaagctggaaacaacccaccagcatgatgtacacactttgtactttagatcctcagcaccatttctctgctcaacatctcctcctgggaaacactacyggttattataaagatagcgctagggtattactttaattccttttattcctcttcctggcactgtttttagcttyccactattggcttgcagrcaagtggggaagactaagtgaaggaaaaattttgaggaaaggaccgtattttgtttgaagtgacagagtagcagcagagaggatagra

SEQ ID NO: 21037 - DNA, 600 bp, Chicken  19866894232170_2
caatgagggtgtgcctagattagcacttcaattttcctcagaacgctagtgaaacaaacatcccagtagtgcccatttacttattctgattcacaccacaaacggtcacagagagcatacactgtgttcccctcagaggaaacaaaaacataaggtgagctccagctattaatgagcatycagctcatggaccaggcaagagcaagctggaaacaacccaccagcatgatgtacacactttgtactttagatcctcagcaccatttctctgctcaacatctcctcctgggaaacactacyggttattataaagatagcgctagggtattactttaattccttttattcctcttcctggcactgtttttagcttyccactattggcttgcagrcaagtggggaagactaagtgaaggaaaaattttgaggaaaggaccgtattttgtttgaagtgacagagtagcagcagagaggatagraaaargaggtcacatttatggtttaggcaaatgtgttttgcagcaatactctggctggatatgcatggtgcaaagctaaaaaaagccactgtacccaaaatgctgagattcacatgacctg

SEQ ID NO: 21038 - DNA, 600 bp, Chicken  19866894232170_3
atttacttattctgattcacaccacaaacggtcacagagagcatacactgtgttcccctcagaggaaacaaaaacataaggtgagctccagctattaatgagcatycagctcatggaccaggcaagagcaagctggaaacaacccaccagcatgatgtacacactttgtactttagatcctcagcaccatttctctgctcaacatctcctcctgggaaacactacyggttattataaagatagcgctagggtattactttaattccttttattcctcttcctggcactgtttttagcttyccactattggcttgcagrcaagtggggaagactaagtgaaggaaaaattttgaggaaaggaccgtattttgtttgaagtgacagagtagcagcagagaggatagraaaargaggtcacatttatggtttaggcaaatgtgttttgcagcaatactctggctggatatgcatggtgcaaagctaaaaaaagccactgtacccaaaatgctgagattcacatgacctgaactaagggtaaagcacaaacctttgacatcagataacaattctttcctctatccagaatcacttcagagatgc

SEQ ID NO: 21039 - DNA, 600 bp, Chicken  19866894232170_4
acaccacaaacggtcacagagagcatacactgtgttcccctcagaggaaacaaaaacataaggtgagctccagctattaatgagcatycagctcatggaccaggcaagagcaagctggaaacaacccaccagcatgatgtacacactttgtactttagatcctcagcaccatttctctgctcaacatctcctcctgggaaacactacyggttattataaagatagcgctagggtattactttaattccttttattcctcttcctggcactgtttttagcttyccactattggcttgcagrcaagtggggaagactaagtgaaggaaaaattttgaggaaaggaccgtattttgtttgaagtgacagagtagcagcagagaggatagraaaargaggtcacatttatggtttaggcaaatgtgttttgcagcaatactctggctggatatgcatggtgcaaagctaaaaaaagccactgtacccaaaatgctgagattcacatgacctgaactaagggtaaagcacaaacctttgacatcagataacaattctttcctctatccagaatcacttcagagatgcaaaagtcctctttaacac

SEQ ID NO: 21040 - DNA, 600 bp, Chicken  19866894232170_5
ycagctcatggaccaggcaagagcaagctggaaacaacccaccagcatgatgtacacactttgtactttagatcctcagcaccatttctctgctcaacatctcctcctgggaaacactacyggttattataaagatagcgctagggtattactttaattccttttattcctcttcctggcactgtttttagcttyccactattggcttgcagrcaagtggggaagactaagtgaaggaaaaattttgaggaaaggaccgtattttgtttgaagtgacagagtagcagcagagaggatagraaaargaggtcacatttatggtttaggcaaatgtgttttgcagcaatactctggctggatatgcatggtgcaaagctaaaaaaagccactgtacccaaaatgctgagattcacatgacctgaactaagggtaaagcacaaacctttgacatcagataacaattctttcctctatccagaatcacttcagagatgcaaaagtcctctttaacacttccattaacactcatatttcatattaaaagcggaagaacaatcttaaacaaaaatagaaatgtcctttttcaattgaactacatgg

SEQ ID NO: 21041 - DNA, 600 bp, Chicken  19866894232170_6
tcatggaccaggcaagagcaagctggaaacaacccaccagcatgatgtacacactttgtactttagatcctcagcaccatttctctgctcaacatctcctcctgggaaacactacyggttattataaagatagcgctagggtattactttaattccttttattcctcttcctggcactgtttttagcttyccactattggcttgcagrcaagtggggaagactaagtgaaggaaaaattttgaggaaaggaccgtattttgtttgaagtgacagagtagcagcagagaggatagraaaargaggtcacatttatggtttaggcaaatgtgttttgcagcaatactctggctggatatgcatggtgcaaagctaaaaaaagccactgtacccaaaatgctgagattcacatgacctgaactaagggtaaagcacaaacctttgacatcagataacaattctttcctctatccagaatcacttcagagatgcaaaagtcctctttaacacttccattaacactcatatttcatattaaaagcggaagaacaatcttaaacaaaaatagaaatgtcctttttcaattgaactacatggacagt

SEQ ID NO: 21042 - DNA, 600 bp, Chicken  19866894232173_1
gttcagagaagataaaggtttactgtagtatacttccaagtttttaaatttgattcttaaggtgatagctatttaagcagcactttgttgattaatagtatccacctgcaagtccactttacagtggattcaaagaacaaaaaattagcatacacttcagcgcttcgctcctattatttcctcatttataaaataaaggaaagctttatatcaattatttcattttgtttatatgctgaaatactttaagtgcctggtacaaaagattgggaacttcttttcatgttgcctattatcagyaaattaacagaactaagcaatcaacatgcttagtgctttgttctgcttttttaattagtctaaaattttaaaggcaattggtttctccatggatgcataaaagcttatttgtcgcatgttatggctgagctggaattgtacgttgcagttttatatgaaaagcattgtttcattgagtaatcttgaggcacttgttttcagagtggaattaaactctgttcaaaagttgaactcattttcctaaacattatcttgttcattgtgagtcattaagatattttacaagttctgtgcttcagt

SEQ ID NO: 21043 - DNA, 600 bp, Chicken  19866894232173_2
ccagtaaaacatgctggtaatcaaaaatgttctgcaccgacagaagtagattctccttctggtagagggagtttggccagggccttggagaaaaaaaaaaaaaaaaaaaagagagagaactaagtattggtctctgagacaaatactatttctgctccaaaagatcggttttaattttaaagccttgtccttcagtaggatcacccccatgatcctgctgcttgaaagtgaaatcctcgtccttatatccagatttctagtctctaccctaccttgattttaagggaactgatgaggatyccacttctggtgtctttcatcttttcgtgttaatcacagagtcatagaatggcttggattagaagggaccataaatatatctatttccaccttcccgtaagaaaatatttccttttcagtcattgcatatgatagaaggatgagaatggttacacatactttttaggcctgttgtatttgactttccttgtaatggcttcatggtagtttttctttaggcctatttccttggcttggttgttgcagccctgctttgacacastttgcattttgataacaaaggctccttttgaatggttt

SEQ ID NO: 21044 - DNA, 600 bp, Chicken  19866894232173_3
tctaccctaccttgattttaagggaactgatgaggatyccacttctggtgtctttcatcttttcgtgttaatcacagagtcatagaatggcttggattagaagggaccataaatatatctatttccaccttcccgtaagaaaatatttccttttcagtcattgcatatgatagaaggatgagaatggttacacatactttttaggcctgttgtatttgactttccttgtaatggcttcatggtagtttttctttaggcctatttccttggcttggttgttgcagccctgctttgacacastttgcattttgataacaaaggctccttttgaatggtttgcatttccttaagtctgtggcatctggaggctgccaaactgttctggcaatgccgcctttctttagtacctggtgcaaattcttggctcaggtaataactctgctagggaattcctgtaattggtctttggctagctgccaagtgtattgtaatacctgtgttagtgtgcagcagacactaaaagggaatgaaaaataaatgttactttccgtagttttagttatttggaatctgttggctgtacaaattgcagctttgctt

SEQ ID NO: 21045 - DNA, 600 bp, Chicken  19866894232173_4
caatgccgcctttctttagtacctggtgcaaattcttggctcaggtaataactctgctagggaattcctgtaattggtctttggctagctgccaagtgtattgtaatacctgtgttagtgtgcagcagacactaaaagggaatgaaaaataaatgttactttccgtagttttagttatttggaatctgttggctgtacaaattgcagctttgctttttcttgagtctggtcccttgctctggtgggctagccctggtcagcagctcagtactgcagagccccacagtcagcacaaatggkaagagaatgggaacatcaaaaatgagtcaagataaagatagtttaagtaaacagtgatggagtggtgagaaggtacacggaataaaaaggcaatcacttagtacctcccacaagcagacccttgccaagccagacctaaaaggatggctacctgatagacccagcccccctgcactcatgttttattgttgagcgtgatgttacatggtatgaatatcctttttcattagtttgggttacctgtcctggctgtgtccatccccagcttaccgactgacaggctgagtgggggaaaaagag

SEQ ID NO: 21046 - DNA, 600 bp, Chicken  19866894232174_1
aatttcagcaggaagagaaaaaaataattaacaaaaaaatgttgatttctgatccgatccctaaacatctttgcattagagttcatctgtacttaatacacattagaataatgtgttatttgtgaattctgcttgtaaagtgctttgtttgaaatagtagtgaagagaaaagatatgtatcattttgttttagttaggattggatgggtggggggagatgcctgccagttagtcctttagtatttggaaaaactcctatatgtgtggcaggtactcaggtgtctggctcttgtgagcttkcaagcaacgttaattcccagaaaagtttatgagagttgtaagtattcagcatcttgcagaattagactaatgagaagaatgagaagggtaatgttgctaggaaaataatggatttatatgcatagtgagagctgtttgtaaatcagcaggtggtttctaaaatatcagaaattagcaaaatgtttactgatgtgatttctttcagaaaaacaaacatgtttaaaaacacttgaatgctaaaacttcaaatgagaaaggctgattttcattttgtcagccatctttttacatgtggtttga

SEQ ID NO: 21047 - DNA, 600 bp, Chicken  19866894232174_2
aatgcaaccctgacccgcacccctaactatcagctgaactgtgtgcatcttctctggaagggtttcaggcgtgatggaagaaggtgtgagctcaaagacctttaatccagttccccctctcagtttctgagcttcacagcaaatctcacctgccgtccctacccccaattctttcagcaattgtacggatggggagatatgtgccgtgctatatacataatttagaacaattgtgctagctgtaagcccaaagtctttcttcatctatcatttatctcatgatgttatctttcgtactcygtccccttcagtaagcacagcctgacatgtctcgtggcctttaccttcctccataaaaaagatggaaaagccgctcggcaccacctggagaagatgaggcagccctggagaacggtgctgtaggagcaggtgactgatgcagagaaatgtgccagtctggggacgcagctgaaggattgtagtggggaagggggaggggaaggggagaaaaaaaagagcaggaacattaatacatcttcctgaggtttgatgggacatatactgcctactgttccatctggtgcttatgatagcatggca

SEQ ID NO: 21048 - DNA, 600 bp, Chicken  19866894232175_1
ctgtttcatgaacttacatcattgttctgggactccagaatgtactcattaagaagaattacacagacaattaaagattctcattcaatatctcccttttattcgtggttaagaatatgaatgaaccacacacataagttactgacacagttctgtataggtgttttgtctggaatgttttgcccgtcagctttcctgttgcaagaaaatactgtaattaattaccttgttttctttgttagttaccacaaattactaatttctagttaattaacagatctgatgtggatgcagtggctraattccatatccaacataacaatatttaacagagatgttgctttttagaaggaattttatatagctgcatttagtattgctctcgctgatctaaaattggatctcttttgtactttagtgctgctgatgtataaaacttgggcaaaaaaakgagatttctttggtgtcctgctactgcccttgagctaggctttctgataacatattggagccccttctactattgcagctgcccatgtcaatccttctctccctctcactattattcctatcccctaggtgtgccagatcttccatggg

SEQ ID NO: 21049 - DNA, 600 bp, Chicken  19866894232175_2
tctgtataggtgttttgtctggaatgttttgcccgtcagctttcctgttgcaagaaaatactgtaattaattaccttgttttctttgttagttaccacaaattactaatttctagttaattaacagatctgatgtggatgcagtggctraattccatatccaacataacaatatttaacagagatgttgctttttagaaggaattttatatagctgcatttagtattgctctcgctgatctaaaattggatctcttttgtactttagtgctgctgatgtataaaacttgggcaaaaaaakgagatttctttggtgtcctgctactgcccttgagctaggctttctgataacatattggagccccttctactattgcagctgcccatgtcaatccttctctccctctcactattattcctatcccctaggtgtgccagatcttccatgggtcccaacatgcctcatggccagataagagcagcctactttgtgagatagtgggttcatctggcctaatacctgtcctccaacagctgctgatggaagaaattgagcaatgtccttcttccggactgtggaagagaggccttcttgtctaaa

SEQ ID NO: 21050 - DNA, 600 bp, Chicken  19866894232176_1
caccttaacattgtttaaatgtgggaagtattttggtggggctttttttggtgtttttttagatgaaaatacagaatcacttagtaatgagagctgtgctatgataggccatgcattcctctgaaggtatctcagtgggggattattcaaatgttgttgagaatttctccttttctagggaagaggcacaatgcttcctgttttctcccgaccttgggaagtgatagcacggaagaactgggccatgcactttatgatgatttgaagaagactccacatgttccttcctatcagcagatwaattgtgttgacagtatcatcaggtaggaaacgacaaagtggttatagtgaataagacttaaggtccggttagtgtaaggttattatgtatgcagtttgcattgactagattttgagttgggataaaattctaattgtggtaattaaaaatttaactttctttctcaatccagctcctgtatgtacttacacacaaactgtgttaccagccaatatactactaccttagcaaccgttaggttgaaacatccttgagagtagaacactcaactgaaattctttgtttactgcagtcattta

SEQ ID NO: 21051 - DNA, 599 bp, Chicken  19866894232180_1
  misc_feature (1)..(141): n is any nucleotide
nnnnnnnnnnnnnnnnnnnnnnnnnnnnnnnnnnnnnnnnnnnnnnnnnnnnnnnnnnnnnnnnnnnnnnnnnnnnnnnnnnnnnnnnnnnnnnnnnnnnnnnnnnnnnnnnnnnnnnnnnnnnnnnnnnnnnnnnnnnnnagaggtatttcagggtttatgcttatctattgagtaatttgttactcctgttagtcaagaggaatgatgaaccgtgcatctctcataatatgtattgatcttctttgaggtgagttaagggtctatcaataatttcttctggtctctgcataagataamatactgtactttctctccatttgcaattattattgtggcattaaattatctcagaatttttcattctttaaagcaataattcaaaaacatccttttattttaagagttaaccaattaataraattggatctggtttgttttgttgctctcgatttcactgttataatctgagttccctttattatcttcrgtttcatagtaactcgcagttttctggttttcaacaatattacttaatcagggtgttttttgttgttgttgtttgtttgtttgtttgtttgatgttgtcagtctgtcag

SEQ ID NO: 21052 - DNA, 599 bp, Chicken  19866894232180_2
  misc_feature (1)..(20): n is any nucleotide
nnnnnnnnnnnnnnnnnnnnagaggtatttcagggtttatgcttatctattgagtaatttgttactcctgttagtcaagaggaatgatgaaccgtgcatctctcataatatgtattgatcttctttgaggtgagttaagggtctatcaataatttcttctggtctctgcataagataamatactgtactttctctccatttgcaattattattgtggcattaaattatctcagaatttttcattctttaaagcaataattcaaaaacatccttttattttaagagttaaccaattaataraattggatctggtttgttttgttgctctcgatttcactgttataatctgagttccctttattatcttcrgtttcatagtaactcgcagttttctggttttcaacaatattacttaatcagggtgttttttgttgttgttgtttgtttgtttgtttgtttgatgttgtcagtctgtcagtcggaagagaccagaatgaggtgctggtgaattttgctttctctgactccagtgtggtttatggtggattaattctgatctggattttgaatgtaatgatgagcttttatcattctgtttc

SEQ ID NO: 21053 - DNA, 600 bp, Chicken  19866894232180_3
gttagtcaagaggaatgatgaaccgtgcatctctcataatatgtattgatcttctttgaggtgagttaagggtctatcaataatttcttctggtctctgcataagataamatactgtactttctctccatttgcaattattattgtggcattaaattatctcagaatttttcattctttaaagcaataattcaaaaacatccttttattttaagagttaaccaattaataraattggatctggtttgttttgttgctctcgatttcactgttataatctgagttccctttattatcttcrgtttcatagtaactcgcagttttctggttttcaacaatattacttaatcagggtgttttttgttgttgttgtttgtttgtttgtttgtttgatgttgtcagtctgtcagtcggaagagaccagaatgaggtgctggtgaattttgctttctctgactccagtgtggtttatggtggattaattctgatctggattttgaatgtaatgatgagcttttatcattctgtttcaaacacctagcatttgactagcccccattttttgttccagttagtacaaaaatcatgcctggatgactgc

SEQ ID NO: 21054 - DNA, 600 bp, Chicken  19866894232182_1
acctgcagaagagcaagctgtatttcatcacctttccaagcatttaaaggaaggctgacaactaaacttggagtacgtgacagtaaagatttttcaaggctggtaaataagtaaaccactctgcatggcacagcactcttaaccagtaatgtagttggaaatggttttaacaagtgccaagcactaaagtttagaagaagcatttctacgtacttgctcaaagaaagtagcttaagtaaccactgcgataatagaagagagacaagtaaaccaagcatctaaaatcataaatacctcttkaggtgttgctgcagctccaagaataacactttcatggttattctgccacagccccgtttctggagaaatgtcactttcattgatgtatcwatttagtacctgctgattagctttcccagagccacagcctgaagaaatacctttcaatccttagcagccgtgagattagcattagcattccactattaaccgcgagtgctgagctctgcagcactttcaagaatcacaaagctctgcccgttaaagattacccacttgcttctattcaaagttggcacagtttaatagtggttggtcacg

SEQ ID NO: 21055 - DNA, 600 bp, Chicken  19866894232182_2
ttttcaaggctggtaaataagtaaaccactctgcatggcacagcactcttaaccagtaatgtagttggaaatggttttaacaagtgccaagcactaaagtttagaagaagcatttctacgtacttgctcaaagaaagtagcttaagtaaccactgcgataatagaagagagacaagtaaaccaagcatctaaaatcataaatacctcttkaggtgttgctgcagctccaagaataacactttcatggttattctgccacagccccgtttctggagaaatgtcactttcattgatgtatcwatttagtacctgctgattagctttcccagagccacagcctgaagaaatacctttcaatccttagcagccgtgagattagcattagcattccactattaaccgcgagtgctgagctctgcagcactttcaagaatcacaaagctctgcccgttaaagattacccacttgcttctattcaaagttggcacagtttaatagtggttggtcacgatcaacaaaaacaagaagggcaaacggtgacgacagcacagatctcaggatcacgtgattttgttacataaagcttcaagagcgattaaa

SEQ ID NO: 21056 - DNA, 600 bp, Chicken  19866894232191_1
cagctattcagcaaaactaccacatgtccttagccaaggcaagagggatcagctgccgaatactggagctgatgaagagcagagctattatagtaagcaataaaaaaaacacaacccagaatggagactgatttttattattatttttttaacctaatggatgacatttataactggaaagtatgagtcagagtgtgctgtgccagcgtggggtctttatgatgttttcatcttgcttgttcttcttacttggctgggaccatgctgtcttgttgatttgtaacctttagtttccttgcrctgcttaggagatggacacatacatgtgtttgtgcatgtgtgtcagcagtgaccatagctcactgaactgaatgcaaagagataaattatccaactcagatattttttaaggagaagtgagactgcagtgttaagacctcttagataaattattgctgccaaagtgttcttgctgccaaatgtggcagtgacgtgagtgtgggaggcaaccacccacttgctagtgaggacaaaacggacacagctcagtctccgcaaccactaatctcatccaaaaaagctttaaaaacagagaactgt

SEQ ID NO: 21057 - DNA, 600 bp, Chicken  19866894232197_1
aaggagtgggacgagttgccctgtgatgtacaggctccatatccaagatggtatggttaggttgtgtatctgctgcctgccaatttcttttgatgcctcctgttcgtgtaaatgagatagcaaacagttgtctttacttactccatgccaattcatgaatttataaacttcagtcttcctcagtgttagcattatttctcacagatgtatacttaaagagaatttggtattttttaaacaatgctagatgagtttacttccttttatgaaaaataacatagccaatagtggaaatgattraaagtcaatcttgtatctcagacttcaacagatacacaactttactctaaaactatttaaatatttattgcttaatgctgcaaatacccttcttgaaaaccaacagaaatggcattcaccatattcaaacaagaaataagaagtgcaatcctaatgatttaagacaacttgaatgaattctcccgtgctcctagagaccaaattgattggggaaaaaagtctgaaatagagctacttgaattcttccctgctccctcaaccatatcacctacggagattcaataatacaaatccttttta

SEQ ID NO: 21058 - DNA, 599 bp, Chicken  19866894232203_1
  misc_feature (1)..(97): n is any nucleotide
nnnnnnnnnnnnnnnnnnnnnnnnnnnnnnnnnnnnnnnnnnnnnnnnnnnnnnnnnnnnnnnnnnnnnnnnnnnnnnnnnnnnnnnnnnnnnnnnnagaggtttgtttgctttccttgccccatcacaaagtgctgggctagccagggggcataggaagcagagcagtttgattttaattgatttgtaaaccagggcttaacttacaagtagtgctctccatcaagattccagcctttctgtctcctttgctggcagacatcggtgccctgtggggtgagctgtgcagggggtgggtawccacaactggagctgcccttcccaaagggcttcactccctttcactttgcatatgtcaccactagcacagggcaggggcaggagttgcacccagaggccgcgcgtggtgcttgcgtcgtccctacacctgagcacacagggctgaaccccaggggrtggggacagccctacagcctgcacgctgctgcttcaggtcaccagcagtcctggaattgggtttcccttttgcacacgcgacggtctgctgagcaggagggaacacccgagcactgatggaggatgccgacctccttccgtga

SEQ ID NO: 21059 - DNA, 600 bp, Chicken  19866894232203_2
gaagcagagcagtttgattttaattgatttgtaaaccagggcttaacttacaagtagtgctctccatcaagattccagcctttctgtctcctttgctggcagacatcggtgccctgtggggtgagctgtgcagggggtgggtawccacaactggagctgcccttcccaaagggcttcactccctttcactttgcatatgtcaccactagcacagggcaggggcaggagttgcacccagaggccgcgcgtggtgcttgcgtcgtccctacacctgagcacacagggctgaaccccaggggrtggggacagccctacagcctgcacgctgctgcttcaggtcaccagcagtcctggaattgggtttcccttttgcacacgcgacggtctgctgagcaggagggaacacccgagcactgatggaggatgccgacctccttccgtgaggcttccacttctgtcgctcttcataaccatccctggcctgggtgttttgtgatgttataagtattgtcrtttcaatcagtgattatcgtctgtgattaacccttcctgcgttgggaagctggggaaggtctcgcctggagggggtgtcgtaaaaaa

SEQ ID NO: 21060 - DNA, 502 bp, Chicken  19866894232203_3
gggcaggggcaggagttgcacccagaggccgcgcgtggtgcttgcgtcgtccctacacctgagcacacagggctgaaccccaggggrtggggacagccctacagcctgcacgctgctgcttcaggtcaccagcagtcctggaattgggtttcccttttgcacacgcgacggtctgctgagcaggagggaacacccgagcactgatggaggatgccgacctccttccgtgaggcttccacttctgtcgctcttcataaccatccctggcctgggtgttttgtgatgttataagtattgtcrtttcaatcagtgattatcgtctgtgattaacccttcctgcgttgggaagctggggaaggtctcgcctggagggggtgtcgtaaaaaattctgctctcagatttaatccgtgctgacaaggagctctcgttgaggacgaggaggcagggagataagaaaacagggagatgtggtcggaaggacgtaagaagttgtagttgaag

SEQ ID NO: 21061 - DNA, 600 bp, Chicken  19866894232208_1
tagtgaaaattaaaaaaaccctttaagactttttccagtttttcttgtgttctgcttatggtattgaagttaggagctgttagtagcaccaacagaaaggctaaaaaactagatttcttgtgaaaatcctccaatccttcagattgtaattgagagtttatcttaaaattggtgctcctaccctaccttccaggatgactgaagttatcaggcctgcctacctcctttcagtcagctgtaaagatttttaaggaggaagatggtagtcttcagattcatcccaaaagaatctctgtattwcagcagggagaacttaattccaaaagctgaaaatagcttcgaatccaggaaaacaaagttttctgtgtggcatattatgcgtttgaaacaaaaaaatatgcgtgtttttttctcgtcctgaactgaattcattgaaagatactctatatgttctgcctgtgatagcttgaactgagaactttaattagtttgtagggctttttattattattttatctttgttcattattttttgctcagtctctgtggatgttctgtattttcatcatcaaataacttgctggctatttttgtcaaaca

SEQ ID NO: 21062 - DNA, 600 bp, Chicken  19866894232217_1
aaattttatgttgttttcataatgtcaaataatttgagacttatccttctatgtgatatcttacagagatacagaactttttcccaaactacatagtagtaaatatgaagctcaacaatgcattatcacagctacctgcttttccagctgaaatatgagtaatttcatagattttacctcatcttctgaattgtgcctagagaaaaccatacagtttacacagagcataagaactttgaaatcagtcactttacttactgccttcctgctgctgtttgcactagactgagtgagaagatytccccttggacttccagcaaagtttaattaagtcctacattattaaaaattcatttaatagaaagaagaacactcaaagctcccatgtcataatcagtaaagatacataagagctctgtatttttgagacagtacartgtatgaatggaaaatatttgctacctctgaaaatgtaagaatattttaaggtaaaataatacattcatcagaaacagtggacaatgatatttttcatctatactatagtattttcatacgtgtattatgtgagakaaaattcaacattgtaactttaatcct

SEQ ID NO: 21063 - DNA, 600 bp, Chicken  19866894232217_2
gcttttccagctgaaatatgagtaatttcatagattttacctcatcttctgaattgtgcctagagaaaaccatacagtttacacagagcataagaactttgaaatcagtcactttacttactgccttcctgctgctgtttgcactagactgagtgagaagatytccccttggacttccagcaaagtttaattaagtcctacattattaaaaattcatttaatagaaagaagaacactcaaagctcccatgtcataatcagtaaagatacataagagctctgtatttttgagacagtacartgtatgaatggaaaatatttgctacctctgaaaatgtaagaatattttaaggtaaaataatacattcatcagaaacagtggacaatgatatttttcatctatactatagtattttcatacgtgtattatgtgagakaaaattcaacattgtaactttaatcctgccatctctgactcgtgattattgccaggagcactatcctcttccaatagagttatcagagcaaagcactatattcgtttacaatartgtgccatgtaaaaatacagacaaaagataaagcacagaattttaaaact

SEQ ID NO: 21064 - DNA, 600 bp, Chicken  19866894232217_3
gtttgcactagactgagtgagaagatytccccttggacttccagcaaagtttaattaagtcctacattattaaaaattcatttaatagaaagaagaacactcaaagctcccatgtcataatcagtaaagatacataagagctctgtatttttgagacagtacartgtatgaatggaaaatatttgctacctctgaaaatgtaagaatattttaaggtaaaataatacattcatcagaaacagtggacaatgatatttttcatctatactatagtattttcatacgtgtattatgtgagakaaaattcaacattgtaactttaatcctgccatctctgactcgtgattattgccaggagcactatcctcttccaatagagttatcagagcaaagcactatattcgtttacaatartgtgccatgtaaaaatacagacaaaagataaagcacagaattttaaaactatttatcatgtagcctcccagataaacttctttcagcttcctgcctttccttttaaaaattgtaggaattgtgtgtaatcttttgtcatattgcctatcaatgttattctaatgtaaggctgtggctttgacatag

SEQ ID NO: 21065 - DNA, 600 bp, Chicken  19866894232217_4
tcataatcagtaaagatacataagagctctgtatttttgagacagtacartgtatgaatggaaaatatttgctacctctgaaaatgtaagaatattttaaggtaaaataatacattcatcagaaacagtggacaatgatatttttcatctatactatagtattttcatacgtgtattatgtgagakaaaattcaacattgtaactttaatcctgccatctctgactcgtgattattgccaggagcactatcctcttccaatagagttatcagagcaaagcactatattcgtttacaatartgtgccatgtaaaaatacagacaaaagataaagcacagaattttaaaactatttatcatgtagcctcccagataaacttctttcagcttcctgcctttccttttaaaaattgtaggaattgtgtgtaatcttttgtcatattgcctatcaatgttattctaatgtaaggctgtggctttgacatagatttgtgcttatactagcctaagaagacattctttggtgtttctaggttgaacagacagtgtgggtattctcctgcattaatcatttgtgatctaattactgtgttctatagca

SEQ ID NO: 21066 - DNA, 600 bp, Chicken  19866894232232_1
taatgaataacatcaatagaagtgagtaagtgggagcaggtttgaatgcaccaagtattcaaatgtgcttgagtatatttcccagaggagattatatcggctgtttaagcttaatcactagtgaccagagtttagctgttaaagtaaggtgattaggagctgcattattacctgcatctctttacatttaccaggctaaatccaattctcagttacagtgcttaaaatctgcattcagtccctgagattcaacagcaaaacagagcattccattcattgagctcagctatactaacgtckggctacaatgaatgagagtgatcaggaggcaagccctgtgtacgtggtcacctggaggacagcatgatcctatttttggatcattttaatcaagaaaatcacaagtaaaattccaaacactttcaaattcttcataaccctccctccagatggacctcatccataccgtgtcattcctaggggggctgccattagtaacgcaaattgttctgctattcacgtctggttttggttagaggggaaacacataccctggggacaagtgcttttctcttttcctgaaaatcaaagtatcacact

SEQ ID NO: 21067 - DNA, 599 bp, Chicken  19866894232233_1
  misc_feature (1)..(97): n is any nucleotide
nnnnnnnnnnnnnnnnnnnnnnnnnnnnnnnnnnnnnnnnnnnnnnnnnnnnnnnnnnnnnnnnnnnnnnnnnnnnnnnnnnnnnnnnnnnnnnnnnttctcctgtgtgcaggagcacctcagtgatgtttagagagtatgaagcagtgccataatctaacttgatgaagctcagcagtatgtacaactggtgttgcattcagcaccttgtgaacagatctgcagggatcctgtgtggccataaggccacagctcctgctttctgggaggacagtacgcctcctgaacacgggatgtggrggatgtgaacatggtccaacctctgctgccataccaccaacatctgtctctggcacttgggtcaacataatgaaataggargcattactttcagagcagcccttgtataagcagtgcaaattaacttgagatgggaataaacagaactatttctaaatggataagtaaatgaaggccatactttcctgagaccacgttttattttataggtgactaacaatgtatatttcttggtgagagcagtgctgaggagggaggtgccatccttgtaaacattaacattttatatgttttaactt

SEQ ID NO: 21068 - DNA, 599 bp, Chicken  19866894232233_2
  misc_feature (1)..(16): n is any nucleotide
nnnnnnnnnnnnnnnnttctcctgtgtgcaggagcacctcagtgatgtttagagagtatgaagcagtgccataatctaacttgatgaagctcagcagtatgtacaactggtgttgcattcagcaccttgtgaacagatctgcagggatcctgtgtggccataaggccacagctcctgctttctgggaggacagtacgcctcctgaacacgggatgtggrggatgtgaacatggtccaacctctgctgccataccaccaacatctgtctctggcacttgggtcaacataatgaaataggargcattactttcagagcagcccttgtataagcagtgcaaattaacttgagatgggaataaacagaactatttctaaatggataagtaaatgaaggccatactttcctgagaccacgttttattttataggtgactaacaatgtatatttcttggtgagagcagtgctgaggagggaggtgccatccttgtaaacattaacattttatatgttttaacttctgctccaaagaaatgcacaaatgagcagcatagctaaatcaatctgttgctcacaagtgctcaacaaaaacatctaccta

SEQ ID NO: 21069 - DNA, 509 bp, Chicken  19866894232233_3
aaattaacttgagatgggaataaacagaactatttctaaatggataagtaaatgaaggccatactttcctgagaccacgttttattttataggtgactaacaatgtatatttcttggtgagagcagtgctgaggagggaggtgccatccttgtaaacattaacattttatatgttttaacttctgctccaaagaaatgcacaaatgagcagcatagctaaatcaatctgttgctcacaagtgctcaacaaaaacatctacctaaaatcaaggcagttctgaagggttaatcaatggtaartgaatctacattaaaataggtgagaatgctgtgctgctgcgctccagtttcaacagagacttaagaagatttcatgcagtaaaaagaggtactgtacaacagtgggaggacagaggcagcacttcctcccttattaactgcagatcatctgcacagagacctctccccatcttccagggctttacccctttctgcccaaatgtcattca

SEQ ID NO: 21070 - DNA, 600 bp, Chicken  19866894232239_1
aaaaaatatattagtgaccctgcagcttctcagataatcaccacgaacatttagtcaatgcagtcaagtttctcagtttatctatcagaaacagtgccattaagtttatttggtgcaaatattgcaaggctgacttacttagctgccttcagcattaggcaacttagaaatctgcctacatcactttttcagagaggtttagttcattattttcagccaatcagttaacgcttaactaatcatttttgtaacaaatcgcattcaacctgtcaaagtccacatggttgcctcaagacctckctgacatacaacctactacagaacctgctrcccaggcttcaagtttggaaaacagcagaagtctcaatcacacacattaaatacacaaagcagcatcttcctaacttaaacatatttactaaaggaaacagtgttcaaaccatggttctgtcttaaagcagagtaaatctgagctgcaacttgacatrcatgattcatttctgctttacagtgccataattctgagccaaataattcaaaaaaaaaaaaamcccatgcttaaaaaatacaaattaattagacagtaaacttttgagcttg

SEQ ID NO: 21071 - DNA, 600 bp, Chicken  19866894232239_2
cagataatcaccacgaacatttagtcaatgcagtcaagtttctcagtttatctatcagaaacagtgccattaagtttatttggtgcaaatattgcaaggctgacttacttagctgccttcagcattaggcaacttagaaatctgcctacatcactttttcagagaggtttagttcattattttcagccaatcagttaacgcttaactaatcatttttgtaacaaatcgcattcaacctgtcaaagtccacatggttgcctcaagacctckctgacatacaacctactacagaacctgctrcccaggcttcaagtttggaaaacagcagaagtctcaatcacacacattaaatacacaaagcagcatcttcctaacttaaacatatttactaaaggaaacagtgttcaaaccatggttctgtcttaaagcagagtaaatctgagctgcaacttgacatrcatgattcatttctgctttacagtgccataattctgagccaaataattcaaaaaaaaaaaaamcccatgcttaaaaaatacaaattaattagacagtaaacttttgagcttgcatgcatctcrttatcagattattaagtga

SEQ ID NO: 21072 - DNA, 600 bp, Chicken  19866894232239_3
gtttatttggtgcaaatattgcaaggctgacttacttagctgccttcagcattaggcaacttagaaatctgcctacatcactttttcagagaggtttagttcattattttcagccaatcagttaacgcttaactaatcatttttgtaacaaatcgcattcaacctgtcaaagtccacatggttgcctcaagacctckctgacatacaacctactacagaacctgctrcccaggcttcaagtttggaaaacagcagaagtctcaatcacacacattaaatacacaaagcagcatcttcctracttaaacatatttactaaaggaaacagtgttcaaaccatggttctgtcttaaagcagagtaaatctgagctgcaacttgacatrcatgattcatttctgctttacagtgccataattctgagccaaataattcaaaaaaaaaaaaamcccatgcttaaaaaatacaaattaattagacagtaaacttttgagcttgcatgcatctcrttatcagattattaagtgaaagcacaaaacaatagctctttgggagtattcccagatgaacatttatactgacaggactacttgaaaagcca

SEQ ID NO: 21073 - DNA, 600 bp, Chicken  19866894232239_4
tcagagaggtttagttcattattttcagccaatcagttaacgcttaactaatcatttttgtaacaaatcgcattcaacctgtcaaagtccacatggttgcctcaagacctckctgacatacaacctactacagaacctgctrcccaggcttcaagtttggaaaacagcagaagtctcaatcacacacattaaatacacaaagcagcatcttcctaacttaaacatatttactaaaggaaacagtgttcaaaccatggttctgtcttaaagcagagtaaatctgagctgcaacttgacatrcatgattcatttctgctttacagtgccataattctgagccaaataattcaaaaaaaaaaaaamcccatgcttaaaaaatacaaattaattagacagtaaacttttgagcttgcatgcatctcrttatcagattattaagtgaaagcacaaaacaatagctctttgggagtattcccagatgaacatttatactgacaggactacttgaaaagccaattaaaataaaaactcatgagttgtactttgctgcagtctgtgatctttactccaattcagacaactaagtgtgagaagacattt

SEQ ID NO: 21074 - DNA, 600 bp, Chicken  19866894232239_5
caaatcgcattcaacctgtcaaagtccacatggttgcctcaagacctckctgacatacaacctactacagaacctgctrcccaggcttcaagtttggaaaacagcagaagtctcaatcacacacattaaatacacaaagcagcatcttcctaacttaaacatatttactaaaggaaacagtgttcaaaccatggttctgtcttaaagcagagtaaatctgagctgcaacttgacatrcatgattcatttctgctttacagtgccataattctgagccaaataattcaaaaaaaaaaaaamcccatgcttaaaaaatacaaattaattagacagtaaacttttgagcttgcatgcatctcrttatcagattattaagtgaaagcacaaaacaatagctctttgggagtattcccagatgaacatttatactgacaggactacttgaaaagccaattaaaataaaaactcatgagttgtactttgctgcagtctgtgatctttactccaattcagacaactaagtgtgagaagacattttaccactgctgagcacagggcactgagatyctctcagtsagggcttcctgtgtccaagcagcc

SEQ ID NO: 21075 - DNA, 600 bp, Chicken  19866894232239_6
cctactacagaacctgctrcccaggcttcaagtttggaaaacagcagaagtctcaatcacacacattaaatacacaaagcagcatcttcctaacttaaacatatttactaaaggaaacagtgttcaaaccatggttctgtcttaaagcagagtaaatctgagctgcaacttgacatrcatgattcatttctgctttacagtgccataattctgagccaaataattcaaaaaaaaaaaaamcccatgcttaaaaaatacaaattaattagacagtaaacttttgagcttgcatgcatctcrttatcagattattaagtgaaagcacaaaacaatagctctttgggagtattcccagatgaacatttatactgacaggactacttgaaaagccaattaaaataaaaactcatgagttgtactttgctgcagtctgtgatctttactccaattcagacaactaagtgtgagaagacattttaccactgctgagcacagggcactgagatyctctcagtsagggcttcctgtgtccaagcagccagtgaccaagaagtttaaaacatataaactcmcactgatacataaattgtgatccagaag

SEQ ID NO: 21076 - DNA, 600 bp, Chicken  19866894232239_7
attctgagccaaataattcaaaaaaaaaaaaamcccatgcttaaaaaatacaaattaattagacagtaaacttttgagcttgcatgcatctcrttatcagattattaagtgaaagcacaaaacaatagctctttgggagtattcccagatgaacatttatactgacaggactacttgaaaagccaattaaaataaaaactcatgagttgtactttgctgcagtctgtgatctttactccaattcagacaactaagtgtgagaagacattttaccactgctgagcacagggcactgagatyctctcagtsagggcttcctgtgtccaagcagccagtgaccaagaagtttaaaacatataaactcmcactgatacataaattgtgatccagaaggactgtaacatgttgaataatgctaaaatccagattatgaacttcattagtgtcatatgtgtaaaggctgcacaaattctaatttcctccatctgaaagctttatgaaagtattttacacttttaaagtcgacacagtttaagaatagggcatctgagcagctctgaaggtaagagagaagtggaaaagagaaaaagaaatgaaatt

SEQ ID NO: 21077 - DNA, 600 bp, Chicken  19866894232239_8
caaataattcaaaaaaaaaaaaamcccatgcttaaaaaatacaaattaattagacagtaaacttttgagcttgcatgcatctcrttatcagattattaagtgaaagcacaaaacaatagctctttgggagtattcccagatgaacatttatactgacaggactacttgaaaagccaattaaaataaaaactcatgagttgtactttgctgcagtctgtgatctttactccaattcagacaactaagtgtgagaagacattttaccactgctgagcacagggcactgagatyctctcagtsagggcttcctgtgtccaagcagccagtgaccaagaagtttaaaacatataaactcmcactgatacataaattgtgatccagaaggactgtaacatgttgaataatgctaaaatccagattatgaacttcattagtgtcatatgtgtaaaggctgcacaaattctaatttcctccatctgaaagctttatgaaagtattttacacttttaaagtcgacacagtttaagaatagggcatctgagcagctctgaaggtaagagagaagtggaaaagagaaaaagaaatgaaatttatcaccac

SEQ ID NO: 21078 - DNA, 600 bp, Chicken  19866894232239_9
gtaaacttttgagcttgcatgcatctcrttatcagattattaagtgaaagcacaaaacaatagctctttgggagtattcccagatgaacatttatactgacaggactacttgaaaagccaattaaaataaaaactcatgagttgtactttgctgcagtctgtgatctttactccaattcagacaactaagtgtgagaagacattttaccactgctgagcacagggcactgagatyctctcagtsagggcttcctgtgtccaagcagccagtgaccaagaagtttaaaacatataaactcmcactgatacataaattgtgatccagaaggactgtaacatgttgaataatgctaaaatccagattatgaacttcattagtgtcatatgtgtaaaggctgcacaaattctaatttcctccatctgaaagctttatgaaagtattttacacttttaaagtcgacacagtttaagaatagggcatctgagcagctctgaaggtaagagagaagtggaaaagagaaaaagaaatgaaatttatcaccaccttcactatgatacacagaaaagacttctcagctctccctttacaccactttaaaa

SEQ ID NO: 21079 - DNA, 600 bp, Chicken  19866894232240_1
tttatattcatctcatacattacgcagacttgatcttcccagcacttatgccttgaaaagagatggtggggtgcatacggcttacttctatcctttaaagaatgcctggctaattcagctctttagaagatgacaagaagtgattggctaccttcagtattttgtgtctttaatattatggtgttgtggtgctttgttctttgagtagcgtccctgaagtgtgaagcaggtgaaacttacttgaattgcaccctcccttcaggtacttatggacattgatgagtttccctgagctgcctyctctgcaggcagaacaggcccagctctcacagcctcttctcaagggagaggtgctgcggacccttcagtgtcttggtgttcctctgttggattctcttcagtatgtcatacttctcttgaactggggagcaaagaactggacccagtgctctatatgcagctttaccagccttgagtataggggaaggatcacctctcttgacctgctggcaatactttgcctaatgcagcctcctcagcagcaaagggcatgcggttggctcatgtctacctcagtgtttgtcagagcggtcctttcct

SEQ ID NO: 21080 - DNA, 600 bp, Chicken  19866894232242_1
gaagaagcagttggaggagaggtgagacctgggccgccaccaggatacctttatgggcatcctgcagaggtgagacctatggggagcatcccaatggtggccaggtatgcagaggagagtgctaaggatgcaaaggtgaaaggtgttgggatgaaagcgttgggattggatggatgagcatggcatattggctgggtgatgcctgggggtgtgagtggggaaagctgtgtgaacagggtggaaaccagctccatgctgagggacttggaatactccctgagcaaaatggttaaatgtccraacaacactaaaaatagctccttcttgggacagccaggagaagcaatggtagattcaatcctgtgcaggccacagggctaatttaaaatgtgattgaagagcctctctaaaagtgcccatcatgtacttaaagtcggtggcattgtaggacttttttttcttwaaaaaaaaaaaaaaagaaagaaagaaaaaaatggaaaagttcattgcgacttcatttcaaaaaggcaatccacataaaagtggtgaggcttgttaaaaagaaattaaaaagcagctgtcaaaagggtaaaattcttc

SEQ ID NO: 21081 - DNA, 528 bp, Chicken  19866894232242_2
gattggatggatgagcatggcatattggctgggtgatgcctgggggtgtgagtggggaaagctgtgtgaacagggtggaaaccagctccatgctgagggacttggaatactccctgagcaaaatggttaaatgtccraacaacactaaaaatagctccttcttgggacagccaggagaagcaatggtagattcaatcctgtgcaggccacagggctaatttaaaatgtgattgaagagcctctctaaaagtgcccatcatgtacttaaagtcggtggcattgtaggacttttttttcttwaaaaaaaaaaaaaaagaaagaaagaaaaaaatggaaaagttcattgcgacttcatttcaaaaaggcaatccacataaaagtggtgaggcttgttaaaaagaaattaaaaagcagctgtcaaaagggtaaaattcttccaggggacatagacattgtttaaagatcttctattagatgatgagagtagatctatacaattatcaaaagagactttaaaagggcaaaaaa

SEQ ID NO: 21082 - DNA, 527 bp, Chicken  19866894232242_3
attggatggatgagcatggcatattggctgggtgatgcctgggggtgtgagtggggaaagctgtgtgaacagggtggaaaccagctccatgctgagggacttggaatactccctgagcaaaatggttaaatgtccraacaacactaaaaatagctccttcttgggacagccaggagaagcaatggtagattcaatcctgtgcaggccacagggctaatttaaaatgtgattgaagagcctctctaaaagtgcccatcatgtacttaaagtcggtggcattgtaggacttttttttcttwwaaaaaaaaaaaaaagaaagaaagaaaaaaatggaaaagttcattgcgacttcatttcaaaaaggcaatccacataaaagtggtgaggcttgttaaaaagaaattaaaaagcagctgtcaaaagggtaaaattcttccaggggacatagacattgtttaaagatcttctattagatgatgagagtagatctatacaattatcaaaagagactttaaaagggcaaaaaa

SEQ ID NO: 21083 - DNA, 599 bp, Chicken  19866894232255_1
  misc_feature (1)..(53): n is any nucleotide
nnnnnnnnnnnnnnnnnnnnnnnnnnnnnnnnnnnnnnnnnnnnnnnnnnnnncagagatgtgaacctgtgctgagtaatggcaataccagtgcacctggggacttctcagagcaaaatgtgctttctatgctaaattgcattcgttcagcagacccagataaaatgagggcattggcagaaagagtcctcaaggagatggagctgggggctgtggcttgggacaggtgcagctcttgcaggcttagtggagttgagctcttctgtttcctgctgcagccaacggggatgcaggtgcagmtggatattggcagcgatgctgtgcaggaacagaggccagtgacaccccacaccatgaccctgatggggacggaaaagcaaatgtcaaggtctgggagagctgcaaaaaagccacgcagacgctgagcacaaactgcctctgagtcccacagcacagaacagctcctsttcttctgccttgggagaaaacgtgcatggggttctctggagagctcgcttggcacgtgtgtggttggcatggggcaggcaggtccctcctctgccamyagtggggctgtccatccttggtattggcttggg

SEQ ID NO: 21084 - DNA, 600 bp, Chicken  19866894232255_2
agggcattggcagaaagagtcctcaaggagatggagctgggggctgtggcttgggacaggtgcagctcttgcaggcttagtggagttgagctcttctgtttcctgctgcagccaacggggatgcaggtgcagmtggatattggcagcgatgctgtgcaggaacagaggccagtgacaccccacaccatgaccctgatggggacggaaaagcaaatgtcaaggtctgggagagctgcaaaaaagccacgcagacgctgagcacaaactgcctctgagtcccacagcacagaacagctcctsttcttctgccttgggagaaaacgtgcatggggttctctggagagctcgcttggcacgtgtgtggttggcatggggcaggcaggtccctcctctgccamyagtggggctgtccatccttggtattggcttgggatcatatccttgtggtggttttgttcccacctcataactgctgccttgggcagcccgtggtgctcttggttgagaaataaagatgttgcacactgttacagtcgaaggctgtgattcaatgagtggcaacttctgctcagcgtcagatttctcagtggtgcttagcat

SEQ ID NO: 21085 - DNA, 600 bp, Chicken  19866894232255_3
tttcctgctgcagccaacggggatgcaggtgcagmtggatattggcagcgatgctgtgcaggaacagaggccagtgacaccccacaccatgaccctgatggggacggaaaagcaaatgtcaaggtctgggagagctgcaaaaaagccacgcagacgctgagcacaaactgcctctgagtcccacagcacagaacagctcctsttcttctgccttgggagaaaacgtgcatggggttctctggagagctcgcttggcacgtgtgtggttggcatggggcaggcaggtccctcctctgccamyagtggggctgtccatccttggtattggcttgggatcatatccttgtggtggttttgttcccacctcataactgctgccttgggcagcccgtggtgctcttggttgagaaataaagatgttgcacactgttacagtcgaaggctgtgattcaatgagtggcaacttctgctcagcgtcagatttctcagtggtgcttagcataggtggggtgagttagtgagcagggatgcaatgggcactggatgtgaccccactactttgacagccctgcagtgttttggggcactgctgtgctgcat

SEQ ID NO: 21086 - DNA, 600 bp, Chicken  19866894232255_4
ttcctgctgcagccaacggggatgcaggtgcagmtggatattggcagcgatgctgtgcaggaacagaggccagtgacaccccacaccatgaccctgatggggacggaaaagcaaatgtcaaggtctgggagagctgcaaaaaagccacgcagacgctgagcacaaactgcctctgagtcccacagcacagaacagctcctsttcttctgccttgggagaaaacgtgcatggggttctctggagagctcgcttggcacgtgtgtggttggcatggggcaggcaggtccctcctctgccamyagtggggctgtccatccttggtattggcttgggatcatatccttgtggtggttttgttcccacctcataactgctgccttgggcagcccgtggtgctcttggttgagaaataaagatgttgcacactgttacagtcgaaggctgtgattcaatgagtggcaacttctgctcagcgtcagatttctcagtggtgcttagcataggtggggtgagttagtgagcagggatgcaatgggcactggatgtgaccccactactttgacagccctgcagtgttttggggcactgctgtgctgcatg

SEQ ID NO: 21087 - DNA, 600 bp, Chicken  19866894232255_5
acactgttacagtcgaaggctgtgattcaatgagtggcaacttctgctcagcgtcagatttctcagtggtgcttagcataggtggggtgagttagtgagcagggatgcaatgggcactggatgtgaccccactactttgacagccctgcagtgttttggggcactgctgtgctgcatgaagactgaaatgcattttaaagttgcatttttgtgcttctctgggattcccatgcctggggctggttatgttggggcagttttcctgtctgcaagaactcacgggatgatccttatgagctrtacagagccatggttttgtcgggagcagaggggttttccctctgcctccttcccctcagtcatgggaggtcacagccgtcagccccacgtcatgctgggtttgggaaccttctgtactttgycactgtgggctgtcatgggacggtgactcaaagggagcagaaggggaagggaacagggaaagatgacgaagctctgctgctccaaagctcccggcacagctgtgacctgtgagactttcatctgcttgcagcctgctttgtgcactgctggggtttggtgctgcagtcccaaattcct

SEQ ID NO: 21088 - DNA, 600 bp, Chicken  19866894232255_6
gtgaccccactactttgacagccctgcagtgttttggggcactgctgtgctgcatgaagactgaaatgcattttaaagttgcatttttgtgcttctctgggattcccatgcctggggctggttatgttggggcagttttcctgtctgcaagaactcacgggatgatccttatgagctrtacagagccatggttttgtcgggagcagaggggttttccctctgcctccttcccctcagtcatgggaggtcacagccgtcagccccacgtcatgctgggtttgggaaccttctgtactttgycactgtgggctgtcatgggacggtgactcaaagggagcagaaggggaagggaacagggaaagatgacgaagctctgctgctccaaagctcccggcacagctgtgacctgtgagactttcatctgcttgcagcctgctttgtgcactgctggggtttggtgctgcagtcccaaattcctggtggtgatgctgtgtgttcaggggaccatttggtgtgggcacaacgatggcttcaggtgacggtggtctgttacctgcgctggaaaatctcagctcctcactcagactgctttgccccaaa

SEQ ID NO: 21089 - DNA, 600 bp, Chicken  19866894232265_1
gcccataaggcgacacattttaaaaggatgtcctgtggttaactatttatgcttatcttagtaacatattaagtataaaatgactaaattaattctttaagctcaaattctttactaaatgagttcaatttataatctctttgattttaatactgtaaaattattacagattatatcttattacagcttgtattttattatgcttaccttctttcttcctatcatctttcatttttatatccttcttgaataaaatttatgcagcatatgtccatttattggtttttggtagtgaagcaycaatgctgaagttggtatattttgcagataactggagtattctgtgtggtgcttttgcctgccattttttattcctaggtttctgtacactaggtcttagaacattctaaaaagaaataactttggaagtgccttcatcttttttcttttttgttttttactggtctaataagaaaagtggatgtttacagtacctcattgtgagcacatccttagaaaggtagtccttttgggttcctcatctaaatatcaggtgtaagcagccactttgtagaagatagtttaaagcaagataacaag

SEQ ID NO: 21090 - DNA, 600 bp, Chicken  19866894232268_1
tcctactttcctgttgactatagcagaattgaattttattcaacccaactcaccctgggtcagcaaaacccttcacctttgtggaagaaaagttaactccttaaaggctgcctgtttttgaacataccttatcggtacaccaaggttctatgcacaaccaaagggaaagggttaatagcacagtttatggaatgtgggagaaatgaggctgtgaggtacatatttgctaatgtgtttaaagcaaagccagagttcactggaccatggtttggtttgttttcattttcgaactattcattmttttctttccatagtatttgctcrttgtctcaatgatttggcaaaaaattctgctaaatatatttaatataatgttagcagtgactactagcattaacatccctacaaaagatgaaggtttagtggaaattagtcctgtggaatcatgtcatttaagagaatgacagcatcttctcttcacattcattcagctggtatcatgggcgtgctggaagaaaggtaatttacagcataatttacggaattatatggctaaatatctgttgatgtgcagaaactgttcttgttgggcaggagaaa

SEQ ID NO: 21091 - DNA, 600 bp, Chicken  19866894232268_2
agaattgaattttattcaacccaactcaccctgggtcagcaaaacccttcacctttgtggaagaaaagttaactccttaaaggctgcctgtttttgaacataccttatcggtacaccaaggttctatgcacaaccaaagggaaagggttaatagcacagtttatggaatgtgggagaaatgaggctgtgaggtacatatttgctaatgtgtttaaagcaaagccagagttcactggaccatggtttggtttgttttcattttcgaactattcattmttttctttccatagtatttgctcrttgtctcaatgatttggcaaaaaattctgctaaatatatttaatataatgttagcagtgactactagcattaacatccctacaaaagatgaaggtttagtggaaattagtcctgtggaatcatgtcatttaagagaatgacagcatcttctcttcacattcattcagctggtatcatgggcgtgctggaagaaaggtaatttacagcataatttacggaattatatggctaaatatctgttgatgtgcagaaactgttcttgttgggcaggagaaaaataatttactaatgttctaatat

SEQ ID NO: 21092 - DNA, 600 bp, Chicken  19866894232270_1
cttttttgtcattctattgccaatcgcttactgctaactgctctgctaaccaggatcatgtcatggagatagtggctgagtttgacagatagcaaagctggcttcccccccaagagtgataaatgcaaaggcctgggggagacacatgccagaacttgcaacctgcacgtcacttaaacatagtgcacaatgacatggaggatggcacgacatgagtagagagaagcaaattcttgggggaaaccccagaaggcactcaacattaagatgttcttgcagtgaataaggaaagagctctcrtgcagctaaggttacggatggcaggcttctatctcagaacagtcccatttaaaatgacagaaaataacactgaacaggcttcgacagcagatggaatcctattgcataattcaattttaatgactaaagaagtctaaaatatgaaggttttgttttgcaaaacagaagacttatatgaaattaagcagacaaatctgctactgtaagaagttacatatgtttaatacatgctaattttatattggaataattaatctgcaagaatatagtgttaaaaagatacccttgtgctaaactcag

SEQ ID NO: 21093 - DNA, 600 bp, Chicken  19866894232270_2
atatgaaggttttgttttgcaaaacagaagacttatatgaaattaagcagacaaatctgctactgtaagaagttacatatgtttaatacatgctaattttatattggaataattaatctgcaagaatatagtgttaaaaagatacccttgtgctaaactcagtgattaaaagaatggaagatccaggagaaaaccaagcttcctaaatacaatctacatataccactaaaaggagtcttattaccaaggttaagtattccattcaatttggatactgaataactttaataccaaaaaagraaaaaaaaaatcactaaaaaagtaggtagtagcattcaaaacctacaatgaagagataactatttttatataaatcatttttgactatatttttctgggccctactgaagtcatatccattatttaaatagctctaatcaacagctctaagttaaactgtaagaattaagccaatggcacaccaatgggtcacctaatataagccttactgcaatttaacagctaggaaattagttaaaattgtggtcttccacagttcaggtctatcttttttgatagcatgatgcaagactgataatt

SEQ ID NO: 21094 - DNA, 600 bp, Chicken  19866894232270_3
tatgaaggttttgttttgcaaaacagaagacttatatgaaattaagcagacaaatctgctactgtaagaagttacatatgtttaatacatgctaattttatattggaataattaatctgcaagaatatagtgttaaaaagatacccttgtgctaaactcagtgattaaaagaatggaagatccaggagaaaaccaagcttcctaaatacaatctacatataccactaaaaggagtcttattaccaaggttaagtattccattcaatttggatactgaataactttaataccaaaaaagaraaaaaaaaatcactaaaaaagtaggtagtagcattcaaaacctacaatgaagagataactatttttatataaatcatttttgactatatttttctgggccctactgaagtcatatccattatttaaatagctctaatcaacagctctaagttaaactgtaagaattaagccaatggcacaccaatgggtcacctaatataagccttactgcaatttaacagctaggaaattagttaaaattgtggtcttccacagttcaggtctatcttttttgatagcatgatgcaagactgataattt

SEQ ID NO: 21095 - DNA, 599 bp, Chicken  19866894232273_1
  misc_feature (1)..(87): n is any nucleotide
nnnnnnnnnnnnnnnnnnnnnnnnnnnnnnnnnnnnnnnnnnnnnnnnnnnnnnnnnnnnnnnnnnnnnnnnnnnnnnnnnnnnnnncaccccaacactctctaagtagctcccttctgctgttgggatgctgcagttttatgttggtttggttaaacaggaccacgctggtgattctacctggagcctacagctacacacacaccgccttcgccctcttctattttcacaacctcaggtgctaaaatatcagtaatgttatcataggaactcttccgtggatctgcctgtttttacagyaacagtggtagcagtttggctgctgtttgctggtttttcccaggcctcctctgcaacacaaagcaaaaggtgcactgaggaaaacactgcatctaaagcatccacgggcacatacagcacttagcactacagcacttccttctgtgggaactctcagataaaacaaaaggcgtctgcagtgagagcacagctgggcagtgatgcagctgagttttgtctcaattacagaaacaaaaaggttacattcgtagtttcactatttgagaatgtggttaaaacacagtttgtttccacctatc

SEQ ID NO: 21096 - DNA, 600 bp, Chicken  19866894232277_1
gagaagatgcaaagagcaaacatctctgtgagaaaactcatgttgaaaagcagtcgttctggtggagcaggttggtaactggagctaatttgttctgctagcaatgcttcttcacccgttttatactgacttcttagtaagtgtgcgaaggtgtgaaactgttatattcaatgaatcaactttaggtatgtctttgggatagttacagtctgtattccctttttcagggacaggtggtgctattttgatctagtgaccagtgacacaagagctctagtctgggaactgaaggatccatcycagctgaaaccaagtcatttagcttttttatttataagctgcggtgtgtgctgaacacagtctcactgagatgtgtaaggagtactttgagcatgcctgatgcatccagcctctgtgggacctgtggcagattttaatactgttttgccttgttactggagaacagcattgctcaggtaaaagctagctgcctctttcctgcagatgaaattgcctggggaacctgcaagagagacaggggaggtgctgaattcctggtttctccagggatgagtagcttctagtgaagactttctggat

SEQ ID NO: 21097 - DNA, 600 bp, Chicken  19866894232277_10
cttggaggagatgggcatcccatatactttgagtactgaaaggtgaattaattcaggtgtgtcttacttttctgctctaaaacaaacatccttcatattcagtgctctctgaaagtttgtcccagaagacagttctaagtacatttgggaaagacccgrtaacgtggtagcaacrtgaccaacccaacttgttttcttaatttatttaattgtttttctgtatgttttgcccatgatatttaatttttctttgccttaggcttttgtgcattgctttcattgaaaatatggctgcaggtrttggaagactttgaaggacatttcagttgtctcatttgtaattctgcaggcttgaatctgtctyatcatacaaaaagcaatgggatgtataatataactggaccttcccattattgatttcttattgattacatgtggcagaggaaaaaagttyagaaaccaaaaatagggtacagagtttactgctatcatttgtatatggagaatgtggtttcaaaaagcyagctgattccttctcccggggtctggctcagatactggacactgaatattttagaactcttgtcctctccttgctct

SEQ ID NO: 21098 - DNA, 600 bp, Chicken  19866894232277_11
tacttttctgctctaaaacaaacatccttcatattcagtgctctctgaaagtttgtcccagaagacagttctaagtacatttgggaaagacccgrtaacgtggtagcaacrtgaccaacccaacttgttttcttaatttatttaattgtttttctgtatgttttgcccatgatatttaatttttctttgccttaggcttttgtgcattgctttcattgaaaatatggctgcaggtrttggaagactttgaaggacatttcagttgtctcatttgtaattctgcaggcttgaatctgtctyatcatacaaaaagcaatgggatgtataatataactggaccttcccattattgatttcttattgattacatgtggcagaggaaaaaagttyagaaaccaaaaatagggtacagagtttactgctatcatttgtatatggagaatgtggtttcaaaaagcyagctgattccttctcccggggtctggctcagatactggacactgaatattttagaactcttgtcctctccttgctcttccatgaattgcagcttacccactaagtgctgttaatatagagcgttgactctattgtcaaatg

SEQ ID NO: 21099 - DNA, 600 bp, Chicken  19866894232277_12
cccgrtaacgtggtagcaacrtgaccaacccaacttgttttcttaatttatttaattgtttttctgtatgttttgcccatgatatttaatttttctttgccttaggcttttgtgcattgctttcattgaaaatatggctgcaggtrttggaagactttgaaggacatttcagttgtctcatttgtaattctgcaggcttgaatctgtctyatcatacaaaaagcaatgggatgtataatataactggaccttcccattattgatttcttattgattacatgtggcagaggaaaaaagttyagaaaccaaaaatagggtacagagtttactgctatcatttgtatatggagaatgtggtttcaaaaagcyagctgattccttctcccggggtctggctcagatactggacactgaatattttagaactcttgtcctctccttgctcttccatgaattgcagcttacccactaagtgctgttaatatagagcgttgactctattgtcaaatgctggtcatggccaaatctgtcatgcaggttaatgccctggacagcaatgctgtgctctttacttgtggctgaaacctgctctggaggaac

SEQ ID NO: 21100 - DNA, 600 bp, Chicken  19866894232277_13
gttttgcccatgatatttaatttttctttgccttaggcttttgtgcattgctttcattgaaaatatggctgcaggtrttggaagactttgaaggacatttcagttgtctcatttgtaattctgcaggcttgaatctgtctyatcatacaaaaagcaatgggatgtataatataactggaccttcccattattgatttcttattgattacatgtggcagaggaaaaaagttyagaaaccaaaaatagggtacagagtttactgctatcatttgtatatggagaatgtggtttcaaaaagcyagctgattccttctcccggggtctggctcagatactggacactgaatattttagaactcttgtcctctccttgctcttccatgaattgcagcttacccactaagtgctgttaatatagagcgttgactctattgtcaaatgctggtcatggccaaatctgtcatgcaggttaatgccctggacagcaatgctgtgctctttacttgtggctgaaacctgctctggaggaaccaatccttcagaaacccaaatctaaagaatcccaagatgattatttgaatgctatatcatgtgcaccat

SEQ ID NO: 21101 - DNA, 600 bp, Chicken  19866894232277_2
tggagaacagcattgctcaggtaaaagctagctgcctctttcctgcagatgaaattgcctggggaacctgcaagagagacaggggaggtgctgaattcctggtttctccagggatgagtagcttctagtgaagactttctggatcatttatttaggcttagttgatcaagttatgtagtagtcctattttagccccatatttggtgagtctgatctagttctatgtctcaagccttattcatggagtttaactaaaaatactcctttgtcttaaaaaatacagtaaaattgcatgcattmgactgaagtgtaatgctaaagtaatggaagcaaatataaccgcagaatactaaacatgaggcaattatatatacccaagatattctttaattgtttcccaggttgaacactgcatttgaaataactgtcttgaaaatatttaataataaaattatagaccctttaaatgacataccaaatcttatgctatagctatcatgtctgtaagtttaaaataatattcactccttcagaaatggggataccggtgatttattcttttttttttttttaattgtcaaatacatgttttgaacagtg

SEQ ID NO: 21102 - DNA, 600 bp, Chicken  19866894232277_3
actcctttgtcttaaaaaatacagtaaaattgcatgcattmgactgaagtgtaatgctaaagtaatggaagcaaatataaccgcagaatactaaacatgaggcaattatatatacccaagatattctttaattgtttcccaggttgaacactgcatttgaaataactgtcttgaaaatatttaataataaaattatagaccctttaaatgacataccaaatcttatgctatagctatcatgtctgtaagtttaaaataatattcactccttcagaaatggggataccggtgatttattcmtttttttttttttaattgtcaaatacatgttttgaacagtgctgagcattcaccatkaaaagtttagttctctgtaatgtatatcatgctggctgtttatgatgcgggtaacttctctgtaacattagccacttaaagttaagacttygccatgtagtctatgtttattcttggaggagatgggcatcccatatactttgagtactgaaaggtgaattaattcaggtgtgtcttacttttctgctctaaaacaaacatccttcatattcagtgctctctgaaagtttgtcccagaagaca

SEQ ID NO: 21103 - DNA, 600 bp, Chicken  19866894232277_4
ctcctttgtcttaaaaaatacagtaaaattgcatgcattmgactgaagtgtaatgctaaagtaatggaagcaaatataaccgcagaatactaaacatgaggcaattatatatacccaagatattctttaattgtttcccaggttgaacactgcatttgaaataactgtcttgaaaatatttaataataaaattatagaccctttaaatgacataccaaatcttatgctatagctatcatgtctgtaagtttaaaataatattcactccttcagaaatggggataccggtgatttattctmttttttttttttaattgtcaaatacatgttttgaacagtgctgagcattcaccatkaaaagtttagttctctgtaatgtatatcatgctggctgtttatgatgcgggtaacttctctgtaacattagccacttaaagttaagacttygccatgtagtctatgtttattcttggaggagatgggcatcccatatactttgagtactgaaaggtgaattaattcaggtgtgtcttacttttctgctctaaaacaaacatccttcatattcagtgctctctgaaagtttgtcccagaagacag

SEQ ID NO: 21104 - DNA, 600 bp, Chicken  19866894232277_5
tcctttgtcttaaaaaatacagtaaaattgcatgcattmgactgaagtgtaatgctaaagtaatggaagcaaatataaccgcagaatactaaacatgaggcaattatatatacccaagatattctttaattgtttcccaggttgaacactgcatttgaaataactgtcttgaaaatatttaataataaaattatagaccctttaaatgacataccaaatcttatgctatagctatcatgtctgtaagtttaaaataatattcactccttcagaaatggggataccggtgatttattcttmtttttttttttaattgtcaaatacatgttttgaacagtgctgagcattcaccatkaaaagtttagttctctgtaatgtatatcatgctggctgtttatgatgcgggtaacttctctgtaacattagccacttaaagttaagacttygccatgtagtctatgtttattcttggaggagatgggcatcccatatactttgagtactgaaaggtgaattaattcaggtgtgtcttacttttctgctctaaaacaaacatccttcatattcagtgctctctgaaagtttgtcccagaagacagt

SEQ ID NO: 21105 - DNA, 600 bp, Chicken  19866894232277_6
taaagtaatggaagcaaatataaccgcagaatactaaacatgaggcaattatatatacccaagatattctttaattgtttcccaggttgaacactgcatttgaaataactgtcttgaaaatatttaataataaaattatagaccctttaaatgacataccaaatcttatgctatagctatcatgtctgtaagtttaaaataatattcactccttcagaaatggggataccggtgatttattcttttttttttttttaattgtcaaatacatgttttgaacagtgctgagcattcaccatkaaaagtttagttctctgtaatgtatatcatgctggctgtttatgatgcgggtaacttctctgtaacattagccacttaaagttaagacttygccatgtagtctatgtttattcttggaggagatgggcatcccatatactttgagtactgaaaggtgaattaattcaggtgtgtcttacttttctgctctaaaacaaacatccttcatattcagtgctctctgaaagtttgtcccagaagacagttctaagtacatttgggaaagacccgrtaacgtggtagcaacrtgaccaacccaac

SEQ ID NO: 21106 - DNA, 600 bp, Chicken  19866894232277_7
cactgcatttgaaataactgtcttgaaaatatttaataataaaattatagaccctttaaatgacataccaaatcttatgctatagctatcatgtctgtaagtttaaaataatattcactccttcagaaatggggataccggtgatttattcttttttttttttttaattgtcaaatacatgttttgaacagtgctgagcattcaccatkaaaagtttagttctctgtaatgtatatcatgctggctgtttatgatgcgggtaacttctctgtaacattagccacttaaagttaagacttygccatgtagtctatgtttattcttggaggagatgggcatcccatatactttgagtactgaaaggtgaattaattcaggtgtgtcttacttttctgctctaaaacaaacatccttcatattcagtgctctctgaaagtttgtcccagaagacagttctaagtacatttgggaaagacccgrtaacgtggtagcaacrtgaccaacccaacttgttttcttaatttatttaattgtttttctgtatgttttgcccatgatatttaatttttctttgccttaggcttttgtgcattgctttca

SEQ ID NO: 21107 - DNA, 600 bp, Chicken  19866894232277_8
gttttgaacagtgctgagcattcaccatkaaaagtttagttctctgtaatgtatatcatgctggctgtttatgatgcgggtaacttctctgtaacattagccacttaaagttaagacttygccatgtagtctatgtttattcttggaggagatgggcatcccatatactttgagtactgaaaggtgaattaattcaggtgtgtcttacttttctgctctaaaacaaacatccttcatattcagtgctctctgaaagtttgtcccagaagacagttctaagtacatttgggaaagacccgrtaacgtggtagcaacrtgaccaacccaacttgttttcttaatttatttaattgtttttctgtatgttttgcccatgatatttaatttttctttgccttaggcttttgtgcattgctttcattgaaaatatggctgcaggtrttggaagactttgaaggacatttcagttgtctcatttgtaattctgcaggcttgaatctgtctyatcatacaaaaagcaatgggatgtataatataactggaccttcccattattgatttcttattgattacatgtggcagaggaaaaaagttyagaaa

SEQ ID NO: 21108 - DNA, 600 bp, Chicken  19866894232277_9
agcattcaccatkaaaagtttagttctctgtaatgtatatcatgctggctgtttatgatgcgggtaacttctctgtaacattagccacttaaagttaagacttygccatgtagtctatgtttattcttggaggagatgggcatcccatatactttgagtactgaaaggtgaattaattcaggtgtgtcttacttttctgctctaaaacaaacatccttcatattcagtgctctctgaaagtttgtcccagaagacagttctaagtacatttgggaaagacccgrtaacgtggtagcaacrtgaccaacccaacttgttttcttaatttatttaattgtttttctgtatgttttgcccatgatatttaatttttctttgccttaggcttttgtgcattgctttcattgaaaatatggctgcaggtrttggaagactttgaaggacatttcagttgtctcatttgtaattctgcaggcttgaatctgtctyatcatacaaaaagcaatgggatgtataatataactggaccttcccattattgatttcttattgattacatgtggcagaggaaaaaagttyagaaaccaaaaatagggtaca

SEQ ID NO: 21109 - DNA, 600 bp, Chicken  19866894232279_1
tctgggaagaaaatgacacgtaaaaagcagaattttcatgcgtcccttggtttaggagcagttacatggatgcagttggcttccacctgatgtccaaccatctcatgtggtcaccgctccaaaaagaagcagagaagttcccaaactgcctggatcacagcatgctccagagatgccaggtaaaaacatagatgtaatgcaactagcaataccagctgtaaccacaaaacagcaaatagaagctcttggtttcctcctgtagattcgaacaggagatgtaagcgtaacaaagaaggggtraggaagggacacaaaggtatcagtggggacaggccagcttctggtgacatcacctgagccccaggggtgcccacagaaccattatctgctgtgtctctgtgctggtttgcgtataattgatggttcctccgaggttctgcctcccccttctcggcgggatgccctcctctatgttagtttattttttaaataattaacagactttgtgactgcttgtctatgcgtccccttggaattcytctccagctgctctcatccatccccacagctcctccctctcctctgcagtgctcttttcct

SEQ ID NO: 21110 - DNA, 600 bp, Chicken  19866894232279_2
aagctcttggtttcctcctgtagattcgaacaggagatgtaagcgtaacaaagaaggggtraggaagggacacaaaggtatcagtggggacaggccagcttctggtgacatcacctgagccccaggggtgcccacagaaccattatctgctgtgtctctgtgctggtttgcgtataattgatggttcctccgaggttctgcctcccccttctcggcgggatgccctcctctatgttagtttattttttaaataattaacagactttgtgactgcttgtctatgcgtccccttggaattcytctccagctgctctcatccatccccacagctcctccctctcctctgcagtgctcttttcctctcgctgcatcttaaagcattgccttttgttttgacttcgctgtgcaacacaatctctgggcacttctttttgagcaggattccctactgctgtttgctggtggctgtaatccttttcttcctagcagctgccactcctagcaaagattttggtctgaataattcttgtggggtgggtgtatcatgttagagacttcagttgttactgatgatgaggacaagagcctgctcctactctc

SEQ ID NO: 21111 - DNA, 599 bp, Chicken  19866894232282_1
  misc_feature (1)..(43): n is any nucleotide
nnnnnnnnnnnnnnnnnnnnnnnnnnnnnnnnnnnnnnnnnnnggtagtacatagattacttgctgaatatactaaaactcaatcatatttaactactttatgaagtctgtttaagttttgtaacatttaactactttaattctaggctagatcctcttttctgctaacttgttttcctagtgaaaaaagagaaaataataggtgcattaattgttagttaaagtagcaggccatggtgaacctcttaacattctcctattttatgagcataaaacttctattttaataatgccttgcartaraggatcttttcatggcagctaaatgatgtacaatggtaatatttctacaagaaaatgagattttgatattgccttggttttcagtgaaacaaaagaatttgtgaagaacttgaaagcgaataccactcatcatcatggacagctgatgaagaagaccraaccagggaagagtggttgagattctttttttctagttaaaggaagcaggagatgttcttgctctagcaaacakyactgacatgatcaagaatctctgaaaatccctggagagatctctccaagtgagcattgaatta

SEQ ID NO: 21112 - DNA, 599 bp, Chicken  19866894232282_2
  misc_feature (1)..(40): n is any nucleotide
nnnnnnnnnnnnnnnnnnnnnnnnnnnnnnnnnnnnnnnnggtagtacatagattacttgctgaatatactaaaactcaatcatatttaactactttatgaagtctgtttaagttttgtaacatttaactactttaattctaggctagatcctcttttctgctaacttgttttcctagtgaaaaaagagaaaataataggtgcattaattgttagttaaagtagcaggccatggtgaacctcttaacattctcctattttatgagcataaaacttctattttaataatgccttgcartaraggatcttttcatggcagctaaatgatgtacaatggtaatatttctacaagaaaatgagattttgatattgccttggttttcagtgaaacaaaagaatttgtgaagaacttgaaagcgaataccactcatcatcatggacagctgatgaagaagaccraaccagggaagagtggttgagattctttttttctagttaaaggaagcaggagatgttcttgctctagcaaacakyactgacatgatcaagaatctctgaaaatccctggagagatctctccaagtgagcattgaattaact

SEQ ID NO: 21113 - DNA, 600 bp, Chicken  19866894232282_3
ctgctaacttgttttcctagtgaaaaaagagaaaataataggtgcattaattgttagttaaagtagcaggccatggtgaacctcttaacattctcctattttatgagcataaaacttctattttaataatgccttgcartaraggatcttttcatggcagctaaatgatgtacaatggtaatatttctacaagaaaatgagattttgatattgccttggttttcagtgaaacaaaagaatttgtgaagaacttgaaagcgaataccactcatcatcatggacagctgatgaagaagaccraaccagggaagagtggttgagattctttttttctagttaaaggaagcaggagatgttcttgctctagcaaacakyactgacatgatcaagaatctctgaaaatccctggagagatctctccaagtgagcattgaattaacttcctttcctactgttccactctgtacaaaagaagtccttccttcaaaagtccttggaatacaatgctgtgttttgtaagcagagtccagaaaagcacaaacacctctaacaaaagaatagtaaataatggctatttctactctcattaccctgggccgc

SEQ ID NO: 21114 - DNA, 600 bp, Chicken  19866894232282_4
ggtgaacctcttaacattctcctattttatgagcataaaacttctattttaataatgccttgcartaraggatcttttcatggcagctaaatgatgtacaatggtaatatttctacaagaaaatgagattttgatattgccttggttttcagtgaaacaaaagaatttgtgaagaacttgaaagcgaataccactcatcatcatggacagctgatgaagaagaccraaccagggaagagtggttgagattctttttttctagttaaaggaagcaggagatgttcttgctctagcaaacakyactgacatgatcaagaatctctgaaaatccctggagagatctctccaagtgagcattgaattaacttcctttcctactgttccactctgtacaaaagaagtccttccttcaaaagtccttggaatacaatgctgtgttttgtaagcagagtccagaaaagcacaaacacctctaacaaaagaatagtaaataatggctatttctactctcattaccctgggccgcacttcctctgctatcaggtaccatgctgaagtacagcgcaggtcactgtggcttaggcaaagctgtgttggtca

SEQ ID NO: 21115 - DNA, 600 bp, Chicken  19866894232282_5
gtgaacctcttaacattctcctattttatgagcataaaacttctattttaataatgccttgcartaraggatcttttcatggcagctaaatgatgtacaatggtaatatttctacaagaaaatgagattttgatattgccttggttttcagtgaaacaaaagaatttgtgaagaacttgaaagcgaataccactcatcatcatggacagctgatgaagaagaccraaccagggaagagtggttgagattctttttttctagttaaaggaagcaggagatgttcttgctctagcaaacakyactgacatgatcaagaatctctgaaaatccctggagagatctctccaagtgagcattgaattaacttcctttcctactgttccactctgtacaaaagaagtccttccttcaaaagtccttggaatacaatgctgtgttttgtaagcagagtccagaaaagcacaaacacctctaacaaaagaatagtaaataatggctatttctactctcattaccctgggccgcacttcctctgctatcaggtaccatgctgaagtacagcgcaggtcactgtggcttaggcaaagctgtgttggtcac

SEQ ID NO: 21116 - DNA, 600 bp, Chicken  19866894232282_6
ctctaacaaaagaatagtaaataatggctatttctactctcattaccctgggccgcacttcctctgctatcaggtaccatgctgaagtacagcgcaggtcactgtggcttaggcaaagctgtgttggtcacacgcttatgcttacatctgttttatccatgcagtagtgtttgaagataaaataaaactgtgaaagcatacagtgttgtcacatgtatgcatttttaaaatcaagttgagtttcccttagcgttatgttattagtcagtgcagcactctaccagttcttgcagactggtktttctagacagttgtttcagaaagagcagtactggttgctactgcacagagaccatgaacaagagatgtgtgtaatgtttaagtgctaaagttgtattttattaatgatttttcaagaacaggctcacatacatcaaagcaaagcctgggcttgattatgatgctgttacaagtcttacttttaatgatatcatagtagctttaacaataatataattattaatagaagtaattaatatggtggtaatgtctaggcattgcaaggacctagacgtttctccatgaaataagaaagcaaga

SEQ ID NO: 21117 - DNA, 600 bp, Chicken  19866894232282_7
accagaatctggtattatttgcctgtacagggtttcataaggtggacctctgtggaaaatgacttaagacttccagcagtaacttctccttctctcttggaagagaaagatatccttgtgctcttggttctgtgtattctggagctttcctgtcagcttgagtggatcagaacaagtctgtctccattgatcagacttctgaagattaatgctcaaacactgaaactttccccacgctgcactgctaaattgatgcagcaaaacacttgaacacacgcaaccaaactgaagtttaaaacmagtcacacagaattgagtttatctttgtattagtttaaaatctgcttgaagaccattatctttgtgcatcctttcaggaaagctttattaggcaccagaggaaattatttctagaccagatgtaacctaaatacgctccaggattgctgcccattagtttttgtttttaaagactggaatagaaaattaagtgcaaatgaaatgtttaggaaagtatgaccataactacatcaatctgattatgcaattaaatggcctttataataataaaaaaaagactgtgctctctaaatgttagac

SEQ ID NO: 21118 - DNA, 600 bp, Chicken  19866894232290_1
tgtttttacatcataaatatacttgtacaaataggtatgaagatacactgttcatccagctgtgatgctttttatgacacgtactacatggagtaaaagcattaaacagactgaatactagaatacactaaaaaaaaaagtattagtgcccttttttgacaaaaaaggcttcccctgagccatctgacatttttaacaaatatacatacaccatttcatacttaagtcaaaacagtagtcaggaaacgtaccaggttgaacaaaaacgtcaaggcagattaactttcagtgcacaccacrcttgctagatatttgcagtgattttaaattgcatacctttgctctcacacggcttgcaaagacaacacttacccttgaagagtgatgtgctcttgggagctttcagcccaacttccactcagcatagcagcaaagtaactagatctggcacataaaatggccctgagagagaaaaagtaagcattatttcactagacacaaatacttattatgagactctttgataacactgattttaatctttgccctttatgtattaaagtgtcatctgtatactgcgtaccttatccctcagtatat

SEQ ID NO: 21119 - DNA, 600 bp, Chicken  19866894232291_1
gtagatttgcaccttttctaatttatttattttagcaagtcactttgatattactatcactaaggaggaacacaggattgtttctcataaggcttttccaattgtttttaatattattgtgctttttatttgtcaggtggtttaataaactattctctctttggatacgcattttattctttattttttaacaaggattcaatcgaatgtcaagaaataaaagaaaccaatggtttagttatatggtccttcaccaattagaaatgaacaagaaagattgcattagagaacctctgtgaraggaaaagaaagagtacaaacgggtaatatttaacaagatgtcctgacattcctctttgtcatccatacagaaaataggaattaggttaacaccaaaattctctaatccattgttccctgcaccctctaggtaattccttcatttatgattatttcttacttgttttgaaattagccacctttacatttctttgtaagtcaatgtatttgaactggaaattgtgttcatttttcaaatgtgcattttcagtacttttatagagaaaatcctctttactactgcctgtacatttgcattta

SEQ ID NO: 21120 - DNA, 541 bp, Chicken  19866894232296_1
gtcccttgtggtgtgtttcagtgggagatgctgccaacggccaccccgacacatctgggcacaacgtgttagaggggctgcgggcagcctggctgagcagagccggctccgcggccgcaggatgcgcggtgctgcaagggatctcagccatcaataaacatcagtgtcaaaaaggacaggaaaaggttatttatcacaaagcaggccaaggagcaggaatgcagcagggggtgacgtgggctctggccaccccgctggggccatgtccggtggcagctcggggtcagagcctccagcccrgtgctctgcgtccccatggctygcctggggctgggctgtgtgctgtgccaccagccaggacagcagcctgatgtttctcttgcttcctttggtgtaagcggggtgctggaggagtgacagcctccttggagcgaagcaggctggggggacggaggtttcagagtaagagctgccaccccacagcactctgcgtggctctgggagctgttggttctgaggtcagaaagctgcaggaatgggg

SEQ ID NO: 21121 - DNA, 519 bp, Chicken  19866894232296_2
gggagatgctgccaacggccaccccgacacatctgggcacaacgtgttagaggggctgcgggcagcctggctgagcagagccggctccgcggccgcaggatgcgcggtgctgcaagggatctcagccatcaataaacatcagtgtcaaaaaggacaggaaaaggttatttatcacaaagcaggccaaggagcaggaatgcagcagggggtgacgtgggctctggccaccccgctggggccatgtccggtggcagctcggggtcagagcctccagcccrgtgctctgcgtccccatggctygcctggggctgggctgtgtgctgtgccaccagccaggacagcagcctgatgtttctcttgcttcctttggtgtaagcggggtgctggaggagtgacagcctccttggagcgaagcaggctggggggacggaggtttcagagtaagagctgccaccccacagcactctgcgtggctctgggagctgttggttctgaggtcagaaagctgcaggaatgggg

SEQ ID NO: 21122 - DNA, 600 bp, Chicken  19866894232297_1
agttgcatcatttcttgttagctagcacttttcttcctgtttgactcccttcataaatcccaagaaatggctcttggcagatcggtgttgttattgacagatgttttactataatcttcgccatattcttcagagatgttccacgtaaccaagcactctgtgcttctcagataccctgatgaggaaggaacagagataacctcttgaggctcttttagcttcacttccgacacacgttctgtggataaatgcacacttcagcgataaaagcatcaagaaaggacagtcagagctttatamgaaacctgccacttctacgtatgattgaaaatagtctagcaggtcaataactgtagtaggacatggtttttcagtgtgataaacatgcatggtaaacacacatacacttggaaaccagttccttcccactctacctccacaggtattatcataatattcagatttccaataagtccaatatcatgggcaaaagcacagctactacacatatgggaaaggcacacacaaataaaaagcataggattaagcagacccattcattttggccagtatatatatatataaaaataaagtgcctat

SEQ ID NO: 21123 - DNA, 599 bp, Chicken  19866894232304_1
  misc_feature (1)..(31): n is any nucleotide
nnnnnnnnnnnnnnnnnnnnnnnnnnnnnnnttagaaccagatctcaatttcctgacttatagtgaaagcaatgaaactttatctgcttttatccgctgacatgagatacaatcatttgaaaagaaccacaaacaggccaatattaattgttgaatatgccataagtggggaaaggagccagatcactttttttttttcttttttttaatctttaggacttgacctgacaacaggaatccagcaagcaacagatgactcacaaaaacttttcttttttgttctgtaaaaggaagatttcrgcagaaaaaaagtatatctaccaaccctttaatcataaaatttatcacaagttaaaaccacacagtccaatacatcaactctatggtataaaatgtttgacagaggcgacagtaatgacaacagcattaaagagggtttctcatatttccttcagatagtactctctcacctaattaatttataccagggtcacatgagccttcattttcctcttagttcaaaatatctgtgaagagtgctttagaagatgtcattcccagacaggaaagaagcctctctcctcataaatctagatctc

SEQ ID NO: 21124 - DNA, 491 bp, Chicken  19866894232307_1
ccttgtctggttcttagcaacacaacaaagcttgctttgaaagtcttttacagaggcagccttgagttcatgtagttgatacttctgtgaagaagcccagtttatttgtataacagctgcttgaatgcacttttgcataatctatcagagcatcttttaaagcatgtgatatagtaactttaaagctgaggaagtgattgggaagagtccaaaggaagcaattgttctgaaccaaaagataaagcaaacaaacaacaacaaaacagaattctctccactaaattcattttcttcttggayttctgttctgcaaatagctgtatacaagagctttttgtctttattgctgtgagatgctaggaaaggctcttggggtattggctggttgctttgtcatgcatacagtgttattcccaacacaaactacatgacaaaaagtgaatgcttctgcttaaaaatgttgatcaacaataatgtcttcagcttgaagc

SEQ ID NO: 21125 - DNA, 600 bp, Chicken  19866894232310_1
ttgtcttcttaaataattttgtataagtcaataaactgtccaaataggaatgattcgtcattgctctgcctctttgttttcatctcattggtatatagacaggacattctacaataagcattactgcattagcgggatattttccatcagttaaaagctgttaatctgaatctccctcaccctaaggaatatacctaaaaccacggagccaacatagaacaatgtatcataatacagtattgtattacaaatatgtatctagctattaaatcacattgcattgtattgtgttacattatrtagtacgttatgatacgttatattgatatagtaattatattatccgtgtattacattacatttacattacatcacattacgtgtgaattatatacatytatggagcagtttccccagggaagcagtgaagtccccatccctggaggtatttctatgatgtgtggacatggcagtaaggcacaaggtttagtgatgggactcggtaggtcaggtttgtggttagacctgatccagaaaatcttttccaactgaaatgtttttatgatattcttattctgtacattgtatgctcataaacac

SEQ ID NO: 21126 - DNA, 600 bp, Chicken  19866894232310_2
acaggacattctacaataagcattactgcattagcgggatattttccatcagttaaaagctgttaatctgaatctccctcaccctaaggaatatacctaaaaccacggagccaacatagaacaatgtatcataatacagtattgtattacaaatatgtatctagctattaaatcacattgcattgtattgtgttacattatrtagtacgttatgatacgttatattgatatagtaattatattatccgtgtattacattacatttacattacatcacattacgtgtgaattatatacatytatggagcagtttccccagggaagcagtgaagtccccatccctggaggtatttctatgatgtgtggacatggcagtaaggcacaaggtttagtgatgggactcggtaggtcaggtttgtggttagacctgatccagaaaatcttttccaactgaaatgtttttatgatattcttattctgtacattgtatgctcataaacacgtatgtaatgattacatcagtacaatctcttgcaatattttatgtaaaaaaatgtaggaaaatgtcatacttttgaggaatcaggcctcctcgtgtct

SEQ ID NO: 21127 - DNA, 594 bp, Chicken  19866894232314_1
tttctgcttgagatcctgcaaattaattgccaagtgtctcagctgtcccaggagaggcagtggaaggtgtattgatggtacctgcagatagccgagagagatgagctgcctacggcattcaccaggccatctctccagcaggggacagcactcctggtcctaacttaaacatcagattccccaggtggagaagctctctggctttgcaggctcagagcttctctgcacacccagcagttctagaatggcaaaaacatagacttcactgagcatatttcagggctctataggcaacgtgcratgctgcagccagctgcaccaggtaaagagaagctctgagtctcttccacatcagctctggggatgtagcaatcagaagctgggaagcagctgtctgatgaggttttcctggagaggctttgaaaggtggatgacagcacacctcccatgtgagcacaccagttcctgtcaaattggtggccccttataaaccagggtaactctgtgtcgtcatggagatgcttcaaaatgattttggagggtttatagaactgtggaaatggtgtgcaacttgttaaggagcaacctgggagt

SEQ ID NO: 21128 - DNA, 600 bp, Chicken  19866894232322_1
gactggatgagagccacaaatgattgcacaaggggaaaaaagtagttcctaggatcttgatatattgcctgaagctgagcaggacacaaagcactagaaactatttttacccaagggcaatttttgttgatactgcccttgcaagcagctcttattttattattgttatgaattctttttctgccctaaatttgtatactgaattatccatgaggataaatgtcagagtggattaagattaaattaggaactagatactccaaaacaacaacaaaaatgtctctttcctagacgctcccyttttaatttatttttattttttattattttttccccttcagatgcaccaggatgcagctccacagaatgtattttcttttgaatctttctacattacattttctkcacagataattcaacttccagtatttcgtcttcttaggtttaggtcatcattctcttcatagacttcctgaatttctttcctctgcttgtaatatagctggatgatgttctttgtcatattttttttttcccttccctttttcactccggttctgctgcagtgcacatgggggcacagtcagagagtttacaatg

SEQ ID NO: 21129 - DNA, 600 bp, Chicken  19866894232322_2
tttacccaagggcaatttttgttgatactgcccttgcaagcagctcttattttattattgttatgaattctttttctgccctaaatttgtatactgaattatccatgaggataaatgtcagagtggattaagattaaattaggaactagatactccaaaacaacaacaaaaatgtctctttcctagacgctcccyttttaatttatttttattttttattattttttccccttcagatgcaccaggatgcagctccacagaatgtattttcttttgaatctttctacattacattttctkcacagataattcaacttccagtatttcgtcttcttaggtttaggtcatcattctcttcatagacttcctgaatttctttcctctgcttgtaatatagctggatgatgttctttgtcatattttttttttcccttccctttttcactccggttctgctgcagtgcacatgggggcacagtcagagagtttacaatggctcctaccttccggagatcgaggagtaatttagcccacttgttatccaggctgccagtctccagcttctaacagctgacagagagcagtaggcatgacacctaa

SEQ ID NO: 21130 - DNA, 600 bp, Chicken  19866894232324_1
ctatgctggttggtcttgacacatgcaagttggacttgacgatctcagagctcttctccaatctgaatgcttctgtgatgctaagaaaagacaaagcaacagccagaaacctcccagggctcactgcagctgtctgggttcaggaagctcttatatgagcaaaactcatcttgaaaaccaacagcaactgtctgaaaatattagtaagacagtttgatggttggagtcacattctataaataaggcacagcgacagaacttgacagactgtcgatcaatatatcttctgggcacgagacrtgtgtcatatcccctcctatctttagacaagtctctakggaaaagaaggttttgagaactgcttaggtcaggcagtattaatgctcttcgccgttatttagtccactctctggatttcaagcatgtagaaggcaaatagcatgggatcacagaatggtttggagttggaagggacccttaaaggccatctgtcccactygctgtaatgaacagggacccccacagctccatcaacactgagagcccatcctgcctgactatcaagactgggacacagcacatacgagcacttgtaccaaa

SEQ ID NO: 21131 - DNA, 600 bp, Chicken  19866894232324_2
acgatctcagagctcttctccaatctgaatgcttctgtgatgctaagaaaagacaaagcaacagccagaaacctcccagggctcactgcagctgtctgggttcaggaagctcttatatgagcaaaactcatcttgaaaaccaacagcaactgtctgaaaatattagtaagacagtttgatggttggagtcacattctataaataaggcacagcgacagaacttgacagactgtcgatcaatatatcttctgggcacgagacrtgtgtcatatcccctcctatctttagacaagtctctakggaaaagaaggttttgagaactgcttaggtcaggcagtattaatgctcttcgccgttatttagtccactctctggatttcaagcatgtagaaggcaaatagcatgggatcacagaatggtttggagttggaagggacccttaaaggccatctgtcccactygctgtaatgaacagggacccccacagctccatcaacactgagagcccatcctgcctgactatcaagactgggacacagcacatacgagcacttgtaccaaaccaaagggctgtcttgtccctgtcctgcctctgatagt

SEQ ID NO: 21132 - DNA, 600 bp, Chicken  19866894232324_3
attagtaagacagtttgatggttggagtcacattctataaataaggcacagcgacagaacttgacagactgtcgatcaatatatcttctgggcacgagacrtgtgtcatatcccctcctatctttagacaagtctctakggaaaagaaggttttgagaactgcttaggtcaggcagtattaatgctcttcgccgttatttagtccactctctggatttcaagcatgtagaaggcaaatagcatgggatcacagaatggtttggagttggaagggacccttaaaggccatctgtcccactygctgtaatgaacagggacccccacagctccatcaacactgagagcccatcctgcctgactatcaagactgggacacagcacatacgagcacttgtaccaaaccaaagggctgtcttgtccctgtcctgcctctgatagtggcccaaactacatccaggatgcctggggaggagattatgaaagatgaaatgtttatgattccctccagtgctcctaaagcctccagatatctgcagcctgggcagctcctgcactagatattgcatccgttgcatctatctattaattattgttcacaat

SEQ ID NO: 21133 - DNA, 600 bp, Chicken  19866894232337_1
tttttttttttttttcttccccttgtgagtattcaaatgaagactcagctgcactctatcagctctgttgtggtttccgatcgccttggtggcaggagggaggctggaggtgccctcatcatacaggcaaggctaagggataaaaccccaaagggtgtcagcggattctcgatggctggcacacctgtgcagctgcaccattcacatgcaaagtactttttagtggcggttcctcggccagtgccagcttccaaggattttgaggtgtaaggcattgggaccacaggtcttaaactgtgrctttcaaaaatatgttcctccccaaaaggtgaggaataaaagtggaaattragcttttctgggatctaagctttactcagtaatttctctctttctgagtttacctctatgtaatcgtctcagagttcagagcaatgagtgcagctaccacagctcttataaactctccccaagtgaccaagcgcttcagtgctcaccacattcctgtcactgatttggctgttaaagtgttccaataataaggtaccaattagataatctcccactagaagcatactgcagctgcaaaatgaatatcat

SEQ ID NO: 21134 - DNA, 600 bp, Chicken  19866894232337_2
cactctatcagctctgttgtggtttccgatcgccttggtggcaggagggaggctggaggtgccctcatcatacaggcaaggctaagggataaaaccccaaagggtgtcagcggattctcgatggctggcacacctgtgcagctgcaccattcacatgcaaagtactttttagtggcggttcctcggccagtgccagcttccaaggattttgaggtgtaaggcattgggaccacaggtcttaaactgtgrctttcaaaaatatgttcctccccaaaaggtgaggaataaaagtggaaattragcttttctgggatctaagctttactcagtaatttctctctttctgagtttacctctatgtaatcgtctcagagttcagagcaatgagtgcagctaccacagctcttataaactctccccaagtgaccaagcgcttcagtgctcaccacattcctgtcactgatttggctgttaaagtgttccaataataaggtaccaattagataatctcccactagaagcatactgcagctgcaaaatgaatatcatatcattagcacctttccttcacatcatctcaggggatggaaacaccagact

SEQ ID NO: 21135 - DNA, 600 bp, Chicken  19866894232346_1
gagggatccggccagcctgttaggctaggagtaaaagacatgggatgacactaaaatagcgtgaggtcaggctttggggatgcaaaatccctgctctcagcaaagcccggaccttgcgaaaagcttggcatcaggtggatgggagctcactgatggagtggtagtgctccacgcacgggcaggttgggttgttaatgggttggccctacacaacaccatgcacagcccagatagttgcattggaagataattcaccccaaaagcgggacatgcacggctggcagcttccccttctgctgmtgatctccaagtctatttcattttaattgccctcgggcccaactgaggctgctctgtgccccagacacacgttgaagtgaggacagagcagtgtttatggcaccagcgacgtgcccgaaaaaggcttcattcagcaggaaacaagggcggctctgatgaagatgttacaggctcttagaagctttcctgaatcaattaaagctgatttcccccacctcatttttaatgtggtgaaatgaagcctgtagtaaataataaaaaagaacaagtcgggcggctcagatcggggttttccgtagc

SEQ ID NO: 21136 - DNA, 600 bp, Chicken  19866894232348_1
aagcttcttttgactgttatattctattgtctgctgcagtttcctatcaagccttaaattaaagctgagaaattcagaaaacacccaagaaagttaactgtaaatttgaaaaacagctttgatatgcgtcaagttcagagaggaccaagaagtgaaagcttgactgattagactgcgcagatgttaaaaaactgaagagtcatgaagcaggctggcagctcggaggaacaagagaaataactgcttaagaaagtgaaactataaataaccgaggactgcttgaagattcactaagagagygtgaatagaatttcagctataaaatgggaaaaaaatatattcataaaaagttgcagctaatttagccgaacacctagaggctgtaatcactttagaatatgcaccaaatgcttcagtattacaccaccagacacaagcacatcacacacaaccaaaagaagctgtaggtttcacaatctcagtcgttccagaagcaaacacacacatcacaacggttaagacaaacagaactgattcctcccaaagcacaacagcctggattccaggcttagaacaggacccctccctgaggcagatgag

SEQ ID NO: 21137 - DNA, 581 bp, Chicken  19866894232348_2
agaacaggacccctccctgaggcagatgaggagcgaaggaaaaggcctcctactgtgtacagctggaaccaatgggaccatggagtcctgtcttgtccgtaagtaaaggagtcttcctagaagcctcagacaaataagttcttttttcttttttcccctccccgtatcaatagtagccagaaaaaagcctggcatcccaatgtgataagatcagcttggttttatttttgaagacatcaaccagccagaagaaaaaggcacctgagacttacactaaggaggcaggggagaccacacacrtgggctttgtgttggaagaggatggctgccagaggggcctttctgctgtgagcagagctacaggaccaaggacaatagccagcaacacagaacagagtacaacacatgcatgaggctacagctaccttcaagtaatgaaatacatacaaacttcagtcataatgcctaccacaacgtcatttaagaactgaattatttcttttacaaagaagcaaatgggtacactcagtcacctagagcaatagtcatgttctgaaaaccccctattattggaaatccat

SEQ ID NO: 21138 - DNA, 600 bp, Chicken  19866894232350_1
aaggcagcatgccattgttttctgtttattataatggaaataaattgttggctccaaatcaggcactgattgttcctttgatatcactgccaggaagcaaaataaaatggctttttaaaaatcacctttcacagaaagtgccacaggcatttgaaagatgagcctttttccatgtcaaagggctcctaccagaagtgccagcacagaaattcaaatccttacctattaaaataaagaagtgcaagtgagaaggcgagagcagggcagcaggatggctggggctggcacgctgcagtcctrtgagtgctygtggctgcagcagagctggctctgcagtgaggagcacttcctgaggaggatgaaacacatcctttgctttttctttttctttctttttttttttttaactcaaaaaagcacaggtgggctgagtggagtactctctatgcctggcagctcttaaactaataatatgagactgcaggagccaaaaaagatggaggaagagcattgcctcagaacttgaaccacccataaatcttgcttgtgtttttttttccccccttttcctaagctacacggagcagcaatttcgccgta

SEQ ID NO: 21139 - DNA, 600 bp, Chicken  19866894232350_2
tgccattgttttctgtttattataatggaaataaattgttggctccaaatcaggcactgattgttcctttgatatcactgccaggaagcaaaataaaatggctttttaaaaatcacctttcacagaaagtgccacaggcatttgaaagatgagcctttttccatgtcaaagggctcctaccagaagtgccagcacagaaattcaaatccttacctattaaaataaagaagtgcaagtgagaaggcgagagcagggcagcaggatggctggggctggcacgctgcagtcctrtgagtgctygtggctgcagcagagctggctctgcagtgaggagcacttcctgaggaggatgaaacacatcctttgctttttctttttctttctttttttttttttaactcaaaaaagcacaggtgggctgagtggagtactctctatgcctggcagctcttaaactaataatatgagactgcaggagccaaaaaagatggaggaagagcattgcctcagaacttgaaccacccataaatcttgcttgtgtttttttttccccccttttcctaagctacacggagcagcaatttcgccgtaccctaaagc

SEQ ID NO: 21140 - DNA, 600 bp, Chicken  19866894232350_3
aagcaaaataaaatggctttttaaaaatcacctttcacagaaagtgccacaggcatttgaaagatgagcctttttccatgtcaaagggctcctaccagaagtgccagcacagaaattcaaatccttacctattaaaataaagaagtgcaagtgagaaggcgagagcagggcagcaggatggctggggctggcacgctgcagtcctrtgagtgctygtggctgcagcagagctggctctgcagtgaggagcacttcctgaggaggatgaaacacatcctttgctttttctttttctttctytttttttttttaactcaaaaaagcacaggtgggctgagtggagtactctctatgcctggcagctcttaaactaataatatgagactgcaggagccaaaaaagatggaggaagagcattgcctcagaacttgaaccacccataaatcttgcttgtgtttttttttccccccttttcctaagctacacggagcagcaatttcgccgtaccctaaagctttctcagcactttagcttcttccccagagattttaaggtgcgaacttcccgttacttgagtgctaccatctaatgagggagtat

SEQ ID NO: 21141 - DNA, 600 bp, Chicken  19866894232350_4
gtacactggccccatgtacagagaggagcttcctcatcagaggctgtagctggatccagatcttaagcaacccagagcacagcggtgtttggatttcatgacgtgctgtagtttgatttggctcggagcagaggatgaagctgagtgccagattcagatctcaggccaaacttggattttgtatttcagctaccaaacttcatcatgggttggcaaagtcacgctctcacctgctcacgccatgtggagaacacctgtgatgtgctggaagggcggctgatcctgctgtgagaaactccstgtaggaaagccagcatgtgagaggctgctccaaatgactggtggctgcagatggctttgtgtgctgggagcrcagggccactgaggcatgctcagactcttcaactgctaagaaaaaagttgaaaaggaaaactgtcaggagcagactgcagctttcctcctgcctttgttgtcatgactgttggaactggagcaacctttttgtttgtgggrctgggactgggatgcaaagcagcagcatggcctgagaataaactagaagaactccacaagcacatcacttcctacaacagcctgct

SEQ ID NO: 21142 - DNA, 600 bp, Chicken  19866894232350_5
agagcacagcggtgtttggatttcatgacgtgctgtagtttgatttggctcggagcagaggatgaagctgagtgccagattcagatctcaggccaaacttggattttgtatttcagctaccaaacttcatcatgggttggcaaagtcacgctctcacctgctcacgccatgtggagaacacctgtgatgtgctggaagggcggctgatcctgctgtgagaaactccstgtaggaaagccagcatgtgagaggctgctccaaatgactggtggctgcagatggctttgtgtgctgggagcrcagggccactgaggcatgctcagactcttcaactgctaagaaaaaagttgaaaaggaaaactgtcaggagcagactgcagctttcctcctgcctttgttgtcatgactgttggaactggagcaacctttttgtttgtgggrctgggactgggatgcaaagcagcagcatggcctgagaataaactagaagaactccacaagcacatcacttcctacaacagcctgcttttcaaagcatccatcttgatgcccaaggatctgttgctcaacatctttttctggccaacactttttccaaaa

SEQ ID NO: 21143 - DNA, 600 bp, Chicken  19866894232350_6
aaagtcacgctctcacctgctcacgccatgtggagaacacctgtgatgtgctggaagggcggctgatcctgctgtgagaaactccstgtaggaaagccagcatgtgagaggctgctccaaatgactggtggctgcagatggctttgtgtgctgggagcrcagggccactgaggcatgctcagactcttcaactgctaagaaaaaagttgaaaaggaaaactgtcaggagcagactgcagctttcctcctgcctttgttgtcatgactgttggaactggagcaacctttttgtttgtgggrctgggactgggatgcaaagcagcagcatggcctgagaataaactagaagaactccacaagcacatcacttcctacaacagcctgcttttcaaagcatccatcttgatgcccaaggatctgttgctcaacatctttttctggccaacactttttccaaaaatcaaaacaattcccatagcttagctggtaaaagacctgtatgtggctaacagtgtggtctgctaaatattaaggccttgtttgacacctatcttgtgcttatatttgcctctaagtgcatccttattttgtaaagtattt

SEQ ID NO: 21144 - DNA, 600 bp, Chicken  19866894232350_7
gaatatttggaaaggaaaaggaaggactttttctccagataatacaatttattctcaattatttctaacactaagaatgtgattactgacctgcaaacacctgatgatcacgctttggtttgacctttttatgagtgtgtaggtttggtaactagcactgcccagtaatttatttcccaagtgggctagaaaagtcatctggaagaaggaaaacagtacctaaaagttttctgtgcaaatggaagattttgctagctgcatacgtgtgttcattctcggaaacagttctcagatgagacrctgactttgctttcctaaagaaatcaaatataagtctttaaatgcaaagtagtgctcaaattcttgcttattttcttaaaagatcagtgatcactacctgctgatgttacgtgtttacagaaaacaggttcaaaaaaagctatgcagaccccaaaagatgctgtgacagagatacaaggaaggcctgaatgacccaacaggatctttgcaaccattctgccccttccctggacatccctttgcccaggatgcagctggcctcacaggctttgcacagcccttcgtggggggttgtggtac

SEQ ID NO: 21145 - DNA, 600 bp, Chicken  19866894232356_1
atggaagactcaagaaatgttgaaattactcctggaagtttcacattgtttgtgtgaagaatgacattccagtcactggagattgactgattggaaatatcatggagaagtaggaagctgaaaatgttgcctaaacatacactagaagtcatcagtgaatactggttctttgttttgtgccatacactcaactcatacagcaaatttttaactgcccagtatttctgagtgaattctaattttctatctaacggaaaacctatggatgtgcgcaaaaactttcaggataaatacctaaayataatacacaaataaatataaatatctgaaaagtaatcacagttatttctttaagttttcatgtgccatatatgagaataaaattttaacacacaaactgaaactcagtaccatgaaaatcttctttacagtgagacatataacttattggatagtttctcaacagcagttgaaataaaaatgattgaatttttcattcattattttcattatttttcagaaacttagaatttcatgcaaaatgaatatcagaagaaaagacacctaaaattatgatatatatatacctaaacatgaaat

SEQ ID NO: 21146 - DNA, 600 bp, Chicken  19866894232356_2
ataaaattttaacacacaaactgaaactcagtaccatgaaaatcttctttacagtgagacatataacttattggatagtttctcaacagcagttgaaataaaaatgattgaatttttcattcattattttcattatttttcagaaacttagaatttcatgcaaaatgaatatcagaagaaaagacacctaaaattatgatatatatatacctaaacatgaaatacttgacaaaaaaaaaaaaagaaaatccactcagttatcttgtatttttttatcaccctgtatagagctcgttcaawatatgaattgtttatttatagtgaaagatacaggtgaattaataaaataaagccaaataaaacattgtaaaatgaagcagttacctaacaaatgtcacaacagtcttacaaaagaaaaaaaaatacattcaaggctttttttttttaattaaaaccttttcaccattggtacaaacactgataaacaaccatctcataacatctactctttagataccacaagactcttagctgtgaacctgaatgctttctcttaggaccacattgaaagttgaacttaaaacactctgacatctgcac

SEQ ID NO: 21147 - DNA, 599 bp, Chicken  19866894232366_1
  misc_feature (1)..(43): n is any nucleotide
nnnnnnnnnnnnnnnnnnnnnnnnnnnnnnnnnnnnnnnnnnntttgcccattaatggatgagaaaactacatttcaaaacaacattttccaattaaattgcagttatattagggaatggcttcttagttatctttaaaggtatgacctttgtgcatgtttctgtgcattagaataagcagacttgcaagatattctgtgattattctctctcttttgcttcaaaatggaaaacaaaaaaacaaaaaatcagttattaaaaaaagcattttcagcaacaaagtttttttttcacagtaayaggtaaatagttactatttacaactttttaaaacccatttttgagtcaaaattctgaattgtaatatgaaattacacatggaaaaagtagaaagagaaaatttctgattttcataagcagtgttctatggccactttgacatgaacttttagctataaaaacaaataataagaaaacaaccctaaaacaattagacatatacttaaacaaatatttagagaattcttatgaaggttttctgtctggcagtgctcctgagacctactgctagcaagcaataggatttgcctgtgcaagga

SEQ ID NO: 21148 - DNA, 600 bp, Chicken  19866894232368_1
ttagccgccagtcactgctgtataccctaagatatcactgaatttgttctaaatggatgaggttgcaactgttgttctccccggtatggctttcttgtgctgtggttcagctgctccagaaggagccgtggtagccctcttctgcttttcaaatggcattgaacctatgtgataccaaggttacatcctgattgctcctgcaagatgaggaagagtacatctgctcccaattcatttatgtgcaaagctgtgcataggtgaaaaatcctaaacaccggaatgaaaagaagacatttgtcytggggctggagatcctaagcagctttttgttcaggatgaagggagctatctcagctgctsgtggtaaaacctgccagggttcattgtactgaggtggtaggtacagcagtccaacctgtggattgcaggaggatttgaggctttggtttttttgcctagtatttatcatcakccttatttcgtagtcattcrggcttctggaatgcatgtgaaacaaagtgtttctcatttgacttggccatattttacactgaacgttttgaaatgcaagtatttgttgttgtgtgaaataatgtatgc

SEQ ID NO: 21149 - DNA, 600 bp, Chicken  19866894232368_2
ggttgcaactgttgttctccccggtatggctttcttgtgctgtggttcagctgctccagaaggagccgtggtagccctcttctgcttttcaaatggcattgaacctatgtgataccaaggttacatcctgattgctcctgcaagatgaggaagagtacatctgctcccaattcatttatgtgcaaagctgtgcataggtgaaaaatcctaaacaccggaatgaaaagaagacatttgtcytggggctggagatcctaagcagctttttgttcaggatgaagggagctatctcagctgctsgtggtaaaacctgccagggttcattgtactgaggtggtaggtacagcagtccaacctgtggattgcaggaggatttgaggctttggtttttttgcctagtatttatcatcakccttatttcgtagtcattcrggcttctggaatgcatgtgaaacaaagtgtttctcatttgacttggccatattttacactgaacgttttgaaatgcaagtatttgttgttgtgtgaaataatgtatgcgggtttttttgtggattcttccctcctgtaagcacaatgctgagtgtttgcatggtaggt

SEQ ID NO: 21150 - DNA, 600 bp, Chicken  19866894232368_3
taccaaggttacatcctgattgctcctgcaagatgaggaagagtacatctgctcccaattcatttatgtgcaaagctgtgcataggtgaaaaatcctaaacaccggaatgaaaagaagacatttgtcytggggctggagatcctaagcagctttttgttcaggatgaagggagctatctcagctgctsgtggtaaaacctgccagggttcattgtactgaggtggtaggtacagcagtccaacctgtggattgcaggaggatttgaggctttggtttttttgcctagtatttatcatcakccttatttcgtagtcattcrggcttctggaatgcatgtgaaacaaagtgtttctcatttgacttggccatattttacactgaacgttttgaaatgcaagtatttgttgttgtgtgaaataatgtatgcgggtttttttgtggattcttccctcctgtaagcacaatgctgagtgtttgcatggtaggttttggctctgagcctcctgcccctgtgcttttggtggctctctgagaagaactgggttctttctactccttcacttctcatcatgcagcttacacaaagaaacagcctgttt

SEQ ID NO: 21151 - DNA, 600 bp, Chicken  19866894232368_4
tgctcctgcaagatgaggaagagtacatctgctcccaattcatttatgtgcaaagctgtgcataggtgaaaaatcctaaacaccggaatgaaaagaagacatttgtcytggggctggagatcctaagcagctttttgttcaggatgaagggagctatctcagctgctsgtggtaaaacctgccagggttcattgtactgaggtggtaggtacagcagtccaacctgtggattgcaggaggatttgaggctttggtttttttgcctagtatttatcatcakccttatttcgtagtcattcrggcttctggaatgcatgtgaaacaaagtgtttctcatttgacttggccatattttacactgaacgttttgaaatgcaagtatttgttgttgtgtgaaataatgtatgcgggtttttttgtggattcttccctcctgtaagcacaatgctgagtgtttgcatggtaggttttggctctgagcctcctgcccctgtgcttttggtggctctctgagaagaactgggttctttctactccttcacttctcatcatgcagcttacacaaagaaacagcctgtttgaaacactgacatgaagcgt

SEQ ID NO: 21152 - DNA, 600 bp, Chicken  19866894232375_1
aaatagtgtgccctgaattaatttatttccctacacattcctttgtctctgtattgtctatttcacaaacagtatcctttaaaaatgatttctgaaggatttcaagcctattccctgttccactaaactgtaacaacatttatgtaagatcacatgcaaaataaacagaagtgatgagcttggctgtacaactctgggtatacaagaatttttttaattcatataaagttgtactgaaactagctgggacagaattaactttatgcacagctatccatgtggggctgtgatttgcacttstagcttgaacagcgctgacattacaccaatgttttctctattactcagtagtgctgacaccgcactaaggctctctcagacgcccccacccaatgaaggctagcagacagggggtgggcaagagatgaggaggggacacagccagggcagctgattgaaactcaccagggggtattccatgccatatgatgtcacacacagccataaaagctgtggaaggggaaggagaaagggacactctcattgtggaaacatccgtgttaccaaagaactgctacatgtaatgaagatttgcttccc

SEQ ID NO: 21153 - DNA, 600 bp, Chicken  19866894232378_1
cagaatagaaccatttaatcaagtttttaatcgcgcttctcaatctgcagccaacagacattgtattttcagtggctgtttctggtttggacttggcataaatctgttttggtttgtcgattatgtgatctggttctcgaccatgaaatgacccaaagatagatctgagtgattctggacacggccttctattttggcactgctcctgactgcccatgtggtctttgccaaatcacttgaatttatcatctatttcctctagccttgaatcaggggagctcctgataaactctcaaaggygttgtggctgtttaattcaattgatattggttgaccgtgcaccagatgctaatgttagagaaatgcactgtgacccaaccatccgggcgagggcgtgaagggacggaagggcacaagtgatggtaaagagcaatgaggaagctcagactgagtgatgctggggagcgatggggaatgtataaaaagggagggggggaggagatgctgaagagcaaagaagaaaacaacacgaagcaaaaacaaaaccagtggtttggagaaaggtaggatgagtcaaggagttggatggaacaaaaggga

SEQ ID NO: 21154 - DNA, 600 bp, Chicken  19866894232378_2
gctgtttaattcaattgatattggttgaccgtgcaccagatgctaatgttagagaaatgcactgtgacccaaccatccgggcgagggcgtgaagggacggaagggcacaagtgatggtaaagagcaatgaggaagctcagactgagtgatgctggggagcgatggggaatgtataaaaagggagggggggaggagatgctgaagagcaaagaagaaaacaacacgaagcaaaaacaaaaccagtggtttggagaaaggtaggatgagtcaaggagttggatggaacaaaagggagaaaakaaggatgaaggtttgttcaagtcagttaagtttatagattatatctgtttaatttttgcttttgaggcattacgttatgtttctaaacttggggcaagatgatttttgtttgaagcatctgaccatccccagtgatctcattaatgattttgcatagacagacctctgaaatttgccctctgaaattttgggttgtactggcccagatgcctgatatcaccctcctttctccagcaaatctgcagatttgtgcatttttttgttttcttttactcttcagtaagcaacatgcccaaatcg

SEQ ID NO: 21155 - DNA, 600 bp, Chicken  19866894232380_1
acatgacaagaaatgactcagctctgaagtatcatgctgtgacatttctcatctgcccagtttgaggcactggatgaacttatgctgggcaggcagctgtcacttaggtggggaatggtcagcctatacttgttgaaatgagttgattccctgctacttcctttccactctcccaccatttcttatacttgtgtgcttcctcaggaatgcctctggacaagaagagctcctggtctgtgcaaggagaaagaagaaggctgtttcaagacatcatctccactgccctttgtcttagagtgytagcgatgcaaaatctcccaggtgggcatatgtgttcagttctgaattaaacttttacgcttgggaaaatgtttgctggaagttgcctcctgtaaccctggcatttgctctgctcttgggagaagatgtgctagtgctagtgctgcaaagtaggccactgggtattactgcaacctggcatttggcctgcaaatgcatccatggatatgttgatccagttggctaccttggtttataaacagcaaatcatttggcctcttctgctctccctgtagatattttgggaacagaggaatatga

SEQ ID NO: 21156 - DNA, 600 bp, Chicken  19866894232381_1
agcctccctgtgtctatgcccatgtgtcaaagcccagaggccaggctggatggggctttgagcagcctgctgtagtggaaggtatccctgcctatagtagggaggttggaactggatgatcttcaaagtcccttccaacccaacccattctatgatgattctctggcaatctgcaaaatgatcctcaatcgtgcatcagtgtatattttcctctctgttaatttagagatgagcaatagggttcagttctgcatctttccttctttgtttaatctctaagtgtagtggaagcttctcctrcagaagggagcagaagatagtagctttcagatttcttcactgaaatctattctctcagctgttccagaatgttattttgctgatgtctgaaaaacaaggattttaaagtccagctgatgaaattttatttcctggagataatttttttctttttttatgtcatagaagcgtacaggagaaaactattgcaaaaggaagctgaaaccgtccattatatcaccgctaaacacaagaagtcaaagaaaataacttaatccaaatgtcctatttagcaggcttcctttcagtaattgtccatat

SEQ ID NO: 21157 - DNA, 600 bp, Chicken  19866894232385_1
aaccatgtccctgtggtccaaacaagagctcaggcctgcaactatacaaaaatttctagctcagcatgtgttggtgttctcactggtgcaaaaacacgtaagtaaacatcctaatttggaggcacttttggagttagcctggctgtatagcgcatctatggtatttgtgttcagaacgtgacacacaggcactggacacattgtggggttcactaagcaacatgtaaactcctgggccatggctatcctgaaggccaagtgttgcatttgttgctgcacatgagtgtactggacagcccwgggaactggcttgatacttggctacttctgacgccatttacatgtgagccaatagaaaacagaggtttcatcagttgaagctgtctgatgcaccttggtcattgcccagggtctgtgtgtgagcaactgactcyccgctgaaggaccaaggactcagagcaggagctcacatgcaggcaactccttgtgcacacctgaactgaaccagaggaatcccagctcctgtgggcctgtggaaagctgaatcccatttcagccccagggtttccatcaagggatgagatgcccaaactgcctcag

SEQ ID NO: 21158 - DNA, 600 bp, Chicken  19866894232385_2
tagcctggctgtatagcgcatctatggtatttgtgttcagaacgtgacacacaggcactggacacattgtggggttcactaagcaacatgtaaactcctgggccatggctatcctgaaggccaagtgttgcatttgttgctgcacatgagtgtactggacagcccwgggaactggcttgatacttggctacttctgacgccatttacatgtgagccaatagaaaacagaggtttcatcagttgaagctgtctgatgcaccttggtcattgcccagggtctgtgtgtgagcaactgactcyccgctgaaggaccaaggactcagagcaggagctcacatgcaggcaactccttgtgcacacctgaactgaaccagaggaatcccagctcctgtgggcctgtggaaagctgaatcccatttcagccccagggtttccatcaagggatgagatgcccaaactgcctcagctggatcactgccctgcccagaggaaggccacccctccatgtgcttccctgtgtgccttttcgttacagcaaacactctctggtatgactaaccatgtgtctggaatgggtcactgtcatttggtggttaaatc

SEQ ID NO: 21159 - DNA, 599 bp, Chicken  19866894232389_1
  misc_feature (1)..(99): n is any nucleotide
nnnnnnnnnnnnnnnnnnnnnnnnnnnnnnnnnnnnnnnnnnnnnnnnnnnnnnnnnnnnnnnnnnnnnnnnnnnnnnnnnnnnnnnnnnnnnnnnnnnattgtgcagatataagaggcacaaggaagtgatggaactctgagccttcccatatgccctgccatgcctgggcataaagcaagagcagccctgagctgaggcttgcacagtcagccctaaagccctccagctgcagatctcatgggctctgagctgctcacagccatttggacttcagcaggtatgtgcatatctgcaggyagaaggttcagcactgyaggggatttcagtgagatgaatggtgatgttccctggagctgtgcaccctcagcatccgttggggaggtgacagtctggcattccagctccgaaacagtgaacacctacatgccttcacagatctaatcctaagcaaacctgcacattctcacttcagtttcctccaggacacttctgaatcctagatgaaaactcattcagcattaaacactttgttagccggattagccagaggggatgctcrtaattacagcgttgttagagctgctttccatttaaaa

SEQ ID NO: 21160 - DNA, 599 bp, Chicken  19866894232389_2
  misc_feature (1)..(82): n is any nucleotide
nnnnnnnnnnnnnnnnnnnnnnnnnnnnnnnnnnnnnnnnnnnnnnnnnnnnnnnnnnnnnnnnnnnnnnnnnnnnnnnnnnattgtgcagatataagaggcacaaggaagtgatggaactctgagccttcccatatgccctgccatgcctgggcataaagcaagagcagccctgagctgaggcttgcacagtcagccctaaagccctccagctgcagatctcatgggctctgagctgctcacagccatttggacttcagcaggtatgtgcatatctgcaggyagaaggttcagcactgyaggggatttcagtgagatgaatggtgatgttccctggagctgtgcaccctcagcatccgttggggaggtgacagtctggcattccagctccgaaacagtgaacacctacatgccttcacagatctaatcctaagcaaacctgcacattctcacttcagtttcctccaggacacttctgaatcctagatgaaaactcattcagcattaaacactttgttagccggattagccagaggggatgctcrtaattacagcgttgttagagctgctttccatttaaaaccattctgttaaagatg

SEQ ID NO: 21161 - DNA, 600 bp, Chicken  19866894232389_3
ccatttggacttcagcaggtatgtgcatatctgcaggyagaaggttcagcactgyaggggatttcagtgagatgaatggtgatgttccctggagctgtgcaccctcagcatccgttggggaggtgacagtctggcattccagctccgaaacagtgaacacctacatgccttcacagatctaatcctaagcaaacctgcacattctcacttcagtttcctccaggacacttctgaatcctagatgaaaactcattcagcattaaacactttgttagccggattagccagaggggatgctcrtaattacagcgttgttagagctgctttccatttaaaaccattctgttaaagatgctttcacacacagactcttgtaatttccctagcagtgggctgggtgtaactccttgttaagctgatagatgtctttttctataaattcaattactggcagaaaatccactaatacaaagggcataatgcaattatttggaattgatttcttataagcttatgaatagacatttgggcgagttcaagtttgctgagtgagtttatagtaataactgtcacgttttacattagctttcatcccagggg

SEQ ID NO: 21162 - DNA, 600 bp, Chicken  19866894232389_4
agctaaagaagtacaaaacgagtggaagaagtccatttgaatcaagacgagctcctaggatgagtccttgagggtgcaatgctcctgtttgcatgcctggaatggtgtaggctctcagagcgtcaggcaaggaagcaaaagcatggcagccaaaggctagctctggctcaaaggctgaaacatggctccttggcagttcagtaatgattgttggtggagaaactttatgtcattactttgcaaagctccaaagttatccagaggcaaaaccttcagaaggccatgggaatgacgtactgmgagaggccttaatgaggctgtgtgygtaattgctggccttttcctggccctatatggtgggcagggattgcattaaaaatcacactaaaactgaggcactgaagttaaattggggcatgtattccccatccaataaatacattcagtatgtctgraaggaacaaggagccatttttatttattttctcatctgactctaagatgagcttcatataagccaggaggaagggcacaarcaccaacagccctgtgctgagataaacccatctctcatttagtgttcccaacatgtggcactct

SEQ ID NO: 21163 - DNA, 600 bp, Chicken  19866894232389_5
aagaagtccatttgaatcaagacgagctcctaggatgagtccttgagggtgcaatgctcctgtttgcatgcctggaatggtgtaggctctcagagcgtcaggcaaggaagcaaaagcatggcagccaaaggctagctctggctcaaaggctgaaacatggctccttggcagttcagtaatgattgttggtggagaaactttatgtcattactttgcaaagctccaaagttatccagaggcaaaaccttcagaaggccatgggaatgacgtactgmgagaggccttaatgaggctgtgtgygtaattgctggccttttcctggccctatatggtgggcagggattgcattaaaaatcacactaaaactgaggcactgaagttaaattggggcatgtattccccatccaataaatacattcagtatgtctgraaggaacaaggagccatttttatttattttctcatctgactctaagatgagcttcatataagccaggaggaagggcacaarcaccaacagccctgtgctgagataaacccatctctcatttagtgttcccaacatgtggcactctgtagtaactttttttttcctgcccc

SEQ ID NO: 21164 - DNA, 600 bp, Chicken  19866894232389_6
gctagctctggctcaaaggctgaaacatggctccttggcagttcagtaatgattgttggtggagaaactttatgtcattactttgcaaagctccaaagttatccagaggcaaaaccttcagaaggccatgggaatgacgtactgmgagaggccttaatgaggctgtgtgygtaattgctggccttttcctggccctatatggtgggcagggattgcattaaaaatcacactaaaactgaggcactgaagttaaattggggcatgtattccccatccaataaatacattcagtatgtctgraaggaacaaggagccatttttatttattttctcatctgactctaagatgagcttcatataagccaggaggaagggcacaarcaccaacagccctgtgctgagataaacccatctctcatttagtgttcccaacatgtggcactctgtagtaactttttttttcctgccccgtgttgcaatggacataaaataaacccaacccttcttaacttatgctggcatcatctcacaccactggaagaatgatcctcacagtttaaagaggtcagatagtaactaatgcgctagataattgcacca

SEQ ID NO: 21165 - DNA, 600 bp, Chicken  19866894232389_7
tttgcaaagctccaaagttatccagaggcaaaaccttcagaaggccatgggaatgacgtactgmgagaggccttaatgaggctgtgtgygtaattgctggccttttcctggccctatatggtgggcagggattgcattaaaaatcacactaaaactgaggcactgaagttaaattggggcatgtattccccatccaataaatacattcagtatgtctgraaggaacaaggagccatttttatttattttctcatctgactctaagatgagcttcatataagccaggaggaagggcacaarcaccaacagccctgtgctgagataaacccatctctcatttagtgttcccaacatgtggcactctgtagtaactttttttttcctgccccgtgttgcaatggacataaaataaacccaacccttcttaacttatgctggcatcatctcacaccactggaagaatgatcctcacagtttaaagaggtcagatagtaactaatgcgctagataattgcaccaatcaaagcatgtgtgtattacaacattaggcaattattaaattaacagatggcagaggcttctcagagctctgtaaaaatg

SEQ ID NO: 21166 - DNA, 600 bp, Chicken  19866894232391_1
tcagacccaagtaaaccagcatctctacaaatctaacagggttagttgctttacccttcaacatgctggtttgtcactgttgagacagtattcctttttttgttggtaatgttttttcttccctgaattactgttggaatataatgtcaccactgcagtgtaatgtgaagatggctgaaccttgcagcagcttacctgtgccaaaagctggttttctcctgcacggcactccacatgagctaatttttgttgctacttgttgaggcaaagcagcctatggtcccgatgttgctgctgcarggctgctcctggcatctccacaagctcactgaaattcagcttaggttattcctgcactgcagtgtctgttttggtcttgatcttgattgggtagcaccattcatatgtacagaattgctaatgtcagtgtttattgtccatgagctttcttcagtcatcccccttaaagcccatgggaagcggtcccgttaattttctgtgtgctttggatcatgctgctagagctgattgtgttccagttttgtcatcagagtacttaagatgttgggtttggttttgcttttttttttttaactgttt

SEQ ID NO: 21167 - DNA, 600 bp, Chicken  19866894232392_1
tagtcattaataatctcatgcatcatcatgcacttaaccacttttcttttgtaataaaaaagacaagccaaatactaattactacatccctaggaaaatgcagtagaaaatatattgtgtcatctcagtgcaatgcactgaagcagaatgaaaccaggaaatgaaatatttctgtattttgttgtttatattcataaaaattgatggtatattttgggatgtatttatgggtcctcttaagaatgtttgtcaagagtaattatcctttatctgtattgtatgaaaacaccatataatgcrtcttttctctttcaggaatggatgttttagtttagttgtgagtgatcttcataaaccctgatcccagttctgatcacttcagggctgaccaaaagttaaggaatgttattgaggacgttgtccaaatgcctcttgaatgctgacatgcatggggcatcaaycagttccctaggaagcctgttccagagtctgaccaccctcataggaaataaaagttacctaatgcccagtctgaccctcacatggagcagctctgtgcccttcccatcctgctattggctcccagtatttttgtagcct

SEQ ID NO: 21168 - DNA, 554 bp, Chicken  19866894232392_2
tgaaatatttctgtattttgttgtttatattcataaaaattgatggtatattttgggatgtatttatgggtcctcttaagaatgtttgtcaagagtaattatcctttatctgtattgtatgaaaacaccatataatgcrtcttttctctttcaggaatggatgttttagtttagttgtgagtgatcttcataaaccctgatcccagttctgatcacttcagggctgaccaaaagttaaggaatgttattgaggacgttgtccaaatgcctcttgaatgctgacatgcatggggcatcaaycagttccctaggaagcctgttccagagtctgaccaccctcataggaaataaaagttacctaatgcccagtctgaccctcacatggagcagctctgtgcccttcccatcctgctattggctcccagtatttttgtagcctcacacagatactgtgatggtaacttcactgtctccatcaactttaaaatagaaaaagatgtcacatgaggcattaaatttgtttaaggataaatactaggaggtaggcacagcag

SEQ ID NO: 21169 - DNA, 600 bp, Chicken  19866894232401_1
aacaaaatgttgaaattgttagtttttctgtgaacaaaatgtccgtttcagtccagcttgacctaagctgcagcacaatactgcttgtggaagaaattcccttcctaccccctgcagagttggttctacactctgaagtatgtgatttcattacccttaatttaccatgccaagctacaaataataatgaccataaaattatccgtctcttgttaaaatgcggcaggaatgcagggccccatccaacagtgaattccagaggagagcttcacgctgtgtgaagaatcacagtcttagtgycgtccacgaagagcaagaaatgccgactgacaggaggcaatcagagcatctccccagctcttgctgaagcgcacgcttcaacagctgaaacaaaactctttagctcctacaaattcctcacatccctttggtgcctacatctcatggcagtgaaacttcggctcccacataaattccaacgtgttacctctccactgtgggagttgccatgggaagccaatgctgttaattcagtctgcagctaacggttccctgttcataagtcatctgtttctctatgtctgagggggaatacagact

SEQ ID NO: 21170 - DNA, 599 bp, Chicken  19866894232405_1
  misc_feature (1)..(104): n is any nucleotide
nnnnnnnnnnnnnnnnnnnnnnnnnnnnnnnnnnnnnnnnnnnnnnnnnnnnnnnnnnnnnnnnnnnnnnnnnnnnnnnnnnnnnnnnnnnnnnnnnnnnnnnntggcctctgtgtggaaattctcctgggaagaggccagaaaggtagttttcaaattttatgttaactgaaattgcagaaaaaggcataaagaagggaaagagttttttatcttctatatatttttaatattttattttattttttgtaaaacttggcttggttctaattaggtgatgcaaattcttcaggtgaactygggctgacggggatataaggttttacagagcccggcgtgaggttgtgtgtgttttgtaccttgtctcctagcagcaaaaaccacatggatgtgagaggctgttttatgatccgccagggctgttgttggacaggttacagtgagcagagttattccagccgcgttggaattgctgttccctccctcctcttattttctctctctctctctctctcccttttccctttccacctttgctttctttttttctttcttcttttttcttcaccaagcaagmgtgagagaggagagaggatgga

SEQ ID NO: 21171 - DNA, 597 bp, Chicken  19866894232405_2
atgcaaattcttcaggtgaactygggctgacggggatataaggttttacagagcccggcgtgaggttgtgtgtgttttgtaccttgtctcctagcagcaaaaaccacatggatgtgagaggctgttttatgatccgccagggctgttgttggacaggttacagtgagcagagttattccagccgcgttggaattgctgttccctccctcctcttattttctctctctctctctctctcccttttccctttccacctttgctttctttttttctttcttcttttttcttcaccaagcaagmgtgagagaggagagaggatggatgctttcattttccttgtgccagaactctcacactggacttggcttcaacctccttctgatctctcttgcaaacccttttcccttgctggctagaatttcaccaggaatttctaaagagactatgtaagtagtaaagtaagtagtaaactatgttggttactttttcatttgctcatctcttcagtgtttcaaaaaaaaacacaacaaaacaactttgtgctcatgctgtgcaacaacttccgtcagaggatttctaaacagcttggcaaacatt

SEQ ID NO: 21172 - DNA, 600 bp, Chicken  19866894232407_1
agtagtatattatatacacagagatatggacattttgtccagtacagttgtccctgaatcccaatatttcctgttaaaaacttcataactttttaatgaaattcagtgtttcattccactgccactttcctcatcaagtaattcgtgtttttcctttctgctgcagtattatataaccagccatgtgcaaaagctggatgcaaactcagtttaagagccaagctcagcacaacacagccacattcagatagctgttcagagaaaggtacatattctcaattgatcagttctctttaaaawgttacagtatccaagtgccataagcatgatttttccctgccttaaattctggagactcacatagatacctgtgaaaatcaggatgggaatatctgatacctacttcgtaagatcatgaataacatctggaagcactaactcaagtttctaaaacaacatactgtcattaacttcaggtaaagtaaatccatcttattaggactaattcccttaggtgcaacacttgatgcagtagagaatcagtgacagatgaggtcaatgtctcatcctagatcttgtacaggatttccatgggctgtg

SEQ ID NO: 21173 - DNA, 600 bp, Chicken  19866894232407_2
agagggaaaggacatttagcattagacatgtcacttggtggaatttcttaagactcatgaaggaaaactgcaaaaattgaccatcagatgaattaatgatcttaaaaatttcaacatggcaaacctctacaaatacactagacacttgtacaggtcttacaacattaccaacagcagaataggaggaaagataaagttggctacatccttctttggagacagtttccagttcctgagcgaccatctactgagatcaggaacagacacattgtcctggaaggcagaattatatgtattccragtctattaccaaaggactcccaaaaatccagartgtgtggatccaagctggtatctgtaggaaaatccaagctggtatctgaaggaagtaaatgaaaagttactcagacttatctgtaccactayccacatttcttattccagactctgatactaccttgaacgagcagattaaaattaakcaagaagctcagacagctggagcaaaggactcagggaaacataaggaatgtaaacatcaggaaaacaatcttggccagttcttttagtgaggagccaagctcatgacgggacaaaaat

SEQ ID NO: 21174 - DNA, 600 bp, Chicken  19866894232407_3
ttggtggaatttcttaagactcatgaaggaaaactgcaaaaattgaccatcagatgaattaatgatcttaaaaatttcaacatggcaaacctctacaaatacactagacacttgtacaggtcttacaacattaccaacagcagaataggaggaaagataaagttggctacatccttctttggagacagtttccagttcctgagcgaccatctactgagatcaggaacagacacattgtcctggaaggcagaattatatgtattccragtctattaccaaaggactcccaaaaatccagartgtgtggatccaagctggtatctgtaggaaaatccaagctggtatctgaaggaagtaaatgaaaagttactcagacttatctgtaccactayccacatttcttattccagactctgatactaccttgaacgagcagattaaaattaakcaagaagctcagacagctggagcaaaggactcagggaaacataaggaatgtaaacatcaggaaaacaatcttggccagttcttttagtgaggagccaagctcatgacgggacaaaaatcagctcagatggtataaaatgggatggactttgg

SEQ ID NO: 21175 - DNA, 600 bp, Chicken  19866894232407_4
ctacaaatacactagacacttgtacaggtcttacaacattaccaacagcagaataggaggaaagataaagttggctacatccttctttggagacagtttccagttcctgagcgaccatctactgagatcaggaacagacacattgtcctggaaggcagaattatatgtattccragtctattaccaaaggactcccaaaaatccagartgtgtggatccaagctggtatctgtaggaaaatccaagctggtatctgaaggaagtaaatgaaaagttactcagacttatctgtaccactayccacatttcttattccagactctgatactaccttgaacgagcagattaaaattaakcaagaagctcagacagctggagcaaaggactcagggaaacataaggaatgtaaacatcaggaaaacaatcttggccagttcttttagtgaggagccaagctcatgacgggacaaaaatcagctcagatggtataaaatgggatggactttggtgtcttgaatgatgttccatgagctagtggtaagaagaggtccatctcctgaagaaaaaggaagagcaccattacttataaacatactgctc

SEQ ID NO: 21176 - DNA, 600 bp, Chicken  19866894232407_5
gaggaaagataaagttggctacatccttctttggagacagtttccagttcctgagcgaccatctactgagatcaggaacagacacattgtcctggaaggcagaattatatgtattccragtctattaccaaaggactcccaaaaatccagartgtgtggatccaagctggtatctgtaggaaaatccaagctggtatctgaaggaagtaaatgaaaagttactcagacttatctgtaccactayccacatttcttattccagactctgatactaccttgaacgagcagattaaaattaakcaagaagctcagacagctggagcaaaggactcagggaaacataaggaatgtaaacatcaggaaaacaatcttggccagttcttttagtgaggagccaagctcatgacgggacaaaaatcagctcagatggtataaaatgggatggactttggtgtcttgaatgatgttccatgagctagtggtaagaagaggtccatctcctgaagaaaaaggaagagcaccattacttataaacatactgctcgaggaggattttaactgccttagaaaagaagggtgacagaaacattttgctatgtg

SEQ ID NO: 21177 - DNA, 600 bp, Chicken  19866894232408_1
aaattgatttattttcatgacgaaaatagtaatgaggtgagatgattacatccaattctcagtctcaaagttgtcatttcccattggactggaccagtgatcttactagcttaattaaatcagcaataataattccttctccctatccccttctgctcagaggagggaaaacttaatggaaaggcaagaacatttccacaataaaagttgccttgagcttcatactcaaaacagtgattaagctcttaacccttatatttcagagattgaatcagtctttagaagaaaccttagaaattwttaaatatttacctaaagacacattccttatgttgcatgggaaaacttgaaaggttttttgttttttttttttcccctaaactctatagcaatgtccttttacttagactggtagtagaatatgtatattgatgtttgaagaagtgatcaaataacaatatttaaccttaacattatttatactgtgaacttattactgcagcatttctgaaagggttttaacgtaactgacattccagttaaaagtaatatgaaatagcactatccaaaatccagaaattaagattttgattagtcagt

SEQ ID NO: 21178 - DNA, 600 bp, Chicken  19866894232409_1
catgggaggagctggagcctgcagaaatggaacccatggggataagagagacagagctgtcactcccaggtcctgagggatggggactgctcagtgacagccatgcctgagtggcacattagtttgtgtttgctaatgggacctgaggacacagtcaccagctcccactcagacccacaataaaagctgagagtaaagtgagaaaatactttggatggctgagccctggagaaggggagcctggcagaaaggggacaggaggtagctgtggccatgtccctgctttctgcccccagggargtgacgaagggcaccaagagagcaaygtgctggctgatgagccgcacatgttgctggtgacccaggtatgcaggctttggggctgtcccaccttggatatagtgctggtctaaggcagcctctacgctgcaccccgacagtctcacaaccccaggacacagctggagatctccctgctgcccccggcccattgctccaaccctcccatgatccccatgccctgctgcaccagccagaagaggagcagccccctgaattgagagcccagggactccccaccagcattgtgaggctgaacac

SEQ ID NO: 21179 - DNA, 600 bp, Chicken  19866894232409_2
atggaacccatggggataagagagacagagctgtcactcccaggtcctgagggatggggactgctcagtgacagccatgcctgagtggcacattagtttgtgtttgctaatgggacctgaggacacagtcaccagctcccactcagacccacaataaaagctgagagtaaagtgagaaaatactttggatggctgagccctggagaaggggagcctggcagaaaggggacaggaggtagctgtggccatgtccctgctttctgcccccagggargtgacgaagggcaccaagagagcaaygtgctggctgatgagccgcacatgttgctggtgacccaggtatgcaggctttggggctgtcccaccttggatatagtgctggtctaaggcagcctctacgctgcaccccgacagtctcacaaccccaggacacagctggagatctccctgctgcccccggcccattgctccaaccctcccatgatccccatgccctgctgcaccagccagaagaggagcagccccctgaattgagagcccagggactccccaccagcattgtgaggctgaacaccagctttctcctagaccttgccccac

SEQ ID NO: 21180 - DNA, 600 bp, Chicken  19866894232409_3
gatgcttgactaaatttgcttgaaagcaggagaagaggagggggaaaaggaagaaacttaaaaccggcagctccaaggttggcagcaattagggaagcaaacagaacgtgcaccagggtgtctaacacagcactacaacacaaatcaaaacagataattactgcacagcacagaaaggctgtcgctccggcacagagcccacagcgagagcaattcgccacgctggctgcctttggggggaggtcaggtggtgggagaggggcagcccatggtctccagacgttggaaggcaagccaggsgtgkgggctcccacaggggacagccatgggaggagacagatgctgacaatcatcagactgtaattcagccagagggaggtgttggcagcaattacaaccagctcggagtgaggttcatcctcaaggcagggcttgggtggtggactcggtggctttcacagttctgccttgggaagatgagctagctccccctgccccaggcactgaagctgcctgtctagctcacagatagcccaaaccatgaatgagctgggaagtcacttcaagtagaaacacaaacagggatggaggccttctggg

SEQ ID NO: 21181 - DNA, 600 bp, Chicken  19866894232409_4
cttgactaaatttgcttgaaagcaggagaagaggagggggaaaaggaagaaacttaaaaccggcagctccaaggttggcagcaattagggaagcaaacagaacgtgcaccagggtgtctaacacagcactacaacacaaatcaaaacagataattactgcacagcacagaaaggctgtcgctccggcacagagcccacagcgagagcaattcgccacgctggctgcctttggggggaggtcaggtggtgggagaggggcagcccatggtctccagacgttggaaggcaagccaggsgtgkgggctcccacaggggacagccatgggaggagacagatgctgacaatcatcagactgtaattcagccagagggaggtgttggcagcaattacaaccagctcggagtgaggttcatcctcaaggcagggcttgggtggtggactcggtggctttcacagttctgccttgggaagatgagctagctccccctgccccaggcactgaagctgcctgtctagctcacagatagcccaaaccatgaatgagctgggaagtcacttcaagtagaaacacaaacagggatggaggccttctgggcaaa

SEQ ID NO: 21182 - DNA, 600 bp, Chicken  19866894232410_1
cagcattatgctcttagctaggtttatctggaaagaaaagcttttgtgcccagagagcccttttgatcagaatcgctattgtttttttaaagtctgtattcattatgctgtagacccttagcatgaacggttttttaggaggcagcctgtattgctcaagtgttgattcttaattcatgactactgagtgatgctgcgttttctttccagttgtacttctgttgtgaggagtcactgagtaatgactggcaaacagtgtccccgcagggctcagctctctgctgccagtgggtcactggrgaaatgatggctgtatgtcagatcatcctctataaatctgggccattgtgggaaaaggtgaaacctggagtcagttgtgcagcagctcgagagaatgatttagctgatgtagactgcagtgtaatactgataaaaatgtgcagagtggcagagatcacggggaattctccatttccacttgcccactaatatcttaaccacagaacgtgtgcagttggagatgaagaagatccccttgttattttcaagctgtggttccaactgtaatatcacgtgataataccatcactttgatcaggg

SEQ ID NO: 21183 - DNA, 599 bp, Chicken  19866894232412_1
  misc_feature (1)..(87): n is any nucleotide
nnnnnnnnnnnnnnnnnnnnnnnnnnnnnnnnnnnnnnnnnnnnnnnnnnnnnnnnnnnnnnnnnnnnnnnnnnnnnnnnnnnnnnnacaagatgggaggctcaacaatgttaacagattgtcttgcagaaatgcaaaaaatagctcctgtgttttacaggaataagtcaaggaactccaacagttccatctctgagaaatggcagagtaggccaggagttaaacctagctcaccttcacagcagttcagtttgagctcaactgactggccgtgaactgcttcaaagacattttgtgggraaaatccttcacaaatacccattaatatactgacaaaatgtccaatattgcccaatgtctaaaacctaaaacaaggttgaccagttttcacagtatttaaaatgaatgctgtaactgtgtccaaagtctatgttacttgcaaatgtatcagcttacgaagtctgaagcactggttgactctcttatgtatacccctgagtacgtataatatttaaatcgcactgtacatggttaagtatacgttttaccatatgttactttagcagaaaacttaactagggcttacctgcaagcattyt

SEQ ID NO: 21184 - DNA, 600 bp, Chicken  19866894232412_2
graaaatccttcacaaatacccattaatatactgacaaaatgtccaatattgcccaatgtctaaaacctaaaacaaggttgaccagttttcacagtatttaaaatgaatgctgtaactgtgtccaaagtctatgttacttgcaaatgtatcagcttacgaagtctgaagcactggttgactctcttatgtatacccctgagtacgtataatatttaaatcgcactgtacatggttaagtatacgttttaccatatgttactttagcagaaaacttaactagggcttacctgcaagcattytgggatgtcagcatattcatattgactgctgctcctgcataggtcagcaggaaygggcayatggaaaaactttcttaaggtaagttttggtataaaatgtatataacaatatttatttaactcccagaggagtttatgaggcttaattaatgccagcaaattgatttaagttgtttgggtgaaagatgatacaaaattgtacagaaggtggcccatgtctcacttgcatttcagagctgtgggatctctgcaggctttgggttgagctgtagttcagggtgaagcaccaagtgggtttga

SEQ ID NO: 21185 - DNA, 600 bp, Chicken  19866894232412_3
caatgtctaaaacctaaaacaaggttgaccagttttcacagtatttaaaatgaatgctgtaactgtgtccaaagtctatgttacttgcaaatgtatcagcttacgaagtctgaagcactggttgactctcttatgtatacccctgagtacgtataatatttaaatcgcactgtacatggttaagtatacgttttaccatatgttactttagcagaaaacttaactagggcttacctgcaagcattytgggatgtcagcatattcatattgactgctgctcctgcataggtcagcaggaaygggcayatggaaaaactttcttaaggtaagttttggtataaaatgtatataacaatatttatttaactcccagaggagtttatgaggcttaattaatgccagcaaattgatttaagttgtttgggtgaaagatgatacaaaattgtacagaaggtggcccatgtctcacttgcatttcagagctgtgggatctctgcaggctttgggttgagctgtagttcagggtgaagcaccaagtgggtttgaacaggtggagtctcatgacctgagttctctgatcttaccacaggttattcaaat

SEQ ID NO: 21186 - DNA, 600 bp, Chicken  19866894232412_4
ctaaaacctaaaacaaggttgaccagttttcacagtatttaaaatgaatgctgtaactgtgtccaaagtctatgttacttgcaaatgtatcagcttacgaagtctgaagcactggttgactctcttatgtatacccctgagtacgtataatatttaaatcgcactgtacatggttaagtatacgttttaccatatgttactttagcagaaaacttaactagggcttacctgcaagcattytgggatgtcagcatattcatattgactgctgctcctgcataggtcagcaggaaygggcayatggaaaaactttcttaaggtaagttttggtataaaatgtatataacaatatttatttaactcccagaggagtttatgaggcttaattaatgccagcaaattgatttaagttgtttgggtgaaagatgatacaaaattgtacagaaggtggcccatgtctcacttgcatttcagagctgtgggatctctgcaggctttgggttgagctgtagttcagggtgaagcaccaagtgggtttgaacaggtggagtctcatgacctgagttctctgatcttaccacaggttattcaaatgtggca

SEQ ID NO: 21187 - DNA, 600 bp, Chicken  19866894232414_1
tcttatgagagctgtaacctgagacttaaaaattcacgtgaatcatcctgttaactctcatcagttacatcagccctcctttcatcagtgagaatttccaattccttttgcacaaaactatcccgctagtattaatgcatgaactattcaatttcttctcttcccagtcagcctcagcactgttcaatacaaacatgacttcctggaactgaactatattttccttgctagtatccttctcctttatctttcacaccctgctacttgcttccctgattagactaaacctttctttctatyttctcttgtccaatgggagagtacaatagcactgcagccccgaggcatgagagatagctgctatgagagagcagcatacagcttgaaagcttgcaaggatgcattgcccatgtccccacttgcagtttcaggaggttacagaacagcaaagagaatattctgtttgataacrcagcaaaaagctaatagctgaactctcctgccggggctaaaagttgtgatggtatacgtggtatgctggactattccactgaaagtaaagctgtaagagcatagtgtggttatctgcatccttgggag

SEQ ID NO: 21188 - DNA, 600 bp, Chicken  19866894232414_2
cttatgagagctgtaacctgagacttaaaaattcacgtgaatcatcctgttaactctcatcagttacatcagccctcctttcatcagtgagaatttccaattccttttgcacaaaactatcccgctagtattaatgcatgaactattcaatttcttctcttcccagtcagcctcagcactgttcaatacaaacatgacttcctggaactgaactatattttccttgctagtatccttctcctttatctttcacaccctgctacttgcttccctgattagactaaacctttctttctataytctcttgtccaatgggagagtacaatagcactgcagccccgaggcatgagagatagctgctatgagagagcagcatacagcttgaaagcttgcaaggatgcattgcccatgtccccacttgcagtttcaggaggttacagaacagcaaagagaatattctgtttgataacrcagcaaaaagctaatagctgaactctcctgccggggctaaaagttgtgatggtatacgtggtatgctggactattccactgaaagtaaagctgtaagagcatagtgtggttatctgcatccttgggaga

SEQ ID NO: 21189 - DNA, 600 bp, Chicken  19866894232414_3
ctcagcactgttcaatacaaacatgacttcctggaactgaactatattttccttgctagtatccttctcctttatctttcacaccctgctacttgcttccctgattagactaaacctttctttctatattctcttgtccaatgggagagtacaatagcactgcagccccgaggcatgagagatagctgctatgagagagcagcatacagcttgaaagcttgcaaggatgcattgcccatgtccccacttgcagtttcaggaggttacagaacagcaaagagaatattctgtttgataacrcagcaaaaagctaatagctgaactctcctgccggggctaaaagttgtgatggtatacgtggtatgctggactattccactgaaagtaaagctgtaagagcatagtgtggttatctgcatccttgggagaggatgtcgacccagaagtctgcttcctccttttggttggcagtgaatgggaggaaaggtcacgtcttgcattcagctgcagcagttcatccacagtgccccaggaccccgagtcctgctctgtagtcccgagctgtctggagcttcccctgaggccaccaacacagtctct

SEQ ID NO: 21190 - DNA, 600 bp, Chicken  19866894232426_1
ttatagcatgctgaattttaataagccgtagaccaattacatttgaacacaagttgagatacacatgatactaaactccaaagggtgtgactggcgttgaaaagatcagtgatttttttgttttcaaaactgcagcagttaaataaggactgaagacagaagattgaacaacaatcgcctaaaccaggaagtcagacatgctgaactgcagttctcttttctcataagtagtagtaaccagtccactaagtacacagtttacaaaacacaaggtaagtaacaggacttcctgtcttcttkctaccataagcatttaaaaataagaaagcatctgaagygtttaccataaaactgaattcagccttcagactctttgcatggctcaagagacttctgtaataaggctgcacgttcatgtctgttgttacaagtcagcaagcacactgctgaaagagctgccttgctcttcacactcctttgctcacatcagcagaacattcacacaatcactctatgtatcagattggacaacctggatgaggctgaagaccaagctagaaaaaaaataactgaatgctggctcacactactaattccagc

SEQ ID NO: 21191 - DNA, 572 bp, Chicken  19866894232426_2
acatttgaacacaagttgagatacacatgatactaaactccaaagggtgtgactggcgttgaaaagatcagtgatttttttgttttcaaaactgcagcagttaaataaggactgaagacagaagattgaacaacaatcgcctaaaccaggaagtcagacatgctgaactgcagttctcttttctcataagtagtagtaaccagtccactaagtacacagtttacaaaacacaaggtaagtaacaggacttcctgtcttcttkctaccataagcatttaaaaataagaaagcatctgaagygtttaccataaaactgaattcagccttcagactctttgcatggctcaagagacttctgtaataaggctgcacgttcatgtctgttgttacaagtcagcaagcacactgctgaaagagctgccttgctcttcacactcctttgctcacatcagcagaacattcacacaatcactctatgtatcagattggacaacctggatgaggctgaagaccaagctagaaaaaaaataactgaatgctggctcacactactaattccagcacagcttgaa

SEQ ID NO: 21192 - DNA, 600 bp, Chicken  19866894232429_1
tctataataatttaggtgaaaatataacattttatatactgtatataatttaaatataacagcatttacctgatactccttatggtaatttgcaagtatgaaattaaatgttatggatgataacagtcaacactcagtttggaaaatgaaaactagactttttgtatatgcacttctacaaaccataaattataccccagaggaaagatttactacaatatgatttaaatcacaataaaggccttaatgttgacatttcgttctgataaatgtctaactttcacctctgtgctagtaacrttacaacattcttttggtaaatggggcaaacaagctgctttgtatttttccatgtcagaaatgaagaaatacaatcttttctgtgattcagaaaacagctcgttctaaaggacagtgactgttaagacrgtagtttggaactgattaagttggcacccatatagcaaaatgctaaggagtttctaaaaacaaaacagaacaaacatatctttgtaacttttatttaattgaaaagataaaaataaatattttgacaacaaactccactttaataatacgttgttcttctgaaagagaatg

SEQ ID NO: 21193 - DNA, 600 bp, Chicken  19866894232429_2
acactcagtttggaaaatgaaaactagactttttgtatatgcacttctacaaaccataaattataccccagaggaaagatttactacaatatgatttaaatcacaataaaggccttaatgttgacatttcgttctgataaatgtctaactttcacctctgtgctagtaacrttacaacattcttttggtaaatggggcaaacaagctgctttgtatttttccatgtcagaaatgaagaaatacaatcttttctgtgattcagaaaacagctcgttctaaaggacagtgactgttaagacrgtagtttggaactgattaagttggcacccatatagcaaaatgctaaggagtttctaaaaacaaaacagaacaaacatatctttgtaacttttatttaattgaaaagataaaaataaatattttgacaacaaactccactttaataatacgttgttcttctgaaagagaatgcacagatacttagatatttgtgggcaaaacaaaacaaagcaaatcagaacatcccttctccccattttttttcctataaataataatatctttgtgaaagcttaaaactcaatactgttctatactgta

SEQ ID NO: 21194 - DNA, 600 bp, Chicken  19866894232431_1
caccttcaatacatcagaaacatcttaaaacaatattcaacttccccatccatcctggagtctgtttgtttccagtaacgtaatgtcattttttcctgcgcatggatattcccaaggttttctctccatctcccacctctccaaatatttctatgaaagcttattgaaggtcaaaacaatgtacacattctgccttggtagaagctcagaggacctttcaaattcacatgattcagtgtgaatagatgggaaggcactgatttctagtttaaaaggtaattttcatgtaacttaaaaagrtaacttcaaaaagtctcatgattattattattatttttaatgcaggatcctactatctgtcattatacacacagtaaggattaaaatatgttcaagagagcttgagccaaaaaaggattatttgctcagactattttaaagaagagtgaagggttgtgggggagtttatatccttacttataaaagctaagtttagaattggttaactcagttccaggtagaactttaaaatcattacaaatttagtttgcctgtgggtcaaagaaaaggcagagtggacataaagatgtaagcaattaa

SEQ ID NO: 21195 - DNA, 600 bp, Chicken  19866894232433_1
taattatttgctcagaatgctctgcagtttcacaccttcttgtaactggacttcaggccttgttcactgtcaccttcttactgtttctgctccatcaatgcgaaccactcagccatctcatcctgctctctgcttatggccagtgggatctacttcacatcacagagaggtgtgaaacaaccagaaggtacaaatagacctctgagaagagtgaaaaaaagtggtgatatcaaatgcttgccaaaaaatgttgcatttattttcaagattttgaattattgaaatcattcattgtgtggragtattcctttgttcactgargccagagctgaggttgtgtatgttagggttrggagtcagctgaaaggttacagccccatctgttgtctgtggcaggggktaggctcccatgaaacaagtcatcctgccttgctgygagaagagactttgtagkagctgatctcttgacattggtatcaatagatcactttttagctgagactaggactgaaaactttaattttaggtgagtgaagataggggaaatagcttcagaaactgctgtctcttctccagccagcagtgggtagcacatttctc

SEQ ID NO: 21196 - DNA, 600 bp, Chicken  19866894232433_2
ctgcagtttcacaccttcttgtaactggacttcaggccttgttcactgtcaccttcttactgtttctgctccatcaatgcgaaccactcagccatctcatcctgctctctgcttatggccagtgggatctacttcacatcacagagaggtgtgaaacaaccagaaggtacaaatagacctctgagaagagtgaaaaaaagtggtgatatcaaatgcttgccaaaaaatgttgcatttattttcaagattttgaattattgaaatcattcattgtgtggragtattcctttgttcactgargccagagctgaggttgtgtatgttagggttrggagtcagctgaaaggttacagccccatctgttgtctgtggcaggggktaggctcccatgaaacaagtcatcctgccttgctgygagaagagactttgtagkagctgatctcttgacattggtatcaatagatcactttttagctgagactaggactgaaaactttaattttaggtgagtgaagataggggaaatagcttcagaaactgctgtctcttctccagccagcagtgggtagcacatttctcatctccatgctttgctgggtt

SEQ ID NO: 21197 - DNA, 600 bp, Chicken  19866894232433_3
tcaggccttgttcactgtcaccttcttactgtttctgctccatcaatgcgaaccactcagccatctcatcctgctctctgcttatggccagtgggatctacttcacatcacagagaggtgtgaaacaaccagaaggtacaaatagacctctgagaagagtgaaaaaaagtggtgatatcaaatgcttgccaaaaaatgttgcatttattttcaagattttgaattattgaaatcattcattgtgtggragtattcctttgttcactgargccagagctgaggttgtgtatgttagggttrggagtcagctgaaaggttacagccccatctgttgtctgtggcaggggktaggctcccatgaaacaagtcatcctgccttgctgygagaagagactttgtagkagctgatctcttgacattggtatcaatagatcactttttagctgagactaggactgaaaactttaattttaggtgagtgaagataggggaaatagcttcagaaactgctgtctcttctccagccagcagtgggtagcacatttctcatctccatgctttgctgggttccatggacttgatgttgagctaattgtatgg

SEQ ID NO: 21198 - DNA, 600 bp, Chicken  19866894232433_4
cgaaccactcagccatctcatcctgctctctgcttatggccagtgggatctacttcacatcacagagaggtgtgaaacaaccagaaggtacaaatagacctctgagaagagtgaaaaaaagtggtgatatcaaatgcttgccaaaaaatgttgcatttattttcaagattttgaattattgaaatcattcattgtgtggragtattcctttgttcactgargccagagctgaggttgtgtatgttagggttrggagtcagctgaaaggttacagccccatctgttgtctgtggcaggggktaggctcccatgaaacaagtcatcctgccttgctgygagaagagactttgtagkagctgatctcttgacattggtatcaatagatcactttttagctgagactaggactgaaaactttaattttaggtgagtgaagataggggaaatagcttcagaaactgctgtctcttctccagccagcagtgggtagcacatttctcatctccatgctttgctgggttccatggacttgatgttgagctaattgtatggcctatgggtgcaacacaatgtgcacaggcaaggcaacatgctcagaat

SEQ ID NO: 21199 - DNA, 600 bp, Chicken  19866894232433_5
tggccagtgggatctacttcacatcacagagaggtgtgaaacaaccagaaggtacaaatagacctctgagaagagtgaaaaaaagtggtgatatcaaatgcttgccaaaaaatgttgcatttattttcaagattttgaattattgaaatcattcattgtgtggragtattcctttgttcactgargccagagctgaggttgtgtatgttagggttrggagtcagctgaaaggttacagccccatctgttgtctgtggcaggggktaggctcccatgaaacaagtcatcctgccttgctgygagaagagactttgtagkagctgatctcttgacattggtatcaatagatcactttttagctgagactaggactgaaaactttaattttaggtgagtgaagataggggaaatagcttcagaaactgctgtctcttctccagccagcagtgggtagcacatttctcatctccatgctttgctgggttccatggacttgatgttgagctaattgtatggcctatgggtgcaacacaatgtgcacaggcaaggcaacatgctcagaatacamttgacccattcttacaatcctttttctgtttc

SEQ ID NO: 21200 - DNA, 600 bp, Chicken  19866894232433_6
tcacatcacagagaggtgtgaaacaaccagaaggtacaaatagacctctgagaagagtgaaaaaaagtggtgatatcaaatgcttgccaaaaaatgttgcatttattttcaagattttgaattattgaaatcattcattgtgtggragtattcctttgttcactgargccagagctgaggttgtgtatgttagggttrggagtcagctgaaaggttacagccccatctgttgtctgtggcaggggktaggctcccatgaaacaagtcatcctgccttgctgygagaagagactttgtagkagctgatctcttgacattggtatcaatagatcactttttagctgagactaggactgaaaactttaattttaggtgagtgaagataggggaaatagcttcagaaactgctgtctcttctccagccagcagtgggtagcacatttctcatctccatgctttgctgggttccatggacttgatgttgagctaattgtatggcctatgggtgcaacacaatgtgcacaggcaaggcaacatgctcagaatacamttgacccattcttacaatcctttttctgtttcattctcacaccacacctg

SEQ ID NO: 21201 - DNA, 600 bp, Chicken  19866894232433_7
ctcccatgaaacaagtcatcctgccttgctgygagaagagactttgtagkagctgatctcttgacattggtatcaatagatcactttttagctgagactaggactgaaaactttaattttaggtgagtgaagataggggaaatagcttcagaaactgctgtctcttctccagccagcagtgggtagcacatttctcatctccatgctttgctgggttccatggacttgatgttgagctaattgtatggcctatgggtgcaacacaatgtgcacaggcaaggcaacatgctcagaatacamttgacccattcttacaatcctttttctgtttcattctcacaccacacctgcaagacagggaagtattgtttttaggaagaaaggagagaagtggctgaccaaggatgcagaaacaaatcctgacagccagtcatgtgcaggtaaaaaagcattcctttctccatgtgagaatatatagtttaaaactatgtcagcctaataatatcagatgttctatgaggtggagtgaaaacatgtcattttgatkctgacagttgtccctttaaatgttttttatgctgggcccccggccaaaacaga

SEQ ID NO: 21202 - DNA, 396 bp, Chicken  19866894232433_8
gcctatgggtgcaacacaatgtgcacaggcaaggcaacatgctcagaatacamttgacccattcttacaatcctttttctgtttcattctcacaccacacctgcaagacagggaagtattgtttttaggaagaaaggagagaagtggctgaccaaggatgcagaaacaaatcctgacagccagtcatgtgcaggtaaaaaagcattcctttctccatgtgagaatatatagtttaaaactatgtcagcctaataatatcagatgttctatgaggtggagtgaaaacatgtcattttgatkctgacagttgtccctttaaatgttttttatgctgggcccccggccaaaacagaatagcaattttcttaagcttcagtgctgatcaacactgactaa

SEQ ID NO: 21203 - DNA, 600 bp, Chicken  19866894232435_1
agagcatggccagcaggttgagggatgttgtcctcccctctactctgccccattaaggccacatttagaatactgtatttggttctggtctttccagttcaaaaaagacaggagtctcctagaaagagtccagtggagggcaacaaagatgataaagggcctggagcatctcccatctgaggaaaggttgagtaacctggccctgttcaacctggggaaaagaagaccaaggggggatctgattaatatttataaatatctacagggaggcaaatggatgaggccaggctcttcatggtratgagtagtgayaggagaaggagcagtggcctaaaacctgaatgtaggaagttccatgcaaacacatggaagagcttatttacagtaagagtgacaragcacttgaaacaggttactcagagacgttgtggagtctccttctatggagatattcaaggactgtctggatgcctacccgtgtgacttactttagggaacctgctgtagcacgggagttggacttgatgatctcttgaggttccttccaacccttgcaattctatgattctgtgatagctttcattgcctttcaatcaagaa

SEQ ID NO: 21204 - DNA, 600 bp, Chicken  19866894232435_2
gcaggttgagggatgttgtcctcccctctactctgccccattaaggccacatttagaatactgtatttggttctggtctttccagttcaaaaaagacaggagtctcctagaaagagtccagtggagggcaacaaagatgataaagggcctggagcatctcccatctgaggaaaggttgagtaacctggccctgttcaacctggggaaaagaagaccaaggggggatctgattaatatttataaatatctacagggaggcaaatggatgaggccaggctcttcatggtratgagtagtgayaggagaaggagcagtggcctaaaacctgaatgtaggaagttccatgcaaacacatggaagagcttatttacagtaagagtgacaragcacttgaaacaggttactcagagacgttgtggagtctccttctatggagatattcaaggactgtctggatgcctacccgtgtgacttactttagggaacctgctgtagcacgggagttggacttgatgatctcttgaggttccttccaacccttgcaattctatgattctgtgatagctttcattgcctttcaatcaagaaaggtaacattca

SEQ ID NO: 21205 - DNA, 600 bp, Chicken  19866894232435_3
ttcaaaaaagacaggagtctcctagaaagagtccagtggagggcaacaaagatgataaagggcctggagcatctcccatctgaggaaaggttgagtaacctggccctgttcaacctggggaaaagaagaccaaggggggatctgattaatatttataaatatctacagggaggcaaatggatgaggccaggctcttcatggtratgagtagtgayaggagaaggagcagtggcctaaaacctgaatgtaggaagttccatgcaaacacatggaagagcttatttacagtaagagtgacaragcacttgaaacaggttactcagagacgttgtggagtctccttctatggagatattcaaggactgtctggatgcctacccgtgtgacttactttagggaacctgctgtagcacgggagttggacttgatgatctcttgaggttccttccaacccttgcaattctatgattctgtgatagctttcattgcctttcaatcaagaaaggtaacattcatgcagggatcctctgtgttggtccttgctattgcaagtaactccctgtaactttgctcgtttcttagtattttttcctttgaata

SEQ ID NO: 21206 - DNA, 600 bp, Chicken  19866894232439_1
ctgttatgaagaagggacacattttgagatgtttaagaggaggttccaaaagaaggatttgaaagagaaataaccagctagctaaaggctgaagggcaagagagaagctgtgtctgtactgggaaattaaacaagtgtgggatcattctgcagcgtggaatctcgtatctgtgctactcaacacttttgccctagagatacagatttctgcctgaacactgcacattggaaatgctgcctggcttctactggcttctgagcagtgcccaggagctgctcaggaggaataatagctatccygagccagaactgtcagggagtagcctaagagtttaacagcgcagatggctgcaatgccactgaccctgctgccctcattgttagtgtagattgacctgtggttctgtatgactctgctctgcaacaaggcatgtaactttgtacattgtcagggagcactgtctggtgggatagaacgtggtgagggacatgaggagcttagtacaatggttctcatttaattaggatggcttggatcacctctgcatttcagcaaaagttaaacctatggcactcttggcttaatgcaccatctctgga

SEQ ID NO: 21207 - DNA, 600 bp, Chicken  19866894232439_2
taactttgtacattgtcagggagcactgtctggtgggatagaacgtggtgagggacatgaggagcttagtacaatggttctcatttaattaggatggcttggatcacctctgcatttcagcaaaagttaaacctatggcactcttggcttaatgcaccatctctggagatgcacaaggtcaggctggatggggctctcagcacctgatggagttgtaggtatccctgttcattgcaggggagttggaatagatggcctttaaggctcctttcccaactcaaagattctatgattctatgrcatcacatggaactgtaagatgttgtggctgcaggaggttaaagagtttcctttatgtaatctaacaccaacacatgatatctttctagattaagtaacaactgtcagtgttcactaatccagtgctgcagctctgtgttagagcacagcatcctgaagtgacccaagctgcagcgcaatgtgactgcctttccacacatagtaacactcagagtttatacgagtagctcaaggtgtgagactgagaatacttgaactatctattatatatatataaatatatatatatttttcagttat

SEQ ID NO: 21208 - DNA, 600 bp, Chicken  19866894232443_1
ggaggcctttacgctctcattatcagcagtcaccatgaaatgttggacagggagggctcagcaacacagcaggaaaagggtttcatatctggaaataatcttgcagaagtctctcctaaggctgaaattcttggcaggaacctttcatccaaatcccctgggacagcaaggcagcgggctcttgtcctttagtaaaacttggcagctttcacatgtttttgaaaagcaattcaaatctttctgaaaatcccaatggcaggtactgtaccaatataaaatgaaacaaaaatctagcctttytttttwtgatgaacataaaccaacatattycacaagtggcatttggcacaggtcttgctcacacctcctgagaggtcagatcttgaggtgctcagtagttgctgaagccaccgtgatttacttggtcacttaaacacttttttttcccccaaatcaagcctacttcaagggctgaggaatgggggcatgtaacccacagtcagattttctgaagaaaatgttataaatcacaacactgaaaacctcacccctcacccttgcaatttgctccagctcttggagggggctcataatggcatt

SEQ ID NO: 21209 - DNA, 600 bp, Chicken  19866894232443_2
ctttacgctctcattatcagcagtcaccatgaaatgttggacagggagggctcagcaacacagcaggaaaagggtttcatatctggaaataatcttgcagaagtctctcctaaggctgaaattcttggcaggaacctttcatccaaatcccctgggacagcaaggcagcgggctcttgtcctttagtaaaacttggcagctttcacatgtttttgaaaagcaattcaaatctttctgaaaatcccaatggcaggtactgtaccaatataaaatgaaacaaaaatctagcctttytttttwtgatgaacataaaccaacatattycacaagtggcatttggcacaggtcttgctcacacctcctgagaggtcagatcttgaggtgctcagtagttgctgaagccaccgtgatttacttggtcacttaaacacttttttttcccccaaatcaagcctacttcaagggctgaggaatgggggcatgtaacccacagtcagattttctgaagaaaatgttataaatcacaacactgaaaacctcacccctcacccttgcaatttgctccagctcttggagggggctcataatggcattcamaay

SEQ ID NO: 21210 - DNA, 600 bp, Chicken  19866894232443_3
ttacgctctcattatcagcagtcaccatgaaatgttggacagggagggctcagcaacacagcaggaaaagggtttcatatctggaaataatcttgcagaagtctctcctaaggctgaaattcttggcaggaacctttcatccaaatcccctgggacagcaaggcagcgggctcttgtcctttagtaaaacttggcagctttcacatgtttttgaaaagcaattcaaatctttctgaaaatcccaatggcaggtactgtaccaatataaaatgaaacaaaaatctagcctttytttttwtwatgaacataaaccaacatattycacaagtggcatttggcacaggtcttgctcacacctcctgagaggtcagatcttgaggtgctcagtagttgctgaagccaccgtgatttacttggtcacttaaacacttttttttcccccaaatcaagcctacttcaagggctgaggaatgggggcatgtaacccacagtcagattttctgaagaaaatgttataaatcacaacactgaaaacctcacccctcacccttgcaatttgctccagctcttggagggggctcataatggcattcamaaytc

SEQ ID NO: 21211 - DNA, 600 bp, Chicken  19866894232443_4
caccatgaaatgttggacagggagggctcagcaacacagcaggaaaagggtttcatatctggaaataatcttgcagaagtctctcctaaggctgaaattcttggcaggaacctttcatccaaatcccctgggacagcaaggcagcgggctcttgtcctttagtaaaacttggcagctttcacatgtttttgaaaagcaattcaaatctttctgaaaatcccaatggcaggtactgtaccaatataaaatgaaacaaaaatctagcctttytttttwtgatgaacataaaccaacatattycacaagtggcatttggcacaggtcttgctcacacctcctgagaggtcagatcttgaggtgctcagtagttgctgaagccaccgtgatttacttggtcacttaaacacttttttttcccccaaatcaagcctacttcaagggctgaggaatgggggcatgtaacccacagtcagattttctgaagaaaatgttataaatcacaacactgaaaacctcacccctcacccttgcaatttgctccagctcttggagggggctcataatggcattcamaaytctacctccagacctgggcttcac

SEQ ID NO: 21212 - DNA, 517 bp, Chicken  19866894232443_5
atccaaatcccctgggacagcaaggcagcgggctcttgtcctttagtaaaacttggcagctttcacatgtttttgaaaagcaattcaaatctttctgaaaatcccaatggcaggtactgtaccaatataaaatgaaacaaaaatctagcctttytttttwtgatgaacataaaccaacatattycacaagtggcatttggcacaggtcttgctcacacctcctgagaggtcagatcttgaggtgctcagtagttgctgaagccaccgtgatttacttggtcacttaaacacttttttttyccccaaatcaagcctacttcaagggctgaggaatgggggcatgtaacccacagtcagattttctgaagaaaatgttataaatcacaacactgaaaacctcacccctcacccttgcaatttgctccagctcttggagggggctcataatggcattcamaaytctacctccagacctgggcttcacagggcaaagcaggcataagctagagctcattag

SEQ ID NO: 21213 - DNA, 360 bp, Chicken  19866894232443_6
ttwtgatgaacataaaccaacatattycacaagtggcatttggcacaggtcttgctcacacctcctgagaggtcagatcttgaggtgctcagtagttgctgaagccaccgtgatttacttggtcacttaaacacttttttttcccccaaatcaagcctacttcaagggctgaggaatgggggcatgtaacccacagtcagattttctgaagaaaatgttataaatcacaacactgaaaacctcacccctcacccttgcaatttgctccagctcttggagggggctcataatggcattcamaaytctacctccagacctgggcttcacagggcaaagcaggcataagctagagctcattag

SEQ ID NO: 21214 - DNA, 357 bp, Chicken  19866894232443_7
tgatgaacataaaccaacatattycacaagtggcatttggcacaggtcttgctcacacctcctgagaggtcagatcttgaggtgctcagtagttgctgaagccaccgtgatttacttggtcacttaaacacttttttttcccccaaatcaagcctacttcaagggctgaggaatgggggcatgtaacccacagtcagattttctgaagaaaatgttataaatcacaacactgaaaacctcacccctcacccttgcaatttgctccagctcttggagggggctcataatggcattcamaaytctacctccagacctgggcttcacagggcaaagcaggcataagctagagctcattag

SEQ ID NO: 21215 - DNA, 599 bp, Chicken  19866894232450_1
  misc_feature (1)..(21): n is any nucleotide
nnnnnnnnnnnnnnnnnnnnngtacctaatgttagacatgcatactgggcagctcaaattctcaaaggctctcctcttttcaattactcacattcattctctttcttactaatatttcaagtcttactgttgttctttatttttaaaggttttaggtttacattcctttaattcagaaaagaacgtgacatcaataactttcatgcactttttttggccagaatcacacaaaaaataatcatgattatctcctactaattcaattaactaattctgacaatataactgacaaattatttwggggcaacaatttgaaatttttgcttctgctttggtaccaaccctcagttcgttagtgatgaggaactagttcttgtcagctaaatcatctctggtcttataatgttgacagaacatcagtgaaagtgcagttatcctcttcaaattaaaaggtaaatatgtttatacacacagtttgtaaatcactatttcatcactgatgatacctttaaaaaaagaaaaaagatatccacaatcaatacctgccatacattgtctacaggaaatagcatgcaacatttttatttttaacttgaaaa

SEQ ID NO: 21216 - DNA, 600 bp, Chicken  19866894232450_2
tgcttctgctttggtaccaaccctcagttcgttagtgatgaggaactagttcttgtcagctaaatcatctctggtcttataatgttgacagaacatcagtgaaagtgcagttatcctcttcaaattaaaaggtaaatatgtttatacacacagtttgtaaatcactatttcatcactgatgatacctttaaaaaaagaaaaaagatatccacaatcaatacctgccatacattgtctacaggaaatagcatgcaacatttttatttttaacttgaaaaaggatttccattcactttcacrtaacgcatgtttctgaataatagggaattagaactgtattatgtagtagagaaagcagtatacaaggsacactattttctagagaatactttcttaarggttttcatggatctcacaggattacatcacagaaaaaaaatcttgcaatactaagtagcagtagaaactccctaccaaagcaatagagctcacacagccttagcaattcaactgaattctctctaggaaatatctgtacacaggatattaatattccataaaaaaatcctgaaagttctcatattctgtcaaacacaggac

SEQ ID NO: 21217 - DNA, 600 bp, Chicken  19866894232450_3
ctctggtcttataatgttgacagaacatcagtgaaagtgcagttatcctcttcaaattaaaaggtaaatatgtttatacacacagtttgtaaatcactatttcatcactgatgatacctttaaaaaaagaaaaaagatatccacaatcaatacctgccatacattgtctacaggaaatagcatgcaacatttttatttttaacttgaaaaaggatttccattcactttcacrtaacgcatgtttctgaataatagggaattagaactgtattatgtagtagagaaagcagtatacaaggsacactattttctagagaatactttcttaarggttttcatggatctcacaggattacatcacagaaaaaaaatcttgcaatactaagtagcagtagaaactccctaccaaagcaatagagctcacacagccttagcaattcaactgaattctctctaggaaatatctgtacacaggatattaatattccataaaaaaatcctgaaagttctcatattctgtcaaacacaggacaattatgtatctaactgatattaaaaattacaccattctgcaacctctccacagcagcacagctgaaa

SEQ ID NO: 21218 - DNA, 600 bp, Chicken  19866894232450_4
gtgaaagtgcagttatcctcttcaaattaaaaggtaaatatgtttatacacacagtttgtaaatcactatttcatcactgatgatacctttaaaaaaagaaaaaagatatccacaatcaatacctgccatacattgtctacaggaaatagcatgcaacatttttatttttaacttgaaaaaggatttccattcactttcacrtaacgcatgtttctgaataatagggaattagaactgtattatgtagtagagaaagcagtatacaaggsacactattttctagagaatactttcttaarggttttcatggatctcacaggattacatcacagaaaaaaaatcttgcaatactaagtagcagtagaaactccctaccaaagcaatagagctcacacagccttagcaattcaactgaattctctctaggaaatatctgtacacaggatattaatattccataaaaaaatcctgaaagttctcatattctgtcaaacacaggacaattatgtatctaactgatattaaaaattacaccattctgcaacctctccacagcagcacagctgaaaaagtcacattttggttacattttttaatga

SEQ ID NO: 21219 - DNA, 600 bp, Chicken  19866894232450_5
tctgtcaaacacaggacaattatgtatctaactgatattaaaaattacaccattctgcaacctctccacagcagcacagctgaaaaagtcacattttggttacattttttaatgatcaggagatctcagaacatcatgctagtgtgtattaaactgctgtatgattgcaaagtgaccaattctgagtggagccaaaagatgtcatttaaatggatttgtaagtacagcgcttctgaattctatcatcaaatgacttgattcatgtcaaccaaactagaacaggagacctgttataatatscaagtggtcagcaggccaacaggttaatatcctaccaccagcatcttgggaaacacaagtgaaatagtcaagccccaaaagaagaaaaagttaccatttactgtagcagttttcagttttcaataactcagtcataaacaagctctgtaataggaatttgtaacacaggaccgctatggttgttattgcttggtagtatctggataattgaaattttattagtagcaacatttagcactgtaagcagaagacaattatgaatgattaagttaaatgtacaaagtagatgtagaaatacct

SEQ ID NO: 21220 - DNA, 600 bp, Chicken  19866894232453_1
tggcagccacaccgctcacaactcctcaccaaagccaatcacagcaggaagtgcctgccaggcccttgtgggcagctctaaggcatgtgtggggaaatgtacctcgtatcccccgctgcaattttataaggtattacataccctactgtgtatcgaagccattgctgctttgactccagctaattagcttttgtagctttgatggatggattgattcagcagttaaacagagataaattaactgtccatctaaagagagtttaactgaggagggaattctgattagaacgttatttcatkcmgtactgctcttctttctcagtgaacacagaaaagcccaccgggcccctctcggcagagccagcccaggtcagacacagctctgctctgccccaccggagctcggagggaccaacccagcccaaagacataagcaggaataagcacgccaggagtggacaactactttatgccacacgcattcctctgtatattcttttaacttcaagaaccccaccaaggagagccaagggtacgagatttttccttttyrgttgaagaggccgtagatacattaattactcctcgttttatgctcca

SEQ ID NO: 21221 - DNA, 600 bp, Chicken  19866894232453_2
gcagccacaccgctcacaactcctcaccaaagccaatcacagcaggaagtgcctgccaggcccttgtgggcagctctaaggcatgtgtggggaaatgtacctcgtatcccccgctgcaattttataaggtattacataccctactgtgtatcgaagccattgctgctttgactccagctaattagcttttgtagctttgatggatggattgattcagcagttaaacagagataaattaactgtccatctaaagagagtttaactgaggagggaattctgattagaacgttatttcatkcmgtactgctcttctttctcagtgaacacagaaaagcccaccgggcccctctcggcagagccagcccaggtcagacacagctctgctctgccccaccggagctcggagggaccaacccagcccaaagacataagcaggaataagcacgccaggagtggacaactactttatgccacacgcattcctctgtatattcttttaacttcaagaaccccaccaaggagagccaagggtacgagatttttccttttyrgttgaagaggccgtagatacattaattactcctcgttttatgctccaat

SEQ ID NO: 21222 - DNA, 546 bp, Chicken  19866894232453_3
aagagagtttaactgaggagggaattctgattagaacgttatttcatkcmgtactgctcttctttctcagtgaacacagaaaagcccaccgggcccctctcggcagagccagcccaggtcagacacagctctgctctgccccaccggagctcggagggaccaacccagcccaaagacataagcaggaataagcacgccaggagtggacaactactttatgccacacgcattcctctgtatattcttttaacttcaagaaccccaccaaggagagccaagggtacgagatttttccttttyrgttgaagaggccgtagatacattaattactcctcgttttatgctccaataggatgagaaaatccgattaaacgaggacgggaattaaagctcggggataacttttgctgtgcaaaaagaaaggcctgggcagcgctcagcagcagagctttgggaggcaatgccaccatcgggtgctgccagggcaaaggggtgcgcgctgatcaataaatatgctgaaccaggtgaaattcgggcaaagaaacg

SEQ ID NO: 21223 - DNA, 545 bp, Chicken  19866894232453_4
agagagtttaactgaggagggaattctgattagaacgttatttcatkcmgtactgctcttctttctcagtgaacacagaaaagcccaccgggcccctctcggcagagccagcccaggtcagacacagctctgctctgccccaccggagctcggagggaccaacccagcccaaagacataagcaggaataagcacgccaggagtggacaactactttatgccacacgcattcctctgtatattcttttaacttcaagaaccccaccaaggagagccaagggtacgagatttttccttttyrgttgaagaggccgtagatacattaattactcctcgttttatgctccaataggatgagaaaatccgattaaacgaggacgggaattaaagctcggggataacttttgctgtgcaaaaagaaaggcctgggcagcgctcagcagcagagctttgggaggcaatgccaccatcgggtgctgccagggcaaaggggtgcgcgctgatcaataaatatgctgaaccaggtgaaattcgggcaaagaaacg

SEQ ID NO: 21224 - DNA, 600 bp, Chicken  19866894232454_1
accagatgtgtttatttgaaacaaatactagctagctacttaatgggatagaattattagccagaagttaattaggcaaatatattaaacatcagtcatcctacacagcatcactttaacttctttagagccattatcagctacagaaaaaggtgggaagtgaacaatcaataaaggagcagtggtaaaaatacagaattatgaaatgtgattgtgcatcaaatgcaatgctttagggaattgacttaactatgtgaaaaacattgcaagtatcctaaaacatgggaggaagaaggaggytttgcttagcacctgcaggtgttggagcaattaagtgtagtaagtttttctttttcgaagaaaaaggatggcttcactgctttcatgtatattctacatatccctgaagatgcagacagtcacatggcgttctgcctctataatgagcttagtaacattgctggccaatggaaaaatgttctgttccccaagaggttaaatttaaaagccatttttaagatgatggctttcaggtccatgacacaagcagaagtgggtggagtaaaggcatgacatccttcaaggggaggaaaaactagt

SEQ ID NO: 21225 - DNA, 600 bp, Chicken  19866894232454_2
cgttctgcctctataatgagcttagtaacattgctggccaatggaaaaatgttctgttccccaagaggttaaatttaaaagccatttttaagatgatggctttcaggtccatgacacaagcagaagtgggtggagtaaaggcatgacatccttcaaggggaggaaaaactagttgggatcctttgttagcatcctgccatgacaaccattgcatagaacacctttcagctgctcctgaatgagagcagctgtctaaaagcaaatgaggtaatttacaggatagagcaccacaatccactyctttacagtgtctgtctgcttttgttcccatgctcttcatcttaaatctggttctggaattaataaaaatgatccttttcaagtgggaaaactaaaatatttatttctacattaatggaaacctctttaactccatgcatctgaaaataaatatgaagcagtactttctctttgcacggggagagagcctcctgtaaggcagagaccaaatgcaggacaatggttgccagctggacacaagttctgggcttccagctagtttaattctctccttcatagctgcagtgaataatattcgag

SEQ ID NO: 21226 - DNA, 599 bp, Chicken  19866894232455_1
  misc_feature (1)..(182): n is any nucleotide
nnnnnnnnnnnnnnnnnnnnnnnnnnnnnnnnnnnnnnnnnnnnnnnnnnnnnnnnnnnnnnnnnnnnnnnnnnnnnnnnnnnnnnnnnnnnnnnnnnnnnnnnnnnnnnnnnnnnnnnnnnnnnnnnnnnnnnnnnnnnnnnnnnnnnnnnnnnnnnnnnnnnnnnnnnnnnnnnnnnnnnttcttaagacaggttctactcctgcaccagcattatagatcgaagtcttacagcataaagggacttttgaaccaagattttagtggcccctttaacatgtagaggttttggtggtttrgttttggtttttgtctcaggttagcttgggaagcttaaccacactgtgcgttacagtcgctcccagatgaccctatcttgccagcttcctacctcctccyctctttgtttagcccggatctccttggactgtttcttcccgcagagctttctgcacttgcatgaaaacgtaactggacttaaacaaaaacaaaactccagtctgtgcatgccagtgaagtcacagaatcacagaatggttgaagttgggagggacctctgtgtccctctggtccaagcactgtgctcaagcagggccac

SEQ ID NO: 21227 - DNA, 599 bp, Chicken  19866894232455_2
  misc_feature (1)..(82): n is any nucleotide
nnnnnnnnnnnnnnnnnnnnnnnnnnnnnnnnnnnnnnnnnnnnnnnnnnnnnnnnnnnnnnnnnnnnnnnnnnnnnnnnnnttcttaagacaggttctactcctgcaccagcattatagatcgaagtcttacagcataaagggacttttgaaccaagattttagtggcccctttaacatgtagaggttttggtggtttrgttttggtttttgtctcaggttagcttgggaagcttaaccacactgtgcgttacagtcgctcccagatgaccctatcttgccagcttcctacctcctccyctctttgtttagcccggatctccttggactgtttcttcccgcagagctttctgcacttgcatgaaaacgtaactggacttaaacaaaaacaaaactccagtctgtgcatgccagtgaagtcacagaatcacagaatggttgaagttgggagggacctctgtgtccctctggtccaagcactgtgctcaagcagggccacgcagggcagcgcgcccaggaccacatccaggggctttggaggatctcccaggaaggagtgtgctggaggagacccctttgtaaaaacaaagtcatttaaa

SEQ ID NO: 21228 - DNA, 600 bp, Chicken  19866894232456_1
tgaatcgtaattcttttttatgccttttccccttgactgaaatcctgttaaatcgttcctctgcacccacaggaatacacttttcttcttctctttctcctccatctccttctccttcttcttcctctctccaatttctcgctcctaaaatagcaaattccagctgactgctttcaaggcaacgaggcgcccgcgggattgtgggagcgttgctcaaatcagcagagaaactaacgaagctgccaggaaacaatattaaaaaaagacggggggtggatcccatctgccataaatcaaagygctgcggtctgagcggagctgagccctcactgctgctctgctccaccccaacgctgcacctctccaacacctgagcacagggcagggctggggcagagctcgccgctccggtttgcagtgtgagaagggactgagcaaaccctggaacacagcctgggctgcccttgagctgtgccaaaggcagcgccaggagtccgctcccatgggatgctgtgggcagatgggagcacagtgcgcaaccactttgggaccgactttgtccctggccgtgagggacagttgctggcttgctggcttgct

SEQ ID NO: 21229 - DNA, 600 bp, Chicken  19866894232460_1
gctcaacaggcctgaaatggggctccgcacaactctgtgctatgatttctctattgctgtgatattgtgatgggtgcactaaaaatgaatgagcagattctgaagataaagaggtctgtaaaacagggataaggcttaattacttcacaggagggttaaaggattaatgaattaatgtttgcaaagtgctttgaagatgaaatgtgctaagtctgattatatctggtgggtggggatacgaatggaaaggaggcgatcagttccatcctgtagcccccaggaacaaggactggctgaacrtcacaataaataacgatctgaaggktttgctctcctgctgctgtggtgytttggagcccccggctgaaggtgcacttccagaacagattctgctgttgggaaatgggcacttttgatttcttctgcccggagttgtttattctgctccttctacattactttgcttttctttctcacttaggcgcatctcagacctgctgctcagtgaggtgcccataggatctgccatctgggccatcaatttggggcacagcttgtgccaccacctctaatctcttcaatggactttgattacccctc

SEQ ID NO: 21230 - DNA, 600 bp, Chicken  19866894232460_2
cgcacaactctgtgctatgatttctctattgctgtgatattgtgatgggtgcactaaaaatgaatgagcagattctgaagataaagaggtctgtaaaacagggataaggcttaattacttcacaggagggttaaaggattaatgaattaatgtttgcaaagtgctttgaagatgaaatgtgctaagtctgattatatctggtgggtggggatacgaatggaaaggaggcgatcagttccatcctgtagcccccaggaacaaggactggctgaacrtcacaataaataacgatctgaaggktttgctctcctgctgctgtggtgytttggagcccccggctgaaggtgcacttccagaacagattctgctgttgggaaatgggcacttttgatttcttctgcccggagttgtttattctgctccttctacattactttgcttttctttctcacttaggcgcatctcagacctgctgctcagtgaggtgcccataggatctgccatctgggccatcaatttggggcacagcttgtgccaccacctctaatctcttcaatggactttgattacccctctggctcaaactcacaccatttgctg

SEQ ID NO: 21231 - DNA, 600 bp, Chicken  19866894232460_3
tctattgctgtgatattgtgatgggtgcactaaaaatgaatgagcagattctgaagataaagaggtctgtaaaacagggataaggcttaattacttcacaggagggttaaaggattaatgaattaatgtttgcaaagtgctttgaagatgaaatgtgctaagtctgattatatctggtgggtggggatacgaatggaaaggaggcgatcagttccatcctgtagcccccaggaacaaggactggctgaacrtcacaataaataacgatctgaaggktttgctctcctgctgctgtggtgytttggagcccccggctgaaggtgcacttccagaacagattctgctgttgggaaatgggcacttttgatttcttctgcccggagttgtttattctgctccttctacattactttgcttttctttctcacttaggcgcatctcagacctgctgctcagtgaggtgcccataggatctgccatctgggccatcaatttggggcacagcttgtgccaccacctctaatctcttcaatggactttgattacccctctggctcaaactcacaccatttgctgggctgtaattgcaggtaatggtgt

SEQ ID NO: 21232 - DNA, 488 bp, Chicken  19866894232460_4
tgcccggagttgtttattctgctccttctacattactttgcttttctttctcacttaggcgcatctcagacctgctgctcagtgaggtgcccataggatctgccatctgggccatcaatttggggcacagcttgtgccaccacctctaatctcttcaatggactttgattacccctctggctcaaactcacaccatttgctgggctgtaattgcaggtaatggtgttaagtggggccgggttcccctgcagggcatgaagcactgctgcagatctgcatccttcacccacgctgagcccrctgcaggactgcagttctttaatggaatatttctacatcgcccaaagccccaaacaataactgctccctgaggtttgatcagtaacgtcggggcagtctctgtctgctgctctgaagaggtttggaggtgttttccctgcaggattcccctcggtggtgtcggtgcctctgcgtccatgcgggcaata

SEQ ID NO: 21233 - DNA, 600 bp, Chicken  19866894232463_1
aaatatattttcctctcaaaaagaaaagaaaacattgctaatcgggtaaataatgctttttttttttttttttcctaggctagcaggccaaaaattgaggcaaataaaaagcaaaaggttgtgagaagggcaaccccagtgtgttacagaaacatacatagcgacacttgtccttctcacaatgatgcatcaaaaaagctttttcaatatctacctgattagtgaacatctcttcgttgattaagttgctaaacaaaatactgttctatagctcaaccaaatcagctaacagtagtaggycatagtcatgtttgtcattgtcatttacattcacagagtcagacttgctactttgagattatttcctactttactaataaaattaaaaaaaaaaaaaaaaaaaccacacacacccagaagatattacagatttgtattgctcctgtccacaaaaaggttaagagccaaattccacctccttttgccaggtctgagaaggatggggcttgggagacagggtatagggtcaaagcacagtgaacttcagttacccttttatctccctctgttccatccattatcttcaccagcacaagagat

SEQ ID NO: 21234 - DNA, 599 bp, Chicken  19866894232466_1
  misc_feature (1)..(122): n is any nucleotide
nnnnnnnnnnnnnnnnnnnnnnnnnnnnnnnnnnnnnnnnnnnnnnnnnnnnnnnnnnnnnnnnnnnnnnnnnnnnnnnnnnnnnnnnnnnnnnnnnnnnnnnnnnnnnnnnnnnnnnnnnnatctacttctgtagcttttgttgtctgctgttaagaagatcctgttcttggaaaagtgtactgaattatacacattttcaaccttgctttccagttatggggctcagttcagctttaattcctctaaaggcacacgcaaagaccttatgacctcgtttatattcctcctgaatgcttytgcacagcayccaggctttgctggtaaaagcgtatccaaaccgaaaaagtaacagtaggaaacaaaaattattaatggttaaatctaaagcaggttgttaaacctagtacattcatctgcttacagtrgaggaacagagcatgctctttcccacagccagatgtcctgacgaggagcacagctcccaggcagacagctctccagcagcatcagcgcaacaatgaagtaatccctcctaaacatggggctgagaggtggatcygtgtcctgggatagaacagtggttacagaggcatttc

SEQ ID NO: 21235 - DNA, 599 bp, Chicken  19866894232466_2
  misc_feature (1)..(112): n is any nucleotide
nnnnnnnnnnnnnnnnnnnnnnnnnnnnnnnnnnnnnnnnnnnnnnnnnnnnnnnnnnnnnnnnnnnnnnnnnnnnnnnnnnnnnnnnnnnnnnnnnnnnnnnnnnnnnnnnatctacttctgtagcttttgttgtctgctgttaagaagatcctgttcttggaaaagtgtactgaattatacacattttcaaccttgctttccagttatggggctcagttcagctttaattcctctaaaggcacacgcaaagaccttatgacctcgtttatattcctcctgaatgcttytgcacagcayccaggctttgctggtaaaagcgtatccaaaccgaaaaagtaacagtaggaaacaaaaattattaatggttaaatctaaagcaggttgttaaacctagtacattcatctgcttacagtrgaggaacagagcatgctctttcccacagccagatgtcctgacgaggagcacagctcccaggcagacagctctccagcagcatcagcgcaacaatgaagtaatccctcctaaacatggggctgagaggtggatcygtgtcctgggatagaacagtggttacagaggcatttcccagagcaga

SEQ ID NO: 21236 - DNA, 600 bp, Chicken  19866894232466_3
ttctgtagcttttgttgtctgctgttaagaagatcctgttcttggaaaagtgtactgaattatacacattttcaaccttgctttccagttatggggctcagttcagctttaattcctctaaaggcacacgcaaagaccttatgacctcgtttatattcctcctgaatgcttytgcacagcayccaggctttgctggtaaaagcgtatccaaaccgaaaaagtaacagtaggaaacaaaaattattaatggttaaatctaaagcaggttgttaaacctagtacattcatctgcttacagtrgaggaacagagcatgctctttcccacagccagatgtcctgacgaggagcacagctcccaggcagacagctctccagcagcatcagcgcaacaatgaagtaatccctcctaaacatggggctgagaggtggatcygtgtcctgggatagaacagtggttacagaggcatttcccagagcagagattcaggtggaagcagccctcaagtttggagatctctaaatagcaggtcaggtctgcaattaagaaaaaaaatcaaaacctttacaaacctacaacaaaaagcatccacagwgtaaac

SEQ ID NO: 21237 - DNA, 600 bp, Chicken  19866894232466_4
gaccttatgacctcgtttatattcctcctgaatgcttytgcacagcayccaggctttgctggtaaaagcgtatccaaaccgaaaaagtaacagtaggaaacaaaaattattaatggttaaatctaaagcaggttgttaaacctagtacattcatctgcttacagtrgaggaacagagcatgctctttcccacagccagatgtcctgacgaggagcacagctcccaggcagacagctctccagcagcatcagcgcaacaatgaagtaatccctcctaaacatggggctgagaggtggatcygtgtcctgggatagaacagtggttacagaggcatttcccagagcagagattcaggtggaagcagccctcaagtttggagatctctaaatagcaggtcaggtctgcaattaagaaaaaaaatcaaaacctttacaaacctacaacaaaaagcatccacagwgtaaactattgtttcatccaaagtgcttacagcatacaaacaggatcctttaggacttactccatctagatgaagttccyacaacttcagatatttaccaagggatcaaagcaattattttccatcagcgtggttttaag

SEQ ID NO: 21238 - DNA, 600 bp, Chicken  19866894232466_5
acagtrgaggaacagagcatgctctttcccacagccagatgtcctgacgaggagcacagctcccaggcagacagctctccagcagcatcagcgcaacaatgaagtaatccctcctaaacatggggctgagaggtggatcygtgtcctgggatagaacagtggttacagaggcatttcccagagcagagattcaggtggaagcagccctcaagtttggagatctctaaatagcaggtcaggtctgcaattaagaaaaaaaatcaaaacctttacaaacctacaacaaaaagcatccacagwgtaaactattgtttcatccaaagtgcttacagcatacaaacaggatcctttaggacttactccatctagatgaagttccyacaacttcagatatttaccaagggatcaaagcaattattttccatcagcgtggttttaagaagtccatctataatgaaacaagcaacgataaagcacacagaaaactcgtgggggagtttaggaaaaaaaaaaaacaaacagcctcaccatctgtgctcaaattgtttggataagatcagccttagaaatgataaaaattgcccagaactaaaaaagatg

SEQ ID NO: 21239 - DNA, 577 bp, Chicken  19866894232466_6
agcagcatcagcgcaacaatgaagtaatccctcctaaacatggggctgagaggtggatcygtgtcctgggatagaacagtggttacagaggcatttcccagagcagagattcaggtggaagcagccctcaagtttggagatctctaaatagcaggtcaggtctgcaattaagaaaaaaaatcaaaacctttacaaacctacaacaaaaagcatccacagwgtaaactattgtttcatccaaagtgcttacagcatacaaacaggatcctttaggacttactccatctagatgaagttccyacaacttcagatatttaccaagggatcaaagcaattattttccatcagcgtggttttaagaagtccatctataatgaaacaagcaacgataaagcacacagaaaactcgtgggggagtttaggaaaaaaaaaaaacaaacagcctcaccatctgtgctcaaattgtttggataagatcagccttagaaatgataaaaattgcccagaactaaaaaagatgggggggggggaagcatggtttatttttttccactaatgtttgttgctgttgtattgg

SEQ ID NO: 21240 - DNA, 537 bp, Chicken  19866894232475_1
cagatctaaggaaagaaagcaaagtttgcaatgcatatggcagtccattagcattatattttcaacacttgagtgaagtctgtgatttcccgcatattggctgatgagctaaagcataaattcactctcaccagtatttatagctgctggcatacaagactcgcaacgtctactcaggatctcttcacatgaagtcctataatgggctgtctgagctacaagcaagataacaagccttcttctctccttgcatctttaggtcagcatttctgaatcagttgcagtgagttaacaaccccrgtgtcatcttgttagcatacaaaggaaggagctcagacaatgaatccagcaagagaatgttattttttttattcaagagaactccattgtacattatttctcttctcgttgacttacaacactggaggagttgctaccacgtgacacaccattacttctagaccggttcttccgggcttaatgtccagtactaccattgactatctctgaaaggttttcaggggtatgaatgagtga

SEQ ID NO: 21241 - DNA, 600 bp, Chicken  19866894232477_1
gtgggaaactgtgatctgcctttgcatgtatgtgtattttttcagtaaatctagagcaaaatttagaatgaattgatgatctgtggaaatcctcttggctagttgtccaaattacaaaagcattgctgcagctaatatatgcacctgacttaatcacagtgcacaaaccatagactgcttgaatactggaactgaatgacctctccattcctttctgccactgagccagtcatgtctgatactctttccttccctcaatcacgatcatgttttcttttgcttctcaaattgactgagatkttaggactatagataatgcacacatgtcaatttaggatatagctgggtaggtatgtggcattgacatttaagagatygcactgatataaatrcagactattcatagtccttatgctatgcagaaatatcctcatcttacaacatgaaatgcatataaataggggtatttaacgcaactgtattaagtatgcagtttttcctctggacacctggaaagtattcgtagctggcatgctaaaacaggaaaggaacagtcctttctagtttaaaaataatagtaataataataatgaacattac

SEQ ID NO: 21242 - DNA, 565 bp, Chicken  19866894232477_2
gatctgtggaaatcctcttggctagttgtccaaattacaaaagcattgctgcagctaatatatgcacctgacttaatcacagtgcacaaaccatagactgcttgaatactggaactgaatgacctctccattcctttctgccactgagccagtcatgtctgatactctttccttccctcaatcacgatcatgttttcttttgcttctcaaattgactgagatkttaggactatagataatgcacacatgtcaatttaggatatagctgggtaggtatgtggcattgacatttaagagatygcactgatataaatrcagactattcatagtccttatgctatgcagaaatatcctcatcttacaacatgaaatgcatataaataggggtatttaacgcaactgtattaagtatgcagtttttcctctggacacctggaaagtattcgtagctggcatgctaaaacaggaaaggaacagtcctttctagtttaaaaataatagtaataataataatgaacattactgtgtaaattttgatgaaaactaacctttgcatgatcagcag

SEQ ID NO: 21243 - DNA, 550 bp, Chicken  19866894232477_3
tcttggctagttgtccaaattacaaaagcattgctgcagctaatatatgcacctgacttaatcacagtgcacaaaccatagactgcttgaatactggaactgaatgacctctccattcctttctgccactgagccagtcatgtctgatactctttccttccctcaatcacgatcatgttttcttttgcttctcaaattgactgagatkttaggactatagataatgcacacatgtcaatttaggatatagctgggtaggtatgtggcattgacatttaagagatygcactgatataaatrcagactattcatagtccttatgctatgcagaaatatcctcatcttacaacatgaaatgcatataaataggggtatttaacgcaactgtattaagtatgcagtttttcctctggacacctggaaagtattcgtagctggcatgctaaaacaggaaaggaacagtcctttctagtttaaaaataatagtaataataataatgaacattactgtgtaaattttgatgaaaactaacctttgcatgatcagcag

SEQ ID NO: 21244 - DNA, 599 bp, Chicken  19866894232486_1
  misc_feature (1)..(60): n is any nucleotide
nnnnnnnnnnnnnnnnnnnnnnnnnnnnnnnnnnnnnnnnnnnnnnnnnnnnnnnnnnnnttttgttttactgtgttaatcttattggagcctttttatttaaatttatcagaaccatttctgtcatacccagatgcatgaagttgaacatgcacccagtggaagttttcatcttgctgagtgaagtaagactattgatcgtatcatctctctcagtcacaggcagtatgtcagacgtggtaaactgacttttctttgcctttgaagagtacattgattttggtttatacatgctcacaratgccttttccccacaccagaagagagctgggtttcttctgccctgcactcactgccaagatgycatgaagccaagttcactgatagccgtatgatttctgtggagtgaattagtttcatttatcctgatgatgcgcaagcagtttcttcaaagcaaagaaaagctgcttgaaagagaaaaggaaataactttaaagttaacagcctttcgaaccaagcccattttaattggtaacttcagamataraaaacagccttctaagtgcctttttttttttttcttttgcttctcttgttgg

SEQ ID NO: 21245 - DNA, 600 bp, Chicken  19866894232486_2
gttttactgtgttaatcttattggagcctttttatttaaatttatcagaaccatttctgtcatacccagatgcatgaagttgaacatgcacccagtggaagttttcatcttgctgagtgaagtaagactattgatcgtatcatctctctcagtcacaggcagtatgtcagacgtggtaaactgacttttctttgcctttgaagagtacattgattttggtttatacatgctcacaratgccttttccccacaccagaagagagctgggtttcttctgccctgcactcactgccaagatgycatgaagccaagttcactgatagccgtatgatttctgtggagtgaattagtttcatttatcctgatgatgcgcaagcagtttcttcaaagcaaagaaaagctgcttgaaagagaaaaggaaataactttaaagttaacagcctttcgaaccaagcccattttaattggtaacttcagamataraaaacagccttctaagtgcctttttttttttttcttttgcttctcttgttggttctggaaaccctagtaaaagaaggggctggatgggatgcactgtagtattgcagctctccactg

SEQ ID NO: 21246 - DNA, 600 bp, Chicken  19866894232486_3
actgacttttctttgcctttgaagagtacattgattttggtttatacatgctcacaratgccttttccccacaccagaagagagctgggtttcttctgccctgcactcactgccaagatgycatgaagccaagttcactgatagccgtatgatttctgtggagtgaattagtttcatttatcctgatgatgcgcaagcagtttcttcaaagcaaagaaaagctgcttgaaagagaaaaggaaataactttaaagttaacagcctttcgaaccaagcccattttaattggtaacttcagamataraaaacagccttctaagtgcctttttttttttttcttttgcttctcttgttggttctggaaaccctagtaaaagaaggggctggatgggatgcactgtagtattgcagctctccactgtgggggatttcttttcaactgagagcagtgagagtatgagagagccgagcttgggagcaggtgggactgacggggaaggagatgctgctttgagcatttgtggtgaggaaatgctagtttgcaagttatggttgacaatgcatttgcagtatgcaacaggaaaagtgtaactcatacag

SEQ ID NO: 21247 - DNA, 600 bp, Chicken  19866894232486_4
acttttctttgcctttgaagagtacattgattttggtttatacatgctcacaratgccttttccccacaccagaagagagctgggtttcttctgccctgcactcactgccaagatgycatgaagccaagttcactgatagccgtatgatttctgtggagtgaattagtttcatttatcctgatgatgcgcaagcagtttcttcaaagcaaagaaaagctgcttgaaagagaaaaggaaataactttaaagttaacagcctttcgaaccaagcccattttaattggtaacttcagamataraaaacagccttctaagtgcctttttttttttttcttttgcttctcttgttggttctggaaaccctagtaaaagaaggggctggatgggatgcactgtagtattgcagctctccactgtgggggatttcttttcaactgagagcagtgagagtatgagagagccgagcttgggagcaggtgggactgacggggaaggagatgctgctttgagcatttgtggtgaggaaatgctagtttgcaagttatggttgacaatgcatttgcagtatgcaacaggaaaagtgtaactcatacagagag

SEQ ID NO: 21248 - DNA, 600 bp, Chicken  19866894232486_5
gagtacattgattttggtttatacatgctcacaratgccttttccccacaccagaagagagctgggtttcttctgccctgcactcactgccaagatgycatgaagccaagttcactgatagccgtatgatttctgtggagtgaattagtttcatttatcctgatgatgcgcaagcagtttcttcaaagcaaagaaaagctgcttgaaagagaaaaggaaataactttaaagttaacagcctttcgaaccaagcccattttaattggtaacttcagamataraaaacagccttctaagtgrctttttttttttttcttttgcttctcttgttggttctggaaaccctagtaaaagaaggggctggatgggatgcactgtagtattgcagctctccactgtgggggatttcttttcaactgagagcagtgagagtatgagagagccgagcttgggagcaggtgggactgacggggaaggagatgctgctttgagcatttgtggtgaggaaatgctagtttgcaagttatggttgacaatgcatttgcagtatgcaacaggaaaagtgtaactcatacagagagatcaagctgcagcgaagag

SEQ ID NO: 21249 - DNA, 600 bp, Chicken  19866894232488_1
ttcaaagtactgaataggttccctatgttgccttgcttgcacacacagcttttgctttacctagcaaacttttttcaacataaaaaacttaccagaatatagatccttccatcatcaccttttatggtgaatctaaacgtgcttttagcagaggacaattccgcaagacactgagcaaccacgctctgtatgaattgagacctgttaaagaattgaacatatcgtacattttaattacaactacacaggtaaggtcattcattcataccaatgcagtgcaagtatgagcaactttatacygtcaattccaccacaatcctactacccatttttacaaagaaattgagctgctttatctttgccttcaccaaaaccactttctatctcctgcaacaggaactacttaacagatcagyagtctaaattgccccatgccccttactttgaacaccaygaaacatcaaatgatgagtaaacgcttttccttatactttacacataaaaacacaaagtttagaaaaatgcacatattgcaaatataattcacaaatagaaagaccgatgactaatacaaagtatataatacaagataattggatc

SEQ ID NO: 21250 - DNA, 600 bp, Chicken  19866894232488_2
accttttatggtgaatctaaacgtgcttttagcagaggacaattccgcaagacactgagcaaccacgctctgtatgaattgagacctgttaaagaattgaacatatcgtacattttaattacaactacacaggtaaggtcattcattcataccaatgcagtgcaagtatgagcaactttatacygtcaattccaccacaatcctactacccatttttacaaagaaattgagctgctttatctttgccttcaccaaaaccactttctatctcctgcaacaggaactacttaacagatcagyagtctaaattgccccatgccccttactttgaacaccaygaaacatcaaatgatgagtaaacgcttttccttatactttacacataaaaacacaaagtttagaaaaatgcacatattgcaaatataattcacaaatagaaagaccgatgactaatacaaagtatataatacaagataattggatcaagttctgtgccatcttagctacaaattgagttacttgagaatctaaaagccccacttccaatgaaacattacaagcttacttaactctacataacaaacttcaatttcaataatt

SEQ ID NO: 21251 - DNA, 600 bp, Chicken  19866894232488_3
acaattccgcaagacactgagcaaccacgctctgtatgaattgagacctgttaaagaattgaacatatcgtacattttaattacaactacacaggtaaggtcattcattcataccaatgcagtgcaagtatgagcaactttatacygtcaattccaccacaatcctactacccatttttacaaagaaattgagctgctttatctttgccttcaccaaaaccactttctatctcctgcaacaggaactacttaacagatcagyagtctaaattgccccatgccccttactttgaacaccaygaaacatcaaatgatgagtaaacgcttttccttatactttacacataaaaacacaaagtttagaaaaatgcacatattgcaaatataattcacaaatagaaagaccgatgactaatacaaagtatataatacaagataattggatcaagttctgtgccatcttagctacaaattgagttacttgagaatctaaaagccccacttccaatgaaacattacaagcttacttaactctacataacaaacttcaatttcaataattagtcaccaaatgccacgcaacttaaataattcaagtat

SEQ ID NO: 21252 - DNA, 600 bp, Chicken  19866894232495_1
tttatctcctgttgtattgtttctttagaaaatgagggtcttttctcttgaaaactcgggtcactgtggaagttgtttcttccaggcacagctgttagtcacgatgcactgggctctaatcccagctgctactgatgacaaggggccccacagcaatcactgctatgttagcatcagtggagcgagcagaggtcaaatgaatgcctggagtaacccaaaaggatctcacagggaagcacaagacttgtgttctgatatgttgcgttctctgccagcacggcatcagcttttatgttgtgragagagggagaaggaatgggaggaagccagagctgacagaccctgtgtagttgcaggttttttgatcttcctcttcatcgtgtgtttgygttggtggtaattcccatgaccttgggattttgctatggaaggaaagttttaaaaatattctcatttattcataattataaatagtaaaaaaacagaggcagtttctgggatcagtaaatccctcacagcaggattcccccttgacactgatctctgttccaagacaccctccagtccttttccagcactaaactctccctcctccaaaca

SEQ ID NO: 21253 - DNA, 600 bp, Chicken  19866894232495_2
agctgttagtcacgatgcactgggctctaatcccagctgctactgatgacaaggggccccacagcaatcactgctatgttagcatcagtggagcgagcagaggtcaaatgaatgcctggagtaacccaaaaggatctcacagggaagcacaagacttgtgttctgatatgttgcgttctctgccagcacggcatcagcttttatgttgtgragagagggagaaggaatgggaggaagccagagctgacagaccctgtgtagttgcaggttttttgatcttcctcttcatcgtgtgtttgygttggtggtaattcccatgaccttgggattttgctatggaaggaaagttttaaaaatattctcatttattcataattataaatagtaaaaaaacagaggcagtttctgggatcagtaaatccctcacagcaggattcccccttgacactgatctctgttccaagacaccctccagtccttttccagcactaaactctccctcctccaaacaacaaccctgtgtttctccctgtagctcagtagcagtatgatgaatggtccatggtgttgatcccactgtctctcccatcccacgcctac

SEQ ID NO: 21254 - DNA, 599 bp, Chicken  19866894232497_1
  misc_feature (1)..(70): n is any nucleotide
nnnnnnnnnnnnnnnnnnnnnnnnnnnnnnnnnnnnnnnnnnnnnnnnnnnnnnnnnnnnnnnnnnnnnnataacttgactgtctgatgataggtgctctgggctatgctgtgatttaaggtgtaagactctcctccctattgaggaggctgaaaaatttctccctccagtctgcgaaccacagagggacctcagattcttaatgcattccctattgatagccaccatagaagggtaagtaagaggaattaagatttaggtagtattggtgaaaaatgaatgcaggactgtattgtgagkaattatggtttatattttattcctttgatactttaacattctctgttttaattgttctgctttatagaactggtttaaaacttcatttacartttaatttctagcaaagtttttacattcttctattttagttgagatgaagaaatgaatacttgctgaccattaagaactccagaatgtaaatccatatacatgaggaagtagctaatacaactttgtgtatgttatgtcagtagttgactttttcctataaactgttacaattcagtattttgaatgttattgtccacttcagaaat

SEQ ID NO: 21255 - DNA, 600 bp, Chicken  19866894232497_2
ggtgctctgggctatgctgtgatttaaggtgtaagactctcctccctattgaggaggctgaaaaatttctccctccagtctgcgaaccacagagggacctcagattcttaatgcattccctattgatagccaccatagaagggtaagtaagaggaattaagatttaggtagtattggtgaaaaatgaatgcaggactgtattgtgagkaattatggtttatattttattcctttgatactttaacattctctgttttaattgttctgctttatagaactggtttaaaacttcatttacartttaatttctagcaaagtttttacattcttctattttagttgagatgaagaaatgaatacttgctgaccattaagaactccagaatgtaaatccatatacatgaggaagtagctaatacaactttgtgtatgttatgtcagtagttgactttttcctataaactgttacaattcagtattttgaatgttattgtccacttcagaaataatccaaaaaattgcacaaaagtaatttgttctaaagcacagtgtctaagattgttacagaatgttcatgggagatctaaggagtatggtgtg

SEQ ID NO: 21256 - DNA, 600 bp, Chicken  19866894232499_1
tcctcaggatgttgtaggatttttggatatgctatgatgcagattttgagactcaagaggccagatttcatattttgtggacatttgtgcattatagattcctagaatacctctgagtagcagtttcttcttacattttgtagtgtttctcctcttcatttgaatggatgtggatggatgtgactctgggaagcctggtctagtggttgcctaccctgcccacagcagggagttgaaactgtaatgatctttaaggtcctttccaacccaggtcattctatgattctatgattcattttygaatattttcttcacattggaaaacataagctatccattcttggttgcttaatttagtgttagtttggagtgtccactttggctgaaggagcagattttcttgtctgaattatttctgataaaagaaatcagcgcacttcagtgtttcttcaacagttcagtgagtcttctgcagtcttagattaaaaatgtctctgcgcattcctgctctatggagaactgaataaaagtataaccagtagctggtgcaaaacccatctcctttttagggtctcactcaacattaaggcacctgcaagg

SEQ ID NO: 21257 - DNA, 600 bp, Chicken  19866894232500_1
gcagatacgtctgctggtgcttgtgtgaacctgagaaatagtgattcatcaaatggatgagcttcacgtgaaaaactgataggtgcaggtaagatggtctggaagagtaaatattttcctgccgtggtttggttctgcttcgtggcattacgtgagctgctcgcttactaagcagcccagttccttactgtcaccctggggcagagacacttctatttttgctacttctgaaaagttatcaaatgaccacaccgttacgattataaaacgtcagcgttggaagcactgcacacagaactmcttcacttcgttgttgtaaattgcttgacttccagctcagcttaaatatatttgcaatttttgcaaactaaccgtcgctatttctcttactccatctccgacccgcccgctgtcgggtcctttgccggagcggctcccagcagcggcgcggggcggcctcggcccggaggagcggtgcagtcgaactgcggcagctgccctgagccgcacgtgggatgggtggcacggaaagcgagccgcagtctccacttctggcaggggcacgcgctgtgtagcgcgctgtctgataagcgggcggtg

SEQ ID NO: 21258 - DNA, 599 bp, Chicken  19866894232507_1
  misc_feature (1)..(124): n is any nucleotide
nnnnnnnnnnnnnnnnnnnnnnnnnnnnnnnnnnnnnnnnnnnnnnnnnnnnnnnnnnnnnnnnnnnnnnnnnnnnnnnnnnnnnnnnnnnnnnnnnnnnnnnnnnnnnnnnnnnnnnnnnnnntcttaggtggcaaaataccaaaattaaacgaagctaaacagaagcttaggacatattttcatttaatgagactgatctcactgcagaatggctttccagagcatttggaagaagccgcagatcttttatcatttaaaagtagcctggacaagacactggacaatgcccattctgtytgaaatccagggatattctctacatgacgtaccacagctctctcatctctgcttcttccaatccctagtttctctgggtcacatccccccttgtgacagaccaaagaaaatgtacgttactccgctggctccactgatcaaagcctcagacggcagattgagtgggttcttttatcagagaggaatgaatagccagagcataacagcagagcagccaactccttgcaaatggctgcatcgtgtcccttcagcgtgcataaccagaggggcttagcatctccttccaaacatttttggtg

SEQ ID NO: 21259 - DNA, 600 bp, Chicken  19866894232511_1
tcttaattgaaggcactctgtaataatggagaagctatgccataactaaagaataggagaaatgtgattcgctctccagtgcctaacagcaggcagaacaactggcttagctgcaatcaagtaaagccaatgggtagaaatgagccatggaataggagcaagtcctttttaaaatgctgctattaagaaacaatatggaaagaaaaatgaaagagtctttatgatttggtccagatattttatagaaaggtctattcagactgtaacgctgtaagcatttttcggtctggaatatacttktgctgtctggaagatgtaaaaatctactatttcttcaaatacacggcacaatttgtcttttcaactgttcctgcgtgtcagaaataactccaaatagttaaagttatgaccaaatataagggcaagctcttcccacaaacaagaatggagagcattttcaatgctgtattgatataatgggaggaagaaggcctatttaactttctttctaataaaatcctgagacaaatcctacagttatacaagaaatgccttcaaatgccccarctgcctttggaaatattctctatcagctcattt

SEQ ID NO: 21260 - DNA, 600 bp, Chicken  19866894232511_2
gctgtaagcatttttcggtctggaatatacttktgctgtctggaagatgtaaaaatctactatttcttcaaatacacggcacaatttgtcttttcaactgttcctgcgtgtcagaaataactccaaatagttaaagttatgaccaaatataagggcaagctcttcccacaaacaagaatggagagcattttcaatgctgtattgatataatgggaggaagaaggcctatttaactttctttctaataaaatcctgagacaaatcctacagttatacaagaaatgccttcaaatgccccarctgcctttggaaatattctctatcagctcatttactgacctgcagctgataaaacctgtaaggattttcttgagggagtgagcacattcctctccctttctatatatgtcttcccttgtactatcaggtctagtaacactggacaattgagactactgtttttttttcaatttgaaggaatagtagaagtgcattccccaggcaaaatataattatagaatcacataaacattaaggttgcaaaagaccacaaaaatcatttagtccaaccatcagcccatcatgactgtgcccactaaa

SEQ ID NO: 21261 - DNA, 600 bp, Chicken  19866894232525_1
gttattgttttgcttctagactctaataacagatgaagttcgtcttcaggagttgagagaaaagctgaatcaattaaaaatcatagcttgtgtttgtctcataacaaacaatatggtgggtgcagcaattgtaaacgtgcctgattttgccagccaactgaaaagaatctctgttcctcttcttgaaggcatgagcaagaagtaaggccttgtttaaccctcatcatacttttttaacagggagtaccaagcagatctaaaaactcaggggaaaacagttcaaatgttatagccaccatytgttgatcacgaatagcaaaagaaggaggcatttggataatgctctcagtactgtactttaacttctggttagtcctaaagtcaggaaggcagttgggctttggtgtttgtagatcccttcyaactgaactgttctaatrctagaagggctgcagcaatatattccaagtcattttygccagttgattcaagtttactataggtagcttaaggtatatggcatctaatgttgttacagcttttgctaaaagtatgatgcaatctctgagtgtctcaaaaaaaaccccaaacaacttccat

SEQ ID NO: 21262 - DNA, 600 bp, Chicken  19866894232525_2
cagcaattgtaaacgtgcctgattttgccagccaactgaaaagaatctctgttcctcttcttgaaggcatgagcaagaagtaaggccttgtttaaccctcatcatacttttttaacagggagtaccaagcagatctaaaaactcaggggaaaacagttcaaatgttatagccaccatytgttgatcacgaatagcaaaagaaggaggcatttggataatgctctcagtactgtactttaacttctggttagtcctaaagtcaggaaggcagttgggctttggtgtttgtagatcccttcyaactgaactgttctaatrctagaagggctgcagcaatatattccaagtcattttygccagttgattcaagtttactataggtagcttaaggtatatggcatctaatgttgttacagcttttgctaaaagtatgatgcaatctctgagtgtctcaaaaaaaaccccaaacaacttccattttactttttcctcatgaaatgctatgaatcgagccctgaggaatgcgtaagctccaggtcagtgtgagttggtgttattgctgcatgctgaaaatggttatctgaatgatcttatcttata

SEQ ID NO: 21263 - DNA, 600 bp, Chicken  19866894232525_3
ctgattttgccagccaactgaaaagaatctctgttcctcttcttgaaggcatgagcaagaagtaaggccttgtttaaccctcatcatacttttttaacagggagtaccaagcagatctaaaaactcaggggaaaacagttcaaatgttatagccaccatytgttgatcacgaatagcaaaagaaggaggcatttggataatgctctcagtactgtactttaacttctggttagtcctaaagtcaggaaggcagttgggctttggtgtttgtagatcccttcyaactgaactgttctaatrctagaagggctgcagcaatatattccaagtcattttygccagttgattcaagtttactataggtagcttaaggtatatggcatctaatgttgttacagcttttgctaaaagtatgatgcaatctctgagtgtctcaaaaaaaaccccaaacaacttccattttactttttcctcatgaaatgctatgaatcgagccctgaggaatgcgtaagctccaggtcagtgtgagttggtgttattgctgcatgctgaaaatggttatctgaatgatcttatcttatagatgctgacttatatctg

SEQ ID NO: 21264 - DNA, 600 bp, Chicken  19866894232525_4
tcttcttgaaggcatgagcaagaagtaaggccttgtttaaccctcatcatacttttttaacagggagtaccaagcagatctaaaaactcaggggaaaacagttcaaatgttatagccaccatytgttgatcacgaatagcaaaagaaggaggcatttggataatgctctcagtactgtactttaacttctggttagtcctaaagtcaggaaggcagttgggctttggtgtttgtagatcccttcyaactgaactgttctaatrctagaagggctgcagcaatatattccaagtcattttygccagttgattcaagtttactataggtagcttaaggtatatggcatctaatgttgttacagcttttgctaaaagtatgatgcaatctctgagtgtctcaaaaaaaaccccaaacaacttccattttactttttcctcatgaaatgctatgaatcgagccctgaggaatgcgtaagctccaggtcagtgtgagttggtgttattgctgcatgctgaaaatggttatctgaatgatcttatcttatagatgctgacttatatctggagaagtacataaatctgctgataacatttctatatt

SEQ ID NO: 21265 - DNA, 600 bp, Chicken  19866894232529_1
ctggatcatggccaacctgtcatccactgggatccccaggtcacatgtggaaactacaagccatctccaagctaagatatgccattctgctttggagcatcaacatatggaaaagtgacacttttgatagccaaatattcatatactcttatagatcagtatatatactgatctataactccccatctcaaattttgcagcacaccatgagcaagaaaatatgttacagaaacacactatcaaatagtactgtatgtccccaaagctgtttcagataagctggcaagcaggaagctgccyacagaacaaaaagcatgttacttgcggtcaaagtgataaagsaaaaagagatttcctgaagacttcgagtagcatggaatgtgaagtggtggtctacggtgaacattatttttgtcccatagctcatgcaacagaaaattaaacaaacaaaacccatgactctatactacctgagggcctataggacagtggagagaagaaaacagttgagttagtataatgaagaggaccagaaggtatggagaaactaaacccgaaagtggacttccctgtaacaatgcaaaaggaaacctaataaaa

SEQ ID NO: 21266 - DNA, 600 bp, Chicken  19866894232529_2
acatgtggaaactacaagccatctccaagctaagatatgccattctgctttggagcatcaacatatggaaaagtgacacttttgatagccaaatattcatatactcttatagatcagtatatatactgatctataactccccatctcaaattttgcagcacaccatgagcaagaaaatatgttacagaaacacactatcaaatagtactgtatgtccccaaagctgtttcagataagctggcaagcaggaagctgccyacagaacaaaaagcatgttacttgcggtcaaagtgataaagsaaaaagagatttcctgaagacttcgagtagcatggaatgtgaagtggtggtctacggtgaacattatttttgtcccatagctcatgcaacagaaaattaaacaaacaaaacccatgactctatactacctgagggcctataggacagtggagagaagaaaacagttgagttagtataatgaagaggaccagaaggtatggagaaactaaacccgaaagtggacttccctgtaacaatgcaaaaggaaacctaataaaattatcttaatcattacttgccttggcttcagcgatttccttg

SEQ ID NO: 21267 - DNA, 521 bp, Chicken  19866894232529_3
aaaattaaacaaacaaaacccatgactctatactacctgagggcctataggacagtggagagaagaaaacagttgagttagtataatgaagaggaccagaaggtatggagaaactaaacccgaaagtggacttccctgtaacaatgcaaaaggaaacctaataaaattatcttaatcattacttgccttggcttcagcgatttccttggccacttctgtttggaaccaaaagtggtttgtaaagtcaggccatttggtgacaattgccctcagctggtgtattatgtgttgtattaggcrcgtgcgagcctctcgggttgtgacgcgttagacccttcccctactctgggtggagctatgacgtgtacactgtagtaggcgtgcatgaagggcataggtatataagtgtgtgtgaggttcaataaattgccatttgctgatcatcatattggtgtcaccgcagtgaatggccaagctgtgtccctcggaggaggacgaacggtaaccactgcaacaattat

SEQ ID NO: 21268 - DNA, 599 bp, Chicken  19866894232530_1
  misc_feature (1)..(217): n is any nucleotide
nnnnnnnnnnnnnnnnnnnnnnnnnnnnnnnnnnnnnnnnnnnnnnnnnnnnnnnnnnnnnnnnnnnnnnnnnnnnnnnnnnnnnnnnnnnnnnnnnnnnnnnnnnnnnnnnnnnnnnnnnnnnnnnnnnnnnnnnnnnnnnnnnnnnnnnnnnnnnnnnnnnnnnnnnnnnnnnnnnnnnnnnnnnnnnnnnnnnnnnnnnnnnnnnnnnnnnnnnatgagttcttgtagctattacatcaagttaggtattcctggttgaatggatcttcttttcagggtaataatacagttagaggraaaaaaaaattatatatatatggtaatgcacctaaactaagcaaaagactgacttagggattagcctttgaggggatgtggcaatgctttatatggatagtaggaacaagataaagacgtaggaaaagagagcgtattaagacaaaccagtttgcaggcacaagaatcacttcagaaattcagggcaataacaatgtatagaaagtaaccattaggtctaatcagcaccttacgtaagtaattgttcatttttacattgctgggaattgttttgagattttttgtartattatttttaa

SEQ ID NO: 21269 - DNA, 600 bp, Chicken  19866894232530_2
tacagttagaggraaaaaaaaattatatatatatggtaatgcacctaaactaagcaaaagactgacttagggattagcctttgaggggatgtggcaatgctttatatggatagtaggaacaagataaagacgtaggaaaagagagcgtattaagacaaaccagtttgcaggcacaagaatcacttcagaaattcagggcaataacaatgtatagaaagtaaccattaggtctaatcagcaccttacgtaagtaattgttcatttttacattgctgggaattgttttgagattttttgtartattatttttaaagaacacttgctctcattacaattcctaattatcaaatattgtacttgcatttagcagaagcatttcaaacctgtttgcagcttcatgtttgcacgcatcttgagaaaaaagggtcagttcccattttagcactgatacctattttataatcacatatccccctttccgcaccttttcctttcctcctcctcacagaagagatagaacatattctgattctacattccatgtgaagttaatatagccagaacatgtgacacttctgtgacattttactaccatttttc

SEQ ID NO: 21270 - DNA, 600 bp, Chicken  19866894232537_1
acccttagttcctctgcaggaaaatacaccctcaatgttctctacactgagctgataagacagggagtgttgggcgaaggaaggaatgtatcctgcaagtgataaaaccttccagacaacttgatgtgctcagccaaggccaggttttcatttgttttccaattctgtcaatcatgcatagaaatgctacttgggagaagagctggtgctaagctacctcttaatgtgtacagcttaatcattatggtaatgatgataatcttgaaacatgaaccaagcaggcctggccagcacaggctygttatgaggagactgagccagggctggggattttctttcccagttgttagctgttccaccacccctgtgaatgctgtttctactcccccaggaaagagagaagagaacaaacaacatgtgacagatgttagtcatgtcgcgtactgcaggactggaaggcacttggatattaatgcaatgagtgcagcagaaaggcctgaatagagtcggcctgacttctaattaagcccactgagatgccaatactgatagcagttgtgcttgcgctgtgagaaaagcacagctagtgagacaaagcag

SEQ ID NO: 21271 - DNA, 599 bp, Chicken  19866894232544_1
  misc_feature (1)..(4): n is any nucleotide
nnnnagggtaaaagtgctacttgcggtagtttgtcacagcattctggaggaaagcctccacagctgtgagtgtatcactgtaaataactattgctttgctagtaagtaccatccataacttgggattctggcccaaagctagggtttcatgccgagcagggtaagttaccttgtaaaacatccactgcaggtgtgaggatatttcatggagcagtcttagcaacaaagcatatttttcctttttgtaattatttgcagagcttacgctcatcaggatttgcaggtcatcttaacagaggytaagtgaacagcttctgagtgtgcgcatcctggcaatgattttggtgccgtggttaatttgggtctgggcaggcagaraaagaggcctttcaaaaactcctgaagatagtatcttataccagcagacttttctccgttagatgtcataactgactattgtaacatgactgttttgacattttggtttgtgaagtctgtatttacaagcactcttacagtctttgttaactctttgattgtagtttgtagtactacgctttgggtaggacaacttgacaaaaggactacacagcaggatg

SEQ ID NO: 21272 - DNA, 600 bp, Chicken  19866894232544_2
tgtaaataactattgctttgctagtaagtaccatccataacttgggattctggcccaaagctagggtttcatgccgagcagggtaagttaccttgtaaaacatccactgcaggtgtgaggatatttcatggagcagtcttagcaacaaagcatatttttcctttttgtaattatttgcagagcttacgctcatcaggatttgcaggtcatcttaacagaggytaagtgaacagcttctgagtgtgcgcatcctggcaatgattttggtgccgtggttaatttgggtctgggcaggcagaraaagaggcctttcaaaaactcctgaagatagtatcttataccagcagacttttctccgttagatgtcataactgactattgtaacatgactgttttgacattttggtttgtgaagtctgtatttacaagcactcttacagtctttgttaactctttgattgtagtttgtagtactacgctttgggtaggacaacttgacaaaaggactacacagcaggatgttggaagtctcttggaggagtttggcccaatagaatcaataaatgtaagtataaatgcttcagtgcaagcataggcttc

SEQ ID NO: 21273 - DNA, 600 bp, Chicken  19866894232544_3
cagtctttgttaactctttgattgtagtttgtagtactacgctttgggtaggacaacttgacaaaaggactacacagcaggatgttggaagtctcttggaggagtttggcccaatagaatcaataaatgtaagtataaatgcttcagtgcaagcataggcttcaaaaatgcttttcagactgtttcaagttagctttatttttaatatattacagagattgaagggctgttgtttcctttatgattgtgttttctaatgtgaaaactaaagtcatttgtcctctgatgtggaaagaaaaraaggcagttgcttgctattttgggtattaaaaatgcctttgggataatgaaaactcccactttcataaaactcaccctttttctagagggaatggaataagaaagggttattgagttccttgtctgttctcttctgtcattttagacgtaagctaaagtttcartatggccaagtgtcgggtcctgcattttggtcacagcaaccccaggcaacccttcaggcttagggtagagtggctggaaagctgcctgatggaaagggaccttggtgtactggtggacagtcagctgaatatgggc

SEQ ID NO: 21274 - DNA, 600 bp, Chicken  19866894232544_4
aaaatgcttttcagactgtttcaagttagctttatttttaatatattacagagattgaagggctgttgtttcctttatgattgtgttttctaatgtgaaaactaaagtcatttgtcctctgatgtggaaagaaaaraaggcagttgcttgctattttgggtattaaaaatgcctttgggataatgaaaactcccactttcataaaactcaccctttttctagagggaatggaataagaaagggttattgagttccttgtctgttctcttctgtcattttagacgtaagctaaagtttcartatggccaagtgtcgggtcctgcattttggtcacagcaaccccaggcaacccttcaggcttagggtagagtggctggaaagctgcctgatggaaagggaccttggtgtactggtggacagtcagctgaatatgggccagcagtgtgctcatgtggccaagaaggccaatggcatcctggcttgtatcaggaatggtgcggtgagcaggactagggaagtcatcacgcccctgtactcagcattggtgaggcctcaccttgagtactgtgttcagttttgggcacctcagcacataaaggg

SEQ ID NO: 21275 - DNA, 599 bp, Chicken  19866894232550_1
  misc_feature (1)..(185): n is any nucleotide
nnnnnnnnnnnnnnnnnnnnnnnnnnnnnnnnnnnnnnnnnnnnnnnnnnnnnnnnnnnnnnnnnnnnnnnnnnnnnnnnnnnnnnnnnnnnnnnnnnnnnnnnnnnnnnnnnnnnnnnnnnnnnnnnnnnnnnnnnnnnnnnnnnnnnnnnnnnnnnnnnnnnnnnnnnnnnnnnnnnnnnnnntgcacagaagaaaacatagtggttatagctttcgtgttctgaatctgagagtctttgtaactgtcattgtaaaacagcatattgatttgtttggcataatgagacctaggattcyctgtcctgcttcctggatgatgctatcttattttatttattttttcccccaagatttacaattttaaatctgtaaggtcattagctaactctaaggaagtgttagatcattatgagatgtcttgatatgttttcagaaccaagatcactaaacaaactcctaaaactgcatttcgcaaaatccgcgcctccaggaagggaaacaggggaccccaaaaaaattaaaagcagcggcaacaatctgaggaggaacaaactaatttactaaatatagtatcagaatgtaagataacacgctat

SEQ ID NO: 21276 - DNA, 599 bp, Chicken  19866894232552_1
  misc_feature (1)..(88): n is any nucleotide
nnnnnnnnnnnnnnnnnnnnnnnnnnnnnnnnnnnnnnnnnnnnnnnnnnnnnnnnnnnnnnnnnnnnnnnnnnnnnnnnnnnnnnnnggtaatgctgacttgtatcagaaatagtgcagccagcaggaacacagaagtgatcgtacctctgtactcagctctggtgaggctgcatctttagtactgcattcagttttgggcccctcactacaaaaaagacattaagacaaaaacaaaagacatctggagcacaagtcttatgttcagtctggagaagaggaggctaaggggagatcttytattgctctctacaactacctgaaaggaggctgtggcaaggtagaggttggcctcttctcccaacagtgacaggacaagaggtgaaggcctcaagttgtgccaggggaggttcaggttgaataytgggaagaacgtcttctcagaaagagcagtcaggcatcagaacaggctgcccagggaagtggtagagtcaccatccctagaggtgtttaaggaaaaggtagatatagcactaaggaacatggtttagtgtgcartattggtgctaagtgactatccagctccccaagattaagta

SEQ ID NO: 21277 - DNA, 600 bp, Chicken  19866894232552_2
caggaacacagaagtgatcgtacctctgtactcagctctggtgaggctgcatctttagtactgcattcagttttgggcccctcactacaaaaaagacattaagacaaaaacaaaagacatctggagcacaagtcttatgttcagtctggagaagaggaggctaaggggagatcttytattgctctctacaactacctgaaaggaggctgtggcaaggtagaggttggcctcttctcccaacagtgacaggacaagaggtgaaggcctcaagttgtgccaggggaggttcaggttgaataytgggaagaacgtcttctcagaaagagcagtcaggcatcagaacaggctgcccagggaagtggtagagtcaccatccctagaggtgtttaaggaaaaggtagatatagcactaaggaacatggtttagtgtgcartattggtgctaagtgactatccagctccccaagattaagtactctcccacaagaatattccattatcatcagtgttagaatcaccttattctataagtgttttacctgtgtggcttgatgttctaggagcaaagcaaccataaagctgaccatcagcctttactca

SEQ ID NO: 21278 - DNA, 600 bp, Chicken  19866894232552_3
ttatgttcagtctggagaagaggaggctaaggggagatcttytattgctctctacaactacctgaaaggaggctgtggcaaggtagaggttggcctcttctcccaacagtgacaggacaagaggtgaaggcctcaagttgtgccaggggaggttcaggttgaataytgggaagaacgtcttctcagaaagagcagtcaggcatcagaacaggctgcccagggaagtggtagagtcaccatccctagaggtgtttaaggaaaaggtagatatagcactaaggaacatggtttagtgtgcartattggtgctaagtgactatccagctccccaagattaagtactctcccacaagaatattccattatcatcagtgttagaatcaccttattctataagtgttttacctgtgtggcttgatgttctaggagcaaagcaaccataaagctgaccatcagcctttactcactagtgaaatttcaactgcatgtctttattagtagctatgtatgttgggagtaatggctgtagctgctagtattaatgcatatgcaagagaaaacggaaaatatctaggcagcttggacagctctcttatacca

SEQ ID NO: 21279 - DNA, 600 bp, Chicken  19866894232555_1
gattttacgtaacttactggtcttactggcacatcttgtgcatagttttttactgcttgattcccaagttggatattttgcaagtatatttctctctgatagttaattttcttccttgtgaaagaagaatttaaaagagttaagtgattttattttaaagactccttatttttactgtaggagagcttttcagaggtatgtgcttggcagatcagcacatctgttttatcttctttggagggtatgcaacagtttcagaagtacatatgaattactaatacttttcagttatggacacartcttccccagatacatttttatttctttttcgttgattttttaagtcttctagagagaaaggaatagattttcttccacatcttggaatagcagaggatattttttgaattacagttagagaaattcttggctttatcttgatagagaaaggaactggaagtcttgtcttcctgtatcctattttgactatagtctctataatttttaatgagattttcaacactggttaaaattcttaacctgtaatgtatatctctgtatacagagacagttcatctacggaaaacatatgagatttg

SEQ ID NO: 21280 - DNA, 600 bp, Chicken  19866894232555_2
tatatctctgtatacagagacagttcatctacggaaaacatatgagatttgtattaggaatattcttcttgacagtaaaggctgttgtttctttatctatcctaaagattatgaactttcaccaattacgtagcacgttaattcattgaaggagacagaaaagatttgtagctacttgtatcacattgataggctgcatcaagtcatctgtgttggtaaagtgatcaaatccaatcaattcaaatgtgaattttgcctcatttgtctcaaggtaaccaaggaaaatatagtttactggartagaatgattgtctagataaagaatttatcttcctctgtaggtactccaaactagagataatttaattaatgaacttcatgatcactagggatgtcagtgactgacatcagatgtctggagcatggagtgtcttgtgtctgtggattcatttcagcagattttttttttctgtactcctgcagaatatgtccaaaagaatctatttatccaggacactcacagatgttcttattctgtagaagatccatttagtgtgaaatggtgggaagtctctcctgaaaagtgtaagccagtaacct

SEQ ID NO: 21281 - DNA, 599 bp, Chicken  19866894232557_1
  misc_feature (1)..(133): n is any nucleotide
nnnnnnnnnnnnnnnnnnnnnnnnnnnnnnnnnnnnnnnnnnnnnnnnnnnnnnnnnnnnnnnnnnnnnnnnnnnnnnnnnnnnnnnnnnnnnnnnnnnnnnnnnnnnnnnnnnnnnnnnnnnnnnnnnnnnnattaattaaccttagtgaatatatgctaaaagagctattgagcttctggtgctgcagctaatacccatttcatggctgcattacttctaaatgtaacactgtacagctaaaggaagcaccaaaggaaagatgagcccaacagtatacacaaatctggaaagaaacgragttacctttcgttctctgcaattcatgattcactttcatggccagtactgtagttctggatattatttggtcaatccctactttaaaaagcattcaacagcagtaagttttctaggttcatacagaggtgtatgctgccttgacagtacggggcaggatatcatccaaggtgaccactggctcaaacggattaggcctatagacagatcactttcagagttgttcctgaatgttacctggcagacaaaacaacctttagaaataattggaaaaggcacataggggaaaaataataata

SEQ ID NO: 21282 - DNA, 600 bp, Chicken  19866894232565_1
caaacaaaggttgaatagagaatcaattgtcttccttactcctgaaagtgctttataaatctcttgttttggacaatgggatctactattgtaagacagtttcatttatttgcctttctgacagccattccctctttgttcctatgaagttagggcagccagatctagtggatggcaagccagcccatgggggggctcaatgatctttaaggtctcttctaacctcagccattctaaaattctatgactattttatgaaattatccacatgtccttaacttcaggtccagactgctaatygtttttttttcctgagtctttgattccaagtttacacattttttttccttctgtcatttctctgattttaatttctatgccttgacactgagaaaaggagaatggtttgctttatacacgacaacctagaagttcagacacctcagtatgcagctctcaacttccagaagtgaaacaggtgtctttgatagtatctgcccatccaactcatcataaggtggtgccagtactacccagtaagaatacagctggccagcccatatctacctgtttagaaactattcagctgaggactgggag

SEQ ID NO: 21283 - DNA, 600 bp, Chicken  19866894232568_1
agagtcagttgagagttcagcagtttccaagtgcacatgaagaagcagcagcatgatggatatgagggaggagggccgaaggcaagatggcaacagttaaatatgtggtttgagtgagttcagtgttaatttaagagattgtggtcatttcagacagagagagaaagaaaaaggagtggtgagtgctgcagagataattattctaaaagctaattcatgtatttgctagtattggagaatggactctcacacttccaaagaaatatatctgaattgattattttatctgctttttttcastctatgtgtggcagagtataaaagctcagagattcatgatcccatctaaaagatacactgtgctttccctgaggtgctctatcagarcacatctgccacgaggctacagcctggcaggcatgtcttgtctgtcagacacaggtggagaagagcaggttgatcttcctagtgagagagcaagctatagagaacaaaagcaaaacggtctcattttgggctgtcattgtgaaagctgctagggctgagggctgagagccccaacatgctatcaaagaaaacaaatgaattctgagtcaggtt

SEQ ID NO: 21284 - DNA, 600 bp, Chicken  19866894232568_2
tggcaacagttaaatatgtggtttgagtgagttcagtgttaatttaagagattgtggtcatttcagacagagagagaaagaaaaaggagtggtgagtgctgcagagataattattctaaaagctaattcatgtatttgctagtattggagaatggactctcacacttccaaagaaatatatctgaattgattattttatctgctttttttcastctatgtgtggcagagtataaaagctcagagattcatgatcccatctaaaagatacactgtgctttccctgaggtgctctatcagarcacatctgccacgaggctacagcctggcaggcatgtcttgtctgtcagacacaggtggagaagagcaggttgatcttcctagtgagagagcaagctatagagaacaaaagcaaaacggtctcattttgggctgtcattgtgaaagctgctagggctgagggctgagagccccaacatgctatcaaagaaaacaaatgaattctgagtcaggtttggctgcacactaggtgaacatacaggtatgctgctctaattatttgagaatttggcctttcaaagttctatattttatttctgaag

SEQ ID NO: 21285 - DNA, 600 bp, Chicken  19866894232571_1
gaaatggttttaaagaggttgcatggaggcaggcaggcagcctaccatgcagtgcaagatagaaaatgtagaatgtcagatttaaaataagcttccaaaagtctttccatagggggtgcagaacaaggatggatgaactgatgtgtaatggcatagagaatcaggtacaagtgatgctaaaagtgtctgcttgaaagactactaaaatacataaaaatgcacatcatggtgagagcagcgggcaacttaaaaaaaaaaaaaatcagctgaactaaaatttttaagggacatacagctttygagcaccactttgattactgacctgttgaatgctaaatctgcctcaacaatgggtttgtcatctactgaaaacatctaacgaccactgaataatctgatatagcctactaataggtgacctctttaaagaacatgagtcaaaaaccaacataagaaaatagcttggaggttccaatccaacagtgatcctcagctgcccattattcctattgctcaagctcattttacattcctctcacccaaaatactgaaggaaaagaaaaaagtaaagacttgaaaatgcttgacccagagctcact

SEQ ID NO: 21286 - DNA, 600 bp, Chicken  19866894232571_2
tggtcccaagagggctgaagggaagaccgatatagaccgttatcacagctcagagacagaaaggcatcgtgcccctcagacctctttccaaggacagagattaaccctacgacaatgaatgtatggcatgttcagttgctgctatcttgccctaaggcagatgcagaagctaaggagcagtttcccaaaacttcccactccaagccccatccctgtaggcattcagagcaaggctggatgtggctctgggcagcctggtctagtggctggcgaccctgcacatagcaggggggttgcaaygagataatcattacggtccttttcaacccagaccattgtatgatgattctatgaaatgacctccagcaagatcctccaacagactcccatcccattaacaacagcgtacaatggtcattttctcttggactccagtccgcatctttgctgcttttataactacgatttcattcctagctttagcctttctaattagtttgttatacaccattaattttccccgtaaacttctttcagcacctcccttccccagatattttaaagtccagcaattaacttctctcatctcccttatcatac

SEQ ID NO: 21287 - DNA, 600 bp, Chicken  19866894232571_3
ttttcaacccagaccattgtatgatgattctatgaaatgacctccagcaagatcctccaacagactcccatcccattaacaacagcgtacaatggtcattttctcttggactccagtccgcatctttgctgcttttataactacgatttcattcctagctttagcctttctaattagtttgttatacaccattaattttccccgtaaacttctttcagcacctcccttccccagatattttaaagtccagcaattaacttctctcatctcccttatcatactgccatcactatgggctcygttgtgttatttagttcttaaaatcacattcgttagttactgtcagccagtgtcattgtgtgaaagacagactctcattaattaacatttttttacattagcaagaaagaatattgagcatctagggggaaaactagagtacgggaactaaaaatacagctctgtctgttacggtataacaatatattgctcttagcagacagttaattgagaacgtgagctgagaatgaaacaaattatcattgttctgcattttcatggaaatcaaacccgaagggatgagtgccacacacctggtgc

SEQ ID NO: 21288 - DNA, 599 bp, Chicken  19866894232590_1
  misc_feature (1)..(173): n is any nucleotide
nnnnnnnnnnnnnnnnnnnnnnnnnnnnnnnnnnnnnnnnnnnnnnnnnnnnnnnnnnnnnnnnnnnnnnnnnnnnnnnnnnnnnnnnnnnnnnnnnnnnnnnnnnnnnnnnnnnnnnnnnnnnnnnnnnnnnnnnnnnnnnnnnnnnnnnnnnnnnnnnnnnnnnnnnnnnnatcattgaattctatcactaggtaccattaatgtctaaagatcagttttcctcgtacacccaacaagattcatccactgtttgtgggagacaatcattttaaaaacacagcacacacacacacacamaaaacaacttatctgaaaagtcagcctgatccacacttgttgcctgattgcagtagtatcactcacataagtaaatctgggaggatgaatgtgcctaaagaacaaacacaatgatcttaccttgaaaatcatggcaaaagtcccaataagctcgttattaagacaaaagaaatgtatttttcattttcacaaaatgaaccattattcctcaaagcataaagatgacaactgtggcttcagatrttcacagaaagacattcatgtatcatgttttgctcacagggataagcatctactaa

SEQ ID NO: 21289 - DNA, 600 bp, Chicken  19866894232590_2
catccactgtttgtgggagacaatcattttaaaaacacagcacacacacacacacamaaaacaacttatctgaaaagtcagcctgatccacacttgttgcctgattgcagtagtatcactcacataagtaaatctgggaggatgaatgtgcctaaagaacaaacacaatgatcttaccttgaaaatcatggcaaaagtcccaataagctcgttattaagacaaaagaaatgtatttttcattttcacaaaatgaaccattattcctcaaagcataaagatgacaactgtggcttcagatrttcacagaaagacattcatgtatcatgttttgctcacagggataagcatctactaaaatgctttacctagttaaatacagactcgcatttacaacctattttgttggagtacagactaaaaattgcttggttagggttcactgctggcacttcttatgcctccatactttttattgtcctmaactgtaaattttcaagatggagacatttgatgtaatttgaattagttaacatgcttcccttttagttaatgtgaacagcacatctaagttttaggaaaaaaatagtatgtgttctgct

SEQ ID NO: 21290 - DNA, 600 bp, Chicken  19866894232590_3
aaaatcatggcaaaagtcccaataagctcgttattaagacaaaagaaatgtatttttcattttcacaaaatgaaccattattcctcaaagcataaagatgacaactgtggcttcagatrttcacagaaagacattcatgtatcatgttttgctcacagggataagcatctactaaaatgctttacctagttaaatacagactcgcatttacaacctattttgttggagtacagactaaaaattgcttggttagggttcactgctggcacttcttatgcctccatactttttattgtcctmaactgtaaattttcaagatggagacatttgatgtaatttgaattagttaacatgcttcccttttagttaatgtgaacagcacatctaagttttaggaaaaaaatagtatgtgttctgcttcatccacagttagccactattaattcatattatttcaatacattacaacactccaccaacataagtcaaaacccttcggacaaaaaaaaaaaaaaaaccaaaaaaacccccaaaaaaaccagtaatcagtagtatccagctttgcaaatttatacagctcataacaacaagaaaagaaaa

SEQ ID NO: 21291 - DNA, 600 bp, Chicken  19866894232592_1
atgggagaaatttttttttgtatggaggaattcagtgacacacctttgcttcattcacctttccatgtcagacgccattttgtcagactgcccctctgcagctatccgtcacacagcaacaaaatgtaatgagatactgatgggaaggttcagcttctactggcatagcaccaacatccacctctgatgttgtgggccaaaataataaaattggacacatgactttcagagcagtcttcatgtaccttagttttgtaacgcttttgtatagaaactgctttactaactcctgttattggrgaagaactgttgacttgccttagaatacctgagaagcaacagagccagagtgatatatatgcatttcactcccctacgtagtagtttgtagtttgtgttacatactgcctgatttcattttggtctgaaaaacatattagtgtctcaaaacatatttataaaaacttttgcttctgtcatcgggaaagtagatctatccgttgagctaacaagtattttttcttcaaaaacagtgctgaaacttgattcaaaacttcttcttttttccaatatatgatgccagtctataacagctttcta

SEQ ID NO: 21292 - DNA, 600 bp, Chicken  19866894232592_2
cagctttctattaaatgtccctgtttcataagatttatcttggtaacaccaacactccagagaaatgcatagtagattccttcaaatccattactagaacatcccatatcaaatgtttgagcttgtaggtaccgtctgttatttcaatatttgctacataattgttatgattatgactaagaacatatttaatcatcacgctctttgacaaacaccattttaaattgaatgttgcttgcttgctttttttttttttccaaaaaatatgtcagtgtactgcatatggtatctctattagaratactcctgcagcacaatttcttttttgtatgtctccttattttaatttattgcttgatgttactgagaagattgagcatttctgcaaaggctgatgagtgtgctatgactctatatacatgctggaagcacatagattatgcatttctctgtgcatgcaaaaatatgcacttgttcatggaactctgatacttctagaagtcaacatctgttcacagaagtggctattggcatacacttatctgtgaatcaatatgcaaatatatgcaactgcagtgaaagaagttcctcaagatttta

SEQ ID NO: 21293 - DNA, 600 bp, Chicken  19866894232592_3
agaattctgaagtgactgacaggtccattgtcacagcccttatggaagctgactgtctactttttcacctaagaaagcagaatattattcaagtgcaagaaacattataataaacacagcagtttccaattctgataacgttttcatggaatcatagaaccattaaggttggaaaagacctctaagatcatttagtccaactgtccagctaccaccactgttgcccacaaaaccatgtccctaagtaccacatttaccctttgcttaaacatctccagggccaggcaccccaccacttcyctgggcagcctacactttttctgagaagaaattctgcctaatatccaagccgaacctcccttggtgccacttgaggccatcacttctcatgctattgctgttacatgagagtagaggccaactcccacctcaccacaacctcttttcaggagctgtagggagcaatgagtctcccctgtgcctcctcttctccagactgaaccatcccattccctcagccactcctcaaaggacagtgctccggacccctcacagcttcattgcccttttctggacacacactggcatctcaatgtcttt

SEQ ID NO: 21294 - DNA, 600 bp, Chicken  19866894232594_1
cgcacagggcaacatctgtttgtcattgaaagcaggataaatgaaatgatcattgtagcttcctcatacttaaagtgcgttatagaaatatttataaaggaccaggagagtgtatagcaagtgtttccagtgaaatgaaactgtgcatgtactcatccaatctgagttattatcatactgttttaaaacacattaggtgcaagcagcaagcagagcagctaaaaaatttaatggcctattctcttgctgcagggcagcagtaagggatttgtctttccatcctggctattttaacatttraatgctggtggaaaatatgtgtttctgccatgctgctgctttagagtaactgggtagagatttctctgcttgaaaattgttagctgctacaaagagttgatactatgcatgttttaaaagaataaaacatgatcatttttatagtgcaatttccaagcagtgataaacacaccagcaagtatactatcgcaatgtgaatgtaagctgttcatgctaaagactatctggcatcctattcagaaaagctgttgtgactgttgctaggaatataaaagtatacagagatcatcttgagtcatg

SEQ ID NO: 21295 - DNA, 599 bp, Chicken  19866894232595_1
  misc_feature (1)..(112): n is any nucleotide
nnnnnnnnnnnnnnnnnnnnnnnnnnnnnnnnnnnnnnnnnnnnnnnnnnnnnnnnnnnnnnnnnnnnnnnnnnnnnnnnnnnnnnnnnnnnnnnnnnnnnnnnnnnnnnnnaattcacaatgttcttttgccccatctcagatgaagttgtaactccaaattaacatgtaagtctaagcacacagtctttgttatgtcaggttcggtgcaattttgagggattaaatcacatttttaaaactgagtattaattcagtcctatactaggtttgtttcactctgcatttcagagttgaacstctgaataggaaaatctacaggacattggaaaaattttaacaattgtcaaataagaraagtggacatttaggatgaagtagattatgtttgtaatttatttaataaataattatttttcagtataacaactaatattatggaaaataccagtaagagtttatgtccttgttctgctgaacagcagcgtgaaaacttcaatgcgtgtacattctttgtttgattttccacttctacctgtcygctatagatgagttctagcaatggctttgaaatttcaaaacatatgcgtaggttcttc

SEQ ID NO: 21296 - DNA, 599 bp, Chicken  19866894232595_2
  misc_feature (1)..(55): n is any nucleotide
nnnnnnnnnnnnnnnnnnnnnnnnnnnnnnnnnnnnnnnnnnnnnnnnnnnnnnnaattcacaatgttcttttgccccatctcagatgaagttgtaactccaaattaacatgtaagtctaagcacacagtctttgttatgtcaggttcggtgcaattttgagggattaaatcacatttttaaaactgagtattaattcagtcctatactaggtttgtttcactctgcatttcagagttgaacstctgaataggaaaatctacaggacattggaaaaattttaacaattgtcaaataagaraagtggacatttaggatgaagtagattatgtttgtaatttatttaataaataattatttttcagtataacaactaatattatggaaaataccagtaagagtttatgtccttgttctgctgaacagcagcgtgaaaacttcaatgcgtgtacattctttgtttgattttccacttctacctgtcygctatagatgagttctagcaatggctttgaaatttcaaaacatatgcgtaggttcttcaaattcaaacaggaatacttataaaagttggaagaaactccatgttctgggtcattg

SEQ ID NO: 21297 - DNA, 600 bp, Chicken  19866894232595_3
ctgagtattaattcagtcctatactaggtttgtttcactctgcatttcagagttgaacstctgaataggaaaatctacaggacattggaaaaattttaacaattgtcaaataagaraagtggacatttaggatgaagtagattatgtttgtaatttatttaataaataattatttttcagtataacaactaatattatggaaaataccagtaagagtttatgtccttgttctgctgaacagcagcgtgaaaacttcaatgcgtgtacattctttgtttgattttccacttctacctgtcygctatagatgagttctagcaatggctttgaaatttcaaaacatatgcgtaggttcttcaaattcaaacaggaatacttataaaagttggaagaaactccatgttctgggtcattgactcctgttctctaaccacaggcaattacaatttgtaatctcctaaaatttttattctaactctgtcctgaaagtagctatatttcttgcctctgctattgctgtgagagttgttacaagacctcactactttaatgtttaagggcagttttctaattttcattccaaatgtatactgattttta

SEQ ID NO: 21298 - DNA, 600 bp, Chicken  19866894232599_1
aaataaagcaatcacgtttcagtctgtaaaccacaaagcactgtctctagcatcttttcccttgtcctttcagcatctcttgtcagaggattcaatcctgcaaattgtgaggcagaactatgcactcaaggcatccagcactccggaggctccttggcacctctggggatcaggcctagagaggatctaggtctcactcatacacttcactcagcatactgaaaccagagctgcacataaataatttgtgattccttcagggtaaatagaatttcagcctctcttgggtcacagggcaaygtctcctccacgggcaaagaaagcaccttgggagagaagagatgaagttctgacacacaaatcataaggccttggtatgcagaccagctcagaaaacacgtcttctgaatggaagcaaacaaaaaatccatgaggtctakctattgggactctatattttcatttaaattctggacttctgtttaaaaacagatcctttattgtggtcattaccttcctcatacccacatcctgaatgagggaagaaatacggcagtaatgtttatattactgcatgctccattgattcacatttggcgt

SEQ ID NO: 21299 - DNA, 600 bp, Chicken  19866894232599_2
ctccggaggctccttggcacctctggggatcaggcctagagaggatctaggtctcactcatacacttcactcagcatactgaaaccagagctgcacataaataatttgtgattccttcagggtaaatagaatttcagcctctcttgggtcacagggcaaygtctcctccacgggcaaagaaagcaccttgggagagaagagatgaagttctgacacacaaatcataaggccttggtatgcagaccagctcagaaaacacgtcttctgaatggaagcaaacaaaaaatccatgaggtctakctattgggactctatattttcatttaaattctggacttctgtttaaaaacagatcctttattgtggtcattaccttcctcatacccacatcctgaatgagggaagaaatacggcagtaatgtttatattactgcatgctccattgattcacatttggcgttgctggcatctgagctgccctggctctcatgataggcatcccttagtcaatgctcaagctacgctttgttctcttatattcaggacacagcagggccctgtgaatgcgttgctactaagaacacagaagtacactgccaa

SEQ ID NO: 21300 - DNA, 599 bp, Chicken  19866894232600_1
  misc_feature (1)..(133): n is any nucleotide
nnnnnnnnnnnnnnnnnnnnnnnnnnnnnnnnnnnnnnnnnnnnnnnnnnnnnnnnnnnnnnnnnnnnnnnnnnnnnnnnnnnnnnnnnnnnnnnnnnnnnnnnnnnnnnnnnnnnnnnnnnnnnnnnnnnnnctcacacttcagcttctcatgtcacacatgacatcacagtgatgtcaaaaagagatggcaaaggagaagtgagacagcacagagcgagacggttgtttgaaaaatcagtactcaatgccaactgctcagaacaatgacaagataaagaagccttgaagggccagacwgcagacaaataaatctacagaagaagacaggacatctgtgttttgaagccctattatttccttggatgatctacgttgcgcagcacttagtacttaggttttagtagtctgtgctttccaaatattgcctgaatctgagagcctcagatacaagcagtctgttgcctcatacagcaggcacagagactgggtgtctcaacaagctgcacagagaagaagggagcagaaggttgctctcagtgggtctcatttcagcatgcatttctgacaaagcttgagctgtttttaggaatgctctt

SEQ ID NO: 21301 - DNA, 599 bp, Chicken  19866894232609_1
  misc_feature (1)..(187): n is any nucleotide
nnnnnnnnnnnnnnnnnnnnnnnnnnnnnnnnnnnnnnnnnnnnnnnnnnnnnnnnnnnnnnnnnnnnnnnnnnnnnnnnnnnnnnnnnnnnnnnnnnnnnnnnnnnnnnnnnnnnnnnnnnnnnnnnnnnnnnnnnnnnnnnnnnnnnnnnnnnnnnnnnnnnnnnnnnnnnnnnnnnnnnnnnnnttcagactcctgtcatgtcaaaacttgttagactgcaaaattagcactgcggttgtctgattgcatccagtcttagcttatgccagttgtcaaaaattatactgatttcattrtgcaaacagagtttatcattttaatgaagtcaaatgctctcttgctgcctctatgaagaaaaatactaaatgttaaacactgaatttggtggaaataagtaatgaataaatcatattaagaagcactcatttatgtgaatcttaacatttttaaccatttagtggtttttttttaattgtagcactgattacaatagtagaacagaaataaaaatgagaaaacacaagtatgtggcaatacaatatcaatgtaaatatatggaagctgtgatacaggtgtacataagcggaaactgcat

SEQ ID NO: 21302 - DNA, 600 bp, Chicken  19866894232609_2
tagaacagaaataaaaatgagaaaacacaagtatgtggcaatacaatatcaatgtaaatatatggaagctgtgatacaggtgtacataagcggaaactgcatgagagtaacaagtacaaaatgaaactatcagtatttactatcagatatgacacactcaaaatacagatgatcaaaatggatctcattgttcaagagaatatgaaagagaaaaaacatcaaaggtgtaaaaaatcattagttatcaaacctcaccggattttgctttttatttttgggttggattgtgttgggttagcyagtgtgggcacatatgccaaaagaaaccaaagaaacaagagccaagatgcttttgcaaagcctctcgtgaggcaagatgatgcagtttaagaaaatgtctgacacaggactgctgctgcactatttccctagggacatggcatgggtccgatagccattcccaagaaacggcagcaagtagttataatcatgttgcagccactgggagaaaggaatcacaaaacagagtgccaggattgattttgctggaaactgaactactgagtgttttgaaacataggcagcagcattcagctctca

SEQ ID NO: 21303 - DNA, 600 bp, Chicken  19866894232611_1
aaataagcatgtacaatatagaacgtagctaagcatcgcatgtatccaaagtccattgaagtctgttaccctctgatcacttttcagctgcatttcatattttgtgaggttgtcagagatactgttctgagcctacttatataacttgcagaagttttgtaactgattcctctttgccaaggaagattaacctcctggagagcaagcaatggtcaattgatttccagagcaatccagttgccacttaagacagaaatgatcagatcgcttgttatcaaagtcccaaggtcaagtcatcarataggactgattgcattttctaatggcttttctatgctcattaaagtgcattcggatattcaaaatcacctctgatcatgacattaaaaacatgctccaatggctcctgacaagcaggaatgtattctctaatatttagccacataaacaatagataaccacttgtaattgagttcaaattgatttcaggtggcttcagagaaaagcaatttctacaacagattaaccttttaattactgtttattaaggatattaccaggtgctgaaatcctactatagcagaaaattacagttcattg

SEQ ID NO: 21304 - DNA, 600 bp, Chicken  19866894232615_1
gcttggaccatatccacatccattcccctgagccatcacttttcttgagtcttttcatgttaattgaaaattaagagtgaaaggctagatggagccacgcgagcatgcttgttatcaaaagtttgtgcgtggtgaaggaaggctttaatgtgggttcaggattctagcaaacatttggcagccgatgtttctgaaggggggaaaaatgctctttatggcaaagttaagaagcaagtataaaagcgtgattcattataagcaattggtgtgggtttctggggcttatgtttctgtgacagytctcatgagcatagagaaaaatgagataggatgttttgcccaagaaaaacagcagtgtgagttggtgcttgccccaccagagctctttcaggagctaccagggctgatggtggctccggtgtggctctgcttctgcaatttgatgctgctaacgcaacaggtttgctcctgtccaaagggagttgttattactgttattactctgttcctcgaggcagttgctgtgggaaagggcaggctcagcattgccgtcttgcaggcatgactcgtggtgctcagcacattcctttcctcgccccc

SEQ ID NO: 21305 - DNA, 488 bp, Chicken  19866894232615_2
aaaatgagataggatgttttgcccaagaaaaacagcagtgtgagttggtgcttgccccaccagagctctttcaggagctaccagggctgatggtggctccggtgtggctctgcttctgcaatttgatgctgctaacgcaacaggtttgctcctgtccaaagggagttgttattactgttattactctgttcctcgaggcagttgctgtgggaaagggcaggctcagcattgccgtcttgcaggcatgactcgtggtgctcagcacattcctttcctcgcccccagctgttgggatgcccrtggctctggcactgaggtgggatgtggggtctgtctccctgtggctttcctggggctgcactgctggatgcaggagctgctgttcctgctgggcctcacagggagccaggctgcaccgccaagttcccatatgggaggaagatggaaagtggggctgatcacccctgtagggtgctgcactgttcttg

SEQ ID NO: 21306 - DNA, 600 bp, Chicken  19866894232617_1
acccacgtgccaccacggagctgggagctgctgggactcaccgggacgaagactcagggcgaccttctgcggggtgatctgtgtgacatccaggtgggtctgcccagagcccttgctgctcaaggggacgttcttcaccacgctgctgctgctgcgcgggttctcgatggctccggcgcaaccgttggcaatgaggttcttcaggaagtcgcaccgcgatgggacggactttgtgctgccgaactcctggcaggtgaagaacagacagattggaaggggtaggagaagaccagaaggtcmatttttccatgcgtgcatgagcctggagaagcttgacaaaaggaagagaggacacagaactgtcaccaagagaagctagagggtcaagtgcaagctggagcatgaggctgggggctccagggacatacatcccctcttgcctgggtgagaccacacattccagcaccagcagcatggtacccctacctcaaaccattgcaaagagggccctggactatcacacaggaaaaatgccattgcagcaagagttctgcgggctggagaacagctggagtgctgtgacgtgagcaggctgtctag

SEQ ID NO: 21307 - DNA, 600 bp, Chicken  19866894232621_1
tacaaagatcagtgctcttcagcaactggtatttactttgtgccgcgagcaatacaaccactgctggttctgcatgagctaacaggagcagacggggtgtgctgatgatatctcaagccctctggatctgttttgtcaaaggaccagcacgccctgccttactacaagaggttgttggcattctgtaagcgcgcctggaggtgcagttaggcagaaatcccagcatcaagcgagaaataaaggccattcctctatgtttacttactgatcagcaatcttcttggccttctcaccaaaggraaacacgggcttgtagtatttcaaccagcgtttacatccctgtaacaaatccacacagattagcacagcacttggactggagaatacagccagatgaaatggctacaagtgtttgaggccattacgggtaaaagctacatgaaagcaataaagagcactgggaaagcaaagaggccatttagagaaaatacaaatctgatgctgtcattcagagcacgggatggtcaatacctcagggagctgctacatgtagctgctgagctttgaggctcttgcacagtaaactccctttagatcttc

SEQ ID NO: 21308 - DNA, 600 bp, Chicken  19866894232627_1
actgaagtggtgtcttcaccacactgaggcgtacagtcagaagcatttggacatccctgcgctgaacgatgggcagctttgaggctgtggtgaaggtcccatccaggctggatggggccctgggcagcctgagctggtggggggcagcgtggcagcaggggttggggcggcatgggcttggaggtcctctcaaacccaaaccattctgtaattctgtgattctacgacaatctgatgcaaaatccctctattctccagcagccccaatagtagggcaatgcttctgctgccttgtttgcrgaatgacatgaagtgggtgggcagcaatggggcgcctatgggggaaccagattagtatgagctttgctgagatgtcccatacacaaacacatatgcaagcacagtacagacaaaagaaaagtgtagtctttggctaaatcttctagtttataggaaatggtgtgaacacaaaaacagaaccaaaaatgttgccggcctctcagatcatttacttagaaaaacaagaccagtatgcagaacatgttgctttttaagaaacttaatcttcacagctcataacaataccaaatttttggtaac

SEQ ID NO: 21309 - DNA, 600 bp, Chicken  19866894232632_1
ttttcagttctggaactccagaactttccttggaagaaaatttaggttcagaaaaagaaaacattttatacatcctgtttggttccatgacttgtttgcatgagagaagaaaggctaattcaaaagttatgaccttggattactttgtttcaacagattagaagtacatcactttgcctataagctaacttttcccatttagaatttccttctatttatttcctaagcattctaaagcttgaaattgaaaagttgtctctgtacagaaaaagaaaacttgacttttcagttaaaaaaaargaaaaaaagagaatttcatccaaattgtcctcttatggttttaaggtttcagaatttttacaatatatttattatgcatgacttccactattcacttgatcattgaacatcaccagattaactctgcagatcaacataataattaaaagctaccactggtgagataaacagcgttggcaaaggaaaaaatctgaaatgccccaaatgttgtactccagatgggacctcacaagggcagagtgacaatcacctccctctccctgctgcttccccctgttttgatgccacccaggatactgc

SEQ ID NO: 21310 - DNA, 599 bp, Chicken  19866894232637_1
  misc_feature (1)..(122): n is any nucleotide
nnnnnnnnnnnnnnnnnnnnnnnnnnnnnnnnnnnnnnnnnnnnnnnnnnnnnnnnnnnnnnnnnnnnnnnnnnnnnnnnnnnnnnnnnnnnnnnnnnnnnnnnnnnnnnnnnnnnnnnnnncttttcttatgaatccagtaacagccttccccagtgggcatatttaatttcaccaaatccctcatcagctgtagcttattcctgtccacacacaaagcctaacaaatttcttattttgtgttctcatttgtgtattgaagccatgtctctcctttgacaaaagaagtaaaagcagaartaggatatatcagcagatatcctgatttcttcatgaaattgactccaaattgttaagaatacatatttggttgcaatacctccaataactataaaaaatgttaattagatgctttcttttgcatttcaaattgtatgcattggatcatgctgtggtactagttactattgggcttcagtaggaaagtagttggaaggtagttaatattgactgtttttctttcagtaagatctcatttcacagtttctgagcatgaaatcaagccattacaaaaaagtaaagatctgatgataaaaaaa

SEQ ID NO: 21311 - DNA, 593 bp, Chicken  19866894232643_1
tctaaagggctccatcagtgggtctcagggcgctcagcttacagcactgagtgaaaccagagctggacttctgcaagagaaccccagcggagtgcttgcagggtaggaaacaggcatctgagaagcaggaaataaaacagagcaagaaaaaaaaggagcatgataaaatccattctatgtcttttcatggagaaattgtcataaaagcctttacaggccttttactcactctgaagcttgtcactgggatttcccctggacattcaatatgcagtactactcttatatacagacaaatayttattttataaaaatccctttaaaaaaagatatttggaaatgatgcrtacattgatgagcaatctgggraatctcaatgcacagaaaactactttttctatgcaaaggacagaaaagaaaaacatgcaagatttgtaagcatataaggaaccagtcagtaycaaagaaaggaaatgacatcacagactccagtattacaaatcagagtaacacctagcaaactccaccaagccatatagctgctctcacagcagcttcctactccacattgcagctgtgtagcaatgagtcaa

SEQ ID NO: 21312 - DNA, 546 bp, Chicken  19866894232643_2
tgagtgaaaccagagctggacttctgcaagagaaccccagcggagtgcttgcagggtaggaaacaggcatctgagaagcaggaaataaaacagagcaagaaaaaaaaggagcatgataaaatccattctatgtcttttcatggagaaattgtcataaaagcctttacaggccttttactcactctgaagcttgtcactgggatttcccctggacattcaatatgcagtactactcttatatacagacaaatayttattttataaaaatccctttaaaaaaagatatttggaaatgatgcrtacattgatgagcaatctgggraatctcaatgcacagaaaactactttttctatgcaaaggacagaaaagaaaaacatgcaagatttgtaagcatataaggaaccagtcagtaycaaagaaaggaaatgacatcacagactccagtattacaaatcagagtaacacctagcaaactccaccaagccatatagctgctctcacagcagcttcctactccacattgcagctgtgtagcaatgagtcaa

SEQ ID NO: 21313 - DNA, 524 bp, Chicken  19866894232643_3
tctgcaagagaaccccagcggagtgcttgcagggtaggaaacaggcatctgagaagcaggaaataaaacagagcaagaaaaaaaaggagcatgataaaatccattctatgtcttttcatggagaaattgtcataaaagcctttacaggccttttactcactctgaagcttgtcactgggatttcccctggacattcaatatgcagtactactcttatatacagacaaatayttattttataaaaatccctttaaaaaaagatatttggaaatgatgcrtacattgatgagcaatctgggraatctcaatgcacagaaaactactttttctatgcaaaggacagaaaagaaaaacatgcaagatttgtaagcatataaggaaccagtcagtaycaaagaaaggaaatgacatcacagactccagtattacaaatcagagtaacacctagcaaactccaccaagccatatagctgctctcacagcagcttcctactccacattgcagctgtgtagcaatgagtcaa

SEQ ID NO: 21314 - DNA, 432 bp, Chicken  19866894232643_4
gataaaatccattctatgtcttttcatggagaaattgtcataaaagcctttacaggccttttactcactctgaagcttgtcactgggatttcccctggacattcaatatgcagtactactcttatatacagacaaatayttattttataaaaatccctttaaaaaaagatatttggaaatgatgcrtacattgatgagcaatctgggraatctcaatgcacagaaaactactttttctatgcaaaggacagaaaagaaaaacatgcaagatttgtaagcatataaggaaccagtcagtaycaaagaaaggaaatgacatcacagactccagtattacaaatcagagtaacacctagcaaactccaccaagccatatagctgctctcacagcagcttcctactccacattgcagctgtgtagcaatgagtcaa

SEQ ID NO: 21315 - DNA, 599 bp, Chicken  19866894232644_1
  misc_feature (1)..(28): n is any nucleotide
nnnnnnnnnnnnnnnnnnnnnnnnnnnnattcaaaatcaatgtcatgcaggtaacaattcatttttttccagcagatatgttatagtaaatattaatggcatctgttcagtcaatctcattcttactttatgatttacattcttactttagaaaactataccttttctaagcagagcctgtcttcgttgaaatatttccacatgcttggattcaaatccaaaaagaactgcaatcacttcattcctaatccacctcagcaggtattggtttctctgataccatagaaaatggattcccawttttttctaaaggaaccaacaggtatttaacttctgaaaaccagacctgtacaacagtgattcatcaaagatcaataggaagtctagaaccaggcaggaaaatcctgtgttttgtagtgtagtgctgccagcactcccaacactgtggtagcttgtctttcttctgctctcagaaacagggtattttagtgccattattccagcagcattaccaacatgaaaacttgactgcaaattgcccaacacctgttgtaaattaatgatgataaaggtttcatagagtggcagagaatgtttat

SEQ ID NO: 21316 - DNA, 600 bp, Chicken  19866894232646_1
gcacaagcagctcggcggtacccaagctgagctggggacccacggctcttctccaccaagagaagagttccatctgccccacacacaaacccccacatcccctggccttgcacggccggaaagcagtagcccagcagcccagcagcacagcagcacggcagcccttgggatagcagcacaaagcgcagcggcggagcggggcgaagcgagcgtgccgtacttacacagcggccgggcgcagggctgggcgatgccgcgctggcgccgagctgttgctcatctgtgtacaaacagagcccrcatggcccagcgatggagctgcatgggaggggacggtgggacgggacggggccgcctggggacggttcccactgggcgcgggaaggacgcggggaggtcagcgcgcgcggttgggttggagccaaggagtgctggccgggtgcgaagggaatgggggaaaaaaataaaacccacaacaaaacaccaccggaaatcgcagcagccaaactctgtcggatcgcgccccgatcggcttcagccaggctgggaggaagcaggaaaaatgcgagctgccaggcttctccctgcgcgcagctcccg

SEQ ID NO: 21317 - DNA, 600 bp, Chicken  19866894232646_2
tgtctccaaggagactggaaaagtgcagagcgcagtggagggagggacgtgccgctgcccagaggtgtccttgcatcgttccccgtgggctgagctggcaccctgcgcagtccctgctccgcatgcagctctgcggaactcacggcgttcttatagagcggctgagagaggactgggagtcactggagagctctgtgtggccattactgcaaagagccgaaggaatggcatgcggacatacccacagccattaccctcagcactgagtccagacctaatgcaccgttcacacagcacggrgagaattaatgttcatctcgacccgttcagcccagccaacgtggacagygtgaaagcacttcccagagccgggtgagccatccctcctctccaaacaacacgtttgggtttgctttgggagcgcagggtggatgcagaggtggctgggctggttgtgcasacctccatccagctgtggagctcccaggggatgctgctgctgaccccacagcccggtgccactgttcccaaagcgctgytggcactcagtgtgagttctgaaccatttcctgcccttctgcctcttttctcctccacacc

SEQ ID NO: 21318 - DNA, 600 bp, Chicken  19866894232646_3
tgccgctgcccagaggtgtccttgcatcgttccccgtgggctgagctggcaccctgcgcagtccctgctccgcatgcagctctgcggaactcacggcgttcttatagagcggctgagagaggactgggagtcactggagagctctgtgtggccattactgcaaagagccgaaggaatggcatgcggacatacccacagccattaccctcagcactgagtccagacctaatgcaccgttcacacagcacggrgagaattaatgttcatctcgacccgttcagcccagccaacgtggacagygtgaaagcacttcccagagccgggtgagccatccctcctctccaaacaacacgtttgggtttgctttgggagcgcagggtggatgcagaggtggctgggctggttgtgcasacctccatccagctgtggagctcccaggggatgctgctgctgaccccacagcccggtgccactgttcccaaagcgctgytggcactcagtgtgagttctgaaccatttcctgcccttctgcctcttttctcctccacaccatctcctggttgttgctccaaggtgtccccagccstgtgcccatgtcgc

SEQ ID NO: 21319 - DNA, 600 bp, Chicken  19866894232646_4
gctgagagaggactgggagtcactggagagctctgtgtggccattactgcaaagagccgaaggaatggcatgcggacatacccacagccattaccctcagcactgagtccagacctaatgcaccgttcacacagcacggrgagaattaatgttcatctcgacccgttcagcccagccaacgtggacagygtgaaagcacttcccagagccgggtgagccatccctcctctccaaacaacacgtttgggtttgctttgggagcgcagggtggatgcagaggtggctgggctggttgtgcasacctccatccagctgtggagctcccaggggatgctgctgctgaccccacagcccggtgccactgttcccaaagcgctgytggcactcagtgtgagttctgaaccatttcctgcccttctgcctcttttctcctccacaccatctcctggttgttgctccaaggtgtccccagccstgtgcccatgtcgccttttgggactgctcatctgggcaatgccctctctgaggtgacaccgttgtgccctgcaaggacagggatgcagacatcatctcctactcacccctctcctgcacrgcagc

SEQ ID NO: 21320 - DNA, 600 bp, Chicken  19866894232646_5
acccacagccattaccctcagcactgagtccagacctaatgcaccgttcacacagcacggrgagaattaatgttcatctcgacccgttcagcccagccaacgtggacagygtgaaagcacttcccagagccgggtgagccatccctcctctccaaacaacacgtttgggtttgctttgggagcgcagggtggatgcagaggtggctgggctggttgtgcasacctccatccagctgtggagctcccaggggatgctgctgctgaccccacagcccggtgccactgttcccaaagcgctgytggcactcagtgtgagttctgaaccatttcctgcccttctgcctcttttctcctccacaccatctcctggttgttgctccaaggtgtccccagccstgtgcccatgtcgccttttgggactgctcatctgggcaatgccctctctgaggtgacaccgttgtgccctgcaaggacagggatgcagacatcatctcctactcacccctctcctgcacrgcagctgccgcctgccagcactgtaaccccacagctgcccttatggtgccggccctgcgcccacagcacagcaaaacctcccag

SEQ ID NO: 21321 - DNA, 600 bp, Chicken  19866894232646_6
ccaacgtggacagygtgaaagcacttcccagagccgggtgagccatccctcctctccaaacaacacgtttgggtttgctttgggagcgcagggtggatgcagaggtggctgggctggttgtgcasacctccatccagctgtggagctcccaggggatgctgctgctgaccccacagcccggtgccactgttcccaaagcgctgytggcactcagtgtgagttctgaaccatttcctgcccttctgcctcttttctcctccacaccatctcctggttgttgctccaaggtgtccccagccstgtgcccatgtcgccttttgggactgctcatctgggcaatgccctctctgaggtgacaccgttgtgccctgcaaggacagggatgcagacatcatctcctactcacccctctcctgcacrgcagctgccgcctgccagcactgtaaccccacagctgcccttatggtgccggccctgcgcccacagcacagcaaaacctcccagcagcaactggtgtggtcagtaggaaaccagtggaaactcccccagctgtaagaggtgtttaacgagctcggggcacaaccctcgtgacactgtttg

SEQ ID NO: 21322 - DNA, 600 bp, Chicken  19866894232646_7
tgcasacctccatccagctgtggagctcccaggggatgctgctgctgaccccacagcccggtgccactgttcccaaagcgctgytggcactcagtgtgagttctgaaccatttcctgcccttctgcctcttttctcctccacaccatctcctggttgttgctccaaggtgtccccagccstgtgcccatgtcgccttttgggactgctcatctgggcaatgccctctctgaggtgacaccgttgtgccctgcaaggacagggatgcagacatcatctcctactcacccctctcctgcacrgcagctgccgcctgccagcactgtaaccccacagctgcccttatggtgccggccctgcgcccacagcacagcaaaacctcccagcagcaactggtgtggtcagtaggaaaccagtggaaactcccccagctgtaagaggtgtttaacgagctcggggcacaaccctcgtgacactgtttgcagctaaataggaatggagctgacatgcaggcacgcacacaggacagcacgaggatatggaaagagctgcaagcacgggttggccgtgggctgctgctgcctcgtatccctggagccaaa

SEQ ID NO: 21323 - DNA, 600 bp, Chicken  19866894232647_1
ccactgtttcaactctttacatgaattccacagcctgaccgtgggctctctcatgattccaacgtagatgcaaagactgatcacaggaggggcctaaaatctcagggcaaagccaccgcaggaggagtggagccacgcgctgctcccaatccttgcagacctactgcacatggaggtgccaaggcagaagtggttaatatttaatgcagccccaagcctgcatgtttaattacgcacatttaatttatcgacgtggtctgccttgagttgcagccctgcaaaacctggatcctgcccacrgatgggggcagaacgatggggggaaaaggtgccagcctaaaaacccatcctatgggccagtggcactctgcggtgggaagcgcttcctcccatcctcctcatcctcgcwggcttctggccgcagcgcccagcacagagggctcagagcattacagagcccagtgctctgcatccacagttaatgctctgagcagctcagcccctgggcaggggggtggcagctccccaccagctgcctctgctgacagcgcctggtttgaaggggagaacatgaagatccagcagcacagcacggggtta

SEQ ID NO: 21324 - DNA, 600 bp, Chicken  19866894232647_2
aagccaccgcaggaggagtggagccacgcgctgctcccaatccttgcagacctactgcacatggaggtgccaaggcagaagtggttaatatttaatgcagccccaagcctgcatgtttaattacgcacatttaatttatcgacgtggtctgccttgagttgcagccctgcaaaacctggatcctgcccacrgatgggggcagaacgatggggggaaaaggtgccagcctaaaaacccatcctatgggccagtggcactctgcggtgggaagcgcttcctcccatcctcctcatcctcgcwggcttctggccgcagcgcccagcacagagggctcagagcattacagagcccagtgctctgcatccacagttaatgctctgagcagctcagcccctgggcaggggggtggcagctccccaccagctgcctctgctgacagcgcctggtttgaaggggagaacatgaagatccagcagcacagcacggggttaatgggatggcaccaatccgcgctggtactgaggataaagtggggatttccataagagggcctctttatgatcaaattaatgggttagcattccccacccaagcaatgcc

SEQ ID NO: 21325 - DNA, 600 bp, Chicken  19866894232651_1
gggctctcgtgcatttcctcgatggggtgacagagcactgctaaactgtgatggtttaggagtgcctcaaggccatggcactgcttcagcccagaatggcagtgggtgagcagggggacacgctcagagccacggccccactgatgggggacggccaggaggcagtgatgggtccacaggatgggggctgcgtgcaggacaggggctgcatgctggatgctttcccactcctgcactcctatgtggttataggtgccatactgggtgccacgtgctgctcaccctcagctaaaccacctkagagccattcagcaaagagcttcaaggccatgcaacaagaggagctgttaaaacaccccctgccctgacgctgagtgtcccaggatggcttcgagcctttgcacttcaccatggcaaacttgagccgtgtgtgacacactgcagtgcacagcttggcacctgaatggctccttcccatggccatgagcagagctcagacgttgctgttcagcattcaggaagcgcagcgcatccccgggagccatcagtcaccctcagcagatggtaaacgtatctcctttcaccacaaactgagcagca

SEQ ID NO: 21326 - DNA, 600 bp, Chicken  19866894232651_2
gagctgttaaaacaccccctgccctgacgctgagtgtcccaggatggcttcgagcctttgcacttcaccatggcaaacttgagccgtgtgtgacacactgcagtgcacagcttggcacctgaatggctccttcccatggccatgagcagagctcagacgttgctgttcagcattcaggaagcgcagcgcatccccgggagccatcagtcaccctcagcagatggtaaacgtatctcctttcaccacaaactgagcagcaaacattcagatccatcaccaagacaacatatttaagtcctyctccattttccaacgcatacatttctaaccaactgcaaagaaaggggaacctctgatttcccccatgcccacaggaggggaccccagctttgcttttggggagccctggtgtcagatcccacatggggactgctggagcaaaasctctgtcacctcattttgaatcaaaacccttccgaattccccataaggagacacctcgaaggccatcaggatgcgggttgatggctgggcgatgcgttggggttgggcttggtgacctcagtgctctcttccagccctaatgagctgcagccacag

SEQ ID NO: 21327 - DNA, 600 bp, Chicken  19866894232651_3
agcagagctcagacgttgctgttcagcattcaggaagcgcagcgcatccccgggagccatcagtcaccctcagcagatggtaaacgtatctcctttcaccacaaactgagcagcaaacattcagatccatcaccaagacaacatatttaagtcctyctccattttccaacgcatacatttctaaccaactgcaaagaaaggggaacctctgatttcccccatgcccacaggaggggaccccagctttgcttttggggagccctggtgtcagatcccacatggggactgctggagcaaaasctctgtcacctcattttgaatcaaaacccttccgaattccccataaggagacacctcgaaggccatcaggatgcgggttgatggctgggcgatgcgttggggttgggcttggtgacctcagtgctctcttccagccctaatgagctgcagccacagggaggggggaaaggtgctgacccaaataacacgagcactcaacgcttaccttaagataaaaaaaaaaaaaggaatttattttacaatcttataaagcagctttacatgaagcacaaacatggatccatttactttgtatataaa

SEQ ID NO: 21328 - DNA, 600 bp, Chicken  19866894232657_1
caagaaaagcaaccaagtcttgcattacggtgtacacaagcacagtttgcaaggcaaagcaaaagtctccagcacttccctaacgtgggtgagtgcaatgcttcgttcccagcccacctggtgggtcatcctgatcgctcctctgcaggcacttacgcaaataacaacataggagaatgaaataaacgaaggacttagtgtattttaatctgtgtacaaaaactttaactgctgggaaatctgaaggtgcaaatccaccctgacaaaccagctagatgcacaccgcaaggaaatgctccrggggtcccagcttgagattagctgctcaggcatctgaaacatgctgagacttccattccctgagccctacttgggtgctttccatgctctcatgtgcgcttgggaaaatgtacacgggacaaattgtgctggctttcccaaattcctcttcagtttttatgtacccaaatcgccatcaaaactacatccctgctgagtacttgcctgcgcaagaaaaaggaatgaaaggctcccctatgtgctgagataaaccgagaaagggaaatcattcggcttcattcagtcaaatgctcattaatt

SEQ ID NO: 21329 - DNA, 599 bp, Chicken  19866894232662_1
  misc_feature (1)..(115): n is any nucleotide
nnnnnnnnnnnnnnnnnnnnnnnnnnnnnnnnnnnnnnnnnnnnnnnnnnnnnnnnnnnnnnnnnnnnnnnnnnnnnnnnnnnnnnnnnnnnnnnnnnnnnnnnnnnnnnnnnnnatgcttgcactacttctctagggaagtctgacctgtatctttgaaagggggacactttggaaagctgccctttgagacaatcgaggtattgagggggcaaatattctaaccattgattttgtgtttctgttaagagtttgcccttcactgtagtcaaaccattcatttttctgctctcctacatwagataatgaagggctacgacaaggggtggggagagaaggagcactctaacagagatgctgaatggcagtgaaaatactgcttgtgcaaagggatgttaatggaggcctgctaagcagtcctaagcagggaaggagcaggcagtgtggttgcagctggcaggtggagctgttaaattagcagttgaagtaactgaaatacatgtatttgttcctactgaggttatgatcaagatagaatgctgttactagtttaactgtacaatcagactaagttgaaattaaaagccaaaatgccttgt

SEQ ID NO: 21330 - DNA, 600 bp, Chicken  19866894232665_1
ttgaacgtctatgatatagttgtttgctggttttttttttttttcctctgatgataaatattaagccttatagaaagagttacgaaggtctgttcctaaaatggtaaatggtgtgctgggaattacagcacttttctgtaaggccaaaaaagcattgattttatattgctcttgtaacaagaatgatatctttgcatgttgcaatacaaagcaaggcaactaaaccagaatcatgtaagatgtaagtaaaataatacaatacttgtcaatgataacgtatttcctttcctcagtccaaaytggaaatcttaatttaccacagtagtgactttctatagcctccaaaggattttaagtgggaagtagcaataaaggacatagccagctgtgacaaaagacataaaagtcaacttttgcaaataraartttacatttacttgaaaattctgctgagtgtcatggcttagtcttgctctctttaaaacacacmgtgtgtatagggatatatataatgtcatgtaatgaaaaatacccaactaacattaaaccagttgcttgtataccaccagcaatctaactatggagacacttagcatcaag

SEQ ID NO: 21331 - DNA, 600 bp, Chicken  19866894232665_2
tacagcacttttctgtaaggccaaaaaagcattgattttatattgctcttgtaacaagaatgatatctttgcatgttgcaatacaaagcaaggcaactaaaccagaatcatgtaagatgtaagtaaaataatacaatacttgtcaatgataacgtatttcctttcctcagtccaaaytggaaatcttaatttaccacagtagtgactttctatagcctccaaaggattttaagtgggaagtagcaataaaggacatagccagctgtgacaaaagacataaaagtcaacttttgcaaataraartttacatttacttgaaaattctgctgagtgtcatggcttagtcttgctctctttaaaacacacmgtgtgtatagggatatatataatgtcatgtaatgaaaaatacccaactaacattaaaccagttgcttgtataccaccagcaatctaactatggagacacttagcatcaagtacttaattagctgaccttgagcttcatgctgctccaggcagaatactatgggtgcactatgggtgcactacctacctcgtttaaagatagttcagaaaactgcattgttgcaggagggacga

SEQ ID NO: 21332 - DNA, 600 bp, Chicken  19866894232665_3
agcacttttctgtaaggccaaaaaagcattgattttatattgctcttgtaacaagaatgatatctttgcatgttgcaatacaaagcaaggcaactaaaccagaatcatgtaagatgtaagtaaaataatacaatacttgtcaatgataacgtatttcctttcctcagtccaaaytggaaatcttaatttaccacagtagtgactttctatagcctccaaaggattttaagtgggaagtagcaataaaggacatagccagctgtgacaaaagacataaaagtcaacttttgcaaataraartttacatttacttgaaaattctgctgagtgtcatggcttagtcttgctctctttaaaacacacmgtgtgtatagggatatatataatgtcatgtaatgaaaaatacccaactaacattaaaccagttgcttgtataccaccagcaatctaactatggagacacttagcatcaagtacttaattagctgaccttgagcttcatgctgctccaggcagaatactatgggtgcactatgggtgcactacctacctcgtttaaagatagttcagaaaactgcattgttgcaggagggacgattt

SEQ ID NO: 21333 - DNA, 600 bp, Chicken  19866894232665_4
tttgcatgttgcaatacaaagcaaggcaactaaaccagaatcatgtaagatgtaagtaaaataatacaatacttgtcaatgataacgtatttcctttcctcagtccaaaytggaaatcttaatttaccacagtagtgactttctatagcctccaaaggattttaagtgggaagtagcaataaaggacatagccagctgtgacaaaagacataaaagtcaacttttgcaaataraartttacatttacttgaaaattctgctgagtgtcatggcttagtcttgctctctttaaaacacacmgtgtgtatagggatatatataatgtcatgtaatgaaaaatacccaactaacattaaaccagttgcttgtataccaccagcaatctaactatggagacacttagcatcaagtacttaattagctgaccttgagcttcatgctgctccaggcagaatactatgggtgcactatgggtgcactacctacctcgtttaaagatagttcagaaaactgcattgttgcaggagggacgatttggaggctgtatcttctgtcaactgtgtatactctgaagcaagcccttctgaagagaagtagaag

SEQ ID NO: 21334 - DNA, 600 bp, Chicken  19866894232673_1
tgttccaaacttggaattatattatatgagattttaccagtataattaaattgtacttgaaactaaggacatgtctggcttttcaatctgttatcctctcacaatctgggtaagcatcaagtttttagattgtttttcctgaatgggaatcgctaccaccaagataaacagcaggatacagtccacttgaaggctcttctaatgcaatagttttataagaacagaaaagtcttcaaagtacaaagggcaaaaataatcagatttccaccaagcaccatccctatgttaggtcctggatcrttgtcctcctcaggggaaaacaaaaggaaaacttcattgcatgtggaaaatatcgcttcttggcaaatacctatgtttttgtgtaaagaactggaacgggcatctgttaccttctgccttcccaaatgtcgaagaaaataagagcacacagacacctgtgccacatctcaacactacaacaaaaagcactgaaagcaaaaccgatctggtggaaaaagcagcgacaagaactttgtttccacgtcgtaaatcttgcagtcattgctttactccagaaaagaggcatctgggtaactaaac

SEQ ID NO: 21335 - DNA, 600 bp, Chicken  19866894232673_2
tatttacgagtcacaatgaacctttcctcactttctctactcataaaaacagatagtatgtaaagcatatcaatgtcagggctaatacaaatgggtgaaaaacaaacctgaaacttatgttaaaatagaagaaagtttgaaggagaggtagtgatgacaaagataatgccagtaagttgtttgagggaaggggaaaatatttcatggtgttgccaccttgaaacatcttaaggcagaaatacagcacatttctgtatttttttcagattgttaagtacctccaaaaaaacattttaaagraaaaaataataccatgtagtaattcaaactgagctgtacaacattatgggtttttttttcctttcagaggaatggagaaaggtatggtatgtgcacagaagccagaaatcataaacttagcagttgattgatgggggaacatgttaacttgttggtacatcagcacatcagatcaagattttccagtgaaaactatacagccacattactgccatatccagaaagaatgcagggaaatcataaaatagcttaggttggaggggatcttaaagatcacctagttccaaccccctgccatgg

SEQ ID NO: 21336 - DNA, 600 bp, Chicken  19866894232674_1
attacaagcactgcaggcagtgggtgggcagtgggacatgccctgtgcccattcctggtggccccatcccttcgtgcatgctggatgttcaccattaaggatacacagatgtgccacctcatccctgcagagtggcagattgggagtttagcacaagtctagcgtgaaaaatgcctttcctccagtgctgaggaaagacatcagcaagaccaggatggctgcagaaagcagctctttgctcagtcttagctgcatgaatgggtattgcactgtacctcccttgtgtcatgacagtaagcrtggtgacatctgcccaagtgctcctrtagagcmtgcatkggactgyagggaggaaagacaagggggacaaggcactctacctgacagggtcctctttcctagctcatctgcaccaagagctgggtctcatgctccatccagcagttcccgtgatgcaatttgaagcccacagccccttttatggcctcagctacatgaatctgagctggacaaggctgcctgagtctgaaggtgtycagcatggaaagggatgatcactgccatgttgcaactttccaactctgaaacagggagttggtg

SEQ ID NO: 21337 - DNA, 600 bp, Chicken  19866894232674_2
ggcagtgggacatgccctgtgcccattcctggtggccccatcccttcgtgcatgctggatgttcaccattaaggatacacagatgtgccacctcatccctgcagagtggcagattgggagtttagcacaagtctagcgtgaaaaatgcctttcctccagtgctgaggaaagacatcagcaagaccaggatggctgcagaaagcagctctttgctcagtcttagctgcatgaatgggtattgcactgtacctcccttgtgtcatgacagtaagcrtggtgacatctgcccaagtgctcctrtagagcmtgcatkggactgyagggaggaaagacaagggggacaaggcactctacctgacagggtcctctttcctagctcatctgcaccaagagctgggtctcatgctccatccagcagttcccgtgatgcaatttgaagcccacagccccttttatggcctcagctacatgaatctgagctggacaaggctgcctgagtctgaaggtgtycagcatggaaagggatgatcactgccatgttgcaactttccaactctgaaacagggagttggtgccagagtgaatttgattttttttttc

SEQ ID NO: 21338 - DNA, 600 bp, Chicken  19866894232674_3
ggacatgccctgtgcccattcctggtggccccatcccttcgtgcatgctggatgttcaccattaaggatacacagatgtgccacctcatccctgcagagtggcagattgggagtttagcacaagtctagcgtgaaaaatgcctttcctccagtgctgaggaaagacatcagcaagaccaggatggctgcagaaagcagctctttgctcagtcttagctgcatgaatgggtattgcactgtacctcccttgtgtcatgacagtaagcrtggtgacatctgcccaagtgctcctrtagagcmtgcatkggactgyagggaggaaagacaagggggacaaggcactctacctgacagggtcctctttcctagctcatctgcaccaagagctgggtctcatgctccatccagcagttcccgtgatgcaatttgaagcccacagccccttttatggcctcagctacatgaatctgagctggacaaggctgcctgagtctgaaggtgtycagcatggaaagggatgatcactgccatgttgcaactttccaactctgaaacagggagttggtgccagagtgaatttgattttttttttccaggatc

SEQ ID NO: 21339 - DNA, 600 bp, Chicken  19866894232674_4
gccctgtgcccattcctggtggccccatcccttcgtgcatgctggatgttcaccattaaggatacacagatgtgccacctcatccctgcagagtggcagattgggagtttagcacaagtctagcgtgaaaaatgcctttcctccagtgctgaggaaagacatcagcaagaccaggatggctgcagaaagcagctctttgctcagtcttagctgcatgaatgggtattgcactgtacctcccttgtgtcatgacagtaagcrtggtgacatctgcccaagtgctcctrtagagcmtgcatkggactgyagggaggaaagacaagggggacaaggcactctacctgacagggtcctctttcctagctcatctgcaccaagagctgggtctcatgctccatccagcagttcccgtgatgcaatttgaagcccacagccccttttatggcctcagctacatgaatctgagctggacaaggctgcctgagtctgaaggtgtycagcatggaaagggatgatcactgccatgttgcaactttccaactctgaaacagggagttggtgccagagtgaatttgattttttttttccaggatctgtttg

SEQ ID NO: 21340 - DNA, 600 bp, Chicken  19866894232674_5
gcccattcctggtggccccatcccttcgtgcatgctggatgttcaccattaaggatacacagatgtgccacctcatccctgcagagtggcagattgggagtttagcacaagtctagcgtgaaaaatgcctttcctccagtgctgaggaaagacatcagcaagaccaggatggctgcagaaagcagctctttgctcagtcttagctgcatgaatgggtattgcactgtacctcccttgtgtcatgacagtaagcrtggtgacatctgcccaagtgctcctrtagagcmtgcatkggactgyagggaggaaagacaagggggacaaggcactctacctgacagggtcctctttcctagctcatctgcaccaagagctgggtctcatgctccatccagcagttcccgtgatgcaatttgaagcccacagccccttttatggcctcagctacatgaatctgagctggacaaggctgcctgagtctgaaggtgtycagcatggaaagggatgatcactgccatgttgcaactttccaactctgaaacagggagttggtgccagagtgaatttgattttttttttccaggatctgtttgagatgaa

SEQ ID NO: 21341 - DNA, 600 bp, Chicken  19866894232674_6
tgctcagtcttagctgcatgaatgggtattgcactgtacctcccttgtgtcatgacagtaagcrtggtgacatctgcccaagtgctcctrtagagcmtgcatkggactgyagggaggaaagacaagggggacaaggcactctacctgacagggtcctctttcctagctcatctgcaccaagagctgggtctcatgctccatccagcagttcccgtgatgcaatttgaagcccacagccccttttatggcctcagctacatgaatctgagctggacaaggctgcctgagtctgaaggtgtycagcatggaaagggatgatcactgccatgttgcaactttccaactctgaaacagggagttggtgccagagtgaatttgattttttttttccaggatctgtttgagatgaaagtttcctggtatgtacagtctgtgctccacttgaagttcagctgcacaaagtgatatttatgttcatttcccattaagttggaatcttccaaaagacagtgagaaagatgttttggtggtgtgagacagaatctgttctctgcaacagaatctctccccactgtgaccttgtgggtgtgatgaggggct

SEQ ID NO: 21342 - DNA, 599 bp, Chicken  19866894232678_1
  misc_feature (1)..(267): n is any nucleotide
nnnnnnnnnnnnnnnnnnnnnnnnnnnnnnnnnnnnnnnnnnnnnnnnnnnnnnnnnnnnnnnnnnnnnnnnnnnnnnnnnnnnnnnnnnnnnnnnnnnnnnnnnnnnnnnnnnnnnnnnnnnnnnnnnnnnnnnnnnnnnnnnnnnnnnnnnnnnnnnnnnnnnnnnnnnnnnnnnnnnnnnnnnnnnnnnnnnnnnnnnnnnnnnnnnnnnnnnnnnnnnnnnnnnnnnnnnnnnnnnnnnnnnnnnnnnnnnnnnnnnnnnnnnaattgtaactgtcaaaaacagcccccacgtgcyccccagacaggcattcagtttggtgcagagcatctccggagtcctaatgtctcatttttgtgaacctacaagtgtttgacagcactgttgataacatatggtacagttaccatcctacatttccayataaactttcatgccataaacccatcatctctaatgccgtatcaagttcctgtgtataacagagaaagctacattcaaacgaacactgcaggctgtactttttcccctcgggaggtaccaaagccatggaaatggagcaccagtccagacttaagacaagcacagcattataa

SEQ ID NO: 21343 - DNA, 599 bp, Chicken  19866894232678_2
  misc_feature (1)..(141): n is any nucleotide
nnnnnnnnnnnnnnnnnnnnnnnnnnnnnnnnnnnnnnnnnnnnnnnnnnnnnnnnnnnnnnnnnnnnnnnnnnnnnnnnnnnnnnnnnnnnnnnnnnnnnnnnnnnnnnnnnnnnnnnnnnnnnnnnnnnnnnnnnnnnnaattgtaactgtcaaaaacagcccccacgtgcyccccagacaggcattcagtttggtgcagagcatctccggagtcctaatgtctcatttttgtgaacctacaagtgtttgacagcactgttgataacatatggtacagttaccatcctacatttccayataaactttcatgccataaacccatcatctctaatgccgtatcaagttcctgtgtataacagagaaagctacattcaaacgaacactgcaggctgtactttttcccctcgggaggtaccaaagccatggaaatggagcaccagtccagacttaagacaagcacagcattataacctgcccaactgagatgctgcttagagactgtaatactcaccaacaagaactgcaaagtctgtgggttttcctctcctctctttctgttgatatttgctaccaactaaaaaataccatcatgaaac

SEQ ID NO: 21344 - DNA, 600 bp, Chicken  19866894232684_1
aaatgtcaacccaaaaagtaatgctataagaattggtaggaagcacacatggcatttgctacaagccgtaaagtaactgtgggcaaggtatctgttagtagtgtttggtaattgaccaactgaaaatttaaaaatcgaaatatacaagtagaaggatctgtcactgatcagttgttctcttaaagcattgctaaaatgccagacacagggtacaactgtgtttgaattagagaatgaggactgagttggttacagtatcctctttaattccagcttttatttgaattttgactattttgyrttagtaaaaggggtagggtagagaaaaggttttgaaaacgtgcattttcagtttggaactttaacaatacattcttctgagatgatacaaaggtgctaatttctcctatactactgttggcacctcccattgcccaggattattaatagaaattaatagaaaggtattagaaattgtcctacgcatattactttacaaagcactgatatgtttcttttttcagagtggagtatactctatgtgactctgtctgcttttattacgattgtggtcatgatagggcttgcctggttctgcat

SEQ ID NO: 21345 - DNA, 600 bp, Chicken  19866894232684_2
aatgtcaacccaaaaagtaatgctataagaattggtaggaagcacacatggcatttgctacaagccgtaaagtaactgtgggcaaggtatctgttagtagtgtttggtaattgaccaactgaaaatttaaaaatcgaaatatacaagtagaaggatctgtcactgatcagttgttctcttaaagcattgctaaaatgccagacacagggtacaactgtgtttgaattagagaatgaggactgagttggttacagtatcctctttaattccagcttttatttgaattttgactattttgyrttagtaaaaggggtagggtagagaaaaggttttgaaaacgtgcattttcagtttggaactttaacaatacattcttctgagatgatacaaaggtgctaatttctcctatactactgttggcacctcccattgcccaggattattaatagaaattaatagaaaggtattagaaattgtcctacgcatattactttacaaagcactgatatgtttcttttttcagagtggagtatactctatgtgactctgtctgcttttattacgattgtggtcatgatagggcttgcctggttctgcatc

SEQ ID NO: 21346 - DNA, 600 bp, Chicken  19866894232696_1
agaatcaagcttttgatattagtagtaaagaatacatttacggggacatttttttccagaacataatgccagttcttctttccaccaggaaagactggctgttccgtgacaactggaatagaaatatgatttttcaattgaaacatcctgaagagactcataagaatggggccctctctagactgatgggagggtatccgtgcttttgaatagtgttccaacaattttaggcagggctgctttctgaaacagtagaacaaaaactctctgaaaacctccgtacaatcaggcaaagaattmacttctgctttatggctgctaaattgaattatcactggagagggaaaaaaaacaacagcataacacaacaaaaaacaggtttgcctggacattgattccctgttgttgtcaaactccagctgttctgtgaaaaggagtagtggggtcatcacatcgctcttcttccacgcaggggaagatcaatacctgcagaataattcaggttcttgtaattacagggtcttggcgcctttgcctgcaggttaaatggcagtcagtgacgagttagcgggtttattttttctgaaagtccccaaacat

SEQ ID NO: 21347 - DNA, 600 bp, Chicken  19866894232707_1
ccagtcccctggcaatcccagttgggaacacagctgagggggctgggacatgttccatcccatacacccagcaggcacatgaggctgagcagctgtgcatctcccccagcccaggtgcatctttcaggtccagctttaccactagaaggggtttctcacaccgtgtagttctccagtgagggctgccagcatcacctgctcatcagcagcaccagtcatggaagtaaccctggattcactccaaagcacacagaggcaaagacagtgcaagccaccaactcacaactatttaaacagacrtgctttcctaatgtgacctatgcacaggtggttctacacacaaagggaacgtgacaaaccacatggcatgcactgatccagccagatcccacgttgctgtcttcttcttaactgaatataaatgtgatgttcaccattattatgtacatacactgcgttcgcatatgctgacaataagaacgagcactatcagttaatagtgatgcgtggcccaagacacacagtggctgtaaaaaagaaaaatcaagccacgtaaacctcacctgtaggcacggaaagcaacgtgagcagttgtggcta

SEQ ID NO: 21348 - DNA, 600 bp, Chicken  19866894232711_1
aatgtgcttctgggctgcttctgaaaatcttactcataatattgatttaacaaaggctactgcagtctcaaaatgcagacaaataggaggattagcataaagtgtatatactattactactttctgaatgaatgaccctgtaaatccaagtaggttagatggttacagtaacacaccgtttgcgtcagtgactggtacagaacaggcatccccttacactttcacatacacatttatgtgtataaaaagagaagagagaacaggaatgtggagtggtgagtgtcagtcacaaaagtatgsattcataagttagaggaagagagtcaacagaaggaatcagcagctgtattttctaatgataatttggagaagttttgaagaatgtaagttttaagagaaaaatcttcctcccagattcaatatatccatcawaacgcaactgaatgatttgttttgcctctgaattgttttgttcttggtggtgttcacaagggagattttgggtaggattttgccagctctgggttcatctcagcatagcatcccctgaaggaacagcaggagtccataatgttctagggaagcatcattgcatgtaat

SEQ ID NO: 21349 - DNA, 600 bp, Chicken  19866894232711_2
tgaccctgtaaatccaagtaggttagatggttacagtaacacaccgtttgcgtcagtgactggtacagaacaggcatccccttacactttcacatacacatttatgtgtataaaaagagaagagagaacaggaatgtggagtggtgagtgtcagtcacaaaagtatgsattcataagttagaggaagagagtcaacagaaggaatcagcagctgtattttctaatgataatttggagaagttttgaagaatgtaagttttaagagaaaaatcttcctcccagattcaatatatccatcawaacgcaactgaatgatttgttttgcctctgaattgttttgttcttggtggtgttcacaagggagattttgggtaggattttgccagctctgggttcatctcagcatagcatcccctgaaggaacagcaggagtccataatgttctagggaagcatcattgcatgtaatgactgtggcttcagagtaaacagaaagttctccataagctatttctctattttggtggcttttttttaaagtgcaattactttgattaaaatattacattgctccttcaggttataataaacactgtacgca

SEQ ID NO: 21350 - DNA, 600 bp, Chicken  19866894232713_1
ttgttccttttcctccaggtctctttttttgcatcttttctttcattactgttttttggatttagttttttatgaactcaaatttaccaagagtgactcttccagcaattaatattaaggttagacaggaaagacagaacatctcccacaggacacaaaattagaacttaaatatttagatactgacaggcaattgcaaaatgccgtcaaaaggcccttatgaactctgtctgaaacacagcagttatgaaaagggtgttctattatctggatagaagatcattcacaagcgttgttgarttttttcctgccaactgttaacgtgtcccctgagatttcccagaagggattccagcattgatatactgtcagaataaaattaacatttttttcaatgttaggttgagggaaggagttcaaacaagtgctgctaaagccacgtctccactacaacacctggttttccagccattagtatgtcccaaattacttactaacatatcacagtcattgtactcgggccaaaaacraagcctcagtgaaacaattatcaccaaaccctctcaaccgttctgtatatagctcctctacaaatggact

SEQ ID NO: 21351 - DNA, 600 bp, Chicken  19866894232713_2
ctgaaacacagcagttatgaaaagggtgttctattatctggatagaagatcattcacaagcgttgttgarttttttcctgccaactgttaacgtgtcccctgagatttcccagaagggattccagcattgatatactgtcagaataaaattaacatttttttcaatgttaggttgagggaaggagttcaaacaagtgctgctaaagccacgtctccactacaacacctggttttccagccattagtatgtcccaaattacttactaacatatcacagtcattgtactcgggccaaaaacraagcctcagtgaaacaattatcaccaaaccctctcaaccgttctgtatatagctcctctacaaatggactgtttcctaktataatgagcatataggtattttccatcaagcatattgctcatgtttataaatctgttctggaaatatactggcatttccacactggcatgatgttagcattttcactagcattctatayttgaagaagctgaggtacagctgaattgaactgaasaacttctgcatacgatgtaaacctaagatgctaaagaaagacatcaacraagtttgccatttact

SEQ ID NO: 21352 - DNA, 600 bp, Chicken  19866894232713_3
gccaactgttaacgtgtcccctgagatttcccagaagggattccagcattgatatactgtcagaataaaattaacatttttttcaatgttaggttgagggaaggagttcaaacaagtgctgctaaagccacgtctccactacaacacctggttttccagccattagtatgtcccaaattacttactaacatatcacagtcattgtactcgggccaaaaacraagcctcagtgaaacaattatcaccaaaccctctcaaccgttctgtatatagctcctctacaaatggactgtttcctaktataatgagcatataggtattttccatcaagcatattgctcatgtttataaatctgttctggaaatatactggcatttccacactggcatgatgttagcattttcactagcattctatayttgaagaagctgaggtacagctgaattgaactgaasaacttctgcatacgatgtaaacctaagatgctaaagaaagacatcaacraagtttgccatttactggagaacaacatattagattcattttcaaatactaaggaaagcacctgcaggttattaaaaaaaaacacaccaaacaca

SEQ ID NO: 21353 - DNA, 600 bp, Chicken  19866894232713_4
gctaaagccacgtctccactacaacacctggttttccagccattagtatgtcccaaattacttactaacatatcacagtcattgtactcgggccaaaaacraagcctcagtgaaacaattatcaccaaaccctctcaaccgttctgtatatagctcctctacaaatggactgtttcctaktataatgagcatataggtattttccatcaagcatattgctcatgtttataaatctgttctggaaatatactggcatttccacactggcatgatgttagcattttcactagcattctatayttgaagaagctgaggtacagctgaattgaactgaasaacttctgcatacgatgtaaacctaagatgctaaagaaagacatcaacraagtttgccatttactggagaacaacatattagattcattttcaaatactaaggaaagcacctgcaggttattaaaaaaaaacacaccaaacacactatcagtagttgagagcacttaatttgccagaactgaccctttattattaaataatgcaaatgctttgctagcagttttacatattatttcattaagatttaatcagcttatttatctt

SEQ ID NO: 21354 - DNA, 600 bp, Chicken  19866894232713_5
cagccattagtatgtcccaaattacttactaacatatcacagtcattgtactcgggccaaaaacraagcctcagtgaaacaattatcaccaaaccctctcaaccgttctgtatatagctcctctacaaatggactgtttcctaktataatgagcatataggtattttccatcaagcatattgctcatgtttataaatctgttctggaaatatactggcatttccacactggcatgatgttagcattttcactagcattctatayttgaagaagctgaggtacagctgaattgaactgaasaacttctgcatacgatgtaaacctaagatgctaaagaaagacatcaacraagtttgccatttactggagaacaacatattagattcattttcaaatactaaggaaagcacctgcaggttattaaaaaaaaacacaccaaacacactatcagtagttgagagcacttaatttgccagaactgaccctttattattaaataatgcaaatgctttgctagcagttttacatattatttcattaagatttaatcagcttatttatcttggcaagcatgaggggtttggtttttttccccagagc

SEQ ID NO: 21355 - DNA, 600 bp, Chicken  19866894232713_6
actcgggccaaaaacraagcctcagtgaaacaattatcaccaaaccctctcaaccgttctgtatatagctcctctacaaatggactgtttcctaktataatgagcatataggtattttccatcaagcatattgctcatgtttataaatctgttctggaaatatactggcatttccacactggcatgatgttagcattttcactagcattctatayttgaagaagctgaggtacagctgaattgaactgaasaacttctgcatacgatgtaaacctaagatgctaaagaaagacatcaacraagtttgccatttactggagaacaacatattagattcattttcaaatactaaggaaagcacctgcaggttattaaaaaaaaacacaccaaacacactatcagtagttgagagcacttaatttgccagaactgaccctttattattaaataatgcaaatgctttgctagcagttttacatattatttcattaagatttaatcagcttatttatcttggcaagcatgaggggtttggtttttttccccagagctctgaggcagcccttcccaaggggaaagacaaggataatttctgatggt

SEQ ID NO: 21356 - DNA, 600 bp, Chicken  19866894232717_1
ccaaggaaaattttatattgacttacatttgatactaaccatataaacatttttcttgacaagagagagcattttagcatgtctggaaagtctattttgaattgtggaaaatttggtttcccagtccatcactgccttgcacgtggattcacaatgccaataaccaacaactacaatctctttccttgtgagaaaagcaaattgagcagcgtggaaaggagcattccaaggagaggacagcactggacatactaagggataactcgcattttatcagtctctgtgtaactgtatctctgkaagtagtatggaaatgagcccagtatggaaatgttactacaccatgaaattggaatgtggcagggaaatgagagtactccctcacacttcatttgtatattgttcttttaccccggatatatcatctcttaagccaaatacatgtttcacttcagaaatgtccagggacaaaaccagagctgaggaaagagacctgacactcaggggggctcacttaattggaataaataaaaccgatgtttgttctttttatgttagacagtccttatccctctgaagtgagacagcaataatatgtaa

SEQ ID NO: 21357 - DNA, 600 bp, Chicken  19866894232721_1
tggaaaatacaacaggtacgaagagcatgataacagtatttaatagagtgaactctcagacataaaacactgtttttcaacacagtcaccagtgttagctatgcattttcaccaacgaagaacaagagcctgcatatcatactcatcaaaacctgcactgatggatgttagtggatacaattgtttttggcatggaggaattcagtgtcacacctttgcttcatccacatttccatgtcagatgcccttctgtccgactctccctctgctgccatctgtcacacagcaacaaaacgtaakgggatactggcgggaaggttcgacctctactgctgtaccaccgacatctgcctctgacatcatgggccaaccataattaaataagaagcattgcttttggagcagttctcacacatatcgaaaacattttcatatagaatgcacagaaattttcactataagccccacttgctacgctaaaaattaagtgcagattcagtcacgcttccagtgtaacctattctagggaacctgctttagcaaggggttggactagatggttccatacaacccctacaattctgccattctgcacatgat

SEQ ID NO: 21358 - DNA, 600 bp, Chicken  19866894232725_1
tgcaactggaggggaaagcctggcttctggacagtgagaaaaacacggccagctttaaaacagttcatttctcagcatgtgcttttgtctgtcagctatgatggagcaggacgtgaagctcttaaagcagctggtttaattggaaacattcagaggggcactgcagctactaatgtgtgtaaagccaagaaaatttgaatgtaatgggcttaggtcttcctcctttacagaagtgttttcctagtacctgtgaagctaagccaatgagaaaataatggcagtgagtcagtaacacactayttgctgcctattcccagagcaggggcrattggagagactgaaattctctcaatacttcttttcagagtgcctgctcaaaayacttacttggctccyatcttgaaggatttgctcctgggatgcaatttctgcttcaattstgctgacattacatggcagttttggatgttgaacagcatcctatgcctaaggattcccagtggaggcaccatcactacaagcagaattagctcctctgtgtgcaattatgtgagctgtactggaagtctgccctgcagcctccctgcatgtggatgtgca

SEQ ID NO: 21359 - DNA, 600 bp, Chicken  19866894232725_2
tggacagtgagaaaaacacggccagctttaaaacagttcatttctcagcatgtgcttttgtctgtcagctatgatggagcaggacgtgaagctcttaaagcagctggtttaattggaaacattcagaggggcactgcagctactaatgtgtgtaaagccaagaaaatttgaatgtaatgggcttaggtcttcctcctttacagaagtgttttcctagtacctgtgaagctaagccaatgagaaaataatggcagtgagtcagtaacacactayttgctgcctattcccagagcaggggcrattggagagactgaaattctctcaatacttcttttcagagtgcctgctcaaaayacttacttggctccyatcttgaaggatttgctcctgggatgcaatttctgcttcaattstgctgacattacatggcagttttggatgttgaacagcatcctatgcctaaggattcccagtggaggcaccatcactacaagcagaattagctcctctgtgtgcaattatgtgagctgtactggaagtctgccctgcagcctccctgcatgtggatgtgcaccttctcttgtgatggaaaaacaccta

SEQ ID NO: 21360 - DNA, 600 bp, Chicken  19866894232725_3
cttttgtctgtcagctatgatggagcaggacgtgaagctcttaaagcagctggtttaattggaaacattcagaggggcactgcagctactaatgtgtgtaaagccaagaaaatttgaatgtaatgggcttaggtcttcctcctttacagaagtgttttcctagtacctgtgaagctaagccaatgagaaaataatggcagtgagtcagtaacacactayttgctgcctattcccagagcaggggcrattggagagactgaaattctctcaatacttcttttcagagtgcctgctcaaaayacttacttggctccyatcttgaaggatttgctcctgggatgcaatttctgcttcaattstgctgacattacatggcagttttggatgttgaacagcatcctatgcctaaggattcccagtggaggcaccatcactacaagcagaattagctcctctgtgtgcaattatgtgagctgtactggaagtctgccctgcagcctccctgcatgtggatgtgcaccttctcttgtgatggaaaaacacctacctgcagctctcggtaacacaagttgtcatccaggtagygtaagaaaaggcaga

SEQ ID NO: 21361 - DNA, 600 bp, Chicken  19866894232725_4
tatgatggagcaggacgtgaagctcttaaagcagctggtttaattggaaacattcagaggggcactgcagctactaatgtgtgtaaagccaagaaaatttgaatgtaatgggcttaggtcttcctcctttacagaagtgttttcctagtacctgtgaagctaagccaatgagaaaataatggcagtgagtcagtaacacactayttgctgcctattcccagagcaggggcrattggagagactgaaattctctcaatacttcttttcagagtgcctgctcaaaayacttacttggctccyatcttgaaggatttgctcctgggatgcaatttctgcttcaattstgctgacattacatggcagttttggatgttgaacagcatcctatgcctaaggattcccagtggaggcaccatcactacaagcagaattagctcctctgtgtgcaattatgtgagctgtactggaagtctgccctgcagcctccctgcatgtggatgtgcaccttctcttgtgatggaaaaacacctacctgcagctctcggtaacacaagttgtcatccaggtagygtaagaaaaggcagagygcagaggaaaggt

SEQ ID NO: 21362 - DNA, 600 bp, Chicken  19866894232725_5
tggaaacattcagaggggcactgcagctactaatgtgtgtaaagccaagaaaatttgaatgtaatgggcttaggtcttcctcctttacagaagtgttttcctagtacctgtgaagctaagccaatgagaaaataatggcagtgagtcagtaacacactayttgctgcctattcccagagcaggggcrattggagagactgaaattctctcaatacttcttttcagagtgcctgctcaaaayacttacttggctccyatcttgaaggatttgctcctgggatgcaatttctgcttcaattstgctgacattacatggcagttttggatgttgaacagcatcctatgcctaaggattcccagtggaggcaccatcactacaagcagaattagctcctctgtgtgcaattatgtgagctgtactggaagtctgccctgcagcctccctgcatgtggatgtgcaccttctcttgtgatggaaaaacacctacctgcagctctcggtaacacaagttgtcatccaggtagygtaagaaaaggcagagygcagaggaaaggtgaaacatccaaatgcccaaatcaaagctcctggctacatgtgca

SEQ ID NO: 21363 - DNA, 600 bp, Chicken  19866894232725_6
gtgcctgctcaaaayacttacttggctccyatcttgaaggatttgctcctgggatgcaatttctgcttcaattstgctgacattacatggcagttttggatgttgaacagcatcctatgcctaaggattcccagtggaggcaccatcactacaagcagaattagctcctctgtgtgcaattatgtgagctgtactggaagtctgccctgcagcctccctgcatgtggatgtgcaccttctcttgtgatggaaaaacacctacctgcagctctcggtaacacaagttgtcatccaggtagygtaagaaaaggcagagygcagaggaaaggtgaaacatccaaatgcccaaatcaaagctcctggctacatgtgcagatacatgttttaaagcccatctctgagagcctgggaggggctgcacagattttgcacgtcctgcttttgcaatgcctgaatcaaatcactgcaagtctcactatggacacttcttgatctctgcttattgcaaccaacatatgtcaaaaaacaaaaacaaaagcaaaaacaaaacaaacaaaaaagccactagccaaactaattcaactactggaaaactgttag

SEQ ID NO: 21364 - DNA, 600 bp, Chicken  19866894232725_7
ttacttggctccyatcttgaaggatttgctcctgggatgcaatttctgcttcaattstgctgacattacatggcagttttggatgttgaacagcatcctatgcctaaggattcccagtggaggcaccatcactacaagcagaattagctcctctgtgtgcaattatgtgagctgtactggaagtctgccctgcagcctccctgcatgtggatgtgcaccttctcttgtgatggaaaaacacctacctgcagctctcggtaacacaagttgtcatccaggtagygtaagaaaaggcagagygcagaggaaaggtgaaacatccaaatgcccaaatcaaagctcctggctacatgtgcagatacatgttttaaagcccatctctgagagcctgggaggggctgcacagattttgcacgtcctgcttttgcaatgcctgaatcaaatcactgcaagtctcactatggacacttcttgatctctgcttattgcaaccaacatatgtcaaaaaacaaaaacaaaagcaaaaacaaaacaaacaaaaaagccactagccaaactaattcaactactggaaaactgttagtgaaggttcaagcagtg

SEQ ID NO: 21365 - DNA, 600 bp, Chicken  19866894232725_8
aaggtgaaacatccaaatgcccaaatcaaagctcctggctacatgtgcagatacatgttttaaagcccatctctgagagcctgggaggggctgcacagattttgcacgtcctgcttttgcaatgcctgaatcaaatcactgcaagtctcactatggacacttcttgatctctgcttattgcaaccaacatatgtcaaaaaacaaaaacaaaagcaaaaacaaaacaaacaaaaaagccactagccaaactaattcaactactggaaaactgttagtgaaggttcaagcagtgattttcastagttaaactattttaaacccagtttcaggtgagcctggcctgcaaatatcagtgggaaaggctttcagtttaatttccacaatttcctctgcttgctatagaaagagaacattacctgttattcttctaattttttttttcggtctcttcagctagtttttctgcttcttccttcagctgcttcactttctgtagagttacttttggaggtccttttgcttttagcttatcttgaagaatggcgtacttccttttaatgtcagcgaattcctgtaacaaaaccccattgcttggtttag

SEQ ID NO: 21366 - DNA, 558 bp, Chicken  19866894232728_1
cctactgccctcagaaaggataatgcattgtttttttcttgtttctaattagtaatttaagcatatgttcagcatttaactctaaatgtttgccttttccccaagctctaagacagctgtccaagatgtgaatgccagaaaacatttaaatatcaacatctgttgaattatgttaatttagtgtaatataattgggcatgagttggaattgatcaaaagtatatgaattacacaaaggcaaatctaaaccaatatcttagtgtacaaacaagccaccaaggaacactgatggaatagaastaaaaaatctacttctggtaaaaattaaattgctaaaactacagctttttttccacaaatgacatgatttcatgcgtttagaaatgattatttacagcaaaatatttcaaaatagttttgaatatatatttttcattatgatttttaatcacagaacacctgataaaagtaagtaatgctcatcttagtgtgattacgtaatatagacagaaaagagtttccacaaataataccattctgttataggacaatatattt

SEQ ID NO: 21367 - DNA, 600 bp, Chicken  19866894232741_1
gggtatttgcaaaggacagagttaaaactgccaaagaagtcaaaacccatatttctgcctattacagtacttcccaagacagaatcccctgaaggaagaggctgtgaaagcaggagctgtttctctctctgacagaaaatggattgacagattctgtatttatttttaaaaaatgcctaactaagcagcattagtcacccatcatccatagtcctctgtataagcgagagcgcatgaagttatagtgtctgcagagaaagcaattacaatactaatttcatcaaaatgataactaggaaraagagaagaaataatcatctagtttaagaarttccattgttttagatcctgattatgggaactccytcacaaacactgaaaaacatcagtcacctacataagctttaggtgagctccctagagggcactacggagagagctgtgtaggaaggcatttcagcagyaatcaacgtgcaagccttcaagtctgctgagctgcaagtttgaccatgaaataggcgagatccccaagataggtgagccagacacacaggcagcccatttgcttgattacctctattggcatctttgcactgaaag

SEQ ID NO: 21368 - DNA, 600 bp, Chicken  19866894232741_2
caaagaagtcaaaacccatatttctgcctattacagtacttcccaagacagaatcccctgaaggaagaggctgtgaaagcaggagctgtttctctctctgacagaaaatggattgacagattctgtatttatttttaaaaaatgcctaactaagcagcattagtcacccatcatccatagtcctctgtataagcgagagcgcatgaagttatagtgtctgcagagaaagcaattacaatactaatttcatcaaaatgataactaggaaraagagaagaaataatcatctagtttaagaarttccattgttttagatcctgattatgggaactccytcacaaacactgaaaaacatcagtcacctacataagctttaggtgagctccctagagggcactacggagagagctgtgtaggaaggcatttcagcagyaatcaacgtgcaagccttcaagtctgctgagctgcaagtttgaccatgaaataggcgagatccccaagataggtgagccagacacacaggcagcccatttgcttgattacctctattggcatctttgcactgaaagtcaaagagctacactttctgaccccgatcta

SEQ ID NO: 21369 - DNA, 600 bp, Chicken  19866894232741_3
gtacttcccaagacagaatcccctgaaggaagaggctgtgaaagcaggagctgtttctctctctgacagaaaatggattgacagattctgtatttatttttaaaaaatgcctaactaagcagcattagtcacccatcatccatagtcctctgtataagcgagagcgcatgaagttatagtgtctgcagagaaagcaattacaatactaatttcatcaaaatgataactaggaaraagagaagaaataatcatctagtttaagaarttccattgttttagatcctgattatgggaactccytcacaaacactgaaaaacatcagtcacctacataagctttaggtgagctccctagagggcactacggagagagctgtgtaggaaggcatttcagcagyaatcaacgtgcaagccttcaagtctgctgagctgcaagtttgaccatgaaataggcgagatccccaagataggtgagccagacacacaggcagcccatttgcttgattacctctattggcatctttgcactgaaagtcaaagagctacactttctgaccccgatctacctgccatgaagccctgtgtgatcctcaccttgaa

SEQ ID NO: 21370 - DNA, 600 bp, Chicken  19866894232741_4
tttaaaaaatgcctaactaagcagcattagtcacccatcatccatagtcctctgtataagcgagagcgcatgaagttatagtgtctgcagagaaagcaattacaatactaatttcatcaaaatgataactaggaaraagagaagaaataatcatctagtttaagaarttccattgttttagatcctgattatgggaactccytcacaaacactgaaaaacatcagtcacctacataagctttaggtgagctccctagagggcactacggagagagctgtgtaggaaggcatttcagcagyaatcaacgtgcaagccttcaagtctgctgagctgcaagtttgaccatgaaataggcgagatccccaagataggtgagccagacacacaggcagcccatttgcttgattacctctattggcatctttgcactgaaagtcaaagagctacactttctgaccccgatctacctgccatgaagccctgtgtgatcctcaccttgaaggtttaatggatccatatagatctcggctggagtgggccacgaggggtcatcatttcacctctcatagtcagccaggattttttctagcagtcctgaa

SEQ ID NO: 21371 - DNA, 600 bp, Chicken  19866894232743_1
caaagataatttcctaagccaggtaacagactgtcccaccagggggtacactgctggaccctgctcattagggcaagtgaactggttggtgacatcaggattggaggctgtctgggctatagccaccatgcagtggtagagttcaaactcttgagggctactaaacaggcaaagagtaaaatcgggagacttaatttcaggaaagccacacctccagctcttcaaggagttagtcagcaaaaaccctgggaatctgtcctcagggacaagggagcagagcagaaatggcagatttttaargaagctttccttagggcacaacagctctcaattctcaggtgtagaaagtcaggaaaggaaagcaagggaccagcatggctgaagcactacccactggtcaaactggagagcaagaagaaaatgcacaggcagtggaagcagggacaggtaacctgggaggattatagggatactgctatgctgtgtagacatggggtcaggaaggccaaggcccaactggaactggacttggcaaagggatgtaaagaataagaaagtcttctataggtacatcagtcaaaagtgaaaagcccaggaggg

SEQ ID NO: 21372 - DNA, 600 bp, Chicken  19866894232745_1
atcgtgtctatctttaaaaaaaaaatcaattcttaaaatctaggagaagaaagaaaataatctgtatcttaatgctgctgtacctctttggatgtttttttggatgtgcttttgtagaattttcttttgaccttaagttttctgcttatgtgcgtacctctgaatactgtgcagggcgtgctttcagtattagatttccttatccataaatattgctttaaaaactgcagctgaagaatatttttacagggttatatcagctcctagtaaggcagactgaaaaactctccttaactttarggaattgtattcattcattcagcttgaatgaattattttaattctcttataattttgtactgctgattcatattatagaaatrgaggcaagagccattggatgtttttcaataattcatatgctgctcggtacctattttgcttctatagtttttgcttctcttccatggacacaagcagaggtatgctaaattgtaatagaatttaaattaatctgtggcatagcactgaaaatctgttaccagcctatatcaaaaaggtacgctgaaagttttgctgttagagctctaagcttcttga

SEQ ID NO: 21373 - DNA, 575 bp, Chicken  19866894232745_2
ctctttggatgtttttttggatgtgcttttgtagaattttcttttgaccttaagttttctgcttatgtgcgtacctctgaatactgtgcagggcgtgctttcagtattagatttccttatccataaatattgctttaaaaactgcagctgaagaatatttttacagggttatatcagctcctagtaaggcagactgaaaaactctccttaactttarggaattgtattcattcattcagcttgaatgaattattttaattctcttataattttgtactgctgattcatattatagaaatrgaggcaagagccattggatgtttttcaataattcatatgctgctcggtacctattttgcttctatagtttttgcttctcttccatggacacaagcagaggtatgctaaattgtaatagaatttaaattaatctgtggcatagcactgaaaatctgttaccagcctatatcaaaaaggtacgctgaaagttttgctgttagagctctaagcttcttgattggagaatgggtgtgggagaaaaaaaaaatccctttcctatttttctagtatatagt

SEQ ID NO: 21374 - DNA, 600 bp, Chicken  19866894232746_1
gtgagatggcaagataaacacgtctaaatctagctgctggcatcctgtcccttccaggctcaaaggctcagagctatattcaagtgaaacaagctagcaaggcactgccatggcaaaaaaagctcagatgattccttccaatacttgaagggagcatataaacaggaggaggaacggctgtttacgagggtggatggtgacaggacaagggggaatggttttaaactgaggcaggggaggtttaggttggatattaggaggaagtttttcacccagagggtggtgacgcactgaacaggytgcccaaggaggctgtggatgccccatccctgsaggcattcaaggccaggctggatgtggctctgggcagcctgggctgstggttggcgaccctgcacatagcagggggttggaactggatgagcattgtggtccttttcaacccaggccattctatgattctatgattctacgaagacttaggaagccaaggacacagtgagcatcaggatgatgctgcacttgccagctgcattttaactatgactaaacctgtttcttgaactaaccttaagaaacggatacttgcagagagcaaag

SEQ ID NO: 21375 - DNA, 600 bp, Chicken  19866894232746_2
ctgctggcatcctgtcccttccaggctcaaaggctcagagctatattcaagtgaaacaagctagcaaggcactgccatggcaaaaaaagctcagatgattccttccaatacttgaagggagcatataaacaggaggaggaacggctgtttacgagggtggatggtgacaggacaagggggaatggttttaaactgaggcaggggaggtttaggttggatattaggaggaagtttttcacccagagggtggtgacgcactgaacaggytgcccaaggaggctgtggatgccccatccctgsaggcattcaaggccaggctggatgtggctctgggcagcctgggctgstggttggcgaccctgcacatagcagggggttggaactggatgagcattgtggtccttttcaacccaggccattctatgattctatgattctacgaagacttaggaagccaaggacacagtgagcatcaggatgatgctgcacttgccagctgcattttaactatgactaaacctgtttcttgaactaaccttaagaaacggatacttgcagagagcaaagatagggataaggcctagacatcttcagaggcaa

SEQ ID NO: 21376 - DNA, 600 bp, Chicken  19866894232746_3
caagtgaaacaagctagcaaggcactgccatggcaaaaaaagctcagatgattccttccaatacttgaagggagcatataaacaggaggaggaacggctgtttacgagggtggatggtgacaggacaagggggaatggttttaaactgaggcaggggaggtttaggttggatattaggaggaagtttttcacccagagggtggtgacgcactgaacaggytgcccaaggaggctgtggatgccccatccctgsaggcattcaaggccaggctggatgtggctctgggcagcctgggctgstggttggcgaccctgcacatagcagggggttggaactggatgagcattgtggtccttttcaacccaggccattctatgattctatgattctacgaagacttaggaagccaaggacacagtgagcatcaggatgatgctgcacttgccagctgcattttaactatgactaaacctgtttcttgaactaaccttaagaaacggatacttgcagagagcaaagatagggataaggcctagacatcttcagaggcaaagttttagagcaattatatccacatgtccgaagttattgtgaagtga

SEQ ID NO: 21377 - DNA, 600 bp, Chicken  19866894232746_4
ttctatgattctacgaagacttaggaagccaaggacacagtgagcatcaggatgatgctgcacttgccagctgcattttaactatgactaaacctgtttcttgaactaaccttaagaaacggatacttgcagagagcaaagatagggataaggcctagacatcttcagaggcaaagttttagagcaattatatccacatgtccgaagttattgtgaagtgaactactggctgcaaaaacaaagctctaatccaactctgaacaaactccttgacccatggcttgggtttgcccaatctcycattatctcttaagtattaaaaataagaggttaaataggagaaatgttggcgtaactcatgagtgagcagaacacagaaaacaaaatgtctgcagcgagtcctggcaacaacagcagcatttcttttcagttctacccaaagagaaaaatctcagaccagaaatgaggacgaaattctcaatgcggagcctcgtctgaagtgccctcaaagcctgtcatcaaaacacctctctcttttaactacacctgcacgtctctaaaggcagagcaagaagcatttccataacaaaaacacacagt

SEQ ID NO: 21378 - DNA, 600 bp, Chicken  19866894232751_1
ttccaacccattttaattcattgtagttatctaattactaattaataacatattctgctttgatggcctttgtcttatcttagcattacaagcatggatgaatcttgcagtaatcccacaagacatgactgcattggtggcttacatagtaaggatcggatcatgtagcacaactggaagtcacctcaaatgcagttatgaggcaatattctctgatagcaagctggcagtaagagctgcaaaataaggtgaaaactgttgtaatccagaatgattattattctatgattctatgattcyatytggggacatggtttagtgggcatggtggtgatgaattgatggatggacttgatggtctcagagttcttttccaaccttaacagctctctgtttctttgattctataatatgactctatgaatggagaagtaagatttagtatcagaacttggactgagcatgtgttgggctgggtgtggcagagaacatcaattcattttaatcttttcgtgtttttatcttttcttataaatgaaatgaattaatggattagatatacatataataactggattattgggggaggagggacttgag

SEQ ID NO: 21379 - DNA, 600 bp, Chicken  19866894232751_2
caacccattttaattcattgtagttatctaattactaattaataacatattctgctttgatggcctttgtcttatcttagcattacaagcatggatgaatcttgcagtaatcccacaagacatgactgcattggtggcttacatagtaaggatcggatcatgtagcacaactggaagtcacctcaaatgcagttatgaggcaatattctctgatagcaagctggcagtaagagctgcaaaataaggtgaaaactgttgtaatccagaatgattattattctatgattctatgattcyatytggggacatggtttagtgggcatggtggtgatgaattgatggatggacttgatggtctcagagttcttttccaaccttaacagctctctgtttctttgattctataatatgactctatgaatggagaagtaagatttagtatcagaacttggactgagcatgtgttgggctgggtgtggcagagaacatcaattcattttaatcttttcgtgtttttatcttttcttataaatgaaatgaattaatggattagatatacatataataactggattattgggggaggagggacttgaggtg

SEQ ID NO: 21380 - DNA, 600 bp, Chicken  19866894232751_3
ggtgctggggttcaaatagtcgcgctgggcttgatgcagaaattgcactgcgctgctccatggcttgttctatgcatatgggaaaacatgattcatatctagccttaaaatctttggctctgtggaaagaaaagacattaacagtgttccaatagtcaagcaatcagagtagtttacaatgaggtgtacttgaaaaattaagaagggaaagagcccgaggatttcattagcatgccaagttggtctaatgttcctcatcagtgtctgcattgtgtttatcttatattttccttagagctrgtccactgtaggtgaaaatatgtgtaaaaaagtgcaaaatttccctcagcctgtacctgagtaattcttacattggwaattatccgttctcattttaactggcaagcagaagataaatacccagattatatgcaggtacatacaaaagctgaattaggttgatctgtaattgtcactccaatgatccctttagcacttttaaatatatgcattttctttcttcgcaatgtgaaatgatgtaaatatgagactcagtgggaattcatgtttatatgtgtatatacaacaaagaacagaact

SEQ ID NO: 21381 - DNA, 600 bp, Chicken  19866894232751_4
atgggaaaacatgattcatatctagccttaaaatctttggctctgtggaaagaaaagacattaacagtgttccaatagtcaagcaatcagagtagtttacaatgaggtgtacttgaaaaattaagaagggaaagagcccgaggatttcattagcatgccaagttggtctaatgttcctcatcagtgtctgcattgtgtttatcttatattttccttagagctrgtccactgtaggtgaaaatatgtgtaaaaaagtgcaaaatttccctcagcctgtacctgagtaattcttacattggwaattatccgttctcattttaactggcaagcagaagataaatacccagattatatgcaggtacatacaaaagctgaattaggttgatctgtaattgtcactccaatgatccctttagcacttttaaatatatgcattttctttcttcgcaatgtgaaatgatgtaaatatgagactcagtgggaattcatgtttatatgtgtatatacaacaaagaacagaacttatggaacaaacccaaataaaggcacactttaaaaattgtatgcaagtatgcacctatgtaaaaaaatataattatg

SEQ ID NO: 21382 - DNA, 600 bp, Chicken  19866894232751_5
taattcttacattggwaattatccgttctcattttaactggcaagcagaagataaatacccagattatatgcaggtacatacaaaagctgaattaggttgatctgtaattgtcactccaatgatccctttagcacttttaaatatatgcattttctttcttcgcaatgtgaaatgatgtaaatatgagactcagtgggaattcatgtttatatgtgtatatacaacaaagaacagaacttatggaacaaacccaaataaaggcacactttaaaaattgtatgcaagtatgcacctatgtwaaaaaatataattatgcatgctggtcatttttagaaaccacttattttgcaaaatgactaaattctggttattttaattattagcaaaacaggagctaatattatatttattggtatagtgacacacttctttatacttgcttccaaaactgcagacaatattcctagagttaacattttcacagcttgaactgtgatgaatttatctgctgtgctacagctctcctcttcagcatctgcatctatgcagtcttttggactcctgtgacttcattttaaacaaccttgaccttcattaaa

SEQ ID NO: 21383 - DNA, 600 bp, Chicken  19866894232755_1
acagttcttaggcaccagaatcaagagatgatacaaactagaagaacaaatctggcaacacacactgcagcaggagtgcagcaccatcctcacagccatgttcccatttaggagagccaggtgatgttatcacttccagagacagcccagtaagaaagctgtatttctgctttcaatccacctctcgcatcctctttcctttacttcctttttaaccagaagacggtaaagttcagcatccctacacagggaaattttttgctgcactctcaaaagcacccttataagagagaatttaargcatcaccttaacatgacaacagtataacgtatttgcaaggtcttaggagccaagactgaatggtacagttgccttcctacagctgcaaataagaactgtgatttaaattctgtgctgtcttacctatgcttttatttgaagagcttcagcttctttgaaagcaaaaataaaacagctcaaaccccaaacctgtgcttttttcccccctgttctctctaaacagttrctaccatcttcaacaatatttagaattaccatcagactccatctagctaaagaacaaaggggtgaagcctatt

SEQ ID NO: 21384 - DNA, 600 bp, Chicken  19866894232755_2
aaagttcagcatccctacacagggaaattttttgctgcactctcaaaagcacccttataagagagaatttaargcatcaccttaacatgacaacagtataacgtatttgcaaggtcttaggagccaagactgaatggtacagttgccttcctacagctgcaaataagaactgtgatttaaattctgtgctgtcttacctatgcttttatttgaagagcttcagcttctttgaaagcaaaaataaaacagctcaaaccccaaacctgtgcttttttcccccctgttctctctaaacagttrctaccatcttcaacaatatttagaattaccatcagactccatctagctaaagaacaaaggggtgaagcctattttaagcagctttaattaacccattagcttttacccccttttcctgtctctttaatacatggttgatgcttttaaagttttgcatgggactacataagcttaagactgaaattaagagaattccaaacagtgctgagcaagctattcagtactctgctgtaacaagttactgcctttgactcaaatgattcagaaggatcaaagctacctctccactgaggtaaaagt

SEQ ID NO: 21385 - DNA, 600 bp, Chicken  19866894232759_1
atgaatccaacacaatttatgttcagggttgcaacttattagctgttacactgttttctatgtgctaattaactgagccagttgtagatctaatgtagtgcttgcagactgggaaggaggccagctgtggcaacccctttaatacgagcgtgtgttaatgtctttaatgttcttctgtccctgcagcattcatgctggcgacacagctgaaccccctcgtggaagaggaacgcttatcagcacactgtatttgccaggttaacagattcattgtcaacagcttgaaagatggaaggtacrcgcatttctttaagtgtggttctacacaaaggcagctgtgctaatggatgcgctgtcctgtgggactaagtgaaggccaaatctttttgattaggcatttctgaaaataataagtgcaggaaggaaagcacacagcgtaagcaattgcagaaagtaactcagtaattgaaggcctccaggtggaatactccaaattgtactgcttcgtttcaattcacttaaaaatacctgctgtggaaaagaagcagtgaaggttgcrtsgtgtgaaatctttgatcttttgtgagactttgagagaag

SEQ ID NO: 21386 - DNA, 600 bp, Chicken  19866894232759_2
taacagattcattgtcaacagcttgaaagatggaaggtacrcgcatttctttaagtgtggttctacacaaaggcagctgtgctaatggatgcgctgtcctgtgggactaagtgaaggccaaatctttttgattaggcatttctgaaaataataagtgcaggaaggaaagcacacagcgtaagcaattgcagaaagtaactcagtaattgaaggcctccaggtggaatactccaaattgtactgcttcgtttcaattcacttaaaaatacctgctgtggaaaagaagcagtgaaggttgcrtsgtgtgaaatctttgatcttttgtgagactttgagagaagtgaggtaggcactgtaaaacgagaagtgatctgagagaagtgattgtctaaaaatgatgtctgtgtgggagaacacgatctgaacttctgcatctggttttattccatgttttcgtgtaggaaatacagcttcttttgaggcagagtgtggattctcttaagaaatttggcatggttttaatgcttttaaagtgctattgtttcaaggcatttctgtgtgcccgttcagcctgctgtcagtgtccttggtgaaatgtga

SEQ ID NO: 21387 - DNA, 600 bp, Chicken  19866894232759_3
acagattcattgtcaacagcttgaaagatggaaggtacrcgcatttctttaagtgtggttctacacaaaggcagctgtgctaatggatgcgctgtcctgtgggactaagtgaaggccaaatctttttgattaggcatttctgaaaataataagtgcaggaaggaaagcacacagcgtaagcaattgcagaaagtaactcagtaattgaaggcctccaggtggaatactccaaattgtactgcttcgtttcaattcacttaaaaatacctgctgtggaaaagaagcagtgaaggttgcrtsgtgtgaaatctttgatcttttgtgagactttgagagaagtgaggtaggcactgtaaaacgagaagtgatctgagagaagtgattgtctaaaaatgatgtctgtgtgggagaacacgatctgaacttctgcatctggttttattccatgttttcgtgtaggaaatacagcttcttttgaggcagagtgtggattctcttaagaaatttggcatggttttaatgcttttaaagtgctattgtttcaaggcatttctgtgtgcccgttcagcctgctgtcagtgtccttggtgaaatgtgata

SEQ ID NO: 21388 - DNA, 600 bp, Chicken  19866894232759_4
tgtgggagaacacgatctgaacttctgcatctggttttattccatgttttcgtgtaggaaatacagcttcttttgaggcagagtgtggattctcttaagaaatttggcatggttttaatgcttttaaagtgctattgtttcaaggcatttctgtgtgcccgttcagcctgctgtcagtgtccttggtgaaatgtgatactttttcaagtctacttgtacaacatgagaaggttaagttgatagtgaagtgcttttgttttccatattcccttgtacaaagaatcagcccctagtggctgsttctcatatctgcacgagaaggattctcggagcctgatagacttagggaggcagtgagtctttattactgtctattttgtgtttgtaggagagtggttatactgatggatttagatgttctgaaaactgctgatatggttggtgggactgttggcaatccggtgccgtacaacgaaggtgagtatcctcaataaacaaaaacctcttgtgagcaggctgcctgttatcacactctttcagctatctgtttctttcttctcatttaaaaagaagcagccaagcatgtgcaactcccttatg

SEQ ID NO: 21389 - DNA, 600 bp, Chicken  19866894232761_1
gatggccgcggcgggcggcggaccccgccccttcgggagcgctcccccgggaggcggacggcgagaagggcggcgagggggcggcacgcggaacggccgggagccgtgaggaacgcgcgtgtaggtgtccgtgctgcccttccagctgagcgaccaaagcggcagaggggagatgtgagcgagccgctgttccgcacttgttttgttcggcgttgtgctgctggaaggagcgcggtgcggggatggaacgtggcagggagtgaccgtccgacagccgtaaccgctgcggcgtgcgtgcartgcagccctgtgttctcggccgtaacagacggagcgtgaacacggagcgatggcggcagaaagacggcacggctttgtgcttttagaagcaggcagaacgcttggccttaaggaggacggacgtgggaggcggcgcgcatctctgcccgcaccctttacaacgctccgtccatcagcagggaaggacagaaggcgctcagcctccccccgcgggtctgagggctgcgttggatgtgatctgctccacgatctgccgccgcttccctcgggacgccccccagcccggcagctctccgtacg

SEQ ID NO: 21390 - DNA, 599 bp, Chicken  19866894232763_1
  misc_feature (1)..(190): n is any nucleotide
nnnnnnnnnnnnnnnnnnnnnnnnnnnnnnnnnnnnnnnnnnnnnnnnnnnnnnnnnnnnnnnnnnnnnnnnnnnnnnnnnnnnnnnnnnnnnnnnnnnnnnnnnnnnnnnnnnnnnnnnnnnnnnnnnnnnnnnnnnnnnnnnnnnnnnnnnnnnnnnnnnnnnnnnnnnnnnnnnnnnnnnnnnnnnnacgtgattttaatagcattttagaatacagttgttaagtcaggggcagtgagatttttctaaaggaaaaaggagcacgggtctcaatggctttaaacagctcctgtctcygcatgtcgcttcttacactcggtggtgaaacgcattatcgagtagtgcccggaaagtggctaactgcgtttgacacacgccaactccctgcctccacactggataattgcattgtcaactgttcagcaaagtggcaggtgacactgcagccggattgattgtcctagcatggaggctccgaagactgtcagctacccaatcgatagagtttacacaaggcaccgtgactgcatctgtaactaatttcagtttggaagtggcggggtgcgccgggccctgtttcctggccggttgcaatc

SEQ ID NO: 21391 - DNA, 600 bp, Chicken  19866894232769_1
ttctctttcatgaactcgctggtttcctttttagctcctgtgaaccgcctgcatccactacacacagtagcaaagggccgctcagcacaacaatatgttgtgcagtttcatctgaaccttctatctgccaccatcatttgatgctgcttctgcactgggaagagacagcgaacaatctgtccccatgcataccctccacaacactcaagattactaaaacctctttcttttaagatctcttttcttctgggctgaggatgcctcgcttcttactcctaccatacatgaagctattctatsttgcagcgttggagtttaatgccagatattttattttttcctatgagaaaaaggagacgagaaaagcagaaggaatgctcaaacatttcatcaaattgccaaaaagcaaccaagcaagaaaatccttgacttttaagtgtttggattcaaagrttcamtattttacttagaccaagactgagatcgaacagttgctcaataccatccatcagtgtggcagagtagaagtcaaactacttcgaggatacagcttctagaagtcttctctacctatgtagcaatttcatcaaattccaaagc

SEQ ID NO: 21392 - DNA, 594 bp, Chicken  19866894232769_2
actgggaagagacagcgaacaatctgtccccatgcataccctccacaacactcaagattactaaaacctctttcttttaagatctcttttcttctgggctgaggatgcctcgcttcttactcctaccatacatgaagctattctatsttgcagcgttggagtttaatgccagatattttattttttcctatgagaaaaaggagacgagaaaagcagaaggaatgctcaaacatttcatcaaattgccaaaaagcaaccaagcaagaaaatccttgacttttaagtgtttggattcaaagrttcamtattttacttagaccaagactgagatcgaacagttgctcaataccatccatcagtgtggcagagtagaagtcaaactacttcgaggatacagcttctagaagtcttctctacctatgtagcaatttcatcaaattccaaagcatggttttgtttcacaagagtaatcaaatattttccatgtagtatccatcatctcttatcagccatatgagaatcaaagtgtgtgctgaaagcttctgagaaagactgctctcacaccttttttaacattataaacagtaaatggat

SEQ ID NO: 21393 - DNA, 589 bp, Chicken  19866894232769_3
gaagagacagcgaacaatctgtccccatgcataccctccacaacactcaagattactaaaacctctttcttttaagatctcttttcttctgggctgaggatgcctcgcttcttactcctaccatacatgaagctattctatsttgcagcgttggagtttaatgccagatattttattttttcctatgagaaaaaggagacgagaaaagcagaaggaatgctcaaacatttcatcaaattgccaaaaagcaaccaagcaagaaaatccttgacttttaagtgtttggattcaaagrttcamtattttacttagaccaagactgagatcgaacagttgctcaataccatccatcagtgtggcagagtagaagtcaaactacttcgaggatacagcttctagaagtcttctctacctatgtagcaatttcatcaaattccaaagcatggttttgtttcacaagagtaatcaaatattttccatgtagtatccatcatctcttatcagccatatgagaatcaaagtgtgtgctgaaagcttctgagaaagactgctctcacaccttttttaacattataaacagtaaatggat

SEQ ID NO: 21394 - DNA, 366 bp, Chicken  19866894232774_1
tgatctccgttgggtcccttccaacttgggatcttctatgattctcaaaacaagaagcagaagtagcaggttagttatagaggcacagcagttgactgtgagctgtgatcacgtggctcacacctcttttgacattttgcctccaaaaacaaaggtcctccaagaacctacatagcgcgggggcacgtgctgaataccagcaagttggagccacggcacgccggcagttccacttttcccgtggcacacgaagcgacgccgacccctcgccggtgcctcccacccatttgggacgcagcrcacgggcgaagcgtggggacgagaggacgtccagcccgggggctgcggggctgggagagccaccgc

SEQ ID NO: 21395 - DNA, 600 bp, Chicken  19866894232778_1
aaacacagttgaatctgcttaattgtcacagggatcacaatggaacatggtgtatctatgcaccctttgtgttggtagacagcatgtgccaaatctgccgctcatgtaaattggcgtagatttgttgaaccccgatgttcaggccctcaagttggggttttgtgtactggaaacactgtaacttcctttgccaatgtcaaacctttgtaagtagaaggaaagaatagcagaaatgaatgaggatttgcactctatttcatatatgcatgcctaagctttgcaggcactaacgcttctttytggacwctaaaatctagacatggaaagaaaatgatccagatatactacctaggtctgtcgtcgaccttgaagaagtatttctctatagtagattcccaacctgtaaaattaggatcatgttatcataccactgtgctgaggttgtccatgtatggacagcagtgccctgagatagatgttagagaaactaaactttttattatttttttttttttaattggaagttagactcagccatttttagccttcggagccacttatgtgcatggtcataatctttcatctggctcctatgactcc

SEQ ID NO: 21396 - DNA, 600 bp, Chicken  19866894232778_2
agttgaatctgcttaattgtcacagggatcacaatggaacatggtgtatctatgcaccctttgtgttggtagacagcatgtgccaaatctgccgctcatgtaaattggcgtagatttgttgaaccccgatgttcaggccctcaagttggggttttgtgtactggaaacactgtaacttcctttgccaatgtcaaacctttgtaagtagaaggaaagaatagcagaaatgaatgaggatttgcactctatttcatatatgcatgcctaagctttgcaggcactaacgcttctttytggacwctaaaatctagacatggaaagaaaatgatccagatatactacctaggtctgtcgtcgaccttgaagaagtatttctctatagtagattcccaacctgtaaaattaggatcatgttatcataccactgtgctgaggttgtccatgtatggacagcagtgccctgagatagatgttagagaaactaaactttttattatttttttttttttaattggaagttagactcagccatttttagccttcggagccacttatgtgcatggtcataatctttcatctggctcctatgactcctgtaag

SEQ ID NO: 21397 - DNA, 600 bp, Chicken  19866894232778_3
tagccttcggagccacttatgtgcatggtcataatctttcatctggctcctatgactcctgtaagagtttaatatgtaagggttaattctgaggatttgctatgaaaatgtatcctcagggagggactggccaattagttcttgctcatatgatacaatatttgcaacttcataacctttacttagcctttaatatggcttgaggaaaaaaaaaaaaaaagagcatggttggatctcagggaagatcctaaagtgcatacgtacgaagtaaattttaaaacgttatttgaacttagattytcaaattcatattcaggcacttaaggaagtgggaggattttcttcagtgctgaaaactgaaaatttactccagttcgatcttgtggggtaactcatttacttcagaaacccatcttattcatcagatatctaaatatggcttttaactctgattttcaagcatttatcttgtcctaacttttcagactgtgaaaaatataattttaaagacacacttccctacagtttctcagaactctttaattctcatctacctctctctgtaatgtctgtagatgatggtgactaggtggatttcac

SEQ ID NO: 21398 - DNA, 600 bp, Chicken  19866894232781_1
gcgctgatttgcagtatatgtatagtggcgcgattacggagctggcaagttgtttgatgcaacctaacaacacaaactcacttttgtgtaaacacatatttaaatacctagctaacagattattagcatcctgcttagtggtcaaaatatagaaatttttatgattgggaaataaattaccatttttttggagagtctagggcagtgcttatctattttatttgaatgatgtctaacaatacttgaagtacaagcaactgttctagacaccatccactcacttaatatttacttgcactrccccaaagcaattctaatgcataaaatgaawtacgggaggatagtatccaataactctctctcatattttgttacagttttgacattacatttttcatttatgactctcatatcgtacccagacaagaatcagctagtaatagtaggaatgcatccyaratagcaaaagaaggagcaaataataggaaaagattaattaagcacatggtaaagtgaatgaaaagtgttaaacgtaaatgaagaagttaattcaagacacgtctgtatagcaatgtctgtattcctgttcaacactaagct

SEQ ID NO: 21399 - DNA, 600 bp, Chicken  19866894232781_2
gattacggagctggcaagttgtttgatgcaacctaacaacacaaactcacttttgtgtaaacacatatttaaatacctagctaacagattattagcatcctgcttagtggtcaaaatatagaaatttttatgattgggaaataaattaccatttttttggagagtctagggcagtgcttatctattttatttgaatgatgtctaacaatacttgaagtacaagcaactgttctagacaccatccactcacttaatatttacttgcactrccccaaagcaattctaatgcataaaatgaawtacgggaggatagtatccaataactctctctcatattttgttacagttttgacattacatttttcatttatgactctcatatcgtacccagacaagaatcagctagtaatagtaggaatgcatccyaratagcaaaagaaggagcaaataataggaaaagattaattaagcacatggtaaagtgaatgaaaagtgttaaacgtaaatgaagaagttaattcaagacacgtctgtatagcaatgtctgtattcctgttcaacactaagcttttaagtaaacaaaaaaatgaatattaacta

SEQ ID NO: 21400 - DNA, 600 bp, Chicken  19866894232781_3
tttatgattgggaaataaattaccatttttttggagagtctagggcagtgcttatctattttatttgaatgatgtctaacaatacttgaagtacaagcaactgttctagacaccatccactcacttaatatttacttgcactrccccaaagcaattctaatgcataaaatgaawtacgggaggatagtatccaataactctctctcatattttgttacagttttgacattacatttttcatttatgactctcatatcgtacccagacaagaatcagctagtaatagtaggaatgcatccyaratagcaaaagaaggagcaaataataggaaaagattaattaagcacatggtaaagtgaatgaaaagtgttaaacgtaaatgaagaagttaattcaagacacgtctgtatagcaatgtctgtattcctgttcaacactaagcttttaagtaaacaaaaaaatgaatattaactatgcaagtggtataaattattactccttatctagtttaaactacgtatgagcaactgatgaagtgagaaaagaaaaatcagagaaaaggctacacaaaagcagatgcaatgtttatgaaaaactgaa

SEQ ID NO: 21401 - DNA, 600 bp, Chicken  19866894232781_4
tatgattgggaaataaattaccatttttttggagagtctagggcagtgcttatctattttatttgaatgatgtctaacaatacttgaagtacaagcaactgttctagacaccatccactcacttaatatttacttgcactrccccaaagcaattctaatgcataaaatgaawtacgggaggatagtatccaataactctctctcatattttgttacagttttgacattacatttttcatttatgactctcatatcgtacccagacaagaatcagctagtaatagtaggaatgcatccyaratagcaaaagaaggagcaaataataggaaaagattaattaagcacatggtaaagtgaatgaaaagtgttaaacgtaaatgaagaagttaattcaagacacgtctgtatagcaatgtctgtattcctgttcaacactaagcttttaagtaaacaaaaaaatgaatattaactatgcaagtggtataaattattactccttatctagtttaaactacgtatgagcaactgatgaagtgagaaaagaaaaatcagagaaaaggctacacaaaagcagatgcaatgtttatgaaaaactgaatt

SEQ ID NO: 21402 - DNA, 599 bp, Chicken  19866894232782_1
  misc_feature (1)..(128): n is any nucleotide
nnnnnnnnnnnnnnnnnnnnnnnnnnnnnnnnnnnnnnnnnnnnnnnnnnnnnnnnnnnnnnnnnnnnnnnnnnnnnnnnnnnnnnnnnnnnnnnnnnnnnnnnnnnnnnnnnnnnnnnnnnnnnnnnagaatgcttggtctgaaaacattcaatgttgcaaacacatggacagttttaaagtctggcaaatgaaacaaaagaagttggaagtattaagagcaatatggaatggaatgcatataggaagacatgaaatgaataaagcagatagcttataaaacaggagaaattacttaargataagaaagcagaaaactttcatgtctaataaagagtaaatcaaatacayttcttcaacaaaaaggcagttatccatagagatatcacaggtaaaattacaagaatgaaatgagacaatgaaatagaccacattattctgttgccaactatgtctcaaaatatagacacactgaggaatgtattcccatactgacgccttttgggaaagcaacctatgtaaataatacagatgaagtggtaaaaactcaaagtttcaatgtgtaatttcttgcttcaaaacatacacaagaggatgat

SEQ ID NO: 21403 - DNA, 599 bp, Chicken  19866894232782_2
  misc_feature (1)..(77): n is any nucleotide
nnnnnnnnnnnnnnnnnnnnnnnnnnnnnnnnnnnnnnnnnnnnnnnnnnnnnnnnnnnnnnnnnnnnnnnnnnnnnagaatgcttggtctgaaaacattcaatgttgcaaacacatggacagttttaaagtctggcaaatgaaacaaaagaagttggaagtattaagagcaatatggaatggaatgcatataggaagacatgaaatgaataaagcagatagcttataaaacaggagaaattacttaargataagaaagcagaaaactttcatgtctaataaagagtaaatcaaatacayttcttcaacaaaaaggcagttatccatagagatatcacaggtaaaattacaagaatgaaatgagacaatgaaatagaccacattattctgttgccaactatgtctcaaaatatagacacactgaggaatgtattcccatactgacgccttttgggaaagcaacctatgtaaataatacagatgaagtggtaaaaactcaaagtttcaatgtgtaatttcttgcttcaaaacatacacaagaggatgatatttgatggcacaacaggacaaaacctggctgcattctgcctaccagtcct

SEQ ID NO: 21404 - DNA, 600 bp, Chicken  19866894232793_1
agtgcccccagattagggtacaaaaggccatttgtgttctgtcatctaatttagtagcttgatgttgagtggcatcattttgaaatgaaattgaagttctgatttatacttaatttacatgtgtagatacagatttagacgtgttaatcttttttaaagtcttttcctataatggctgagttttaaatcattttcaatctttatagcatctgcatttcaacattttacacacataatattttataaaggatgtgcagctttatatttatagaaaagttcagtgcctagcttctcaactcracatgcaataagtagatagcatctgctgtagtatgataataattctgtccctgatccatctgacactactgacctttgtgacccagcatttcacagtttaattgacaaaatctttcacctttatcacagaatactttattttgcagttagacgcttcagaggggataccagtagcacccaactgtgggtatataccatagcctttcaagtcagctggcatcgtttcaatcatacacagtgaagaggaactctgagagggttatatagagtagaagggctaaaaggatgtgctcaacaatc

SEQ ID NO: 21405 - DNA, 600 bp, Chicken  19866894232800_1
taaatcacacttgtggctttttttctgctgaaggaaatatgtaacaaagtgaataagataagaattccttaagagaagaaagactgccatatcattctgtgactcctcagaatatttcattactaagtgcctttggtctgtgaagtttgtaagcactacatttgcagtgctaaggcttatccagctagtcgtggtttgcagcagcaggtttctcctcatttgctcttccaaagaacttctgaagatatcctaattcagactacacaccacttaaaccgtagtacaggacaaatcactacraatttgttctactgggtagcaatttcaactgaagctcatagtcaaacactatatacaaatgcaattattcagtacagtcaagggatgatgaccttatgatcaaactacataccaacagaaatatgctgtctctgaatctttagctagtgccacttctctatattgagataagtttatggtcgcagaaaagttgatctttacgcaatcctttctccactggtccagtgaaccgaacctaccttctggagcctgtaattatgggtcctaatgcttttcattctcaggcattctccagtgtcc

SEQ ID NO: 21406 - DNA, 600 bp, Chicken  19866894232803_1
ccaaatacttaggggagaagtcatagggaattatttcttctactatttaaggaataagacaaagagaaaaatcttattatttagaaaagaaagggagtataaccacatggaaaacttttggtcctgcagaattaaaactcttcaaagcttccagaatgacaaggttatcagaattgaaacgtgtatttaagaaatgacagctaggacgtagataagtagcaatttaccactcagattggtttcctgacgcaactgggcattcacaaaatgcagtggctaattttggcacttctgaattgrtgacagtttaaaaaaaaaaaaaaggcagatatacaattcagatggattatacttgtgaacattaaaaaagtacaaaaaaaggtgtgtatatatggggctggaaccctttacttgaatcctttcaacttctcatttaatgggataaagtcatttcatttaaagactccacacttggatttatgaatagggcagaaaaagagttaacagttgtagagataatgaaatgatattatagtatatacatgcagttgaagagcaattttaggcacttattaaaatattttttaaaccatagacagc

SEQ ID NO: 21407 - DNA, 600 bp, Chicken  19866894232805_1
ctccttacgatcgttgtgggcctttcacactaattaatctgggttcatggagaggtccttcttccttcaactgcatcattttgaaaatctctcttaagaagctgttgtttcaagtcatattttctctcatcactggtgagcagtgttctgtggcatggctatttttgtgttttatttgtgtgaagtatctcatatgtgcaaataactttacctgtgtgcagatgatgctctgcccattcaagtcggtgtgcgattctctggaagttgcttttgcctctccaatcataaatgtttagactkcatagaaagaagatgtcattatcatcatcaggcttctgtttcacatcagctgatgggagctggtataagtgtctcagttgcttcatgacgttaagggaaatctcttccagttgcacgtagatggaactcactacatctgcaatgttctcatctctcaatattttgttccctgtctgggaaatgctggagttagttagacaggctttagtgtgccctcacctgctaaaatgcctccacctggtaaacttttcagaactgggaataacagctactgagatcacgtggtacgaaagaggaaat

SEQ ID NO: 21408 - DNA, 600 bp, Chicken  19866894232805_2
gtgccctcacctgctaaaatgcctccacctggtaaacttttcagaactgggaataacagctactgagatcacgtggtacgaaagaggaaatgtttgtgttgatgtaggttctgagattgaaactgatgcagctatggggagcactgggtgatgtactgtacgcagcatatgcttggaaacacaaatgctctgtttgaaaaaccttactgtaatttgctttgatcaaaactgctccttggtgagtggatttgccttgcagatagttgaagttatggaaaaatgcctcacgtgtggctgttrtttataatattcgaaagctgaaacactttctaatgtctacagattttgctgaaacatacttctatcttctatatgttcaattttgcatttaatactttttgggctgtaggaagaactttgtgtgctaaaccaagagaatgctgagctgaagagagagattgagaagctcaaagaagagcttgcagaatgttgttcagcgctttcgcaggatggtaaggtaatgcttgcaatattttacaattattattttagaaggacacatttttggtcaattctaggctgtttggaatcatagaatgg

SEQ ID NO: 21409 - DNA, 600 bp, Chicken  19866894232805_3
gctcctagataacatgctagttttgaagataggtggcagaaatgcttttattgctctggctgttttgtcttggaggcaaacagtgttttccttttattttgaaacagtaacaaaaggggaaagagtcacatctgaaactccttgctatctattaaagtaggctttcctaaccagtgttttcatgagtaccttaacctatcctcattataaaatacttctgttttactgcaacagtaatatgcaaggcaatttattaacagattcaccattgctgtagaacaataatgtaagtgaaaataracwatagtgtgatgactctgatacttgcattttgcagattttacttagcaaaagtattctaattctacagacaggaacacctgtagacttcaactgaattttgcccctgtagggtcgagctcaagttcaaagttaatcaaaggagagaattgagaaaaactaaaataatgggcaaaaatcccaggaagagacatctgcagcaagtcaatatagttagcagttagacctctgctaccagctgtgacttcaatctgcttgactcttaacctttaaacatatatatacaaatggcacttctag

SEQ ID NO: 21410 - DNA, 600 bp, Chicken  19866894232805_4
cctagataacatgctagttttgaagataggtggcagaaatgcttttattgctctggctgttttgtcttggaggcaaacagtgttttccttttattttgaaacagtaacaaaaggggaaagagtcacatctgaaactccttgctatctattaaagtaggctttcctaaccagtgttttcatgagtaccttaacctatcctcattataaaatacttctgttttactgcaacagtaatatgcaaggcaatttattaacagattcaccattgctgtagaacaataatgtaagtgaaaataracwatagtgtgatgactctgatacttgcattttgcagattttacttagcaaaagtattctaattctacagacaggaacacctgtagacttcaactgaattttgcccctgtagggtcgagctcaagttcaaagttaatcaaaggagagaattgagaaaaactaaaataatgggcaaaaatcccaggaagagacatctgcagcaagtcaatatagttagcagttagacctctgctaccagctgtgacttcaatctgcttgactcttaacctttaaacatatatatacaaatggcacttctaggca

SEQ ID NO: 21411 - DNA, 600 bp, Chicken  19866894232805_5
aagttaatcaaaggagagaattgagaaaaactaaaataatgggcaaaaatcccaggaagagacatctgcagcaagtcaatatagttagcagttagacctctgctaccagctgtgacttcaatctgcttgactcttaacctttaaacatatatatacaaatggcacttctaggcaagactactatttattttcctgttatgaaataaattacctgaagtttgttctctatcttgattctaaaatattagattaaaaaaaaggtggcagaaatgaaagtggtgttcactaacatggaagacwcagagggtgactttccagatatgaatacccgctgcgttttttctgtaacaacaagaatcccattcaaactgaaccaaaaccacgcactgcttaccttggaagatgaagaaggtatgatgcatattttgagtacaaaattaatgtctctgatgtatttcattaccataatggctgactccattatgcatgtatattgcagatacagaggtggcgtctgatccattatttcagctaaaatctaacagtctcagaaggcattctggtagcaatgtgtttttacctgtggattttagaaataaa

SEQ ID NO: 21412 - DNA, 600 bp, Chicken  19866894232836_1
aagtgcaagtgctgtagttttgcagggccagctctcatctaaagagtcactcctgtgactctctcagttactctggtggtgcagtgaaacagctgcatgtacacagttggaagcagtggtggggttcttattgggtggcagctgagcctcccatttcctatgtctccagcctggtgagggtttcttaacgtgcccctctcttctcacccacagagctctgacaacatccctccaggctatgagcctatttccttgctggaagctctgaatggccttcgctctgtgtccccctccatcccrtcagctcctctgtatgatgaaatcaactactctggcatggtggatgggatgccccctgcaaaccgaccacatgttgggatggacagagccgtggagagcagccaccagaagggcaagcggagcaagtctccagataggtcagcatgggggcagaggggtctgctcctttgtaagccctgaggccttgtggccacgtgtactgcgtgctgaaagggtgctgtgtctctgggtggtgccatcactggtggcactgctagctcatcctcttaggaggccagtaggtactcatggcagtgagag

SEQ ID NO: 21413 - DNA, 600 bp, Chicken  19866894232840_1
aagctggactcagtggtccttacaggtcccttccaactcgggatattctatgattctttgatttggccttgtgagggtctctcctccaacattttcctgcctgtatataagcaccacaaacaatgacattcttactgtggtcactcacaagcttgactaaaaatcacatctattagaagctttattggtattccacctacattgctctccctgagctttatcacatcactcccagttacacacctcccgctacccttccgagcagctctcttcctgaagttcacacccttcaaattacakcaagacagccaggtttcccctcttaatcatcaattacccatgataaacacacttatctgctttaatctttcctcgtacctcagctcccctccagcaccctcatcactgttactctttgaactccttctgacttgcctgccgctgtgacagcgaggctggagttgagcacggggtttcgggtgggatctgatcaaagctgcaggctaattttgtcgttagcaagattaggtatgtgtggcaggaagctcgagttggttcattcatgtgtttgtttgcctgcacgtctcactgctcacggac

SEQ ID NO: 21414 - DNA, 600 bp, Chicken  19866894232842_1
cctgtaacgtgaaagttcacttggtgtcaagtattaggaatggaagagcgtaagcatttttcagtgtaaaatctttcttctgttggattatctttgacacttctcaacattgttttctaaagttttcattttaaaatctcttaaatggtttatattgacgagtttgagacaaccaaagcattcagaccgctggttaaaggaaggaaaggaaatttcttgtagttcaggaacagtcagtcttgattgtactatcagcttgaagtctatcagcttcagtgcaatgcagaagtaaaaaagaaytataccctgaattgatttggaccaggtgtaaaggtagagaagaaagtccccgggacccaaccactgtattcctgcatcctctcactctaccaatctgatcctctgtctcaactgtttttcccatggcaaagtggaaaaaatgggtggaaaaattgctcctagaattctctgcacctccacagtatttttcctgccatacaactgtatgtgaagtagagccagctgcatatatgttgtccttgtagcacaccatactaggaatttaaaagttcctgtcttcagcaagaagatatcaggttg

SEQ ID NO: 21415 - DNA, 600 bp, Chicken  19866894232848_1
gaggttatgtactcgactagtgaaaatttacattcctacggatgagagttttgctgactaaaaggccaactccactttagatgtttctgcggcaaagatctgtttgcgaaaacagaattatttgcagtgtttctgcacaggtaaggtaaacatgatagaacttgaaaaactacatgatttttttctgtgtggatgcctcagtggtgacattaaggcttcaccaacagccaggaaaagcatcctttggaagtccctccatgcaaaaactgatcctaagcctcacgaaagaagcacgttgcytwatttattgctacgataggatgatagatgtacttgaagcaaaaccaaagcagtgtgcttcactagaaacggagaacactggaaacatttctcccagatttgatgtttatatcagcactccattgtgatattattccaccacastgtgacattgatctatataagactgttagacatagagctctgcttttcataaaattagaatgatatttaatgaacgtgcttmatttactacacagataagtggaatacacgttttagtataacacagagaaaytgaggatttaaataatttgtttc

SEQ ID NO: 21416 - DNA, 600 bp, Chicken  19866894232848_2
ggttatgtactcgactagtgaaaatttacattcctacggatgagagttttgctgactaaaaggccaactccactttagatgtttctgcggcaaagatctgtttgcgaaaacagaattatttgcagtgtttctgcacaggtaaggtaaacatgatagaacttgaaaaactacatgatttttttctgtgtggatgcctcagtggtgacattaaggcttcaccaacagccaggaaaagcatcctttggaagtccctccatgcaaaaactgatcctaagcctcacgaaagaagcacgttgcytwatttattgctacgataggatgatagatgtacttgaagcaaaaccaaagcagtgtgcttcactagaaacggagaacactggaaacatttctcccagatttgatgtttatatcagcactccattgtgatattattccaccacastgtgacattgatctatataagactgttagacatagagctctgcttttcataaaattagaatgatatttaatgaacgtgcttmatttactacacagataagtggaatacacgttttagtataacacagagaaaytgaggatttaaataatttgtttcac

SEQ ID NO: 21417 - DNA, 600 bp, Chicken  19866894232848_3
ggtaaacatgatagaacttgaaaaactacatgatttttttctgtgtggatgcctcagtggtgacattaaggcttcaccaacagccaggaaaagcatcctttggaagtccctccatgcaaaaactgatcctaagcctcacgaaagaagcacgttgcytwatttattgctacgataggatgatagatgtacttgaagcaaaaccaaagcagtgtgcttcactagaaacggagaacactggaaacatttctcccagatttgatgtttatatcagcactccattgtgatattattccaccacastgtgacattgatctatataagactgttagacatagagctctgcttttcataaaattagaatgatatttaatgaacgtgcttmatttactacacagataagtggaatacacgttttagtataacacagagaaaytgaggatttaaataatttgtttcacaatatccrcttggttaaatacacacacatttatggctgagcctgcacgatgtctttttagcttctgttaaagcagcagtcccacttttgatatgagttcctattctacatcagtagtgattatttttactgctactaatgga

SEQ ID NO: 21418 - DNA, 600 bp, Chicken  19866894232848_4
gccaggaaaagcatcctttggaagtccctccatgcaaaaactgatcctaagcctcacgaaagaagcacgttgcytwatttattgctacgataggatgatagatgtacttgaagcaaaaccaaagcagtgtgcttcactagaaacggagaacactggaaacatttctcccagatttgatgtttatatcagcactccattgtgatattattccaccacastgtgacattgatctatataagactgttagacatagagctctgcttttcataaaattagaatgatatttaatgaacgtgcttmatttactacacagataagtggaatacacgttttagtataacacagagaaaytgaggatttaaataatttgtttcacaatatccrcttggttaaatacacacacatttatggctgagcctgcacgatgtctttttagcttctgttaaagcagcagtcccacttttgatatgagttcctattctacatcagtagtgattatttttactgctactaatggatttaagtttttgtttttggtgaggtatcagtgagtaataaataactgatcgtgtatgtctcaaagctcttccttcttgttaa

SEQ ID NO: 21419 - DNA, 600 bp, Chicken  19866894232848_5
cctcacgaaagaagcacgttgcytwatttattgctacgataggatgatagatgtacttgaagcaaaaccaaagcagtgtgcttcactagaaacggagaacactggaaacatttctcccagatttgatgtttatatcagcactccattgtgatattattccaccacastgtgacattgatctatataagactgttagacatagagctctgcttttcataaaattagaatgatatttaatgaacgtgcttmatttactacacagataagtggaatacacgttttagtataacacagagaaaytgaggatttaaataatttgtttcacaatatccrcttggttaaatacacacacatttatggctgagcctgcacgatgtctttttagcttctgttaaagcagcagtcccacttttgatatgagttcctattctacatcagtagtgattatttttactgctactaatggatttaagtttttgtttttggtgaggtatcagtgagtaataaataactgatcgtgtatgtctcaaagctcttccttcttgttaagcatgcatacacrccagcgtaatagagctgttctcagaaaacctgaaacac

SEQ ID NO: 21420 - DNA, 600 bp, Chicken  19866894232848_6
ctacgataggatgatagatgtacttgaagcaaaaccaaagcagtgtgcttcactagaaacggagaacactggaaacatttctcccagatttgatgtttatatcagcactccattgtgatattattccaccacastgtgacattgatctatataagactgttagacatagagctctgcttttcataaaattagaatgatatttaatgaacgtgcttmatttactacacagataagtggaatacacgttttagtataacacagagaaaytgaggatttaaataatttgtttcacaatatccrcttggttaaatacacacacatttatggctgagcctgcacgatgtctttttagcttctgttaaagcagcagtcccacttttgatatgagttcctattctacatcagtagtgattatttttactgctactaatggatttaagtttttgtttttggtgaggtatcagtgagtaataaataactgatcgtgtatgtctcaaagctcttccttcttgttaagcatgcatacacrccagcgtaatagagctgttctcagaaaacctgaaacactctagatttaagagcattttaagacttcacact

SEQ ID NO: 21421 - DNA, 517 bp, Chicken  19866894232848_7
ataagtggaatacacgttttagtataacacagagaaaytgaggatttaaataatttgtttcacaatatccrcttggttaaatacacacacatttatggctgagcctgcacgatgtctttttagcttctgttaaagcagcagtcccacttttgatatgagttcctattctacatcagtagtgattatttttactgctactaatggatttaagtttttgtttttggtgaggtatcagtgagtaataaataactgatcgtgtatgtctcaaagctcttccttcttgttaagcatgcatacacrccagcgtaatagagctgttctcagaaaacctgaaacactctagatttaagagcattttaagacttcacactctattttctgtcatggaaaaataaatgacattacatgcacgctcagagagaaacaacagtgggatggacacagctggagagcaccactagggagtccacattatatcagcacatgatgcagttacagctctgactgtgctgcatat

SEQ ID NO: 21422 - DNA, 600 bp, Chicken  19866894232850_1
tgagcagggctggccagcaagagaagctgagatgcatggccaggtggttttggggtctgttgtgcagggagagccacagcaaggtgtcgcaggagcaggacttacagggctacctaaagggcggaggagagcaaaagcaaaacctttctcctcattcattctattaatttattttgtttggttttctggctgccagtaactccaaaaatgaggtgtgtggggtgttcttcctcctctcatagctcccagaggctcctccaccccatgctgactcctccaggaattacaaactcattttgyccaagtctgaaatactctccaaaacctaaaatggccctaactctgcctccttaaaaatggatggaaacattttcctctattaccaaagagcagcttcgtgtcctcagccttccctctgggatgaaagatgctttgactctctgcagaacacagggagcccaggaactgagttttgctgwgaaagcaggaggttggaagggatgcccgtgctgtgttaggtgcaggaatgctgaggagattctcatgtaccaggagctgcattgccttatggccgggtggagcagacacttgactgcctgc

SEQ ID NO: 21423 - DNA, 600 bp, Chicken  19866894232850_2
ggttttctggctgccagtaactccaaaaatgaggtgtgtggggtgttcttcctcctctcatagctcccagaggctcctccaccccatgctgactcctccaggaattacaaactcattttgyccaagtctgaaatactctccaaaacctaaaatggccctaactctgcctccttaaaaatggatggaaacattttcctctattaccaaagagcagcttcgtgtcctcagccttccctctgggatgaaagatgctttgactctctgcagaacacagggagcccaggaactgagttttgctgwgaaagcaggaggttggaagggatgcccgtgctgtgttaggtgcaggaatgctgaggagattctcatgtaccaggagctgcattgccttatggccgggtggagcagacacttgactgcctgcttgtccaaacctccaacctaggtttatttttattattttatggctgcttggctcattctctcctttcttgctcattatccaygagctgtgccaggtaccagcctgccagtggtcaaaatctccatgcatgtggcagtgaggaggatggctgtaggacaggagctggacacccttcctga

SEQ ID NO: 21424 - DNA, 600 bp, Chicken  19866894232850_3
ccaaagagcagcttcgtgtcctcagccttccctctgggatgaaagatgctttgactctctgcagaacacagggagcccaggaactgagttttgctgwgaaagcaggaggttggaagggatgcccgtgctgtgttaggtgcaggaatgctgaggagattctcatgtaccaggagctgcattgccttatggccgggtggagcagacacttgactgcctgcttgtccaaacctccaacctaggtttatttttattattttatggctgcttggctcattctctcctttcttgctcattatccaygagctgtgccaggtaccagcctgccagtggtcaaaatctccatgcatgtggcagtgaggaggatggctgtaggacaggagctggacacccttcctgaagcacaggttccaagcctgcagctgctctccattgtcagagccctaatgcttccagctaggatggctgaccactgaacgtaggaggcattgagtgggcaaacagaggtgaatcacgatggcaatggggacatcctggctgagctgtacatcatggatgctcaaagtgtgtgagtgtatttgaggagcgctcaggatgagaagc

SEQ ID NO: 21425 - DNA, 600 bp, Chicken  19866894232853_1
tgctcttttggaagtcttgtcctgacaacctttttgcacttactgtgaaatacgtcccaactttcccctgggtgaagtgatagatgtgaggagggagctcttaagcacaactttcaaagcgctggcaaaccctctggctgcatctgaggctctcatgaagaggatttctgtgctacagttactacaacgggaaaaacaaaactctttgtgactgtctcataatttgtgtttcctgtgttactggatcaaatacagtcatctgtttggaagtttacttgtctgggtttaccccaaagcttwcttgggtattttgtggtagaacattacaattgttgatttgttggcttgcaaatctcagagatccttctcgatctgtttgttgtagtactgttggtactggggatacttgattgtctggatccagttgctggtctgagacttgactggatgcatgcttctgtcagcattygttaatctcaagctcttttgccatcttagggttgatttcagtgggtgttgtatcatgctcttagtcttccatatcttgtgaattagacatgtgacatttcrgcttatcctctcccctttagctaaagacta

SEQ ID NO: 21426 - DNA, 600 bp, Chicken  19866894232853_2
gtgctacagttactacaacgggaaaaacaaaactctttgtgactgtctcataatttgtgtttcctgtgttactggatcaaatacagtcatctgtttggaagtttacttgtctgggtttaccccaaagcttwcttgggtattttgtggtagaacattacaattgttgatttgttggcttgcaaatctcagagatccttctcgatctgtttgttgtagtactgttggtactggggatacttgattgtctggatccagttgctggtctgagacttgactggatgcatgcttctgtcagcattygttaatctcaagctcttttgccatcttagggttgatttcagtgggtgttgtatcatgctcttagtcttccatatcttgtgaattagacatgtgacatttcrgcttatcctctcccctttagctaaagactactgcattttaagctgtaatactcatacacagttttcttgtttactaaacattaatctttattcctgtaaaaagtagtcatgcttgcattttacayggcaccacttaccccaagtcttttacaaaactctttgtgcctcttaaacaaatacaaggtattttatatgtcaa

SEQ ID NO: 21427 - DNA, 600 bp, Chicken  19866894232853_3
tttacttgtctgggtttaccccaaagcttwcttgggtattttgtggtagaacattacaattgttgatttgttggcttgcaaatctcagagatccttctcgatctgtttgttgtagtactgttggtactggggatacttgattgtctggatccagttgctggtctgagacttgactggatgcatgcttctgtcagcattygttaatctcaagctcttttgccatcttagggttgatttcagtgggtgttgtatcatgctcttagtcttccatatcttgtgaattagacatgtgacatttcrgcttatcctctcccctttagctaaagactactgcattttaagctgtaatactcatacacagttttcttgtttactaaacattaatctttattcctgtaaaaagtagtcatgcttgcattttacayggcaccacttaccccaagtcttttacaaaactctttgtgcctcttaaacaaatacaaggtattttatatgtcaaacagtatttttcaacaggctttgaagaggaaaattgcagaataatgggggaattcaaattgctagtatgtatgaaacagtccttggagttggttaagtacc

SEQ ID NO: 21428 - DNA, 577 bp, Chicken  19866894232853_4
actggggatacttgattgtctggatccagttgctggtctgagacttgactggatgcatgcttctgtcagcattygttaatctcaagctcttttgccatcttagggttgatttcagtgggtgttgtatcatgctcttagtcttccatatcttgtgaattagacatgtgacatttcrgcttatcctctcccctttagctaaagactactgcattttaagctgtaatactcatacacagttttcttgtttactaaacattaatctttattcctgtaaaaagtagtcatgcttgcattttacayggcaccacttaccccaagtcttttacaaaactctttgtgcctcttaaacaaatacaaggtattttatatgtcaaacagtatttttcaacaggctttgaagaggaaaattgcagaataatgggggaattcaaattgctagtatgtatgaaacagtccttggagttggttaagtaccagacttttaactcacaaagtgaataaataggaggcaggttcagccagtggttggtttataccctgtatttttcctctgcatcattatttacctgacaatctg

SEQ ID NO: 21429 - DNA, 600 bp, Chicken  19866894232862_1
tcagtatctctatcattcattaagtataattttgcaagttacaacattaaaaattccaaaggtcattgtcaaatcagtggagagcatttttgcaactcttctttaagttttcctaattattttcatattatattcttaatatttaacatgacaacaccttgagaactttggagttctttgcttgcagtacactctactgtaataacgtgaatcactgtgatccaggttgtcttcataaaccagtttaatatctctgtgagagctgagaattgaaacttcaaaaatgttaatttcaattgyacaaaawttgacttttcctattgttcagatcctgcagtttagtaaaaagtaattctcttagtagtgtcactatcagaaatatraaggaatggtgatgtctgggtgaaagcctagaggaagacatggcatcataagttgatcatgctctgagcctctgcagtgaaaaataattcaaaaattatagcagcactcacaacaaacctttcagcagtacagatgaccactgtgtaactttgaactgaatttaattaatatgtgaaagtccccatttaaaagaattattcaatttttatagatgtt

SEQ ID NO: 21430 - DNA, 600 bp, Chicken  19866894232862_2
ctctatcattcattaagtataattttgcaagttacaacattaaaaattccaaaggtcattgtcaaatcagtggagagcatttttgcaactcttctttaagttttcctaattattttcatattatattcttaatatttaacatgacaacaccttgagaactttggagttctttgcttgcagtacactctactgtaataacgtgaatcactgtgatccaggttgtcttcataaaccagtttaatatctctgtgagagctgagaattgaaacttcaaaaatgttaatttcaattgyacaaaawttgacttttcctattgttcagatcctgcagtttagtaaaaagtaattctcttagtagtgtcactatcagaaatatraaggaatggtgatgtctgggtgaaagcctagaggaagacatggcatcataagttgatcatgctctgagcctctgcagtgaaaaataattcaaaaattatagcagcactcacaacaaacctttcagcagtacagatgaccactgtgtaactttgaactgaatttaattaatatgtgaaagtccccatttaaaagaattattcaatttttatagatgttggtctcc

SEQ ID NO: 21431 - DNA, 600 bp, Chicken  19866894232862_3
gcatttttgcaactcttctttaagttttcctaattattttcatattatattcttaatatttaacatgacaacaccttgagaactttggagttctttgcttgcagtacactctactgtaataacgtgaatcactgtgatccaggttgtcttcataaaccagtttaatatctctgtgagagctgagaattgaaacttcaaaaatgttaatttcaattgyacaaaawttgacttttcctattgttcagatcctgcagtttagtaaaaagtaattctcttagtagtgtcactatcagaaatatraaggaatggtgatgtctgggtgaaagcctagaggaagacatggcatcataagttgatcatgctctgagcctctgcagtgaaaaataattcaaaaattatagcagcactcacaacaaacctttcagcagtacagatgaccactgtgtaactttgaactgaatttaattaatatgtgaaagtccccatttaaaagaattattcaatttttatagatgttggtctcccactagctgttttttgaagcttctggtactcatcttctgaggcaggattttagtaatacctcagtctgctttataa

SEQ ID NO: 21432 - DNA, 600 bp, Chicken  19866894232862_4
cctgaatgttattaacaatttaccactggacttcttaacatagtacacactatgcttcattgcaaacactgcattatttacacacataagggattgtaggtgtcataatggtcatttacaaccaggaatcatttaagatatctctgaagttgttctctattcagataaaagacaacattaactctacctacccacattaggtgagcacatggttgattttggatcaccttttcctctgatttgtagtatcattccgagatattaagatccagcagatactaaaacaaaacttgtacttcyactaagtgtttctcttcaactaaagaaaatgttcccttgagaaattaaagggatgtggccttgtagataaaattctgttagcagttgataagaatccactgttcactggtgtttctagaaatgacagctgagtgttcagaatctttctttgaaaagagaggagtattcataataatggtgactgttagcaaagtggatgaaatttcaagtaaacagccatgctgctggaatatagtgagttacttgaagagaaaacaggttgttaatactacttattttactgaatagcagggacaccta

SEQ ID NO: 21433 - DNA, 600 bp, Chicken  19866894232863_1
ggaccattttgggttactttttttggtttgatgacctgtgtaagtatctcaccctcttcttgctgggatatcacatggcagcaggctgtgtaggctgatcatttagcaaacttatttttttttatttaagagctttgattttcctgtttttctgactgtttgaatagctttggagcttgaaatgaaggtgggaaggagtagagaggagtacccttccataaaattaatcattttgacttcccagtgcatctttctctatgtcttgaagcagggacaaagacagtaacgagacgttgtgcrtcattcaatgcaaattgcgtcaggcataattgctctttccctgttcttacaattaggtcatatggtgttggtgaatgcttccatactctgtgatggagctgtggctgtgactgcctgcaccagcctccagcaacacttgtatatgaggaaaatgtgttttatggtaagtgtagtgaggcactggaacccattgcccagagaggtggtggatgccctacccctggagacactcagggtcaggctggatggggctctgagcaacctcatctagctgtaggtgtccctgttcattgcagagga

SEQ ID NO: 21434 - DNA, 600 bp, Chicken  19866894232863_2
gtcatatggtgttggtgaatgcttccatactctgtgatggagctgtggctgtgactgcctgcaccagcctccagcaacacttgtatatgaggaaaatgtgttttatggtaagtgtagtgaggcactggaacccattgcccagagaggtggtggatgccctacccctggagacactcagggtcaggctggatggggctctgagcaacctcatctagctgtaggtgtccctgttcattgcagaggaattggaccagatggcctttgagagtcccttccaactcaaacaattctatggatctrtaaacaccaaggcacaccacagctggtacaattcttccagctcctccttggataacaggactgaaagggctgcccggagtgtctgtcattgcagagcaacaaaatcatagggtgtatcatcccccatgtgcagactaaattgcaaacattgattttggaaaacacttgtggaaatgaaaaattgtattgatgcccatgcaaatgtatgggctcttccagatagtaacagaatgaatytgttttctgaaaagtagtgaaaagtaaattcttaataggcaaaaggcaaaataaatttccttt

SEQ ID NO: 21435 - DNA, 600 bp, Chicken  19866894232863_3
cagaggaattggaccagatggcctttgagagtcccttccaactcaaacaattctatggatctrtaaacaccaaggcacaccacagctggtacaattcttccagctcctccttggataacaggactgaaagggctgcccggagtgtctgtcattgcagagcaacaaaatcatagggtgtatcatcccccatgtgcagactaaattgcaaacattgattttggaaaacacttgtggaaatgaaaaattgtattgatgcccatgcaaatgtatgggctcttccagatagtaacagaatgaatytgttttctgaaaagtagtgaaaagtaaattcttaataggcaaaaggcaaaataaatttcctttaaaatttaagagacttttcaagaggagaaaactatagcctacaaagagccttgtttaacactggaaatatgaacattggccatagctttgatagcagaagggttgtatatttaaatttccttgggtaaccaaacagaaaatttctaaacataagcagaagattgcaagctgaatatgttaaatttaaattatcagctagaggtgttatccacagctgatttgatgcttttatctatt

SEQ ID NO: 21436 - DNA, 600 bp, Chicken  19866894232864_1
atggaaaaatgcttgcagagaatcaggacagcacttctcagctgccccaagctctgtagctcatgccagcatgggatgccaaagcatctgtgggatgtctgggccagtcccaaatactttccccacagggctgacaccacagcaggaaattaagggatcctcaagtcagtctgatgagccagggaggagggctctctttcaggaagagcagaatggattttttccccaagactgttggatattctgctttttgaggcagggagtaaaacctttggaccagtttggccttttgtattgcayatatctttggaaaatgccacataatgtagggagggagacagaaggtccatgagcaaccctagagctgggatttgggtttgccaccttgctcttcccagccctcaagatggagcaagcaccttgcaaccccaaagcagaacagacatggtgtctgtctgtggttatttgcacagccagtgcttctgggggccattagtgcattgctacctatgacttccacgaggaaggagctgaactgaaagatatgtgcttatgtagaagtgctcctgataaacattgaccaatattgaccaatttatc

SEQ ID NO: 21437 - DNA, 600 bp, Chicken  19866894232868_1
tgagatggagaacagctgggaggtcatgccagggtgctctatggctttattcaaaacaccaatcctcctctttcagtgactttgcttttttagattaggcacgatgtgaaggatgactgtgtgtcttagtacagtattgattaaaggtgtgactgtactaatttactcaagtattcgcgagcttctgaatagctaggagatgccactcagaaaatgatggtgcacagctgttaagttcttcctagtgctggagtttattctagtctttgtataagaacagatattctcctttcaggtttrtgtgtctacccgtagtcacaatatagtaactttctgcctattgcttctgcaaactgttcrgcactttgacagaggagacgagcggagagcacttctaggggatgcttcagtagcaggtgcagaactctgtaaggtgatgggcattttggtgttwagtgtgctaaagtgcatgcatgctgtatgatactgaattctattcatgagataaaacttgcattgtgaatttctatgcgtttagttggatataagtgatatgagtagattcgtgctagagcacgtttcttttctaggcacttccaa

SEQ ID NO: 21438 - DNA, 600 bp, Chicken  19866894232868_2
aatcctcctctttcagtgactttgcttttttagattaggcacgatgtgaaggatgactgtgtgtcttagtacagtattgattaaaggtgtgactgtactaatttactcaagtattcgcgagcttctgaatagctaggagatgccactcagaaaatgatggtgcacagctgttaagttcttcctagtgctggagtttattctagtctttgtataagaacagatattctcctttcaggtttrtgtgtctacccgtagtcacaatatagtaactttctgcctattgcttctgcaaactgttcrgcactttgacagaggagacgagcggagagcacttctaggggatgcttcagtagcaggtgcagaactctgtaaggtgatgggcattttggtgttwagtgtgctaaagtgcatgcatgctgtatgatactgaattctattcatgagataaaacttgcattgtgaatttctatgcgtttagttggatataagtgatatgagtagattcgtgctagagcacgtttcttttctaggcacttccaatcttcagaaaaatctccctcttctttttaactctaaaatagagtgaacttgttttcaaca

SEQ ID NO: 21439 - DNA, 600 bp, Chicken  19866894232868_3
gtactaatttactcaagtattcgcgagcttctgaatagctaggagatgccactcagaaaatgatggtgcacagctgttaagttcttcctagtgctggagtttattctagtctttgtataagaacagatattctcctttcaggtttrtgtgtctacccgtagtcacaatatagtaactttctgcctattgcttctgcaaactgttcrgcactttgacagaggagacgagcggagagcacttctaggggatgcttcagtagcaggtgcagaactctgtaaggtgatgggcattttggtgttwagtgtgctaaagtgcatgcatgctgtatgatactgaattctattcatgagataaaacttgcattgtgaatttctatgcgtttagttggatataagtgatatgagtagattcgtgctagagcacgtttcttttctaggcacttccaatcttcagaaaaatctccctcttctttttaactctaaaatagagtgaacttgttttcaacacaacgtatttccaaggagtttcagctggccrtaagcatggrggggctgagataggtcaggttgtatatcttgtctgtgtaacctggggcttctg

SEQ ID NO: 21440 - DNA, 600 bp, Chicken  19866894232868_4
cttctaggggatgcttcagtagcaggtgcagaactctgtaaggtgatgggcattttggtgttwagtgtgctaaagtgcatgcatgctgtatgatactgaattctattcatgagataaaacttgcattgtgaatttctatgcgtttagttggatataagtgatatgagtagattcgtgctagagcacgtttcttttctaggcacttccaatcttcagaaaaatctccctcttctttttaactctaaaatagagtgaacttgttttcaacacaacgtatttccaaggagtttcagctggccrtaagcatggrggggctgagataggtcaggttgtatatcttgtctgtgtaacctggggcttctgcagttttgttacagtgcgctctttaaatattaagatatataacaaaaaggaakgatctgctacaaaaacggttatagtgatttgttgggtaatgctcatctataacattactttgctctgtatactgcaccacatgaggcatatgtactccaggatgtatatgaaaatgttttaatggggtaagggaagaaagcagattgacaactgcagtggttcacaggaatatgactagatgga

SEQ ID NO: 21441 - DNA, 600 bp, Chicken  19866894232868_5
atgcttcagtagcaggtgcagaactctgtaaggtgatgggcattttggtgttwagtgtgctaaagtgcatgcatgctgtatgatactgaattctattcatgagataaaacttgcattgtgaatttctatgcgtttagttggatataagtgatatgagtagattcgtgctagagcacgtttcttttctaggcacttccaatcttcagaaaaatctccctcttctttttaactctaaaatagagtgaacttgttttcaacacaacgtatttccaaggagtttcagctggccrtaagcatggrggggctgagataggtcaggttgtatatcttgtctgtgtaacctggggcttctgcagttttgttacagtgcgctctttaaatattaagatatataacaaaaaggaakgatctgctacaaaaacggttatagtgatttgttgggtaatgctcatctataacattactttgctctgtatactgcaccacatgaggcatatgtactccaggatgtatatgaaaatgttttaatggggtaagggaagaaagcagattgacaactgcagtggttcacaggaatatgactagatggagcatagttta

SEQ ID NO: 21442 - DNA, 530 bp, Chicken  19866894232868_6
aaacttgcattgtgaatttctatgcgtttagttggatataagtgatatgagtagattcgtgctagagcacgtttcttttctaggcacttccaatcttcagaaaaatctccctcttctttttaactctaaaatagagtgaacttgttttcaacacaacgtatttccaaggagtttcagctggccrtaagcatggrggggctgagataggtcaggttgtatatcttgtctgtgtaacctggggcttctgcagttttgttacagtgcgctctttaaatattaagatatataacaaaaaggaakgatctgctacaaaaacggttatagtgatttgttgggtaatgctcatctataacattactttgctctgtatactgcaccacatgaggcatatgtactccaggatgtatatgaaaatgttttaatggggtaagggaagaaagcagattgacaactgcagtggttcacaggaatatgactagatggagcatagtttaagaaactgggaccttttctgttttatgggacaattg

SEQ ID NO: 21443 - DNA, 600 bp, Chicken  19866894232869_1
ttgtgatcagtggtgctattggtgtacaacagaggtcagcagtactggatctattgttatgatgccttcactaatgttgtggctggtggaaccaaagagcaccctcagcaagtctgcagacaatacaaaattgggagcagtacctgagggctgtgctgttttccagagggacttggacaggttggagatatggtctgatagtaacctaatgaagttaaacaggaagtgcagtgctgtctctttagagaaacagccccttgaacctatgtgctgaggtatgtgctgagaactgaccagccrcaaagcaactttgcagagaasatcctggtgatcccaacagcctcctgggctgttttaggaggagtgttgccaacaggtcaaggagatgatccttcctcactactcagcrctggtgaaacacttctagagtcctgtgtccaggtctgggyaccccagtacattagagacttgtgcatactgtagaatccagaartgggccacgaagatcattaaaagactggagcatctgttgtacaaggatctgggactgctcatcctggataatagaaggcttgggtgatcttaatgtttataactcct

SEQ ID NO: 21444 - DNA, 600 bp, Chicken  19866894232869_2
gtgtacaacagaggtcagcagtactggatctattgttatgatgccttcactaatgttgtggctggtggaaccaaagagcaccctcagcaagtctgcagacaatacaaaattgggagcagtacctgagggctgtgctgttttccagagggacttggacaggttggagatatggtctgatagtaacctaatgaagttaaacaggaagtgcagtgctgtctctttagagaaacagccccttgaacctatgtgctgaggtatgtgctgagaactgaccagccrcaaagcaactttgcagagaasatcctggtgatcccaacagcctcctgggctgttttaggaggagtgttgccaacaggtcaaggagatgatccttcctcactactcagcrctggtgaaacacttctagagtcctgtgtccaggtctgggyaccccagtacattagagacttgtgcatactgtagaatccagaartgggccacgaagatcattaaaagactggagcatctgttgtacaaggatctgggactgctcatcctggataatagaaggcttgggtgatcttaatgtttataactcctgctggaatggaatgagaaaga

SEQ ID NO: 21445 - DNA, 600 bp, Chicken  19866894232869_3
aagtctgcagacaatacaaaattgggagcagtacctgagggctgtgctgttttccagagggacttggacaggttggagatatggtctgatagtaacctaatgaagttaaacaggaagtgcagtgctgtctctttagagaaacagccccttgaacctatgtgctgaggtatgtgctgagaactgaccagccrcaaagcaactttgcagagaasatcctggtgatcccaacagcctcctgggctgttttaggaggagtgttgccaacaggtcaaggagatgatccttcctcactactcagcrctggtgaaacacttctagagtcctgtgtccaggtctgggyaccccagtacattagagacttgtgcatactgtagaatccagaartgggccacgaagatcattaaaagactggagcatctgttgtacaaggatctgggactgctcatcctggataatagaaggcttgggtgatcttaatgtttataactcctgctggaatggaatgagaaagaggaagacagaccctgttcagtagtactagtgacaggacaagatgcagtgaacacaaattgaaatacaggaaatttcaatttaaaatat

SEQ ID NO: 21446 - DNA, 600 bp, Chicken  19866894232869_4
gctgtgctgttttccagagggacttggacaggttggagatatggtctgatagtaacctaatgaagttaaacaggaagtgcagtgctgtctctttagagaaacagccccttgaacctatgtgctgaggtatgtgctgagaactgaccagccrcaaagcaactttgcagagaasatcctggtgatcccaacagcctcctgggctgttttaggaggagtgttgccaacaggtcaaggagatgatccttcctcactactcagcrctggtgaaacacttctagagtcctgtgtccaggtctgggyaccccagtacattagagacttgtgcatactgtagaatccagaartgggccacgaagatcattaaaagactggagcatctgttgtacaaggatctgggactgctcatcctggataatagaaggcttgggtgatcttaatgtttataactcctgctggaatggaatgagaaagaggaagacagaccctgttcagtagtactagtgacaggacaagatgcagtgaacacaaattgaaatacaggaaatttcaatttaaaatatgaaaaagcctttttactatggagatatcaaacacaggcac

SEQ ID NO: 21447 - DNA, 600 bp, Chicken  19866894232869_5
tctgatagtaacctaatgaagttaaacaggaagtgcagtgctgtctctttagagaaacagccccttgaacctatgtgctgaggtatgtgctgagaactgaccagccrcaaagcaactttgcagagaasatcctggtgatcccaacagcctcctgggctgttttaggaggagtgttgccaacaggtcaaggagatgatccttcctcactactcagcrctggtgaaacacttctagagtcctgtgtccaggtctgggyaccccagtacattagagacttgtgcatactgtagaatccagaartgggccacgaagatcattaaaagactggagcatctgttgtacaaggatctgggactgctcatcctggataatagaaggcttgggtgatcttaatgtttataactcctgctggaatggaatgagaaagaggaagacagaccctgttcagtagtactagtgacaggacaagatgcagtgaacacaaattgaaatacaggaaatttcaatttaaaatatgaaaaagcctttttactatggagatatcaaacacaggcacggtttgccctgatagcatgtgaagtcttcagacttagagacatt

SEQ ID NO: 21448 - DNA, 377 bp, Chicken  19866894232871_1
aagagctaaattcaagtttaattttaacaggtgtgaattcacagtaggtctattgacacacactataaattaaatcagaaccttgtccttagctaaatctttcctggggtttgaatagctacagcgttcacaaagctgcatttgtcatactgcatcagcaatttcaacatttcttttactagttaagcatctttactcccttagcaaatactgttaagatactgaacccaaagtgcaaattgctgaggtgatttgccccacagtgacagaaatcgaactgaaaaatcctcagatttaggmaaagtcaaaattctattaaatgggccacagcttccaaggtataaaacaaatacttaagtgaattacacaatattaca

SEQ ID NO: 21449 - DNA, 600 bp, Chicken  19866894232872_1
cgatgatgctatatgtgatatttcatactgatagaggaatgttgttataaagactcttcctttcaaaattccctagccctagctagggaggttactgcataaaccacattgcaatgtaatgcatacatgatgttctaatggcacagaataatgggactgaaaaaactcccagcttcaagagagccaagggctctaaaggcctgtccagaagcccattcacaaaaccacacattctgtcatgcaattgccctgctcctgtatgatttcttgctcttatggaagaatcataggctgtcacaytttttctttagcaagttgaatgacagtattgtctttgctgtactttacccttagagtaggccagatattttttattcttctatgtctagtattatctatttaaaaatatcaaatctatccttataatattattcctcccagttgacagaattaaacattttaaacagaggaaatgaaacttggtaaataagtacacagactgttcatttcgcactcaccttccagactggttaaggtcccttttattatttttcttaatctctctgctgtcagagattgagagcattatactgatgctca

SEQ ID NO: 21450 - DNA, 600 bp, Chicken  19866894232872_2
taaataagtacacagactgttcatttcgcactcaccttccagactggttaaggtcccttttattatttttcttaatctctctgctgtcagagattgagagcattatactgatgctcagaacatcatgtcttattctgtctgtgccctgaatctagccctgtatctatgtttattagaatcttcttaaatttattttaactatagactgggtttaaaaacaaacaagtggtcactgttgttaattggctttgtaaatgcttgtaaactagcaggtacaaattaagagaactatatgaaaaytgtcacacccagcacatattatgattcagtaggtaaagctcagaacagttaaaatcaaggctgactttaatattaaatctaattcaagtttttcatattcatttcaaaatgcaggcagtccataagccctccactgtctggttaagcagttagtttacaattgctttgcatcaagcactcagtacaaagtagtttggatacactagcaaatatatccctcttcatttctactcactgtttttcaaagaataatagaatggttgctgttcttttggtttctttaattccctatgtgggatg

SEQ ID NO: 21451 - DNA, 600 bp, Chicken  19866894232873_1
gtgcaggatgtcattgtggttggcagcttcccagacactgccctcttttgcttgcttaaaattgaactagaaccagtacagatattgacaggaaattttgtaactaaggacacttctaattgcgtagcaacataatgcaaatgaatatgaatataggcataaaatagtaagataatgtttaagagtgaatctgaataactcttgtggtagtgcaattcttctacaattggatgtagtactcttctatgaaatacacctttttcagtaaactaaattgtatgggtacaaaatctgtcaggrtaaggcagaatgactgtctgcacccattcacagtaacagtcattatgggcacctttggagcatttatcataaacacctgattttaagcatagtgggattcttagagtgacattcttgttgtccctgccttctccaagggaagatagctatgttgatttagaagacctacaatgagagtgaaacaggccggaatgcaaactgtgaaatctgaagccagttatttagtgaaggaattgtctttaggagctgtaagcagcccagagtaggtggagagccaagtgggcagttatgtctgctgct

SEQ ID NO: 21452 - DNA, 600 bp, Chicken  19866894232875_1
taggcacagacttgatatgtccttagagctgtccataaggagtcttttaaggcaggttgcaagtctgtaaacgagtatttgctgcccatactgtactgctgaagtccttgggagctacagcctgtgtataagcacgcctgccttgctaaggggctgcttgcagctactgtacatctaaagagcttatgcacctcactgaaataccaataaatgcttgctgagcaacatagcagggagatgcctttgggtttgttacagttccatatcctttcacacttcaattaacattacctggcctcrctcttgttcctctttctgttctatgctttcagtgccatccccactggtcaagaggtgtaccctgggwtcagcctgcagctgttctatgttcacctcagctgtgtccctgcctccctgtcggcacaaactgatttttctctgaggctccttttttttcctctgaaatatgtttaatttgccagctgagttacctgctgatggaaggggaggagaaaagtggtagcaattaataatcctggttccttagctggtagttgggctaaaggcaaccaaatgcagctatcatttccttcttcctct

SEQ ID NO: 21453 - DNA, 600 bp, Chicken  19866894232875_2
taaacgagtatttgctgcccatactgtactgctgaagtccttgggagctacagcctgtgtataagcacgcctgccttgctaaggggctgcttgcagctactgtacatctaaagagcttatgcacctcactgaaataccaataaatgcttgctgagcaacatagcagggagatgcctttgggtttgttacagttccatatcctttcacacttcaattaacattacctggcctcrctcttgttcctctttctgttctatgctttcagtgccatccccactggtcaagaggtgtaccctgggwtcagcctgcagctgttctatgttcacctcagctgtgtccctgcctccctgtcggcacaaactgatttttctctgaggctccttttttttcctctgaaatatgtttaatttgccagctgagttacctgctgatggaaggggaggagaaaagtggtagcaattaataatcctggttccttagctggtagttgggctaaaggcaaccaaatgcagctatcatttccttcttcctctgcaggccactgggtgctaggtctgctgccttggcccaatgttaggcctctggtacatcagaactgtg

SEQ ID NO: 21454 - DNA, 555 bp, Chicken  19866894232875_3
tttttcctctgaaatatgtttaatttgccagctgagttacctgctgatggaaggggaggagaaaagtggtagcaattaataatcctggttccttagctggtagttgggctaaaggcaaccaaatgcagctatcatttccttcttcctctgcaggccactgggtgctaggtctgctgccttggcccaatgttaggcctctggtacatcagaactgtggtgtgtgtcagggacaacttcagaagcatccttctgactcactgcttcacatgctttgatctctattagcctcgagctggcatkcatgcaaacaaaattaaatacctctattaaaacaaaaagcctggcttgccattgtgctgactccatatatgtgattgccttgtgtgctgctgttctggctggattccagcgcagagagctgcacttatctccctaagttttcctttgtgaattcaggtagcgttctgtcccttcagagtggtgcaggacagaagcagagctgcagtctgcatttgcagcacttgctgtattcccaccatcagttaaataattgag

SEQ ID NO: 21455 - DNA, 599 bp, Chicken  19866894232878_1
  misc_feature (1)..(163): n is any nucleotide
nnnnnnnnnnnnnnnnnnnnnnnnnnnnnnnnnnnnnnnnnnnnnnnnnnnnnnnnnnnnnnnnnnnnnnnnnnnnnnnnnnnnnnnnnnnnnnnnnnnnnnnnnnnnnnnnnnnnnnnnnnnnnnnnnnnnnnnnnnnnnnnnnnnnnnnnnnnnnnnnnnnattgtttcatttactttccccaaagaaggggaatagtgaccccgtgaggactgtgaaaaatcccccccctgggagtagaggtgggggtaaaaggtttgatatcacacattctttattagaatataatctttatttcwgagtggtgcttttgcatcaggtgtggtgctgctgtcatacctttgggttgtttgtgtgttccccagaagatgtgtgctaccccagggtgggcagcctccccatctgagaaggctgagttaacgtgtgctgccagtgtttgccacacagaccctgcctctgtgatcagtgatgagcaaagctggtcactttaacattagaagtgtacattatttagggctgggtgggaggaggaaataagcacagcatcgtaatcaacgctgtgtccatagatgattgatgaccttcagtattaaattag

SEQ ID NO: 21456 - DNA, 600 bp, Chicken  19866894232878_2
cccatctgagaaggctgagttaacgtgtgctgccagtgtttgccacacagaccctgcctctgtgatcagtgatgagcaaagctggtcactttaacattagaagtgtacattatttagggctgggtgggaggaggaaataagcacagcatcgtaatcaacgctgtgtccatagatgattgatgaccttcagtattaaattagattatttggaatgcttgttatatgtcatcaagcagtatgttttgtccatgtaactggggttacattggctttgtcttttaacttttgctgtgggagtawmgggctttgctgatctcagggcttctgaagttcttcaggagagagaagttgagagatagctaatactcttaaaacaagtctcaatgccatcatatctttcataaagtgagcactggttttcctttgcttaatgaaatgtgtgtgagtgccttgtgcattcacaacagctgtttatggcagactgtgggtttgcatatatgtgaatattgttgacttgaatatgtctgggcaacctggaaaacatcactcctagcatatgtttctttgagcactggatggtcactcaccatcttgcagcag

SEQ ID NO: 21457 - DNA, 600 bp, Chicken  19866894232878_3
ccatctgagaaggctgagttaacgtgtgctgccagtgtttgccacacagaccctgcctctgtgatcagtgatgagcaaagctggtcactttaacattagaagtgtacattatttagggctgggtgggaggaggaaataagcacagcatcgtaatcaacgctgtgtccatagatgattgatgaccttcagtattaaattagattatttggaatgcttgttatatgtcatcaagcagtatgttttgtccatgtaactggggttacattggctttgtcttttaacttttgctgtgggagtawmgggctttgctgatctcagggcttctgaagttcttcaggagagagaagttgagagatagctaatactcttaaaacaagtctcaatgccatcatatctttcataaagtgagcactggttttcctttgcttaatgaaatgtgtgtgagtgccttgtgcattcacaacagctgtttatggcagactgtgggtttgcatatatgtgaatattgttgacttgaatatgtctgggcaacctggaaaacatcactcctagcatatgtttctttgagcactggatggtcactcaccatcttgcagcaga

SEQ ID NO: 21458 - DNA, 600 bp, Chicken  19866894232882_1
ttgggaggcaaatttttggccttgaaaccgcaagacatgaaatattttgctctccaaaactctggtgctgcttttggtgtgcaaggtgagcactgaaactaaggcaagacctttaaaagtgggattatggtggagttttattccagatttgttcctgctctattccttcctgtgcagggtacagcaagtatcagatcatgagatcaaggcctctgtactcaggaatctgtaaggcagtagagctctgtgtctagagcaggagcttattaccttgagatcatgcctgaatctcaatttctractctctgagaaccttgatacattgctagctattgaaattcaggcrctgcacgatgacgaaatacagtctgaatggaagcaacttgtgcaaygttctttttttgcggataagctgcattttgggcacaaaggaacaacgttgaggaatcaggtagatggcctggagcttagagtcaagttgcaggtcttgcgacaaggcagagggcaggtttgtaactagcaggcagataatgcttatgcttttgggggctgtgtgcttctgaggtttcacccagcaagggccaagcatagtgagataaa

SEQ ID NO: 21459 - DNA, 600 bp, Chicken  19866894232882_2
ttgctctccaaaactctggtgctgcttttggtgtgcaaggtgagcactgaaactaaggcaagacctttaaaagtgggattatggtggagttttattccagatttgttcctgctctattccttcctgtgcagggtacagcaagtatcagatcatgagatcaaggcctctgtactcaggaatctgtaaggcagtagagctctgtgtctagagcaggagcttattaccttgagatcatgcctgaatctcaatttctractctctgagaaccttgatacattgctagctattgaaattcaggcrctgcacgatgacgaaatacagtctgaatggaagcaacttgtgcaaygttctttttttgcggataagctgcattttgggcacaaaggaacaacgttgaggaatcaggtagatggcctggagcttagagtcaagttgcaggtcttgcgacaaggcagagggcaggtttgtaactagcaggcagataatgcttatgcttttgggggctgtgtgcttctgaggtttcacccagcaagggccaagcatagtgagataaatcaaatggtgctttcttccttttgaatctatgctctcttttagctc

SEQ ID NO: 21460 - DNA, 600 bp, Chicken  19866894232882_3
ctgaaactaaggcaagacctttaaaagtgggattatggtggagttttattccagatttgttcctgctctattccttcctgtgcagggtacagcaagtatcagatcatgagatcaaggcctctgtactcaggaatctgtaaggcagtagagctctgtgtctagagcaggagcttattaccttgagatcatgcctgaatctcaatttctractctctgagaaccttgatacattgctagctattgaaattcaggcrctgcacgatgacgaaatacagtctgaatggaagcaacttgtgcaaygttctttttttgcggataagctgcattttgggcacaaaggaacaacgttgaggaatcaggtagatggcctggagcttagagtcaagttgcaggtcttgcgacaaggcagagggcaggtttgtaactagcaggcagataatgcttatgcttttgggggctgtgtgcttctgaggtttcacccagcaagggccaagcatagtgagataaatcaaatggtgctttcttccttttgaatctatgctctcttttagctctgtcagtgggcttttggactgcttagttagtcccaagatctaatca

SEQ ID NO: 21461 - DNA, 600 bp, Chicken  19866894232883_1
tgtggggtgtctccaggtccatcgttccccatggatacgtgagcagagcgctggtggcagctccctgacgtccccgtggcaataggcagtttcttgaggcagatctggtgacacagagatccccttccggtgtccccattggctctgtgtgtccctgtgtgtgcgtgaccagagcgcaggcgtggctccccgatgtccccatggtgacgggcagaggtaaagggattcctgatgtccttattttggagatgctggggctcccgcaggcagctcgggtgacgtctgaagcccattccgacrtcctcaaggctactgctgccccgagcagcgcttccccgatgcccacagaacggacggagctatgggggatccacaacgtccgcatttcggagatcctggcatccctggaggcagctccggcgacagcaagcagccgtcccacgtccccaagcctacttgtgtccccgttggtgcgtgacgaggccggagcgctgccggaagcacttaccgcagcgcgggcacggatacggcttctccccggtgtgaatgcggcggtgggcggccaggtgagaggcgacggcgaaggctttgcccgcagtc

SEQ ID NO: 21462 - DNA, 600 bp, Chicken  19866894232884_1
atggcaagctgtttccaaagaagatgatgatctctctttagtctttgcaaactgctgcaatttttctctttctacttctgtgccctcagtaattaccttagcctacatctgctatcggggtgtatagccctggaagtagattaaattcgaggtctatgtagaaaataagatcataaccaccgactctaacaagcctcagagatggactgctactggatctgaatacttacagaaaaatttctactcacagactaactatgcttccaggtcacagaagcaggtactgcttttttggaagtrcagttctgctccaagcctctttcaatacagctgtgttctccttgaatggaggagtccttacaattccctcaattaactcccaatcctcttctgaactggcattcccttgctttgcattgccttccttgtttttttataaattctaaaatgccttgccataatcactttctactacttttatttaagtttgatttttgcaaattcatgtatcactgaattagtagtgagactatatatatataagcagttttacaaaggcactgaaaagaacatttcatcacaacacaatatactactgct

SEQ ID NO: 21463 - DNA, 600 bp, Chicken  19866894232886_1
ctgctgccagccttcctcacttctggaactgtcacggatttaagtgccaggattacaacttaacaccagctgagcaaatcaaggttaagcttgagtgaataaaaaattgtattatagaagttcagaccattaaaggggaaaaaaatggaatgaagaagattagggaggcagctaagaaaagcagcatttaaaagattaagctgggagggttgacttttttttccttaatgtaagctcaaaagattaagtccacgttattccaaaagacagtgattttgggtggcctggatgcctgccatrcccaactcatgctaccatggagagattctatttctgccacgcaccagcagccagggtcctttgggaacagaagcacaaagccattaarcaatcccctttgagcagcttggaagcaacatcagccttcctcaaccatgtggtcaccttcagagcatccccatcctcacgttgacagaatttagaaatgggtgcatatatacacacacatacaccagcaccttcagcatcccacccaaggcagccaacagaacagccttctctgaacatagagaaccaaaacaatgactgttttgaggctga

SEQ ID NO: 21464 - DNA, 600 bp, Chicken  19866894232886_2
gcttgagtgaataaaaaattgtattatagaagttcagaccattaaaggggaaaaaaatggaatgaagaagattagggaggcagctaagaaaagcagcatttaaaagattaagctgggagggttgacttttttttccttaatgtaagctcaaaagattaagtccacgttattccaaaagacagtgattttgggtggcctggatgcctgccatrcccaactcatgctaccatggagagattctatttctgccacgcaccagcagccagggtcctttgggaacagaagcacaaagccattaarcaatcccctttgagcagcttggaagcaacatcagccttcctcaaccatgtggtcaccttcagagcatccccatcctcacgttgacagaatttagaaatgggtgcatatatacacacacatacaccagcaccttcagcatcccacccaaggcagccaacagaacagccttctctgaacatagagaaccaaaacaatgactgttttgaggctgacttccctaaaatcaggattattacagctgggctgtgctccttaccatggaataagaccatcgatgagctcagggactgaatgctgatg

SEQ ID NO: 21465 - DNA, 599 bp, Chicken  19866894232890_1
  misc_feature (1)..(63): n is any nucleotide
nnnnnnnnnnnnnnnnnnnnnnnnnnnnnnnnnnnnnnnnnnnnnnnnnnnnnnnnnnnnnnnccgctgtaaggatgtttgaattcctctggtggctttggagcagttgtaaaggctgaccatgaatttcccaaagttgccagagtggagatacaaatcatcagtgacagcagagtctcttgggaaggtgtgtgtgtgtgtgcataaacacacacagggggctctggcaagtgtccgtggataattcccaccacactccggtgaactttgcgctgttcaccgcatgtcatagaaagaggsaattaacgttacttaacatttggctgtttttcccaggttagatgttgttgactcattttgtggctgcatatattctctgagaaggtcaaaggtttccaatcggctgaggcagaaacagaaacagattgctaagcyaacactgagcgtggaccttcttctgacttcccagtgttgctcctgcagcgtcccacagttctccttttcttctatcagttytgtttttaatgcagagcaccccagaactgcagagttcaaattgatcgtttctgaagtcactgatttacagcattacactgtaa

SEQ ID NO: 21466 - DNA, 600 bp, Chicken  19866894232890_2
gttgccagagtggagatacaaatcatcagtgacagcagagtctcttgggaaggtgtgtgtgtgtgtgcataaacacacacagggggctctggcaagtgtccgtggataattcccaccacactccggtgaactttgcgctgttcaccgcatgtcatagaaagaggsaattaacgttacttaacatttggctgtttttcccaggttagatgttgttgactcattttgtggctgcatatattctctgagaaggtcaaaggtttccaatcggctgaggcagaaacagaaacagattgctaagcyaacactgagcgtggaccttcttctgacttcccagtgttgctcctgcagcgtcccacagttctccttttcttctatcagttytgtttttaatgcagagcaccccagaactgcagagttcaaattgatcgtttctgaagtcactgatttacagcattacactgtaaaactttaatcaagattttaaatagaaaatgcataccttgggggtataaatgtgtcacaggtttcctaacaagttacrtgtgagaaatgttacactgatggggcaggcaacctgatggatgtgacagtgttgtcccc

SEQ ID NO: 21467 - DNA, 567 bp, Chicken  19866894232890_3
gggggctctggcaagtgtccgtggataattcccaccacactccggtgaactttgcgctgttcaccgcatgtcatagaaagaggsaattaacgttacttaacatttggctgtttttcccaggttagatgttgttgactcattttgtggctgcatatattctctgagaaggtcaaaggtttccaatcggctgaggcagaaacagaaacagattgctaagcyaacactgagcgtggaccttcttctgacttcccagtgttgctcctgcagcgtcccacagttctccttttcttctatcagttytgtttttaatgcagagcaccccagaactgcagagttcaaattgatcgtttctgaagtcactgatttacagcattacactgtaaaactttaatcaagattttaaatagaaaatgcataccttgggggtataaatgtgtcacaggtttcctaacaagttacrtgtgagaaatgttacactgatggggcaggcaacctgatggatgtgacagtgttgtcccctttatctatgctactaattcaatcactcaggttggacagctacaaaga

SEQ ID NO: 21468 - DNA, 407 bp, Chicken  19866894232890_4
ctgagaaggtcaaaggtttccaatcggctgaggcagaaacagaaacagattgctaagcyaacactgagcgtggaccttcttctgacttcccagtgttgctcctgcagcgtcccacagttctccttttcttctatcagttytgtttttaatgcagagcaccccagaactgcagagttcaaattgatcgtttctgaagtcactgatttacagcattacactgtaaaactttaatcaagattttaaatagaaaatgcataccttgggggtataaatgtgtcacaggtttcctaacaagttacrtgtgagaaatgttacactgatggggcaggcaacctgatggatgtgacagtgttgtcccctttatctatgctactaattcaatcactcaggttggacagctacaaaga

SEQ ID NO: 21469 - DNA, 600 bp, Chicken  19866894232891_1
aaatctctgcttagaaaaaagtatccttcacatgaatttccccttcccctacttcagcatgggccatcccagcgtcagccatgctccagcttcatttctcatggatcctgtgcctttgtgtggattagttactgagcctattaacctttagccctgtgacacagacgggtgacatgggtgggtgtgtactacaggccagctgatcagggggaggaagttgatgttctacaagcactggaagtagcctcacaatcctggccactggttcttatgggggacttcaatcatcctggtatctgytggattagcaacatggccaggcatgcatggtccaggaggttcctgcaatatgttaaagataactttctaacacaggtggtggagaagccaacaaggagaggtgagctgctggaccttgctcttactaacaagaaaggrctggtyggggatgtgaaagttgggaacagcttaggatgcagtaatcatgagatggtagagttcaggatcatgtgtagaagaagcactgtggacttcaggagagtcaacttcgacctcttaaagaacctacttggtgggctagagttcccatgggcttggagt

SEQ ID NO: 21470 - DNA, 550 bp, Chicken  19866894232891_2
tattaacctttagccctgtgacacagacgggtgacatgggtgggtgtgtactacaggccagctgatcagggggaggaagttgatgttctacaagcactggaagtagcctcacaatcctggccactggttcttatgggggacttcaatcatcctggtatctgytggattagcaacatggccaggcatgcatggtccaggaggttcctgcaatatgttaaagataactttctaacacaggtggtggagaagccaacaaggagaggtgagctgctggaccttgctcttactaacaagaaaggrctggtyggggatgtgaaagttgggaacagcttaggatgcagtaatcatgagatggtagagttcaggatcatgtgtagaagaagcactgtggacttcaggagagtcaacttcgacctcttaaagaacctacttggtgggctagagttcccatgggcttggagtgctggaaaggaaagggagcccaagtgaattggtcgacactcaaacaccacttcttccagctcaaaatcaatgtaaccctaacagtaag

SEQ ID NO: 21471 - DNA, 544 bp, Chicken  19866894232891_3
cctttagccctgtgacacagacgggtgacatgggtgggtgtgtactacaggccagctgatcagggggaggaagttgatgttctacaagcactggaagtagcctcacaatcctggccactggttcttatgggggacttcaatcatcctggtatctgytggattagcaacatggccaggcatgcatggtccaggaggttcctgcaatatgttaaagataactttctaacacaggtggtggagaagccaacaaggagaggtgagctgctggaccttgctcttactaacaagaaaggrctggtyggggatgtgaaagttgggaacagcttaggatgcagtaatcatgagatggtagagttcaggatcatgtgtagaagaagcactgtggacttcaggagagtcaacttcgacctcttaaagaacctacttggtgggctagagttcccatgggcttggagtgctggaaaggaaagggagcccaagtgaattggtcgacactcaaacaccacttcttccagctcaaaatcaatgtaaccctaacagtaag

SEQ ID NO: 21472 - DNA, 599 bp, Chicken  19866894232895_1
  misc_feature (1)..(150): n is any nucleotide
nnnnnnnnnnnnnnnnnnnnnnnnnnnnnnnnnnnnnnnnnnnnnnnnnnnnnnnnnnnnnnnnnnnnnnnnnnnnnnnnnnnnnnnnnnnnnnnnnnnnnnnnnnnnnnnnnnnnnnnnnnnnnnnnnnnnnnnnnnnnnnnnnnnnnntcttaatatggaaagtattgcttgcagtgtgtgataagatgcatttggtatcgtgaagatggtagaataatcctgttctaatgttgaccgtgacccagatctgagagttacagtttgctaagcaataatgtgagaaaataaagtgtcatycagacttytcagtgatttgaaactatgtaaagatgggaaagaagcttaaaatacatttcaatagtagaaagctaacaagctttgatagcgcctttgatgtgccatcgttcctgcaaacctgcttttgatgtcttatttcatgcagtaaagctgaagtaaatcttaataaaaattacaatatcagtaaaatatcctcctgtgactgtatatggaaaacccttcttgcaaaataatgagagctgaagarctgctgtgttccygaagatagagaaccatgagccttgagtggaaaattctag

SEQ ID NO: 21473 - DNA, 599 bp, Chicken  19866894232895_2
  misc_feature (1)..(142): n is any nucleotide
nnnnnnnnnnnnnnnnnnnnnnnnnnnnnnnnnnnnnnnnnnnnnnnnnnnnnnnnnnnnnnnnnnnnnnnnnnnnnnnnnnnnnnnnnnnnnnnnnnnnnnnnnnnnnnnnnnnnnnnnnnnnnnnnnnnnnnnnnnnnnntcttaatatggaaagtattgcttgcagtgtgtgataagatgcatttggtatcgtgaagatggtagaataatcctgttctaatgttgaccgtgacccagatctgagagttacagtttgctaagcaataatgtgagaaaataaagtgtcatycagacttytcagtgatttgaaactatgtaaagatgggaaagaagcttaaaatacatttcaatagtagaaagctaacaagctttgatagcgcctttgatgtgccatcgttcctgcaaacctgcttttgatgtcttatttcatgcagtaaagctgaagtaaatcttaataaaaattacaatatcagtaaaatatcctcctgtgactgtatatggaaaacccttcttgcaaaataatgagagctgaagarctgctgtgttccygaagatagagaaccatgagccttgagtggaaaattctagcacctttg

SEQ ID NO: 21474 - DNA, 600 bp, Chicken  19866894232895_3
gatctgagagttacagtttgctaagcaataatgtgagaaaataaagtgtcatycagacttytcagtgatttgaaactatgtaaagatgggaaagaagcttaaaatacatttcaatagtagaaagctaacaagctttgatagcgcctttgatgtgccatcgttcctgcaaacctgcttttgatgtcttatttcatgcagtaaagctgaagtaaatcttaataaaaattacaatatcagtaaaatatcctcctgtgactgtatatggaaaacccttcttgcaaaataatgagagctgaagarctgctgtgttccygaagatagagaaccatgagccttgagtggaaaattctagcacctttgtcagactaaasgctctgggagtaatgttggtgctgggcagactgtatttgctgaatcagaacaytggaccaattgtggctagctttgagcacttaggtggagcttgtttaatttctgtgcagtaacccttttctaggaaagtattgatgtacagtcaaaaactaagcagctctgggttagcgcccttagttgaaggcaaacatgtgcttaaacgccttgctggacttgagcccaaaggct

SEQ ID NO: 21475 - DNA, 600 bp, Chicken  19866894232895_4
cagtttgctaagcaataatgtgagaaaataaagtgtcatycagacttytcagtgatttgaaactatgtaaagatgggaaagaagcttaaaatacatttcaatagtagaaagctaacaagctttgatagcgcctttgatgtgccatcgttcctgcaaacctgcttttgatgtcttatttcatgcagtaaagctgaagtaaatcttaataaaaattacaatatcagtaaaatatcctcctgtgactgtatatggaaaacccttcttgcaaaataatgagagctgaagarctgctgtgttccygaagatagagaaccatgagccttgagtggaaaattctagcacctttgtcagactaaasgctctgggagtaatgttggtgctgggcagactgtatttgctgaatcagaacaytggaccaattgtggctagctttgagcacttaggtggagcttgtttaatttctgtgcagtaacccttttctaggaaagtattgatgtacagtcaaaaactaagcagctctgggttagcgcccttagttgaaggcaaacatgtgcttaaacgccttgctggacttgagcccaaaggctgagttcacagtta

SEQ ID NO: 21476 - DNA, 600 bp, Chicken  19866894232895_5
gaaactatgtaaagatgggaaagaagcttaaaatacatttcaatagtagaaagctaacaagctttgatagcgcctttgatgtgccatcgttcctgcaaacctgcttttgatgtcttatttcatgcagtaaagctgaagtaaatcttaataaaaattacaatatcagtaaaatatcctcctgtgactgtatatggaaaacccttcttgcaaaataatgagagctgaagarctgctgtgttccygaagatagagaaccatgagccttgagtggaaaattctagcacctttgtcagactaaasgctctgggagtaatgttggtgctgggcagactgtatttgctgaatcagaacaytggaccaattgtggctagctttgagcacttaggtggagcttgtttaatttctgtgcagtaacccttttctaggaaagtattgatgtacagtcaaaaactaagcagctctgggttagcgcccttagttgaaggcaaacatgtgcttaaacgccttgctggacttgagcccaaaggctgagttcacagttagggcttttccccattatttaaagggatcaaactgcaagtaacatctctacccagatta

SEQ ID NO: 21477 - DNA, 600 bp, Chicken  19866894232895_6
ctaacaagctttgatagcgcctttgatgtgccatcgttcctgcaaacctgcttttgatgtcttatttcatgcagtaaagctgaagtaaatcttaataaaaattacaatatcagtaaaatatcctcctgtgactgtatatggaaaacccttcttgcaaaataatgagagctgaagarctgctgtgttccygaagatagagaaccatgagccttgagtggaaaattctagcacctttgtcagactaaasgctctgggagtaatgttggtgctgggcagactgtatttgctgaatcagaacaytggaccaattgtggctagctttgagcacttaggtggagcttgtttaatttctgtgcagtaacccttttctaggaaagtattgatgtacagtcaaaaactaagcagctctgggttagcgcccttagttgaaggcaaacatgtgcttaaacgccttgctggacttgagcccaaaggctgagttcacagttagggcttttccccattatttaaagggatcaaactgcaagtaacatctctacccagattagaataattgctgtaagatttggtttaaaatacatgtattttttccttattagc

SEQ ID NO: 21478 - DNA, 600 bp, Chicken  19866894232898_1
ttaagttgttattgaaatacagctaagtatatagagacaattttttgtacctacactgtgacccacattcagtatgttcctggaagacagataacagtattacgtggtgaggaaccacttggaaacagctatttgtctgcttgcaacttctgccacagcaggagtggctactttactcctcagagctttctgatcaggtcctatgtcttctggctccccaagaagggattagatggatctccacactggctttgactgggatggagttaattttcttcatagtagtttgtatggtgttaygttctggattttttactaaagcagtgctgataactgaggtttagctactgctagctggccaagggtacacaaggcacaggaagggacacagccatgacagctgaccttgctgacctaagggttactctgtatcatgggacgtgatcagtaataaatgtgagtaaaagaaggaggaagggttaggagttatagcatttgtcctcacagataagcattatrcattataaagcctttcctggaaatgggtgaacatctgccagctgataggaaaaaatgaatgaattcctgattataatttac

SEQ ID NO: 21479 - DNA, 600 bp, Chicken  19866894232898_2
aagaagggattagatggatctccacactggctttgactgggatggagttaattttcttcatagtagtttgtatggtgttaygttctggattttttactaaagcagtgctgataactgaggtttagctactgctagctggccaagggtacacaaggcacaggaagggacacagccatgacagctgaccttgctgacctaagggttactctgtatcatgggacgtgatcagtaataaatgtgagtaaaagaaggaggaagggttaggagttatagcatttgtcctcacagataagcattatrcattataaagcctttcctggaaatgggtgaacatctgccagctgataggaaaaaatgaatgaattcctgattataatttacttgcatgcagctttttcttcacctattaaactcactttatctcagtacaccagctttctcacttttacctttccagttctctcttgctttcctcaaagatggcagtgagtgagtggctgtgtagaattaagcacgagtccagggagaggtcctctgaggcctggagggaaagatggatcaaagggctggtgactgcacaatgtaaggagacaggagagc

SEQ ID NO: 21480 - DNA, 586 bp, Chicken  19866894232898_3
cctctgaggcctggagggaaagatggatcaaagggctggtgactgcacaatgtaaggagacaggagagctggaatggagtattggtgaagggagtgggacagagattctcaccctacagcctcaaaccacctctagtctcccctgttctcttggctgctgtacctacatcattaatggacacaggagagaatgaaaaaatgagtcccagtgtggagtccacatccaggcttttactaccctgttgagtaccccagcgatttcagcagtgaattagggctctacttattccctcagaagarttccatygagcagtaatgcatgccccttttctagatcagacaatctcctggtaggtcagagatgtgagcttgagctgtcaggaacccaaatctctcaggcatgctctgaaacatcctactgaactcactataccacagtgcaatttgcaatgtgatcttccaatgctcagtatctagtttaggctgcagaagcaacctagctgcaattgtactaaactctgcacacgcttgctttgtctgtgctcttccgcagtctttactacccacatgactcataagttgagat

SEQ ID NO: 21481 - DNA, 579 bp, Chicken  19866894232898_4
ggcctggagggaaagatggatcaaagggctggtgactgcacaatgtaaggagacaggagagctggaatggagtattggtgaagggagtgggacagagattctcaccctacagcctcaaaccacctctagtctcccctgttctcttggctgctgtacctacatcattaatggacacaggagagaatgaaaaaatgagtcccagtgtggagtccacatccaggcttttactaccctgttgagtaccccagcgatttcagcagtgaattagggctctacttattccctcagaagarttccatygagcagtaatgcatgccccttttctagatcagacaatctcctggtaggtcagagatgtgagcttgagctgtcaggaacccaaatctctcaggcatgctctgaaacatcctactgaactcactataccacagtgcaatttgcaatgtgatcttccaatgctcagtatctagtttaggctgcagaagcaacctagctgcaattgtactaaactctgcacacgcttgctttgtctgtgctcttccgcagtctttactacccacatgactcataagttgagat

SEQ ID NO: 21482 - DNA, 600 bp, Chicken  19866894232899_1
ctgttctcttttgtttttagggtttaagtttacacaaggtaaacatctgcaatgtgtgcccggcgtttccttcctgcagggcgagacgcggctctgataaatcccactccctttggctgctccctgtctctgctccccgctgcagggcacagcccgcccctgtgccgctcccaccgctgctgtccttcatctgctgtgccaacctgtgcggtgctgcctgtgtgaggtaaaggacacgtgcccgtgggatgctcctggccgggggagctgcctgcagcctgtggacagcaaacggccgcrctgcacatctcacccttgggtccatttgcaggaggggggtgggagaggggccctgcagagctggacctgcgggcacccgctgggagctgggatggttctattttgtgatagaaaatggtgaaggaagacccaatccgtgggcagagacctgcgcacacgtggtgggatggggtctttttgtccttttgtaatgattttaaagcctccgagtgactggattgctgtatgtatgtgtcactttttatttttgaaagaattaatgtataaatagagtatcttaaaatataatgagggaaagat

SEQ ID NO: 21483 - DNA, 600 bp, Chicken  19866894232900_1
aaagctggaggggagcctacaaaataaaagcaaagtaaaataatattatgtggaaaaaacaaaagagaaattaacacgataaatgagaattggcatgcgttgcattggggccgtgcccactgccctgggcagcctgtgccatgcccaccgccctctggggcacagactccatttccttagctagattacttttcagtagtctatctagtagataactcagccttaaacctggagatttctaaatgcgttccaaccccctttgtcattgcccactattgtttgtttttcaccaattttgarttgtttataaactggttaccttctgatcagcaaagtaatgtttttccagttttagtttctgctgcaggcaaatactatctgagaaaagttagtttagtagccctctctgaagagggccacagcaagatgaatgaagttacagctattaattctcatctgtctcaaaatattctcctttttaacagtctgttcatttcattgtcttttctttaaggttaagaagatgttaaaacttgtggaattgaaccctttctttatttttcccccccctctaaaatcagttaattgtaaaaggcttgt

SEQ ID NO: 21484 - DNA, 599 bp, Chicken  19866894232903_1
  misc_feature (1)..(61): n is any nucleotide
nnnnnnnnnnnnnnnnnnnnnnnnnnnnnnnnnnnnnnnnnnnnnnnnnnnnnnnnnnnnngagaaatggtaggactggaaagacgcctgattatagggatctgcagattcagtcatctcagaaagcttatggtcgtgccagcatacatgagatttactttgtcctctggatttctatgccagtaaaagtcaggctgtcaacactatgtattcatcctttgctgggtaagcctctttccttttaacctaggcacagttgtattaccttctctaggcgatgttgtcaccctttgcctgctkctggcatgcagtgctggctaacactgccagggagtttcaaaggcagggaagatacacatgagcagacagtgacctgtttggcagcattagagcacattgcccttcagattacagatgaggaggctgcaatccatctgcagaggtatgccaaaaaatgcagttgccagttactggatgccacaaggtgtagatgttctggatgatgcacttgttacccaacaactcattatctcctttcaagatgcagtgctttgctcttgccctctttgaggttcargacacccttcctgaattatcct

SEQ ID NO: 21485 - DNA, 566 bp, Chicken  19866894232903_2
atgttgtcaccctttgcctgctkctggcatgcagtgctggctaacactgccagggagtttcaaaggcagggaagatacacatgagcagacagtgacctgtttggcagcattagagcacattgcccttcagattacagatgaggaggctgcaatccatctgcagaggtatgccaaaaaatgcagttgccagttactggatgccacaaggtgtagatgttctggatgatgcacttgttacccaacaactcattatctcctttcaagatgcagtgctttgctcttgccctctttgaggttcargacacccttcctgaattatcctggagaggaagagcaggcagcgtgattgcaggcaggttgggtttcgtgtccttgatggacaaacctcagcctctgtgtgtccctttataagccaaggtaaccagctcacttggtgtcattgttcttcccaactgcacggacgggcctggagcagaaggtcaggttgagctgtaacgcgtactttccttctaactaatgccgttgctgaaagaaatgttcccaaccgagtcacaaggtgttcttca

SEQ ID NO: 21486 - DNA, 600 bp, Chicken  19866894232909_1
tttggtccctaggagccagcgctaagaaacagggagaggacttagcggataatgacggggatgaagacgaaggtatttctgtgctcgaggctgccactgcatgacacgcaaagcaactccgtatgcccgccatccgctgccatccccagggagccccgtgtgtgtctgtctcggcgctgggcagctgcgcggggcggggggcaggggggccggctgtgcagggctcagcccccatcctctcctcctggggaagcttgtggggttgtgctgcaggagaagtttgctggctgccccgctccrctcgagcgagggccgggaggaagcatggcagcttgggagcagaggagccctcgggcacctgggcccatttcaccccgagcccggtcatattccacctccagcctcatccctccagacttagcgatgcacgacgggagcctgcactctcccctcccacctgatcccagtaagggacagaagcatggacacccgtgccaccgatctgtgcccggtcccagctgggtgtgctgcacccatttatttcccaatgcaaggtgttgcttgtgccactgcgtctgtgccagatgaggcagagtgagt

SEQ ID NO: 21487 - DNA, 540 bp, Chicken  19866894232913_1
taaaaaaaaagcagggagatttagttctgcatactacactacacggtaggattcagcaacatagaaactatgcaagtgtttccatatgttataatgcttatagtttaaaaaaaaaaatccttgaaatctctattgagagaagtttgcatgccctcaactagctccagggctagaaaagttacatacaatacatgcctaagacaaggcatcagtgtaacaagaaccacagagaaggtcatgattctttaccctacagtgagtccttaccctatactagttcttgggtaaggaaataacaaytgttacttttagagtgtgaatgtgaatcagaacactctatggctgatcatttacctttttaagtgcggtagggcgtttcagttttgaaatctctctctcttttcctcttttcacttttggagcagttgaatccaaaggattaaggcaacccatagatggctgcccctttgttaaagactttctgttggcagactctttggtatgaaagggagcagcactgccaactaaatacgagaaaga

SEQ ID NO: 21488 - DNA, 600 bp, Chicken  19866894232915_1
tgccatatgcaaaaaggacagtgtgttaaagaaagagaattgaatatgaatagaatgagttaaggcaaacagtcactttcagatgttttctactcatctggggcgaattaaattcaccttaggatgctcttaatagtcagaggcaacctagaagtgcagttcatagtggagtgaaaatgaaatgagctcataagcctccagaagacaaagtaacgtacaacaaccattatgattaagaacatataatgtctcagcaacctaaatttgtctgtaataataataataattacaatatatatrttatattatatttatatattatattatattgatctttacatatatgtataatataatatatataattatataattataattaataattattattatggaattagggagagggtacaagctgtgagtgtcatatagatacatactgacattaatattttgatactgcatttgataatatcttcgtaagccaacagtgaaatataaatctagtgaaaattcattatgtataatttctgcaaactctgttgttcaaaaattcatatttcctttattgtctacatggaaggatgtgtcaggtgt

SEQ ID NO: 21489 - DNA, 600 bp, Chicken  19866894232924_1
gctgaggccattgtggaacactgttaaaaagacaattgcagacaagacttgagtcgatgatgagaaatgaaattctctgtatataatggtgtgttagtgtgtcttttcttgccttcgggctgagctttaactttcaatataaaagagagttcccttctccagccataatcgagaaaagtcttgtttgcacagtcagaaggcaaattacagtttttgtagtctaattcttttccatgaaaaattttttactggcctaatccgttaactattctagacagacattttattgatagaaattayatttatttcaatatgactattcatgtaggacacagttataaaccaaagccttaaaatattgtgtgataagtgcatgcatcctgttcaatggcctcctgtttgttcccatatactacttggcagtacgtaggcgtaatttttgatctggtcacagatattaaggatttgaagtttacattgtgctaaatataatgcttcagggtttgatggtaatcagtgtttagtagatagaaaatctcttcaaaaatggcattgtatgtactctctcttctcctatccccacacttctactgagtgaat

SEQ ID NO: 21490 - DNA, 600 bp, Chicken  19866894232926_1
ccttttgggggatgtcatcccattttgagggacgttaatccgttttgggagatgtgagcccatttaggggggtataatcccattctgggggacgtgaacccattttgggggtgcgatcccatttaggggagggggcagcgtatgttttggaggagcgctcacccaattaagagcccattaattgattgtggaggaccagtaacccatttccggaccccgctgtccctttttttttggttcctttagtcttttttaaggtttatttcatccatttcagggttcctacggcccatttcagaymttttaacccattgtgggagccgttaaccgcttttaggctcccttaacctccttcagatcttcctttgaccctccttagggtccatttgaccccttctagggctccataaacccacttttaggccccctgaacccatttctggactccggcacgctttcaggctctctcatcccatctcatccctccctttcaccgctttaggcctcctttcacccacccgggtcaccgttaaccccctccaggacccccccgagcccgttctgggggctccctttaacccttttttgggggcgcaggta

SEQ ID NO: 21491 - DNA, 600 bp, Chicken  19866894232926_2
cttttgggggatgtcatcccattttgagggacgttaatccgttttgggagatgtgagcccatttaggggggtataatcccattctgggggacgtgaacccattttgggggtgcgatcccatttaggggagggggcagcgtatgttttggaggagcgctcacccaattaagagcccattaattgattgtggaggaccagtaacccatttccggaccccgctgtccctttttttttggttcctttagtcttttttaaggtttatttcatccatttcagggttcctacggcccatttcagaymttttaacccattgtgggagccgttaaccgcttttaggctcccttaacctccttcagatcttcctttgaccctccttagggtccatttgaccccttctagggctccataaacccacttttaggccccctgaacccatttctggactccggcacgctttcaggctctctcatcccatctcatccctccctttcaccgctttaggcctcctttcacccacccgggtcaccgttaaccccctccaggacccccccgagcccgttctgggggctccctttaacccttttttgggggcgcaggtac

SEQ ID NO: 21492 - DNA, 599 bp, Chicken  19866894232927_1
  misc_feature (1)..(226): n is any nucleotide
nnnnnnnnnnnnnnnnnnnnnnnnnnnnnnnnnnnnnnnnnnnnnnnnnnnnnnnnnnnnnnnnnnnnnnnnnnnnnnnnnnnnnnnnnnnnnnnnnnnnnnnnnnnnnnnnnnnnnnnnnnnnnnnnnnnnnnnnnnnnnnnnnnnnnnnnnnnnnnnnnnnnnnnnnnnnnnnnnnnnnnnnnnnnnnnnnnnnnnnnnnnnnnnnnnnnnnnnnnnnnnnnnnactttgcagtagtttgagagtggagtctgtgtgacaggagggaatgatttctaggctgaatctgtccaccaccyccctcgccctcagaaagatgtgatgcagtctgctttggtagatgtgaggcctcraatgcctgcrgtgcaggagctgctggagaaacagactacgaaataacacagctctgtgtcttatgtgcaacttaaggcaccattctgctatctcagctttctcagcttctgctccagagttgacacgcaaatctgtgcaagcaggagctctgctgycccccactgtcgctccccaccggcgaatgctggcagccattggatgtgctgtgctccctgcagatgtggctccagcagctgcagcttgg

SEQ ID NO: 21493 - DNA, 599 bp, Chicken  19866894232927_2
  misc_feature (1)..(172): n is any nucleotide
nnnnnnnnnnnnnnnnnnnnnnnnnnnnnnnnnnnnnnnnnnnnnnnnnnnnnnnnnnnnnnnnnnnnnnnnnnnnnnnnnnnnnnnnnnnnnnnnnnnnnnnnnnnnnnnnnnnnnnnnnnnnnnnnnnnnnnnnnnnnnnnnnnnnnnnnnnnnnnnnnnnnnnnnnnnnactttgcagtagtttgagagtggagtctgtgtgacaggagggaatgatttctaggctgaatctgtccaccaccyccctcgccctcagaaagatgtgatgcagtctgctttggtagatgtgaggcctcraatgcctgcrgtgcaggagctgctggagaaacagactacgaaataacacagctctgtgtcttatgtgcaacttaaggcaccattctgctatctcagctttctcagcttctgctccagagttgacacgcaaatctgtgcaagcaggagctctgctgycccccactgtcgctccccaccggcgaatgctggcagccattggatgtgctgtgctccctgcagatgtggctccagcagctgcagcttggagctgtgtcctcagatcaaggttttcacagacagcccatgtgttgaatgggctg

SEQ ID NO: 21494 - DNA, 599 bp, Chicken  19866894232927_3
  misc_feature (1)..(162): n is any nucleotide
nnnnnnnnnnnnnnnnnnnnnnnnnnnnnnnnnnnnnnnnnnnnnnnnnnnnnnnnnnnnnnnnnnnnnnnnnnnnnnnnnnnnnnnnnnnnnnnnnnnnnnnnnnnnnnnnnnnnnnnnnnnnnnnnnnnnnnnnnnnnnnnnnnnnnnnnnnnnnnnnnnactttgcagtagtttgagagtggagtctgtgtgacaggagggaatgatttctaggctgaatctgtccaccaccyccctcgccctcagaaagatgtgatgcagtctgctttggtagatgtgaggcctcraatgcctgcrgtgcaggagctgctggagaaacagactacgaaataacacagctctgtgtcttatgtgcaacttaaggcaccattctgctatctcagctttctcagcttctgctccagagttgacacgcaaatctgtgcaagcaggagctctgctgycccccactgtcgctccccaccggcgaatgctggcagccattggatgtgctgtgctccctgcagatgtggctccagcagctgcagcttggagctgtgtcctcagatcaaggttttcacagacagcccatgtgttgaatgggctgagttcttact

SEQ ID NO: 21495 - DNA, 599 bp, Chicken  19866894232927_4
  misc_feature (1)..(16): n is any nucleotide
nnnnnnnnnnnnnnnnactttgcagtagtttgagagtggagtctgtgtgacaggagggaatgatttctaggctgaatctgtccaccaccyccctcgccctcagaaagatgtgatgcagtctgctttggtagatgtgaggcctcraatgcctgcrgtgcaggagctgctggagaaacagactacgaaataacacagctctgtgtcttatgtgcaacttaaggcaccattctgctatctcagctttctcagcttctgctccagagttgacacgcaaatctgtgcaagcaggagctctgctgycccccactgtcgctccccaccggcgaatgctggcagccattggatgtgctgtgctccctgcagatgtggctccagcagctgcagcttggagctgtgtcctcagatcaaggttttcacagacagcccatgtgttgaatgggctgagttcttactgctctgtctaatcttaccyctgcaaaagagaagctgaagttggaactgrtgcaactcgaaccacgtgtacgtcagttttytcgggctccagccctgccatcccggcagcggggaatccctccggctcggctttataaagtagataa

SEQ ID NO: 21496 - DNA, 600 bp, Chicken  19866894232927_5
aaacagactacgaaataacacagctctgtgtcttatgtgcaacttaaggcaccattctgctatctcagctttctcagcttctgctccagagttgacacgcaaatctgtgcaagcaggagctctgctgycccccactgtcgctccccaccggcgaatgctggcagccattggatgtgctgtgctccctgcagatgtggctccagcagctgcagcttggagctgtgtcctcagatcaaggttttcacagacagcccatgtgttgaatgggctgagttcttactgctctgtctaatcttaccyctgcaaaagagaagctgaagttggaactgrtgcaactcgaaccacgtgtacgtcagttttytcgggctccagccctgccatcccggcagcggggaatccctccggctcggctttataaagtagataacagcgccctctgctgtccgcacgctgtaagagcaccccgtcctgacggaaaggagcggtgccggcggcgccgcgcttcgtgctgtcctacagcagagggtggtgttggctgcgcccggagtgctgcagcccgcggccgggttgaagggatgggcgcccccaggcttggctttt

SEQ ID NO: 21497 - DNA, 600 bp, Chicken  19866894232927_6
tcttatgtgcaacttaaggcaccattctgctatctcagctttctcagcttctgctccagagttgacacgcaaatctgtgcaagcaggagctctgctgycccccactgtcgctccccaccggcgaatgctggcagccattggatgtgctgtgctccctgcagatgtggctccagcagctgcagcttggagctgtgtcctcagatcaaggttttcacagacagcccatgtgttgaatgggctgagttcttactgctctgtctaatcttaccyctgcaaaagagaagctgaagttggaactgrtgcaactcgaaccacgtgtacgtcagttttytcgggctccagccctgccatcccggcagcggggaatccctccggctcggctttataaagtagataacagcgccctctgctgtccgcacgctgtaagagcaccccgtcctgacggaaaggagcggtgccggcggcgccgcgcttcgtgctgtcctacagcagagggtggtgttggctgcgcccggagtgctgcagcccgcggccgggttgaagggatgggcgcccccaggcttggcttttccgactgttgcggagctgtatttatagcag

SEQ ID NO: 21498 - DNA, 600 bp, Chicken  19866894232927_7
atctcagctttctcagcttctgctccagagttgacacgcaaatctgtgcaagcaggagctctgctgycccccactgtcgctccccaccggcgaatgctggcagccattggatgtgctgtgctccctgcagatgtggctccagcagctgcagcttggagctgtgtcctcagatcaaggttttcacagacagcccatgtgttgaatgggctgagttcttactgctctgtctaatcttaccyctgcaaaagagaagctgaagttggaactgrtgcaactcgaaccacgtgtacgtcagttttytcgggctccagccctgccatcccggcagcggggaatccctccggctcggctttataaagtagataacagcgccctctgctgtccgcacgctgtaagagcaccccgtcctgacggaaaggagcggtgccggcggcgccgcgcttcgtgctgtcctacagcagagggtggtgttggctgcgcccggagtgctgcagcccgcggccgggttgaagggatgggcgcccccaggcttggcttttccgactgttgcggagctgtatttatagcagccgtatgtatgcatcttttaccacttcgctg

SEQ ID NO: 21499 - DNA, 445 bp, Chicken  19866894232927_8
gatgtagctgagcatttcttgacatttacacgtgtataaaaacagaattttaagcagtgccctgtttaaagaggaagataaagtgctaaagagaaggaataaacctcctgatgcagatggatttgtaaactctgtttaagacattcccctgtagcggagcgatgcttgggctgtgtgcagtgtgacagatcagctccacacaccctgctgaggttcctgctggggtggctgagatctcctacatggggtcacacagcatccatgtcctggtgagcagctctgtgcctctgctgtgctgtrttgtcccatttccgtgtggccttaatgatgcgtccatgctagaatacaaatgctgtgctgctaccagttctttcctgctgttgcactacgacccactgtaccactcatgctaaaccactgagcatctttcaacagctgttcattt

SEQ ID NO: 21500 - DNA, 600 bp, Chicken  19866894232930_1
atagacttttcttgatgagcatactgttctgcttgttatcctgtgacagttattaaagctcattatcctatgtttatgagttttctttttactgcttcgatatattgtagcatatagcttttttcatcacttccattcttatcaaatttctgttttcaattagtttgattcaaatgtactgatactgctagaatccactttagcttgaagggaagctatgtcttaacattaagacaaatgttcgagtataacagcgctaggagttgcttattggaacaaatgagctctttggatgtcacragtcttagatctgcaccctttcgatcagtggtgggctgtctccatgttctgcaggtgtgcgtgctttatgttttggggaaaccacyactgacaaggagtaacagaaaagtaagaggaatgaatctctttgaatccaggcagcttttcactctggtagatattgaactttggcagtcttgacatttcaagtggctagtcttgtaccttgtctgcagcagaattgctacctaatatactttaatattagaaacaatgctaagtacaaagcctggcagacatgagttgtgtyaggattgcaca

SEQ ID NO: 21501 - DNA, 600 bp, Chicken  19866894232930_2
ttttactgcttcgatatattgtagcatatagcttttttcatcacttccattcttatcaaatttctgttttcaattagtttgattcaaatgtactgatactgctagaatccactttagcttgaagggaagctatgtcttaacattaagacaaatgttcgagtataacagcgctaggagttgcttattggaacaaatgagctctttggatgtcacragtcttagatctgcaccctttcgatcagtggtgggctgtctccatgttctgcaggtgtgcgtgctttatgttttggggaaaccacyactgacaaggagtaacagaaaagtaagaggaatgaatctctttgaatccaggcagcttttcactctggtagatattgaactttggcagtcttgacatttcaagtggctagtcttgtaccttgtctgcagcagaattgctacctaatatactttaatattagaaacaatgctaagtacaaagcctggcagacatgagttgtgtyaggattgcacaacacgctagattatgtatggtctgacaatgtacgctccctaaatctgcattaaggaaatctagcattagtagtgctatctcccatc

SEQ ID NO: 21502 - DNA, 600 bp, Chicken  19866894232930_3
tggatgtcacragtcttagatctgcaccctttcgatcagtggtgggctgtctccatgttctgcaggtgtgcgtgctttatgttttggggaaaccacyactgacaaggagtaacagaaaagtaagaggaatgaatctctttgaatccaggcagcttttcactctggtagatattgaactttggcagtcttgacatttcaagtggctagtcttgtaccttgtctgcagcagaattgctacctaatatactttaatattagaaacaatgctaagtacaaagcctggcagacatgagttgtgtyaggattgcacaacacgctagattatgtatggtctgacaatgtacgctccctaaatctgcattaaggaaatctagcattagtagtgctatctcccatcactgcagtggtgaggtggtggatttggtttccaactcaagcctgtgacttaaaagcggactgtaaataacctggtatcaagctgatgtacttctgggatgataaaagtgcgcagtgacagatgtcagaactaatgttcacagtaaaagtttttctatagtgcctgcaaaggaaggatggccagaagttcatattaaagtctga

SEQ ID NO: 21503 - DNA, 600 bp, Chicken  19866894232934_1
ggccagcagggagatgttttaaacatcagggaaacattgtaaaatgggatgaatttctaggtctacttctgtcacttggacatgtgtttgtgtgtgggatgttcctgttggtcagatgagaggatatatgcattccagagtcatgcagtcagattataaactattaatattttggtgaagtgcacttacatgtaaatccttttattttctttggatacacaggatatagaaatttaatggtagactaaataaagcagagtaacgaaacagagtgttacatatgggatcggtagcttcttrttcttgaccttgctgggtggtgtcctagttgcaagacaagaaacagttgagtgtcatcctcgatggttctctcttctacctttcttgtactttatggtggtctttaaattatttcttyttcaagctgcaatactagcatacgtatgactataattaaatgctcttctcatgaaagaatgaagctaaatgaaaataaatgccttgtgtctaattttcttctctttcctgaaaaatctgttgtacatgatgcttcatctgctgtgttatggtatcactgatgactatttggaggattccatt

SEQ ID NO: 21504 - DNA, 600 bp, Chicken  19866894232934_2
agaggatatatgcattccagagtcatgcagtcagattataaactattaatattttggtgaagtgcacttacatgtaaatccttttattttctttggatacacaggatatagaaatttaatggtagactaaataaagcagagtaacgaaacagagtgttacatatgggatcggtagcttcttrttcttgaccttgctgggtggtgtcctagttgcaagacaagaaacagttgagtgtcatcctcgatggttctctcttctacctttcttgtactttatggtggtctttaaattatttcttyttcaagctgcaatactagcatacgtatgactataattaaatgctcttctcatgaaagaatgaagctaaatgaaaataaatgccttgtgtctaattttcttctctttcctgaaaaatctgttgtacatgatgcttcatctgctgtgttatggtatcactgatgactatttggaggattccattcatagtaatgaggattctgagtcagttgacatcccttgcttgtgtgtatggaagggataagaaaaagaaatctcaggttaagactatttaagcaaaatggatttatgtgcacaacata

SEQ ID NO: 21505 - DNA, 599 bp, Chicken  19866894232948_1
  misc_feature (1)..(59): n is any nucleotide
nnnnnnnnnnnnnnnnnnnnnnnnnnnnnnnnnnnnnnnnnnnnnnnnnnnnnnnnnnncaacatgtttttaagattccagttactaaaccctctgctgtgttttctgcagtctcaaatttgcaatccttgttctctgttaacttttagtatcttcaacttctcttgttcactgactattttatgtcagaagtcttgcctgtttgggcatgatattcctcttaggttggaatctatcttctgtgtgcttgtttcaaagaataacataaccgttactttttatggagatgatctggcaatwttaatttatttctatttgcgtatattatgagatgctttgtccttcacagatttttgtggcttcttttttccagtgtttataatctcattcttttctctcagttgagtcaataagtragctatgagacatcttccatacagctaaaattacagctgatcatcttccttatttagtcttcttcaaaatgagtctatttttcccactaaggrtctaaaagtgtttattatgacgtgcaatcattattattattattattattatacaatatgtcacaatttgcaccatggaatgtttatgca

SEQ ID NO: 21506 - DNA, 600 bp, Chicken  19866894232948_2
aatttgcaatccttgttctctgttaacttttagtatcttcaacttctcttgttcactgactattttatgtcagaagtcttgcctgtttgggcatgatattcctcttaggttggaatctatcttctgtgtgcttgtttcaaagaataacataaccgttactttttatggagatgatctggcaatwttaatttatttctatttgcgtatattatgagatgctttgtccttcacagatttttgtggcttcttttttccagtgtttataatctcattcttttctctcagttgagtcaataagtragctatgagacatcttccatacagctaaaattacagctgatcatcttccttatttagtcttcttcaaaatgagtctatttttcccactaaggrtctaaaagtgtttattatgacgtgcaatcattattattattattattattatacaatatgtcacaatttgcaccatggaatgtttatgcatttggctttgtttaagagatttccctaaaattttcatatctgytatccacatttttgttataaaggaaggaaaaratgcattctcacagcaactggtcatcatgccacagggagagt

SEQ ID NO: 21507 - DNA, 600 bp, Chicken  19866894232948_3
tgatattcctcttaggttggaatctatcttctgtgtgcttgtttcaaagaataacataaccgttactttttatggagatgatctggcaatwttaatttatttctatttgcgtatattatgagatgctttgtccttcacagatttttgtggcttcttttttccagtgtttataatctcattcttttctctcagttgagtcaataagtragctatgagacatcttccatacagctaaaattacagctgatcatcttccttatttagtcttcttcaaaatgagtctatttttcccactaaggrtctaaaagtgtttattatgacgtgcaatcattattattattattattattatacaatatgtcacaatttgcaccatggaatgtttatgcatttggctttgtttaagagatttccctaaaattttcatatctgytatccacatttttgttataaaggaaggaaaaratgcattctcacagcaactggtcatcatgccacagggagagtgatttgacattatagtaggtgttccttaaaatgtctcaaaagtatgatttttrtctatgggaaagttctctgccttctctgtatgttgattct

SEQ ID NO: 21508 - DNA, 551 bp, Chicken  19866894232948_4
ttcacagatttttgtggcttcttttttccagtgtttataatctcattcttttctctcagttgagtcaataagtragctatgagacatcttccatacagctaaaattacagctgatcatcttccttatttagtcttcttcaaaatgagtctatttttcccactaaggrtctaaaagtgtttattatgacgtgcaatcattattattattattattattatacaatatgtcacaatttgcaccatggaatgtttatgcatttggctttgtttaagagatttccctaaaattttcatatctgytatccacatttttgttataaaggaaggaaaaratgcattctcacagcaactggtcatcatgccacagggagagtgatttgacattatagtaggtgttccttaaaatgtctcaaaagtatgatttttrtctatgggaaagttctctgccttctctgtatgttgattctttccactgcaaaaatgcactattcatgaaagtatatttcaggaagtatttcaagaatgcagtcagaggtttagctaaggcaaaa

SEQ ID NO: 21509 - DNA, 519 bp, Chicken  19866894232948_5
gtttataatctcattcttttctctcagttgagtcaataagtragctatgagacatcttccatacagctaaaattacagctgatcatcttccttatttagtcttcttcaaaatgagtctatttttcccactaaggrtctaaaagtgtttattatgacgtgcaatcattattattattattattattatacaatatgtcacaatttgcaccatggaatgtttatgcatttggctttgtttaagagatttccctaaaattttcatatctgytatccacatttttgttataaaggaaggaaaaratgcattctcacagcaactggtcatcatgccacagggagagtgatttgacattatagtaggtgttccttaaaatgtctcaaaagtatgatttttrtctatgggaaagttctctgccttctctgtatgttgattctttccactgcaaaaatgcactattcatgaaagtatatttcaggaagtatttcaagaatgcagtcagaggtttagctaaggcaaaa

SEQ ID NO: 21510 - DNA, 424 bp, Chicken  19866894232948_6
ttagtcttcttcaaaatgagtctatttttcccactaaggrtctaaaagtgtttattatgacgtgcaatcattattattattattattattatacaatatgtcacaatttgcaccatggaatgtttatgcatttggctttgtttaagagatttccctaaaattttcatatctgytatccacatttttgttataaaggaaggaaaaratgcattctcacagcaactggtcatcatgccacagggagagtgatttgacattatagtaggtgttccttaaaatgtctcaaaagtatgatttttrtctatgggaaagttctctgccttctctgtatgttgattctttccactgcaaaaatgcactattcatgaaagtatatttcaggaagtatttcaagaatgcagtcagaggtttagctaaggcaaaa

SEQ ID NO: 21511 - DNA, 599 bp, Chicken  19866894232951_1
  misc_feature (1)..(81): n is any nucleotide
nnnnnnnnnnnnnnnnnnnnnnnnnnnnnnnnnnnnnnnnnnnnnnnnnnnnnnnnnnnnnnnnnnnnnnnnnnnnnnnnnacttcctgttgtctgtgacaaactcttgataaagcagtaaaatttacagccatgtttgattctaaatttacagtcctcagatgacagtcacatttctaattaagtacatcaatgaaaaagatttctcacctgcaagtgctagtgcatcagtactgataaagcccatagatatgcattcatatttaaataaaatgtaattgcctagtcctttaaaaaggraaaaaaactttaagagagcaagctgttcagcctaatagtgacaataccttttaattttgcccaactgagttcaaagatcaaaatcctattcgagtgtttttaaatgccagttaaaaatcacagctagaaatgtgcatggtatgcttgattataatcttcccaattatagctcaagctgatgatacaaatacccctagtgcctactctcagttctttttcagctttctggattttctgrttcttttgcatagcattctcctgctcaaggtagagaagatcatttaaaacctatacttaga

SEQ ID NO: 21512 - DNA, 490 bp, Chicken  19866894232951_2
aaagcccatagatatgcattcatatttaaataaaatgtaattgcctagtcctttaaaaaggaaaaaaaactttaagagagcaagctgttcagcctaatagtgacaataccttttaattttgcccaactgagttcaaagatcaaaatcctattcgagtgtttttaaatgccagttaaaaatcacagctagaaatgtgcatggtatgcttgattataatcttcccaattatagctcaagctgatgatacaaatacccctagtgcctactctcagttctttttcagctttctggattttctgrttcttttgcatagcattctcctgctcaaggtagagaagatcatttaaaacctatacttagaaataagggctctttagtcttcaccacattcaaatacatgtcttaaaattatattttacttatttacagttttatattatatgttttatattttagttgctttagctacaaggctgtcttctaaagtatc

SEQ ID NO: 21513 - DNA, 600 bp, Chicken  19866894232955_1
gggtggttgggcactgagatagactcccccagagtactggtcacagcactgagcctgatggagttcagcgtttgagagcatccaaacacagagccactcaaaattcaaaccctattttttgacccccttcgggggtcccttccagcttaggatattccatgattctataggttttcatccttatctgtcagagttcactatgataattcacaagggagtcacagaggaaaggttagagatccattaatctattaacctttgtttcagttattaaaaatatttatattcaaacatgctttrtgggtgagtagggccatctccagttgcataaaatgaatattctctatgatcatctatcccagctatctagtgtacccatcaaaacagtaatgccaaagagatcttcagatacactaatatatgggaaarctcttttttctttttttaaataagatccttatacgggtcatgtgatgcaaaactacacagctcaatgtcagttaagaaagycatcatttttgagtaatctaagctatgcttatygtcctagaggctgtttgtgaagcgtcctttgaccttgctggtgtgataagtgatttt

SEQ ID NO: 21514 - DNA, 600 bp, Chicken  19866894232955_2
cgggggtcccttccagcttaggatattccatgattctataggttttcatccttatctgtcagagttcactatgataattcacaagggagtcacagaggaaaggttagagatccattaatctattaacctttgtttcagttattaaaaatatttatattcaaacatgctttrtgggtgagtagggccatctccagttgcataaaatgaatattctctatgatcatctatcccagctatctagtgtacccatcaaaacagtaatgccaaagagatcttcagatacactaatatatgggaaarctcttttttctttttttaaataagatccttatacgggtcatgtgatgcaaaactacacagctcaatgtcagttaagaaagycatcatttttgagtaatctaagctatgcttatygtcctagaggctgtttgtgaagcgtcctttgaccttgctggtgtgataagtgattttaaaattatttgttccatatacatgtcagatgtacaggacaattttctatagactcwcagccagctgcaaattactttcaagtcatatgtacttacagatcagccttcagggaagaatagagacaaacta

SEQ ID NO: 21515 - DNA, 600 bp, Chicken  19866894232955_3
caagggagtcacagaggaaaggttagagatccattaatctattaacctttgtttcagttattaaaaatatttatattcaaacatgctttrtgggtgagtagggccatctccagttgcataaaatgaatattctctatgatcatctatcccagctatctagtgtacccatcaaaacagtaatgccaaagagatcttcagatacactaatatatgggaaarctcttttttctttttttaaataagatccttatacgggtcatgtgatgcaaaactacacagctcaatgtcagttaagaaagycatcatttttgagtaatctaagctatgcttatygtcctagaggctgtttgtgaagcgtcctttgaccttgctggtgtgataagtgattttaaaattatttgttccatatacatgtcagatgtacaggacaattttctatagactcwcagccagctgcaaattactttcaagtcatatgtacttacagatcagccttcagggaagaatagagacaaactaagaagatggcattaataagatgtagacaagcttttccacattttgtattagaccatgaatctatccagtctgtcagatctt

SEQ ID NO: 21516 - DNA, 600 bp, Chicken  19866894232955_4
ttaatctattaacctttgtttcagttattaaaaatatttatattcaaacatgctttrtgggtgagtagggccatctccagttgcataaaatgaatattctctatgatcatctatcccagctatctagtgtacccatcaaaacagtaatgccaaagagatcttcagatacactaatatatgggaaarctcttttttctttttttaaataagatccttatacgggtcatgtgatgcaaaactacacagctcaatgtcagttaagaaagycatcatttttgagtaatctaagctatgcttatygtcctagaggctgtttgtgaagcgtcctttgaccttgctggtgtgataagtgattttaaaattatttgttccatatacatgtcagatgtacaggacaattttctatagactcwcagccagctgcaaattactttcaagtcatatgtacttacagatcagccttcagggaagaatagagacaaactaagaagatggcattaataagatgtagacaagcttttccacattttgtattagaccatgaatctatccagtctgtcagatcttattctccaagtgaatgcttatgatgaaagtttt

SEQ ID NO: 21517 - DNA, 600 bp, Chicken  19866894232955_5
tcccagctatctagtgtacccatcaaaacagtaatgccaaagagatcttcagatacactaatatatgggaaarctcttttttctttttttaaataagatccttatacgggtcatgtgatgcaaaactacacagctcaatgtcagttaagaaagycatcatttttgagtaatctaagctatgcttatygtcctagaggctgtttgtgaagcgtcctttgaccttgctggtgtgataagtgattttaaaattatttgttccatatacatgtcagatgtacaggacaattttctatagactcwcagccagctgcaaattactttcaagtcatatgtacttacagatcagccttcagggaagaatagagacaaactaagaagatggcattaataagatgtagacaagcttttccacattttgtattagaccatgaatctatccagtctgtcagatcttattctccaagtgaatgcttatgatgaaagtttttctatccattgtgctttagactaggtgctgtaacttgtaaaaggtaagcctgtgtaatgcttgaattacaaacctgagacatttgcaactcttccaacaacttccagatgttc

SEQ ID NO: 21518 - DNA, 600 bp, Chicken  19866894232955_6
atcctgaaagataggaaatctcacagaacatcagtcattcttattctgcatatttgcaggcacagtaaaggcaataaaacaaaaacatatgctttcctttgtgtagcacacaaagacaggatctgaggaaaaataacagcagagtgctagatagtactgtcagctaaagtaaaatagaatagatttcagcactgcaatttgcagtatcctgcagtgtttgcagaagttttttctcaagcatttctaatgttagaacttaagacagtttccttaagtctttgtggaatatgctatattaaytcctatgatgtttgcaatttcctgatgttttggcctgacaaaagyatgcaaaactcccaagaaggttgtgattaaacacaaaaagctacaagcaattccttctaatttgaaaccctcctgttataagagatatcacttccaaacattaccatatagcagtcactttaatatgcaagatatgcatgattttaagggatactcagcagtctacttgtacagtacattacagcaaagcaagatggcaaaatgaacgtcaaatctgttacatggctcccagcttcatcttctgctaccttctta

SEQ ID NO: 21519 - DNA, 600 bp, Chicken  19866894232955_7
ctgcatatttgcaggcacagtaaaggcaataaaacaaaaacatatgctttcctttgtgtagcacacaaagacaggatctgaggaaaaataacagcagagtgctagatagtactgtcagctaaagtaaaatagaatagatttcagcactgcaatttgcagtatcctgcagtgtttgcagaagttttttctcaagcatttctaatgttagaacttaagacagtttccttaagtctttgtggaatatgctatattaaytcctatgatgtttgcaatttcctgatgttttggcctgacaaaagyatgcaaaactcccaagaaggttgtgattaaacacaaaaagctacaagcaattccttctaatttgaaaccctcctgttataagagatatcacttccaaacattaccatatagcagtcactttaatatgcaagatatgcatgattttaagggatactcagcagtctacttgtacagtacattacagcaaagcaagatggcaaaatgaacgtcaaatctgttacatggctcccagcttcatcttctgctaccttcttactgcacagagaggctgtttaaataaataagaagaatcattgtctt

SEQ ID NO: 21520 - DNA, 600 bp, Chicken  19866894232956_1
aagcctaatgcttccattcaaccaagactattatttatggtgcttgctggtgatgggccttttgatttccctcagtatggcagtttttgtagtattggagtatattagagaacttgcaactacaacttctatactgactaagtacaatggagctagccctagctcccagttccttctcactgtctgctgtgggagttttcggttcctctaagcaactttattgtagtgatctgtagaaccaattacttagtcacataacagctatttcagagttttcttctttcccaagaagaaatgtgytttgttttgggagccacttgatggctgcatggaaagctacagacattaattcatcaactgcagaaccgcaattattatctaatgatgggcgctcaagatactttgctttgaggagtgccctcattatgctacaagttttgaccagcatgtatgcacatggcattcacatactgactgctttcttgctaaattgctatctrctgttttgccagagcacatgtacttatgcaatcactgtaataattaatgatctgatgagctagggctggcttgtgctatgttctggcctcttctgagcct

SEQ ID NO: 21521 - DNA, 600 bp, Chicken  19866894232956_2
ggttcctctaagcaactttattgtagtgatctgtagaaccaattacttagtcacataacagctatttcagagttttcttctttcccaagaagaaatgtgytttgttttgggagccacttgatggctgcatggaaagctacagacattaattcatcaactgcagaaccgcaattattatctaatgatgggcgctcaagatactttgctttgaggagtgccctcattatgctacaagttttgaccagcatgtatgcacatggcattcacatactgactgctttcttgctaaattgctatctrctgttttgccagagcacatgtacttatgcaatcactgtaataattaatgatctgatgagctagggctggcttgtgctatgttctggcctcttctgagcctttgcatgagtgctgtgaggttcagccttcagctaaattgggagtgcttktgcctcatttgggagctagttttctctttttcatctcagcccatgcttgggaaaagctttgtgccagttccacgactccaggccatttgcatcttgtcacttcttgaattcattttgtaagccacactgctttcatctgctgtgccactgt

SEQ ID NO: 21522 - DNA, 600 bp, Chicken  19866894232956_3
ttcatcaactgcagaaccgcaattattatctaatgatgggcgctcaagatactttgctttgaggagtgccctcattatgctacaagttttgaccagcatgtatgcacatggcattcacatactgactgctttcttgctaaattgctatctrctgttttgccagagcacatgtacttatgcaatcactgtaataattaatgatctgatgagctagggctggcttgtgctatgttctggcctcttctgagcctttgcatgagtgctgtgaggttcagccttcagctaaattgggagtgcttktgcctcatttgggagctagttttctctttttcatctcagcccatgcttgggaaaagctttgtgccagttccacgactccaggccatttgcatcttgtcacttcttgaattcattttgtaagccacactgctttcatctgctgtgccactgtggttcagaccactgaatttgtttgggaaacggatctcctgatcacctctgcttgccaccatactagagagctgtatgaaactcattaactgaattactttcagatgaagctatgctggaaatgcaggcaccaagggctgttcagtgaac

SEQ ID NO: 21523 - DNA, 600 bp, Chicken  19866894232957_1
gagccttttcaaagcacttgcaaagttccagccacatgattcccattaactgtaatgagcactggacagataaattcacacatgttgctttgaagatttatactaaattggcttcatctttgttagcactaaaggaataatgatactccacaatatgaaagagaaatctttcaatttgccccctgcaattttctccattatccccagaattctccagtagctggtcagactacagattcataattgttccaattttacagacagttaaaaatattagctatagcagaacagtcaatctcygcagaatacagtgctaaaatgctcctttttaaagaaaaaaacaaccaaaataacacaggcccagctagttgtgcttctgaagtcatatcaaaggcctgaacaagtagaacagcacagggagaaagctgttgctgtagaagccaatccataataccttgccaaatctttaattgctaagcatgtacatttggcttgatcttgtgctgctttgaagtaaagatattagcatcaattaatcccaaaatgacctcaagttatggactttgggaagaaaaaaaaaaagagaaacagaaaatggtg

SEQ ID NO: 21524 - DNA, 600 bp, Chicken  19866894232960_1
tcccagttaacaacctatctctgttatgagagcatacgtaaactagatactccaaatatgttctggactgtatgaataatcctgaaaagaaatgagaaagtatcaccaaaaggggctgagaaggggcacatagaacttgtctgtcccactcctcaggtcatgcctggaacagtaggttcaaagaaaatcctcggcacctccacctccaaatcagccctgcactgtgtgatgtagctgagtaaatgtgatactagcttagagactgtggttttaatttcttctactttaatacctgaggasatattgaaaagctgaatcttctacgcctaaaagtgatgctatggaaaaacgaagatgaaactgaagaacatgcaaggcagcagaggactcttacagagaagtgtaaggaaaggaaaaggctgtgatgacaaaacacaggaggcaaagttcatggagacaaatggcaaggaagaagaatgcctaagtagggagctactggaaaaaaaacaaaaaaaaaaaaaaaaagaaagaaagaaagaaaaaaaaaaggaaaagaaaaataagaaagaaaagacacattagaataataataccaacata

SEQ ID NO: 21525 - DNA, 600 bp, Chicken  19866894232964_1
tcttctggtttcagtactttgagagtgtttttgaattataatctttttttcttgagttacaatatccaaaaattatcttaagaaaaagggtgcaactcttagatgataattcaaagaatttagatattaaagtcattactgatgctttccagagacaatcaagtattgtgtgtttagactaagaccacgaaagctggccatacttgaaaatgcgatgatcattataagtcctatgtctggagatcccagaaagaattatattaaggagtgcatgaaggggactgttggcgtgtgagctcrtataccaagtgaaaatgtctaatagagaaggataatctgaaaagtgaaattaagttgccttactctaatagaactgtcaaaaaatctgtctgacaaaacaagttgtttttmtttatttattttagaaactatctgcttcctgacaccgattctttacacaggaatgtctgacttaagcaaaatttttyacaaaagccaggatagaattgctgatcaagtgtgagacagagatcacacgtgctcagttgcctggtgatcagggcactcactgcagtaagagatcttcatgctagtaccaga

SEQ ID NO: 21526 - DNA, 600 bp, Chicken  19866894232964_2
caaagaatttagatattaaagtcattactgatgctttccagagacaatcaagtattgtgtgtttagactaagaccacgaaagctggccatacttgaaaatgcgatgatcattataagtcctatgtctggagatcccagaaagaattatattaaggagtgcatgaaggggactgttggcgtgtgagctcrtataccaagtgaaaatgtctaatagagaaggataatctgaaaagtgaaattaagttgccttactctaatagaactgtcaaaaaatctgtctgacaaaacaagttgtttttmtttatttattttagaaactatctgcttcctgacaccgattctttacacaggaatgtctgacttaagcaaaatttttyacaaaagccaggatagaattgctgatcaagtgtgagacagagatcacacgtgctcagttgcctggtgatcagggcactcactgcagtaagagatcttcatgctagtaccagaacagactgcactgatattttattttaggtttatcaaatgagaagtgattgcctcagctgtccagaagttgactattttgggccatagtgttttgtgatttattgttctttg

SEQ ID NO: 21527 - DNA, 600 bp, Chicken  19866894232964_3
gaaagctggccatacttgaaaatgcgatgatcattataagtcctatgtctggagatcccagaaagaattatattaaggagtgcatgaaggggactgttggcgtgtgagctcrtataccaagtgaaaatgtctaatagagaaggataatctgaaaagtgaaattaagttgccttactctaatagaactgtcaaaaaatctgtctgacaaaacaagttgtttttmtttatttattttagaaactatctgcttcctgacaccgattctttacacaggaatgtctgacttaagcaaaatttttyacaaaagccaggatagaattgctgatcaagtgtgagacagagatcacacgtgctcagttgcctggtgatcagggcactcactgcagtaagagatcttcatgctagtaccagaacagactgcactgatattttattttaggtttatcaaatgagaagtgattgcctcagctgtccagaagttgactattttgggccatagtgttttgtgatttattgttctttggcataaggaaaaaatctacaaagtcttatgaccaagaaacacagttctattcatttttatttctgagcttgcaaatt

SEQ ID NO: 21528 - DNA, 600 bp, Chicken  19866894232967_1
agggtgactgtctctcttcattggtaataaatggattctagacaaataatttagcttacatgtcaaatttttagacagacaacataaggtaaaaggaactctacgtgtcctttccaactccggatattctgtggttctgtgataagcatgggctgagctctgtatttgagttgtgagaaatcagtcatgtaatcattaagtaggaaatgagctgtgaatcaagagtaatatgttcaagaaagcctggttgtcagctacattaagaaatgcagtttagtccacagcaaaaagatttactaygtagtggggttttttctttctttcttggtgaagtatgaaggacataatatttttatgcagaatggaacagatttcctcatttttgagtcagaaaggactttgagacaaaagtgtttgatctgattgctccaagcatttacttagcttctctgccctctctgtcctgacggtttrgtgcttggcatgctgttttacagatatttacataatgaaggttgtttctctgagacgggataggatgaattacaattgtaaattccactaattgtcataaagcaggtctcaaagtgtagacagtag

SEQ ID NO: 21529 - DNA, 600 bp, Chicken  19866894232967_2
gagaaatcagtcatgtaatcattaagtaggaaatgagctgtgaatcaagagtaatatgttcaagaaagcctggttgtcagctacattaagaaatgcagtttagtccacagcaaaaagatttactaygtagtggggttttttctttctttcttggtgaagtatgaaggacataatatttttatgcagaatggaacagatttcctcatttttgagtcagaaaggactttgagacaaaagtgtttgatctgattgctccaagcatttacttagcttctctgccctctctgtcctgacggtttrgtgcttggcatgctgttttacagatatttacataatgaaggttgtttctctgagacgggataggatgaattacaattgtaaattccactaattgtcataaagcaggtctcaaagtgtagacagtagcaaatcctattgttctmtgtccctgagrtatgtgtgaatggaatgttaatatatggatgtatagattcataagccaaagtacaaaaatgattcataaaaaggtttattcacttgtaatccaaaaatgatgcttaaggtcacgaaccactgacctgtgaatgtatggctaagttt

SEQ ID NO: 21530 - DNA, 600 bp, Chicken  19866894232967_3
ttctttcttggtgaagtatgaaggacataatatttttatgcagaatggaacagatttcctcatttttgagtcagaaaggactttgagacaaaagtgtttgatctgattgctccaagcatttacttagcttctctgccctctctgtcctgacggtttrgtgcttggcatgctgttttacagatatttacataatgaaggttgtttctctgagacgggataggatgaattacaattgtaaattccactaattgtcataaagcaggtctcaaagtgtagacagtagcaaatcctattgttctmtgtccctgagrtatgtgtgaatggaatgttaatatatggatgtatagattcataagccaaagtacaaaaatgattcataaaaaggtttattcacttgtaatccaaaaatgatgcttaaggtcacgaaccactgacctgtgaatgtatggctaagtttcattcgatagacatataaaataaacatttattatgtgtagtgtgacttttccacttaggatttatagaggtacagttcgggccagtatatatttaggaaagttcaaattattgcagcactgtattttttgctctgtttctcag

SEQ ID NO: 21531 - DNA, 600 bp, Chicken  19866894232967_4
tgaagtatgaaggacataatatttttatgcagaatggaacagatttcctcatttttgagtcagaaaggactttgagacaaaagtgtttgatctgattgctccaagcatttacttagcttctctgccctctctgtcctgacggtttrgtgcttggcatgctgttttacagatatttacataatgaaggttgtttctctgagacgggataggatgaattacaattgtaaattccactaattgtcataaagcaggtctcaaagtgtagacagtagcaaatcctattgttctmtgtccctgagrtatgtgtgaatggaatgttaatatatggatgtatagattcataagccaaagtacaaaaatgattcataaaaaggtttattcacttgtaatccaaaaatgatgcttaaggtcacgaaccactgacctgtgaatgtatggctaagtttcattcgatagacatataaaataaacatttattatgtgtagtgtgacttttccacttaggatttatagaggtacagttcgggccagtatatatttaggaaagttcaaattattgcagcactgtattttttgctctgtttctcagcaaagctcttt

SEQ ID NO: 21532 - DNA, 600 bp, Chicken  19866894232967_5
caacaccctccttctattacagtatcatcttctgttgctgtatgctgcttctgagtctgtatgcccaattagcccccagccagaacctgggtctggtgtgagaacaagggctgaggtaaagaacatgactaatagtttgtgaaggattggacatgagtttttgttggaatatttgcatctaggtgcatggaagagatttttttgctagtgtaaaaatgataaagcattatgtcttgttgctgatactgcactatatctacaaatgtctctaatgtaaatctgatgtaaggctgtgtgtgygtgtgcgcatctcaacttgcttcactgtagagtttgtgcttgcattgcagagatgttcagttttttgctatgaatctaaagagtctgcgaatgaaatgtttgcaaggtatcatgaggatatttttcagatcttccagatggacttctgcaagcttcttcttccatgcatgtcactaacttgccctttaagatgatatgtgacctattttgcctgttgcttctgttgttctatgataggtaatccagggagtgagtggtctttagctgttttgtgttggtataataggtctcagagacagc

SEQ ID NO: 21533 - DNA, 600 bp, Chicken  19866894232968_1
gagcagaatgtgacttcagtaaaacttctttaactgctgtcccacttgacattcctaccttaaaccagaacagtggagggacagtcagttggaaaatggctctcaaaaaggcatctcaagcagggtcccaagggaatacatcctgagatgattctattcaatattttcattagccacctggatgatggaagagaaagcacacttatgaaatttgctgacagctccaagccaggatggatggcaagcggtatgtgggatgggatctgaattcaaagagatctttatgcactggagagagawaacacaaagggaaggaaagaaagtgtggcaagygcaaagatctacatttagaggagagaaagaaaaygaataaatacaaaatggaaactaaatggctaaacactggcatggcagaaraatatctggagctaaaagtggattagaaactggctgcagatctatctgcattatgattcttttgcagaataggcaagctgcagactgagagctattaatgggagagataacataaaactgaaggaaaaccattgttattaatcattttaatgtcaccaaaagatttctctaaacacaggtgga

SEQ ID NO: 21534 - DNA, 600 bp, Chicken  19866894232968_2
ctgctgtcccacttgacattcctaccttaaaccagaacagtggagggacagtcagttggaaaatggctctcaaaaaggcatctcaagcagggtcccaagggaatacatcctgagatgattctattcaatattttcattagccacctggatgatggaagagaaagcacacttatgaaatttgctgacagctccaagccaggatggatggcaagcggtatgtgggatgggatctgaattcaaagagatctttatgcactggagagagawaacacaaagggaaggaaagaaagtgtggcaagygcaaagatctacatttagaggagagaaagaaaaygaataaatacaaaatggaaactaaatggctaaacactggcatggcagaaraatatctggagctaaaagtggattagaaactggctgcagatctatctgcattatgattcttttgcagaataggcaagctgcagactgagagctattaatgggagagataacataaaactgaaggaaaaccattgttattaatcattttaatgtcaccaaaagatttctctaaacacaggtggaaggttatctgaggattattcaactactgtcagg

SEQ ID NO: 21535 - DNA, 600 bp, Chicken  19866894232968_3
gaacagtggagggacagtcagttggaaaatggctctcaaaaaggcatctcaagcagggtcccaagggaatacatcctgagatgattctattcaatattttcattagccacctggatgatggaagagaaagcacacttatgaaatttgctgacagctccaagccaggatggatggcaagcggtatgtgggatgggatctgaattcaaagagatctttatgcactggagagagawaacacaaagggaaggaaagaaagtgtggcaagygcaaagatctacatttagaggagagaaagaaaaygaataaatacaaaatggaaactaaatggctaaacactggcatggcagaaraatatctggagctaaaagtggattagaaactggctgcagatctatctgcattatgattcttttgcagaataggcaagctgcagactgagagctattaatgggagagataacataaaactgaaggaaaaccattgttattaatcattttaatgtcaccaaaagatttctctaaacacaggtggaaggttatctgaggattattcaactactgtcaggatctcagccagtcttttataccataaaaatccct

SEQ ID NO: 21536 - DNA, 600 bp, Chicken  19866894232968_4
aagcagggtcccaagggaatacatcctgagatgattctattcaatattttcattagccacctggatgatggaagagaaagcacacttatgaaatttgctgacagctccaagccaggatggatggcaagcggtatgtgggatgggatctgaattcaaagagatctttatgcactggagagagawaacacaaagggaaggaaagaaagtgtggcaagygcaaagatctacatttagaggagagaaagaaaaygaataaatacaaaatggaaactaaatggctaaacactggcatggcagaaraatatctggagctaaaagtggattagaaactggctgcagatctatctgcattatgattcttttgcagaataggcaagctgcagactgagagctattaatgggagagataacataaaactgaaggaaaaccattgttattaatcattttaatgtcaccaaaagatttctctaaacacaggtggaaggttatctgaggattattcaactactgtcaggatctcagccagtcttttataccataaaaatccctacagaaaaccatggataaaatccagggttgtttttatgctcagtcctgtg

SEQ ID NO: 21537 - DNA, 600 bp, Chicken  19866894232969_1
aaaattaaaaagaaacttattaaaattgcaggctaacagcagtgccagaaattaaactcagcttctcagagcaacatagcattaatctgtttggaagctgagctagccagtcttttagttgcttagtaatggttttccaaagaatcatcaggttagacataagattaacatcttggttaatatgactacagtggtgaccctttgcttcattcttaatagcaaaagatcagtcatatttaagaaacagctttctgtattaactcatgtgatgttgtacaaatctaggttttcatactaacratgaaaagtaggttatacagttccactgtgtagcaatgggaagcaaattattttatgttcacaaattttgtaatcttggcatcagctaattaataacacatttcaagttttactctctgaaaagttagaggaatcttttatacagtaataaaaaatgaagtattttacatgaaaatatctcatggaacactcraaaatcaaagaagcatagaatcacagaatcacaggagttggaaggaacttcaagagatcatcgagtccaatcccccctgctaaagcaggtaccttacaataggtagg

SEQ ID NO: 21538 - DNA, 600 bp, Chicken  19866894232969_2
gtgaccctttgcttcattcttaatagcaaaagatcagtcatatttaagaaacagctttctgtattaactcatgtgatgttgtacaaatctaggttttcatactaacratgaaaagtaggttatacagttccactgtgtagcaatgggaagcaaattattttatgttcacaaattttgtaatcttggcatcagctaattaataacacatttcaagttttactctctgaaaagttagaggaatcttttatacagtaataaaaaatgaagtattttacatgaaaatatctcatggaacactcraaaatcaaagaagcatagaatcacagaatcacaggagttggaaggaacttcaagagatcatcgagtccaatcccccctgctaaagcaggtaccttacaataggtaggtatatcartattgactagagatttcacacagatttcaaaatcaagaagaagttgaagttgaatcctggaaggacttttaytcttaagaamggtgttttagaactcacgtaatctaagtacaatgaaaatttattttgttagtgctttcaattattattaatgctatctggaaaagtggaattccataccacag

SEQ ID NO: 21539 - DNA, 600 bp, Chicken  19866894232969_3
taggttatacagttccactgtgtagcaatgggaagcaaattattttatgttcacaaattttgtaatcttggcatcagctaattaataacacatttcaagttttactctctgaaaagttagaggaatcttttatacagtaataaaaaatgaagtattttacatgaaaatatctcatggaacactcraaaatcaaagaagcatagaatcacagaatcacaggagttggaaggaacttcaagagatcatcgagtccaatcccccctgctaaagcaggtaccttacaataggtaggtatatcartattgactagagatttcacacagatttcaaaatcaagaagaagttgaagttgaatcctggaaggacttttaytcttaagaamggtgttttagaactcacgtaatctaagtacaatgaaaatttattttgttagtgctttcaattattattaatgctatctggaaaagtggaattccataccacagatcttattttttgattttggtcttttgtgtcagggtaaaactaaagcttataacatttctacaacagcttgataggcaaaatgtagatttgaaccttaaagtaccacaaataatg

SEQ ID NO: 21540 - DNA, 600 bp, Chicken  19866894232969_4
atcagctaattaataacacatttcaagttttactctctgaaaagttagaggaatcttttatacagtaataaaaaatgaagtattttacatgaaaatatctcatggaacactcraaaatcaaagaagcatagaatcacagaatcacaggagttggaaggaacttcaagagatcatcgagtccaatcccccctgctaaagcaggtaccttacaataggtaggtatatcartattgactagagatttcacacagatttcaaaatcaagaagaagttgaagttgaatcctggaaggacttttaytcttaagaamggtgttttagaactcacgtaatctaagtacaatgaaaatttattttgttagtgctttcaattattattaatgctatctggaaaagtggaattccataccacagatcttattttttgattttggtcttttgtgtcagggtaaaactaaagcttataacatttctacaacagcttgataggcaaaatgtagatttgaaccttaaagtaccacaaataatgttaattccttgggatactgagagacctaaaaggactttttctgctcactgtctacagtgaatgccaaaacca

SEQ ID NO: 21541 - DNA, 600 bp, Chicken  19866894232969_5
taataacacatttcaagttttactctctgaaaagttagaggaatcttttatacagtaataaaaaatgaagtattttacatgaaaatatctcatggaacactcraaaatcaaagaagcatagaatcacagaatcacaggagttggaaggaacttcaagagatcatcgagtccaatcccccctgctaaagcaggtaccttacaataggtaggtatatcartattgactagagatttcacacagatttcaaaatcaagaagaagttgaagttgaatcctggaaggacttttaytcttaagaamggtgttttagaactcacgtaatctaagtacaatgaaaatttattttgttagtgctttcaattattattaatgctatctggaaaagtggaattccataccacagatcttattttttgattttggtcttttgtgtcagggtaaaactaaagcttataacatttctacaacagcttgataggcaaaatgtagatttgaaccttaaagtaccacaaataatgttaattccttgggatactgagagacctaaaaggactttttctgctcactgtctacagtgaatgccaaaaccattccttgtga

SEQ ID NO: 21542 - DNA, 600 bp, Chicken  19866894232974_1
tcagaaagggaaaatgctcatgtatgtttggcagtatactttccttgcggtttgaaggtcaggtggctgtgtgccctgagaagcttgggcctgcaaaatgtgcagctttggcttttttaccccacagcctcttgtctgtctttaagggatatgacaaaatgatccttgctgttggctgggcagagatctcagttctctgctgacctttaatttaatgctgtattttgggtgttagttacattttactagaggcagattttcacagcagtttgtcttccaaagcactaaagggggaaaacrctctttaataagaatatttcccttgaattttaatttcaatttttcttcctgtccttttaaaattatatttgaaagctttctcttagaaaaatggataatttccacaactgagccttaggttctttaactatatatgtacactttgaaatggcacctcttgaagttggagtggtctgagtccctcttttccatcttgggttcttctgttgagtaagataactttatctcaggaacatttgctttcttcttgtgattttgaaatcgatgcatcgcaggtgaacatagactccttccaaaggg

SEQ ID NO: 21543 - DNA, 600 bp, Chicken  19866894232976_1
ctttaaaatatttgctgatggctttgtgcacttcactgttatattctgactagaaagtatgtgaggcagaaactgtattaatgctctaggcaggaaggagtagtatttttcaaatattaataaaaactttgcaaaacttccctgtttaaaatatagattattttaacaattagtcccatatcctgccagatctattttagtgtttacaaaagaaagattccataccagaatgaggcatgagcaaccttaggtacctcatccaagacctctccatttatgtggtagataattggcatgatraaagcaagatcaccatcctgaaaattggcaaaaggctattgcagcttctgcagtttctcaggctgttttcaggcatttctgctctgctgaaagcagcagcctctgagtgtgtgtcatatctgtcagtgagatgggtcttgctgcacaggagaatsattaaggtagagggtgaacttagagtgccacagttattctgtgtctggatacatgttgtgtacttgggatgtgcaatcgctcgagaggtgagtgtatggtggggagatggtgcagggctctttcctgatatcaatgacaggatca

SEQ ID NO: 21544 - DNA, 600 bp, Chicken  19866894232976_2
gattattttaacaattagtcccatatcctgccagatctattttagtgtttacaaaagaaagattccataccagaatgaggcatgagcaaccttaggtacctcatccaagacctctccatttatgtggtagataattggcatgatraaagcaagatcaccatcctgaaaattggcaaaaggctattgcagcttctgcagtttctcaggctgttttcaggcatttctgctctgctgaaagcagcagcctctgagtgtgtgtcatatctgtcagtgagatgggtcttgctgcacaggagaatsattaaggtagagggtgaacttagagtgccacagttattctgtgtctggatacatgttgtgtacttgggatgtgcaatcgctcgagaggtgagtgtatggtggggagatggtgcagggctctttcctgatatcaatgacaggatcaacgactaatggaatattaaagaaaatataattagaaaaaaaggaatgtaggtagtgggaaatcatgcagtatcagatggaaccccgctggattttccactgcatgctgcacaggtacagtacaaacagaagttcacagcatttgaatggacataa

SEQ ID NO: 21545 - DNA, 599 bp, Chicken  19866894232977_1
  misc_feature (1)..(7): n is any nucleotide
nnnnnnntaaaacctgctgctattaagcagtagggagtaagggagcgaaacttgctgacatatatttgcataggctcatctagataaaaaagcaaggatgtttgtatcttacaaacgtttctccttcactgagttctaacactttgtcagtatggatctttatataaccatgtctgaaaggagactgcaaactttttcagtttgcaaactttttcagtttaacatttaacattctaatttcctgtttttcctacaccttactctccaccaacagttcacccatcttttctgtcttttctwaaccacagccagaagacctgtgagacaatttaagctacttttttccccagcatggaataatgatccaagtcttgatcaaaaccacttataaataagcaattttttttccatctacatatcttacgttactataatttacatgtacaaaaccwcactyattctttttctgtaagccattttctctcagttgatcctattaacagcacctatagtggattattattgcagacatgcatagttcaggaacaagcactccattacaagtaagcagaagtgccatttttgagtttccaacatta

SEQ ID NO: 21546 - DNA, 600 bp, Chicken  19866894232977_2
tggatctttatataaccatgtctgaaaggagactgcaaactttttcagtttgcaaactttttcagtttaacatttaacattctaatttcctgtttttcctacaccttactctccaccaacagttcacccatcttttctgtcttttctwaaccacagccagaagacctgtgagacaatttaagctacttttttccccagcatggaataatgatccaagtcttgatcaaaaccacttataaataagcaattttttttccatctacatatcttacgttactataatttacatgtacaaaaccwcactyattctttttctgtaagccattttctctcagttgatcctattaacagcacctatagtggattattattgcagacatgcatagttcaggaacaagcactccattacaagtaagcagaagtgccatttttgagtttccaacattagaacaatgtgatatgatacaccttacaattacctctcagaaaggtcagatgactctgttcatcctcacttcagcttccactgcatccagagcacttctccctgacttgcacccgatgtgcatagaagatcctctttaataaattagtactaag

SEQ ID NO: 21547 - DNA, 600 bp, Chicken  19866894232977_3
ctttatataaccatgtctgaaaggagactgcaaactttttcagtttgcaaactttttcagtttaacatttaacattctaatttcctgtttttcctacaccttactctccaccaacagttcacccatcttttctgtcttttctwaaccacagccagaagacctgtgagacaatttaagctacttttttccccagcatggaataatgatccaagtcttgatcaaaaccacttataaataagcaattttttttccatctacatatcttacgttactataatttacatgtacaaaaccwcactyattctttttctgtaagccattttctctcagttgatcctattaacagcacctatagtggattattattgcagacatgcatagttcaggaacaagcactccattacaagtaagcagaagtgccatttttgagtttccaacattagaacaatgtgatatgatacaccttacaattacctctcagaaaggtcagatgactctgttcatcctcacttcagcttccactgcatccagagcacttctccctgacttgcacccgatgtgcatagaagatcctctttaataaattagtactaagcttac

SEQ ID NO: 21548 - DNA, 600 bp, Chicken  19866894232977_4
tggtcaaacatatgttaaaaggttggacgtttacactgagttctagtcccacaccatgccaccttcaaaactgtctgtttgaataaatgattctgtgacacacacagttagacatctctggcaactcacaataggccaaaaaccatcactgttccccacaagcagagaaatgttatatttcatcttctgtttatgatatctttcttttaccttctttggtgcaaatacataacagacatttctccaaacaacgtgaaacaaacatgaaataaaacaggatatttatgttacttcagaacmactttcttccaaaacattataagctgattctattccaattagaagtactcgtcttacttttttttcagagaaagagtgtcaaactgctctgttaaaacatcaaaaagggacactttgaataggaaaatacaattttttttgtttcactacttctaatattacaatacgattttttctgtaggtttgtttttgtttttttaattcaaaaatctgattaaactacaatgtggggctatgttattcaggggtgacaaaggagacaggtagatgaggcaaagagaaatcagtaagttttatggt

SEQ ID NO: 21549 - DNA, 600 bp, Chicken  19866894232977_5
tacgattttttctgtaggtttgtttttgtttttttaattcaaaaatctgattaaactacaatgtggggctatgttattcaggggtgacaaaggagacaggtagatgaggcaaagagaaatcagtaagttttatggtgtcccaaagaagtcatgttggtctggatatccaggagtttattgaagggtaggaagtagctgttacacactattggaatcctgctttgtttgcaggattatgtcatgagtctgactcaagactattcacagagtcactgtgctgctgatgccatgtgctggctycttccaattttccagtaggaaactgcccaccagaaagactgggatgagtcagaccaagtataggtacccacaccagagcctgtcatgcagcatacattgagaaaaacaagccacatttggcagttataccttgatattgcctagttacttaagcacacaaaaacgaatggttaaatattaagtatttttcttgtttggtgggtgagtttagctcatattttgtcaccttgaatggttttcctacctttcattgaccatttcttgtgggagtttttacaataaaaaccctttctttaaggt

SEQ ID NO: 21550 - DNA, 600 bp, Chicken  19866894232979_1
atgcatcttctagaaaattactttttttttattggcttattttttttactggcttttagaaagtttgcagcagcaaacatcttctttctgtatctaaagagctattaaaaaaaatgcttggtgcagtgttaactcttgaaactactgaggactttacatcaagctgatttttgtgttggctgttaggtgcgtaattttaagctttgtgtcataaaatcttccttctgtaaaatatggataatgcccagatatgagttaggaggaaaaactgtaggtcttagccggtgtgtataaagtacyttgggggactgtgatgctgtgtgtgtgtaagattatrtgcccaaatcatgacatacaaaaggtaaggttggagctctacctgttaatgatttccagatgttttggttttgataaagctgtaatcatatcactagataattctcatcatacatataagctttaattaagaaaaaaactaaaaacttcttgcatttatatgaagcaagcgctatgattgtatgtttataacacagtttaaattgccatcctgtaagaatgatggagtttaaatattgtttccttggtggtttttgggtgtgg

SEQ ID NO: 21551 - DNA, 600 bp, Chicken  19866894232979_2
tattttttttactggcttttagaaagtttgcagcagcaaacatcttctttctgtatctaaagagctattaaaaaaaatgcttggtgcagtgttaactcttgaaactactgaggactttacatcaagctgatttttgtgttggctgttaggtgcgtaattttaagctttgtgtcataaaatcttccttctgtaaaatatggataatgcccagatatgagttaggaggaaaaactgtaggtcttagccggtgtgtataaagtacyttgggggactgtgatgctgtgtgtgtgtaagattatrtgcccaaatcatgacatacaaaaggtaaggttggagctctacctgttaatgatttccagatgttttggttttgataaagctgtaatcatatcactagataattctcatcatacatataagctttaattaagaaaaaaactaaaaacttcttgcatttatatgaagcaagcgctatgattgtatgtttataacacagtttaaattgccatcctgtaagaatgatggagtttaaatattgtttccttggtggtttttgggtgtgggttcttttatcccctccactcccctttcctcctaaac

SEQ ID NO: 21552 - DNA, 600 bp, Chicken  19866894232984_1
ttattgctgtgctttccattgtgttacatatgctctaagaactgtttaaacacactggtcagtttgatggcttgtctattgtttccagacaaaactagaaataatgagggctagtcttgtaacaccaccagtggctgagtgaaaagcatttgaactatttctgcaactccagaggagaaagacagccaagatttttttcttgtttttgagagtgctgctaatgaaaactggtgaaagatttataagacctttttaattaacatgcagatgtttaagagcatgtatgacagaactgtggayattgcttacacaaaggcccaggcagcaaatttgaaggtataagaacttattcctatgagtggatatgctgacttgtactgcaaaaccctgtcttaactatgccactcatgttacttgtgtgagaaattcactgtgtggtagtttgggggagtaggggaaaaagaaagtgaagatcaaaaacccacccatggttttgtgcttgagtgaggtcaacactaacatggaatggaaaaaatcacaaacttaaggcaatttgagttagtggatctgtcatccactctcagctgaaaagagactaac

SEQ ID NO: 21553 - DNA, 600 bp, Chicken  19866894232992_1
atagaataatgtgctggctcagtggacataactttttattttttgttccttttcttgcctttttactttagaagaaactaatgcattttctgtgtatctggaaactgaacacttatgctggggtgtacttgcaacagtatttgtagccacatgtatgtagcaatgcaagagttagcaggaaggtgacatttggagagctcttctgagaacactcagggtgacagataggaatgaataatagaagtgatgcttgcagagttttctctggtgagatttgtcacatcccgagttgtacagtgyactcaaagtacaaagttacctcaagatgccttacaattagatacttatagattaatctgcttgaagagtttaggcaaaaagaaaagtagagagcattttaaatgttgttcttggccagctggagacagaaattcagagagataggctgggtatatgtttccattagataaaccacttggagttgagtatttttttcttagttctgcttgcagttaacaaaatgcrtttgaaagagtcttcaattggaagatcgcttaagagttcttgaaaacaaatttggtttccacacagaagttttgg

SEQ ID NO: 21554 - DNA, 600 bp, Chicken  19866894232992_2
taggaatgaataatagaagtgatgcttgcagagttttctctggtgagatttgtcacatcccgagttgtacagtgyactcaaagtacaaagttacctcaagatgccttacaattagatacttatagattaatctgcttgaagagtttaggcaaaaagaaaagtagagagcattttaaatgttgttcttggccagctggagacagaaattcagagagataggctgggtatatgtttccattagataaaccacttggagttgagtatttttttcttagttctgcttgcagttaacaaaatgcrtttgaaagagtcttcaattggaagatcgcttaagagttcttgaaaacaaatttggtttccacacagaagttttggatttcagacaattccttagatgaaatgcacatagtatttggagaagaggttaataatttatgtagctgtattggcattaagctaccttcatgtgcttataagagaactgcatgcagaatgatgccttaaggattaaacttctgatggtggcaataagtagtgtggaaaattcagatgttgaatattaaaaagacttcaatcaggcagagccttgccgagatttcg

SEQ ID NO: 21555 - DNA, 599 bp, Chicken  19866894232993_1
  misc_feature (1)..(40): n is any nucleotide
nnnnnnnnnnnnnnnnnnnnnnnnnnnnnnnnnnnnnnnnttagcattttagaattgccattttagtataaactttgctgctacctgtgaggaagatattttcaaggagcggtggctgaggagccatgccagaaacaagcatctaggctgactgccatggttctgaaagcaaatttgtgaggcctcagatttagagctccctcacccctcaattcttttgttgtaaaagctttcccaaatttttcagacattagatttttactttaaagtacaaagcactgtggcaataatttttttttwwataataattatgagcccactttatagcatttctgaagtgtaggattttattcctggtttttagtatgtgataaacttccctgtctttctgttacatttatcactactaccagcaccagttggtcaaactgtggtctgctgcattagaaaagagcatactcttttatcagrtytatggaaaagaataaatttgtctataaagaggctgagctgaagctgagagtacatttaatattatcatttttatagtcaactgtgctgctgaaagcaacattgttcataggttctgcttctgcatg

SEQ ID NO: 21556 - DNA, 599 bp, Chicken  19866894232993_2
  misc_feature (1)..(39): n is any nucleotide
nnnnnnnnnnnnnnnnnnnnnnnnnnnnnnnnnnnnnnnttagcattttagaattgccattttagtataaactttgctgctacctgtgaggaagatattttcaaggagcggtggctgaggagccatgccagaaacaagcatctaggctgactgccatggttctgaaagcaaatttgtgaggcctcagatttagagctccctcacccctcaattcttttgttgtaaaagctttcccaaatttttcagacattagatttttactttaaagtacaaagcactgtggcaataatttttttttwwataataattatgagcccactttatagcatttctgaagtgtaggattttattcctggtttttagtatgtgataaacttccctgtctttctgttacatttatcactactaccagcaccagttggtcaaactgtggtctgctgcattagaaaagagcatactcttttatcagrtytatggaaaagaataaatttgtctataaagaggctgagctgaagctgagagtacatttaatattatcatttttatagtcaactgtgctgctgaaagcaacattgttcataggttctgcttctgcatgt

SEQ ID NO: 21557 - DNA, 600 bp, Chicken  19866894232993_3
aatttgtgaggcctcagatttagagctccctcacccctcaattcttttgttgtaaaagctttcccaaatttttcagacattagatttttactttaaagtacaaagcactgtggcaataatttttttttwwataataattatgagcccactttatagcatttctgaagtgtaggattttattcctggtttttagtatgtgataaacttccctgtctttctgttacatttatcactactaccagcaccagttggtcaaactgtggtctgctgcattagaaaagagcatactcttttatcagrtytatggaaaagaataaatttgtctataaagaggctgagctgaagctgagagtacatttaatattatcatttttatagtcaactgtgctgctgaaagcaacattgttcataggttctgcttctgcatgtgccctccctagctatttaatatttgataatgcaatgcagttttacataaaggtgtatatttcccctgctccagacttaaactgtgtatcgatatactgatttgctaatatgcaattctgattttgtaaatgatgtcgtaggcttcatggtagtgagacagcaggcctgtgg

SEQ ID NO: 21558 - DNA, 600 bp, Chicken  19866894232993_4
tttgtgaggcctcagatttagagctccctcacccctcaattcttttgttgtaaaagctttcccaaatttttcagacattagatttttactttaaagtacaaagcactgtggcaataatttttttttwwataataattatgagcccactttatagcatttctgaagtgtaggattttattcctggtttttagtatgtgataaacttccctgtctttctgttacatttatcactactaccagcaccagttggtcaaactgtggtctgctgcattagaaaagagcatactcttttatcagrtytatggaaaagaataaatttgtctataaagaggctgagctgaagctgagagtacatttaatattatcatttttatagtcaactgtgctgctgaaagcaacattgttcataggttctgcttctgcatgtgccctccctagctatttaatatttgataatgcaatgcagttttacataaaggtgtatatttcccctgctccagacttaaactgtgtatcgatatactgatttgctaatatgcaattctgattttgtaaatgatgtcgtaggcttcatggtagtgagacagcaggcctgtggta

SEQ ID NO: 21559 - DNA, 600 bp, Chicken  19866894232993_5
tattatgtttatatcgattaaaagatctaaaggagaaaaaaaaggaatcctactattgcagcttataaggatatataacaagtgctggattaactgtagatctcttcagaaaaatatacagagttagaatttagtcattctgaactttgcaattgaaggaaaagtatatttttccataatttgttatttcccaggcatactgtggatacatgagtattctagttacccacacactgttatttttaattattaatcccccagtcccttcaaaaaatatccaagaaagatgttagcatgggrgagaaagagaaagcttttagaaattgaaatatgctaaaatttcaagcttttctatgaaatggttgtagctaaatattctgctttgaaagagtacaaactgtatattttgttgaacttcataatgcaatgactgactgcacagaaattatagcatagttacactagtaatttttcatcctgcaattactactaattcatctaaccataaagagcatggatgggaataattacagtgtgaacactttgctgttagtacatctgagatacatatacatacatttatatagatctgacagtgtg

SEQ ID NO: 21560 - DNA, 600 bp, Chicken  19866894232996_1
tgtctggagaggaggagggcaccaaaaagcatgagaacgtgctgtattcaagattcctcctgctgcaggagcattttatttcaataatcttatcttattttctttggtttccagcaccagactctcctacagcaaggcaaccccactataaataaagggttattccatagttgggtcatctccagttttagtagatttaatattagtgcattgagccttttaaaggcggcatgctgttacttgttaatttattaagaaataaagcaagcgaccaattaacagtgaatctcatctactggwagcgtggctcacaacagcttgtggacagcagatcccatccatcttaaagtaaaaacaaaatggcagcgagttacgggttctctaactttgtgtgcgatgtccaactctttgcaactcaactcaaygcacaaagagtgtctgctcaggaaaagctgtggcccataactcggaatgcagcccaaccagggccaagcagttcatgcgattaaagtatttcaccctgattaaattcaactgtttccacccattgcgaactgggctcctgagccttctgcatggtcctccagtcttcattggcca

SEQ ID NO: 21561 - DNA, 600 bp, Chicken  19866894232996_2
cctacagcaaggcaaccccactataaataaagggttattccatagttgggtcatctccagttttagtagatttaatattagtgcattgagccttttaaaggcggcatgctgttacttgttaatttattaagaaataaagcaagcgaccaattaacagtgaatctcatctactggwagcgtggctcacaacagcttgtggacagcagatcccatccatcttaaagtaaaaacaaaatggcagcgagttacgggttctctaactttgtgtgcgatgtccaactctttgcaactcaactcaaygcacaaagagtgtctgctcaggaaaagctgtggcccataactcggaatgcagcccaaccagggccaagcagttcatgcgattaaagtatttcaccctgattaaattcaactgtttccacccattgcgaactgggctcctgagccttctgcatggtcctccagtcttcattggccaccactgactatgggagcccaaacatgcacatgtgtaatacttcaaaacgtagaaaaggggaaaatatatatatatcttccaccagcaactgccagctcacagccccaggtccagctgtgagttca

SEQ ID NO: 21562 - DNA, 600 bp, Chicken  19866894232998_1
agttcttccttctgaaatttgtacagatattcacagcaatatatttcaaggtagtctggaaaatcttcaataaacaaggagtactgtaagtcaatcactattcttccaacttttttttttttaaacatacaggtacactcaactagaagtgatgataatttctctcatgaacacatggagaacacatttcactgaaacacttcatatcaaactactgtgatgcaactcttgtcctcagcaccttcctaaggacctctttttttagagcaagacaaacatcataattcaactatgcaaccraaaatagcatataatctctacccatattaactagcattgttttgtataagccttgcagaaagcctctaagacaaatgtgtttataccagaaagtgaatattgtaaggaatagctatttcttcaattgctcattggttagaaggcctgaattcattacctgctacataaaacagtagaacacatgtgcatatcgctaaagtacttcagtttttcagggggaaaaaaaaaacattcatcactgtggacatacttatcaatataagtattttcagttttacaatgaaaaagagtaatttacat

SEQ ID NO: 21563 - DNA, 517 bp, Chicken  19866894232998_2
aatctctacccatattaactagcattgttttgtataagccttgcagaaagcctctaagacaaatgtgtttataccagaaagtgaatattgtaaggaatagctatttcttcaattgctcattggttagaaggcctgaattcattacctgctacataaaacagtagaacacatgtgcatatcgctaaagtacttcagtttttcagggggaaaaaaaaaacattcatcactgtggacatacttatcaatataagtattttcagttttacaatgaaaaagagtaatttacatgatctattaacrttccttttgaggtatcttccatacttcgtttccacttctcagttcatttttcttgttatttataccattaacatatgctacatacagctgcaactgcgttggcacagattgcgagtctgaaatcatagaagcaaacaaaaaatccttctaatgtatctcataaatatatgaattaactgtaactggattgtataaacatacaatattacattgtaag

SEQ ID NO: 21564 - DNA, 600 bp, Chicken  19866894233008_1
aatgtgtgtctttgaagatacagccttcaaatggattcccaaatctactgctgcaaatacaaggaataggcatgccctcatagtacgtgaactgagcagggaagctaattcaacaagcatctctaactgatagagctatgaagctagaacacaaaatctatacttttgtacttcctacaactactaagttgattttcctctttaaaagtgtttcaaagtgcagaagcgatacagcttcacttaataacaggtgtgtttgtggttcatgtaggtacccaggccactagacaaggcaggggkttttttttctccacacttccaaatttaattctaatctgaaaacactaaagaggaaggaaaggacccatgaattcaaagcgcacctaacaaatttcactcagtgaaygcttacttcttcccaatcacttgcaataaagacaaaggtaccacattgttgcttacagactagtcagagataattatcagaattgatacaaatcaaggagttactgtggctaaaagctatttgttttctggacctagatgttcagcgacatccatgcagttgtgcccacagctcacacatatgtgctccctgcc

SEQ ID NO: 21565 - DNA, 600 bp, Chicken  19866894233008_2
aattcaacaagcatctctaactgatagagctatgaagctagaacacaaaatctatacttttgtacttcctacaactactaagttgattttcctctttaaaagtgtttcaaagtgcagaagcgatacagcttcacttaataacaggtgtgtttgtggttcatgtaggtacccaggccactagacaaggcaggggkttttttttctccacacttccaaatttaattctaatctgaaaacactaaagaggaaggaaaggacccatgaattcaaagcgcacctaacaaatttcactcagtgaaygcttacttcttcccaatcacttgcaataaagacaaaggtaccacattgttgcttacagactagtcagagataattatcagaattgatacaaatcaaggagttactgtggctaaaagctatttgttttctggacctagatgttcagcgacatccatgcagttgtgcccacagctcacacatatgtgctccctgcctggagtccatgcagcattttagagtctgttagcaaaaggcaaagaaataccatatgctgctgcctcagtatcgcagcccattaaataaatgagcatcctttttaga

SEQ ID NO: 21566 - DNA, 600 bp, Chicken  19866894233016_1
ccagaaaggtaagttgttagtgcagttctcagcatcctagcagagaaatgggagagagagcaaggagatggcaaggcaaacaaagaacaatccattgcaaggccagttctgctcagattaagtaaattactgcctaacctcatctccagacaagatgacaagcagctatgatctaaaatgattcccctgtacttgccacaagctatcaacatcttaaatcaccacttaagttctcagctgagttctccctcatgcagtgcaacagtcagggcccaacagcacactccagctctggatttycacctccaccttggagcagtgagtgacccacaggagacctgtgagcaatgaggacctagcccctagaaagtcatttctgatcttctcaaagggcttatcaggtgaaatctatatgcagaagtgacagaacgcccacaattttgtgcctgtgtctttccagagatcctcattttgcgctcatcatttcaagggggttggtaaggatcgtttcaatggctacacaaaaccaaaaccaacccaactgttcctctttaaccccagaagggacagaacctcatgtgcactctgccattcggcact

SEQ ID NO: 21567 - DNA, 600 bp, Chicken  19866894233021_1
aatacatgcacattattattagtcatgctcagcctgggtttcaatgggtccctccaggatctacttctactcaccatttattttcattaatggtttggatgatataacagatgatgccatgacaaaccttgcaaatgctggggcagagcaggctgtaagctccctgcaaggcaaggctgtgctcgggtggatcttggctggttgtactcagcatgatctcattgatcacactcaatgagagtggtgaggcactgcacagactgcccagagaggtggtgcagacattcaaggtcagggaawggggctctgagcactgatggagctgtgggtgtccctgctcagtgcaggggttggacctgatggccttcagggtccctcccaactccaaccattctgagtctatgattctcagggagcgtggaaaggcattgctcaatggcatttctcacttcaaggccatgtttggggggcaaatttggttgtgcctatggatgctgtggggtctccagatggtacagctgtgaatacaccccctgttcctcatgccatgaggccatcaaagcacccagctcacggcacagcagtaaacatgcccgtgct

SEQ ID NO: 21568 - DNA, 599 bp, Chicken  19866894233024_1
  misc_feature (1)..(70): n is any nucleotide
nnnnnnnnnnnnnnnnnnnnnnnnnnnnnnnnnnnnnnnnnnnnnnnnnnnnnnnnnnnnnnnnnnnnnnttggagggaaagaatcaagtggggacataccctaaatatgaccaaatacataaaagcccaccccccctacacaagtgtaatgtaaaaatatcagtggtttacattgcattctagcaagagaagaagggcagctctctgaatgcatcacagtatataaagcagaataaaaagtttcctaatgctcagtataagtgttttgcatttaaaatgctatagataatatgaaaggsttgcaaagcaatttacagtccttctccaaattttttgtcatcactcaggtatctgcagcacagatctcttaaatatctcttaagatgtaggtggctaactagcaatttggaaagaagccagttaagatgaagaatggaaaagaaaactcaagagatcctgatttacagttctttaatctgtctcccagtattgcaacgacaaatattaatggtaagaaaaatatattcagagcattagaacagcaacagcttaagtacagcaatgagaacggctatggagtctagaatgtttcagtggt

SEQ ID NO: 21569 - DNA, 600 bp, Chicken  19866894233028_1
gagtttatttttcccctgaagtttttcaacaatttagtagcaactcttacagtatatttttttttctgacaaaatcctatttggtttctgttacagaataagcttgtgaccattgagaccagtatttttacaagtttacctactgtagacatatttaatgtgctctaaccatcctccaacttgactatgtattcactcttttctgtagcatttaaaaactgtgagctcactggggcagagacttcaggaaataccttcaggcaagacctcctgagtgtgttatcacaagaaagataaatygctaccaataaatatttgcttaaattacacttgcttgaaggctgaataccataaaacttttggaataatactgacagttttctatagagttctgcacctgattagattaaaaataaaataatatgtttcttaactttctaaaaagtgttatatcatattgagaactaaggattaaaagctttaaacctcatacattctactaaaacaaaaaaaaagtcaaacatttgtaggcaacatgatctatcaagtctgcagaagtgtgggaattactttaatgtgtctaacagaagggcaatttaa

SEQ ID NO: 21570 - DNA, 600 bp, Chicken  19866894233028_2
tcaaagatctcatctggttgtgtatgcataaatccctttttgataatctctggatcaggaggttaattatgtaagactctaatttgtaaaaaatgttagagtaaaacactattcaacagtaagtaaaataagcaagtctgactaactttccagtccaaggggctaatataggacagagtgagattcatcttacgtacattagctgtataaattaaatcactatggcatcttaaaatggggaggcatatgtaccctcagaaggagattttttccttttgcatttttagagggaacctagayttcagggcactgagtttggattggagtcatctcactaacaagcagatagacagaactggaattatttagtcacaacttcaatttacctaaaaatttagtctctctctgtctacaaaaacatctgtctacataatgggtaattttgtaatagaatttccctggtaaatggataatacattttttctcattagcatctacaatattatggacactgcttttcctccctcaagaggacaagcccatgaacatctcattttggctgcagacaggttcatattctgattaatcatattctgatgg

SEQ ID NO: 21571 - DNA, 600 bp, Chicken  19866894233028_3
tctggatcaggaggttaattatgtaagactctaatttgtaaaaaatgttagagtaaaacactattcaacagtaagtaaaataagcaagtctgactaactttccagtccaaggggctaatataggacagagtgagattcatcttacgtacattagctgtataaattaaatcactatggcatcttaaaatggggaggcatatgtaccctcagaaggagattttttccttttgcatttttagagggaacctagayttcagggcactgagtttggattggagtcatctcactaacaagcagatygacagaactggaattatttagtcacaacttcaatttacctaaaaatttagtctctctctgtctacaaaaacatctgtctacataatgggtaattttgtaatagaatttccctggtaaatggataatacattttttctcattagcatctacaatattatggacactgcttttcctccctcaagaggacaagcccatgaacatctcattttggctgcagacaggttcatattctgattaatcatattctgatggccacaaggcctgattgtatgggatcctgggcagcctgatattgtggct

SEQ ID NO: 21572 - DNA, 600 bp, Chicken  19866894233028_4
ctggatcaggaggttaattatgtaagactctaatttgtaaaaaatgttagagtaaaacactattcaacagtaagtaaaataagcaagtctgactaactttccagtccaaggggctaatataggacagagtgagattcatcttacgtacattagctgtataaattaaatcactatggcatcttaaaatggggaggcatatgtaccctcagaaggagattttttccttttgcatttttagagggaacctagayttcagggcactgagtttggattggagtcatctcactaacaagcagatayacagaactggaattatttagtcacaacttcaatttacctaaaaatttagtctctctctgtctacaaaaacatctgtctacataatgggtaattttgtaatagaatttccctggtaaatggataatacattttttctcattagcatctacaatattatggacactgcttttcctccctcaagaggacaagcccatgaacatctcattttggctgcagacaggttcatattctgattaatcatattctgatggccacaaggcctgattgtatgggatcctgggcagcctgatattgtggctg

SEQ ID NO: 21573 - DNA, 600 bp, Chicken  19866894233028_5
tggatcaggaggttaattatgtaagactctaatttgtaaaaaatgttagagtaaaacactattcaacagtaagtaaaataagcaagtctgactaactttccagtccaaggggctaatataggacagagtgagattcatcttacgtacattagctgtataaattaaatcactatggcatcttaaaatggggaggcatatgtaccctcagaaggagattttttccttttgcatttttagagggaacctagayttcagggcactgagtttggattggagtcatctcactaacaagcagatagycagaactggaattatttagtcacaacttcaatttacctaaaaatttagtctctctctgtctacaaaaacatctgtctacataatgggtaattttgtaatagaatttccctggtaaatggataatacattttttctcattagcatctacaatattatggacactgcttttcctccctcaagaggacaagcccatgaacatctcattttggctgcagacaggttcatattctgattaatcatattctgatggccacaaggcctgattgtatgggatcctgggcagcctgatattgtggctga

SEQ ID NO: 21574 - DNA, 600 bp, Chicken  19866894233028_6
ggatcaggaggttaattatgtaagactctaatttgtaaaaaatgttagagtaaaacactattcaacagtaagtaaaataagcaagtctgactaactttccagtccaaggggctaatataggacagagtgagattcatcttacgtacattagctgtataaattaaatcactatggcatcttaaaatggggaggcatatgtaccctcagaaggagattttttccttttgcatttttagagggaacctagayttcagggcactgagtttggattggagtcatctcactaacaagcagatagayagaactggaattatttagtcacaacttcaatttacctaaaaatttagtctctctctgtctacaaaaacatctgtctacataatgggtaattttgtaatagaatttccctggtaaatggataatacattttttctcattagcatctacaatattatggacactgcttttcctccctcaagaggacaagcccatgaacatctcattttggctgcagacaggttcatattctgattaatcatattctgatggccacaaggcctgattgtatgggatcctgggcagcctgatattgtggctgac

SEQ ID NO: 21575 - DNA, 600 bp, Chicken  19866894233035_1
agtgtgcacagaggtgatcaaagcaaagcatttggcaaattagtttgcttccatcttaactgatcacattccttgacatctctttgctcacagactcttaacatctgttctcaggttgacaaggtgaatcccacagctcgtgcctccttggttatcatacaatggcttgggttggaagggacctcaaggatcatcaagctcctacagccctgcggcaggcagggccacctacctccatttctaaaactagatcaagggcatctgctgctcaccggatgtcttcatatcaccaagaaaacyggacaatgcctttccacactctcctcatagctccacaatgttcccttcccaagagtcctccccagtgacagtaggtgctacacaggagtcaagttagcaagtccagcagaactaattaaactgggttcagctctgtgctctgtcacgtcttacctcccagttttgatatgccttagaagtatacatgtatccaattaaaaaaaaaaaaaagccatttccttagaaatcctgttataaaaagtcgaagttcactctactactcttcaattacaggagggaaatgaatctctagtactgtct

SEQ ID NO: 21576 - DNA, 600 bp, Chicken  19866894233037_1
gcctcataaaagtgaaggaaatagattgtcctggaaatgatgcaagtactggacatgcagtggaaagtcaactagtcaaagcatgccaaaagctagatactgaggaacgagtcagatgatggacatgtggagacctgtgctgcagatatgtcaagggctgcaaggctaaactggcaagggaactatttatgaatgttgaagtggaattaaacttaagttacaacagcttaaagaatgtcaaatatgtgagccagcaatatgccctcgccacactgaaagctaatattctgggcaaagcartgccatcaggttgagggaggtgatccttgccttctgcttacatttgaagacacatckggagctctcattattaatgcaaaactggttagcagagagcatcatatgtgtccaaggaaaatccctttcctggactgaaaaaacacctgactaaatttacagatttggaagtgcgatgaattcattggttctgcagctgaattgtagcgtttggtctttgagatgggaagaggaagtggcaaatgcacagggtaactcatttacttgtttaaccaccactcgtggaaaaggtgttctaaaaaa

SEQ ID NO: 21577 - DNA, 600 bp, Chicken  19866894233037_2
cagtggaaagtcaactagtcaaagcatgccaaaagctagatactgaggaacgagtcagatgatggacatgtggagacctgtgctgcagatatgtcaagggctgcaaggctaaactggcaagggaactatttatgaatgttgaagtggaattaaacttaagttacaacagcttaaagaatgtcaaatatgtgagccagcaatatgccctcgccacactgaaagctaatattctgggcaaagcartgccatcaggttgagggaggtgatccttgccttctgcttacatttgaagacacatckggagctctcattattaatgcaaaactggttagcagagagcatcatatgtgtccaaggaaaatccctttcctggactgaaaaaacacctgactaaatttacagatttggaagtgcgatgaattcattggttctgcagctgaattgtagcgtttggtctttgagatgggaagaggaagtggcaaatgcacagggtaactcatttacttgtttaaccaccactcgtggaaaaggtgttctaaaaaacgtggggaacgtgcttaaagcagaaccactctaagtaaagtcaaccatttgggaaca

SEQ ID NO: 21578 - DNA, 600 bp, Chicken  19866894233040_1
gaatgaaaaataaagttcctggaaatttggctttgtgcaaaaccatgtgattaaatgagggacagcaaaacaatcagaatttctgtttaaaaattactgttttgattcaaatatctgtgtcagtggtccagcataacattgatacaggataacctaactcataattcataattgtactggtaggaatgagatatgctagctcactgtggtgatttcagtgagcttttagtccaaagttctggttaacaaaaaaagacaggagcacagaattacacaggctttgcacagactctatgcacwrtctctgcacagaattatatgaagtatttttaaacacttcttgactgtaaaagagatgataccctggaggatgtgacaggtcattgtatgcctgtcacacagtgttaaaattgagcattaggaagtactccaaatatagtttccatagcagataacttcagaggtgaatttgggactgcatgcctacctgatctggggctttgtagctgtactctgtgctgtgctgctggtcttataggtctgttaccattgacatgccaaaaaaggcgtaggtcagacttttatgatcagccctttgga

SEQ ID NO: 21579 - DNA, 600 bp, Chicken  19866894233040_2
aatgaaaaataaagttcctggaaatttggctttgtgcaaaaccatgtgattaaatgagggacagcaaaacaatcagaatttctgtttaaaaattactgttttgattcaaatatctgtgtcagtggtccagcataacattgatacaggataacctaactcataattcataattgtactggtaggaatgagatatgctagctcactgtggtgatttcagtgagcttttagtccaaagttctggttaacaaaaaaagacaggagcacagaattacacaggctttgcacagactctatgcacwrtctctgcacagaattatatgaagtatttttaaacacttcttgactgtaaaagagatgataccctggaggatgtgacaggtcattgtatgcctgtcacacagtgttaaaattgagcattaggaagtactccaaatatagtttccatagcagataacttcagaggtgaatttgggactgcatgcctacctgatctggggctttgtagctgtactctgtgctgtgctgctggtcttataggtctgttaccattgacatgccaaaaaaggcgtaggtcagacttttatgatcagccctttggat

SEQ ID NO: 21580 - DNA, 599 bp, Chicken  19866894233053_1
  misc_feature (1)..(30): n is any nucleotide
nnnnnnnnnnnnnnnnnnnnnnnnnnnnnnctcctacctctgaaatagtggaacacatacgtacaggtaattgctcacacaatattcttcagcaaagtcagttgtaaattaaattgcaaataaacctggtaagctgtgtgagctgaactttgtagaaagtaaatctttggggatatgggtggaagtgtgattgtgaacttgggagtgaaagagtttcgtcttgctttagttgacactgtgtgaaatctgaacaaatacctgagatataagaaatgcctgagagacttctgtgtcactgcrtaagttgtgattactcttctaccaggacctgatgcgcttgtaagaaaggccttctctttttcctrtgtctgcttacctactgccctatggcagtaggggatggagcattgcaaaagcttttattttgcagcagtgctgttgagttttggacaagggctggtggtaacatggctatagagtgagggatgcactgtggaaagcaacgcattggcttctcccagtgtctccatgcatcttgtaggatgtctgctgagttctttcccacagagtggtgatgtgactgcaaagctgatttctgt

SEQ ID NO: 21581 - DNA, 600 bp, Chicken  19866894233053_2
ggtaattgctcacacaatattcttcagcaaagtcagttgtaaattaaattgcaaataaacctggtaagctgtgtgagctgaactttgtagaaagtaaatctttggggatatgggtggaagtgtgattgtgaacttgggagtgaaagagtttcgtcttgctttagttgacactgtgtgaaatctgaacaaatacctgagatataagaaatgcctgagagacttctgtgtcactgcrtaagttgtgattactcttctaccaggacctgatgcgcttgtaagaaaggccttctctttttcctrtgtctgcttacctactgccctatggcagtaggggatggagcattgcaaaagcttttattttgcagcagtgctgttgagttttggacaagggctggtggtaacatggctatagagtgagggatgcactgtggaaagcaacgcattggcttctcccagtgtctccatgcatcttgtaggatgtctgctgagttctttcccacagagtggtgatgtgactgcaaagctgatttctgtctatcactttatttgtgtttcttattgaaggatgaaatatgtccaccagcagaaatttggtttaga

SEQ ID NO: 21582 - DNA, 600 bp, Chicken  19866894233055_1
ggaagccgaggggaaggattcacttctccccctgggactggaggctgcagccttgctaactgtttacaggtgctggggaggacgccgtgtgggaggccagcaccccaccaggcaccccaagctcaccgtgtgccctccaaccctgcactgcagagttcagccccacagcagcctccagggcacaaagtgcagagccccgccagaccaccggggaggtgagagctggtgggagcaatagagctttggggggcatccatggggggcaagagggttgttttcgggggcagcttgctgagcttsctgctgaagggtgggtgaggtgggagccccatggggctgtgggtgctgcgctgcttcaccatttatctgtccctatccagggcagccctgagacggtacgcagacccaaaggtgagtgggacaccagtgtcatcaggctggggtgaggcaggctgggggctcgttcccccgccccactcctgaagcaccccaaaatgctgcaggagtggcgaccaggctgagccgccggcgggtctcatgccgggacctgggccgggtggactgcgatggctggctcctgaagaagaaagaccacgtggg

SEQ ID NO: 21583 - DNA, 600 bp, Chicken  19866894233059_1
agcagtgatgttttgaaacaagctctccctaagaccagtgggggaaaatggctaacttatggcaagctgaagcttcatgaatatataaaacttgtgtcattgtatgatatgattgtgtcagcagttgggatcccacaaagctccgctttgcccttaattctaatctttgtggacaccagaagcagcccaaaggctcttagtggcctccaatagcctctccgtggccccagataggtttcactatttgtgcctttgctcttatttccccatttatttttcagggtggctatctgatagtcrgtatgtgcaaaatatactgatgtgtcatckccttctgccatttaaatccaggctgggtaaagtagttaagggtagaatgggaaggagacaattttgtatcagggaagactcagaccaggggaattaagagtatagcattcactaggtcttattctttgccaatagcattaatatttgtcaggagataatctggttttcagttgaatttccttagctgcaattccaaaaaggtgttctataaaaatatatgagatcattagactcagtaacagataaaagagttctgtaatttcttggagg

SEQ ID NO: 21584 - DNA, 600 bp, Chicken  19866894233059_2
aagaccagtgggggaaaatggctaacttatggcaagctgaagcttcatgaatatataaaacttgtgtcattgtatgatatgattgtgtcagcagttgggatcccacaaagctccgctttgcccttaattctaatctttgtggacaccagaagcagcccaaaggctcttagtggcctccaatagcctctccgtggccccagataggtttcactatttgtgcctttgctcttatttccccatttatttttcagggtggctatctgatagtcrgtatgtgcaaaatatactgatgtgtcatckccttctgccatttaaatccaggctgggtaaagtagttaagggtagaatgggaaggagacaattttgtatcagggaagactcagaccaggggaattaagagtatagcattcactaggtcttattctttgccaatagcattaatatttgtcaggagataatctggttttcagttgaatttccttagctgcaattccaaaaaggtgttctataaaaatatatgagatcattagactcagtaacagataaaagagttctgtaatttcttggaggaactctcttgtagtttttcatgaagctttg

SEQ ID NO: 21585 - DNA, 600 bp, Chicken  19866894233071_1
tggcccagagctggacaaatatttataatgccattaagaaaacatctatagttaataaactcatatggcagaatactattcaagtgctttaagctagtatttactttgttacaacacattgactaagattacttcttaaatctgaagattaaatttgcctcctgatgattttcttatattttcacttatcagacaattacagtagctttcagtatcatagtgagcagaattacaaggtgaattatgtttgcatttctgcagggaatcagcttgcaacctctggtgataacgcaactctgraaatggggtagtgttatacatgtagtgtcaagggacatcaaaaggagcatgaggactcagaactgtttgtagataaggtttatgggaataatgtccacagcttaatttctattatttcgtgacaataaatgattgaacagaaaataaacctgaggaaacttgtttgaattcttcctaaaattgatacctgaaatgtgacttttacaacaggtttgagacacacacagatacttttcagactgtgccaaacacaaaaaaaagtctgttttccagacagtggtatgttttcattggcttaat

SEQ ID NO: 21586 - DNA, 600 bp, Chicken  19866894233081_1
tgttgaaaatgtaaggatgtctgcccatttttcactccatggtttaatggattcatggaaaaggagatgtgtatatagtctctcagcagtggtctgaaattacggagttattcatctctcttgaacaagaaaattgcaaaggattcatcagtgctgcctgacccagtgaggtatttcagaccataaatgccaagcttatgcactaaatacttgagatactttcctagagggcgtctccagactccattaatacttttaactttaaatacattggaaaagggctgaacaaaagtaagcatrgttcctgggtggctgctattgataaataattgcagccctccttgaacaagtgatcactgtgtgctatttaagattcgtttctaaaagaatactcagatgtcgaaggttctaattgtagtgaccggtgactttctcttcccttctcaactgcttcttgatcttttgtgcttcccaataaatagttctcgttaacttctcacctttcttctcaagctctcgggctgagggacgcgctctccacactggatgcttctgacacatcatgcgtatcatcagagatgtgcagtagtgaaggtgcag

SEQ ID NO: 21587 - DNA, 600 bp, Chicken  19866894233082_1
ctttgctgatgctggtttctctacttcggcgcaaattgcgtaaagcattgcacagacgttgcacaatggcagcagcaccaggctgcttggagcaggggtcatagaggcaaggctggggctcaggctctgtcctctattcctggggtatctgttgcttggagggagcacgctgctccagaggggtttgtgttctgggtgctgcgatgagtgctgggtgctttgtgtactgggagtgtgggactcgcagctctcacgccctccagctgcagaaatgccaaacagtgactgtgcaggagcacrgggcaccctcatcctgcagctcagagctgtgtgwgtgtggctttggcgtgcacgttgtgccccaggctccttcacacactgtcttgtgttcccctccgcagcctctccgagtgaaggtgtcagagcagcttctggctgagatcggtgagtgaggagcactcaggggctgccagaaagtcctcactgcactttcctgcatggctggtgacactgcctgtccttttaccacccagaggctcgcctgcggaatggggatgatgtccgatctgccctcttcgaagctcaggagatggtgatgcc

SEQ ID NO: 21588 - DNA, 600 bp, Chicken  19866894233082_2
attgcgtaaagcattgcacagacgttgcacaatggcagcagcaccaggctgcttggagcaggggtcatagaggcaaggctggggctcaggctctgtcctctattcctggggtatctgttgcttggagggagcacgctgctccagaggggtttgtgttctgggtgctgcgatgagtgctgggtgctttgtgtactgggagtgtgggactcgcagctctcacgccctccagctgcagaaatgccaaacagtgactgtgcaggagcacrgggcaccctcatcctgcagctcagagctgtgtgwgtgtggctttggcgtgcacgttgtgccccaggctccttcacacactgtcttgtgttcccctccgcagcctctccgagtgaaggtgtcagagcagcttctggctgagatcggtgagtgaggagcactcaggggctgccagaaagtcctcactgcactttcctgcatggctggtgacactgcctgtccttttaccacccagaggctcgcctgcggaatggggatgatgtccgatctgccctcttcgaagctcaggagatggtgatgcccgagatacaggagcagatccaggactacaggtga

SEQ ID NO: 21589 - DNA, 458 bp, Chicken  19866894233084_1
tttatcttactagaagcgtttcttggaagggctggaaaaaatttatttcagatggatttttcagctgagaacaaagttgtatttattataattatgcactctccactgtggcctgcctcgctgagaaagaacattaaattcagctgcacacgaactcacggaagtgaccttttgaatgagaatgctgcaacgagagactcatagagcattctccctaaataataccccactgtttgcagcttgcgattagcactctgaccactgatttcagctgctacttacacaggcacaagtccacaygaggtcaatctgctgagagtaactcacgcttgctgcaaactgcaatgtggagaactggacttgggaaactattcaaagtctccagtccaatttgttttgatgaacattcattaaccatcatgtggcagcataaccttgggaggcactctaagagggct

SEQ ID NO: 21590 - DNA, 600 bp, Chicken  19866894233085_1
tttctggagacaagtctacttgtttgctaagctgtaaggggtatgttcctctattatttgaagtgcactgagatataaaagctcacagagatgatttcttccacttcatgtgtccctgcaatcctgaatttgtcagggcctggttttcagtggtgcctcttgctgttgaacacatttgggagctctgacaatcaaatcatatattaaatacatgttaaatatatgtatttagaattcaagcagtgggcactgataatgttaatgtactgaaacagaggaaggaactgaaaggctttctcmaaaaaagtgcacatggagccattaataacttgcagttcattttccctttgtggcagatgaagggtggtgtccctccttgctccattacagatgtactgcttaatcttgattgattctggaagagtggctacacaaagcacagtcaggtgaatttaggagaatttagcttcctgctggtggttgaacmcatgtcttgaagccacccatccaaagtttcagtctggcataggaaacagtaaggacaagaggctgtaatctgcactgggaggatgacactgaagtagcacagctctcactgaa

SEQ ID NO: 21591 - DNA, 600 bp, Chicken  19866894233085_2
acaatcaaatcatatattaaatacatgttaaatatatgtatttagaattcaagcagtgggcactgataatgttaatgtactgaaacagaggaaggaactgaaaggctttctcmaaaaaagtgcacatggagccattaataacttgcagttcattttccctttgtggcagatgaagggtggtgtccctccttgctccattacagatgtactgcttaatcttgattgattctggaagagtggctacacaaagcacagtcaggtgaatttaggagaatttagcttcctgctggtggttgaacmcatgtcttgaagccacccatccaaagtttcagtctggcataggaaacagtaaggacaagaggctgtaatctgcactgggaggatgacactgaagtagcacagctctcactgaatgatgacccattaaaagagagagggcagtttgatttctggcagtgcagaagtgggtgttgatgtaaggaggagagttatgccctcataacccaggcgttatcttgaaagctattatcactctgcagccaccatatcatttcctccattcagtacgtacagtcatttccatcaataaaatgggagcag

SEQ ID NO: 21592 - DNA, 530 bp, Chicken  19866894233101_1
gtagcagtaataactctaaaaccaatctcatctaatgaaacatgcaacatttctccctctaggatggagaggtgtactgcatagatgcccgtttctatggcaacatcagccgctttataaaccacctctgtgagccaaacctcattcccgtgcgagtcttcatgtctcaccaggacctccgcttccccaggatcgccttcttcagcacgaggcacatagaggccggagaagaaatcgggtaggtaccgacctgggctggctgcctgcaccttgcctgggcaggactgaatgctgcaaacmttcacgtgccctgtcctgtgttctgagcagtgggttttcctccagagcacactgactgatatcactgattttgtactttcctgttcctycttcttttgtttggtgatatctgtaactcagcctcccttttgcactaaactttttcttttgggggcttgttgtggatagccactgaagcattcagacattgggaatcacacacaaagaaaaaaaacaacaataaaatccca

SEQ ID NO: 21593 - DNA, 441 bp, Chicken  19866894233101_2
cgtttctatggcaacatcagccgctttataaaccacctctgtgagccaaacctcattcccgtgcgagtcttcatgtctcaccaggacctccgcttccccaggatcgccttcttcagcacgaggcacatagaggccggagaagaaatcgggtaggtaccgacctgggctggctgcctgcaccttgcctgggcaggactgaatgctgcaaacmttcacgtgccctgtcctgtgttctgagcagtgggttttcctccagagcacactgactgatatcactgattttgtactttcctgttcctycttcttttgtttggtgatatctgtaactcagcctcccttttgcactaaactttttcttttgggggcttgttgtggatagccactgaagcattcagacattgggaatcacacacaaagaaaaaaaacaacaataaaatccca

SEQ ID NO: 21594 - DNA, 600 bp, Chicken  19866894233103_1
ttctttttctttaatgtgattatgtttcctcatagcacatacatccatggattattgtacatttgttgttttcataagttgatttaattttatataattgcatcagtagtaacatagcaaaagcctctcagacttcctataaacccatagtatttagatgtctgatttaaaaaaatgcaatagataaaaaactaaggctgttaaaaaggacgattctctctgagaacactgtttaaacagagctcttcaatggcttgagctggagtcactcacgtgggttacagaactgtacagaagaakattaaacttsttttacctggaatgcattgttcacgcttcctgctgggtatgtcacaggggccctccttaatcacctacgagatgaagaaatctacagaaatctcttaaaaatmtctgatagaaatagtttggccaatcttagatgtctgctttatagaatcttagaataattaatgtaggactgggctagatcaggtttctcagagtcttgtccagtcacgttttgcctgtctccaagtatgaagattctgcagtctcacaaaactatttctgggcaaactgtcaygctgcagatttttt

SEQ ID NO: 21595 - DNA, 600 bp, Chicken  19866894233103_2
ttaatgtgattatgtttcctcatagcacatacatccatggattattgtacatttgttgttttcataagttgatttaattttatataattgcatcagtagtaacatagcaaaagcctctcagacttcctataaacccatagtatttagatgtctgatttaaaaaaatgcaatagataaaaaactaaggctgttaaaaaggacgattctctctgagaacactgtttaaacagagctcttcaatggcttgagctggagtcactcacgtgggttacagaactgtacagaagaakattaaacttsttttacctggaatgcattgttcacgcttcctgctgggtatgtcacaggggccctccttaatcacctacgagatgaagaaatctacagaaatctcttaaaaatmtctgatagaaatagtttggccaatcttagatgtctgctttatagaatcttagaataattaatgtaggactgggctagatcaggtttctcagagtcttgtccagtcacgttttgcctgtctccaagtatgaagattctgcagtctcacaaaactatttctgggcaaactgtcaygctgcagatttttttcctttatgt

SEQ ID NO: 21596 - DNA, 600 bp, Chicken  19866894233103_3
atagcaaaagcctctcagacttcctataaacccatagtatttagatgtctgatttaaaaaaatgcaatagataaaaaactaaggctgttaaaaaggacgattctctctgagaacactgtttaaacagagctcttcaatggcttgagctggagtcactcacgtgggttacagaactgtacagaagaakattaaacttsttttacctggaatgcattgttcacgcttcctgctgggtatgtcacaggggccctccttaatcacctacgagatgaagaaatctacagaaatctcttaaaaatmtctgatagaaatagtttggccaatcttagatgtctgctttatagaatcttagaataattaatgtaggactgggctagatcaggtttctcagagtcttgtccagtcacgttttgcctgtctccaagtatgaagattctgcagtctcacaaaactatttctgggcaaactgtcaygctgcagatttttttcctttatgtccagtcaaaatgtcctttacyacaaggtgtgacatttgcctgttgtcctgctactaagcatctccaagaagaatttggcagtgtcttctttgtaccctcycag

SEQ ID NO: 21597 - DNA, 537 bp, Chicken  19866894233103_4
ctgtacagaagaakattaaacttsttttacctggaatgcattgttcacgcttcctgctgggtatgtcacaggggccctccttaatcacctacgagatgaagaaatctacagaaatctcttaaaaatmtctgatagaaatagtttggccaatcttagatgtctgctttatagaatcttagaataattaatgtaggactgggctagatcaggtttctcagagtcttgtccagtcacgttttgcctgtctccaagtatgaagattctgcagtctcacaaaactatttctgggcaaactgtcaygctgcagatttttttcctttatgtccagtcaaaatgtcctttacyacaaggtgtgacatttgcctgttgtcctgctactaagcatctccaagaagaatttggcagtgtcttctttgtaccctcycagtaggtagtttaaagcaacagtgtccccttagccaactcctcttagtatcagataatcgttttattgcctcccctttggtggccttctaccaggctttttccagtatgtca

SEQ ID NO: 21598 - DNA, 492 bp, Chicken  19866894233103_5
cacgcttcctgctgggtatgtcacaggggccctccttaatcacctacgagatgaagaaatctacagaaatctcttaaaaatmtctgatagaaatagtttggccaatcttagatgtctgctttatagaatcttagaataattaatgtaggactgggctagatcaggtttctcagagtcttgtccagtcacgttttgcctgtctccaagtatgaagattctgcagtctcacaaaactatttctgggcaaactgtcaygctgcagatttttttcctttatgtccagtcaaaatgtcctttacyacaaggtgtgacatttgcctgttgtcctgctactaagcatctccaagaagaatttggcagtgtcttctttgtaccctcycagtaggtagtttaaagcaacagtgtccccttagccaactcctcttagtatcagataatcgttttattgcctcccctttggtggccttctaccaggctttttccagtatgtca

SEQ ID NO: 21599 - DNA, 413 bp, Chicken  19866894233103_6
atmtctgatagaaatagtttggccaatcttagatgtctgctttatagaatcttagaataattaatgtaggactgggctagatcaggtttctcagagtcttgtccagtcacgttttgcctgtctccaagtatgaagattctgcagtctcacaaaactatttctgggcaaactgtcaygctgcagatttttttcctttatgtccagtcaaaatgtcctttacyacaaggtgtgacatttgcctgttgtcctgctactaagcatctccaagaagaatttggcagtgtcttctttgtaccctcycagtaggtagtttaaagcaacagtgtccccttagccaactcctcttagtatcagataatcgttttattgcctcccctttggtggccttctaccaggctttttccagtatgtca

SEQ ID NO: 21600 - DNA, 469 bp, Chicken  19866894233107_1
ttcctaatggttcatgcacacatcacctggtatctcccaatgactttctgtccttccaggaagggcaggactaactcttcaaggccagcttttgaattgtatgttgtccttactaagtggccagatgtatggtcagaaagcaacacccttccatgtcatagtgaccatgggagcatttttacttcttgctggaagaacacccttcttagcatttctccatgtggttttcatccacgtaagggtcaatatctctatatgcattcctgatggatgtagtttttatttgcctctacatgatakatgtgtgtagagagaataaggctgattgctgaactaggaacatcccacagaaagaaactccttcctgctctgtctcattagctctcagcacaacctgatcccatctgctggagaactcagaagctatgcttgtaattattgatactaaacatcataacaggcgcagaat

SEQ ID NO: 21601 - DNA, 599 bp, Chicken  19866894233109_1
  misc_feature (1)..(156): n is any nucleotide
nnnnnnnnnnnnnnnnnnnnnnnnnnnnnnnnnnnnnnnnnnnnnnnnnnnnnnnnnnnnnnnnnnnnnnnnnnnnnnnnnnnnnnnnnnnnnnnnnnnnnnnnnnnnnnnnnnnnnnnnnnnnnnnnnnnnnnnnnnnnnnnnnnnnnnnnnnnnaattaagtggtcgagctgctaacagaaaaatatgcagcctttcattacagtgctaccatgccagaagataagaggtaacaaatacctcatctcaaaaaatctggaaggtgtgttcctgcaagcttgattagggctgtagattgyttttctcttttaatcatcttggcttcagaaagaagatcagcatatccagygaaaagagccagcctcagcccatcaggagccactggcaaaggcgagcgtgggtggtttgctggctaagcatattctggtgaccactgacctggagatgagtggtggtccttgaaaggattgacttcaatgataattaaaaaacaacttccctaattaacccctgcccttcttaaacgtggcctagcttcagtgagtgtctatcccttggaataatgctgggataggttaactctttccttggcacactt

SEQ ID NO: 21602 - DNA, 599 bp, Chicken  19866894233109_2
  misc_feature (1)..(106): n is any nucleotide
nnnnnnnnnnnnnnnnnnnnnnnnnnnnnnnnnnnnnnnnnnnnnnnnnnnnnnnnnnnnnnnnnnnnnnnnnnnnnnnnnnnnnnnnnnnnnnnnnnnnnnnnnnaattaagtggtcgagctgctaacagaaaaatatgcagcctttcattacagtgctaccatgccagaagataagaggtaacaaatacctcatctcaaaaaatctggaaggtgtgttcctgcaagcttgattagggctgtagattgyttttctcttttaatcatcttggcttcagaaagaagatcagcatatccagygaaaagagccagcctcagcccatcaggagccactggcaaaggcgagcgtgggtggtttgctggctaagcatattctggtgaccactgacctggagatgagtggtggtccttgaaaggattgacttcaatgataattaaaaaacaacttccctaattaacccctgcccttcttaaacgtggcctagcttcagtgagtgtctatcccttggaataatgctgggataggttaactctttccttggcacacttatgagtggaatgataggacaaagctattgtcctaataacccaggatttcc

SEQ ID NO: 21603 - DNA, 538 bp, Chicken  19866894233110_1
gaaacctttctcagttctcttttaatttccgcctaaaaatccacagtgcatatagaaattttacttactgtttacactgaggtacaaaaggtgcaagagggaggggtgggatatgttagcttttcagtgtagctcctcccgtcatcacagattctgaaagaaaatttagtgttccaaattatgtgctggttgaattgcagctatttaaacactccttgccctgcagtgtcagaatcacagaagcatccatatgtaaatacttgattgagaaactgaaaaaattagaaactgctgctttcrtaatgcaagttgaatggaatttaagagccaaccttaagacatttttgtttaaaagtttaaattattggggttgttgataaaacattgtgtaggcaggagaggagagtagttatactgcttttaaaaatatttatttggttattagatgttaaagcaagatctaattcaatttcatgtatctgcctttggttcaagactttgtacaacaccaacatgcacttaacttcacaatgattcc

SEQ ID NO: 21604 - DNA, 600 bp, Chicken  19866894233113_1
tgtccacagtgcccctgaagatcacttaatgcacaatttgtgatgatgagcttaccttgtacttggtaataagccagaagactcctagtagtttaagggagggctcatgagtttcaaagttcaccagcagttttaaagaccagaagatgttgattcatccctcgataaattattttagagctttctgcagctcttagcattaaaagctacttctattacgtatttgattaacccagctgtgaaatgcatggagtcttgcactggcctgtcactgtcagcacaggaaaggaaacaggtatrgccagcattaacaaaagccatgttaccataatgcatgagttaccctacataccctaggataactgtttttcccatctttttacaattatatttctaaaacacaaagggaagaaacttgatatagctgtacatcaaatataaagcacaaaataactttctggatttcaaaactcatagaattatagaatgccttgggttagaagggacctcaaggatcataaagctccaacccccctgccacaggcagggccgccaacctctgcatttaatactagaccaggctgcccagggccccatcca

SEQ ID NO: 21605 - DNA, 600 bp, Chicken  19866894233116_1
agagagaaggcaacttgtggtcatgagaaggaagactacttactacatctctgagggtcttgaaacaccctccactcaaaatcactgagcatgtgcaagcagatgggaccctatgttaatgattttgggaacaagtattgaatatgtatgtactgcccaggaaaccttttgcatatgtaaaacaataatatgtatatgctgaaggtcttttgttcaaggtatgtgtggctagaatgcctactaacatcacactggagttaatgagtttattcctgaatttcagatgacacaagcatcatrcccagagaggttgtggagtctcctccttggagatcttcaagagccacctggatgtggtcctgagcaccctactctgggtgtccgtgcttgaggcctcctctgcttgggccaggtggcttccttaaccattctgtgtgattctgtctttacattcccaaacagaatccatcaaataactgatcatattcaacttcaaaattttaattgaaggtggatatgtttttgttgttgttgtttctgaaaggtgaaaattggttcaatattaaaactgattattttcaagtgattgaaatttgtatt

SEQ ID NO: 21606 - DNA, 600 bp, Chicken  19866894233119_1
aaaagttagttatggcccgctcagaaggaacacggcattaaggtgattttgtatctgtgtgaaggtcgaatgataggattgctgcttttttaaaatggaatattggctctccaaggagaaatgagctcgtattggtgtttttttagacagggaacgccctggataaggcttttgaaggcaattctgggggcaggtgggtggcttgaaggcaccctaaaatctactgggtaaaatagagaagaagcagatggtcagagaaagcctgcatgtgagaggtgtgactacaggacgtgagctcayrgagcaaatgactcccatacctgatgggtagagctggagcatcctcacgggacatgcatcagagtcatctactaagggtggggggctgcgttgggtcagggtaaggtccctaatgctaagcaagccccggcaggaaggacacaaccttccttcgagactaaaggagaccctgatttgcagagagaggggggtgaggaatgagagggcgatgcttgcggagctgagctccgggatgcggggccggaacgcaatgaggccgctggggggagcgcgaggcccgrgagagagctggaatacgga

SEQ ID NO: 21607 - DNA, 600 bp, Chicken  19866894233119_2
aaagttagttatggcccgctcagaaggaacacggcattaaggtgattttgtatctgtgtgaaggtcgaatgataggattgctgcttttttaaaatggaatattggctctccaaggagaaatgagctcgtattggtgtttttttagacagggaacgccctggataaggcttttgaaggcaattctgggggcaggtgggtggcttgaaggcaccctaaaatctactgggtaaaatagagaagaagcagatggtcagagaaagcctgcatgtgagaggtgtgactacaggacgtgagctcayrgagcaaatgactcccatacctgatgggtagagctggagcatcctcacgggacatgcatcagagtcatctactaagggtggggggctgcgttgggtcagggtaaggtccctaatgctaagcaagccccggcaggaaggacacaaccttccttcgagactaaaggagaccctgatttgcagagagaggggggtgaggaatgagagggcgatgcttgcggagctgagctccgggatgcggggccggaacgcaatgaggccgctggggggagcgcgaggcccgrgagagagctggaatacggaa

SEQ ID NO: 21608 - DNA, 452 bp, Chicken  19866894233119_3
ctacaggacgtgagctcayrgagcaaatgactcccatacctgatgggtagagctggagcatcctcacgggacatgcatcagagtcatctactaagggtggggggctgcgttgggtcagggtaaggtccctaatgctaagcaagccccggcaggaaggacacaaccttccttcgagactaaaggagaccctgatttgcagagagaggggggtgaggaatgagagggcgatgcttgcggagctgagctccgggatgcggggccggaacgcaatgaggccgctggggggagcgcgaggcccgrgagagagctggaatacggaatcgtctgttttcacctgggatcctacagctagggaaggcctgagcctcggaaccggggtgatggcaacacctggcaaacacttctggtgggaagcacgttagcgcagtgttttgtctggcggtaagggaaag

SEQ ID NO: 21609 - DNA, 600 bp, Chicken  19866894233124_1
gaaataaatatatatacacataccttgataaatctacaccttaatgcatagcactactctcatacagtaacatgagtatttccttttgccacctgagaatataaagcacagttcagagttaatttcaggctgctgtagcaattaacatatttttccttaatggtttctcattaataaatatccacagcaaaaagaaggtcatttcacatggtctctaagccagcccttaatggtctgaaccactcatctctgcacacaagacagacagaagcaaggcaggagtcagtctctttttccccyrtactcacaaggaaatggcctcaagttacatcaggggacrcttagatttgatatcaggaagaatttcttcatggagggggttgccaagcactgggacasgttggccagagaaatggtgcagtccccatttcccccattgagagatgtgtggatgtagcactgatgtggtttagtaataggactyggtagatcaggatgatggttggacttaatcttgaaggtcttgtccaacccagatgattctctatttgtaaatcaatggagggatataaaatagtccctgtgcccaactagcaacgt

SEQ ID NO: 21610 - DNA, 600 bp, Chicken  19866894233124_2
aaataaatatatatacacataccttgataaatctacaccttaatgcatagcactactctcatacagtaacatgagtatttccttttgccacctgagaatataaagcacagttcagagttaatttcaggctgctgtagcaattaacatatttttccttaatggtttctcattaataaatatccacagcaaaaagaaggtcatttcacatggtctctaagccagcccttaatggtctgaaccactcatctctgcacacaagacagacagaagcaaggcaggagtcagtctctttttccccyrtactcacaaggaaatggcctcaagttacatcaggggacrcttagatttgatatcaggaagaatttcttcatggagggggttgccaagcactgggacasgttggccagagaaatggtgcagtccccatttcccccattgagagatgtgtggatgtagcactgatgtggtttagtaataggactyggtagatcaggatgatggttggacttaatcttgaaggtcttgtccaacccagatgattctctatttgtaaatcaatggagggatataaaatagtccctgtgcccaactagcaacgta

SEQ ID NO: 21611 - DNA, 600 bp, Chicken  19866894233124_3
ttaatgcatagcactactctcatacagtaacatgagtatttccttttgccacctgagaatataaagcacagttcagagttaatttcaggctgctgtagcaattaacatatttttccttaatggtttctcattaataaatatccacagcaaaaagaaggtcatttcacatggtctctaagccagcccttaatggtctgaaccactcatctctgcacacaagacagacagaagcaaggcaggagtcagtctctttttccccyrtactcacaaggaaatggcctcaagttacatcaggggacrcttagatttgatatcaggaagaatttcttcatggagggggttgccaagcactgggacasgttggccagagaaatggtgcagtccccatttcccccattgagagatgtgtggatgtagcactgatgtggtttagtaataggactyggtagatcaggatgatggttggacttaatcttgaaggtcttgtccaacccagatgattctctatttgtaaatcaatggagggatataaaatagtccctgtgcccaactagcaacgtaagccaacaatcagcattactccctttcaacaagttgagc

SEQ ID NO: 21612 - DNA, 600 bp, Chicken  19866894233124_4
tataaagcacagttcagagttaatttcaggctgctgtagcaattaacatatttttccttaatggtttctcattaataaatatccacagcaaaaagaaggtcatttcacatggtctctaagccagcccttaatggtctgaaccactcatctctgcacacaagacagacagaagcaaggcaggagtcagtctctttttccccyrtactcacaaggaaatggcctcaagttacatcaggggacrcttagatttgatatcaggaagaatttcttcatggagggggttgccaagcactgggacasgttggccagagaaatggtgcagtccccatttcccccattgagagatgtgtggatgtagcactgatgtggtttagtaataggactyggtagatcaggatgatggttggacttaatcttgaaggtcttgtccaacccagatgattctctatttgtaaatcaatggagggatataaaatagtccctgtgcccaactagcaacgtaagccaacaatcagcattactccctttcaacaagttgagctcacactttgagaatggtatgccccaagagaaacaatactagaagtgcacaaactcaac

SEQ ID NO: 21613 - DNA, 600 bp, Chicken  19866894233124_5
cagcaaaaagaaggtcatttcacatggtctctaagccagcccttaatggtctgaaccactcatctctgcacacaagacagacagaagcaaggcaggagtcagtctctttttccccyrtactcacaaggaaatggcctcaagttacatcaggggacrcttagatttgatatcaggaagaatttcttcatggagggggttgccaagcactgggacasgttggccagagaaatggtgcagtccccatttcccccattgagagatgtgtggatgtagcactgatgtggtttagtaataggactyggtagatcaggatgatggttggacttaatcttgaaggtcttgtccaacccagatgattctctatttgtaaatcaatggagggatataaaatagtccctgtgcccaactagcaacgtaagccaacaatcagcattactccctttcaacaagttgagctcacactttgagaatggtatgccccaagagaaacaatactagaagtgcacaaactcaacagctcactgactgcaggcctcagtgccaggcagatggaagtgcaataaatagcaaatgaagaatatcaaccatttacagcaattc

SEQ ID NO: 21614 - DNA, 600 bp, Chicken  19866894233125_1
ttgagtctaactcttgactccacacaggatcatgctaaattcaaaccctatttctaagagcattgttcaaatgcattttgaagccctgcagcttgggcctgtgaccattgcactggggagcctgctccagttccctctggtgaagaacatttttcctaatatctaacatgaacctcctttggttcagatttatgccaatctctcaagtcttatctctggtcaccagaaagattgctatttgtaccaccagaaataaagcacttgtattatttttactttttatttgtacctgtgactttwtattcagcagcagactttacctgaagcgaatataaaccataaaagaaaaacttacctaacaatttcaataaactatccaaagttcagatcagtttaggaacactacctttgcctgacaccaggtgatcaggcctagccaacatgggtccacgaagggcaggtcctgcttgaccagcctgatctccttctatgatccagtgacccgtctggtggatgagggaaaagctgttgatgtagtccacctagacttcagcaaagcctttgacactgtctcccacagtattctcctgcaaaagctgg

SEQ ID NO: 21615 - DNA, 600 bp, Chicken  19866894233127_1
atctgtttggtatccataaatgttcagcaagcatcgataatgtcactgggtgccattttttcccacgtggaggaattcagtggcacaccttcatattcacttccatgtcagacaccattctgtcagactgcccctctgctgccatctgtcacacggcaccaacatgtagcagggtactggtgggggaaggttcaacctctactgccatcccaccaacgtctgcctcgtggctgatggtgagctgacatcataaaataggaggcattacttttggagcagccctcgtattatgaaagcctyaacatttaagttgctgttatcactactttaaaacaaatggtgatatctgaacaaatggagcgtaggttcttgtttgtcatccctatcacaaagtttatcagtgatgtaacaggaaaggaagtcggagagactgggggggtaaaagggcactgggaggtgaaacttgagttttggcatcatttctgcagcattggttgaggacagtgtatctacattcctgtttttgcaggtttccaatatttcttctagtagaaatttttaagtgatttgatgataattcttttaaaacactgcagtggt

SEQ ID NO: 21616 - DNA, 600 bp, Chicken  19866894233130_1
ataagcttcagctctgaaagaaataaaggtaataaatcataagagtctttgttatagggcagtattctattgaattcaggggcttaccttctgtgataggcatggcattgagtcttcataagccagtggcatgacataaggtgttcctcgtatcagcagcttcatagaaacaaagtacccttctaagatgccttagaaagaaaattatatttacaaagaggctaaaaagtccaggaaagtaatggatttctgtaagtaacagttacagaaaataaatatctgttgctatttgcatgccartcatgctttacttactattacgtttattctaacaactgaagctataagggargacattacatagtgcaatcaatacggtcacatttacacaatgctgtgctggaaactgctgcctttcccagtctgtctctgcttttctagcatatcaagtatacagttatgtgatagttcaatttcacttcagagctaccagacgcagctaccagaactttaaccacagtaaagttaataacccacccaggaaagacggcgagcagtagcttctcaggcatgttatgaaaggtcagtctaagaatttca

SEQ ID NO: 21617 - DNA, 600 bp, Chicken  19866894233130_2
tatagggcagtattctattgaattcaggggcttaccttctgtgataggcatggcattgagtcttcataagccagtggcatgacataaggtgttcctcgtatcagcagcttcatagaaacaaagtacccttctaagatgccttagaaagaaaattatatttacaaagaggctaaaaagtccaggaaagtaatggatttctgtaagtaacagttacagaaaataaatatctgttgctatttgcatgccartcatgctttacttactattacgtttattctaacaactgaagctataagggargacattacatagtgcaatcaatacggtcacatttacacaatgctgtgctggaaactgctgcctttcccagtctgtctctgcttttctagcatatcaagtatacagttatgtgatagttcaatttcacttcagagctaccagacgcagctaccagaactttaaccacagtaaagttaataacccacccaggaaagacggcgagcagtagcttctcaggcatgttatgaaaggtcagtctaagaatttcagagagagcaaagggtctgaattttaatggcagtatgaatgagtctcccaggt

SEQ ID NO: 21618 - DNA, 599 bp, Chicken  19866894233138_1
  misc_feature (1)..(117): n is any nucleotide
nnnnnnnnnnnnnnnnnnnnnnnnnnnnnnnnnnnnnnnnnnnnnnnnnnnnnnnnnnnnnnnnnnnnnnnnnnnnnnnnnnnnnnnnnnnnnnnnnnnnnnnnnnnnnnnnnnnnnctattcctctttgcagcaactcacatgtatttgaaaccgaacttctgcagttattttcttcctaaagataataacctcacatccttaagtctttccccttaagttgtattttacagacctctggataattttcttcttttttgtttgtggccttcaaaccagtccacatctgtcacatggtgygtaaagtgaaatggcttacaatgctctaatgaagtagattgaaaagattcatttctgtgttcgttttactttttgatctacaatacttctacaatatagaatacaatacagtaccatttgcaaaacctcataaccaaagttttgagtgaaaatatcagacagcacctgatatctccaccggcagaggccctartggaatcctttccaatccttgattcagactggatagtgagtaatttatatatgctcctgaggaccaatcaccaaaaagctttgtatcatgtaataacttcaatatg

SEQ ID NO: 21619 - DNA, 600 bp, Chicken  19866894233138_2
tcacatccttaagtctttccccttaagttgtattttacagacctctggataattttcttcttttttgtttgtggccttcaaaccagtccacatctgtcacatggtgygtaaagtgaaatggcttacaatgctctaatgaagtagattgaaaagattcatttctgtgttcgttttactttttgatctacaatacttctacaatatagaatacaatacagtaccatttgcaaaacctcataaccaaagttttgagtgaaaatatcagacagcacctgatatctccaccggcagaggccctartggaatcctttccaatccttgattcagactggatagtgagtaatttatatatgctcctgaggaccaatcaccaaaaagctttgtatcatgtaataacttcaatatggcaattataaatttacctatgagattacctagaaaagtttctgacaattccttactgtagccaaaatatattacctttagttgtttctctttctgtatcctctgcattgtctgcttctttataacacagggatattagactggttagacataatttaatatatactgactgctattcataccctttgttatctt

SEQ ID NO: 21620 - DNA, 600 bp, Chicken  19866894233141_1
aagtgaaggaatcctgcaggatctgccctcagaggggggagatctccttgcagatctgctcctgtagattgtttggggcaagagcttttgtgtttgtgcagcctggtgtagtgattggcaaccctgcacatagtaggggggttgaaactctatgactattatggtccttttcaacccaggccattctatgattctctcatctctttgtcaacttgctccagcactttgggaagaatatcagaggaagactgtgagagtgcaaaggggaaggaggacacacatgacaactgacacacgctrcctctttccagacctggatataaatgagaaaaggytaatgatgctatcacatggcagaggtccaagctgcagacaaagctagcgaaatgaaggtgccaatattctgaacctgcagcacaggaagcatggagtcaagttgcatttctcaaaccagcatccaaatttaactccttgcctgtgcacaagccgggctgcacgtctcgtttctcttttgggccagggcaaaagaaacatataggcaccaaatcctcttactcagcaacctaaataattgggaattaggacaacaaatgctttgta

SEQ ID NO: 21621 - DNA, 600 bp, Chicken  19866894233141_2
ggggagatctccttgcagatctgctcctgtagattgtttggggcaagagcttttgtgtttgtgcagcctggtgtagtgattggcaaccctgcacatagtaggggggttgaaactctatgactattatggtccttttcaacccaggccattctatgattctctcatctctttgtcaacttgctccagcactttgggaagaatatcagaggaagactgtgagagtgcaaaggggaaggaggacacacatgacaactgacacacgctrcctctttccagacctggatataaatgagaaaaggytaatgatgctatcacatggcagaggtccaagctgcagacaaagctagcgaaatgaaggtgccaatattctgaacctgcagcacaggaagcatggagtcaagttgcatttctcaaaccagcatccaaatttaactccttgcctgtgcacaagccgggctgcacgtctcgtttctcttttgggccagggcaaaagaaacatataggcaccaaatcctcttactcagcaacctaaataattgggaattaggacaacaaatgctttgtatttctggccacaaatacacaagcgtagggtggaag

SEQ ID NO: 21622 - DNA, 600 bp, Chicken  19866894233141_3
tatatccctaaggcaaaaagccacaaatgagggacagagcaggaggagaaggtatgagatgtgtattacatggcactgtggttttagtcctggctgacaagatgggtgaagcagagaagagcgtgcaagaatttggggcagtgctgcttatatgtgtaaccccagtgtgatgtgctcctacctcctgcagcatggttgctgtggtttatcctgctctgtgatcctgcagaactgatcagcagtttgctcctgaactgaaggaagggatgtgagtgcctgtagcgggtgagctgacattayatttgcctcctgtggcactgaaacaccagcaatttatcagtggtttcatcagctgggtatgtggcttttctctgcaggttctgctgctgcctctgtgtgagcagttatttaggaagctttacaatagagatttccaagatgggggggggggggggaagggttgcactccactgggtgcatcaagtgggactgaagggattcagggtttgtcttcagctttttcacatttcttcttgaaatctgtggcaaatcgcttcacctttctgtgctgttgtttctgctgtttttatctatgtgtac

SEQ ID NO: 21623 - DNA, 600 bp, Chicken  19866894233141_4
ggggggggggaagggttgcactccactgggtgcatcaagtgggactgaagggattcagggtttgtcttcagctttttcacatttcttcttgaaatctgtggcaaatcgcttcacctttctgtgctgttgtttctgctgtttttatctatgtgtacatttgcagaacggccattggctctaacactgcatacgcaggaccagacaaaaaaaaagagtgagctcattcctttatacaagccattaaatctgccaatggagagaccagaagccaggctctacgctccgtgttgcgtgtgtgaygtgctgtttccaagaggtaatataatcaatgacttaattaatgaggaacttgctctggtcctggtgacgaagagcagctcactccgtgccaggaccactatgtttgttgtacgcaccacatcccagctgcyccacttctacctactcccagtgcccttcctgtcccctccaacaccccccaaacttcttttgctgcaagaactcccccaaacatacacatacaaacatacacctcatatataccagaacacacaggaccccctccctgcacacaacagtactcccagtaacctctccccg

SEQ ID NO: 21624 - DNA, 600 bp, Chicken  19866894233141_5
tctgctgtttttatctatgtgtacatttgcagaacggccattggctctaacactgcatacgcaggaccagacaaaaaaaaagagtgagctcattcctttatacaagccattaaatctgccaatggagagaccagaagccaggctctacgctccgtgttgcgtgtgtgaygtgctgtttccaagaggtaatataatcaatgacttaattaatgaggaacttgctctggtcctggtgacgaagagcagctcactccgtgccaggaccactatgtttgttgtacgcaccacatcccagctgcyccacttctacctactcccagtgcccttcctgtcccctccaacaccccccaaacttcttttgctgcaagaactcccccaaacatacacatacaaacatacacctcatatataccagaacacacaggaccccctccctgcacacaacagtactcccagtaacctctccccgcttacatcactccccccaacaggtcccctcacaccagtaccctcaagtaccccctctccccatacaccagccccccgagaaaccattctgtccacacaccagttccctctctccctacacaacagtacctc

SEQ ID NO: 21625 - DNA, 599 bp, Chicken  19866894233144_1
  misc_feature (1)..(126): n is any nucleotide
nnnnnnnnnnnnnnnnnnnnnnnnnnnnnnnnnnnnnnnnnnnnnnnnnnnnnnnnnnnnnnnnnnnnnnnnnnnnnnnnnnnnnnnnnnnnnnnnnnnnnnnnnnnnnnnnnnnnnnnnnnnnnnccttggtaaccgtgggtataaatttggaatgaggttgaaacatttgttaatgcttacttttacagataaaaaaagagaagaacagtattctgcatataaaatgaggtttccatgttctttagaatacaaaactttaagcagtaagactttgtggctgaatattgttatctgtgyttggatggaaagtatggctgatgacacattctcatgacagtagagccttgcttctgtgtctttctgcaacacagaaagcccagtgcaagtacaagggtttatttatttgcttgctggcataccttctatcttaaggagtactatgatgttttacatacgacagtgtagtagtattaccatcaaatgtgatgcttatgctggttcatttacagtttcagtaaggtttaaaaaaggaaggcattaaatayggagaagagagatggaattaagaaaattgaggtacaatgtacttctaaagt

SEQ ID NO: 21626 - DNA, 575 bp, Chicken  19866894233144_2
aatacaaaactttaagcagtaagactttgtggctgaatattgttatctgtgyttggatggaaagtatggctgatgacacattctcatgacagtagagccttgcttctgtgtctttctgcaacacagaaagcccagtgcaagtacaagggtttatttatttgcttgctggcataccttctatcttaaggagtactatgatgttttacatacgacagtgtagtagtattaccatcaaatgtgatgcttatgctggttcatttacagtttcagtaaggtttaaaaaaggaaggcattaaatayggagaagagagatggaattaagaaaattgaggtacaatgtacttctaaagtcttgataattagaaaaaaaaagaaattgcaagttatcccttttattattgaaacaattgtgacatttctctgtagcagataacagaaatttcacaggaaaagtaacctttgaaagtggaatctacctcagtgtgtgttcttgctgttgcatttcaaaagatttctgaacaaagaaagatttttttcttgttaactaggtaaagaaagagctgcagttccactct

SEQ ID NO: 21627 - DNA, 600 bp, Chicken  19866894233147_1
gcacgcgaatccttggctctcacagaggctcagagagccctggccggcccagcaatgggcaggctgggtttgctctgccactgttatgccagccaatgatcccactgcttcctccccatgagcctgcacaggcatcaggccagtgtgggtcaggtcactaccggtgcaaaaggactcacctcagggagtggatgaagctcctccacctccacaatgacctctgcaggctgctcagcctcctgagagcccccagcctcctcctctccctgcagctggatcagctctctggcttttgccttkgattttttactcttcttcttcagcttcagyttgctaagggcacctttcgtcttgtccccaagcttcctctctgccacgctggggctgctgaaaatgtccactgtgatggccatgaggatgcgcccgcggtagaagatcccctcccccatgccytcattcaggtccttgtggacgtcccgcagagctgaattctgaggggagccatacaggttcacccaggctgggccaaacgtggggttaaagcctgcagggacagggtctgattaaacacaaggtgctgcagagacctttcctcaagaa

SEQ ID NO: 21628 - DNA, 600 bp, Chicken  19866894233147_2
cagagagccctggccggcccagcaatgggcaggctgggtttgctctgccactgttatgccagccaatgatcccactgcttcctccccatgagcctgcacaggcatcaggccagtgtgggtcaggtcactaccggtgcaaaaggactcacctcagggagtggatgaagctcctccacctccacaatgacctctgcaggctgctcagcctcctgagagcccccagcctcctcctctccctgcagctggatcagctctctggcttttgccttkgattttttactcttcttcttcagcttcagyttgctaagggcacctttcgtcttgtccccaagcttcctctctgccacgctggggctgctgaaaatgtccactgtgatggccatgaggatgcgcccgcggtagaagatcccctcccccatgccytcattcaggtccttgtggacgtcccgcagagctgaattctgaggggagccatacaggttcacccaggctgggccaaacgtggggttaaagcctgcagggacagggtctgattaaacacaaggtgctgcagagacctttcctcaagaagacagcccaggacacacagtgtgagcatgc

SEQ ID NO: 21629 - DNA, 600 bp, Chicken  19866894233147_3
gtcactaccggtgcaaaaggactcacctcagggagtggatgaagctcctccacctccacaatgacctctgcaggctgctcagcctcctgagagcccccagcctcctcctctccctgcagctggatcagctctctggcttttgccttkgattttttactcttcttcttcagcttcagyttgctaagggcacctttcgtcttgtccccaagcttcctctctgccacgctggggctgctgaaaatgtccactgtgatggccatgaggatgcgcccgcggtagaagatcccctcccccatgccytcattcaggtccttgtggacgtcccgcagagctgaattctgaggggagccatacaggttcacccaggctgggccaaacgtggggttaaagcctgcagggacagggtctgattaaacacaaggtgctgcagagacctttcctcaagaagacagcccaggacacacagtgtgagcatgcgctgcccatacacttctgctttccacctccaggagaccaccgtggcctgggcagatgtgcccagcatgagaccccaggggagcagccatgccaggcctcaccgttccttccggggtccgagat

SEQ ID NO: 21630 - DNA, 600 bp, Chicken  19866894233147_4
gcgtggcgatggctacatcaccaacgttggcatcatccagcacctggatttttatcttcttggcaagaggtgggaacatctcaatgaagctgatctgctcgttccactcgggctcggtggtgttgctctccacagatgtctccccctgtgaaggaggaggtatgagagtcacacagccccaaccagaccagcagacagagtaagggatgtctctgggcctccctggggatggctcaccgccgctccacctgcagatggtgctgggcaggtggccaggtgcctgtcccttcccccatgttscagctattgctctctgcccttcatcagggggtcagttccaaggcactggccatgctctgcacagccaagagaaacactggccacaagcaggcagcaccaacagacccagggatgtcacagagtcccttggcagagccacctggcccatcatgttgcccagaaacatctggctggcccagtgtcctctcatcttaatgggcatcgtaagaccacaaacctcagctatttattagctaaataaactctcccaaggatgagttcagctcacttgtggaggacttccactgggatttatctgat

SEQ ID NO: 21631 - DNA, 599 bp, Chicken  19866894233152_1
  misc_feature (1)..(209): n is any nucleotide
nnnnnnnnnnnnnnnnnnnnnnnnnnnnnnnnnnnnnnnnnnnnnnnnnnnnnnnnnnnnnnnnnnnnnnnnnnnnnnnnnnnnnnnnnnnnnnnnnnnnnnnnnnnnnnnnnnnnnnnnnnnnnnnnnnnnnnnnnnnnnnnnnnnnnnnnnnnnnnnnnnnnnnnnnnnnnnnnnnnnnnnnnnnnnnnnnnnnnnnnnnnnnnnnntatgtaactttgtagttttatctaataagaaagtaaagtacaaattctttttgtttgactgtgttaagtgcctcagagttgaaattggaaygagatcgatagttttcttcagacctctcaatatttgtcttcatattcattctttaaggtcctaactaagttgaaatgcartatttcattcctgacatttaatccatgaaaatgtccttggagatgcatgattcccttaaaataatgtttgtgtaccctacgatgtgtgcactgctgtggagtagtatcrgaatggtttttgctctgttgcaggatgcaagttggagacatgtacatgcctcttttgaaatcattttatataattgccatgtaataaacaagttgtagtcttgaggctat

SEQ ID NO: 21632 - DNA, 599 bp, Chicken  19866894233152_2
  misc_feature (1)..(129): n is any nucleotide
nnnnnnnnnnnnnnnnnnnnnnnnnnnnnnnnnnnnnnnnnnnnnnnnnnnnnnnnnnnnnnnnnnnnnnnnnnnnnnnnnnnnnnnnnnnnnnnnnnnnnnnnnnnnnnnnnnnnnnnnnnnnnnnnntatgtaactttgtagttttatctaataagaaagtaaagtacaaattctttttgtttgactgtgttaagtgcctcagagttgaaattggaaygagatcgatagttttcttcagacctctcaatatttgtcttcatattcattctttaaggtcctaactaagttgaaatgcartatttcattcctgacatttaatccatgaaaatgtccttggagatgcatgattcccttaaaataatgtttgtgtaccctacgatgtgtgcactgctgtggagtagtatcrgaatggtttttgctctgttgcaggatgcaagttggagacatgtacatgcctcttttgaaatcattttatataattgccatgtaataaacaagttgtagtcttgaggctattttctgttgaaatacttatttwaaaaaaaaacaaacagtgaacaaaagtacagaatcaaactgtaacaygaactaacact

SEQ ID NO: 21633 - DNA, 599 bp, Chicken  19866894233152_3
  misc_feature (1)..(20): n is any nucleotide
nnnnnnnnnnnnnnnnnnnntatgtaactttgtagttttatctaataagaaagtaaagtacaaattctttttgtttgactgtgttaagtgcctcagagttgaaattggaaygagatcgatagttttcttcagacctctcaatatttgtcttcatattcattctttaaggtcctaactaagttgaaatgcartatttcattcctgacatttaatccatgaaaatgtccttggagatgcatgattcccttaaaataatgtttgtgtaccctacgatgtgtgcactgctgtggagtagtatcrgaatggtttttgctctgttgcaggatgcaagttggagacatgtacatgcctcttttgaaatcattttatataattgccatgtaataaacaagttgtagtcttgaggctattttctgttgaaatacttatttwaaaaaaaaacaaacagtgaacaaaagtacagaatcaaactgtaacaygaactaacactgtgctaattggatccgttgtggttggtttgcaaatgagtacaggtagtatttctgagctcactccttgcagatgcattaaggtagaatggatgtgtaggcctgtccttc

SEQ ID NO: 21634 - DNA, 600 bp, Chicken  19866894233152_4
acctctcaatatttgtcttcatattcattctttaaggtcctaactaagttgaaatgcartatttcattcctgacatttaatccatgaaaatgtccttggagatgcatgattcccttaaaataatgtttgtgtaccctacgatgtgtgcactgctgtggagtagtatcrgaatggtttttgctctgttgcaggatgcaagttggagacatgtacatgcctcttttgaaatcattttatataattgccatgtaataaacaagttgtagtcttgaggctattttctgttgaaatacttatttwaaaaaaaaacaaacagtgaacaaaagtacagaatcaaactgtaacaygaactaacactgtgctaattggatccgttgtggttggtttgcaaatgagtacaggtagtatttctgagctcactccttgcagatgcattaaggtagaatggatgtgtaggcctgtccttctgtactgttgttgttagcatttggctacaaggatattcactcctgaatgagcagttcaggggagccatggccatgtaggtgaggagtgtgtgccaagggaaatttctgcctgctacacaagtcagcagtcgaa

SEQ ID NO: 21635 - DNA, 600 bp, Chicken  19866894233152_5
gttgaaatgcartatttcattcctgacatttaatccatgaaaatgtccttggagatgcatgattcccttaaaataatgtttgtgtaccctacgatgtgtgcactgctgtggagtagtatcrgaatggtttttgctctgttgcaggatgcaagttggagacatgtacatgcctcttttgaaatcattttatataattgccatgtaataaacaagttgtagtcttgaggctattttctgttgaaatacttatttwaaaaaaaaacaaacagtgaacaaaagtacagaatcaaactgtaacaygaactaacactgtgctaattggatccgttgtggttggtttgcaaatgagtacaggtagtatttctgagctcactccttgcagatgcattaaggtagaatggatgtgtaggcctgtccttctgtactgttgttgttagcatttggctacaaggatattcactcctgaatgagcagttcaggggagccatggccatgtaggtgaggagtgtgtgccaagggaaatttctgcctgctacacaagtcagcagtcgaagcatatttaatgtataagtgccatcatgggggctctgtcagctgtgc

SEQ ID NO: 21636 - DNA, 464 bp, Chicken  19866894233157_1
gaagcaggaaggagttcagtgcagtttgacatgtgaagacatgcgagaagccaaagatggtgttggtaccattcagctgagcagcgtgtgcaggcagaggatctgtctggggaaggcaaaccacgcctacagagcattcctgtggacatgctacatctttcaaagttcattttgtttggttcacacagttggtgggaggtcctttgcagtacagagcccaacccacacagctgtgcttggctctgagccatcatggggggaaaggagaacccgcacctgttggttatacccaaggaattsatccagacactatctctgatcaaagcgggctttattcaccactgcaatgccggatgtcccgcatacagcagcrcacacagaaagcagygttatgtctcttatgcccagcaccacggtgaagccctttgctccctgggccctcctcgcccaccttggagctcggg

SEQ ID NO: 21637 - DNA, 391 bp, Chicken  19866894233157_2
cagctgagcagcgtgtgcaggcagaggatctgtctggggaaggcaaaccacgcctacagagcattcctgtggacatgctacatctttcaaagttcattttgtttggttcacacagttggtgggaggtcctttgcagtacagagcccaacccacacagctgtgcttggctctgagccatcatggggggaaaggagaacccgcacctgttggttatacccaaggaattsatccagacactatctctgatcaaagcgggctttattcaccactgcaatgccggatgtcccgcatacagcagcrcacacagaaagcagygttatgtctcttatgcccagcaccacggtgaagccctttgctccctgggccctcctcgcccaccttggagctcggg

SEQ ID NO: 21638 - DNA, 376 bp, Chicken  19866894233157_3
tgcaggcagaggatctgtctggggaaggcaaaccacgcctacagagcattcctgtggacatgctacatctttcaaagttcattttgtttggttcacacagttggtgggaggtcctttgcagtacagagcccaacccacacagctgtgcttggctctgagccatcatggggggaaaggagaacccgcacctgttggttatacccaaggaattsatccagacactatctctgatcaaagcgggctttattcaccactgcaatgccggatgtcccgcatacagcagcrcacacagaaagcagygttatgtctcttatgcccagcaccacggtgaagccctttgctccctgggccctcctcgcccaccttggagctcggg

SEQ ID NO: 21639 - DNA, 600 bp, Chicken  19866894233162_1
agttttctagtgaaagctgtgcaaaaagctattaaactacacccatatttttctgttctacctgatgtttaaataatttacaagatggaaataatattttgttggtgttattatttgttctaacaataaagattttgctcattacacgtgcaaatgaattacgtgaggcacataaaaagcaaggaaggcctggttaaggaagcatctgagctaaatatatttgattctgtagaatttggcaaccatatgcactgtgattttctaatatggactcaaggaggaaaatgctacaataaaaaygttaagctagaaatcatcaagttcaagtttccatcttcaaattgctgtttaaattctctatttccaactgattactgaattgctgcaatggatgacatcttaayatcttccttagtaatagaggaaaattgaatttattggctatagggatatgtgtaggaagacccagcgggtatgccacatttcacttatgtggttaaagcttaaaaagtagtttgaatgcagcactgttattcactgtatgtctaaaaaatgcctactgtaggaaaagyatgtgcacactaattagaggacaagggc

SEQ ID NO: 21640 - DNA, 600 bp, Chicken  19866894233162_2
gtgttattatttgttctaacaataaagattttgctcattacacgtgcaaatgaattacgtgaggcacataaaaagcaaggaaggcctggttaaggaagcatctgagctaaatatatttgattctgtagaatttggcaaccatatgcactgtgattttctaatatggactcaaggaggaaaatgctacaataaaaaygttaagctagaaatcatcaagttcaagtttccatcttcaaattgctgtttaaattctctatttccaactgattactgaattgctgcaatggatgacatcttaayatcttccttagtaatagaggaaaattgaatttattggctatagggatatgtgtaggaagacccagcgggtatgccacatttcacttatgtggttaaagcttaaaaagtagtttgaatgcagcactgttattcactgtatgtctaaaaaatgcctactgtaggaaaagyatgtgcacactaattagaggacaagggcacagattgctttctgcactgaaaatgctctgcatcaggacatctttgcccacacagtcatcttgcttggactatctacatatcagatatccacttaaccactac

SEQ ID NO: 21641 - DNA, 600 bp, Chicken  19866894233162_3
tcaaggaggaaaatgctacaataaaaaygttaagctagaaatcatcaagttcaagtttccatcttcaaattgctgtttaaattctctatttccaactgattactgaattgctgcaatggatgacatcttaayatcttccttagtaatagaggaaaattgaatttattggctatagggatatgtgtaggaagacccagcgggtatgccacatttcacttatgtggttaaagcttaaaaagtagtttgaatgcagcactgttattcactgtatgtctaaaaaatgcctactgtaggaaaagyatgtgcacactaattagaggacaagggcacagattgctttctgcactgaaaatgctctgcatcaggacatctttgcccacacagtcatcttgcttggactatctacatatcagatatccacttaaccactactcagcttcagaaagaccttcctgcttgtagagtggggcacaatctgagaaattaaccttctacttcaacatgatatattcacttgaagaaggttatcctttgaaatggggatttctattaattttttggctgtatagacagaggagatgggagattaatagaagtaac

SEQ ID NO: 21642 - DNA, 599 bp, Chicken  19866894233168_1
  misc_feature (1)..(89): n is any nucleotide
nnnnnnnnnnnnnnnnnnnnnnnnnnnnnnnnnnnnnnnnnnnnnnnnnnnnnnnnnnnnnnnnnnnnnnnnnnnnnnnnnnnnnnnnnaaatctggaatgttttgcaaaagcattgctatcatttaccagcttggtgattgctgtgggctttgctgtaggtggcagaaatctggttgttccactacccagagccaaaaaggtagtgcaggagagcggctgaaatctgcgttgcataaagaagtggctgtgcagtagagctgctgaagtttgctttctcctgtagtgtccctggctctcmtctacgagtgacgatgggtgtgtgccttgtttcagccttgtgtcttctggggcaagagtgactctatgaagttttcaaccgttctgtcaaaggagaatgggatccctggctttgcttatttaaccttaaaccaaggctcatgtaaatcttcaacttagtcagactaatttggtttcgcctcttctctagctttgaggaaatcagagccactgtctgcttaatgactatttgcatctagagacaggatgttaaatacaagtttgggtttgatttgtttctttttttctatgctaatgcag

SEQ ID NO: 21643 - DNA, 600 bp, Chicken  19866894233173_1
ctcttcagactaaagacaaaacttttccttttgcagtaaagatctcatttttccacattctgtcatgacagtggcaaaaagtttcaaataaaacatgaaaagtctctatttgaaaacacattctgtgaatgcttgttcctttttgaacaaatactgtaagcaacaaattctttctctaaaaaaactctaaagtttctaactttagttgtgctttgtgtcaggaaacagggttattcagacactcaaatgatccccagtttgtgacatctgactgaaataatgttgtcgagtgctccagcrttttcagcagatagatgatcttggctggtgatttttcatctctgatcttacttcagaacctaaaatatttgagagagctggcttcttctgaagctgcttcctgctcctccaaaagggagatattcaattgttatgataaatctgttcttcagctttgtgttgccttgattgttgcttgccttattttttttcaattataactttcactttatccaatatattaccataaccaccttattcaactctacttttgtgtttgagttcatcatgtccatgggagcagacctgtctctgttgttt

SEQ ID NO: 21644 - DNA, 600 bp, Chicken  19866894233182_1
ctgctgactcgtgctggccccgtagtcagatgtgattttttccccctggcttttccatgtgctaatgaagaccagagacgacctcaactcttgttttatgtttcacaaaacactaatggcaaattcagccccccggccccagccgagcagatggccaaaacgcggccttggctccgtttcaacacctttcatagcctcggggcagagcctcaactggcgctcaccaccacaacttgaggcactgcagccatttccctcagctggagagctgcttttccaagcgtaaatattgcatattcygagcctttaccccaaggtaaattttatcctcatcgcagctctgagcccagccctggacctgatccagagcctggatgttatccagagcctcctctgtgctggaatcatccctgactcaagtaacacctttttccgtgctggatgcagccgtgccccacaggtccaccactgccatacaccattacatgtgatgtcggtgttgtaactccaaacttgcaatcgagtgggatgatattcccatggaagcactgctggtgggactcaggcagaattctgctggcagtggggcaaggggatgcc

SEQ ID NO: 21645 - DNA, 600 bp, Chicken  19866894233182_2
agccatcctgctgcaaaacattgccagacgcaagtgctaacctcacacttctgcccacacatgagcaagaccctggagtgagattcagatggcactgaggtttgggttcacatagaccttcaggagctgatgtgctgattcagaggctcagatcaaatcacagagttgtaaatcttttgagttggaagggaccctccaaggtcatcatggtccaatccccctgcaaagaacagagacactgaggttgtatgtatgtctgaggctgtacataggaatggctgggaacaggttgtcttctgwgaggtcttacagcaggggcagcaaaaccgtgccagtagtacatggaggtgaacctccatgggttgattcaggttgagcattaaatggagatctgtgagctgcaggtagttgcccagtaaggctgcagtgaccataagcttttcctattcattttcctggtatgtggctcctgagcacaacatccttgcagaaccagttcagctggaaaggtctcacatttctctgctgagcacaaattgctcacaggcattggggatttcacttgcttgcctttagttcacctcttgcactgcattccca

SEQ ID NO: 21646 - DNA, 600 bp, Chicken  19866894233188_1
aagagacattcatttttaccattttattctttccttttttattatttagctaaacagaaaaatccagaccaaagtcatcctgctgtgtttccatagtgctattcaagacatgacaaaaatatgccagagatcagttttatcatcacctgctagctgcccaagaacatgaaaagtaaggtgtatttatgttttaaaagtcccagagaagctgaaaagaaaataatactataaattcccaaatacaaaataaagacttcagtgaaaattgctaccagctctgctgcattgaactagcactayagcagaactattctgacataaatacagcagatgcttctttttgggaaaagtgcaaccaatgaatatatatttaaaatagatttaccaatacataactttttaatgagattcaggaataaacaaatatgctaaaaatatttagaaaatctgtctaatatattgattaacctccagttttgtatrtttcttctccttaagggtgaatgtaaagagtcgttaaatactatcccaataatcctgttaaatcactttttaagtcaatagttgttaattttctggggcattgtctcagagttaggc

SEQ ID NO: 21647 - DNA, 600 bp, Chicken  19866894233188_2
ttatgttttaaaagtcccagagaagctgaaaagaaaataatactataaattcccaaatacaaaataaagacttcagtgaaaattgctaccagctctgctgcattgaactagcactayagcagaactattctgacataaatacagcagatgcttctttttgggaaaagtgcaaccaatgaatatatatttaaaatagatttaccaatacataactttttaatgagattcaggaataaacaaatatgctaaaaatatttagaaaatctgtctaatatattgattaacctccagttttgtatrtttcttctccttaagggtgaatgtaaagagtcgttaaatactatcccaataatcctgttaaatcactttttaagtcaatagttgttaattttctggggcattgtctcagagttaggcaagcagataaccagaagtkcaaacataggcaatttgcatttgactttcaaacaaactgacagatgaaacctatataaaggatgtttcagaaattaaattggcactgaagagaagtccagctgatttaggccttacattcagtattaatttgagccatggttttctgactggtgttaaattaga

SEQ ID NO: 21648 - DNA, 600 bp, Chicken  19866894233188_3
aaatacagcagatgcttctttttgggaaaagtgcaaccaatgaatatatatttaaaatagatttaccaatacataactttttaatgagattcaggaataaacaaatatgctaaaaatatttagaaaatctgtctaatatattgattaacctccagttttgtatrtttcttctccttaagggtgaatgtaaagagtcgttaaatactatcccaataatcctgttaaatcactttttaagtcaatagttgttaattttctggggcattgtctcagagttaggcaagcagataaccagaagtkcaaacataggcaatttgcatttgactttcaaacaaactgacagatgaaacctatataaaggatgtttcagaaattaaattggcactgaagagaagtccagctgatttaggccttacattcagtattaatttgagccatggttttctgactggtgttaaattagactctggctagtttcatactagtcaaaaatctggtgtgaaattaaccagggtctaatttaacataagttctttcactaaaggagcaattcatatgcttcagtttaactagaaagcattacagtttcaatcctattac

SEQ ID NO: 21649 - DNA, 458 bp, Chicken  19866894233188_4
taggccttacattcagtattaatttgagccatggttttctgactggtgttaaattagactctggctagtttcatactagtcaaaaatctggtgtgaaattaaccagggtctaatttaacataagttctttcactaaaggagcaattcatatgcttcagtttaactagaaagcattacagtttcaatcctattacaatttctttatatatatgtgtgtgtgtgtgtgtataataaggtcatctttcatgaaagagcagaggaccttagagctcaaatatattctgcttctatttagctaawcattttaataatgcttcttcatgtagcaagcagtagtaatataaagacaaggaagcatacattcttcatttaaaagaaggcatattcagaggataattacagtttgcagtatacaaagcacagtgctccttagaattcttactcactagtttctgggg

SEQ ID NO: 21650 - DNA, 600 bp, Chicken  19866894233190_1
ctgtgggctgggtttatacccatttctccctttgttgtttttttgtttgttttagatgcaacccaaaccttgttttcctgaaatggaatcaactttcatctagcaacatcaacactgttggctccttcctcttccctgccctcacatcgtgtactgcgaagttgagcagcacagaattgggctgcagcagaactgccaagcaggctttgcatgccactgcgtgagccttcctttcctaagatgggttgacctggccactggggagaaatgtcctcagatctatgacgatccagaggagaytgggacttgaaagaacttatgcaagcgcaagccaggagctgctctgagtaggtatgaaaaagcagagttcagttcccaaattctgctgactcagctgcaagtttctcacctgagaaaccactgtactcgcatggtgcagcctgcaagggatcaacagtgtgtaatctattagccattaactattgctcttaacaatgaccagtgtcaaggacgtgcattgggatcaatggaacacaaagggctggttcctacgacaattctgctttgcatagcatttgctgttattcctataattaagta

SEQ ID NO: 21651 - DNA, 600 bp, Chicken  19866894233193_1
tacataaataagcactgagattttcattggcatttacttggcctggcagagaatggcaaccttgctgtgttgcagattccttgtcctagcaggggcttttctttttgtcacttaaaaagatatgtggactggagacaagttttgaaccaagacctcaggaatgtcagatgctcagtcctcctgaagtagaggtgctgactgtaaatcccataacgctgggtgctgggggagagtgggatcggagctattggagcattctcctctttcaacaaaattgctttccgttatcttgaaagaggygcagaaaggcagcacgtytgaacactgccatgtgggtgcctttcctttttagatcctcatatgaaatggaaaagaaaggcagggatgtcactgtaatgtgctgtggatggtaattcgtggcagcagcagcgctaccttcttagcrtgagctcttcaaagtgctctgctgtcaaatggaggcagtcattcctcacagaaacagcagccggcttcctcagagggaagcaggatggaaagagaagagggatatttctttaggacagatgcagatcaaatgaagcagtgctttgactcgggctt

SEQ ID NO: 21652 - DNA, 600 bp, Chicken  19866894233193_2
gattttcattggcatttacttggcctggcagagaatggcaaccttgctgtgttgcagattccttgtcctagcaggggcttttctttttgtcacttaaaaagatatgtggactggagacaagttttgaaccaagacctcaggaatgtcagatgctcagtcctcctgaagtagaggtgctgactgtaaatcccataacgctgggtgctgggggagagtgggatcggagctattggagcattctcctctttcaacaaaattgctttccgttatcttgaaagaggygcagaaaggcagcacgtytgaacactgccatgtgggtgcctttcctttttagatcctcatatgaaatggaaaagaaaggcagggatgtcactgtaatgtgctgtggatggtaattcgtggcagcagcagcgctaccttcttagcrtgagctcttcaaagtgctctgctgtcaaatggaggcagtcattcctcacagaaacagcagccggcttcctcagagggaagcaggatggaaagagaagagggatatttctttaggacagatgcagatcaaatgaagcagtgctttgactcgggctttctgcccaaatgacagtg

SEQ ID NO: 21653 - DNA, 600 bp, Chicken  19866894233193_3
accaagacctcaggaatgtcagatgctcagtcctcctgaagtagaggtgctgactgtaaatcccataacgctgggtgctgggggagagtgggatcggagctattggagcattctcctctttcaacaaaattgctttccgttatcttgaaagaggygcagaaaggcagcacgtytgaacactgccatgtgggtgcctttcctttttagatcctcatatgaaatggaaaagaaaggcagggatgtcactgtaatgtgctgtggatggtaattcgtggcagcagcagcgctaccttcttagcrtgagctcttcaaagtgctctgctgtcaaatggaggcagtcattcctcacagaaacagcagccggcttcctcagagggaagcaggatggaaagagaagagggatatttctttaggacagatgcagatcaaatgaagcagtgctttgactcgggctttctgcccaaatgacagtgtaactgctgtgttaatggaaaccctggaggtggaatgaatataggcccttctctgggcaggcaatagctggaccaaagtaattctatactgtgattgaggggctggctatgggagacaaaaatagac

SEQ ID NO: 21654 - DNA, 549 bp, Chicken  19866894233214_1
cacatggctgtgtccaacgtgaatgctatgggcagagacactgtgcaacaaagagatgatcccttcaggattttcagtgagaaagagaaaaaccattggtcctaagggaaactgtcctataaagcagctgaaagctacttgactgcaatggaaagggactcctgctatgaatgataaccaattccaagctaaatgctgcgtggaataggagctgcacccagcccactggtctgcacccaagtgactaatgagcaacatgagcaggaggggaaacagacgggttctcctggcagcagttaysatactgctcagaaagaacaggyggacaggaaagattctgctgcaccatgcagcatggacagactgggtgtgctgtctgttttcccaaggacacgatgcagaaatcacaygtgagatttgcaagcacatgtcagctcactgagaaagcatgcacctcactgcacaattcctcatattcccttaaaaactctcaacaagcgtgaggaaaatggcatgcagcgtttccatcacattaaccacaggctgcgt

SEQ ID NO: 21655 - DNA, 548 bp, Chicken  19866894233214_2
acatggctgtgtccaacgtgaatgctatgggcagagacactgtgcaacaaagagatgatcccttcaggattttcagtgagaaagagaaaaaccattggtcctaagggaaactgtcctataaagcagctgaaagctacttgactgcaatggaaagggactcctgctatgaatgataaccaattccaagctaaatgctgcgtggaataggagctgcacccagcccactggtctgcacccaagtgactaatgagcaacatgagcaggaggggaaacagacgggttctcctggcagcagttaysatactgctcagaaagaacaggyggacaggaaagattctgctgcaccatgcagcatggacagactgggtgtgctgtctgttttcccaaggacacgatgcagaaatcacaygtgagatttgcaagcacatgtcagctcactgagaaagcatgcacctcactgcacaattcctcatattcccttaaaaactctcaacaagcgtgaggaaaatggcatgcagcgtttccatcacattaaccacaggctgcgt

SEQ ID NO: 21656 - DNA, 526 bp, Chicken  19866894233214_3
tgctatgggcagagacactgtgcaacaaagagatgatcccttcaggattttcagtgagaaagagaaaaaccattggtcctaagggaaactgtcctataaagcagctgaaagctacttgactgcaatggaaagggactcctgctatgaatgataaccaattccaagctaaatgctgcgtggaataggagctgcacccagcccactggtctgcacccaagtgactaatgagcaacatgagcaggaggggaaacagacgggttctcctggcagcagttaysatactgctcagaaagaacaggyggacaggaaagattctgctgcaccatgcagcatggacagactgggtgtgctgtctgttttcccaaggacacgatgcagaaatcacaygtgagatttgcaagcacatgtcagctcactgagaaagcatgcacctcactgcacaattcctcatattcccttaaaaactctcaacaagcgtgaggaaaatggcatgcagcgtttccatcacattaaccacaggctgcgt

SEQ ID NO: 21657 - DNA, 439 bp, Chicken  19866894233214_4
actgtcctataaagcagctgaaagctacttgactgcaatggaaagggactcctgctatgaatgataaccaattccaagctaaatgctgcgtggaataggagctgcacccagcccactggtctgcacccaagtgactaatgagcaacatgagcaggaggggaaacagacgggttctcctggcagcagttaysatactgctcagaaagaacaggyggacaggaaagattctgctgcaccatgcagcatggacagactgggtgtgctgtctgttttcccaaggacacgatgcagaaatcacaygtgagatttgcaagcacatgtcagctcactgagaaagcatgcacctcactgcacaattcctcatattcccttaaaaactctcaacaagcgtgaggaaaatggcatgcagcgtttccatcacattaaccacaggctgcgt

SEQ ID NO: 21658 - DNA, 599 bp, Chicken  19866894233216_1
  misc_feature (1)..(116): n is any nucleotide
nnnnnnnnnnnnnnnnnnnnnnnnnnnnnnnnnnnnnnnnnnnnnnnnnnnnnnnnnnnnnnnnnnnnnnnnnnnnnnnnnnnnnnnnnnnnnnnnnnnnnnnnnnnnnnnnnnnnctccaattttgtttttctggcttttcttttctttttttttcagcaagaaatgtcatagctcaggcaaaaatagctcatattcttttccagtatctcatgctgttccaaggccacagctttcataggtggtaggagaaaacaacagtactgacatttctacctgcttctgaggaatacatccttytttctaatcgatctagaaattaccaataatttttagtgtctactggacagacatttatttttcaaaactcaatccactgcaagttactgcttccagagattcaagtatcatatttcagaatctgctataattgtgtgcatcttttttgcattctccttgcaatttagagaaatttgtcactctagttcacttgttgcttgtgttcacatgattttagtggtattcttgcaagggactaaataatctgattatggacatgcagccttttttcgcttagygcagactgttgcgtgctgcct

SEQ ID NO: 21659 - DNA, 600 bp, Chicken  19866894233216_2
gcttctgaggaatacatccttytttctaatcgatctagaaattaccaataatttttagtgtctactggacagacatttatttttcaaaactcaatccactgcaagttactgcttccagagattcaagtatcatatttcagaatctgctataattgtgtgcatcttttttgcattctccttgcaatttagagaaatttgtcactctagttcacttgttgcttgtgttcacatgattttagtggtattcttgcaagggactaaataatctgattatggacatgcagccttttttcgcttagygcagactgttgcgtgctgcctctttctggctgggtgagaagactaaattgaggatctctctgctcaccattccaggttccttttcaacatgttgtcctctactgcatggtttttaagagcaatttttgaatgcccactgtaaataggaaactccaaatgcagaagcgactttttacacagtctgatagaaataagaggaattactttaaactaaaagagtagaattttaggttagatgttaggaggaaattcttcactcatgctggcacagctgccagagaagctgtggtgccccatccc

SEQ ID NO: 21660 - DNA, 599 bp, Chicken  19866894233218_1
  misc_feature (1)..(82): n is any nucleotide
nnnnnnnnnnnnnnnnnnnnnnnnnnnnnnnnnnnnnnnnnnnnnnnnnnnnnnnnnnnnnnnnnnnnnnnnnnnnnnnnnnccatgctgtgactgtttaattttcagagagtaaagcagcagttctcctgctgcagaggccaagctggattctggcagtgggagtcttgggatgctctgtgcctaaagccagggctgccatccaggctggttccaggcttacaccgagagctgcttcctgacaaagcaggaaatgtctccagacacgcaggagaccgcggggtgggctctgtagacacmaaatgcaaatgaatcttgatattaaaaaatgaaagcttaggcatttttcttttctctcacatctttcttgttgcctgttggcaatatgagactgcgccgtggcggtcttctgagacgctggcctccaaaataggagccagcagcttcgcatgaagcataattttaaagaaaggtatcacagagtttttacccaaagattctgttctgcctaaatcactcaccctcttagtctgggaacactgatggagtttgacacgctgacatcagccagggagggcatcctgaggcagaaaagaagg

SEQ ID NO: 21661 - DNA, 491 bp, Chicken  19866894233218_2
catttttcttttctctcacatctttcttgttgcctgttggcaatatgagactgcgccgtggcggtcttctgagacgctggcctccaaaataggagccagcagcttcgcatgaagcataattttaaagaaaggtatcacagagtttttacccaaagattctgttctgcctaaatcactcaccctcttagtctgggaacactgatggagtttgacacgctgacatcagccagggagggcatcctgaggcagaaaagaaggcattcccatctgcattacaacagctgtgtggggttatgtacracacagagaagggacaagagctgcatggtttgcagcacattcttgaagtctgatctgaacccaagcccagcacacctyttcatgggckcacatatgtgcmygcgtgcaatcccattgccactcaaacctgtgccactcctatggtattctgcagtgctgagcagtggtggcttgctggcgaagataagagt

SEQ ID NO: 21662 - DNA, 413 bp, Chicken  19866894233218_3
ggcctccaaaataggagccagcagcttcgcatgaagcataattttaaagaaaggtatcacagagtttttacccaaagattctgttctgcctaaatcactcaccctcttagtctgggaacactgatggagtttgacacgctgacatcagccagggagggcatcctgaggcagaaaagaaggcattcccatctgcattacaacagctgtgtggggttatgtacracacagagaagggacaagagctgcatggtttgcagcacattcttgaagtctgatctgaacccaagcccagcacacctyttcatgggckcacatatgtgcmygcgtgcaatcccattgccactcaaacctgtgccactcctatggtattctgcagtgctgagcagtggtggcttgctggcgaagataagagt

SEQ ID NO: 21663 - DNA, 403 bp, Chicken  19866894233218_4
ataggagccagcagcttcgcatgaagcataattttaaagaaaggtatcacagagtttttacccaaagattctgttctgcctaaatcactcaccctcttagtctgggaacactgatggagtttgacacgctgacatcagccagggagggcatcctgaggcagaaaagaaggcattcccatctgcattacaacagctgtgtggggttatgtacracacagagaagggacaagagctgcatggtttgcagcacattcttgaagtctgatctgaacccaagcccagcacacctyttcatgggckcacatatgtgcmygcgtgcaatcccattgccactcaaacctgtgccactcctatggtattctgcagtgctgagcagtggtggcttgctggcgaagataagagt

SEQ ID NO: 21664 - DNA, 391 bp, Chicken  19866894233218_5
agcttcgcatgaagcataattttaaagaaaggtatcacagagtttttacccaaagattctgttctgcctaaatcactcaccctcttagtctgggaacactgatggagtttgacacgctgacatcagccagggagggcatcctgaggcagaaaagaaggcattcccatctgcattacaacagctgtgtggggttatgtacracacagagaagggacaagagctgcatggtttgcagcacattcttgaagtctgatctgaacccaagcccagcacacctyttcatgggckcacatatgtgcmygcgtgcaatcccattgccactcaaacctgtgccactcctatggtattctgcagtgctgagcagtggtggcttgctggcgaagataagagt

SEQ ID NO: 21665 - DNA, 390 bp, Chicken  19866894233218_6
gcttcgcatgaagcataattttaaagaaaggtatcacagagtttttacccaaagattctgttctgcctaaatcactcaccctcttagtctgggaacactgatggagtttgacacgctgacatcagccagggagggcatcctgaggcagaaaagaaggcattcccatctgcattacaacagctgtgtggggttatgtacracacagagaagggacaagagctgcatggtttgcagcacattcttgaagtctgatctgaacccaagcccagcacacctyttcatgggckcacatatgtgcmygcgtgcaatcccattgccactcaaacctgtgccactcctatggtattctgcagtgctgagcagtggtggcttgctggcgaagataagagt

SEQ ID NO: 21666 - DNA, 599 bp, Chicken  19866894233221_1
  misc_feature (1)..(5): n is any nucleotide
nnnnnattctatgaaaaggtgttttccctgctgtttataatcttccctttaagtactggaaggccactaacaggtttttctggagccttctattctccaggctaaagaagcccatcttcctcaaactttcttcatagcagaggaggtccatctttgtggtctcatctggacctaatccaacagctccccatctgtgttgtggaaagtgaatgaataacagtcttcagagagatgatagccaaaagtgaagttttcttcagaaggtggttgacatcaccgtattgaaattggtgctaaacraagagggttggtcctggacatgatgttagtgcaggaagtggtagcaaacaggcctaagggcaccctgycctcaccgctgatcacaaaacactcataccacagggccctgatctgctctgtgccataggaagagctgattgccactacaatgagctacagaaaatgctgtgagtttgagtcytttttttattattatttactgaatctgagactgaacagaaaactcccttttatttacaaaggaggtgttactctgagctgcttgataaaccaaggtgggggcttggattgtaaaggaa

SEQ ID NO: 21667 - DNA, 600 bp, Chicken  19866894233221_2
aacaggtttttctggagccttctattctccaggctaaagaagcccatcttcctcaaactttcttcatagcagaggaggtccatctttgtggtctcatctggacctaatccaacagctccccatctgtgttgtggaaagtgaatgaataacagtcttcagagagatgatagccaaaagtgaagttttcttcagaaggtggttgacatcaccgtattgaaattggtgctaaacraagagggttggtcctggacatgatgttagtgcaggaagtggtagcaaacaggcctaagggcaccctgycctcaccgctgatcacaaaacactcataccacagggccctgatctgctctgtgccataggaagagctgattgccactacaatgagctacagaaaatgctgtgagtttgagtcytttttttattattatttactgaatctgagactgaacagaaaactcccttttatttacaaaggaggtgttactctgagctgcttgataaaccaaggtgggggcttggattgtaaaggaatagaaagcttacgtaaaggcagctttataatagtcaatatgttaaaaagagtgactcagcccctcttct

SEQ ID NO: 21668 - DNA, 600 bp, Chicken  19866894233221_3
agctccccatctgtgttgtggaaagtgaatgaataacagtcttcagagagatgatagccaaaagtgaagttttcttcagaaggtggttgacatcaccgtattgaaattggtgctaaacraagagggttggtcctggacatgatgttagtgcaggaagtggtagcaaacaggcctaagggcaccctgycctcaccgctgatcacaaaacactcataccacagggccctgatctgctctgtgccataggaagagctgattgccactacaatgagctacagaaaatgctgtgagtttgagtcytttttttattattatttactgaatctgagactgaacagaaaactcccttttatttacaaaggaggtgttactctgagctgcttgataaaccaaggtgggggcttggattgtaaaggaatagaaagcttacgtaaaggcagctttataatagtcaatatgttaaaaagagtgactcagcccctcttctcataagtaagcagcacaatcctgagctaagtcaggcttccagatgaagggaagaagtaagaagaaagtcaagatggatgcacagtctgcttccagccttactcctgccayatc

SEQ ID NO: 21669 - DNA, 600 bp, Chicken  19866894233221_4
atctgtgttgtggaaagtgaatgaataacagtcttcagagagatgatagccaaaagtgaagttttcttcagaaggtggttgacatcaccgtattgaaattggtgctaaacraagagggttggtcctggacatgatgttagtgcaggaagtggtagcaaacaggcctaagggcaccctgycctcaccgctgatcacaaaacactcataccacagggccctgatctgctctgtgccataggaagagctgattgccactacaatgagctacagaaaatgctgtgagtttgagtcytttttttyttattatttactgaatctgagactgaacagaaaactcccttttatttacaaaggaggtgttactctgagctgcttgataaaccaaggtgggggcttggattgtaaaggaatagaaagcttacgtaaaggcagctttataatagtcaatatgttaaaaagagtgactcagcccctcttctcataagtaagcagcacaatcctgagctaagtcaggcttccagatgaagggaagaagtaagaagaaagtcaagatggatgcacagtctgcttccagccttactcctgccayatccataaagt

SEQ ID NO: 21670 - DNA, 600 bp, Chicken  19866894233221_5
tcytttttttattattatttactgaatctgagactgaacagaaaactcccttttatttacaaaggaggtgttactctgagctgcttgataaaccaaggtgggggcttggattgtaaaggaatagaaagcttacgtaaaggcagctttataatagtcaatatgttaaaaagagtgactcagcccctcttctcataagtaagcagcacaatcctgagctaagtcaggcttccagatgaagggaagaagtaagaagaaagtcaagatggatgcacagtctgcttccagccttactcctgccayatccataaagttatgtagcattgggtagtctgttcaatcagtggatgtaaaatatttgtcacatggaaagagcatcaggagtctccagcaatgtttgagtagtgttgtgatttgaactgcggtatttatagcagtgggttggtgcatcaaaagaaagactcccttgaacagtgtggttccttgcatctcctggaggtgctcagcaagcagaatgttttattttgggtttctctaatgggtacagaacattgccctcagttgtctttgaaactcagagcagcttttgctttgtctgacctg

SEQ ID NO: 21671 - DNA, 599 bp, Chicken  19866894233226_1
  misc_feature (1)..(43): n is any nucleotide
nnnnnnnnnnnnnnnnnnnnnnnnnnnnnnnnnnnnnnnnnnnatcacatcttacagctaaaatctgtagttgattgaaaaaccctgtagcttgaaagaaaaagcaattttgtgccagttgtattctgttccttggaccagctctcagctgtctctgcatgagaggcttgtgaatccctgggcagggccctcccttgacctgccccataccgggagcacagacctcccccgtactcccccagcctctcttctggctcacagtatgggatcaacaggaccatgcctcattacagaaagagraagactaagccaaagcattcagccaatctgtggggattaaagggcacaaatagtcatggaaatgcctagaacttaaatgattcctaagaagcagtaagaaaaaaacaccaacccaacrcctcaatccattctgtaaactgcagcaagagcataatatctcaagtgggtggtcttcatgcttaaacaagggaacgtctaaatgaaaaacatgggagacrcttttcatagattacatcttgtagtatgtattcatgacaggaatagagataggattataaaacagaatactccaatacaaa

SEQ ID NO: 21672 - DNA, 583 bp, Chicken  19866894233226_2
ttgtattctgttccttggaccagctctcagctgtctctgcatgagaggcttgtgaatccctgggcagggccctcccttgacctgccccataccgggagcacagacctcccccgtactcccccagcctctcttctggctcacagtatgggatcaacaggaccatgcctcattacagaaagagraagactaagccaaagcattcagccaatctgtggggattaaagggcacaaatagtcatggaaatgcctagaacttaaatgattcctaagaagcagtaagaaaaaaacaccaacccaacrcctcaatccattctgtaaactgcagcaagagcataatatctcaagtgggtggtcttcatgcttaaacaagggaacgtctaaatgaaaaacatgggagacrcttttcatagattacatcttgtagtatgtattcatgacaggaatagagataggattataaaacagaatactccaatacaaattgtggtcttcaaaaactgtaactccaagtattgcatcattggtcattcaacatacttggcaagcaatctttttggatgcactgccttctgaaagcccttca

SEQ ID NO: 21673 - DNA, 483 bp, Chicken  19866894233226_3
cagacctcccccgtactcccccagcctctcttctggctcacagtatgggatcaacaggaccatgcctcattacagaaagagraagactaagccaaagcattcagccaatctgtggggattaaagggcacaaatagtcatggaaatgcctagaacttaaatgattcctaagaagcagtaagaaaaaaacaccaacccaacrcctcaatccattctgtaaactgcagcaagagcataatatctcaagtgggtggtcttcatgcttaaacaagggaacgtctaaatgaaaaacatgggagacrcttttcatagattacatcttgtagtatgtattcatgacaggaatagagataggattataaaacagaatactccaatacaaattgtggtcttcaaaaactgtaactccaagtattgcatcattggtcattcaacatacttggcaagcaatctttttggatgcactgccttctgaaagcccttca

SEQ ID NO: 21674 - DNA, 600 bp, Chicken  19866894233231_1
aggaaaacttatcgaagtggtacgtagcatttgctttggtactgcttttctttattatttttcccccgatgggaagaatgtgctttatctgtacagtaggtagtagatttttagaatacagtaccagagagtatatgaaagaggaaaatgattgatgcagtattatttttttttaaactcccaattaccatctttataaatgatgattataaatggtaagtctgctatctagtgtgtatcttaaattcaggttgctgccgtatttgctgttttcagataccactccactttgttggaagkgtgttctggtgacattccacagaagagtaaatagattgtaaatgtaatcaattggtctattttctggcgtactgattacagaccttgttatctctgctctttcaggtaatatgatagttttgcctgatattaagtgatacattaattgccaaaatgagatactacttttttttttccacaaaataaaggaaatcagttgaaccgaaggagcagaactagtagaagtgacagctctawtgtttttcttgtgagctgaccttgcctcttcaccgaagtgggaaactcccacagacagagaag

SEQ ID NO: 21675 - DNA, 600 bp, Chicken  19866894233231_2
atcttaaattcaggttgctgccgtatttgctgttttcagataccactccactttgttggaagkgtgttctggtgacattccacagaagagtaaatagattgtaaatgtaatcaattggtctattttctggcgtactgattacagaccttgttatctctgctctttcaggtaatatgatagttttgcctgatattaagtgatacattaattgccaaaatgagatactacttttttttttccacaaaataaaggaaatcagttgaaccgaaggagcagaactagtagaagtgacagctctawtgtttttcttgtgagctgaccttgcctcttcaccgaagtgggaaactcccacagacagagaagatatttttaaaacattagatacagattgattgtaactttggaaagacagtaattcctgtgatgacaaagtcattacatgacaatacaggttgcttgtgtggttgaactgaacttttctccttaggaatatttaacactatttcatttaaagcccctctaagacttctaatttgcctttgaattcctctgatttcacctatctaggcttttcccagtgcatgttcagaaaagtttgaa

SEQ ID NO: 21676 - DNA, 600 bp, Chicken  19866894233234_1
tttctgcatgatgaaattgcattggggaattcttcctgctggcgtgcaactggaagggtataaagatagaaaactgatttgaaatactgctaaagcaacatagctggctaagtattgttagtccaaaggagagcagtccctttgctgcatctctctccatctgaattattaaaattctcagcattctttactcctgaagctgctggaagtgccccatttctaactggccaccccagccccaggcgttttggaagcaccggttgcaaagggagcgtggagcaaattgtgctgctgcagcayggggccatgggatggatccaggagtggggtagcaaaccagggccagcccagcaccacccctgccaaatatctgctttgaggttaacacacgtggtgagcatcggtctttcatgctgcaccacttgctaggaacaaccaagcagtccagtcctcatgcaaatgattgggatcttatatactgcaattgggaataaaaccccttttgccataatgaaaacctacacgtttggctgaaacacctctcagcccgaagcatttcctgactttaccacgtccatcaccgccctgccagccctcccc

SEQ ID NO: 21677 - DNA, 600 bp, Chicken  19866894233234_2
agcatttcctgactttaccacgtccatcaccgccctgccagccctcccctctcgctgcctcccattaccagtaaccacaccagctcagatttatcatctgtcacctgtgttgggattagatgtcatgcttgtctttctattactcagatattgatagataaaattccgcggccatacattgcctgtcccctcaaaggttaccatcagaggatgctcagaatcaatacagatcttatctgccactgccttcggtggggcactgcaaacaaggctcacgggaacgcagcacacaggaatccrtcacggctctcaggattagtgcagcttgttgcaatacagcccattgttccacagatgtgtttcttctcattccacgtctctaaccaaatcatgtctcagaagagagcgtaattcacagcaatcgccagaaattcagcctttctgagtacgaccatgcagatcaggaaccctaccagtcacactcaccgcagcgatgtctaaaagcacaatttatatgttttgctgccatggctaagttggaaagctgctggctatatttttcctccttcagaacacatttcttacctcatctggcagctc

SEQ ID NO: 21678 - DNA, 600 bp, Chicken  19866894233237_1
atgctggatctaatgacacacctttacatgtacccaaagtgaagcagaggcactttttcagtgaggaatttacagaccgctggctttcagctggacttaggctcctaactgctggatacccaaaggaatttatgcccagataagcactgattaaaacttcaaaaaattcttagcttccttattctaaccactaggtatcagcaaaggaacttaacattctcagctgaactacattattctgcttgtcacactgcagggcctgactgcacaaaaacctgaaccttgatacattctacagaygttaagtatacattaatgttaatcaagagagccacttataaaatggccaaagcttctatgaaaatacagcaatatcctagcagttgttaaactgaatggagtcgaaattcaagcaagctctgatcccaaaaggagctaagtcccctatcaaagctgaacagaaaattcagagagttgtttcaggcagcgccttaccagcacaaagcactaaactacaaaatggaaaacacagtaccaggatagtgtaataaagaaaagatgggaccatgcagaacaaacatcagcttgtcaaggaatagg

SEQ ID NO: 21679 - DNA, 600 bp, Chicken  19866894233241_1
ccctcttctgcaggcactacttaaaccaaacaactttaggataacacatggcacgtttaaatccatgtcaaaagttctctgcaaccaggagatcacacccctgttctttgagtccttgcttcctgattttggagaccctgtaagaaatagttcttctgtggaggatgtccatgtccagaagatgatgaggaaatatgggattccttatgattccagtaagtctggctttttcatatgtcaagtacatttcaaagccaaactctcacatttccagagatccatcactgatcttgatttttytctggagggctcatggtttatgctggttgaagatctgcctcgcccaagttactggtggcttatttttgtaagcattaaaaggcaaacagcctgcacagcccagcagtgtttgatactgcagcacttcccatttgttgatggtacggttctaggacttggcaggttgctgttttttcttgatacgtagttttcccgactgtgctgacattattacctcctctgagttcacaaaactccatttaacctccaagcagagaatcctggctcgaacaaagagactcttgttgtcttgagttcagc

SEQ ID NO: 21680 - DNA, 600 bp, Chicken  19866894233241_2
acctcctctgagttcacaaaactccatttaacctccaagcagagaatcctggctcgaacaaagagactcttgttgtcttgagttcagcaacaggagattttggggatggattgcttttgtcaaggcacattatatcagtcagtgaagagaggcctgaagtcatttgctggacacagcaacaaattgggccaaggtttcctgtgtctggtctacttgtgctctgtagagtttatttgtttttctccctttgcagcaccgttttgtttatctttctacctggatctggtcaagaccccaacyggagctttaatttggtcttttttaaaaccaatggtgtttgggaagatcctctacacaccagatacaccagaaactcgagcaatcatggggaaaggtatggccctgcttacactacatgaagatatatgccctctcaaagggattttaatttgtgtctggcgcaggttggtttctttcagaagcagaactctcttttctgactgttaggatcattagtcaggtttttctttttgtagttccattgctggttgtatgtgtccttaaacatccattaaacatcctttaaatgaatgttacctc

SEQ ID NO: 21681 - DNA, 600 bp, Chicken  19866894233244_1
cacagacggtagcacccttgcagtctgaggactgtaaacatgccagtttttgtagtttatgacacaagcatgggaacttaatatatttacaggaaggggccttgaatttcctggctgaaatatactaagtttgcatagatttggaggataaatttaccctattgtgtggagctgaatatgctttctgcattcttaatttaaatcctaggattgttttcaggaaaatgtcagagcaattgttcaaagcacagctatctgccaacacaaaagtaaaagctggagaatgattttacactgatmtcctattagaaggaatttggaaagcaccagggaccagcaaagggagtttgaggtggaaggtagaatgcttgtactacagccctgtgtctctgccaccagcttactggagtrctttgaatgcacaaatttcctgtgctgggtacaggctgtcaggcccacatgacrrtctgaaagggtgcagcaagaagatgccctgaatctgaagagcagtgagagaactrtgtgctattgttggtgcatgatatttcaagagtgtaaagggaaagttacagaaggacctaaaaaaagcrtttctctaat

SEQ ID NO: 21682 - DNA, 600 bp, Chicken  19866894233244_2
tggctgaaatatactaagtttgcatagatttggaggataaatttaccctattgtgtggagctgaatatgctttctgcattcttaatttaaatcctaggattgttttcaggaaaatgtcagagcaattgttcaaagcacagctatctgccaacacaaaagtaaaagctggagaatgattttacactgatmtcctattagaaggaatttggaaagcaccagggaccagcaaagggagtttgaggtggaaggtagaatgcttgtactacagccctgtgtctctgccaccagcttactggagtrctttgaatgcacaaatttcctgtgctgggtacaggctgtcaggcccacatgacrrtctgaaagggtgcagcaagaagatgccctgaatctgaagagcagtgagagaactrtgtgctattgttggtgcatgatatttcaagagtgtaaagggaaagttacagaaggacctaaaaaaagcrtttctctaataatttggcagacctctcaactacattctgtccaggtgtgtaagatggactaacaaattcaatacatccagaagcatttaccagcactgaggccaatagaagaggttagtcg

SEQ ID NO: 21683 - DNA, 600 bp, Chicken  19866894233244_3
gtggagctgaatatgctttctgcattcttaatttaaatcctaggattgttttcaggaaaatgtcagagcaattgttcaaagcacagctatctgccaacacaaaagtaaaagctggagaatgattttacactgatmtcctattagaaggaatttggaaagcaccagggaccagcaaagggagtttgaggtggaaggtagaatgcttgtactacagccctgtgtctctgccaccagcttactggagtrctttgaatgcacaaatttcctgtgctgggtacaggctgtcaggcccacatgacrrtctgaaagggtgcagcaagaagatgccctgaatctgaagagcagtgagagaactrtgtgctattgttggtgcatgatatttcaagagtgtaaagggaaagttacagaaggacctaaaaaaagcrtttctctaataatttggcagacctctcaactacattctgtccaggtgtgtaagatggactaacaaattcaatacatccagaagcatttaccagcactgaggccaatagaagaggttagtcggtgtccatgctgccaaactccctttacctctaaaagggaggggcctggatgctg

SEQ ID NO: 21684 - DNA, 600 bp, Chicken  19866894233244_4
tggagctgaatatgctttctgcattcttaatttaaatcctaggattgttttcaggaaaatgtcagagcaattgttcaaagcacagctatctgccaacacaaaagtaaaagctggagaatgattttacactgatmtcctattagaaggaatttggaaagcaccagggaccagcaaagggagtttgaggtggaaggtagaatgcttgtactacagccctgtgtctctgccaccagcttactggagtrctttgaatgcacaaatttcctgtgctgggtacaggctgtcaggcccacatgacrrtctgaaagggtgcagcaagaagatgccctgaatctgaagagcagtgagagaactrtgtgctattgttggtgcatgatatttcaagagtgtaaagggaaagttacagaaggacctaaaaaaagcrtttctctaataatttggcagacctctcaactacattctgtccaggtgtgtaagatggactaacaaattcaatacatccagaagcatttaccagcactgaggccaatagaagaggttagtcggtgtccatgctgccaaactccctttacctctaaaagggaggggcctggatgctga

SEQ ID NO: 21685 - DNA, 600 bp, Chicken  19866894233244_5
aaaatgtcagagcaattgttcaaagcacagctatctgccaacacaaaagtaaaagctggagaatgattttacactgatmtcctattagaaggaatttggaaagcaccagggaccagcaaagggagtttgaggtggaaggtagaatgcttgtactacagccctgtgtctctgccaccagcttactggagtrctttgaatgcacaaatttcctgtgctgggtacaggctgtcaggcccacatgacrrtctgaaagggtgcagcaagaagatgccctgaatctgaagagcagtgagagaactrtgtgctattgttggtgcatgatatttcaagagtgtaaagggaaagttacagaaggacctaaaaaaagcrtttctctaataatttggcagacctctcaactacattctgtccaggtgtgtaagatggactaacaaattcaatacatccagaagcatttaccagcactgaggccaatagaagaggttagtcggtgtccatgctgccaaactccctttacctctaaaagggaggggcctggatgctgactgcctaccaggaatgggttggtgcacgtgctcatttccaaacgatgccagggga

SEQ ID NO: 21686 - DNA, 544 bp, Chicken  19866894233244_6
tacactgatmtcctattagaaggaatttggaaagcaccagggaccagcaaagggagtttgaggtggaaggtagaatgcttgtactacagccctgtgtctctgccaccagcttactggagtrctttgaatgcacaaatttcctgtgctgggtacaggctgtcaggcccacatgacrrtctgaaagggtgcagcaagaagatgccctgaatctgaagagcagtgagagaactrtgtgctattgttggtgcatgatatttcaagagtgtaaagggaaagttacagaaggacctaaaaaaagcrtttctctaataatttggcagacctctcaactacattctgtccaggtgtgtaagatggactaacaaattcaatacatccagaagcatttaccagcactgaggccaatagaagaggttagtcggtgtccatgctgccaaactccctttacctctaaaagggaggggcctggatgctgactgcctaccaggaatgggttggtgcacgtgctcatttccaaacgatgccaggggaattaattgctttg

SEQ ID NO: 21687 - DNA, 599 bp, Chicken  19866894233249_1
  misc_feature (1)..(224): n is any nucleotide
nnnnnnnnnnnnnnnnnnnnnnnnnnnnnnnnnnnnnnnnnnnnnnnnnnnnnnnnnnnnnnnnnnnnnnnnnnnnnnnnnnnnnnnnnnnnnnnnnnnnnnnnnnnnnnnnnnnnnnnnnnnnnnnnnnnnnnnnnnnnnnnnnnnnnnnnnnnnnnnnnnnnnnnnnnnnnnnnnnnnnnnnnnnnnnnnnnnnnnnnnnnnnnnnnnnnnnnnnnnnnnnntatttaatgatgtatgtttgaagatgaaccagagagcattaatgtctagggagaacttgaaaaatggagggtacaraaatgggtgattaattcatctgaaagtatgggcaattgattgcttgctctgagtgatgtccttttgcaagcctggcaaataacatctcatgcaatgtgctttaagcatatggctaaagctttttttaaatacctgcctcatctctgctatttggagagactgtgctgtttctaacaaatgtagagatctgtccactacccttgttctgaacaaatacctttttaagtgaagacacttcttctatgtttaaagtcagataagaaaaacttgtctgactgcaaaagctagtgcctgagctt

SEQ ID NO: 21688 - DNA, 600 bp, Chicken  19866894233249_2
acccttgttctgaacaaatacctttttaagtgaagacacttcttctatgtttaaagtcagataagaaaaacttgtctgactgcaaaagctagtgcctgagcttgggttcctaaagtcctaacctaatttgtaagagatgaagtctacttttagtgaataactaccttcccgggcatattattttatttaaaagctagaatgaaggggaggagattactttcagagcaacccttgtagttatggttcctatttcattgtgttggcccacaatgatactcagttttagtgtttgtacaaacytctctgtgcacttcactgtaccctccactggtggcggtgtggggaacacacagctccattatgcagtgctgcaagaagcagagaacctgggtgaagaattgaataaatgtggtattacataggactgaagttggtgtgcgtattgactttggtggagaaaacactgccctatgttgcaaataaaacatcctactggtggttgtccctacactcagagtagggaagggtacacaaagatatggatgggagtaagccttagcttttttgacatgtactagtcccagctgggagcaagatagc

SEQ ID NO: 21689 - DNA, 600 bp, Chicken  19866894233251_1
atgtccaatctaaatctcccttcttttcatttgaaactatttccccttgttctatcaccacagagcctgctaaaggatctgtccccttctttcttatagcccccttttagatactaaaagactgctttcaggtcaccccagagccttctcttctccaggctgaacagccccagcgctctcagcttgtcctcactggggaggtgttccaacccttggatcatgttcgtggccctcctctggacatgctccaacaggtccatgcctctcctgtactgcaaactccacatctggatgcaataygccaagtgaggtctcatcagtgcagagtaaaggggcaggattacctcccttgacctgctggcctcacttcttttgatgcagcccaggacatgattggctttctcatmggctgtgaaggcacacttgctggctcatgtccagtttactatccaccagtactcccaaatcctttttgcatggctgtgctacctccttacatccttcaacttgtaatgatagtgtgggttgccacgacccaggtgcaataccttgtacttggatttattgaacctcatgaagttmacctgggcccactacttg

SEQ ID NO: 21690 - DNA, 600 bp, Chicken  19866894233251_2
tagatactaaaagactgctttcaggtcaccccagagccttctcttctccaggctgaacagccccagcgctctcagcttgtcctcactggggaggtgttccaacccttggatcatgttcgtggccctcctctggacatgctccaacaggtccatgcctctcctgtactgcaaactccacatctggatgcaataygccaagtgaggtctcatcagtgcagagtaaaggggcaggattacctcccttgacctgctggcctcacttcttttgatgcagcccaggacatgattggctttctcatmggctgtgaaggcacacttgctggctcatgtccagtttactatccaccagtactcccaaatcctttttgcatggctgtgctacctccttacatccttcaacttgtaatgatagtgtgggttgccacgacccaggtgcaataccttgtacttggatttattgaacctcatgaagttmacctgggcccactacttgagcctaggtctctgagtagtattgctagtttcaggcattttgactgcaccacacagcttggtcaagatgatcggagaggtcaagtatgatttccccttggtgcatcc

SEQ ID NO: 21691 - DNA, 600 bp, Chicken  19866894233251_3
cacatctggatgcaataygccaagtgaggtctcatcagtgcagagtaaaggggcaggattacctcccttgacctgctggcctcacttcttttgatgcagcccaggacatgattggctttctcatmggctgtgaaggcacacttgctggctcatgtccagtttactatccaccagtactcccaaatcctttttgcatggctgtgctacctccttacatccttcaacttgtaatgatagtgtgggttgccacgacccaggtgcaataccttgtacttggatttattgaacctcatgaagttmacctgggcccactacttgagcctaggtctctgagtagtattgctagtttcaggcattttgactgcaccacacagcttggtcaagatgatcggagaggtcaagtatgatttccccttggtgcatccatgtagactactcctgataatctccttttcttccacttggatggagatgacattcagaataagctgctccatcaccttcttagggatggaggtgaggctgtctggcctatagttccctgggtactccttagtatcctttttgaagactggtgcaacgttggcagtcctccagtcc

SEQ ID NO: 21692 - DNA, 600 bp, Chicken  19866894233251_4
tgcaccacacagcttggtcaagatgatcggagaggtcaagtatgatttccccttggtgcatccatgtagactactcctgataatctccttttcttccacttggatggagatgacattcagaataagctgctccatcaccttcttagggatggaggtgaggctgtctggcctatagttccctgggtactccttagtatcctttttgaagactggtgcaacgttggcagtcctccagtcctcaggcacctctcttgttctccgtgacttttcaaagatggtaggaagtggtttggcaataayttctgaaagttccctcagcactcatgggtatgtcccatcggggcctatggatttctgtgcagtgagtttattctcaaccaaggagttttcctttgcccagactctctctcttatctccagggtctgggatttctgaggggcagtcttagcagtaaaaactgaagcaaaaaaaaactattcagtaactcctccttctcagtgtacttcattatctgagagggcacccaccttgttcagcagtgggctcagattttccctggtcttcattttgctattgtcatacttaaagaaacctttttg

SEQ ID NO: 21693 - DNA, 600 bp, Chicken  19866894233251_5
acacattttgtcattggctgctccaccagctgcatcagaaagttatctttggcgcactgcaggaacttcctgggctatgtgtgcctggccatattgtttttccagcaaatattcagggtgattgaagtctcctatgagaaccagtgcctgtggtcatgaagctactttcagctgtttgtagaaggtctcatcaactttctcctcctcatcaggcaatttgtgattatagatctttgatgagagaaggaggtttcagtgtcttttcaagacagaagtgatttctcatggcctgcagagaarcttctacttttaaatgctcagataaaaagtggtgtgagtaccctttagtctggtgttgtttttctttccctggacaaaaccattacagaattcacattgaatgtatataataatacaagctagaaattatttactgaaaaatattcatccagtgcagtgtatcagctgaagggagctgcaaggataactatttagtattagcattaattactgtgcagggacattgttgcaggtgatccacatttattaagccattccatttagcagatatgaagaaatcatggttattctgtctcagta

SEQ ID NO: 21694 - DNA, 507 bp, Chicken  19866894233263_1
gagagcttatggattgaaattatggaccagatcttcggaggagatcttgtgttcagagtctacacaggctgtcagaaagagaggagcctgctgacaaggcctccttgcttcagctgcaggaacagtcacgctcacacgctctcattctgatgggggatttcaaccacccgggtatctgttgggaaagcaacgcagcaagttgctccaggagactcctggagtccatcgaggataaactcctggttcaggcgtcagacagaccgaccagaggagaagtgttaccagacctggtgctcacaragaagatcatgaccaacatggctgaacaaggacctggtggtcaggctgagggacgagaaggaaatatacaggcagtgcaagcagggatggctggtctggaaagaatacagggatgctgatgtgatcagggaaagccaacgtgtagatagaactgaacttggtgaggggttctactcatatggtggtcagaagagacaggcaaaggag

SEQ ID NO: 21695 - DNA, 600 bp, Chicken  19866894233268_1
gaagattcttattttacccaatttcatgttttcttatacatcccagaaagtctatgcaaccctactctcacagtaactaagctctctacagtcaaaatgaaaggtgtcttttcttgatatgactcaaaatgaaaactatattgaatattttaggaaaatagaatatcctcagctgggaggaacccataaggataattgagaccaactcctggctccacacaggagcggccaaactgagactatatgtctgtgagcattgcccaaacattccttaaactcatggctcagggcaatgactgytgtcctgggaagactgtatctgggcccaaccactctctactgaggaaccttaccctaccagccaacctgacccttcccttgggccctgtcgctgtaacagagagcagaactcagtggtgctcctttgctccctgtgaggttctgcaaccaccatgaagctctctgctcctgtgctctgatctgagcaaacccaaggactccagacactttataacaacttctagaaattaatctaatttcaccccctaactcttgcacaggaaaaaaaggaaggataagaatgaagaaccacgtgtgagg

SEQ ID NO: 21696 - DNA, 600 bp, Chicken  19866894233269_1
gtgtttagtaaacagttttcctctcattcccttagtccatgttctccaattgtccaaaacagtggagcatagctttctcacacctaaaaagaagatatattttagctgtttgaaacaaggaggaaaggaagagctgaaagactttccatattcttcagcactcagacagtgaagggtgtgaggaccagctcacagcagccagctgcctggtggtgaggcagcaccttgttccttgaaggctcccatggaatgcaatggcactgcagacagaataaggctttgccttctttcttaccaagraaaaataataataataataataaccaaagggtgggatctgccttttcatgtcacagacttttatctgctcaaaatcacgctaacctcagggtgccaagcacagagtgtttgaaagccttccaaggatgggaagagctgctgcatctcctccactacaaagggaagctgggtaggagtaggagctgctgtgggcttacaagaaagggatttggtcgccttgccttctgtcaggacctcattcctcctggatacttccaggtagtacctttttgcttatgcttgtattaggaaaatakttga

SEQ ID NO: 21697 - DNA, 489 bp, Chicken  19866894233269_2
aagraaaaataataataataataataaccaaagggtgggatctgccttttcatgtcacagacttttatctgctcaaaatcacgctaacctcagggtgccaagcacagagtgtttgaaagccttccaaggatgggaagagctgctgcatctcctccactacaaagggaagctgggtaggagtaggagctgctgtgggcttacaagaaagggatttggtcgccttgccttctgtcaggacctcattcctcctggatacttccaggtagtacctttttgcttatgcttgtattaggaaaatakttgattgactggctttatwattgaaaaggaccacaatgttatctcattccaacccctgctatgtgcagagttgccaaccaccggaccaggctgcccagagccacgtccagcctggccttgaatgcctccagggatggggcaacatctagtgttaagattaagatcttaattacctgaattccttttaga

SEQ ID NO: 21698 - DNA, 470 bp, Chicken  19866894233269_3
aataataaccaaagggtgggatctgccttttcatgtcacagacttttatctgctcaaaatcacgctaacctcagggtgccaagcacagagtgtttgaaagccttccaaggatgggaagagctgctgcatctcctccactacaaagggaagctgggtaggagtaggagctgctgtgggcttacaagaaagggatttggtcgccttgccttctgtcaggacctcattcctcctggatacttccaggtagtacctttttgcttatgcttgtattaggaaaatakttgattgactggctttatwattgaaaaggaccacaatgttatctcattccaacccctgctatgtgcagagttgccaaccaccggaccaggctgcccagagccacgtccagcctggccttgaatgcctccagggatggggcaacatctagtgttaagattaagatcttaattacctgaattccttttaga

SEQ ID NO: 21699 - DNA, 600 bp, Chicken  19866894233272_1
cgctacgtttatcgctttgtgtgcgacctgcagaacttgctggggtacacagcggaggagctgcatgccatgctgggggtgcagcccgacaccgaggactgagcccgaccacctggtgccgcaccagcggggagtgcttgttgggactgtgaccaggagccgtctgcagtcagttcttctggctgttcggatgggtgcaactgtgatgaaataaggaccttgactgattttgtaaccagggaaagttggaaggaagtggccttatttcatcagtggcttcagatgttgctgtatcaggcrcttgagcagcatggaagtcgatacagatcacagctctgtcacgatgacacagaaaggctttagggttaagcattttgaccacctattctgccatataaaatgttttggctacttacactgccatgtaatgatgggttggctttaaaaccaaaggttggatgaagaaaccggtgatggagcagaacaattgctcagattcttttataacacgccatcgtctttgcttccatcttctatcatgcaatttatttaagaaaaactaatttattttaaaagagcagtaagaagaattgatattaa

SEQ ID NO: 21700 - DNA, 600 bp, Chicken  19866894233286_1
aggtaaatcagtgaaggagcaggaggcacgctcctgtaggagaacttttgggaactttggtttgtccctcaaacatggcacctgtcagctcagggcccctcagcagtacagaacagacctgttgctggtgtcattgatgtttcttacaggcttttgaggttttttagcggtggtccttagttctgtgatagtggatctttctcttctcactcttgtggcatcctctgctgtactacagccatattagttcctttgggcacgattccctgccctattggtctctgtcatactgtaagatgmtgtcctgagaaaccttaagaccttttccttattgccaggaaagctgggagacgcctgacgttatctcaatgaatgtgaaaaatgctgaggataagttttgaacttacagagaaatgcagatgatccattttctatgtctttgtctcagcagaactttgcattatgctgtcctgcctagccaagaaaggagagggaggaaacccacgagaccaggaaggtttttgcaataacatggcacaaactgaggagtttctgaatacgaaggagaggaaatggaagaattttctaagatctgttact

SEQ ID NO: 21701 - DNA, 600 bp, Chicken  19866894233290_1
taagctagaggtagcaatgccagtttgctgactccagcacctggactgcttgaggaaatctcagagcagctatgggaggtcagtgggtgagagggacactggggagctgcatgttcagcccgtcctcaaagcagagcacagagagagcagctttcctccagtgctgagctcttgctggagctgacacagcaccattgcactgatactagcatggcagcatcctgtaccctccacagagctcctctattctgctccatccaccccagcaagaagagctaagagtgcaacaatgcacagagratacctgcatagtgccttgagcccctggagaaggattctttttaatggacagtcccccagacaccagctcagccatactaggtgctgtctgaagccagcagcagctttgcttacaggtaagcagtcttaagcacaactgatgtgctgaattagggattgaagcaggcagcacccctccgagctataatccattgccttgctaacacggatgtaaattcgattagggtgagggagggcactgagggaaggctgctgtctgctcccgctgtgctgggctgcagcacgcacacagcatcccgt

SEQ ID NO: 21702 - DNA, 600 bp, Chicken  19866894233297_1
tccattctgaaaattttactttaaaaaaatggtatttataaggactttgtcatcagaacagggtgaataggttgttagcaatttggaaggcatagagaagatccagttgctctgagagagctataccctggctgtgcattaaagcactctgaacaaagagttgtttgcatgtgtggaatgggtagagatgctttggagacgtgcatggagcaagccaagtggatttgcttgtcaagagttcagtcctgttcttttcagtgagactcatgcagtaaattctctctgtgtaaagtggagatyttggtgctcccgtggtgtgccaagtgtttccctaggtgtgtgcatttggctgcgtgcagcaggaggcagggcaggagctgcagacagggaaaggcagttttcatgtggagggtgtgggcctcattggctgctctgggacaagaaattatgttgctttcagagactcgttggtggaatctaattaaaccactgctttaaaaagactaaaaatctccccttaagtggatttgtttgctggcaatttggtatgaaatcagaggactaggaacagatgattagctttttttttccttcggttta

SEQ ID NO: 21703 - DNA, 600 bp, Chicken  19866894233301_1
gaacccagaatgtttaagtgggaagagatggctactgggcaagggtctgcctgaaccagacatcaaaaccaacagtagggaaacaaatctgtaggttttaatctgcttttctcaccggtaacagtagagtggcttctgcattctcttctgcatctacgtgactctttcagaacagacttttaaatacctctagtcctaaatattgcctccatcagtccacttttattagtacacagatcctctgtaagcacttgtccttggcagaaggacagccttctccaaaagcagagcacatccttrcaccacttgtttagccaacagttcattttgagtggttgcccctctgcattccgttcttatttggttatcatcccattcccctggtatctctscagccatttgcactctgccaagcatccgatgaagccaggcatgaatgctgcaccaggctttcacctctgggttcagagaatcatagaatcagttgagttggaagaaacctttcaaggctatctagtccaactcccctgcaatgagcagggacatccacagctacaccagagtgctcagagcccctccagcctgaccttgagtgtctcc

SEQ ID NO: 21704 - DNA, 600 bp, Chicken  19866894233301_2
aggttttaatctgcttttctcaccggtaacagtagagtggcttctgcattctcttctgcatctacgtgactctttcagaacagacttttaaatacctctagtcctaaatattgcctccatcagtccacttttattagtacacagatcctctgtaagcacttgtccttggcagaaggacagccttctccaaaagcagagcacatccttrcaccacttgtttagccaacagttcattttgagtggttgcccctctgcattccgttcttatttggttatcatcccattcccctggtatctctscagccatttgcactctgccaagcatccgatgaagccaggcatgaatgctgcaccaggctttcacctctgggttcagagaatcatagaatcagttgagttggaagaaacctttcaaggctatctagtccaactcccctgcaatgagcagggacatccacagctacaccagagtgctcagagcccctccagcctgaccttgagtgtctccaaggatggggcatccaccacctctctgggtaacctgtgccagtgcataactacccttatcacaaaaaaacaaagaaacaaaacaaaaacaaa

SEQ ID NO: 21705 - DNA, 600 bp, Chicken  19866894233306_1
tgtatgtggtgcagtcacagctattccctctcttggtatgccaacttatgaagtttcatattcaaacaatataatatattcttaaatagtgttaggacatttacataaataactatatttaaaagtgtggcatagcattaaaaaaatgaaaaccagttaccactttttgtaactaactcctactcattcctaaaggtatttacttaatattcaggaaggaagaaaacgcagagacaaatctacttttttttttttttttttctgaggtgctaaatccattctctttaaagcatggtcttytgcctctcctggtttcactattagtttgatatttttttctttttttgctaaaaagatttcctccaaaaaaccacttttgtttcctaattaaacaaacaaacaaacaaaaaaaaaacaaagcaaacaagcaaaactctcaggagcatactttagtatagcaaatgggcgtatcttgttcttatattttagcattccacagttgctaacacttatcttctgtgctccactttgctttagttcagctgaagtgttgactgtattcctttctagataacttcttaaattccattttctttcttt

SEQ ID NO: 21706 - DNA, 600 bp, Chicken  19866894233306_2
ttttttcattagaaataaagagataagtattaagtctcttcttctgcctcactctgacagaatgtttttcacagtcttttaagataatttggattgcataatatcaaatttttgattccttatatcttaacagacaaatatttgcaaagtagctgctgaaaggtatatagctcacgaaaatattgacaagtctgtcgttaaattaattaacactatcttccaagtaataacattcttgttttttaatatcatatatatatttaaaaatctgaatccctttgttctaatgctgatcatagyttaataaattttgagcaaaatacttmtttaaaaatcttccaaagacttcttttgtttccctacatgagattatgcctcatttgaaaacatgtaataactacctctttttactttctggaaagtcttgatttcagattaagaaaagatgaagacttgtacatgtatgatttaagttttattttaatgttttcattgtacattttagtgttcaccatcctttttctgcagtagaaattaagtatgcctaaaaaagtaaaagggatatgatcttaatttttttcttaaaattctttttcttct

SEQ ID NO: 21707 - DNA, 600 bp, Chicken  19866894233306_3
gtattaagtctcttcttctgcctcactctgacagaatgtttttcacagtcttttaagataatttggattgcataatatcaaatttttgattccttatatcttaacagacaaatatttgcaaagtagctgctgaaaggtatatagctcacgaaaatattgacaagtctgtcgttaaattaattaacactatcttccaagtaataacattcttgttttttaatatcatatatatatttaaaaatctgaatccctttgttctaatgctgatcatagyttaataaattttgagcaaaatacttmtttaaaaatcttccaaagacttcttttgtttccctacatgagattatgcctcatttgaaaacatgtaataactacctctttttactttctggaaagtcttgatttcagattaagaaaagatgaagacttgtacatgtatgatttaagttttattttaatgttttcattgtacattttagtgttcaccatcctttttctgcagtagaaattaagtatgcctaaaaaagtaaaagggatatgatcttaatttttttcttaaaattctttttcttctgcatgttcttgatggtggaagctatc

SEQ ID NO: 21708 - DNA, 600 bp, Chicken  19866894233307_1
gtgaaaagcaaaagactgctcagtatggagaagaacagcactatgcttgtgattgcacatctgtggctgccagccaggccaagcagcaggtgctgaatactcctcagctgagtattaacaaaaacaataacaataaatataaagcaagccactaggtgacaccacaaatagaacagactgcaaaggtgtaagtcagaacaaagcatggaaaagtaatttcttcagtcaaagtgccttccgaagtgggacagtacttatggccaacatcagacacaatgcaaacaagctctgggtgacctrcacgcttatctgtagtactgtgtatgctgttcagtcctacactcatcagaatcygcactacctgagggcttttcttgacagctcttcaagctgaggaaagcacaacaaaattcattttcactgagaattattttgaatatttgcttggaaaaggcctgtgaatgatcattttgggcaaatgggtcttaatacaggaattaacttgtttcaaaggtcttgaacacaacacacatcactcaatgattaataagatatacaggcaataggctttcctcaactttctgttattaatttgctaat

SEQ ID NO: 21709 - DNA, 600 bp, Chicken  19866894233307_2
gcacatctgtggctgccagccaggccaagcagcaggtgctgaatactcctcagctgagtattaacaaaaacaataacaataaatataaagcaagccactaggtgacaccacaaatagaacagactgcaaaggtgtaagtcagaacaaagcatggaaaagtaatttcttcagtcaaagtgccttccgaagtgggacagtacttatggccaacatcagacacaatgcaaacaagctctgggtgacctrcacgcttatctgtagtactgtgtatgctgttcagtcctacactcatcagaatcygcactacctgagggcttttcttgacagctcttcaagctgaggaaagcacaacaaaattcattttcactgagaattattttgaatatttgcttggaaaaggcctgtgaatgatcattttgggcaaatgggtcttaatacaggaattaacttgtttcaaaggtcttgaacacaacacacatcactcaatgattaataagatatacaggcaataggctttcctcaactttctgttattaatttgctaatcagtcactaattgagcacaacttcctgaggtggtaggcagcagagaatgaagaa

SEQ ID NO: 21710 - DNA, 600 bp, Chicken  19866894233327_1
aggcaagatggttagggagcacactgcagagataagcagaaaaaggaggggtaatcttgtgactcccaagcagttttctcttccccaaaaaaggaaaatgggggtagaactgtgaagtcttctggggtatgtatttcttacctcctgagaaccaggtactcagaatatcatcaatccacagaactggagcattaactccttaaagcccagtgcactacatgatgttataatgtggaataccggtaacaaaaattgtaaaaccatgacactcataaataattctagcaaaattttaggtasagaacactggaaatggctttaggacaaaatgaactatgattttttcagaattaatacaaaaaagaaraaaatgcttgtattttagaaagaactcaaacctgttccctgtggcagctagtcacaaygtttagctgcaaaacaaacttcttacgaggacaccaaatattttcatttttgtctacaggtagagattgtctaaaggaacccctaccaatgtttgacttctttttatactgactttaagtatcatgagaagcatcttgtaaagaattctaattcattttcttttaagtaaagggt

SEQ ID NO: 21711 - DNA, 596 bp, Chicken  19866894233327_2
aagcagttttctcttccccaaaaaaggaaaatgggggtagaactgtgaagtcttctggggtatgtatttcttacctcctgagaaccaggtactcagaatatcatcaatccacagaactggagcattaactccttaaagcccagtgcactacatgatgttataatgtggaataccggtaacaaaaattgtaaaaccatgacactcataaataattctagcaaaattttaggtasagaacactggaaatggctttaggacaaaatgaactatgattttttcagaattaatacaaaaaagaaraaaatgcttgtattttagaaagaactcaaacctgttccctgtggcagctagtcacaaygtttagctgcaaaacaaacttcttacgaggacaccaaatattttcatttttgtctacaggtagagattgtctaaaggaacccctaccaatgtttgacttctttttatactgactttaagtatcatgagaagcatcttgtaaagaattctaattcattttcttttaagtaaagggttaccttgcacatattcctcctttccatttgtacttttaataattcagagaacctcaaaacagt

SEQ ID NO: 21712 - DNA, 538 bp, Chicken  19866894233327_3
ggtatgtatttcttacctcctgagaaccaggtactcagaatatcatcaatccacagaactggagcattaactccttaaagcccagtgcactacatgatgttataatgtggaataccggtaacaaaaattgtaaaaccatgacactcataaataattctagcaaaattttaggtasagaacactggaaatggctttaggacaaaatgaactatgattttttcagaattaatacaaaaaagaaraaaatgcttgtattttagaaagaactcaaacctgttccctgtggcagctagtcacaaygtttagctgcaaaacaaacttcttacgaggacaccaaatattttcatttttgtctacaggtagagattgtctaaaggaacccctaccaatgtttgacttctttttatactgactttaagtatcatgagaagcatcttgtaaagaattctaattcattttcttttaagtaaagggttaccttgcacatattcctcctttccatttgtacttttaataattcagagaacctcaaaacagt

SEQ ID NO: 21713 - DNA, 600 bp, Chicken  19866894233330_1
atgcagcagcagatgcttagcatagacctctttcatgtctgttagtacatacattccagagctggactgaatccagtttgcactagcacatgaaacattttctgttgtagtgctgcttagcaacatgtgaggacccatgtgaaacctgaaggaaaccctgggcagcagctcctccagtcctcacacactccaggataacaactattgcccacatgagcaaggatgctctttggacacagtaacgctacctgctgtgtgtgctgaagcaggggataactgggtctggcaggctgtgcaaaygccgttggggggagagacttcagcatcatgttctgcatgatgatttgatgcatctgtgcattctgcatcagcatcatctccaccatatctgggaagaagtcatccaaaggaagaaagtaagagctttattagcaacagacaagcagaagaggtatctcagtagaagctgccctccaggatgcgaactcatgaacacaactgagatgaagtggctgaaaatgacatttgagcaatattagcattacatgcccagatggtgcaaaattaatgtctatgaataagaccatccacaccagattt

SEQ ID NO: 21714 - DNA, 600 bp, Chicken  19866894233333_1
ggcaaactgccagaatactggttctcttgccttcctgtcaaaaactgagctgaagaatatgattcaagcatcaaggctttcaatggcagacaggctgtcactgtaatgcatcccatctacttaaaagcatctctcagatgtcaaagaagaaggtggaaaaagaactccagacttatcctgagtctgaatgtgtccctggaggccttgcttccacatttgatccacactgcgaaaacctaacatcagatcagaatatggagaaaggaggtaaaactaatagtaggaaaatacactgatgartggctatagggctgtccaggagacatgcagatgctttatgtgcctgcaaacaggtaagggaagaaaaaaaaaaaagagagaaactactcagaaatgcagcaggaagagctgagatgcatttcttgatttcagcacaataattaaggatttataggttgcagaagtaccactttccatgctcagcctctcatgccagggcagttcattttgccatgatatgagcagattttcacatataaccaaattcctctcctagggcagcctctctttcataaccttttgaactgggcagtctccagg

SEQ ID NO: 21715 - DNA, 600 bp, Chicken  19866894233333_2
caagcatcaaggctttcaatggcagacaggctgtcactgtaatgcatcccatctacttaaaagcatctctcagatgtcaaagaagaaggtggaaaaagaactccagacttatcctgagtctgaatgtgtccctggaggccttgcttccacatttgatccacactgcgaaaacctaacatcagatcagaatatggagaaaggaggtaaaactaatagtaggaaaatacactgatgartggctatagggctgtccaggagacatgcagatgctttatgtgcctgcaaacaggtaagggaagraaaaaaaaaaagagagaaactactcagaaatgcagcaggaagagctgagatgcatttcttgatttcagcacaataattaaggatttataggttgcagaagtaccactttccatgctcagcctctcatgccagggcagttcattttgccatgatatgagcagattttcacatataaccaaattcctctcctagggcagcctctctttcataaccttttgaactgggcagtctccaggaactgttattgtttcattgactgtagtgagcacacaggatatcatgcaggcagtaaataaagtg

SEQ ID NO: 21716 - DNA, 600 bp, Chicken  19866894233334_1
caagcatgcatcttagtaggtggggatgaagcacccggggtgaaataaacttctaaacccgtgtggaaatgctggctggagattgtcagcaatttatagaattcattccattgccttacagatgatgcacatcattaatgagcaaaaatatttgcttgcgcaccaatacctgaaactcctcctgatagctacagcaaacatgggaacaggccctgaagttgctaatgcgaatataaatctctcttcgattgagcttaatcatacatcagccattgcacagcctaaagcttggctctcgaygtttccaggctaatcaagaagacagttgagtcaaagcactgatggttccttactgcagagaatagcatatggctccatcattcacctggctcggcacagagagcattaagcgagatgctgttggctgcccatgcatactgttgtgtacaataacagaaaacaacagaccgcttggatgagcaaaaaattcatccaaaaagaaaagaaaaagattctgcttgattttggctttttgacaagtacaaatgataaaggttgtacggacaccattaggaaagagccttagcaacagtgtaagat

SEQ ID NO: 21717 - DNA, 599 bp, Chicken  19866894233335_1
  misc_feature (1)..(196): n is any nucleotide
nnnnnnnnnnnnnnnnnnnnnnnnnnnnnnnnnnnnnnnnnnnnnnnnnnnnnnnnnnnnnnnnnnnnnnnnnnnnnnnnnnnnnnnnnnnnnnnnnnnnnnnnnnnnnnnnnnnnnnnnnnnnnnnnnnnnnnnnnnnnnnnnnnnnnnnnnnnnnnnnnnnnnnnnnnnnnnnnnnnnnnnnnnnnnnnnnnnnctgatattaattacagaaatgttttgtatgaaaaggaagtaatttttctgtgtgtgtttctggcaggtcttgagctgcacagaagaaggtaagagttccaagcsggaaattcatgagaagggatggaatgcttttacaagaattatcttgatactattcaagataatacaagaattcaagaatatacaagaatatacaagaattcttttacaagaccagtgagctggcaagctcactgttaaatraattttgctgcctaagctgccaccttccacaggttgaccctactgggattgtcaatgtatgtaattaactcacaggctcacagcttgctcttgtgagcyacaaagaattccctgagtaggaacagatctcagatctgcacccttcctgaatttatggt

SEQ ID NO: 21718 - DNA, 599 bp, Chicken  19866894233335_2
  misc_feature (1)..(55): n is any nucleotide
nnnnnnnnnnnnnnnnnnnnnnnnnnnnnnnnnnnnnnnnnnnnnnnnnnnnnnnctgatattaattacagaaatgttttgtatgaaaaggaagtaatttttctgtgtgtgtttctggcaggtcttgagctgcacagaagaaggtaagagttccaagcsggaaattcatgagaagggatggaatgcttttacaagaattatcttgatactattcaagataatacaagaattcaagaatatacaagaatatacaagaattcttttacaagaccagtgagctggcaagctcactgttaaatraattttgctgcctaagctgccaccttccacaggttgaccctactgggattgtcaatgtatgtaattaactcacaggctcacagcttgctcttgtgagcyacaaagaattccctgagtaggaacagatctcagatctgcacccttcctgaatttatggtggcccaatgttttccttcagatttttaaatgtagggcctttaaaattctcttgatcacaaagcaatataatctgaaagatgcagaaggaagggagatctaggtatcagcatttctgttgccactttcttatttttagaatg

SEQ ID NO: 21719 - DNA, 600 bp, Chicken  19866894233335_3
tttctgtgtgtgtttctggcaggtcttgagctgcacagaagaaggtaagagttccaagcsggaaattcatgagaagggatggaatgcttttacaagaattatcttgatactattcaagataatacaagaattcaagaatatacaagaatatacaagaattcttttacaagaccagtgagctggcaagctcactgttaaatraattttgctgcctaagctgccaccttccacaggttgaccctactgggattgtcaatgtatgtaattaactcacaggctcacagcttgctcttgtgagcyacaaagaattccctgagtaggaacagatctcagatctgcacccttcctgaatttatggtggcccaatgttttccttcagatttttaaatgtagggcctttaaaattctcttgatcacaaagcaatataatctgaaagatgcagaaggaagggagatctaggtatcagcatttctgttgccactttcttatttttagaatgatagatacaaaatctgtcacaagagcaagaaattttagactcattaagatgaaaagactgatatggtgaagaacatgatgactacaaacgtttgcttatg

SEQ ID NO: 21720 - DNA, 600 bp, Chicken  19866894233338_1
aagtggaggaatggcattttctgcatttaacaccttgcttcatatacaactgtcaacttagatagaagtacacatgagaacacaaagtcaaaaacttaggaatccagcagaacatcaaactaagggtttcaggatgaggctgatgcttatgttccgccgttctgcatgccacattaattctcccaccattctccaccggcaacactgttaaaactagaacatcatataccatcagggaattcttggaagaggtaccaaacaaaatgttttgagtcttgcgtctttttctggtgcttcacraagaacactttaagagcagctcaagaacgtaaagaagcctaaattgaagagtcttaatatcgcttcacaccctaaatagcttgctataaatgccaacatttttcagcagttagtgcccatcactgaagccaacaggagtttgcccctgttcayttaagatgctttaagaaggaagcaagagcccaactatgtatgtgttcagtgttgattaccaatgttaagatttctacaattcccactttatacaacattaacactacagtgatccaagacaaggggttcatcaagggcaaaaatgaa

SEQ ID NO: 21721 - DNA, 600 bp, Chicken  19866894233338_2
ccgccgttctgcatgccacattaattctcccaccattctccaccggcaacactgttaaaactagaacatcatataccatcagggaattcttggaagaggtaccaaacaaaatgttttgagtcttgcgtctttttctggtgcttcacraagaacactttaagagcagctcaagaacgtaaagaagcctaaattgaagagtcttaatatcgcttcacaccctaaatagcttgctataaatgccaacatttttcagcagttagtgcccatcactgaagccaacaggagtttgcccctgttcayttaagatgctttaagaaggaagcaagagcccaactatgtatgtgttcagtgttgattaccaatgttaagatttctacaattcccactttatacaacattaacactacagtgatccaagacaaggggttcatcaagggcaaaaatgaattccaccaatggtgcttgagaactgatgtgttcccttacctctgaattcccatacgtattagaaatgtaacattcatatatataattagcaagcatgcagtgttacgcttttaagatgggcaaacataagaaaattggaaacatattaggttt

SEQ ID NO: 21722 - DNA, 600 bp, Chicken  19866894233338_3
atctgaatatttgaaacacagcatctgcaacagcaatttattactgatccatgttacagcatttgctcaacaggaagaacaagttggcaaatcagaaatgatataaagcctgtcacttactgcagaatgtacatgtaaaaggagtctaaaaatatctgcttggcagatcattttaaaagtgacacatgaggacacactcacaaagccagtaacaatctggataatcttgttccaatcaagaacaagaagctttaacaacagtaaatatgatcaaggatacaactaaatcaaaacaacccraaggtctttttttgtgtttgtttgttttttaaaaaataaacaccaaaaaaaaaaaaaagaatagacaatgtccacaagagatcaccccactgaagcacaaacatgtctttgttggaagtgatgaaagaattacattggaggaacaaattaaatcagtggaggtgaaacagaacgtaacttacaatactaagagagcatatgaaatcttacaatcatcgatttggaatgactttgtaacatatcttccatatgaaaaaccaaacagatagataagcttcattctgaagttacaaaaattag

SEQ ID NO: 21723 - DNA, 600 bp, Chicken  19866894233338_4
cctgatgcagagtgaaaaggaaggaatgacgatgcagcctagccagctcttgaactcagatgacggggagctcaaggctcaagggacacttcgcaatctgatcagcatgcatagcagtaagcatcacctctgtcactgttttcttctagctcacagggagactgcatctggacttccacatgcaaagttacactccattgttaagtgaattgaggtggttttaacacaagtgcttcattggtgttaacttactgaaaagactcaaaagcaaaaaagactgaaacttattttttttgtatyatatatgtgatagtgaatagctccccttagctccgaaatgtcaagatgggaaggacttcacctaacttcttgattctctaacttcttgaaataagatgctcattaacataaaaatgcattgacttaaagaaacacagatctcttagctattmtctcaagtccactttgtaagtctgtcttaatgcgtgagcagacagtttcagaaaaagaagaaaatttctatctgcctgttatgagaccgactgctgggagaagtcactctgatcccatggacagctttatccacctcgactactcagt

SEQ ID NO: 21724 - DNA, 600 bp, Chicken  19866894233338_5
acagggagactgcatctggacttccacatgcaaagttacactccattgttaagtgaattgaggtggttttaacacaagtgcttcattggtgttaacttactgaaaagactcaaaagcaaaaaagactgaaacttattttttttgtatyatatatgtgatagtgaatagctccccttagctccgaaatgtcaagatgggaaggacttcacctaacttcttgattctctaacttcttgaaataagatgctcattaacataaaaatgcattgacttaaagaaacacagatctcttagctattmtctcaagtccactttgtaagtctgtcttaatgcgtgagcagacagtttcagaaaaagaagaaaatttctatctgcctgttatgagaccgactgctgggagaagtcactctgatcccatggacagctttatccacctcgactactcagtaaacagctaacagaaataaagccaaattcttcagtttcaggtttaccaaattcagcttccttgaatttgtaagaataagaaagctaccacccgagtaatggacacaagtatttcatttacttcactccaatcttccttacaaaatatttttg

SEQ ID NO: 21725 - DNA, 600 bp, Chicken  19866894233348_1
attattttcctggaaaaaattagaattgattttatttggagaccgaaaacaaagaatacatctgttaaatattttccatctgtttatttatttatgctttcaggtctggtagaacataaagcagcaaagtgtctgctacctacattctgcttgcagcccagaaggccaaccgtgtcctgggccgcatcaagagaagcgtgaccagcaggtcgagaggtgattctgcccctctgctctgctcgtgaggccccacctgcatccagttctggagcctccaacacagaaaggatgtgaagctgkgggagcaggtctagaggagggccacggagaygatcagaggatggagcatctcccctgcaaggacagcctgagagctggggctcttcagcccagagaagtgaaggctctgaggagaccttatagcagccttccagtacctggaggggcctacagggaagctggggagggacttcttataagggcatgttgtgaaaggacaaggggaaatggtttcaagctggaagagggcagatttagattagatatcaggaagaaactctttattgtgagggtgatgagacactggaacaggttgcccag

SEQ ID NO: 21726 - DNA, 600 bp, Chicken  19866894233348_2
ttatttggagaccgaaaacaaagaatacatctgttaaatattttccatctgtttatttatttatgctttcaggtctggtagaacataaagcagcaaagtgtctgctacctacattctgcttgcagcccagaaggccaaccgtgtcctgggccgcatcaagagaagcgtgaccagcaggtcgagaggtgattctgcccctctgctctgctcgtgaggccccacctgcatccagttctggagcctccaacacagaaaggatgtgaagctgkgggagcaggtctagaggagggccacggagaygatcagaggatggagcatctcccctgcaaggacagcctgagagctggggctcttcagcccagagaagtgaaggctctgaggagaccttatagcagccttccagtacctggaggggcctacagggaagctggggagggacttcttataagggcatgttgtgaaaggacaaggggaaatggtttcaagctggaagagggcagatttagattagatatcaggaagaaactctttattgtgagggtgatgagacactggaacaggttgcccagcgaggctgtggatgccccctccctggacaca

SEQ ID NO: 21727 - DNA, 600 bp, Chicken  19866894233348_3
gacaaaggtgctgctgggctatccctaagctactattttatatacaagcaagctttcatgtgctgctgttgcaaaaacacatgacattgaagaacagacctagtccacctgtaaccctttgtaatactctgtcagcccagagggaaatgggaagtcacctcctgaatcagccagagaacaggtcaaggctctgcagctgaacgaactgaaattaagtgacctctaacagacatatagctgacaggttgggcttgggttccaaaatcaaagaacaaaggaccacagaatactgagcccagyagcaactaagcagttaatgacaacacctgcargctggaaatggaacaaagaactgtgcttttccctctcctgccctgtcyatgtgttctgtaaagctggtaaggccactgctttcttgtgctccagtaaagtatccagaattttgagagaggcactcagcatgggcataggcatatgcagtacttcttcctcatgttccgagggtaaatcccctcttccccagctacacaggaaaactgcagcttcctagcttggggtgaatgaacccatctagagatctgctcttgtctgtcaaagcct

SEQ ID NO: 21728 - DNA, 600 bp, Chicken  19866894233348_4
ctattttatatacaagcaagctttcatgtgctgctgttgcaaaaacacatgacattgaagaacagacctagtccacctgtaaccctttgtaatactctgtcagcccagagggaaatgggaagtcacctcctgaatcagccagagaacaggtcaaggctctgcagctgaacgaactgaaattaagtgacctctaacagacatatagctgacaggttgggcttgggttccaaaatcaaagaacaaaggaccacagaatactgagcccagyagcaactaagcagttaatgacaacacctgcargctggaaatggaacaaagaactgtgcttttccctctcctgccctgtcyatgtgttctgtaaagctggtaaggccactgctttcttgtgctccagtaaagtatccagaattttgagagaggcactcagcatgggcataggcatatgcagtacttcttcctcatgttccgagggtaaatcccctcttccccagctacacaggaaaactgcagcttcctagcttggggtgaatgaacccatctagagatctgctcttgtctgtcaaagccttgcagtaggtcagctgtttccagtactgccac

SEQ ID NO: 21729 - DNA, 600 bp, Chicken  19866894233348_5
atgacattgaagaacagacctagtccacctgtaaccctttgtaatactctgtcagcccagagggaaatgggaagtcacctcctgaatcagccagagaacaggtcaaggctctgcagctgaacgaactgaaattaagtgacctctaacagacatatagctgacaggttgggcttgggttccaaaatcaaagaacaaaggaccacagaatactgagcccagyagcaactaagcagttaatgacaacacctgcargctggaaatggaacaaagaactgtgcttttccctctcctgccctgtcyatgtgttctgtaaagctggtaaggccactgctttcttgtgctccagtaaagtatccagaattttgagagaggcactcagcatgggcataggcatatgcagtacttcttcctcatgttccgagggtaaatcccctcttccccagctacacaggaaaactgcagcttcctagcttggggtgaatgaacccatctagagatctgctcttgtctgtcaaagccttgcagtaggtcagctgtttccagtactgccaccactgtttttgagtcagcagagtcttctgacactgagtcagcattttg

SEQ ID NO: 21730 - DNA, 600 bp, Chicken  19866894233356_1
ctggctttaatttataatttttgttattttgttttcaggataaagaaatgtacagctgtgatgagatgtttgactatgtgcttgatccttctagaaattaatggaaggtacattcctggcataatagcaccaaactgtgcatgtttcttcttttccctttgaggtgctgagaagactcactttcatttcaagattttcctccagcgaattaatttatgtaagtgaaatgatttttaattttcacaagagaaatttataaaacccagcacagctcagcttttgctacagctgctgcctccytcgttatttatatgacaatacaatacagcaaagcaggaatacgaagccgtgctgacagaaaatgaagatagcataaacaatacagattgcagcagtaaaagaaaagcccgatataaaccacaagtggaatcaagaaaagagaaaactatgaaatatcagattgttgagaatgagatcagcatcacagttgcagttgggaagaagagaataccagtgtgatttagtgccggtttccttttcctgctttcagttacctgcctctaatgtttcgactgtggtttctgtgggatcaggaaagtt

SEQ ID NO: 21731 - DNA, 600 bp, Chicken  19866894233362_1
ggaatatcccccctgaacatttcatcctccctggaataagctttcacgagataagtcataataaatacggtgtatcaattgtctgaccctttgggaaagggcaggtacaggaacaacttggagcacatagatgagaaccgtggctccagagacctgctgacaagcatagaaatggcaaaggtttaaatgccatttccaatcagagctctgtagctaaaggacaaggtatgtagaccaaccccatagtatcctgaaattgttctcacgctgttgacaggaatgactgacagtggtaaatcrcctattacaaagcctgatayaacaactcagaaattcatcaaaacacaaaatgcccagcagaaaaacaaacccaaagaagaggttccaaatagcaackgagaggagccccaaacggctggtattggcaaggaaatgcaaaaggtacatgtgyccttgtactgtggaattaaagrataagcatgccagcagcatcacgtgacccatgttttaaaggtctaaagactacctattcttccaactagaaacttctcatctattgattagaagagttaactgattttctttaagggaattaagagt

SEQ ID NO: 21732 - DNA, 600 bp, Chicken  19866894233362_2
ttcatcctccctggaataagctttcacgagataagtcataataaatacggtgtatcaattgtctgaccctttgggaaagggcaggtacaggaacaacttggagcacatagatgagaaccgtggctccagagacctgctgacaagcatagaaatggcaaaggtttaaatgccatttccaatcagagctctgtagctaaaggacaaggtatgtagaccaaccccatagtatcctgaaattgttctcacgctgttgacaggaatgactgacagtggtaaatcrcctattacaaagcctgatayaacaactcagaaattcatcaaaacacaaaatgcccagcagaaaaacaaacccaaagaagaggttccaaatagcaackgagaggagccccaaacggctggtattggcaaggaaatgcaaaaggtacatgtgyccttgtactgtggaattaaagrataagcatgccagcagcatcacgtgacccatgttttaaaggtctaaagactacctattcttccaactagaaacttctcatctattgattagaagagttaactgattttctttaagggaattaagagtatgattcacattttcgtttt

SEQ ID NO: 21733 - DNA, 600 bp, Chicken  19866894233362_3
agggcaggtacaggaacaacttggagcacatagatgagaaccgtggctccagagacctgctgacaagcatagaaatggcaaaggtttaaatgccatttccaatcagagctctgtagctaaaggacaaggtatgtagaccaaccccatagtatcctgaaattgttctcacgctgttgacaggaatgactgacagtggtaaatcrcctattacaaagcctgatayaacaactcagaaattcatcaaaacacaaaatgcccagcagaaaaacaaacccaaagaagaggttccaaatagcaackgagaggagccccaaacggctggtattggcaaggaaatgcaaaaggtacatgtgyccttgtactgtggaattaaagrataagcatgccagcagcatcacgtgacccatgttttaaaggtctaaagactacctattcttccaactagaaacttctcatctattgattagaagagttaactgattttctttaagggaattaagagtatgattcacattttcgttttgctgagcaccaactagaatgtctttcttctctctcatatggatagcgattatctaatatggattctctataagcaca

SEQ ID NO: 21734 - DNA, 600 bp, Chicken  19866894233362_4
acctgctgacaagcatagaaatggcaaaggtttaaatgccatttccaatcagagctctgtagctaaaggacaaggtatgtagaccaaccccatagtatcctgaaattgttctcacgctgttgacaggaatgactgacagtggtaaatcrcctattacaaagcctgatayaacaactcagaaattcatcaaaacacaaaatgcccagcagaaaaacaaacccaaagaagaggttccaaatagcaackgagaggagccccaaacggctggtattggcaaggaaatgcaaaaggtacatgtgyccttgtactgtggaattaaagrataagcatgccagcagcatcacgtgacccatgttttaaaggtctaaagactacctattcttccaactagaaacttctcatctattgattagaagagttaactgattttctttaagggaattaagagtatgattcacattttcgttttgctgagcaccaactagaatgtctttcttctctctcatatggatagcgattatctaatatggattctctataagcacatraaagtacaaaaataaaacatgaaaaaaactgaaatcaagctgtcaaagctct

SEQ ID NO: 21735 - DNA, 600 bp, Chicken  19866894233362_5
ggcaaaggtttaaatgccatttccaatcagagctctgtagctaaaggacaaggtatgtagaccaaccccatagtatcctgaaattgttctcacgctgttgacaggaatgactgacagtggtaaatcrcctattacaaagcctgatayaacaactcagaaattcatcaaaacacaaaatgcccagcagaaaaacaaacccaaagaagaggttccaaatagcaackgagaggagccccaaacggctggtattggcaaggaaatgcaaaaggtacatgtgyccttgtactgtggaattaaagrataagcatgccagcagcatcacgtgacccatgttttaaaggtctaaagactacctattcttccaactagaaacttctcatctattgattagaagagttaactgattttctttaagggaattaagagtatgattcacattttcgttttgctgagcaccaactagaatgtctttcttctctctcatatggatagcgattatctaatatggattctctataagcacatraaagtacaaaaataaaacatgaaaaaaactgaaatcaagctgtcaaagctctcctcactacctaggcatgttaa

SEQ ID NO: 21736 - DNA, 600 bp, Chicken  19866894233362_6
gaggagccccaaacggctggtattggcaaggaaatgcaaaaggtacatgtgyccttgtactgtggaattaaagrataagcatgccagcagcatcacgtgacccatgttttaaaggtctaaagactacctattcttccaactagaaacttctcatctattgattagaagagttaactgattttctttaagggaattaagagtatgattcacattttcgttttgctgagcaccaactagaatgtctttcttctctctcatatggatagcgattatctaatatggattctctataagcacatraaagtacaaaaataaaacatgaaaaaaactgaaatcaagctgtcaaagctctcctcactacctaggcatgttaaaaagaaataaaatgaaacagatccaacagtttccaagaagtgtgataaacagaatgttgaggggtaaattggagtatctggaatacatctgtggacatctactttgtcatttaccactcagtgcatctccagctcagaaaaaaatacttctcttacatagcagcagctgttattgtttggattgtaaacagtcataagccatatggcacaagaaaaagacttcaca

SEQ ID NO: 21737 - DNA, 600 bp, Chicken  19866894233362_7
atgttaaaaagaaataaaatgaaacagatccaacagtttccaagaagtgtgataaacagaatgttgaggggtaaattggagtatctggaatacatctgtggacatctactttgtcatttaccactcagtgcatctccagctcagaaaaaaatacttctcttacatagcagcagctgttattgtttggattgtaaacagtcataagccatatggcacaagaaaaagacttcacactttctcatttagacaaatattattattacaaagcataaacacatcgatatatgtgtcttttctctrgggaagcagatagccttcaacctgattctagagaagttaccagattccagacgagcagcttacctgtaaatatttgatttggattttcagaatttggataacttaacagaaagcaagtgcaggtgtgcagtarcaatggtttcaatttgacagacagaatgaaaaagaaatgcaaaatacaaatcaagatagttaaatgggagtgagagttaggyggaaggggaaaaaagatatttttcataataactgcaaatagaatgcatttcagtatgttctgctgcctaccatctaactacataa

SEQ ID NO: 21738 - DNA, 567 bp, Chicken  19866894233362_8
ctccagctcagaaaaaaatacttctcttacatagcagcagctgttattgtttggattgtaaacagtcataagccatatggcacaagaaaaagacttcacactttctcatttagacaaatattattattacaaagcataaacacatcgatatatgtgtcttttctctrgggaagcagatagccttcaacctgattctagagaagttaccagattccagacgagcagcttacctgtaaatatttgatttggattttcagaatttggataacttaacagaaagcaagtgcaggtgtgcagtarcaatggtttcaatttgacagacagaatgaaaaagaaatgcaaaatacaaatcaagatagttaaatgggagtgagagttaggyggaaggggaaaaaagatatttttcataataactgcaaatagaatgcatttcagtatgttctgctgcctaccatctaactacataaaatgcagtaggcccacagcataacatgcaaatggatcagcagttcctgcatgcttggtggatttgaactttccacgcagtcagcaatgggtaaaccattt

SEQ ID NO: 21739 - DNA, 485 bp, Chicken  19866894233362_9
caagaaaaagacttcacactttctcatttagacaaatattattattacaaagcataaacacatcgatatatgtgtcttttctctrgggaagcagatagccttcaacctgattctagagaagttaccagattccagacgagcagcttacctgtaaatatttgatttggattttcagaatttggataacttaacagaaagcaagtgcaggtgtgcagtarcaatggtttcaatttgacagacagaatgaaaaagaaatgcaaaatacaaatcaagatagttaaatgggagtgagagttaggyggaaggggaaaaaagatatttttcataataactgcaaatagaatgcatttcagtatgttctgctgcctaccatctaactacataaaatgcagtaggcccacagcataacatgcaaatggatcagcagttcctgcatgcttggtggatttgaactttccacgcagtcagcaatgggtaaaccattt

SEQ ID NO: 21740 - DNA, 600 bp, Chicken  19866894233366_1
tggtgtggcatgggttagtgaaaacagtctgtttaatcatcaacaacaaagtcctggaatatgatccctaggcaaaacacaaagcctgctggtgattaaatacctgggacaaatgaaaggaaataatccttcatggatgctgtggtcactccaaaactcactgctgcaagaaatcatgtaaatcaagtggtcaatataacgttatttttaagaactgttttagtttcacactcatcgatagcatggttgggttaggcaggcagtacgggaggagtatccttctcatctgcagaggaattkcatggctcagggggaagaataactcctcgtttgtaagctctgatgactgactgtgggcattgccagggggaagaaatcactttcctgagcattgcatttcaactacttacaaagagaagaagttgcttgacaagatagacttacgatttgattgcaagtcaggccaatatttccatatacttgatttaaattttaatcaaagtaaattgtttttcaagtgctgataacagagcagtggctccaaaaataaaacatgagcgagcaatctatcagacgtgtctgtcagcaaaacagacgcca

SEQ ID NO: 21741 - DNA, 600 bp, Chicken  19866894233366_2
agatagacttacgatttgattgcaagtcaggccaatatttccatatacttgatttaaattttaatcaaagtaaattgtttttcaagtgctgataacagagcagtggctccaaaaataaaacatgagcgagcaatctatcagacgtgtctgtcagcaaaacagacgccatcccataaacctgccaaaacagccctttgcttgaaacaataaaaactggaagagatcgaaagcctcagttttaaaaatcactctttgtacattcttaaaaaaaaaaaaaaaaaaaagtcccagttctaaatyggtgtaatttggagtaggttaatgtaaaaaaaccccaaaccattcaataaatcttttagtgcagttcaaaagcaatgggtgtaagaaaccagaaaatggatgatatgacattttccaacacactataatgttcatattattcagagaactgccaaccacaattgttcgaatactcctttaaccaatcttgctcactgaactcatgagccagccactggtctccccagggggaagcatatgggaagacagtagctcaattataagtaatatggtgtctgcctcttaatccttggttgagcc

SEQ ID NO: 21742 - DNA, 600 bp, Chicken  19866894233368_1
taattacacctatgggttattatcttcatctgtaatgatgcagataaggctcagaagtgtcacagctcagccatctattgcatactagtgttttctttacgggtgttttggtgaatttctttagaattctcagtgtttatagggtccttctgcttagggctatcagcagtggtggaggttaaaggttgtcattctgtgttagttccaatattgcagttggttaaagctctggaccctgttaaattgaaggaagttattcaatacaaaagggacaaaatgtgtggtgacaatttatgaacyaatgttgtatctccctagtgctctgtaactgttggagatgtagtcatgtctgctgcaattcactttttagtgctctaaaaaatctcagccctttcaataagggctgcagagggacttactgaattaaaactagatggtcattaagtgctctttgccaagagcataagggtctcctgtcagagcaggttaagcactagcaaacacaaagtaaagggaatcagtctgtaactcagagtgtcggcatacataaagcagacctgaccattgacccttattccacttagcttgtctcacaagctc

SEQ ID NO: 21743 - DNA, 600 bp, Chicken  19866894233372_1
cctcacagtctggctggcgaagaagctacaaattgctgtgtatagacaagtttccctcatctataaacttagttgaatttatgctgtgcatacatccagtacaaagtagtccaggaggagtaatctgttgcgcaggtagttgaagtcatcccagccacagatgtgtgtaagaagcctgggaagaagtgggaaaaaaaaactgggacaatttctacattatttctacatttttaagaggcaaaactagctctaaatcagaacctcctcaccttgaccaacagacaattttaaaagaaaaakaaaccatttctataacaacttgtcagtagtatggcttggtgtgctcttctctttaatgaagagggaagttggcttrtctcttacttggcatgttatttctgagtgagccctttgcaacgctgtgctaagttttcatgtctgttgttgagaaggctgaaccttgaaaaagagaatcggttctgtgggcattcatttttaattagacagcttttgttaatcatttttaatgatgtctttattgycttcaaaatttattaacatagctgatatgtaggtgattattttattactacgcatatg

SEQ ID NO: 21744 - DNA, 600 bp, Chicken  19866894233372_2
atttatgctgtgcatacatccagtacaaagtagtccaggaggagtaatctgttgcgcaggtagttgaagtcatcccagccacagatgtgtgtaagaagcctgggaagaagtgggaaaaaaaaactgggacaatttctacattatttctacatttttaagaggcaaaactagctctaaatcagaacctcctcaccttgaccaacagacaattttaaaagaaaaakaaaccatttctataacaacttgtcagtagtatggcttggtgtgctcttctctttaatgaagagggaagttggcttrtctcttacttggcatgttatttctgagtgagccctttgcaacgctgtgctaagttttcatgtctgttgttgagaaggctgaaccttgaaaaagagaatcggttctgtgggcattcatttttaattagacagcttttgttaatcatttttaatgatgtctttattgycttcaaaatttattaacatagctgatatgtaggtgattattttattactacgcatatgcagtaattacattccaggatgattctaataaaaataattaattattcataagatattattttaatggaaagattct

SEQ ID NO: 21745 - DNA, 600 bp, Chicken  19866894233372_3
actagctctaaatcagaacctcctcaccttgaccaacagacaattttaaaagaaaaakaaaccatttctataacaacttgtcagtagtatggcttggtgtgctcttctctttaatgaagagggaagttggcttrtctcttacttggcatgttatttctgagtgagccctttgcaacgctgtgctaagttttcatgtctgttgttgagaaggctgaaccttgaaaaagagaatcggttctgtgggcattcatttttaattagacagcttttgttaatcatttttaatgatgtctttattgycttcaaaatttattaacatagctgatatgtaggtgattattttattactacgcatatgcagtaattacattccaggatgattctaataaaaataattaattattcataagatattattttaatggaaagattcttttatctaaaaataataccataggaggaacagtgtaattactgagctcttctgagaaagataagaactttcctgctacatttcaccrgaaagtataaaatcctgctgcataaaattaggtcttacagcttgtatgtgtatttccaagattgcactggacctctgaa

SEQ ID NO: 21746 - DNA, 590 bp, Chicken  19866894233372_4
ttggtgtgctcttctctttaatgaagagggaagttggcttrtctcttacttggcatgttatttctgagtgagccctttgcaacgctgtgctaagttttcatgtctgttgttgagaaggctgaaccttgaaaaagagaatcggttctgtgggcattcatttttaattagacagcttttgttaatcatttttaatgatgtctttattgycttcaaaatttattaacatagctgatatgtaggtgattattttattactacgcatatgcagtaattacattccaggatgattctaataaaaayaattaattattcataagatattattttaatggaaagattcttttatctaaaaataataccataggaggaacagtgtaattactgagctcttctgagaaagataagaactttcctgctacatttcaccrgaaagtataaaatcctgctgcataaaattaggtcttacagcttgtatgtgtatttccaagattgcactggacctctgaatttgaaaaatattttggaccatatactggcattgaagtgcataggagtttatcaatgagtttaacacaactgtgctctgaagt

SEQ ID NO: 21747 - DNA, 589 bp, Chicken  19866894233372_5
tggtgtgctcttctctttaatgaagagggaagttggcttrtctcttacttggcatgttatttctgagtgagccctttgcaacgctgtgctaagttttcatgtctgttgttgagaaggctgaaccttgaaaaagagaatcggttctgtgggcattcatttttaattagacagcttttgttaatcatttttaatgatgtctttattgycttcaaaatttattaacatagctgatatgtaggtgattattttattactacgcatatgcagtaattacattccaggatgattctaataaaaatyattaattattcataagatattattttaatggaaagattcttttatctaaaaataataccataggaggaacagtgtaattactgagctcttctgagaaagataagaactttcctgctacatttcaccrgaaagtataaaatcctgctgcataaaattaggtcttacagcttgtatgtgtatttccaagattgcactggacctctgaatttgaaaaatattttggaccatatactggcattgaagtgcataggagtttatcaatgagtttaacacaactgtgctctgaagt

SEQ ID NO: 21748 - DNA, 588 bp, Chicken  19866894233372_6
ggtgtgctcttctctttaatgaagagggaagttggcttrtctcttacttggcatgttatttctgagtgagccctttgcaacgctgtgctaagttttcatgtctgttgttgagaaggctgaaccttgaaaaagagaatcggttctgtgggcattcatttttaattagacagcttttgttaatcatttttaatgatgtctttattgycttcaaaatttattaacatagctgatatgtaggtgattattttattactacgcatatgcagtaattacattccaggatgattctaataaaaatayttaattattcataagatattattttaatggaaagattcttttatctaaaaataataccataggaggaacagtgtaattactgagctcttctgagaaagataagaactttcctgctacatttcaccrgaaagtataaaatcctgctgcataaaattaggtcttacagcttgtatgtgtatttccaagattgcactggacctctgaatttgaaaaatattttggaccatatactggcattgaagtgcataggagtttatcaatgagtttaacacaactgtgctctgaagt

SEQ ID NO: 21749 - DNA, 587 bp, Chicken  19866894233372_7
gtgtgctcttctctttaatgaagagggaagttggcttrtctcttacttggcatgttatttctgagtgagccctttgcaacgctgtgctaagttttcatgtctgttgttgagaaggctgaaccttgaaaaagagaatcggttctgtgggcattcatttttaattagacagcttttgttaatcatttttaatgatgtctttattgycttcaaaatttattaacatagctgatatgtaggtgattattttattactacgcatatgcagtaattacattccaggatgattctaataaaaataaytaattattcataagatattattttaatggaaagattcttttatctaaaaataataccataggaggaacagtgtaattactgagctcttctgagaaagataagaactttcctgctacatttcaccrgaaagtataaaatcctgctgcataaaattaggtcttacagcttgtatgtgtatttccaagattgcactggacctctgaatttgaaaaatattttggaccatatactggcattgaagtgcataggagtttatcaatgagtttaacacaactgtgctctgaagt

SEQ ID NO: 21750 - DNA, 462 bp, Chicken  19866894233372_8
aaaaagagaatcggttctgtgggcattcatttttaattagacagcttttgttaatcatttttaatgatgtctttattgycttcaaaatttattaacatagctgatatgtaggtgattattttattactacgcatatgcagtaattacattccaggatgattctaataaaaataattaattattcataagatattattttaatggaaagattcttttatctaaaaataataccataggaggaacagtgtaattactgagctcttctgagaaagataagaactttcctgctacatttcaccrgaaagtataaaatcctgctgcataaaattaggtcttacagcttgtatgtgtatttccaagattgcactggacctctgaatttgaaaaatattttggaccatatactggcattgaagtgcataggagtttatcaatgagtttaacacaactgtgctctgaagt

SEQ ID NO: 21751 - DNA, 599 bp, Chicken  19866894233380_1
  misc_feature (1)..(44): n is any nucleotide
nnnnnnnnnnnnnnnnnnnnnnnnnnnnnnnnnnnnnnnnnnnnaggttataagtttgtctgttttgtttcagagggttattgttgggtggttgtgggtttttttggtaacatttaacataacatctcctgtctgaatctaagaaagcacacactaattatacctaaacttaaatcccacattcataattaacaatgtattgtaacttcatctgatctttggaaaatatgtatttggtcaatcattttacgtttaaaatacatatacatcaacattctggcaggctaaaagttatgaaamgagtttggttataatcaaattattttcagggcacttccagtatcagaagtgtaacacgtaaatttagattttaaagatcatttagattttacttatattaatagtcctaaagaaaatttaatctaaacacttcattgtctttttcttcttcttacaaattgaaaattactgcagttacagaaaacagaaagattaagcaagacaacatcagagagttcaatcaacagagagttgagtgaaagaccataaacaggaactgaagtagaayggagaagatagagtaagaaaaagggcctcag

SEQ ID NO: 21752 - DNA, 600 bp, Chicken  19866894233380_2
tcaacattctggcaggctaaaagttatgaaamgagtttggttataatcaaattattttcagggcacttccagtatcagaagtgtaacacgtaaatttagattttaaagatcatttagattttacttatattaatagtcctaaagaaaatttaatctaaacacttcattgtctttttcttcttcttacaaattgaaaattactgcagttacagaaaacagaaagattaagcaagacaacatcagagagttcaatcaacagagagttgagtgaaagaccataaacaggaactgaagtagaayggagaagatagagtaagaaaaagggcctcagaggatgaaaaacaggataaatgtgaaacaagacaggttttctgtacacagtccagcctagggtcagatggatttgattgcagcttctaatgttcagcaaggttatgaataactggagtttaaacaacatctagaattataattaacatcatcatcccaataaaacattgacttaatagcaggagcttactaaaccagatggaaggtcaattaaaaagaagataattgcaaattgatatccaaaaaaatatagtattttcaaaagctgtc

SEQ ID NO: 21753 - DNA, 600 bp, Chicken  19866894233389_1
tttttttttcccccctgacagctgcagaccaaaaaaaaaattgtatttgcagaactttgttaacatcacaataactctgaggctgcactggagctcagatccaaccacaacaagggcgacacagaaccctggcactgacagcacagatcacagcttacaatgcaatagtggtgaagcagagcagcattccctgggagaaaatgaagtgagaggaggagaagaggatgcaatagcccagaccacctatggacagagttcttaagtacagccccccaggctgcagggattggttcatcattygggttctatctgacttcagcatcagcctttatcatccagttggctctgagaatgaacagcataaagatgctttgcaattttcagcaattggccagcaggtgaagtaggcaggtagatttctaatccaaaggaaaacttaccaaccaataacaaccttaatagatagrtaagaatgagatggacactgcaggagttggagctgcagcatcacactgcagtactataactggatcccttcagcacagccacaaccaggcaagagcaaagagaaggctggtggaagcgagaagagcagcatga

SEQ ID NO: 21754 - DNA, 600 bp, Chicken  19866894233389_2
gtggtgaagcagagcagcattccctgggagaaaatgaagtgagaggaggagaagaggatgcaatagcccagaccacctatggacagagttcttaagtacagccccccaggctgcagggattggttcatcattygggttctatctgacttcagcatcagcctttatcatccagttggctctgagaatgaacagcataaagatgctttgcaattttcagcaattggccagcaggtgaagtaggcaggtagatttctaatccaaaggaaaacttaccaaccaataacaaccttaatagatagrtaagaatgagatggacactgcaggagttggagctgcagcatcacactgcagtactataactggatcccttcagcacagccacaaccaggcaagagcaaagagaaggctggtggaagcgagaagagcagcatgattttgctgtccttggcacttgctactgtgactgtacaaatagtgcaagcatacgcagaactcaagatgtgaagtcctccatctttttctcccactacgaaattcgagatgtgccacaaagcagcacacaggttattgcttggcccactacaaatgctgaaagaataa

SEQ ID NO: 21755 - DNA, 599 bp, Chicken  19866894233395_1
  misc_feature (1)..(67): n is any nucleotide
nnnnnnnnnnnnnnnnnnnnnnnnnnnnnnnnnnnnnnnnnnnnnnnnnnnnnnnnnnnnnnnnnnnattactgatgggtactcaaagatttaaacagccacgttcattattaaccacagtccaatatttgcagtgcttctccctttgtatctggtaggcttgcaatgataagctctgctgggcggttattacagtctacatttgcagttaagttctaggtctatctagagaaaactgatcacatggaattcactaagagacaggaatcttgtattgctgtttattcctggatgtgtaaygtgcttgaatgcctacaagatttagaatacaaattcactgaaattctttgaaaacacatcaaaataaacaaataccttatggcagtgctgctgtctgaggtctgtgctgttggagaacccaccctgaggcatccaggactctggtctaagcttgttgattttgttatttgaggagcacttctttttgatctcaagtcaccactcaaaaagctctttgcgtaggaggctaaatttggtacactgacaacacgactgggcacctcaactggtctcttctgctgctttttatcataaaagaa

SEQ ID NO: 21756 - DNA, 554 bp, Chicken  19866894233401_1
gtgaggctttaaacttttctagtttaaggtgaccagcatgttgagaacatttttgtctatcattatcttctattctcttgagctcctctaagcttacatattatgtatgtatgctcattattgttttcaaagttttcatgactgtattaattctctcagtttcttagaggtgttcagaatcatgttgcaaaggtcagtgtttcgtgtaaaccgtccccttgtctcttcactcacttgaaacgtgtactggagtcgacgcatcttactgacattgccatgtacaagggcacatggattccytccatggtcttgtttcgtctgacatcacccaacttcctgcacaacgtttgtgtggcaggggaaaatcaaagattacgtttatgtttgagggaagagggcagaatagtggaagatggcaggggtatggtgttttcagctttctacccgaagtagaggcacgggtcttaagaaatcttaagttcttactgtttgtattgtgctagattcttgaacaggcaattcatggatgggctgtgtgagctctttgtgctttg

SEQ ID NO: 21757 - DNA, 600 bp, Chicken  19866894233407_1
gtgtttgttgcaaggcattcctttccctccagctgagcaacatataaagcattggctttattgtagtcatcactttcaaaaagtgaagtgccccagattaaaaattccatggcgttgtgaaatagcttgaaagtttcaaattcagatattgagttttttgtgttccacccatcctcagcaacgatcctctacattaggcagtgtagatgtaaaaacgtctgattgtcgcatcaacaaagtaagaaaggatttgtacaatagtaggcaaaaaaagaggagctttattaagggcaggtaaamacgataaatccatatccttgacggtagggaataacggcgataattattgttcaagtaagcagaggtttctgtgattcagagaagcattagcaggtgggagttggctgtgtgctgggatttcttgcgctgcagctctagcttcggcagtaaggtttcacaattctccctgggaaagtaacattgggaaatactggtgattttgaaagtttggtcaatttgggtaacatttggcatcatcttttttttccttctggtaagatttcatttaccttgcttacttggcaataactaagaacactg

SEQ ID NO: 21758 - DNA, 599 bp, Chicken  19866894233411_1
  misc_feature (1)..(172): n is any nucleotide
nnnnnnnnnnnnnnnnnnnnnnnnnnnnnnnnnnnnnnnnnnnnnnnnnnnnnnnnnnnnnnnnnnnnnnnnnnnnnnnnnnnnnnnnnnnnnnnnnnnnnnnnnnnnnnnnnnnnnnnnnnnnnnnnnnnnnnnnnnnnnnnnnnnnnnnnnnnnnnnnnnnnnnnnnnnnatttattaaagaagaatcaagtgaaggagttggtgtggacaaaggaaaccccaaaaacttgttactataaaaatgatcatgaaagacctcaggcaaatgcagtggaagacaattacttcagagttaayagatgctgtctgaaactatattacatatgctgtctagcagtatttcttgttctagcttaggagaaattcaggattcactaataagatagagattgttgtaaatgtccataattctaaatgaaaagctgtaagtcagaagggctgctaggtgtttatagttgtagaatcatagaaccatagaatcacagaattggtcaggttggaaaagaccttcaagatcatcgagtccaaccacaacctgactatattaccctaactctaacaaccctccgctaaatcatgtctttgagtaccacatc

SEQ ID NO: 21759 - DNA, 590 bp, Chicken  19866894233420_1
tgatgatatgtaattacagaccccaatgttccagattcaattttttcctattttacaaatgtgttaggacttcaaagcaagaaaatgcatgggcagggctttccatcacagaacttccaaggaccagaacaaatgaaaatgccactttttgaaagtttggtttcttaaaaggcatgatgtgattttaatattttactctgcatgttgttaaatttctaatcctcctacaaattcccaaaagcatttttcctgtcaggggagaagaattcattctggaatgctttttaaaatacagatacstatgaaagaatatttagacatgcattacccaaggaggagaggaaattattttgaaaacagaagtgtaccatttcaaagcatgaaatgaggtaggttttcagcacagatcttacttttcaccctagaagttgccataaagactgtctgtctagatcaaaaggctaaaatgtgcccggcctttagttaaagcttttcttcatgtggaaccagatcctgaacatctttctcaagttggtcatcgtcagtctagtcattatgaagaattaaaccaggcccatggttttcaatgt

SEQ ID NO: 21760 - DNA, 599 bp, Chicken  19866894233421_1
  misc_feature (1)..(119): n is any nucleotide
nnnnnnnnnnnnnnnnnnnnnnnnnnnnnnnnnnnnnnnnnnnnnnnnnnnnnnnnnnnnnnnnnnnnnnnnnnnnnnnnnnnnnnnnnnnnnnnnnnnnnnnnnnnnnnnnnnnnnnnctgttgatttatactaaaagctatcagttaaaatctctgaatggaactcattggaaaactcaagtccaaacaagaaatatttcccctcgaatcacagacattgtaaacattacattaaagatagctaaatcagccaaatggctcattagaactcccccctgcagctaaagtaatacaaatygtgctttgttgctagaaaaagttgttgttttttttagcgtgggcaagcaatgaacatgtgcgatcctgagaaaagcatgcagtaggactgaggcactttcgttttgcatgaagtaaactcaaggccagccctcctccaccctggtgctcattcccgcatgtacaccttacaacaaaagggtcacattttactgcatgttcattgaacgtagctcacacgttagttagggcaagggaaaagggaatacaggaaatgtgcaaagttcaagaggaccctgttatatcacaccagcagcatct

SEQ ID NO: 21761 - DNA, 599 bp, Chicken  19866894233426_1
  misc_feature (1)..(215): n is any nucleotide
nnnnnnnnnnnnnnnnnnnnnnnnnnnnnnnnnnnnnnnnnnnnnnnnnnnnnnnnnnnnnnnnnnnnnnnnnnnnnnnnnnnnnnnnnnnnnnnnnnnnnnnnnnnnnnnnnnnnnnnnnnnnnnnnnnnnnnnnnnnnnnnnnnnnnnnnnnnnnnnnnnnnnnnnnnnnnnnnnnnnnnnnnnnnnnnnnnnnnnnnnnnnnnnnnnnnnnnctgattcagccttatgaaagtctgggaaacatatcccactgacttcaggaagatctggatcagctttctaaagattaggatcttygcttaccttgtgatataaccacacagtgcagtaaataagcttatgctccccgtgcctgtacctgtaggtcagcaccctcatacttcaaacaggacctactgagcaaaagctccttttatgctttatgtgtctggctccaaaaaaaaagatgtgctccaaggaagcgagtaccaccttcccttccaggaattagtcacatccagcagaaagttactgccagaaaataaacataaagtatgtaaccatgctataacagctcttctacactcacaccctgtgatatgtgatgcaagggtgaa

SEQ ID NO: 21762 - DNA, 600 bp, Chicken  19866894233430_1
gtgctgacccaatggcttgcacaacactgttctgtatctggaagaaacacagtgattaatgctaagccaaacactttggcaagctgttatgagaaaacgatcgcgtgaggcagaaagttgagaagttttgaagttattagcttggccattctcaagtcaactgcactctaccagcaagtccttgagcagagcctgctccttctgcgctaaccattaattcctgtctgagggctctccctgatcaggaatgcaatgagaggggaaagccaacacccaccaagatgctctccttcacaaagygtctccttgcatttcaaggcagctcagaagctaaggctgtatctgcttagcaagacttatacttgctatttagggatgccattccacactcaggcttttctgctggagccaagcatttatcatgcctaaagtaaccagcttgcaaaatgcagagrtgggaagtttggtttgcttgttgaaaaagttttgaagcaatgtgacttttgcttgcatygtctgtagaagcccaaaggtctacaggaggtaagctgtgctggtggctacagcaggacctgaagccatctgtgcattagcgggcac

SEQ ID NO: 21763 - DNA, 600 bp, Chicken  19866894233430_2
gtcaactgcactctaccagcaagtccttgagcagagcctgctccttctgcgctaaccattaattcctgtctgagggctctccctgatcaggaatgcaatgagaggggaaagccaacacccaccaagatgctctccttcacaaagygtctccttgcatttcaaggcagctcagaagctaaggctgtatctgcttagcaagacttatacttgctatttagggatgccattccacactcaggcttttctgctggagccaagcatttatcatgcctaaagtaaccagcttgcaaaatgcagagrtgggaagtttggtttgcttgttgaaaaagttttgaagcaatgtgacttttgcttgcatygtctgtagaagcccaaaggtctacaggaggtaagctgtgctggtggctacagcaggacctgaagccatctgtgcattagcgggcactgatgtggcaaacacacagacccaacatatctcagatgaatgcaagaaaaattagctcagttttcagagatggaactcatgcaatcaaaccctacctcgccacgtcctcaaagctcagtccaaaagagcaattcaaagagcttcagccaaaaatt

SEQ ID NO: 21764 - DNA, 600 bp, Chicken  19866894233430_3
taattcctgtctgagggctctccctgatcaggaatgcaatgagaggggaaagccaacacccaccaagatgctctccttcacaaagygtctccttgcatttcaaggcagctcagaagctaaggctgtatctgcttagcaagacttatacttgctatttagggatgccattccacactcaggcttttctgctggagccaagcatttatcatgcctaaagtaaccagcttgcaaaatgcagagrtgggaagtttggtttgcttgttgaaaaagttttgaagcaatgtgacttttgcttgcatygtctgtagaagcccaaaggtctacaggaggtaagctgtgctggtggctacagcaggacctgaagccatctgtgcattagcgggcactgatgtggcaaacacacagacccaacatatctcagatgaatgcaagaaaaattagctcagttttcagagatggaactcatgcaatcaaaccctacctcgccacgtcctcaaagctcagtccaaaagagcaattcaaagagcttcagccaaaaattactatatttttgttttcaaaaaatctgctattttttttttcccatttaatgctgaaata

SEQ ID NO: 21765 - DNA, 600 bp, Chicken  19866894233430_4
tgtgacttttgcttgcatygtctgtagaagcccaaaggtctacaggaggtaagctgtgctggtggctacagcaggacctgaagccatctgtgcattagcgggcactgatgtggcaaacacacagacccaacatatctcagatgaatgcaagaaaaattagctcagttttcagagatggaactcatgcaatcaaaccctacctcgccacgtcctcaaagctcagtccaaaagagcaattcaaagagcttcagccaaaaattactatatttttgttttcaaaaaatctgctatttttttttycccatttaatgctgaaatattctgcagaaacatctcacattttccagttaaagcagagcaaagcatggtgctcaaacatacacaacccatctcatcctaaacagaacgttcagccagctctgcagctaaacccaaattgctgggtcctggtcatccctggtgaggagctgatgcatttggggaagaatctggttcattttgtccagtgcaaagcaaggatgtcagagggcatggacagccctggcacagagcagctgctatctcacagcatcgttgcattgattgcagcgacctctgaac

SEQ ID NO: 21766 - DNA, 600 bp, Chicken  19866894233430_5
gtgacttttgcttgcatygtctgtagaagcccaaaggtctacaggaggtaagctgtgctggtggctacagcaggacctgaagccatctgtgcattagcgggcactgatgtggcaaacacacagacccaacatatctcagatgaatgcaagaaaaattagctcagttttcagagatggaactcatgcaatcaaaccctacctcgccacgtcctcaaagctcagtccaaaagagcaattcaaagagcttcagccaaaaattactatatttttgttttcaaaaaatctgctattttttttttyccatttaatgctgaaatattctgcagaaacatctcacattttccagttaaagcagagcaaagcatggtgctcaaacatacacaacccatctcatcctaaacagaacgttcagccagctctgcagctaaacccaaattgctgggtcctggtcatccctggtgaggagctgatgcatttggggaagaatctggttcattttgtccagtgcaaagcaaggatgtcagagggcatggacagccctggcacagagcagctgctatctcacagcatcgttgcattgattgcagcgacctctgaacc

SEQ ID NO: 21767 - DNA, 600 bp, Chicken  19866894233430_6
catctcacattttccagttaaagcagagcaaagcatggtgctcaaacatacacaacccatctcatcctaaacagaacgttcagccagctctgcagctaaacccaaattgctgggtcctggtcatccctggtgaggagctgatgcatttggggaagaatctggttcattttgtccagtgcaaagcaaggatgtcagagggcatggacagccctggcacagagcagctgctatctcacagcatcgttgcattgattgcagcgacctctgaaccagcaccagagaaaagaaatcagattcagwtctgttccgacacacacttgtgcaacacatgttgagctgactcagctcaaagcatttcttaggaattatgtccttaggtacaagctgtctttaaaatagtggggaaagaatcattcccctcatgaggggaagaagggagagctgaaagcgatgctaattctcaaaagtcaattgaaaaacagttggagagtgaacgaagcaacaagttccagatcagcccagatggtaagggaaactggaaaagggcagcagattggggcacagctgggcttggaggattgcagggctgaggcagtggga

SEQ ID NO: 21768 - DNA, 600 bp, Chicken  19866894233433_1
ttttggattacatccctcattccagatttaaaatgttttatttatttttctggcttgcttcttagtctgatttttatcactaatattgatttggctgctcctgttttgatctttatataatggactgtgttgcagaatggccaagaggtgcagcacagcggagaactaaaatagtcttgaggtaatggtttcctgtgcaattatttgttgtttgagagtctgagtagttctcttggccttgaatgaagcagccatgtaactaaggcaataaggagttggggaaggaatatcttctcgctkaaatgcatgatatggttaagtcagagttacaggaaatgaatttcattattgtagagggtcagttgttagcaagagagtaaataaccttgtgtttaaaatgttaatgtttttrttgttgttgcrttgcaggcaaactactttgattgtttacattctctctttcattgggatggtggtatttaccttcacgctggacctcggataccttatagtggtgtttgtgactggaggagtgcttgggtgagtgatgaaaggaggytagaaggctgattgcagttctgctcaggaacagtatttgac

SEQ ID NO: 21769 - DNA, 600 bp, Chicken  19866894233433_2
ttatataatggactgtgttgcagaatggccaagaggtgcagcacagcggagaactaaaatagtcttgaggtaatggtttcctgtgcaattatttgttgtttgagagtctgagtagttctcttggccttgaatgaagcagccatgtaactaaggcaataaggagttggggaaggaatatcttctcgctkaaatgcatgatatggttaagtcagagttacaggaaatgaatttcattattgtagagggtcagttgttagcaagagagtaaataaccttgtgtttaaaatgttaatgtttttrttgttgttgcrttgcaggcaaactactttgattgtttacattctctctttcattgggatggtggtatttaccttcacgctggacctcggataccttatagtggtgtttgtgactggaggagtgcttgggtgagtgatgaaaggaggytagaaggctgattgcagttctgctcaggaacagtatttgactgttttaaatcaatgtttctactgtgtgctctgtcactatgctctcaacctatgtctgtagcttatagatatggtttatttggcaggcaaagcaagtgttgaatcatattag

SEQ ID NO: 21770 - DNA, 600 bp, Chicken  19866894233433_3
actgtgttgcagaatggccaagaggtgcagcacagcggagaactaaaatagtcttgaggtaatggtttcctgtgcaattatttgttgtttgagagtctgagtagttctcttggccttgaatgaagcagccatgtaactaaggcaataaggagttggggaaggaatatcttctcgctkaaatgcatgatatggttaagtcagagttacaggaaatgaatttcattattgtagagggtcagttgttagcaagagagtaaataaccttgtgtttaaaatgttaatgtttttrttgttgttgcrttgcaggcaaactactttgattgtttacattctctctttcattgggatggtggtatttaccttcacgctggacctcggataccttatagtggtgtttgtgactggaggagtgcttgggtgagtgatgaaaggaggytagaaggctgattgcagttctgctcaggaacagtatttgactgttttaaatcaatgtttctactgtgtgctctgtcactatgctctcaacctatgtctgtagcttatagatatggtttatttggcaggcaaagcaagtgttgaatcatattagatcttgaaaac

SEQ ID NO: 21771 - DNA, 600 bp, Chicken  19866894233433_4
ctaaggcaataaggagttggggaaggaatatcttctcgctkaaatgcatgatatggttaagtcagagttacaggaaatgaatttcattattgtagagggtcagttgttagcaagagagtaaataaccttgtgtttaaaatgttaatgtttttrttgttgttgcrttgcaggcaaactactttgattgtttacattctctctttcattgggatggtggtatttaccttcacgctggacctcggataccttatagtggtgtttgtgactggaggagtgcttgggtgagtgatgaaaggaggytagaaggctgattgcagttctgctcaggaacagtatttgactgttttaaatcaatgtttctactgtgtgctctgtcactatgctctcaacctatgtctgtagcttatagatatggtttatttggcaggcaaagcaagtgttgaatcatattagatcttgaaaacaagcagctcagaatagcagataatttggagtaccgggttttgatgcctgattttcatagccatagtaacagatgagagccatacccatcatcctcttgttttcttcttgaacaggttcttcatgactggctatctc

SEQ ID NO: 21772 - DNA, 600 bp, Chicken  19866894233447_1
cttccaaaatataggtagacggggagaagcaagaacaatatgatcgttgttacagctaggtcaagctctcttcaacaaggctaattaacaagggaaaatgcagttcttcctatcggaattgctataacaaagtaattgctacaagcagaattcgttattaaaaagccagacagcaggcttgtgaagaacactggaatcaaggcagcacctgacggcttgccctcactgccaccccaggcacagctgacaacctgtgggaccacactggtgctttccaggagtcagagcctctggcatgtwgtagaggctcagcctctttcaagtgcacagacaaagtaagaatcaatatataaataaataaggaaggcacacattttacgacagcttctacagccctcttctgatttttcaactttatttggttcttaaatgtgattttactcttggaaatggagacttctgattattcacagcatgagaaacagaaggacaaaactgcctatgcgcttctaccagctcgctttggccgtggacaaggaatgagagagaggctttctccatttatgtccacccagtttctgtctactactccaagtcctc

SEQ ID NO: 21773 - DNA, 600 bp, Chicken  19866894233447_2
ttatgtccacccagtttctgtctactactccaagtcctctaaaacgatacaatttttaaagtcagttcacctgaaagggtttctattagtgaatttgccagatgcctaattacaggcttttcaaaaatcctgagaaaagcctgcaaaattgatcataaggcttccaaatcccatgggaatgttgctaagtagggctaatgaacaaagggttgtatctgcctgcctagctgttacaactctcattttcaagtttccttcccttaagacagagacaagaaacatgtttcaagggagatccayrattctcaagcagtcagatgatgcctgtaatcagaggtttgattaataactgcactatttattgtctagcccacaatgaaatggcaagactctcccttttctggaaaataaaatcaaatcaacaccttttaaggcttccttcacagcaaatgtcatttctaccaactcatctcaaccctcaactcatctatccttctcaaatgcctcctatttcactattattttttgccaggatttgtcataccagaaaacatctcttctctttaaaaagtgagttcccattagcagtaaaaaaacctt

SEQ ID NO: 21774 - DNA, 600 bp, Chicken  19866894233447_3
tatgtccacccagtttctgtctactactccaagtcctctaaaacgatacaatttttaaagtcagttcacctgaaagggtttctattagtgaatttgccagatgcctaattacaggcttttcaaaaatcctgagaaaagcctgcaaaattgatcataaggcttccaaatcccatgggaatgttgctaagtagggctaatgaacaaagggttgtatctgcctgcctagctgttacaactctcattttcaagtttccttcccttaagacagagacaagaaacatgtttcaagggagatccayrattctcaagcagtcagatgatgcctgtaatcagaggtttgattaataactgcactatttattgtctagcccacaatgaaatggcaagactctcccttttctggaaaataaaatcaaatcaacaccttttaaggcttccttcacagcaaatgtcatttctaccaactcatctcaaccctcaactcatctatccttctcaaatgcctcctatttcactattattttttgccaggatttgtcataccagaaaacatctcttctctttaaaaagtgagttcccattagcagtaaaaaaaccttt

SEQ ID NO: 21775 - DNA, 600 bp, Chicken  19866894233449_1
aggctgtaaatctgattattagcagaccattaactcagtaacagacaaatggacgtgactgcaattgtagcagtagaagtagttttgtttacctaaatgctaataattatctgaattcacaaattgaaactgtaactgttggtggacattcttaagttttaatctgaaaacttgaactgcctgctgatgcttaatttgcttgggatctgagtctgttcacttatttcttacctatttgctgaatattcatatatgaatatatggaatttatttcagggaaagctttctgctgaaaagttraagttaaaaattgaagtgaatcctttaatttcagcttctggaaaggagccacaaaaaattatcagggacttgtgggaaatgatgcataggggaaaactaattcctgacgggttagatatgaaggattgtatgatgcaagttagcctcaacagctttatccttgagaaaaacaagtaaatttgaaaaggagacattataaactgaagacaaaaacaaaaagaaaacctgaagggcaaaaacagactgtatgcagagtaaatgaaatgcatgctgcctatgtgaatctgttctatagcttgc

SEQ ID NO: 21776 - DNA, 600 bp, Chicken  19866894233459_1
tgaagattccacagtgtctctgggtccttactccagtgttgacccttccaatgcagaggctttttataccagaggcaagaaatcccatagcgatggaagtttcctttattaatgggattttttctgttacgtgtctggagtcctccatttgggacacactcagatgactggtgtgagttggtgctgtctttcagcagtataaattacaaaccttctatgatcttggactgcaaatttaaagcctgcaaggatttgcagcaaacaaattagctgtgcaatgacatcattaaaccaataacragaagttctgtttgctttttgttgcataaataggtgagagcccatgaaagggagcactgaatgactcatgaaaacacttcagtgtagaaagcttagggctcttccatatttcatgaaatcatagaaccataaaggttagaaaagatcattaagaacacttcatccaactgtcarctcatccccaccatgcccactcaccatgtccctcagtgtgacatctacatggctcttgaacacctccagggggtggtgactccaccacttacctgggcagcctttgccagtgcctcatctttcttt

SEQ ID NO: 21777 - DNA, 600 bp, Chicken  19866894233459_2
gagttggtgctgtctttcagcagtataaattacaaaccttctatgatcttggactgcaaatttaaagcctgcaaggatttgcagcaaacaaattagctgtgcaatgacatcattaaaccaataacragaagttctgtttgctttttgttgcataaataggtgagagcccatgaaagggagcactgaatgactcatgaaaacacttcagtgtagaaagcttagggctcttccatatttcatgaaatcatagaaccataaaggttagaaaagatcattaagaacacttcatccaactgtcarctcatccccaccatgcccactcaccatgtccctcagtgtgacatctacatggctcttgaacacctccagggggtggtgactccaccacttacctgggcagcctttgccagtgcctcatctttctttctgagaagaaatttttcctaatatccaacctgaacctcccctggtgcaacttaaggccgtttcttctcatcctatcacttttactcgggagaagagaccaatccccaccttgccacaagttcctttcatgtcactgtagagagcagtaaggtctcccctgaccctcctccacac

SEQ ID NO: 21778 - DNA, 600 bp, Chicken  19866894233463_1
gacatttgtaaaaacagagcagagctgactcagctcagcatgagttatttttcccgcgttccacaataaaacttttttggacacatttcctctttgctggtgtacagaattgcttcatctcagctgctcctctctgtcaaggatgccccacgttccccagatgccttcagaccatggaagaggagaaaggcacaggcacagcacacaccctgggcaggagccaatccaaaggaaaaacattccccattccctcaggtttgtcagcagcctttacaacgatggttggctactgctgcaacraggtctaactatcaagactatcttcatacaaattggaacagtactagaacaccaaagtctggtaattttcattgtttaataggaatgaaggtgctgggggcagggataaagactagatcccaaaccagtgcctccctcatcctataccagggactgcacaatggaaaacagaaggcagcttcagtgccgcagtgctgcttttgcacaagaagacaaaggtgatgcacagaggaaggaggaagtggcaatgtagagctcgacaccgaccttagtaattttactgcaagggttcttcactac

SEQ ID NO: 21779 - DNA, 600 bp, Chicken  19866894233463_2
gataccaccctacactccgactgctggagtcctgctggagccatgcgctgtgaagtctaagctactcttaacatccagctgacacttgttataaatccagcagcttctatccaataaaatttctgaatacttcttataaaatagtttttgaaaagttacaaattacctacacaaagatgaatttcataaagaataaattaactcgcacatttaatgaattaagcatagattgcataataaggaaatgatctaatgcaaaatctttcctcgtttgcaggcatttaatgggcaaagactgcrctgagctgtcctacccagagcagcacatctgctgacatggcagcttccagcttactctgcagtgagcacctcctgctagttactcctttctgttaaattatgcaggttgatttaattaatggcacttaaagggaacttactaaatactaaattttcagcaatcagaaagagtaatgaataaaaactattgcaacagagacacaaaccaaacaggtgaaaggaaatctcatgtgtgccatgtaaaaatgcatgcagttccgattccagagggtttcccttacctccctgcatcttggtgcc

SEQ ID NO: 21780 - DNA, 600 bp, Chicken  19866894233465_1
gcctgtgactcctgaaaggcagctgggctgagggccaacttggcctcctcaggaaaagatgttttaataatttcctcctgttttgcattggtgagctgataacactcattcccccgtcctgctgtttattcgaggtggctgacggcgcttcactgcttggggtctggctgagggctgcagccctgccttgggcttgggggtgatgaggaaggggctgctgtgtggcacgaggagtgctgcagccctgcgttgggcaatggggtgactcaggcttgacgcatgctgcaggtggctgatggrtggtggcaccacggcctctgccctgcagcctcaggtcccaggggagggagcagcgctgctgcaggtagtgctaaccctgtgtggggctgctgtaggcaggtcggggctgtggggtgtggagctgacctggctgtgctctggaggagttatcacaggcgtttcctcgaggcgtttgggcaggctgccttccttcctcctggggcagcaaaataaaattcccttcatagcaggtagaattgaggaaatagttgggagctaattcccatgccgtttgttttcccagccagctgtgcactctga

SEQ ID NO: 21781 - DNA, 600 bp, Chicken  19866894233465_2
ccctgcctgcctgcccagttccaggtatgtggggtgtgtggggcaggctccctgtgaccctcctgggctcactgcccccagcacccacagcctgtgctgtgtccccatcaggttgccaaaggctggggcaggagggagggggtgagcctggagccttgcacacaccggtcctggcggagcagcctaatccccccataatgcacacaatcccctctgagatgaaaggcgtgagcccagagcagagctcattcatgtgacaagcatgaggagaggatctgggtccctgcccactgcaggccrgctccgcgcacgcgggagtttgttcaggtttttcgggagctttgagttctgctgagtctgcagctctggctgagcagtcagggctgctgctctgcaaacaacctcctctgttcccagccgcctcacgaaggcactggcacgagttgtgctgatgctgtgctgggaagaggaggcggtggagctgctggcccgagggcagccgcccagaaaaaccgagtctggttggggctgcagcagagaacggggctgccctgtgtgtgaccaaagctgcagcgtacctacagggctggccatgcagca

SEQ ID NO: 21782 - DNA, 599 bp, Chicken  19866894233475_1
  misc_feature (1)..(80): n is any nucleotide
nnnnnnnnnnnnnnnnnnnnnnnnnnnnnnnnnnnnnnnnnnnnnnnnnnnnnnnnnnnnnnnnnnnnnnnnnnnnnnnnccttcttgggcaccgctttctccttgctcacctttggcttcgcctccgccttcagcttctccgcagaggagtctggcttggcgggtttggccttctcctcctccgaccccgctctggccacctcccccagtgcctttggcttctccttggtccccaccttcgcctccttcctctccaccgttttcagagccttctccttggctacgccagcgtccaccargctgagcttggaggcagacgccaagctctccttgctctccgtcctcctctgcttcagctgcttgtcagcttgaggtcccttcaagtcattcttagtgaccacgggctgcttgaggaactccaggtgcttcaccttctccagcccctccaggatgcgtgcctggggcgtgcagcctgggaagaggacgcggatgatcttttcggcagggctgacggggtgccagaccagcagggcgcacaccgaggtcaggcactgcagtggcagctcctgctcctcggggtacccattccccgaccaat

SEQ ID NO: 21783 - DNA, 599 bp, Chicken  19866894233478_1
  misc_feature (1)..(118): n is any nucleotide
nnnnnnnnnnnnnnnnnnnnnnnnnnnnnnnnnnnnnnnnnnnnnnnnnnnnnnnnnnnnnnnnnnnnnnnnnnnnnnnnnnnnnnnnnnnnnnnnnnnnnnnnnnnnnnnnnnnnnntccaatttcagccgttctctgattctatgattctatggtaatatttgtgctgctctgcagtagagacctcaaacagggtggagaaatatgttctaaacataccgcaggcctcagtggagcagaatttaagctgtttttgtttaaaaaatggtcaaaaaaaaggattgtgttgtgcagtgtcytgttctcacagtaggccacggctgatgcacagtgtgtctggaaacagaacaagcctgaagaaacatttatctggattgatctcccgtcctcaggcaattcaaagccttctgaggtcagagatggtctctttgcacttgccttgataagtctttcttactgaatttgcctcatcagttttagagtgtatgaaaattttcatcatcaaaggatgtagcagaataactaagactaacgtgaagaaaaattactgttagcacattttttacacactatatcctaatagcaaagaataagcaga

SEQ ID NO: 21784 - DNA, 600 bp, Chicken  19866894233478_2
ctggattgatctcccgtcctcaggcaattcaaagccttctgaggtcagagatggtctctttgcacttgccttgataagtctttcttactgaatttgcctcatcagttttagagtgtatgaaaattttcatcatcaaaggatgtagcagaataactaagactaacgtgaagaaaaattactgttagcacattttttacacactatatcctaatagcaaagaataagcagaaatctgacaaatcattcccagttcaccttctctttttaactcacaaagatcagctattatcagaatcactstacactactttggaaggattttttctcattttcccagatgcctaatgtattacgaagacattttgttctttattcagcaagtttgaagcacgagaaactgctatttgcattgaagtgaacttgaatgtcaaggtcttatttataaatttatttaactgtggattaattagtgaagttctacagagaaagtcaaattcagtacaattcgattcttcattagtgattatttagacagggggtagaaatcagagactacatcttatatttgagtcttttgtgtagctgggcctttgagtattg

SEQ ID NO: 21785 - DNA, 600 bp, Chicken  19866894233491_1
aatcgtgcgttttccgtttaaccttccatggaagcatttatttcgtaaagagatcggtgaaaagcgatgttgaacaagtcgttcaacctttagttcaatcacgcacgtgctgcttactgtgaagactaaggaggtgctcacaggaatgctggctttatttatttactgtatagctgttttgcaaataattatagaatcacagaatggcctgggttgaaaaggaccacaatgatcatcaagtttcaagccccctgctagtaacacgtttcacaaagatcagataggtcttagaacacactkctgctccaagtatccgtgttcagcgggaaaggtacagcagacagaaagcagtgaactgcccggttgtggtatagctgaaagacgggctcaaaggcagcctcggtttcattacagtaagcatatggctccacaaatttggaggtttcaaacctttgtttttcaaagaagaagcgtgcctttatgtggtcaggtgccaagacgagagtctgagcagttctttgtgatacatacagagaatacggtacrtttcagtaaggtttctagtacctgttcagtaataaaacactgtaggaataaatt

SEQ ID NO: 21786 - DNA, 600 bp, Chicken  19866894233491_2
gccccctgctagtaacacgtttcacaaagatcagataggtcttagaacacactkctgctccaagtatccgtgttcagcgggaaaggtacagcagacagaaagcagtgaactgcccggttgtggtatagctgaaagacgggctcaaaggcagcctcggtttcattacagtaagcatatggctccacaaatttggaggtttcaaacctttgtttttcaaagaagaagcgtgcctttatgtggtcaggtgccaagacgagagtctgagcagttctttgtgatacatacagagaatacggtacrtttcagtaaggtttctagtacctgttcagtaataaaacactgtaggaataaattgattttaaatgycaggctggttgcagccttcttaaacacactgaactctatggtatcagtgacctgcagttccagcagtgcgatgtcataaacatgaggatttctgcttgtctgtgttagtgaaatgatgcttaggtgtatacagaggtgataactctatctgtgtggtgggttatgctgctgctcctgggtggtgtttccaaactgtagcaccatatgcttacttagattcgtgcgttgcgaaag

SEQ ID NO: 21787 - DNA, 600 bp, Chicken  19866894233491_3
tccgtgttcagcgggaaaggtacagcagacagaaagcagtgaactgcccggttgtggtatagctgaaagacgggctcaaaggcagcctcggtttcattacagtaagcatatggctccacaaatttggaggtttcaaacctttgtttttcaaagaagaagcgtgcctttatgtggtcaggtgccaagacgagagtctgagcagttctttgtgatacatacagagaatacggtacrtttcagtaaggtttctagtacctgttcagtaataaaacactgtaggaataaattgattttaaatgycaggctggttgcagccttcttaaacacactgaactctatggtatcagtgacctgcagttccagcagtgcgatgtcataaacatgaggatttctgcttgtctgtgttagtgaaatgatgcttaggtgtatacagaggtgataactctatctgtgtggtgggttatgctgctgctcctgggtggtgtttccaaactgtagcaccatatgcttacttagattcgtgcgttgcgaaagtaatcctgaatgatgttattcccccgggacttactggatgcgttctcatgtactctctgctactgc

SEQ ID NO: 21788 - DNA, 599 bp, Chicken  19866894233495_1
  misc_feature (1)..(88): n is any nucleotide
nnnnnnnnnnnnnnnnnnnnnnnnnnnnnnnnnnnnnnnnnnnnnnnnnnnnnnnnnnnnnnnnnnnnnnnnnnnnnnnnnnnnnnnngggaagagttacgggctcctgctgttctgtgtgctgccggggccgcgtgcaggggctgtggggtccccagtgcccctccacgtgctgctggtgggctgggcctgggggggcattccgagtaaatgggagctttgtccttgaaacagcgagttaaaggagctcctggtacttcacctgcttgctcttcccctgccgatatttgtagttccacratcacattttcccgtgatttgaatcgtttcctgtgctttgttcctgcatgsaaggtgggcacacaggagggcactgggaaggagctgtgggactggagcagagcctcagggtgtggggctgccctgagcccccggaggtaacccagggggaggctgaggcaggcagttctgctgattaatgctacaaaatatgggaaggaaaccacacattttaatgaaaagccgccatctcctcctggcagagccctgcaattagctgtgctcagctcgttatcgatgccagctgggtgcatttactg

SEQ ID NO: 21789 - DNA, 599 bp, Chicken  19866894233495_2
  misc_feature (1)..(37): n is any nucleotide
nnnnnnnnnnnnnnnnnnnnnnnnnnnnnnnnnnnnngggaagagttacgggctcctgctgttctgtgtgctgccggggccgcgtgcaggggctgtggggtccccagtgcccctccacgtgctgctggtgggctgggcctgggggggcattccgagtaaatgggagctttgtccttgaaacagcgagttaaaggagctcctggtacttcacctgcttgctcttcccctgccgatatttgtagttccacratcacattttcccgtgatttgaatcgtttcctgtgctttgttcctgcatgsaaggtgggcacacaggagggcactgggaaggagctgtgggactggagcagagcctcagggtgtggggctgccctgagcccccggaggtaacccagggggaggctgaggcaggcagttctgctgattaatgctacaaaatatgggaaggaaaccacacattttaatgaaaagccgccatctcctcctggcagagccctgcaattagctgtgctcagctcgttatcgatgccagctgggtgcatttactgatgtaggtcagggaaaggccctgcagctctctgggctccagatgctgctgc

SEQ ID NO: 21790 - DNA, 600 bp, Chicken  19866894233496_1
gaacattggtcacttctatgctgttggcttttttgttccattcattaattttctacttttctttaactcttattttgctgtacatgaagtacgtgaatattttgtgatggcctacaccaaactgtgttctgaaactcttaatttcctggtctttagttcttatggtacttcacatgctttacttatccatgatgtccttttgtaaagtgctctacagacactgaaatatgatttagtgcaacactgaacaaagtagaagtgtatctggtgtgatacacgtgagatgtaacaacctttttsaaaaaaaaagaaaattaaggcagaaaagataattttccagacatctggaagttttaaaaccttaggcactcaacatctcggcatatatttcagtgagcaattgtgtgccagcagttggatatttctcactggcgattgctgcactgtggatttttctggcatgtagtctgactcagtctgacattactggaaatagtgtagaaggaagtttgttgacttgggcaatgtttgtgtgtaatatctccttatcggctgtggttttagttattttaattgtctttaagattctgaaagcatata

SEQ ID NO: 21791 - DNA, 599 bp, Chicken  19866894233499_1
  misc_feature (1)..(60): n is any nucleotide
nnnnnnnnnnnnnnnnnnnnnnnnnnnnnnnnnnnnnnnnnnnnnnnnnnnnnnnnnnnnttttttggttgatcaagatagatggaaagatttctttaaaacatttagcttcattctgcatttaacccttatttataaaactgtttcttaaaataccattgttgaatatgtaaaatgggcttaagcactggctaaataatagtctcaatgaataaatgtgcaatactaaataacaaattttgctgaatgggattcttctatggatttaggggtctgaaagtccagattccaaaactgttytcacaacacaccaaaaagtgcagcctagggatatgtgcactggagaacactgatgaaaaatgaggaagagatttaacttccacatgttagaatgagataaatgctagaataactctctttgttctggcacattcacttttaaaaagttgttgagaaatttgagacaatatcacagagacacaaaaatgaygagaggacatggagcaaatgcttcacaggcaaaagctcacaaacctcagtctgttcattttatcagagagaagactgaaaactgacttggagacagtgtataaatactt

SEQ ID NO: 21792 - DNA, 600 bp, Chicken  19866894233499_2
gctaaataatagtctcaatgaataaatgtgcaatactaaataacaaattttgctgaatgggattcttctatggatttaggggtctgaaagtccagattccaaaactgttytcacaacacaccaaaaagtgcagcctagggatatgtgcactggagaacactgatgaaaaatgaggaagagatttaacttccacatgttagaatgagataaatgctagaataactctctttgttctggcacattcacttttaaaaagttgttgagaaatttgagacaatatcacagagacacaaaaatgaygagaggacatggagcaaatgcttcacaggcaaaagctcacaaacctcagtctgttcattttatcagagagaagactgaaaactgacttggagacagtgtataaatacttggatgaaaaacaaaacaaaacaaaaagttctctaaagagctcctctagaatcaatgcctggaagcagaaagcagagaaattaatccgaaaaaataatgtacatatttttaatagtgattttcacttaagcagattatccacaggatttttttcttccattccttaggatgttcatcaggatttggtgcctc

SEQ ID NO: 21793 - DNA, 599 bp, Chicken  19866894233505_1
tctcaataacaagaaataagacataaatttgtttacctgttaaaatcagatccactgtaagcccatcaatagatgtaatcagacaatgaaatgctctgtctagcctcttgtgctctgctctgccttgtagaagcacgtttcagtaattgttctccctgccctttacacctactaaatgaaggatgaatagctattaaaagaaggattatttatgtgacatattacacaaaatgcatgcttaattaaaaatcagcaatgcaattataaggattgtaaaagaaatcataaagacaatatgaracaattaattaggatttttttttctctgccgcccttaaaaatcaagtcaaggtactccatctgcatacataaaattatttcaattattatttcacttatttctattggtgttagcaaaaatattaactgaaatgtgtgagaaaaccatctttcactgaacatcacttttggaaattaacaatattaaactaaattgcgcagagccagccttcttcacccttaacaaaatttcacaggaaaaccaacaacttccagcaaaagtagtctaacttcacctatacgtatttcagcctccccca

SEQ ID NO: 21794 - DNA, 600 bp, Chicken  19866894233515_1
caggctaatgacttacatttgcacaaaacattcatatagaaatgtaagcacgtgccaagagaatgtaatcactgcaaaacaatttaagtatatgtaagtatttgctttaaatatacagagaaaccataagcgtttgtataagacagcctaaatacagcaatacatatttgccaaatcaactgaatacacatttaggataagatagcttgcatgtcacatgacaacgtcatatttggcagtgacacagctaagaaaatactgccctagacacagtcctgatacaatacaagagaaatgacrcttcagggtagtgtttcaaatacaagttgaattatcctatttccttctgcaacaacgttatgactgttggatgcttataaatcaaacccagcacttcaatcatgcatactgaaatattttgaatgttatagtatatcttaaatatttatataactctgtatttttatacttcacatttttaaaacaagaccagggagaggaaccacccacacttttacataagccacagagttatctttttctaagcatgactgtttttttggccactaaaaataaccacctattccatatgtattcaca

SEQ ID NO: 21795 - DNA, 600 bp, Chicken  19866894233520_1
ccacatctttgtatggcgcagttctgcaaggtctgcacttgatccatcagaaattattttcactgcagctctgaaaattttccccaggttatgtacgaaatcacaggaacagaattaaagcccgtccactaattttcttttctctgccaaacatacccacttctgaaaaaaacacctggagcgtgtccagagaagggcaacaaagctggtgaggggtctggagcacaggccttatggagagcagctgaaggagctgagattgttcagtctggagaagaggaggcgcaggggagaccttaytgctctctataactacctgaagggaggttgtagtgagctgggggtcagcctcttctcttgtgtaaccagtgataggactagagggaatggcttcaagctgcgccagggaagattcaggctggacgttaggaaatactrcttctctgaaagggtggtcaggcactggaatgggctgcccagagaggtggtggagtcaccgaccctggaggtgttcaaggaacgtttggatgttgtgttgagggacatggtttagtgagaaccattggtgatgggtggatggttggactgggtgatcctgtg

SEQ ID NO: 21796 - DNA, 600 bp, Chicken  19866894233520_2
tttctctgccaaacatacccacttctgaaaaaaacacctggagcgtgtccagagaagggcaacaaagctggtgaggggtctggagcacaggccttatggagagcagctgaaggagctgagattgttcagtctggagaagaggaggcgcaggggagaccttaytgctctctataactacctgaagggaggttgtagtgagctgggggtcagcctcttctcttgtgtaaccagtgataggactagagggaatggcttcaagctgcgccagggaagattcaggctggacgttaggaaatactrcttctctgaaagggtggtcaggcactggaatgggctgcccagagaggtggtggagtcaccgaccctggaggtgttcaaggaacgtttggatgttgtgttgagggacatggtttagtgagaaccattggtgatgggtggatggttggactgggtgatcctgtgggtcttttccaaccttggtgattctatgattctgtaatctaaaagatacttcaataatccaacaatttcactttcttttctggaaaggaaaacgttctgcagcaaacagaaactgaatgtttcgttctgtattttcat

SEQ ID NO: 21797 - DNA, 600 bp, Chicken  19866894233525_1
agcagagctaaacatcaatgaactatttttctgaggttttcatgattaacacggcaggtatcctcgtgaatgtttggagacaaagaaggctgaacaaaactactgtgaggtggtagcagtaccaaccagtggagaaacacagttgtatactggtgctgttcttatgaatacacttgttgttttgaagagcaggatacagaacaccattcctgaagaagtattattgtcaccatcttggcttgaattgaatttgcttgtgatctcatgtccttcttccaaggtcaggcagggctatcaccwycttttctgtgaaatcatcactagttctggtcctgagaccagattaagagaacagattataatattactcctgatcaatgctaaggtatgatgatgaactcacttctcacatagaaattcccacagcttgtgctgtctattatgtgcactgagcttgaaaaagatacagtacaytgcaagagcatacaggacggttcatttctttgtaagggaaagaggaggagttgtttcttgttggacctctctaaattccttactaagctacttcagcaaaaaacctacaaattgaagttggtcttc

SEQ ID NO: 21798 - DNA, 600 bp, Chicken  19866894233525_2
gcagagctaaacatcaatgaactatttttctgaggttttcatgattaacacggcaggtatcctcgtgaatgtttggagacaaagaaggctgaacaaaactactgtgaggtggtagcagtaccaaccagtggagaaacacagttgtatactggtgctgttcttatgaatacacttgttgttttgaagagcaggatacagaacaccattcctgaagaagtattattgtcaccatcttggcttgaattgaatttgcttgtgatctcatgtccttcttccaaggtcaggcagggctatcaccwycttttctgtgaaatcatcactagttctggtcctgagaccagattaagagaacagattataatattactcctgatcaatgctaaggtatgatgatgaactcacttctcacatagaaattcccacagcttgtgctgtctattatgtgcactgagcttgaaaaagatacagtacaytgcaagagcatacaggacggttcatttctttgtaagggaaagaggaggagttgtttcttgttggacctctctaaattccttactaagctacttcagcaaaaaacctacaaattgaagttggtcttca

SEQ ID NO: 21799 - DNA, 583 bp, Chicken  19866894233525_3
tgttgttttgaagagcaggatacagaacaccattcctgaagaagtattattgtcaccatcttggcttgaattgaatttgcttgtgatctcatgtccttcttccaaggtcaggcagggctatcaccwycttttctgtgaaatcatcactagttctggtcctgagaccagattaagagaacagattataatattactcctgatcaatgctaaggtatgatgatgaactcacttctcacatagaaattcccacagcttgtgctgtctattatgtgcactgagcttgaaaaagatacagtacaytgcaagagcatacaggacggttcatttctttgtaagggaaagaggaggagttgtttcttgttggacctctctaaattccttactaagctacttcagcaaaaaacctacaaattgaagttggtcttcagtgtttatttgggtgctgtggaaaataggatgcagcagatgcacatgaaaggtggaacccttatgtgcagcatgctgtaccactgcagctgacaactctgaaaggtgttgagcttttctatggaggaacaacagcagctttaaataaaaataaatg

SEQ ID NO: 21800 - DNA, 600 bp, Chicken  19866894233527_1
gctgcctgtccgggcacacaagccccccattcaccaacaggttccccaggatggccatcaggatacctgcagagatgaaggtgagcagtacgatcttctctgctacgccgaagccctcactcgaacttgggggggggagcagaaacaagaaaagaaaagacacagcacatcagagcctggggactgcagagcagaaggctgcaggtgtctgcctgtggcttggcattgcagcagccacaaaacaagaggcagcctggcatttctacaactatcttgttaaacggagaaaagaagttaaaygtttaggagcctgcaaaacaggagggcagcarccaacrtgcaatgaatgtcgttcagttcytcagaaaatcaattattataaaatcactgagccattctttccttttaggctatttctattgacgtacccagaagcaaaggcacctcaaccctgcactcctgtctttccacggtacatygcagcagtgagaaggggtgcctgctcacagcatyacgtggggctggaagtaagctggcattgagagcagsactccacacccgttcagcagggagattccttcactgcgtatggagctggcg

SEQ ID NO: 21801 - DNA, 600 bp, Chicken  19866894233527_2
accaacaggttccccaggatggccatcaggatacctgcagagatgaaggtgagcagtacgatcttctctgctacgccgaagccctcactcgaacttgggggggggagcagaaacaagaaaagaaaagacacagcacatcagagcctggggactgcagagcagaaggctgcaggtgtctgcctgtggcttggcattgcagcagccacaaaacaagaggcagcctggcatttctacaactatcttgttaaacggagaaaagaagttaaaygtttaggagcctgcaaaacaggagggcagcarccaacrtgcaatgaatgtcgttcagttcytcagaaaatcaattattataaaatcactgagccattctttccttttaggctatttctattgacgtacccagaagcaaaggcacctcaaccctgcactcctgtctttccacggtacatygcagcagtgagaaggggtgcctgctcacagcatyacgtggggctggaagtaagctggcattgagagcagsactccacacccgttcagcagggagattccttcactgcgtatggagctggcgtttggcactgggattaacgtggtgagattgct

SEQ ID NO: 21802 - DNA, 600 bp, Chicken  19866894233527_3
aggttccccaggatggccatcaggatacctgcagagatgaaggtgagcagtacgatcttctctgctacgccgaagccctcactcgaacttgggggggggagcagaaacaagaaaagaaaagacacagcacatcagagcctggggactgcagagcagaaggctgcaggtgtctgcctgtggcttggcattgcagcagccacaaaacaagaggcagcctggcatttctacaactatcttgttaaacggagaaaagaagttaaaygtttaggagcctgcaaaacaggagggcagcarccaacrtgcaatgaatgtcgttcagttcytcagaaaatcaattattataaaatcactgagccattctttccttttaggctatttctattgacgtacccagaagcaaaggcacctcaaccctgcactcctgtctttccacggtacatygcagcagtgagaaggggtgcctgctcacagcatyacgtggggctggaagtaagctggcattgagagcagsactccacacccgttcagcagggagattccttcactgcgtatggagctggcgtttggcactgggattaacgtggtgagattgctcaggta

SEQ ID NO: 21803 - DNA, 600 bp, Chicken  19866894233527_4
gatacctgcagagatgaaggtgagcagtacgatcttctctgctacgccgaagccctcactcgaacttgggggggggagcagaaacaagaaaagaaaagacacagcacatcagagcctggggactgcagagcagaaggctgcaggtgtctgcctgtggcttggcattgcagcagccacaaaacaagaggcagcctggcatttctacaactatcttgttaaacggagaaaagaagttaaaygtttaggagcctgcaaaacaggagggcagcarccaacrtgcaatgaatgtcgttcagttcytcagaaaatcaattattataaaatcactgagccattctttccttttaggctatttctattgacgtacccagaagcaaaggcacctcaaccctgcactcctgtctttccacggtacatygcagcagtgagaaggggtgcctgctcacagcatyacgtggggctggaagtaagctggcattgagagcagsactccacacccgttcagcagggagattccttcactgcgtatggagctggcgtttggcactgggattaacgtggtgagattgctcaggtaattgaaaaattgaaaggttattc

SEQ ID NO: 21804 - DNA, 600 bp, Chicken  19866894233527_5
gggactgcagagcagaaggctgcaggtgtctgcctgtggcttggcattgcagcagccacaaaacaagaggcagcctggcatttctacaactatcttgttaaacggagaaaagaagttaaaygtttaggagcctgcaaaacaggagggcagcarccaacrtgcaatgaatgtcgttcagttcytcagaaaatcaattattataaaatcactgagccattctttccttttaggctatttctattgacgtacccagaagcaaaggcacctcaaccctgcactcctgtctttccacggtacatygcagcagtgagaaggggtgcctgctcacagcatyacgtggggctggaagtaagctggcattgagagcagsactccacacccgttcagcagggagattccttcactgcgtatggagctggcgtttggcactgggattaacgtggtgagattgctcaggtaattgaaaaattgaaaggttattctgtcttagtttgacttcctctggggtcatgttttatttactaaatacaacccagactttcacacttgatctcactgagttctcttgacttttggcaaagctaaaaaggattagaagct

SEQ ID NO: 21805 - DNA, 600 bp, Chicken  19866894233527_6
tgtggcttggcattgcagcagccacaaaacaagaggcagcctggcatttctacaactatcttgttaaacggagaaaagaagttaaaygtttaggagcctgcaaaacaggagggcagcarccaacrtgcaatgaatgtcgttcagttcytcagaaaatcaattattataaaatcactgagccattctttccttttaggctatttctattgacgtacccagaagcaaaggcacctcaaccctgcactcctgtctttccacggtacatygcagcagtgagaaggggtgcctgctcacagcatyacgtggggctggaagtaagctggcattgagagcagsactccacacccgttcagcagggagattccttcactgcgtatggagctggcgtttggcactgggattaacgtggtgagattgctcaggtaattgaaaaattgaaaggttattctgtcttagtttgacttcctctggggtcatgttttatttactaaatacaacccagactttcacacttgatctcactgagttctcttgacttttggcaaagctaaaaaggattagaagctcttctgcaatctcatctccagtgtatgtaacatc

SEQ ID NO: 21806 - DNA, 600 bp, Chicken  19866894233527_7
cagcctggcatttctacaactatcttgttaaacggagaaaagaagttaaaygtttaggagcctgcaaaacaggagggcagcarccaacrtgcaatgaatgtcgttcagttcytcagaaaatcaattattataaaatcactgagccattctttccttttaggctatttctattgacgtacccagaagcaaaggcacctcaaccctgcactcctgtctttccacggtacatygcagcagtgagaaggggtgcctgctcacagcatyacgtggggctggaagtaagctggcattgagagcagsactccacacccgttcagcagggagattccttcactgcgtatggagctggcgtttggcactgggattaacgtggtgagattgctcaggtaattgaaaaattgaaaggttattctgtcttagtttgacttcctctggggtcatgttttatttactaaatacaacccagactttcacacttgatctcactgagttctcttgacttttggcaaagctaaaaaggattagaagctcttctgcaatctcatctccagtgtatgtaacatcttaataggcttcttgtagccaacttcaggctgtcta

SEQ ID NO: 21807 - DNA, 600 bp, Chicken  19866894233535_1
ttaatgtacttagcaaatgaaaaggaaggagatttcattctctcaccagcctcattttatctgcacattgaagagatcaaagctggtgtctggtattctgagactacactgaaggtagcttgtgtttttcctgatgcatgcccattttaaacacaaaagatgatgcctctgtctgaataaacctcatgggatcaaagctgttgggagctaatgtcaggcccagccacagagaaaggctcctggggatcagggaggtcttgagagagatgggaagagtaggttccttctcgaagtccctgwcagtccttattttcagaccattgtggwgctttgctacagtgattggcattggcagagctttgatttatttattttttccttttcccaaatgaagaactgaaattcaaaaaaagccagctggccaaatattggattaattgcagagagatatggaatggaatgagttaaatctcaatcactgcagtattgctcctaaatggtttactgtacratgtgagtcatggtgtggtttggtcttctgtctatgcagagtttgcaatttttattattattattattattatttgaagcagaaggttc

SEQ ID NO: 21808 - DNA, 600 bp, Chicken  19866894233535_2
ggagatttcattctctcaccagcctcattttatctgcacattgaagagatcaaagctggtgtctggtattctgagactacactgaaggtagcttgtgtttttcctgatgcatgcccattttaaacacaaaagatgatgcctctgtctgaataaacctcatgggatcaaagctgttgggagctaatgtcaggcccagccacagagaaaggctcctggggatcagggaggtcttgagagagatgggaagagtaggttccttctcgaagtccctgwcagtccttattttcagaccattgtggwgctttgctacagtgattggcattggcagagctttgatttatttattttttccttttcccaaatgaagaactgaaattcaaaaaaagccagctggccaaatattggattaattgcagagagatatggaatggaatgagttaaatctcaatcactgcagtattgctcctaaatggtttactgtacratgtgagtcatggtgtggtttggtcttctgtctatgcagagtttgcaatttttattattattattattattatttgaagcagaaggttcatcaaaacaaattacaccaatggcttt

SEQ ID NO: 21809 - DNA, 600 bp, Chicken  19866894233535_3
tgtcaggcccagccacagagaaaggctcctggggatcagggaggtcttgagagagatgggaagagtaggttccttctcgaagtccctgwcagtccttattttcagaccattgtggwgctttgctacagtgattggcattggcagagctttgatttatttattttttccttttcccaaatgaagaactgaaattcaaaaaaagccagctggccaaatattggattaattgcagagagatatggaatggaatgagttaaatctcaatcactgcagtattgctcctaaatggtttactgtacratgtgagtcatggtgtggtttggtcttctgtctatgcagagtttgcaatttttattattattattattattatttgaagcagaaggttcatcaaaacaaattacaccaatggctttatggagcccagcaatgcagcctggcagccccatgctatcgatcccccagaaggtgagaaagccctattagagcacctccccagctgggcagcaatatcctttcgaggaaaattctttcctgatccttgctttaaagaagtgattcgagattaatgtaaagaccatttgtcattttgggtataag

SEQ ID NO: 21810 - DNA, 600 bp, Chicken  19866894233536_1
acctcagtccaactctctggtgtgtctggtgaaaccagacagcagctaattattttaaaatattagtaatgcttaattaacgagcatagacataaataattggctaagagttgaatatgggtatatgaacatgatcagaatctagctctatgcagcaactgagtagatgtgcttactgataatatctaagtttttttattctctcttctaaaatattgatatgtgtttagtagcaaaataaatatctaatctaatatcactttaaaatatatgccatgtaggtacataccatatattgtragaaaaaataaatgatgtacttttttttcatagcatattaaaaacaaatcaagagaagatttttatggtttaattatttgagagatatttttttctttacaatttattgtctaaaaactgcatttctagtttawgttcatcatatagacgtccttctatttcttgtcaaattaaaaatcagtcatctatagagaatagagtataattcatccttcctggagagcattcttaactgaatgtaagtaatggagacaaaagaaatccatattagatacacaagtggagttaacagatactagt

SEQ ID NO: 21811 - DNA, 475 bp, Chicken  19866894233536_2
tcagaatctagctctatgcagcaactgagtagatgtgcttactgataatatctaagtttttttattctctcttctaaaatattgatatgtgtttagtagcaaaataaatatctaatctaatatcactttaaaatatatgccatgtaggtacataccatatattgtragaaaaaataaatgatgtacttttttttcatagcatattaaaaacaaatcaagagaagatttttatggtttaattatttgagagatatttttttctttacaatttattgtctaaaaactgcatttctagtttawgttcatcatatagacgtccttctatttcttgtcaaattaaaaatcagtcatctatagagaatagagtataattcatccttcctggagagcattcttaactgaatgtaagtaatggagacaaaagaaatccatattagatacacaagtggagttaacagatactagtaatattaca

SEQ ID NO: 21812 - DNA, 600 bp, Chicken  19866894233547_1
gacagaattcaagtcagtcacaaaactctcatctgaacagctgatgcatagaaaaaggaatgacaatagctgacaccactggaatcaagactagtaaaaagtatcagatcatgaatcctagccctgcttttgtcctcttcaggaatcctaacctttatttctaattccttctgcatttctaagatcatttctaaacttcagtttagaattggaccatattccacaagtagaaagtagaagttatcatcaaaaatgaagagaaatcaaagcttccaaaggaaaaatgggaattaatgactytgtgggaggagcaacagaagagttctggatagattggtcgtgtcattgagggaataacttagtctgccgtgattcatgggaaagatacaggaatgagttctataatggaagaataaattgaattaaaaaatgctgtggttggaaatggactcttacagacgttaaaccataaaggagagcaatcataacttacatgcaataaatcatttgcagttcgacatttctgagttcagtgttcacacctggtacctgtctgtgtgtctgaggagggaaagggaaagagtgaaggatccaggtaaa

SEQ ID NO: 21813 - DNA, 599 bp, Chicken  19866894233548_1
  misc_feature (1)..(129): n is any nucleotide
nnnnnnnnnnnnnnnnnnnnnnnnnnnnnnnnnnnnnnnnnnnnnnnnnnnnnnnnnnnnnnnnnnnnnnnnnnnnnnnnnnnnnnnnnnnnnnnnnnnnnnnnnnnnnnnnnnnnnnnnnnnnnnnnngaaatatcaatatgcctgagggtaggattggcctagagagggacctggacaggctggatagctgggctgaggccactgtgatgaatttcaacaggaccaagtggcaggtccttcactttggtcacagcaaccccagacttggggcagagaggttagaagattgtgtggaaraaatggacctgggggtgttggtcgaccctcggctgaacatgagccagcagtgtgcccaggtggccaagaaggccaatgacatcctgatttgtatcagaagtagtgttgccagcagragcaggttggtgatctccccctgtactcagcactggtgagratgcaccttgagtgctatcttcatttttgggcccctcagcagaagaaagacattgaggccctggrgtgtgtccagagaaaggcaataaagctgtgaaggctctggagcacaagtcttatgaggrccagctgaaggaactgga

SEQ ID NO: 21814 - DNA, 599 bp, Chicken  19866894233548_2
  misc_feature (1)..(13): n is any nucleotide
nnnnnnnnnnnnngaaatatcaatatgcctgagggtaggattggcctagagagggacctggacaggctggatagctgggctgaggccactgtgatgaatttcaacaggaccaagtggcaggtccttcactttggtcacagcaaccccagacttggggcagagaggttagaagattgtgtggaaraaatggacctgggggtgttggtcgaccctcggctgaacatgagccagcagtgtgcccaggtggccaagaaggccaatgacatcctgatttgtatcagaagtagtgttgccagcagragcaggttggtgatctccccctgtactcagcactggtgagratgcaccttgagtgctatcttcatttttgggcccctcagcagaagaaagacattgaggccctggrgtgtgtccagagaaaggcaataaagctgtgaaggctctggagcacaagtcttatgaggrccagctgaaggaactggaattgtttagtctggagaaggagagattttattcctctctacarctacccgataggaggttgtggtgagtttggggtcttctcctgcataaatagcaaaagaactagagggaatggc

SEQ ID NO: 21815 - DNA, 600 bp, Chicken  19866894233548_3
tggcctagagagggacctggacaggctggatagctgggctgaggccactgtgatgaatttcaacaggaccaagtggcaggtccttcactttggtcacagcaaccccagacttggggcagagaggttagaagattgtgtggaaraaatggacctgggggtgttggtcgaccctcggctgaacatgagccagcagtgtgcccaggtggccaagaaggccaatgacatcctgatttgtatcagaagtagtgttgccagcagragcaggttggtgatctccccctgtactcagcactggtgagratgcaccttgagtgctatcttcatttttgggcccctcagcagaagaaagacattgaggccctggrgtgtgtccagagaaaggcaataaagctgtgaaggctctggagcacaagtcttatgaggrccagctgaaggaactggaattgtttagtctggagaaggagagattttattcctctctacarctacccgataggaggttgtggtgagtttggggtcttctcctgcataaatagcaaaagaactagagggaatggcctcaagttgtgccaggggagattcaggttggatattaggaat

SEQ ID NO: 21816 - DNA, 600 bp, Chicken  19866894233548_4
ggaccaagtggcaggtccttcactttggtcacagcaaccccagacttggggcagagaggttagaagattgtgtggaaraaatggacctgggggtgttggtcgaccctcggctgaacatgagccagcagtgtgcccaggtggccaagaaggccaatgacatcctgatttgtatcagaagtagtgttgccagcagragcaggttggtgatctccccctgtactcagcactggtgagratgcaccttgagtgctatcttcatttttgggcccctcagcagaagaaagacattgaggccctggrgtgtgtccagagaaaggcaataaagctgtgaaggctctggagcacaagtcttatgaggrccagctgaaggaactggaattgtttagtctggagaaggagagattttattcctctctacarctacccgataggaggttgtggtgagtttggggtcttctcctgcataaatagcaaaagaactagagggaatggcctcaagttgtgccaggggagattcaggttggatattaggaataatttcttctccaaaatagtggttaggcactagaacaggctgtccagggaggtggtggagtccct

SEQ ID NO: 21817 - DNA, 600 bp, Chicken  19866894233548_5
ttagaagattgtgtggaaraaatggacctgggggtgttggtcgaccctcggctgaacatgagccagcagtgtgcccaggtggccaagaaggccaatgacatcctgatttgtatcagaagtagtgttgccagcagragcaggttggtgatctccccctgtactcagcactggtgagratgcaccttgagtgctatcttcatttttgggcccctcagcagaagaaagacattgaggccctggrgtgtgtccagagaaaggcaataaagctgtgaaggctctggagcacaagtcttatgaggrccagctgaaggaactggaattgtttagtctggagaaggagagattttattcctctctacarctacccgataggaggttgtggtgagtttggggtcttctcctgcataaatagcaaaagaactagagggaatggcctcaagttgtgccaggggagattcaggttggatattaggaataatttcttctccaaaatagtggttaggcactagaacaggctgtccagggaggtggtggagtccctatctctagaagcgctcaagaaacgtttggatgttgtactaagggacgtggtttagtggg

SEQ ID NO: 21818 - DNA, 600 bp, Chicken  19866894233548_6
gccagcagtgtgcccaggtggccaagaaggccaatgacatcctgatttgtatcagaagtagtgttgccagcagragcaggttggtgatctccccctgtactcagcactggtgagratgcaccttgagtgctatcttcatttttgggcccctcagcagaagaaagacattgaggccctggrgtgtgtccagagaaaggcaataaagctgtgaaggctctggagcacaagtcttatgaggrccagctgaaggaactggaattgtttagtctggagaaggagagattttattcctctctacarctacccgataggaggttgtggtgagtttggggtcttctcctgcataaatagcaaaagaactagagggaatggcctcaagttgtgccaggggagattcaggttggatattaggaataatttcttctccaaaatagtggttaggcactagaacaggctgtccagggaggtggtggagtccctatctctagaagcgctcaagaaacgtttggatgttgtactaagggacgtggtttagtggggaaatgttggtggcagatggagggttagtttggatgatcttggaggtcttttccagccttg

SEQ ID NO: 21819 - DNA, 599 bp, Chicken  19866894233556_1
  misc_feature (1)..(143): n is any nucleotide
nnnnnnnnnnnnnnnnnnnnnnnnnnnnnnnnnnnnnnnnnnnnnnnnnnnnnnnnnnnnnnnnnnnnnnnnnnnnnnnnnnnnnnnnnnnnnnnnnnnnnnnnnnnnnnnnnnnnnnnnnnnnnnnnnnnnnnnnnnnnnnnatgattctttgattctaattaaaatggaagaatagagaggaggtgaggaaagaaagaagagaggagagaaaggaagagaaaggaaggaagcaggaaggaaagaagaggaaggggggaaggagggaagcagaaaggaggaagggaggaagagaagggrggaaggaaggaaggaagagaagggagggagggaaggaggtaggaaggaaggaaagaaaaagctgacatgtcaggagagtagcttaaaaaaatgaatttcagtgctttagtgcattacttcttgtaatttcacccagaatgttatcctgaaaaaattattcttattaatgttctctttatttctgcagggggcataaaaataactgatgactgtgagaatataaaccgtatggttagtgaggcagaggtgataattagaacatgctgtactacgcagtaaacaaagctattatgaacgat

SEQ ID NO: 21820 - DNA, 599 bp, Chicken  19866894233556_2
  misc_feature (1)..(142): n is any nucleotide
nnnnnnnnnnnnnnnnnnnnnnnnnnnnnnnnnnnnnnnnnnnnnnnnnnnnnnnnnnnnnnnnnnnnnnnnnnnnnnnnnnnnnnnnnnnnnnnnnnnnnnnnnnnnnnnnnnnnnnnnnnnnnnnnnnnnnnnnnnnnnnatgattctttgattctaattaaaatggaagaatagagaggaggtgaggaaagaaagaagagaggagagaaaggaagagaaaggaaggaagcaggaaggaaagaagaggaaggggggaaggagggaagcagaaaggaggaagggaggaagagaagggargaaggaaggaaggaagagaagggagggagggaaggaggtaggaaggaaggaaagaaaaagctgacatgtcaggagagtagcttaaaaaaatgaatttcagtgctttagtgcattacttcttgtaatttcacccagaatgttatcctgaaaaaattattcttattaatgttctctttatttctgcagggggcataaaaataactgatgactgtgagaatataaaccgtatggttagtgaggcagaggtgataattagaacatgctgtactacgcagtaaacaaagctattatgaacgata

SEQ ID NO: 21821 - DNA, 599 bp, Chicken  19866894233556_3
  misc_feature (1)..(141): n is any nucleotide
nnnnnnnnnnnnnnnnnnnnnnnnnnnnnnnnnnnnnnnnnnnnnnnnnnnnnnnnnnnnnnnnnnnnnnnnnnnnnnnnnnnnnnnnnnnnnnnnnnnnnnnnnnnnnnnnnnnnnnnnnnnnnnnnnnnnnnnnnnnnnatgattctttgattctaattaaaatggaagaatagagaggaggtgaggaaagaaagaagagaggagagaaaggaagagaaaggaaggaagcaggaaggaaagaagaggaaggggggaaggagggaagcagaaaggaggaagggaggaagagaagggagraaggaaggaaggaagagaagggagggagggaaggaggtaggaaggaaggaaagaaaaagctgacatgtcaggagagtagcttaaaaaaatgaatttcagtgctttagtgcattacttcttgtaatttcacccagaatgttatcctgaaaaaattattcttattaatgttctctttatttctgcagggggcataaaaataactgatgactgtgagaatataaaccgtatggttagtgaggcagaggtgataattagaacatgctgtactacgcagtaaacaaagctattatgaacgatag

SEQ ID NO: 21822 - DNA, 599 bp, Chicken  19866894233556_4
  misc_feature (1)..(140): n is any nucleotide
nnnnnnnnnnnnnnnnnnnnnnnnnnnnnnnnnnnnnnnnnnnnnnnnnnnnnnnnnnnnnnnnnnnnnnnnnnnnnnnnnnnnnnnnnnnnnnnnnnnnnnnnnnnnnnnnnnnnnnnnnnnnnnnnnnnnnnnnnnnnatgattctttgattctaattaaaatggaagaatagagaggaggtgaggaaagaaagaagagaggagagaaaggaagagaaaggaaggaagcaggaaggaaagaagaggaaggggggaaggagggaagcagaaaggaggaagggaggaagagaagggaggraggaaggaaggaagagaagggagggagggaaggaggtaggaaggaaggaaagaaaaagctgacatgtcaggagagtagcttaaaaaaatgaatttcagtgctttagtgcattacttcttgtaatttcacccagaatgttatcctgaaaaaattattcttattaatgttctctttatttctgcagggggcataaaaataactgatgactgtgagaatataaaccgtatggttagtgaggcagaggtgataattagaacatgctgtactacgcagtaaacaaagctattatgaacgataga

SEQ ID NO: 21823 - DNA, 599 bp, Chicken  19866894233559_1
  misc_feature (1)..(16): n is any nucleotide
nnnnnnnnnnnnnnnnaaaagaatcataactgtttgatatgggaaaagtgatgcacgctgtgcttgtggtccaggagcatttctttggcatttcctctatgaagatctttccttctgtttagacaccctccaacttctacctacgaaccttgttcagtgaacatgttaataattgggtctccgtagtatggttgcattgaataggaaggaaggttacatgatagaagagaaggatttctcttctttagctgtatagcagtggatagtacacatggagcttcacctgcaccgagtggtgtrttttttgagtcttctatttgcacacagaaattctctgtgtggatattggagttttgttgggaaaaattccattttaaatatattatgttttcagaaycaaatctcctatccctatgtttctgagccttcaggaatccttactgtagagaaaattggtaatgccaactttagattgttttttattcaatttcgcaatgggaaagaatttctgagatctctgtaggaacggaattccttttctttgtagctgtggttggttgtagctcattcccaaataatctgctggtctaacaaagatt

SEQ ID NO: 21824 - DNA, 600 bp, Chicken  19866894233559_2
tatgaagatctttccttctgtttagacaccctccaacttctacctacgaaccttgttcagtgaacatgttaataattgggtctccgtagtatggttgcattgaataggaaggaaggttacatgatagaagagaaggatttctcttctttagctgtatagcagtggatagtacacatggagcttcacctgcaccgagtggtgtrttttttgagtcttctatttgcacacagaaattctctgtgtggatattggagttttgttgggaaaaattccattttaaatatattatgttttcagaaycaaatctcctatccctatgtttctgagccttcaggaatccttactgtagagaaaattggtaatgccaactttagattgttttttattcaatttcgcaatgggaaagaatttctgagatctctgtaggaacggaattccttttctttgtagctgtggttggttgtagctcattcccaaataatctgctggtctaacaaagattttctgatcagataattgctcaagaatatctagttgctttagggatatgtctctgagcagttctagatttaagcttttacgtggtcttgaaatttacct

SEQ ID NO: 21825 - DNA, 600 bp, Chicken  19866894233560_1
ttaaacattaaatgacatattgataattatttaaaataatttactttctaatgtatataattagtacataatgtgctttgaaacaaatgtaataaatgaaaatttgtttttagaatgtatctataggttataaaaatcactaaaaaactgaagtatcacctgattcatcataactattagaaatagttgttcatatactttgtacatcttctgataatctgaagtggaagggtttatctgggttcacactttgggatggctttcatccctagatgtgaaaagttaaatttgggtgtcatyagtgtgtctataagttgagactgtctttatacctctgttgtaagtraagatctcaattcagccaaatagtcattttgttgaacagctattaggtagatagctgtacagatagaccacctataggtagcagattgtatctccctccaggctctaatcacagctatgactggacttcactgaatgtgagaaaagtctaggtgcatgggtgcatgcattgacacttctgtgcagaaacctaagtttaaggtgcagaatctagggggaactgaccagagatttggaaacatgaataaaattctt

SEQ ID NO: 21826 - DNA, 600 bp, Chicken  19866894233560_2
tctaatgtatataattagtacataatgtgctttgaaacaaatgtaataaatgaaaatttgtttttagaatgtatctataggttataaaaatcactaaaaaactgaagtatcacctgattcatcataactattagaaatagttgttcatatactttgtacatcttctgataatctgaagtggaagggtttatctgggttcacactttgggatggctttcatccctagatgtgaaaagttaaatttgggtgtcatyagtgtgtctataagttgagactgtctttatacctctgttgtaagtraagatctcaattcagccaaatagtcattttgttgaacagctattaggtagatagctgtacagatagaccacctataggtagcagattgtatctccctccaggctctaatcacagctatgactggacttcactgaatgtgagaaaagtctaggtgcatgggtgcatgcattgacacttctgtgcagaaacctaagtttaaggtgcagaatctagggggaactgaccagagatttggaaacatgaataaaattctttcaaaaccctcaactgcgacttcacaatgttcatcaaaaacaaaca

SEQ ID NO: 21827 - DNA, 600 bp, Chicken  19866894233567_1
gtttattgtgacactctaaaaggcacaagaacttttgtttctcatggggccagctaaaatctaacagaaaaagtgagcaagataaagtgaggtgataagtgataattgtttagaagtgtgtaatttggtaaggaatagggaaacttttgccccaaatcaagttttctccatgtcccatgcattcagtttattaagttcttacaatatctataatccagcaacaataatggaaacaaaatgtttagtaattactgtaaacttcatacacatctggaagtcagttcacctttatgagtgagkgatgaccacaaaattaacaagtgagaaagttcagagaaaccatcagtgacaattacacaaggttatattcctagagagaaaatacattcaagcacctcacattgcatatttgatttatattgtgtcatcttctctctttatatttattataatgtttgcaatacctgctggctactgtccttgctttggccctctaagtaattttgtatctaaatgctaaaacagtgacaggagagctttgcaatattgatcttaacaaatacatgtgcacagtattgaaactgcatttcataataagga

SEQ ID NO: 21828 - DNA, 600 bp, Chicken  19866894233572_1
gtacagcaatgttgtaaaagagaatagctaaagcaaaacagaaatgggtcttgaaatagtttaaatcacagtgaaagttttaagagtctgcagagggactgaatctcttttcttttgccatctgctacaggtgggggaggagggggagccaacaagttatacagtattacatagtatttaaattcctttagaagtcataatacacctgcttgtaagattattcttcaactccatataagtgcttatgcaggatttctcctcaccatggagtgcagtccttcccaaaccctataatggaawcttttacctcctcagctgcttgcaaagtttaaaggtacgctaacatttcccgggtagtaagtcagcaaaactataacgctgatttcttataaaaagtcagcctaaaacaaacttcaacattcattttcatcaagtgtttcctaacagttagaaagtcagattttaatcatgaggatactgctgagaagattgctgagttgctaaaaaaagtgcttgaatgctttctgaggcataggcctgaataacttcagcatttaattcctattgatcttaacagaactcaggcacctcttttccttc

SEQ ID NO: 21829 - DNA, 600 bp, Chicken  19866894233573_1
tatggtttgggaggaagctgagcctaagccatgcatgcttcacacaaatgagttgtccttactttcataaacctccccactggctttggttacacagattacatgagtggaacgaatccactgggagtggaaattcataagatcagagccaagcctgctataccttcctaggacatgaagcctttgcataagaaccccatttattctccagtcccttttcacagctctagtatgtattttctctcactttcctttccacagccagagtgggctatgttggtcataggaaggctgaggcamaaatcttggttgttatcacagtgccagattgcattgcagctttctaaccaatattctccctgcctacattctaaccaaacagaattctccttatttcagatggtgtaattgaatgtgcgtaaatggatggcttacaccctttgtgcagaaaagcagatccatgggaacacaaactgactcctcagtgccaaacttttttttccctaatgggagtactatgagtaccctatgcagttggtataacttgtctttctgctctcattgtttgcagaatttcaaaacgtgagagacataaagaaa

SEQ ID NO: 21830 - DNA, 600 bp, Chicken  19866894233576_1
atgcctgataatccctgtccttatgtaagtggatatgataatctatgaacaacaggaaacttactgttgctgaaatcagcatgtgcatgtctgcatcttaaaactgggatttcagatggatgatattttatctgctttgaaatttgtgttcataatatttgctctttctttttccagtacagagcaaccactctgcctgcatttaagtactacgtgacttgcgcctgtctcatattcttctgcatttttgttgtgcagattctggtattgccaaagtaagtggtattttaatatgtattyattcctatgtttacttgcatattaatgtaaaaaatatattagtaaaagttgtttgaagtgtcagattgcagagatcaattaatggaaagaaagttgaacaaaaattgaggattttagccagtyttcaatgttatacttgtttctagttttaaacgctgccattgcctggtgttcaaatattatatcaattcttcaytgattttagtttttgtatttaaaaatgtgtgatgatgatatgaatccatatgtgcaaagaaaagtaatacaaactatgaatctatgagactacaattgcatgta

SEQ ID NO: 21831 - DNA, 600 bp, Chicken  19866894233576_2
tattttatctgctttgaaatttgtgttcataatatttgctctttctttttccagtacagagcaaccactctgcctgcatttaagtactacgtgacttgcgcctgtctcatattcttctgcatttttgttgtgcagattctggtattgccaaagtaagtggtattttaatatgtattyattcctatgtttacttgcatattaatgtaaaaaatatattagtaaaagttgtttgaagtgtcagattgcagagatcaattaatggaaagaaagttgaacaaaaattgaggattttagccagtyttcaatgttatacttgtttctagttttaaacgctgccattgcctggtgttcaaatattatatcaattcttcaytgattttagtttttgtatttaaaaatgtgtgatgatgatatgaatccatatgtgcaaagaaaagtaatacaaactatgaatctatgagactacaattgcatgtaaaataagcctgagctttgggctttaaagtgggatgaagtggattgcagaattgagactgtgattaattagtggtatttaacacattgctgtgatagtactgctctgctctacatacaattagc

SEQ ID NO: 21832 - DNA, 600 bp, Chicken  19866894233576_3
ctgcatttaagtactacgtgacttgcgcctgtctcatattcttctgcatttttgttgtgcagattctggtattgccaaagtaagtggtattttaatatgtattyattcctatgtttacttgcatattaatgtaaaaaatatattagtaaaagttgtttgaagtgtcagattgcagagatcaattaatggaaagaaagttgaacaaaaattgaggattttagccagtyttcaatgttatacttgtttctagttttaaacgctgccattgcctggtgttcaaatattatatcaattcttcaytgattttagtttttgtatttaaaaatgtgtgatgatgatatgaatccatatgtgcaaagaaaagtaatacaaactatgaatctatgagactacaattgcatgtaaaataagcctgagctttgggctttaaagtgggatgaagtggattgcagaattgagactgtgattaattagtggtatttaacacattgctgtgatagtactgctctgctctacatacaattagcattactatttgaagaatttctctttctaaaactaggttagaaaatatcatcaattgatgaaataattattgcc

SEQ ID NO: 21833 - DNA, 600 bp, Chicken  19866894233576_4
ttaaaatggaattttgctgttgattgtttccataatggacacttgatgtttgttagtttgatagcagttgtctccaaagccaacactgcatattctctgtgattcagtatgcggtctttttttcctgcatagtgcttctgggagtagttcttacaacctcagataagtgactgctcttgtgctgtagtacttgcattttaattcaaagccagaaggggtttttattctgcagacttgttttataacatattaagctttacaggcttctcttcagatgttgcagcattattattattattwttttttttgcaatgggtttcccattagtttctaatttacagacacgggcttcaaaaggtcagtcttagaagaaaagagttcagcagtatcctctatatggttcactctgaatttaggtatcataccaaaagcaaaacatgaatctaattagtctcttccaatattatcactcagatctatttttatgtttttatttcagtcacaaaaatgaattcagctttattatttaccatatatgaagtaagatgttaattttactatatgcttatgaagtctattgaaccaaatgtgtagctcatt

SEQ ID NO: 21834 - DNA, 599 bp, Chicken  19866894233581_1
  misc_feature (1)..(53): n is any nucleotide
nnnnnnnnnnnnnnnnnnnnnnnnnnnnnnnnnnnnnnnnnnnnnnnnnnnnncttcactatatgatcaatccagagcatgattatatgattatgaagtgatgctgggagctgtagagataaattcttttatgatcatactgctacccctggaggtttggcagcatcggaggttgggaacagaatgttgatgagctgatgacccttctattaagaatactgggtacacagttctttgttaaaaaaaagttcagagaaatggaggtctctaagacagccttttgagacactagtcaggagkttgtggcttcactaggtttcagctggaagcaccatctgcattttgaagcattttaaactcgggtaactctttgtaaactagcctgcttcctgttatacagataaatgccagttcaacagctataaaaaggatgattttcccatctcccttgtgcttaagatggtccattttgttacaagtgattagaccactaactcactcaccagctccaaacaggactaggcaggaactaaatactgtgggaaagatttgttcagtggagttttaacttgagctgttcctcagggtaagatccataa

SEQ ID NO: 21835 - DNA, 599 bp, Chicken  19866894233582_1
  misc_feature (1)..(35): n is any nucleotide
nnnnnnnnnnnnnnnnnnnnnnnnnnnnnnnnnnnacaattgtgatcatctagaacttcattggtattgttgataataagttcttaaatttagtaattttactctttgagcattcctggtattcttgccataagttgtatgtaatcccataataaaaatcaaagtcaaggagcagtagcaagtaaagtggaaaaaagttcatgcattttctgaagatgaaatcaaccaataaaagccagccagttttatttgctttctttcaagaacaagtgggggcatgggggtaaagaggtggacacrtgtaacacagtggaaaatgcagcagtgacagcagagcatcaaggtcccaggctgcagcaagtgaagatttgctcaagttgcaacagctgtgggcacagaaataaaagaaagaagctgcttaccttcagaagccctcaggtatgcagggatctccaacaagatacccttgcctccactgccaacccttgcatgaggtctgggaaggggtgggacctcagctcaccccttacagtcactcaggtgcactgcactgcattacatgcacctgagttcccctgggttggccctgccttcccacc

SEQ ID NO: 21836 - DNA, 600 bp, Chicken  19866894233583_1
atacttacatgtagttatccttgtggttcctcgtacagtttataaacagagggttctcaggcaggaagcatccactaaaaaaatattcagaatgtgttttgaagattttcttacaatgcaagtgaaactaaagcttcaacatttatccttactgattcttctgttagaaggcatcagctttctaaagaagttctgcttaatcaatttcaagaaggtattacaagccatacaaactcctttgatgtatattttaatgaccttgattatatttaatgacttaggttctatatgaatcttccwtgtctttacttcactcattaaattaatcttattggagtgtcctgctaattctattaataatattaataattaattctattaataattctattaatattattaatagaatgaatagaaaagaattattttttacaatcttttaatgaaaatgatattttggaacaaagaacacaactgattatgccatatcatattcaaacataatttcccmaaatatgtgttaacattatccatataaatgtatggattaattcccactgttggtcttataactttatttacaggtaaagttacacttgt

SEQ ID NO: 21837 - DNA, 600 bp, Chicken  19866894233583_2
aaggtattacaagccatacaaactcctttgatgtatattttaatgaccttgattatatttaatgacttaggttctatatgaatcttccwtgtctttacttcactcattaaattaatcttattggagtgtcctgctaattctattaataatattaataattaattctattaataattctattaatattattaatagaatgaatagaaaagaattattttttacaatcttttaatgaaaatgatattttggaacaaagaacacaactgattatgccatatcatattcaaacataatttcccmaaatatgtgttaacattatccatataaatgtatggattaattcccactgttggtcttataactttatttacaggtaaagttacacttgtaccaatgcaatacagggctggaacttcaatwaaaaaaaagatattttgaatataagcccaaacttccaatactagaacatatattcttactgtttatattcctatctgcttgcattatctgaaggtagcatttggactcctctaggaaggatcatctctgccagctgatgagagtcacaaagtacaagcactgctcagatcaccaggccag

SEQ ID NO: 21838 - DNA, 557 bp, Chicken  19866894233583_3
ttggagtgtcctgctaattctattaataatattaataattaattctattaataattctattaatattattaatagaatgaatagaaaagaattattttttacaatcttttaatgaaaatgatattttggaacaaagaacacaactgattatgccatatcatattcaaacataatttcccmaaatatgtgttaacattatccatataaatgtatggattaattcccactgttggtcttataactttatttacaggtaaagttacacttgtaccaatgcaatacagggctggaacttcaatwaaaaaaaagatattttgaatataagcccaaacttccaatactagaacatatattcttactgtttatattcctatctgcttgcattatctgaaggtagcatttggactcctctaggaaggatcatctctgccagctgatgagagtcacaaagtacaagcactgctcagatcaccaggccaggaagagcctcagtctggctatgcaacacttgagcatgccattggatatgtcttagagagtgccccagatttccccag

SEQ ID NO: 21839 - DNA, 600 bp, Chicken  19866894233584_1
gctcaaaacccagccagtgctacaaagaatcatttgcccattattacaatgcctgcagtgcccaaatagcagaagatgccctggataaaaagcataccagggctgcactacagccttctgatcccgatcagcaaaatcatcaaagcacctccaagcacactttgttccttactgcagctccctgctgtgctcaggaggcacctggttcctcctccaccccttcctttgtgccctgcccaggtgcagagcaagaagccctctcactcagataccacaactcctggcagctgcctgcttcaktgccacctccagttcctggaaggggtatctgaaagcttggcacatcatttcctgcccccagtcagggattatagagcaaaagtatgtgtgaaaaataaaacaagaacacaaaggatttctgagctcagagatggctgccatttcaaacacttcagctgggaaaaggggcttccaagtgtaggacagcctgcagtgcctgagaggtttcacctccttggctcctgcaatggacacttgtgattatctgaacctacacaacagtctgggaaaagcaagagctacagtcttaactcygcatgc

SEQ ID NO: 21840 - DNA, 600 bp, Chicken  19866894233584_2
cttcaktgccacctccagttcctggaaggggtatctgaaagcttggcacatcatttcctgcccccagtcagggattatagagcaaaagtatgtgtgaaaaataaaacaagaacacaaaggatttctgagctcagagatggctgccatttcaaacacttcagctgggaaaaggggcttccaagtgtaggacagcctgcagtgcctgagaggtttcacctccttggctcctgcaatggacacttgtgattatctgaacctacacaacagtctgggaaaagcaagagctacagtcttaactcygcatgcaaatagcttcagggctgggagtttctagcactttaaagcacagtgggatgatttgaggaacctgggtaggaagaaatgaaaacaggcaggtttactcaaagttgtggagagaaaaagcaagcagaggacagagaaggggaggcagactctrcaactcattacagaaatcaacacagacacatttcattacaacctgttgcatttgaggaggacagcagcaccatggagtggctcattcagcttaatagtatactcccagatgaaacagaacttacccaggagatgaattcagcc

SEQ ID NO: 21841 - DNA, 600 bp, Chicken  19866894233584_3
tcagctgggaaaaggggcttccaagtgtaggacagcctgcagtgcctgagaggtttcacctccttggctcctgcaatggacacttgtgattatctgaacctacacaacagtctgggaaaagcaagagctacagtcttaactcygcatgcaaatagcttcagggctgggagtttctagcactttaaagcacagtgggatgatttgaggaacctgggtaggaagaaatgaaaacaggcaggtttactcaaagttgtggagagaaaaagcaagcagaggacagagaaggggaggcagactctrcaactcattacagaaatcaacacagacacatttcattacaacctgttgcatttgaggaggacagcagcaccatggagtggctcattcagcttaatagtatactcccagatgaaacagaacttacccaggagatgaattcagcctaatcagactcatcttagaagtgtaagttgatcaaatcatctccagtgcattcctgtcctgtgccttcctaaataactcagcacttaaaacagtaactttcaggacaacccaaccatggtgggcaaggaagacatttcagtttagcaatcagctgct

SEQ ID NO: 21842 - DNA, 600 bp, Chicken  19866894233587_1
gctttggttttaatttgagtggctttcttatttctggaactattctatgctttgccattgtgaaaaggcttctcaataaaacttgtctacatacgtgtgacatcttatgcatttctataatgcttagcagttaaaatatgaaactgattatataaatagagtacctttattgtatccttgggcagcatttcataatcctgttggatcaggcttcccgtggcaaaatctgcatcaacatactcataaaacttgggtgaatcttgctgtataggtggtgctggcttcaccaaaggtacaaaygcaaccaggaaaaaagcagcttgcaaagtcttcattttctcacggagcaatgtccttggcttgcactgagctgatggaggtctgctcgtgtgttgactgtggagratactttctttgtgactggaaatgaaaatgcaatccgtcaaaacaatatttaaagcctagagaagtagttggcagaagtttctaacgcataaggaacatggaacaacttttaactcttggtattctttaattagactgaagtattattaagggatgttgttaatgtggaatgaaactaggaaataataaacagcc

SEQ ID NO: 21843 - DNA, 600 bp, Chicken  19866894233587_2
tatgcatttctataatgcttagcagttaaaatatgaaactgattatataaatagagtacctttattgtatccttgggcagcatttcataatcctgttggatcaggcttcccgtggcaaaatctgcatcaacatactcataaaacttgggtgaatcttgctgtataggtggtgctggcttcaccaaaggtacaaaygcaaccaggaaaaaagcagcttgcaaagtcttcattttctcacggagcaatgtccttggcttgcactgagctgatggaggtctgctcgtgtgttgactgtggagratactttctttgtgactggaaatgaaaatgcaatccgtcaaaacaatatttaaagcctagagaagtagttggcagaagtttctaacgcataaggaacatggaacaacttttaactcttggtattctttaattagactgaagtattattaagggatgttgttaatgtggaatgaaactaggaaataataaacagccttttcgaactagttaagaaaatattatctgtctgcctatttgccagagtgctatttctgccaatagcagggagggttttataaagcattttatgaaacacttggc

SEQ ID NO: 21844 - DNA, 599 bp, Chicken  19866894233589_1
  misc_feature (1)..(91): n is any nucleotide
nnnnnnnnnnnnnnnnnnnnnnnnnnnnnnnnnnnnnnnnnnnnnnnnnnnnnnnnnnnnnnnnnnnnnnnnnnnnnnnnnnnnnnnnnnntgtttttttggccttcatcacattttaaacaactgacacagggaaagagccctattttaaatatatttgttgttaattcctccaaatttcatggcagcgccccaaggatgggctcagagctgaccaggtttccccctgactttgctctgtttgcaggcctccgtgcatcttctctgtagcttatcagatcacggtgccagatcagctcyctgccagctttgagaagctgcactcagttgtcagcagcttgtctgctaataggcacaactgttctccatcaaggctgcttgagcaaagcatctggaaatgtggaaattcggaggaaatctcgctggttcaacccaatggagaaaacccatgcagctttggaggatgaactgccaaactataaatatttatatagtaaatgcatatgcttgtgtggaaacgaagtgcttcgaaccctgtgagcaatcctccaaacctgttttgtgtatgtttcagtgcagaaaatacctctccaagtttt

SEQ ID NO: 21845 - DNA, 534 bp, Chicken  19866894233594_1
ctcttaactaagccagtcagtttgacagtgtgtttcccctagctgcacggtctagcagagtccacttaattggcaattttcttctgtttaacaaaaacagaaatatagctaagccacaaagaaaaagatttcactattgattaacagtggttggttttgctaagtaatctgacagacatttggaacacatcaactgtctcataccgctgtagccaagcatcttggagcacgatctgctctcctccacttttattacttgcagaagaagcaagctctgccaggatgttatttgaagggatrtctgccattttaatatgtagttacttggacaaaacttggtggaaacatactgcagtatctttgattttgcaaataggtaatcatatttgtttacagtaaaaaatgtgaatcattgctatgtttgggaaagtaaattaaaatatacagcacaagtcacaaaaaatgtgccattttgttgaactccacaagtactgaaatattgtatgggaaatactccaatttcacctttttttc

SEQ ID NO: 21846 - DNA, 600 bp, Chicken  19866894233595_1
ttgttttccgtgatatggcaaataactgtttttgtgtttgagtatgggaaaagaaatggtactgactgcaagctcttgtccactgaggaataagtgaggatggaaatgtgactttggaaagctttctcctaacctctataagattgtatggcctctttccataacttaacagagctagtcttgtgcaaggcagcacatacagggttaagccaatggctccagcttgaataaaaatgttctactacatactaaaaatctgcaagatactaatatcaaagtggttaaaaaggacaagtgggmtgtgtggaaaaagtttcgtggagrcagaaggaagaaaggcagttaggaagatagaaaagctgttaaagatttcaatttctctgcttgaagtmaaaatttgaagagatgattgatcttacattatttcaaattagatttaatttctgattaatctgttatttgatatcagtgcccagccaaagcaattatattaattcttttgagtgatactacaaaataaacctttccatttgatttgaaggagttaaatggtgtgtttgcactggaagacactatattaaagtgctgacagatgtccag

SEQ ID NO: 21847 - DNA, 600 bp, Chicken  19866894233595_2
actgtttttgtgtttgagtatgggaaaagaaatggtactgactgcaagctcttgtccactgaggaataagtgaggatggaaatgtgactttggaaagctttctcctaacctctataagattgtatggcctctttccataacttaacagagctagtcttgtgcaaggcagcacatacagggttaagccaatggctccagcttgaataaaaatgttctactacatactaaaaatctgcaagatactaatatcaaagtggttaaaaaggacaagtgggmtgtgtggaaaaagtttcgtggagrcagaaggaagaaaggcagttaggaagatagaaaagctgttaaagatttcaatttctctgcttgaagtmaaaatttgaagagatgattgatcttacattatttcaaattagatttaatttctgattaatctgttatttgatatcagtgcccagccaaagcaattatattaattcttttgagtgatactacaaaataaacctttccatttgatttgaaggagttaaatggtgtgtttgcactggaagacactatattaaagtgctgacagatgtccaggtctgctttcctctataattaaag

SEQ ID NO: 21848 - DNA, 600 bp, Chicken  19866894233595_3
agtgaggatggaaatgtgactttggaaagctttctcctaacctctataagattgtatggcctctttccataacttaacagagctagtcttgtgcaaggcagcacatacagggttaagccaatggctccagcttgaataaaaatgttctactacatactaaaaatctgcaagatactaatatcaaagtggttaaaaaggacaagtgggmtgtgtggaaaaagtttcgtggagrcagaaggaagaaaggcagttaggaagatagaaaagctgttaaagatttcaatttctctgcttgaagtmaaaatttgaagagatgattgatcttacattatttcaaattagatttaatttctgattaatctgttatttgatatcagtgcccagccaaagcaattatattaattcttttgagtgatactacaaaataaacctttccatttgatttgaaggagttaaatggtgtgtttgcactggaagacactatattaaagtgctgacagatgtccaggtctgctttcctctataattaaagcactacttgaataaaacctgaaaggttgttgccagatctcttctttcaaccttctttcattacatttg

SEQ ID NO: 21849 - DNA, 600 bp, Chicken  19866894233597_1
atggccctttgttcagctccaacgcctcctgcctactgaagacatcactaaactgagctttgcaggctcctggggaggtaggcaggattgttttcaggtatgtggataaggaagcagaagcacaggctggccaagtcacataagaaagccgtgcaaaagcaggaaattgaaccttaggtcacgtcatcctcagacctttgaattcttattctaatactgcccaaccgtgtctgtctgcatcctgagatgatgctcctgctgagcacagatgtgttctacatggaccactcagactcccakcctcacagtatgggctccttaggaaaggagaatgacagtgaattggaaagctcycattgcattgtgagtagctacagaatcatagaatcacagaaccagtcagggtggaaaagaccactaagatcccccagtccaaccccaacccatcccaccgtgcccactgaccacatccctcagtgccacatctccagtccttaaacacctccagggatggtgaccccaccacctccctgggcagctgtgccactgcatcactgcttttttcagagaagaagttgttcctaatatccaacctgaacc

SEQ ID NO: 21850 - DNA, 600 bp, Chicken  19866894233597_2
gagctttgcaggctcctggggaggtaggcaggattgttttcaggtatgtggataaggaagcagaagcacaggctggccaagtcacataagaaagccgtgcaaaagcaggaaattgaaccttaggtcacgtcatcctcagacctttgaattcttattctaatactgcccaaccgtgtctgtctgcatcctgagatgatgctcctgctgagcacagatgtgttctacatggaccactcagactcccakcctcacagtatgggctccttaggaaaggagaatgacagtgaattggaaagctcycattgcattgtgagtagctacagaatcatagaatcacagaaccagtcagggtggaaaagaccactaagatcccccagtccaaccccaacccatcccaccgtgcccactgaccacatccctcagtgccacatctccagtccttaaacacctccagggatggtgaccccaccacctccctgggcagctgtgccactgcatcactgcttttttcagagaagaagttgttcctaatatccaacctgaacctcccctggtgcaacttgaggccatcccctctcatagtatcaagaagaagccaac

SEQ ID NO: 21851 - DNA, 600 bp, Chicken  19866894233600_1
aagcagaactcgtatttctgagcttttttgccacatctcagttagatcacccttcctccagtctgttctgacatctccacctggcaagccatgaagatgctgtgttagctttcagctctgcacatgtacaagctaccaccaggcaggatttactacggtcagggtccatctgttactctctgcagaggatccacctggagtcactgttacttattacaggttttttgtgagacagataaggaaattgaggctcttcaaaacacctactctatataaaattctgcccaacgggttcaagcrtcatctacatgtactgaccttacgattggactccaagatgtaagaactttcttctttaactcgttccatctcttcttgcaatgtaatgatcctgttgtttgcaacagcaagctgtgagcaaaacagaacagtaatgtattaaaaacgtacttagcagattttttcttctctagacagactatcctgtacttgtttgctaacattcccagtaagaaaaataaatatttgaagtgaaagaggacaattcagcccttaacacagggacagaccaactgaaaaagtatcagccaataatgtaaa

SEQ ID NO: 21852 - DNA, 599 bp, Chicken  19866894233607_1
  misc_feature (1)..(120): n is any nucleotide
nnnnnnnnnnnnnnnnnnnnnnnnnnnnnnnnnnnnnnnnnnnnnnnnnnnnnnnnnnnnnnnnnnnnnnnnnnnnnnnnnnnnnnnnnnnnnnnnnnnnnnnnnnnnnnnnnnnnnnnnattgctggaaggaaaaagaaagctatgctctagacacatttgtttcctggctgtgctaatatagagcactgcgacactgacactgtaattaactttttgctacagtccttaatagacacacctaggaacagcaacacagtcacagctcacatcagtagctgaacaagcactgaacaaccycttgcttttagaaagctgctggaatgcttttaaacacaagtccagtagttttcagaggcagcaatttgtgtaaacattaatcagtgcaagattctctctttgcttctgtcaccagactaaccgtcttctggctaaggacaggatcctgtcagagcaaattaatgctgctcctgaattgctggatgcggtcttcagatagtaagaacaggaagaggtgactctgtctcaacctgttgccccgtgcaataaatattacaagttggcagacaaatgtcagtaaaattcacattagtatttta

SEQ ID NO: 21853 - DNA, 547 bp, Chicken  19866894233607_2
gaatgcttttaaacacaagtccagtagttttcagaggcagcaatttgtgtaaacattaatcagtgcaagattctctctttgcttctgtcaccagactaaccgtcttctggctaaggacaggatcctgtcagagcaaattaatgctgctcctgaattgctggatgcggtcttcagatagtaagaacaggaagaggtgactctgtctcaacctgttgccccgtgcaataaatattacaagttggcagacaaatgtcagtaaaattcacattagtattttagtttggaacaaaacaacacacrggaaaatacaaatttaagtatggcatagattcataccgatacctggagattcaaattcaacctttagcttctgcagttctgtaacattttgtcataacatcaagattaaggagctcaagttcaccccccaaaaatgcagtaccaatttagaacaagcactgtaatgcagaatgtgtagctgtatcagtttaaaagcgtcttaaaccagtatacattttcttgcacagaagcagcgagatgtacagat

SEQ ID NO: 21854 - DNA, 600 bp, Chicken  19866894233620_1
aaaaggacaggagggctcgtgtattgtaggccctccaggactgcctgggattactggcagaattggttctgctgggttgccaggtcctccgggagaaccaggtgatgtttcatcattgtatacacaatgtacaacaacaaatctagagtcatcccaatatctaattaatcagattatataaatacttaagaatagagtgtatattaagttatgcaacgtaatttttctttggaaatttcttcttagagcattcattaaaaagcatgcgaagcaaagatctgtgcttcattgttaatgaawttctggagagaggtattgtgacttcctagtataaaaatttctcacttttttctataactgtgactaaaagtctactatataatcacaggaaggactaatgagagaaaatctgttcttaagattaacttttccaamagctgcaggatttctgtaaaactaccttcrgaaagggctgttctataagttagaaagatcacacagataccttcttaggtgataccttctggacataagagctgatttgaagttctggcagcatgaaaacaaaatagtagtaaagtaatagatgaaccaattgac

SEQ ID NO: 21855 - DNA, 600 bp, Chicken  19866894233620_2
aacaaatctagagtcatcccaatatctaattaatcagattatataaatacttaagaatagagtgtatattaagttatgcaacgtaatttttctttggaaatttcttcttagagcattcattaaaaagcatgcgaagcaaagatctgtgcttcattgttaatgaawttctggagagaggtattgtgacttcctagtataaaaatttctcacttttttctataactgtgactaaaagtctactatataatcacaggaaggactaatgagagaaaatctgttcttaagattaacttttccaamagctgcaggatttctgtaaaactaccttcrgaaagggctgttctataagttagaaagatcacacagataccttcttaggtgataccttctggacataagagctgatttgaagttctggcagcatgaaaacaaaatagtagtaaagtaatagatgaaccaattgactagatgtggtttacaacacttttagaaagtgtattaaccaggagaacatctttaagaaccagcatcatgtttcctttataaatggtatggcttacacaagttcttttctgatgtaatgcttctcttttctctctt

SEQ ID NO: 21856 - DNA, 600 bp, Chicken  19866894233620_3
taatcagattatataaatacttaagaatagagtgtatattaagttatgcaacgtaatttttctttggaaatttcttcttagagcattcattaaaaagcatgcgaagcaaagatctgtgcttcattgttaatgaawttctggagagaggtattgtgacttcctagtataaaaatttctcacttttttctataactgtgactaaaagtctactatataatcacaggaaggactaatgagagaaaatctgttcttaagattaacttttccaamagctgcaggatttctgtaaaactaccttcrgaaagggctgttctataagttagaaagatcacacagataccttcttaggtgataccttctggacataagagctgatttgaagttctggcagcatgaaaacaaaatagtagtaaagtaatagatgaaccaattgactagatgtggtttacaacacttttagaaagtgtattaaccaggagaacatctttaagaaccagcatcatgtttcctttataaatggtatggcttacacaagttcttttctgatgtaatgcttctcttttctctcttaaagatatctatcctgcaaatatattgctc

SEQ ID NO: 21857 - DNA, 600 bp, Chicken  19866894233620_4
caaaatagtagtaaagtaatagatgaaccaattgactagatgtggtttacaacacttttagaaagtgtattaaccaggagaacatctttaagaaccagcatcatgtttcctttataaatggtatggcttacacaagttcttttctgatgtaatgcttctcttttctctcttaaagatatctatcctgcaaatatattgctcaatgtatcttctgttttttccagagtgatagtaaatacaccagaataattgtgacaaatatacttgaacaacattaatgatctacagttaaaataaaastttcctttctagttctagaaaagtaagagctatgtttctgttgattcaaataaaatgtaaatatttcccccagggactgtgctttttaaaggcacctccctggctagacagatggatccagcagcagcctgatgagatttgctttagctttgccatacttattctcaaatatttgaagttaaaggtgttttggacttgtccaggtagttctgtcttaaataaatactgacaccagctcatccttggacctttttttctgctttagcaaatggataattgtctgacgtattggtgccatgc

SEQ ID NO: 21858 - DNA, 599 bp, Chicken  19866894233624_1
  misc_feature (1)..(44): n is any nucleotide
nnnnnnnnnnnnnnnnnnnnnnnnnnnnnnnnnnnnnnnnnnnnctcctgtcgagcacgcaggctccagcttctgactctgcttcctcttgtctgctgtcctgttgcaactccctttccctcgtcagcctcaggaacaaggaaagtccagctctgattcatctgctgtggttctgaggaacatgaatcctcagctttcattttctggggatggagtgggatctgtttactcaaggatgtaaaatgaagtcatttttttcccatttatgccaacagcggaaaacgatttcaaagagaaagragtgggttcagatctggtctcagacaaaagctgaatgaactcagatcagaaytgaagtcaaacaaagcttctgggtggtttgaccataacagtgataagtccagacccacgttctctgcctccacaatcggaaactccagataactctctgttatggatagggctaaagcctataaatcccaatttcttatatttacttctggccacccaaattcaccccactaccactgttaggacaagattccaagagtcctgcccctggggcttgctcttatacattaggtcaactcctctcccag

SEQ ID NO: 21859 - DNA, 600 bp, Chicken  19866894233624_2
gagcacgcaggctccagcttctgactctgcttcctcttgtctgctgtcctgttgcaactccctttccctcgtcagcctcaggaacaaggaaagtccagctctgattcatctgctgtggttctgaggaacatgaatcctcagctttcattttctggggatggagtgggatctgtttactcaaggatgtaaaatgaagtcatttttttcccatttatgccaacagcggaaaacgatttcaaagagaaagragtgggttcagatctggtctcagacaaaagctgaatgaactcagatcagaaytgaagtcaaacaaagcttctgggtggtttgaccataacagtgataagtccagacccacgttctctgcctccacaatcggaaactccagataactctctgttatggatagggctaaagcctataaatcccaatttcttatatttacttctggccacccaaattcaccccactaccactgttaggacaagattccaagagtcctgcccctggggcttgctcttatacattaggtcaactcctctcccagagctgggaggggagccccagagtcctgctccagtcctttgacttcactctttg

SEQ ID NO: 21860 - DNA, 600 bp, Chicken  19866894233629_1
attgggccttgcctcacagcacccaactgctcacctccatggcaagaaggctcccactgtgatatgtggggtacttaacagtacggaacaccatgaatttccttttgaatgctatggactacgttatcttgctcataactgcgttacagctgaattatttcgcccataactgcattacagctgctaactggtgtcccatcccagatccacagcctcctggatccgacccttgctcccataaggacagcctttagaaaacaggaggcagccacgctctggtagctccaggccaaagatccwccgagagcccacgctcgcagaagaccacagcaattagagtccagcaaactgtaggattaagatacatcacttagggaacgggaaaataacggatgcttagtgatattaaagatactgaaaccattaggagatattcgcctcaaaggcatttgagttcacgtcctcccaacacagccaagaaacatggtgggccatgaacccttcgttccacctttggcacagaggatcccagttcagctccttgacttccttcaactcacaccccagcatcagattcaggatgaggtctcctgtagttct

SEQ ID NO: 21861 - DNA, 599 bp, Chicken  19866894233640_1
  misc_feature (1)..(108): n is any nucleotide
nnnnnnnnnnnnnnnnnnnnnnnnnnnnnnnnnnnnnnnnnnnnnnnnnnnnnnnnnnnnnnnnnnnnnnnnnnnnnnnnnnnnnnnnnnnnnnnnnnnnnnnnnnnncaagcttttcaaacctgatgcagaggcacctggtagagacaagaagaaatgtaacccttctcataggggtgacaagcaaatctgtggctctctggtgtaaggtgatgggctgcagtgcagtgtctgaatgcagtcatggttggagatggttcctaggggttgaacaaattagacatcctcgctgttgatgcygtagtgggatacaatgaagatcaagggtctgaggaactcaccctcagttaatggtattgctttcactgggtwatgaatatggcaaattaaaacaagttctgacatggggcattcaaaaacttggaataaaacacgtctaatagctcccatttataccaatgttttgccccaagttgttgaatggagtgatgtttgagtacttggctcttgttaccatctgttcttttcacctrtaagtgagcagggacctattttggctcataagaattgttttacycttctttgtccttgtagtatgc

SEQ ID NO: 21862 - DNA, 599 bp, Chicken  19866894233640_2
  misc_feature (1)..(36): n is any nucleotide
nnnnnnnnnnnnnnnnnnnnnnnnnnnnnnnnnnnncaagcttttcaaacctgatgcagaggcacctggtagagacaagaagaaatgtaacccttctcataggggtgacaagcaaatctgtggctctctggtgtaaggtgatgggctgcagtgcagtgtctgaatgcagtcatggttggagatggttcctaggggttgaacaaattagacatcctcgctgttgatgcygtagtgggatacaatgaagatcaagggtctgaggaactcaccctcagttaatggtattgctttcactgggtwatgaatatggcaaattaaaacaagttctgacatggggcattcaaaaacttggaataaaacacgtctaatagctcccatttataccaatgttttgccccaagttgttgaatggagtgatgtttgagtacttggctcttgttaccatctgttcttttcacctrtaagtgagcagggacctattttggctcataagaattgttttacycttctttgtccttgtagtatgccttcaaattccagtctgggcctacatttaataatatacagcgctacagcagcctgcagagaacagagctatg

SEQ ID NO: 21863 - DNA, 600 bp, Chicken  19866894233640_3
gaatgcagtcatggttggagatggttcctaggggttgaacaaattagacatcctcgctgttgatgcygtagtgggatacaatgaagatcaagggtctgaggaactcaccctcagttaatggtattgctttcactgggtwatgaatatggcaaattaaaacaagttctgacatggggcattcaaaaacttggaataaaacacgtctaatagctcccatttataccaatgttttgccccaagttgttgaatggagtgatgtttgagtacttggctcttgttaccatctgttcttttcacctrtaagtgagcagggacctattttggctcataagaattgttttacycttctttgtccttgtagtatgccttcaaattccagtctgggcctacatttaataatatacagcgctacagcagcctgcagagaacagagctatgatctgtattgcagggcttccaccagccttaacaggcaatgtacacacagccaacggagagcgtggtttcagctgctgggtggataccattaccctgttagagctgggacacaatgctaacaccagtgtcaccattcaggtttatcagagatcagccccgaag

SEQ ID NO: 21864 - DNA, 600 bp, Chicken  19866894233640_4
tagacatcctcgctgttgatgcygtagtgggatacaatgaagatcaagggtctgaggaactcaccctcagttaatggtattgctttcactgggtwatgaatatggcaaattaaaacaagttctgacatggggcattcaaaaacttggaataaaacacgtctaatagctcccatttataccaatgttttgccccaagttgttgaatggagtgatgtttgagtacttggctcttgttaccatctgttcttttcacctrtaagtgagcagggacctattttggctcataagaattgttttacycttctttgtccttgtagtatgccttcaaattccagtctgggcctacatttaataatatacagcgctacagcagcctgcagagaacagagctatgatctgtattgcagggcttccaccagccttaacaggcaatgtacacacagccaacggagagcgtggtttcagctgctgggtggataccattaccctgttagagctgggacacaatgctaacaccagtgtcaccattcaggtttatcagagatcagccccgaagaattacacctgtaggagctgcagtgtggtgcgctaaagcccata

SEQ ID NO: 21865 - DNA, 600 bp, Chicken  19866894233642_1
gtctgtaaataaagcagtgtttgattagcaggggctttctagtaagctatgcttttttgggtgggttagtagtggtcctaaatatttgcattaggaacatctgtaaaatgtgtttgtggtgtgcttgggcttaattatagagatgttattgccttcttgtgcctacgtgaggaacctgtccaaaggacaagttggttttcacaaaagactgctttaaaacattgcatgtgagccatattcatattcaagcgagcacctgaagggatttggtagtgatgtttatcactttcttgtgggaaygtgtcccttsaatctgcagtcactcagaagagacccctggctgacaccgagtgatcagtccgttccyamtgcaaagtactggcaggtaaaactgcagtgctctgtctgcagagtgcagcctttctaatagctagttgaaagagttgtttgtggaactcaatcagcttagttccagctcttacgtgggagagaggacatctgttattttcacaggatttccttcccgtgcctacgtaaatgctactcaattttgcaagactgttctgagaaggatcatctgaaaatcaaagctgatgccca

SEQ ID NO: 21866 - DNA, 600 bp, Chicken  19866894233642_2
aaagcagtgtttgattagcaggggctttctagtaagctatgcttttttgggtgggttagtagtggtcctaaatatttgcattaggaacatctgtaaaatgtgtttgtggtgtgcttgggcttaattatagagatgttattgccttcttgtgcctacgtgaggaacctgtccaaaggacaagttggttttcacaaaagactgctttaaaacattgcatgtgagccatattcatattcaagcgagcacctgaagggatttggtagtgatgtttatcactttcttgtgggaaygtgtcccttsaatctgcagtcactcagaagagacccctggctgacaccgagtgatcagtccgttccyamtgcaaagtactggcaggtaaaactgcagtgctctgtctgcagagtgcagcctttctaatagctagttgaaagagttgtttgtggaactcaatcagcttagttccagctcttacgtgggagagaggacatctgttattttcacaggatttccttcccgtgcctacgtaaatgctactcaattttgcaagactgttctgagaaggatcatctgaaaatcaaagctgatgcccatgttgaattt

SEQ ID NO: 21867 - DNA, 600 bp, Chicken  19866894233642_3
agtagtggtcctaaatatttgcattaggaacatctgtaaaatgtgtttgtggtgtgcttgggcttaattatagagatgttattgccttcttgtgcctacgtgaggaacctgtccaaaggacaagttggttttcacaaaagactgctttaaaacattgcatgtgagccatattcatattcaagcgagcacctgaagggatttggtagtgatgtttatcactttcttgtgggaaygtgtcccttsaatctgcagtcactcagaagagacccctggctgacaccgagtgatcagtccgttccyamtgcaaagtactggcaggtaaaactgcagtgctctgtctgcagagtgcagcctttctaatagctagttgaaagagttgtttgtggaactcaatcagcttagttccagctcttacgtgggagagaggacatctgttattttcacaggatttccttcccgtgcctacgtaaatgctactcaattttgcaagactgttctgagaaggatcatctgaaaatcaaagctgatgcccatgttgaatttatttttttaccaggctgatgttctttagcacaaaagrattccatcctgttgctgtgc

SEQ ID NO: 21868 - DNA, 600 bp, Chicken  19866894233642_4
tagtggtcctaaatatttgcattaggaacatctgtaaaatgtgtttgtggtgtgcttgggcttaattatagagatgttattgccttcttgtgcctacgtgaggaacctgtccaaaggacaagttggttttcacaaaagactgctttaaaacattgcatgtgagccatattcatattcaagcgagcacctgaagggatttggtagtgatgtttatcactttcttgtgggaaygtgtcccttsaatctgcagtcactcagaagagacccctggctgacaccgagtgatcagtccgttccyamtgcaaagtactggcaggtaaaactgcagtgctctgtctgcagagtgcagcctttctaatagctagttgaaagagttgtttgtggaactcaatcagcttagttccagctcttacgtgggagagaggacatctgttattttcacaggatttccttcccgtgcctacgtaaatgctactcaattttgcaagactgttctgagaaggatcatctgaaaatcaaagctgatgcccatgttgaatttatttttttaccaggctgatgttctttagcacaaaagrattccatcctgttgctgtgcca

SEQ ID NO: 21869 - DNA, 512 bp, Chicken  19866894233642_5
cgagtgatcagtccgttccyamtgcaaagtactggcaggtaaaactgcagtgctctgtctgcagagtgcagcctttctaatagctagttgaaagagttgtttgtggaactcaatcagcttagttccagctcttacgtgggagagaggacatctgttattttcacaggatttccttcccgtgcctacgtaaatgctactcaattttgcaagactgttctgagaaggatcatctgaaaatcaaagctgatgcccatgttgaatttatttttttaccaggctgatgttctttagcacaaaagrattccatcctgttgctgtgccaggagcctcatcataaaaatttaactttgcttgtggtagtcctactaattaacaccctgggttctctgggaatggggtcggtaggtaagactggggtgtgttctgttgacagccactaccttcacttgcctcaggtattgcaatctggcaacatctgtttcactagcagaaaggattacacctacgtgcct

SEQ ID NO: 21870 - DNA, 600 bp, Chicken  19866894233652_1
agctggctgccaaccttgagatctgcaccagggcaatggacgaagtctgtgaactccttgagtccaggacagagctttccccacggatgaggaaactcagcttgggggctagaaccactactgagaccccaagaccatccagctgaaacagtagttgccctataatgaaaccaggcttgaaaacactacgtaattctcaccattagcactgctacctgttgctgttgtaatattgatggtgctcgtccacatagatgcacacagctcttgtgccttatttatatctgaacacaaaactcyccctgatagcaagacagagttacatacatacacatacacagatacaccccactgcctcacagcagccccctggctcaagatagaggtcatgagggacacgtggactactgggtaygtggcagcagatccaggagccagaatgcagggataggcggccattcctcagttccatgtttccccatcctcctccatgactctgcttcctcatgtagcagaaaaaagcaggtcagcagagtgatgaaatccctgcagtcttggtgctgactgaccctggcttgtggataactcgtgaatctatga

SEQ ID NO: 21871 - DNA, 600 bp, Chicken  19866894233652_2
cactactgagaccccaagaccatccagctgaaacagtagttgccctataatgaaaccaggcttgaaaacactacgtaattctcaccattagcactgctacctgttgctgttgtaatattgatggtgctcgtccacatagatgcacacagctcttgtgccttatttatatctgaacacaaaactcyccctgatagcaagacagagttacatacatacacatacacagatacaccccactgcctcacagcagccccctggctcaagatagaggtcatgagggacacgtggactactgggtaygtggcagcagatccaggagccagaatgcagggataggcggccattcctcagttccatgtttccccatcctcctccatgactctgcttcctcatgtagcagaaaaaagcaggtcagcagagtgatgaaatccctgcagtcttggtgctgactgaccctggcttgtggataactcgtgaatctatgaatgctgaaggggctgtgataccctcaaagagccaccagccaccagcttccagtagagcacagccccgttaccaaggtacatctgggaaggctgttgaaaggagcagccccggata

SEQ ID NO: 21872 - DNA, 600 bp, Chicken  19866894233656_1
gctctcctgtggtttccgtggactaacgaacctctctgcacacccaggagccccgagcagtgatggtgaggtaggatgtctgctctgcctttgacaaaaaggggtgaaggcacggagaccaagaaaggttctgttgctgcggtgggatgtgagctacaaaggtgtgggtgctgttggagtgggaatagtgattaacggtgctcattagcagtatttctgcagaagtgtaacattctccagtggaaattacccctcacctgcctctgcagcacaccagtgatgatggtgactctccttgcrccgggaaacactgtgttggcagtttcattaacgtgattattaaggcagccatggtgaggctggcggtgctgagcacagcccaggaggggttatccctgctgggaacagaatgttatttatggcttgttattagatctgtatctcgcattaccttgttagcaatgctgcgttaatggctgcttatctctgcgtttgctgtagcagagcgcgctttgctttgctgatagcgagcatcccaaggccttgctgctcactctccaatgctgctccatcccatcttatagaagggtatataggaag

SEQ ID NO: 21873 - DNA, 600 bp, Chicken  19866894233658_1
ttttgatcaaactagcaaaaaaaccaaaccaaaacaaaaaaaatctgtctccctctctgaactgccccacgattttggattctcaaaactgtcctggaaagctcataagaacaagctttctcatgatgtgagactcctggtatttcctgcttctagtttggctagacgtgctgcaacagttgcttttctcatggtatttgggtgtagcagttcactctaaatggaaggcctagacccagatgcccgcagcttttaagacactgagaaactgagtccaagtaagagctcagtgtgccaaayggttccaacctcaataatcaatcccgtgtagtgtgaagttgttcaagctctagatttagaaatcttgactctcaaatgttagcgtaagagcccaacaggaaagacgtagtatggagaaagattaaaatataaacaatttaggttgaaaattagctaagcaaagcgtgattttggccatgttctctcttgacttgaygctcaagatktgagggagcatgtgaattgttttcagttcaggtagcaccacccacccgctccaagtggaatcagagcagtcctttttgctaaattcagcagaaa

SEQ ID NO: 21874 - DNA, 600 bp, Chicken  19866894233658_2
tttgggtgtagcagttcactctaaatggaaggcctagacccagatgcccgcagcttttaagacactgagaaactgagtccaagtaagagctcagtgtgccaaayggttccaacctcaataatcaatcccgtgtagtgtgaagttgttcaagctctagatttagaaatcttgactctcaaatgttagcgtaagagcccaacaggaaagacgtagtatggagaaagattaaaatataaacaatttaggttgaaaattagctaagcaaagcgtgattttggccatgttctctcttgacttgaygctcaagatktgagggagcatgtgaattgttttcagttcaggtagcaccacccacccgctccaagtggaatcagagcagtcctttttgctaaattcagcagaaactgaattggcctgtaattcaggaaggcactgagacaagggaaaacacttyttctgatgtcttcctctggagtgggacataatggttttctgttcctgtgctaatcaatcacagttctggcattaaaattagtaggagaattattggacctgaaagctgtgaaatatttctttaatatcttgttttatcatcttttt

SEQ ID NO: 21875 - DNA, 600 bp, Chicken  19866894233658_3
gcagttcactctaaatggaaggcctagacccagatgcccgcagcttttaagacactgagaaactgagtccaagtaagagctcagtgtgccaaayggttccaacctcaataatcaatcccgtgtagtgtgaagttgttcaagctctagatttagaaatcttgactctcaaatgttagcgtaagagcccaacaggaaagacgtagtatggagaaagattaaaatataaacaatttaggttgaaaattagctaagcaaagcgtgattttggccatgttctctcttgacttgaygctcaagatktgagggagcatgtgaattgttttcagttcaggtagcaccacccacccgctccaagtggaatcagagcagtcctttttgctaaattcagcagaaactgaattggcctgtaattcaggaaggcactgagacaagggaaaacacttyttctgatgtcttcctctggagtgggacataatggttttctgttcctgtgctaatcaatcacagttctggcattaaaattagtaggagaattattggacctgaaagctgtgaaatatttctttaatatcttgttttatcatctttttgcataaggga

SEQ ID NO: 21876 - DNA, 600 bp, Chicken  19866894233658_4
tagatttagaaatcttgactctcaaatgttagcgtaagagcccaacaggaaagacgtagtatggagaaagattaaaatataaacaatttaggttgaaaattagctaagcaaagcgtgattttggccatgttctctcttgacttgaygctcaagatktgagggagcatgtgaattgttttcagttcaggtagcaccacccacccgctccaagtggaatcagagcagtcctttttgctaaattcagcagaaactgaattggcctgtaattcaggaaggcactgagacaagggaaaacacttyttctgatgtcttcctctggagtgggacataatggttttctgttcctgtgctaatcaatcacagttctggcattaaaattagtaggagaattattggacctgaaagctgtgaaatatttctttaatatcttgttttatcatctttttgcataagggagccaagctgcattaatggttttctcaaatgtgtgcatattaccataaatcctgctagcttctgaaatgctatttcctaacctattattttttaaactatattgttttaatagtagttttctcagcaatttcaattaagatgtaa

SEQ ID NO: 21877 - DNA, 599 bp, Chicken  19866894233665_1
  misc_feature (1)..(145): n is any nucleotide
nnnnnnnnnnnnnnnnnnnnnnnnnnnnnnnnnnnnnnnnnnnnnnnnnnnnnnnnnnnnnnnnnnnnnnnnnnnnnnnnnnnnnnnnnnnnnnnnnnnnnnnnnnnnnnnnnnnnnnnnnnnnnnnnnnnnnnnnnnnnnnnnnatgaggctgtgaagaactggaggtgatttttatatgtaatatgtgttttacatacaccttttggggtggggtgaaggaagttaagagagaagtgagcatcccccattggctccccttcctttactcccaacctgggagtagccgagctgtccttyctccggggcaggcagaaaaccaaattctcacaaatgggtgattccaccttcttttccattttctctcatttactacagagttttagcaccgctggttaagttagctggggaaaaatggaagaaaaatcctggtttagaaggaaaaaccctccagattcccccatttcatcattttctcagagactgacaggtaatttatgtccaggcaaagcactgagatgttgccagggcaactcaccttccccatgaaggctgcaacctcagaaacagagctgagagaaagcaaggcaggaagggat

SEQ ID NO: 21878 - DNA, 600 bp, Chicken  19866894233665_2
ccaaattctcacaaatgggtgattccaccttcttttccattttctctcatttactacagagttttagcaccgctggttaagttagctggggaaaaatggaagaaaaatcctggtttagaaggaaaaaccctccagattcccccatttcatcattttctcagagactgacaggtaatttatgtccaggcaaagcactgagatgttgccagggcaactcaccttccccatgaaggctgcaacctcagaaacagagctgagagaaagcaaggcaggaagggatcctctgaagttttgaagcaytggatgtattttgtctgtgtcctttcattctggaacagtcagggagtgatttttgtgttgtcaaagccatgggaaggacaaagtgaagatccttaccagggcaaagctctacagcaaagctcaagctctccagtgctccaggtgggttgggatggacagggcaggatgaagtggtgctggagagctctgctgttgccatgctgctctcaagtcttcagtgagcttttttactgtatcatcgttagaaaatgggttgggaaatccagtacatgcaggaataaaaagcagcagttggtagaa

SEQ ID NO: 21879 - DNA, 599 bp, Chicken  19866894233673_1
  misc_feature (1)..(77): n is any nucleotide
nnnnnnnnnnnnnnnnnnnnnnnnnnnnnnnnnnnnnnnnnnnnnnnnnnnnnnnnnnnnnnnnnnnnnnnnnnnnntcatctgtgggaagcagctagacagctttgctctctggctgcaacacagtctcacccagtcatatgcatagcatctgcaacccctttgtccgtctgccagtacacctacacacagaaggaaagcccaagaaaattagattcccttgggtttccctaggaatgcatttatagaagattaatgtaggaaactgggttagctagaagtggtgggaggaaggaagaygatgttgtggctcaagactcaagagatctagcactaatttagctccttcactgctccttgagtgactttgagcaagtcacgtagtatcatcaggctttggctctctgtctctatgttgagtcacttctttcttaaactttgtccagactggtgtttgaattagcagggcttgatgcaagacataagtgaactcacgtaattataaagaggtctgtaagttatttaactgtgtgatttaaaggaaaatattkttcgaatgtgttttaatcagtgacaaaatgcaatattcagcactttct

SEQ ID NO: 21880 - DNA, 600 bp, Chicken  19866894233673_2
attaatgtaggaaactgggttagctagaagtggtgggaggaaggaagaygatgttgtggctcaagactcaagagatctagcactaatttagctccttcactgctccttgagtgactttgagcaagtcacgtagtatcatcaggctttggctctctgtctctatgttgagtcacttctttcttaaactttgtccagactggtgtttgaattagcagggcttgatgcaagacataagtgaactcacgtaattataaagaggtctgtaagttatttaactgtgtgatttaaaggaaaatattkttcgaatgtgttttaatcagtgacaaaatgcaatattcagcactttctatamgcacaatgacgttcagatggaaaccagggaaatttaaaatgcaatctataaaaaatatattactaggtcacagactatgacttttagaggaccaaaaatcaatgaactgaataattattgcatttttaaaatcatgacatagtgatcagactaccagaacatggctgaattttacttgctgatagaaaaccaatgaagtttgcacatgaaaatcctcttccacaagttgctacaaaagactaaactgt

SEQ ID NO: 21881 - DNA, 600 bp, Chicken  19866894233673_3
gttgtggctcaagactcaagagatctagcactaatttagctccttcactgctccttgagtgactttgagcaagtcacgtagtatcatcaggctttggctctctgtctctatgttgagtcacttctttcttaaactttgtccagactggtgtttgaattagcagggcttgatgcaagacataagtgaactcacgtaattataaagaggtctgtaagttatttaactgtgtgatttaaaggaaaatattkttcgaatgtgttttaatcagtgacaaaatgcaatattcagcactttctatamgcacaatgacgttcagatggaaaccagggaaatttaaaatgcaatctataaaaaatatattactaggtcacagactatgacttttagaggaccaaaaatcaatgaactgaataattattgcatttttaaaatcatgacatagtgatcagactaccagaacatggctgaattttacttgctgatagaaaaccaatgaagtttgcacatgaaaatcctcttccacaagttgctacaaaagactaaactgtagagctgtctgggacaaaggaatgtaagtaacagttggacggcttcaatagt

SEQ ID NO: 21882 - DNA, 600 bp, Chicken  19866894233675_1
ttaatgtgttaaaaggtcattaaatccctaagtggatgcttcttactctgtattaaagtgtttcagcgcaggcagactacccaactagctgtttttgccctctcttccctgtgtgtgtgggcaagctgtaactttgttgctgaagatgaaagctgatttttaataaatcatgtccactaaattgcactttctcgctttgtgatattagaagaaagttttcccatgacactaacaccattcaatagtttaatcatcaggtctgcctttagacttgaattgttggactgtgatgattttctrataaactaatgtgctttctgtgttgaaaaacactgtttataggtaaagttctttggaatttttggccaaatatatatttcttaaaaaaaaaaagagttttaatatattgatcagtatttctaatagcttaataatatggtatttgggataggcagcaggggacttcattttgatagctttaattgacttgcaggcttagtctgttgaaaacttccagctattatttgtgggcgtaaatcattgtaagttgactacatatttaaagccagttgtatttttagatcaattagatccttcagt

SEQ ID NO: 21883 - DNA, 600 bp, Chicken  19866894233675_2
acttcattttgatagctttaattgacttgcaggcttagtctgttgaaaacttccagctattatttgtgggcgtaaatcattgtaagttgactacatatttaaagccagttgtatttttagatcaattagatccttcagtgaaattgattgtttcaactgttctcttcctcagtctgaagcgtgtgtataaaggatgttgggaataatggatttttttttttaatgacattacaagtgtcattgaaaatattggtaggaatcctaaactagatgtctcggtgtcacttaacttcctgactkgaaaatttttgcagtgaatgatggagttaatcaattccatcatgggcagacatatgaatatgtgttgaaatagcagagaatatttccctttactgactgtcctctgygtttaatagggagcatagataagagctgtggtgcatttgtgtgaaagagttctgtacagacttcaaggtatttaaaataagcctaatattcagcatgaacattcttcatgccagtaagccctgtcatttctcttcttttcaaaaaacaactcgtatttggtaaactttctatgtattacctgaatggtaggtg

SEQ ID NO: 21884 - DNA, 600 bp, Chicken  19866894233675_3
gttgtatttttagatcaattagatccttcagtgaaattgattgtttcaactgttctcttcctcagtctgaagcgtgtgtataaaggatgttgggaataatggatttttttttttaatgacattacaagtgtcattgaaaatattggtaggaatcctaaactagatgtctcggtgtcacttaacttcctgactkgaaaatttttgcagtgaatgatggagttaatcaattccatcatgggcagacatatgaatatgtgttgaaatagcagagaatatttccctttactgactgtcctctgygtttaatagggagcatagataagagctgtggtgcatttgtgtgaaagagttctgtacagacttcaaggtatttaaaataagcctaatattcagcatgaacattcttcatgccagtaagccctgtcatttctcttcttttcaaaaaacaactcgtatttggtaaactttctatgtattacctgaatggtaggtggttatttacaactcctctctcaagagagaaacaatctgatatgttttgttacttggtttaaatccagtattcatggtgtagtttatcaaattacattctggggatag

SEQ ID NO: 21885 - DNA, 600 bp, Chicken  19866894233675_4
gagaaacaatctgatatgttttgttacttggtttaaatccagtattcatggtgtagtttatcaaattacattctggggataggtattttttgaaacaaaaattacaggaatttgtcttgtaaaaatggttgtgtttgttctggaaaatggagagaacctgagtagtcttctaagagcatcaagaaaggtcctaggaaccattaggaatacaaataggaaagtaatattgagctattgtagcaatgaactaatttgagggggcttttggtagtagaaaaactatctgctttccaaaacacrttacttggagtatcaccatattacagccgtgatggaattatcaaatgatttgttagccggctttctttagtatcagcactgtatattctcctactactagcaagtttaggtctggaggttttcattgtctaaaacctccgaaaatcatcagtctgggtcctttctcttaggggtaattgatagccagcgtgtactctgtcagattccccttgtggtacaatttgaccagaaccaagtatgaccacgattacatttctaacccagaccatgcaatctgaaattgatgcccttttatgctgc

SEQ ID NO: 21886 - DNA, 600 bp, Chicken  19866894233684_1
aggtctcgagtaaggtactgtgctgcgatggaggagagttgttttcagatccagttctcatcgcatatgggaaccatttcagtctgggtcaaaagcatgttgaaatccttaggaagaattcagtgcatgtgaattagagccatcatgactatgttatgctgttagcagtggggaagtcaaggaagagaatgattcttccactttttacttatcagaggctcatttacatagaaaatctgtgcactgggtgcaaagtcaaatacagttaaactctggcaaatcatgaatttataacccttmaacagttgctctttaattgtctccttacacgtgtttagtccactccaattacactgcaaatgagtcagcttaaatctctgcaaacggggaatgagattctctccatcccagacagaaatatcatgtcgagcaacaaatttgtttgacaccaagttcctgaaaaatggcttagtggcacatggtttgtgaaaaccttatgtttaatgagtaaatagagacaactgagtttcgattcagtagtatgcaatgcttatgaggagatttcaaagtaaagacatcattaaagatgtagtgatatat

SEQ ID NO: 21887 - DNA, 600 bp, Chicken  19866894233686_1
acataatgaagagtgtaaatgctgtttttttggttgcctttccccccctcctcttatcttaaagagaacacaaatacaaacaagctactgaatatgaagaaactaggaaggcagcttttcctctcccacacactgtgaactaagcatgaattattaccacctaagactgctgtttttacccccgtgctttggagcaagttattttctcagtgcgagctgcttctgggcaggaaaaaaatcaactttactctcactccagaaacacgtgccacattcagaaatagtactacatccagtaaygtaacgccgagtggctcaccagggtgcggacggttccttgagtgaactggagccactgctggaaccagcatggtaaggraactgctgggctcckaaaaggtgaactgatggcragctttgggactgcagctggggagagatggcataatgagagtcacaaagaaatattttaaayggtgaccgcacttgaggtagcaacagaataaatgtggtcaccaaaaatttgacacaatttaatcatgttaaccactgtttcctaaggctagcttttttaggtggctctttcccttctgttttgtt

SEQ ID NO: 21888 - DNA, 600 bp, Chicken  19866894233686_2
acaagctactgaatatgaagaaactaggaaggcagcttttcctctcccacacactgtgaactaagcatgaattattaccacctaagactgctgtttttacccccgtgctttggagcaagttattttctcagtgcgagctgcttctgggcaggaaaaaaatcaactttactctcactccagaaacacgtgccacattcagaaatagtactacatccagtaaygtaacgccgagtggctcaccagggtgcggacggttccttgagtgaactggagccactgctggaaccagcatggtaaggraactgctgggctcckaaaaggtgaactgatggcragctttgggactgcagctggggagagatggcataatgagagtcacaaagaaatattttaaayggtgaccgcacttgaggtagcaacagaataaatgtggtcaccaaaaatttgacacaatttaatcatgttaaccactgtttcctaaggctagcttttttaggtggctctttcccttctgttttgttatgtaatgtttgcactcacccaggccaaccgtgtctgaccacagcaaatctcacccgycagcttctgggaacgagttgt

SEQ ID NO: 21889 - DNA, 600 bp, Chicken  19866894233686_3
tgaagaaactaggaaggcagcttttcctctcccacacactgtgaactaagcatgaattattaccacctaagactgctgtttttacccccgtgctttggagcaagttattttctcagtgcgagctgcttctgggcaggaaaaaaatcaactttactctcactccagaaacacgtgccacattcagaaatagtactacatccagtaaygtaacgccgagtggctcaccagggtgcggacggttccttgagtgaactggagccactgctggaaccagcatggtaaggraactgctgggctcckaaaaggtgaactgatggcragctttgggactgcagctggggagagatggcataatgagagtcacaaagaaatattttaaayggtgaccgcacttgaggtagcaacagaataaatgtggtcaccaaaaatttgacacaatttaatcatgttaaccactgtttcctaaggctagcttttttaggtggctctttcccttctgttttgttatgtaatgtttgcactcacccaggccaaccgtgtctgaccacagcaaatctcacccgycagcttctgggaacgagttgttctagacattgatgc

SEQ ID NO: 21890 - DNA, 600 bp, Chicken  19866894233686_4
gcttttcctctcccacacactgtgaactaagcatgaattattaccacctaagactgctgtttttacccccgtgctttggagcaagttattttctcagtgcgagctgcttctgggcaggaaaaaaatcaactttactctcactccagaaacacgtgccacattcagaaatagtactacatccagtaaygtaacgccgagtggctcaccagggtgcggacggttccttgagtgaactggagccactgctggaaccagcatggtaaggraactgctgggctcckaaaaggtgaactgatggcragctttgggactgcagctggggagagatggcataatgagagtcacaaagaaatattttaaayggtgaccgcacttgaggtagcaacagaataaatgtggtcaccaaaaatttgacacaatttaatcatgttaaccactgtttcctaaggctagcttttttaggtggctctttcccttctgttttgttatgtaatgtttgcactcacccaggccaaccgtgtctgaccacagcaaatctcacccgycagcttctgggaacgagttgttctagacattgatgcacygagtttttgcacgttt

SEQ ID NO: 21891 - DNA, 600 bp, Chicken  19866894233686_5
ttacccccgtgctttggagcaagttattttctcagtgcgagctgcttctgggcaggaaaaaaatcaactttactctcactccagaaacacgtgccacattcagaaatagtactacatccagtaaygtaacgccgagtggctcaccagggtgcggacggttccttgagtgaactggagccactgctggaaccagcatggtaaggraactgctgggctcckaaaaggtgaactgatggcragctttgggactgcagctggggagagatggcataatgagagtcacaaagaaatattttaaayggtgaccgcacttgaggtagcaacagaataaatgtggtcaccaaaaatttgacacaatttaatcatgttaaccactgtttcctaaggctagcttttttaggtggctctttcccttctgttttgttatgtaatgtttgcactcacccaggccaaccgtgtctgaccacagcaaatctcacccgycagcttctgggaacgagttgttctagacattgatgcacygagtttttgcacgtttaagtggcacaacttcagctgtaatatgcacgtgggcttttcttttaatcagctgaaagactg

SEQ ID NO: 21892 - DNA, 600 bp, Chicken  19866894233686_6
ctggaaccagcatggtaaggraactgctgggctcckaaaaggtgaactgatggcragctttgggactgcagctggggagagatggcataatgagagtcacaaagaaatattttaaayggtgaccgcacttgaggtagcaacagaataaatgtggtcaccaaaaatttgacacaatttaatcatgttaaccactgtttcctaaggctagcttttttaggtggctctttcccttctgttttgttatgtaatgtttgcactcacccaggccaaccgtgtctgaccacagcaaatctcacccgycagcttctgggaacgagttgttctagacattgatgcacygagtttttgcacgtttaagtggcacaacttcagctgtaatatgcacgtgggcttttcttttaatcagctgaaagactgtcctgctattcatcctcttggtcattagatgtattttctctgttctctctgactacaccgtcattccagggaatgatgataaactgtctcgctagagtttataaatcagcacgtttcatcttgtcagcaatgggagctgtctccagatggagagatgctcttcccacagtgtgcaagccgcta

SEQ ID NO: 21893 - DNA, 600 bp, Chicken  19866894233686_7
aggtgaactgatggcragctttgggactgcagctggggagagatggcataatgagagtcacaaagaaatattttaaayggtgaccgcacttgaggtagcaacagaataaatgtggtcaccaaaaatttgacacaatttaatcatgttaaccactgtttcctaaggctagcttttttaggtggctctttcccttctgttttgttatgtaatgtttgcactcacccaggccaaccgtgtctgaccacagcaaatctcacccgycagcttctgggaacgagttgttctagacattgatgcacygagtttttgcacgtttaagtggcacaacttcagctgtaatatgcacgtgggcttttcttttaatcagctgaaagactgtcctgctattcatcctcttggtcattagatgtattttctctgttctctctgactacaccgtcattccagggaatgatgataaactgtctcgctagagtttataaatcagcacgtttcatcttgtcagcaatgggagctgtctccagatggagagatgctcttcccacagtgtgcaagccgctactcccccactctccttccatgtgtagccacagaaacagg

SEQ ID NO: 21894 - DNA, 600 bp, Chicken  19866894233688_1
ggctggctctgtcttttttgctcccctagcaagtgtctatacacatagatgagatccacccccaagatctcttgcttctgggctaaactgaccccagttctctcagcttcacctgctacgtgtccaaacccataattgtctttgtggtgctttgggctatctccactatgtccatatttctcatgtactggggagcctgagacttgaaccagcactccaggttcatctcagcagtgttgagaagacaggaaggattatgtcctttgatctgcaagcagtgctctctgtaacagagcccargagaggttggccatctrtggcacaaggcccactgcttactcatggccaatttgatgcccagcaggaacaccacatcctttcttgatawgctttgctttacgtgtctggaagtgaaaactgactgtcctgtccagagttaaattcacatgcaagtaatggcaaaactgaaagaatcattttccacaccaacatcagacagctcttcattccttaatgtaatggaaatattgattagcagagctactactgcaatttccttgctcggtttctccctgcaatatggcaaaatcacttcagaat

SEQ ID NO: 21895 - DNA, 600 bp, Chicken  19866894233688_2
ttgctcccctagcaagtgtctatacacatagatgagatccacccccaagatctcttgcttctgggctaaactgaccccagttctctcagcttcacctgctacgtgtccaaacccataattgtctttgtggtgctttgggctatctccactatgtccatatttctcatgtactggggagcctgagacttgaaccagcactccaggttcatctcagcagtgttgagaagacaggaaggattatgtcctttgatctgcaagcagtgctctctgtaacagagcccargagaggttggccatctrtggcacaaggcccactgcttactcatggccaatttgatgcccagcaggaacaccacatcctttcttgatawgctttgctttacgtgtctggaagtgaaaactgactgtcctgtccagagttaaattcacatgcaagtaatggcaaaactgaaagaatcattttccacaccaacatcagacagctcttcattccttaatgtaatggaaatattgattagcagagctactactgcaatttccttgctcggtttctccctgcaatatggcaaaatcacttcagaatactactgtttaaaattc

SEQ ID NO: 21896 - DNA, 600 bp, Chicken  19866894233688_3
tgaccccagttctctcagcttcacctgctacgtgtccaaacccataattgtctttgtggtgctttgggctatctccactatgtccatatttctcatgtactggggagcctgagacttgaaccagcactccaggttcatctcagcagtgttgagaagacaggaaggattatgtcctttgatctgcaagcagtgctctctgtaacagagcccargagaggttggccatctrtggcacaaggcccactgcttactcatggccaatttgatgcccagcaggaacaccacatcctttcttgatawgctttgctttacgtgtctggaagtgaaaactgactgtcctgtccagagttaaattcacatgcaagtaatggcaaaactgaaagaatcattttccacaccaacatcagacagctcttcattccttaatgtaatggaaatattgattagcagagctactactgcaatttccttgctcggtttctccctgcaatatggcaaaatcacttcagaatactactgtttaaaattcagacagctggctgataggaatttatcaaactgcacatttaagtgaattatgaatgyggggccaagcctctc

SEQ ID NO: 21897 - DNA, 600 bp, Chicken  19866894233688_4
atcctttcttgatawgctttgctttacgtgtctggaagtgaaaactgactgtcctgtccagagttaaattcacatgcaagtaatggcaaaactgaaagaatcattttccacaccaacatcagacagctcttcattccttaatgtaatggaaatattgattagcagagctactactgcaatttccttgctcggtttctccctgcaatatggcaaaatcacttcagaatactactgtttaaaattcagacagctggctgataggaatttatcaaactgcacatttaagtgaattatgaatgyggggccaagcctctcattcaggmgtcactcataagagatattgccatacctgctaagtcaggaacctgctgcttatttaatgtcaacacttaaagacaaagaaatgatggattttagtgcttcgtggacaaaaacttttggtgataaaatattgttttaaattgttaactgaaatggtaatggctaccagggaaaacttaacaatgacaagcgaggtgagcggctaccagccagatgtgggtattgctgaaagagaggttaattgtgttgcagtattgacaatggctgagagacagttat

SEQ ID NO: 21898 - DNA, 600 bp, Chicken  19866894233688_5
ttacgtgtctggaagtgaaaactgactgtcctgtccagagttaaattcacatgcaagtaatggcaaaactgaaagaatcattttccacaccaacatcagacagctcttcattccttaatgtaatggaaatattgattagcagagctactactgcaatttccttgctcggtttctccctgcaatatggcaaaatcacttcagaatactactgtttaaaattcagacagctggctgataggaatttatcaaactgcacatttaagtgaattatgaatgyggggccaagcctctcattcaggmgtcactcataagagatattgccatacctgctaagtcaggaacctgctgcttatttaatgtcaacacttaaagacaaagaaatgatggattttagtgcttcgtggacaaaaacttttggtgataaaatattgttttaaattgttaactgaaatggtaatggctaccagggaaaacttaacaatgacaagcgaggtgagcggctaccagccagatgtgggtattgctgaaagagaggttaattgtgttgcagtattgacaatggctgagagacagttatcgtattatcacgtgttatcatat

SEQ ID NO: 21899 - DNA, 600 bp, Chicken  19866894233688_6
aagaatcattttccacaccaacatcagacagctcttcattccttaatgtaatggaaatattgattagcagagctactactgcaatttccttgctcggtttctccctgcaatatggcaaaatcacttcagaatactactgtttaaaattcagacagctggctgataggaatttatcaaactgcacatttaagtgaattatgaatgyggggccaagcctctcattcaggmgtcactcataagagatattgccatacctgctaagtcaggaacctgctgcttatttaatgtcaacacttaaamacaaagaaatgatggattttagtgcttcgtggacaaaaacttttggtgataaaatattgttttaaattgttaactgaaatggtaatggctaccagggaaaacttaacaatgacaagcgaggtgagcggctaccagccagatgtgggtattgctgaaagagaggttaattgtgttgcagtattgacaatggctgagagacagttatcgtattatcacgtgttatcatattatcattcatattatccctcttggaatgttagaagagatgtgatatttttgtcttactgcttccgttggaaa

SEQ ID NO: 21900 - DNA, 600 bp, Chicken  19866894233688_7
gaatcattttccacaccaacatcagacagctcttcattccttaatgtaatggaaatattgattagcagagctactactgcaatttccttgctcggtttctccctgcaatatggcaaaatcacttcagaatactactgtttaaaattcagacagctggctgataggaatttatcaaactgcacatttaagtgaattatgaatgyggggccaagcctctcattcaggmgtcactcataagagatattgccatacctgctaagtcaggaacctgctgcttatttaatgtcaacacttaaagamaaagaaatgatggattttagtgcttcgtggacaaaaacttttggtgataaaatattgttttaaattgttaactgaaatggtaatggctaccagggaaaacttaacaatgacaagcgaggtgagcggctaccagccagatgtgggtattgctgaaagagaggttaattgtgttgcagtattgacaatggctgagagacagttatcgtattatcacgtgttatcatattatcattcatattatccctcttggaatgttagaagagatgtgatatttttgtcttactgcttccgttggaaaac

SEQ ID NO: 21901 - DNA, 600 bp, Chicken  19866894233695_1
ataatgttattgatgttaaattatgagcttgatagcgtggttctcaaaaaaaaaagcccaacctgttcatatcaggaagatcgttgtaacacacttctaggaacaagaatgctgccagcatagttgcaacatgagtggaaaagaatctgtgaagctctctgtctgagcaattgtaggaggcagaaatgaatatcttttcaataatgctttgtgacagaggagcagaagcagctttagagcttaacactatttttaaaatatgactcaggagaggttttctttttctaactgagctggggmaaaaaaaacacaaaaaccacccaagagtcaaacaatcttttagaaagctggaacctttcaataaaacaactattgtaggtcaggataatttgaatttgcatacaacaccattgacaaacacagaagagatctatgcataataaacagagaaaaacagatctgatatattggaaaccttgagttctgagagattaatgaattgccccttccacaacataccatttttgtgaaatacctacatagattgtactgaatagcagaaataagatgaaaaatcaacgcagctgtaattccactaaa

SEQ ID NO: 21902 - DNA, 600 bp, Chicken  19866894233695_2; identical to SEQ ID NO: 21901

SEQ ID NO: 21903 - DNA, 600 bp, Chicken  19866894233702_1
ggccatcattaagccttcacagtgaaaattcaggcactgctataattttccttagaagctgaccttttctttaattccttacaagtagttctacttatcttctagttctctaactcaaaccaatttttccaactcatggttttactgcaaaacttgaaaatgcagtgtttttcttaaaacattttcacttgtagtaacctgagagtctcacattaaagttttccagctcttgtttgatggagctcagaaacacaatttctgagcttataaaaagaaataaaatatagattattatttttwaaatttatwctttgaaaagggtcaggagtttggaaagttaaagttggcagtactcctaagcccacttttcttcagtaatcttcctttagattgattaattagatacatttgatgagaaaagcatctagtcatatactgcctttttgtataccctaaccaggaaatgttctcttggtaaaactcatagtcttttcaaagactgaatcatttatccattcatggattaagtagaataaagctttcttctttaacttaaactgtttaycctgatctctataattaattacagaaacaaatgta

SEQ ID NO: 21904 - DNA, 600 bp, Chicken  19866894233702_2
taagccttcacagtgaaaattcaggcactgctataattttccttagaagctgaccttttctttaattccttacaagtagttctacttatcttctagttctctaactcaaaccaatttttccaactcatggttttactgcaaaacttgaaaatgcagtgtttttcttaaaacattttcacttgtagtaacctgagagtctcacattaaagttttccagctcttgtttgatggagctcagaaacacaatttctgagcttataaaaagaaataaaatatagattattatttttwaaatttatwctttgaaaagggtcaggagtttggaaagttaaagttggcagtactcctaagcccacttttcttcagtaatcttcctttagattgattaattagatacatttgatgagaaaagcatctagtcatatactgcctttttgtataccctaaccaggaaatgttctcttggtaaaactcatagtcttttcaaagactgaatcatttatccattcatggattaagtagaataaagctttcttctttaacttaaactgtttaycctgatctctataattaattacagaaacaaatgtacaattactt

SEQ ID NO: 21905 - DNA, 600 bp, Chicken  19866894233702_3
tataaaaagaaataaaatatagattattatttttwaaatttatwctttgaaaagggtcaggagtttggaaagttaaagttggcagtactcctaagcccacttttcttcagtaatcttcctttagattgattaattagatacatttgatgagaaaagcatctagtcatatactgcctttttgtataccctaaccaggaaatgttctcttggtaaaactcatagtcttttcaaagactgaatcatttatccattcatggattaagtagaataaagctttcttctttaacttaaactgtttaycctgatctctataattaattacagaaacaaatgtacaattacttctatatttctattttagccttccgatcctcaactcacttggcacccattttgcagaccctctcacagaaagattggctgatatccagtgacattcacaccatccttctgcaatgccaagacaccataaaaagattcataaaatctgcaggcccctaaatcttgttacactgccagggaaggaaaaaagcagtcatggaaaatggggtggtaccaacaagaaagattaaggaagagaaggaaggcagaaggagcctg

SEQ ID NO: 21906 - DNA, 599 bp, Chicken  19866894233712_1
  misc_feature (1)..(66): n is any nucleotide
nnnnnnnnnnnnnnnnnnnnnnnnnnnnnnnnnnnnnnnnnnnnnnnnnnnnnnnnnnnnnnnnnntgcgtgggagcgctgtttggtttagcagcaccctcaggctggagaccattcttcctaagtgataggagaggtttcctgcacgggtagcattgttttccggtcccttctttctcttggggaaatctggcagcttcatgcataaggggaatttcgtcccctattttttgggatcttggatcaattttaatgggaaaaaaagccctgaaggaacgggtcacatggcttctggaaccrcacggacagtcaaggaagtctgcgctccaaggctgcctctcaagcacttgcatttatatttcttggcaaaaactgcatttatgcactcagttgatttccataacagggtgaaaaccagatgcccttctttgcaccatgcagcttactcactgggatgcctacatgaaagatactgcgatgatgaggtttattttaaggaggtggttgattggtagcctacagtgttgcccttttcatgccacgctctggaaggaaaaaaaaaaataattattaaaggacgtgtgggagcgccaaatagc

SEQ ID NO: 21907 - DNA, 599 bp, Chicken  19866894233713_1
  misc_feature (1)..(15): n is any nucleotide
nnnnnnnnnnnnnnnctgttgacttccactggcagctattttgttggttctccttttgctttcaaagcagtgtctccagaaagactttctgtttatcaaaaatacagataacttcactcaaagcttggaagtttgaatacaactgcaaagctcttgcagacaccatgaacctccaagcattcccttccatctcttgtccaaccatcccatggcaccttggggttaggaaaccttggtttatcatgtgtcttcacagcaaaatgctgtgttttccagctcagacagtccagagcagtggargaaacacaaggacaagagaagtgaggaagggacacattgggttggctttccagctgggtggtaaagccccttttgccttgcacctgagccagatggttgatgatgaaggtcaccttgccttcaccctttgtctctagaggatggtgatgctcatttagagtttgcagtggatttgctggagctgcagttctgtattcaaccatgagccacccatccttgttgtccaaagccaatttctacccatgcagatttttggcatycacaatacccatcagtgaggagctgcaatcatggaatgt

SEQ ID NO: 21908 - DNA, 600 bp, Chicken  19866894233713_2
atgctgtgttttccagctcagacagtccagagcagtggargaaacacaaggacaagagaagtgaggaagggacacattgggttggctttccagctgggtggtaaagccccttttgccttgcacctgagccagatggttgatgatgaaggtcaccttgccttcaccctttgtctctagaggatggtgatgctcatttagagtttgcagtggatttgctggagctgcagttctgtattcaaccatgagccacccatccttgttgtccaaagccaatttctacccatgcagatttttggcatycacaatacccatcagtgaggagctgcaatcatggaatgtctcccttcctctggttcagtcctacctggaagaccaccggcaagccctggctgctacagggatgcatttcactccagtccagctgctgtctatcccagcattcccactgtcctccccatcattgtggctggcaagacacccacctaaagaatcagccactctgcacgtatttttacattataatatataccctttatatataaaacatcagtgcaaaaccatctgttctgtagcaagggggtgggggagaaatgagtggat

SEQ ID NO: 21909 - DNA, 600 bp, Chicken  19866894233714_1
actacatacctgtagccaagaatgtattctgaagttgtgcaaaacaacgaaggatttattacttgcaaagccttaactctttcccctatggattttcttagtcctcttctccagtttgattcgagttcctagtcatctaattaacttctgtgcaattacaactcttctgcaactctcaggaacatgtagggcaggagttacagaaataagtatgcacttcagtagctggactagatttttagaccctgagaagaaagactagttttaaaaacatgtactatgtaaatctgagaatcatcmacacatttattctgcgcaagtcataatggaaagataccaaagctggaatagtgattcttacctatgcagaaggataatgaatcgagcattttacacactcatttgaaagcacgtattttttcatcgtgtaatattcagaagacaaatcaactaagcaaatagtcacaaataataattatcactactgttccatgaatttagcagttagtagaattttagcttttagctttggtcttgctatcattttacctcttcttgatgcgaattaaagtatataatgtttactgcccataagttaaa

SEQ ID NO: 21910 - DNA, 599 bp, Chicken  19866894233718_1
  misc_feature (1)..(25): n is any nucleotide
nnnnnnnnnnnnnnnnnnnnnnnnnaataaagttttcagtggtgtgagaaaaacactagaaggtacagtgaatatttttgacactatttcaaggagaaatgggaggtgtaaaattatcaatgtgttaaacatactaggatgtgaattttcacattctgtctcataagtcccatgtgcctgcagtgatgaaagctgcatttatagactgtgtacagcatgaccagatcaacagaaaaaaacacccgttcaattctttcaaattttgttgtaatcagtgctttagttgagcttatcaaaatwaaatagtcagctttcctttttccaaacagaaattaatcagcgtgagcartattttgctgtgataaaaaccacagatgcttaataggaagtattttagtggaaaagcagaaaatctctacttcatggctaagctgttatcaccctacttggtatgttccctttgaggatatgaggcatcaccctgctytgtaatagcttgtagccctcctcacaccttggtgccttgttcagttagcttttaagtatagcaaattatactgttcacagtctaatgttctgttactgccaagcctttctgt

SEQ ID NO: 21911 - DNA, 600 bp, Chicken  19866894233718_2
aaaacactagaaggtacagtgaatatttttgacactatttcaaggagaaatgggaggtgtaaaattatcaatgtgttaaacatactaggatgtgaattttcacattctgtctcataagtcccatgtgcctgcagtgatgaaagctgcatttatagactgtgtacagcatgaccagatcaacagaaaaaaacacccgttcaattctttcaaattttgttgtaatcagtgctttagttgagcttatcaaaatwaaatagtcagctttcctttttccaaacagaaattaatcagcgtgagcartattttgctgtgataaaaaccacagatgcttaataggaagtattttagtggaaaagcagaaaatctctacttcatggctaagctgttatcaccctacttggtatgttccctttgaggatatgaggcatcaccctgctytgtaatagcttgtagccctcctcacaccttggtgccttgttcagttagcttttaagtatagcaaattatactgttcacagtctaatgttctgttactgccaagcctttctgtgtgcagcttgtggtactcaggcgtacactcctgattctgcataccacttc

SEQ ID NO: 21912 - DNA, 600 bp, Chicken  19866894233718_3
gaaagctgcatttatagactgtgtacagcatgaccagatcaacagaaaaaaacacccgttcaattctttcaaattttgttgtaatcagtgctttagttgagcttatcaaaatwaaatagtcagctttcctttttccaaacagaaattaatcagcgtgagcartattttgctgtgataaaaaccacagatgcttaataggaagtattttagtggaaaagcagaaaatctctacttcatggctaagctgttatcaccctacttggtatgttccctttgaggatatgaggcatcaccctgctytgtaatagcttgtagccctcctcacaccttggtgccttgttcagttagcttttaagtatagcaaattatactgttcacagtctaatgttctgttactgccaagcctttctgtgtgcagcttgtggtactcaggcgtacactcctgattctgcataccacttcaacagagcccagcagtgaaaacccaagtgagctcacagcagctggtaggattgtcttctgtgtgtggccatgctccatttttgtactaaatgggatatgtcaaattcaatgtaccctgcagtttgatcagagttttat

SEQ ID NO: 21913 - DNA, 600 bp, Chicken  19866894233719_1
ttctgattttctcatgaacactgtaaatcatggagaaaagcagatgtgtgtacgtgtcaacctacacataaacacagagcccccactttatgcatttccttaaattcccagtcctgactgaggaacaatctgcttgctggtcttttggtgagctggataaatacaaggactgtgtttgtatggtataggggaagccagtcgtttatggacaattaatcacagacatgtattctttatttcctatttatggatgacacagaaggctgaattctaatcagctctcactgtggtgggttttcrtgtccctgctttcagcagttaacactttagagatatcagccaaaggaagaagtggaatgaatatggattgggaccacttctgcttttagtgatgacttttgttccttcagagaagggacaaattgatgccttgtaagtgtgagcttctgggatggcaccctggaaatgggtgcagcttctgagaacaagtatcccacagtactatgtagaatggtgaacggagctcaactaaaaccagcatctgaacccaactttccactgcctctatctaacacagggcaaaggggttggtatggctat

SEQ ID NO: 21914 - DNA, 600 bp, Chicken  19866894233720_1
gtgaaactagaagcttaacttccatatccaaaatgatttctatcatagaatcatacaatatcataagttggaagggatccataaggatcatcaactccgaagctaaacatccatgctctgaatcaccctgaaagagcctttcctttttcttcttgataagtaggagaaaagccttcattagactaaaactaagtgttacatcatctaaagactgaaagttgcctaggaaatataacaaagcctctaaactgaagttaagtaaagtacattaggcagttttggtacctcagtggaatatcrtaaacatttcagttatctaaacatctggtagactttacatctgattaacttctttaaaattactaactttaaaaatatggtatgacttttgaagtactcatctgcattttcaccatccaaagcgtagataagtcacatgtaagaaatcaaacttctgtcgtaaggctaccaaaaatagcaaatcttcaagtcctggctccacacttctgggtgatatttctccacttaaagttctctaaataactctaaataaagcaagactgattatactccactcttgtcctttctttgtggcacttc

SEQ ID NO: 21915 - DNA, 600 bp, Chicken  19866894233720_2
tctctactgtttctatgttactgtttcaaaaggtttctctactgttactatgaattgcattttccacagtgtttactctgtaagtatgtctttacagcacagcactctcacccttcctgatcttgtctattaaccaccattacaacttctcatgatcttaactgatgcatcttgcatatcagaggcctggtgagtctttttaaactgtgcaaaacttaaatagctccttcctaaggctcatcaaagaatagaatttctcctgctgattgatgcagaaaaggagcccaattgaaattattmtgcatatctctacaaaagagtctatctcaccgactaaataagaacttcagggagattaagtagcttacttgagagaattccttctctgtcactgagttaggtatctaaaatacactagtgactcccccttcattttgcattttaatttgtgtactaaaagggattctggtctacaaatcagcctttcaaggagttctcctatgtaagtaattatgaagaaagcaaagaaatactttgcagagaaatactgcaaagaagcttaagatgattgcctctttgaagtgttttctctcttactgg

SEQ ID NO: 21916 - DNA, 600 bp, Chicken  19866894233723_1
tactaacccacagcagctgcactaagctcgtgcagcaaagccctgatgttcctccagaggtccttactggatagcgtgtgctactgcagctcagtgcactgatggaaaactgaggaggactttaaatcttacagttgtgatactatgtggaccctttgaacaggaagctgtgactctatcatggcattaggaccactgtctggaagcagtggtttagtgaatacgaattcactagtgaatatgaatgaggagaggcagggagattaggtagaaggagctgagttgtattcatctaaaacygagtttgtctgaggtcaatgggagcatctcctagttgagaaagtaagaatctgtgaacaacattacaacagtcatgttgtatggtaatgtgtgctgtgggatagaagcagagtcagaacccttctctatttgtaaaaggctttcatggctagctaaataataatgccttgttcccagactactactagtgtgaggttatttgggttacttcatcagctccagmataagtcttgcttggtcttcatcagcttttggtttctattcctatttggcmggcctaatgttttctctccatggtaa

SEQ ID NO: 21917 - DNA, 600 bp, Chicken  19866894233723_2
cgaattcactagtgaatatgaatgaggagaggcagggagattaggtagaaggagctgagttgtattcatctaaaacygagtttgtctgaggtcaatgggagcatctcctagttgagaaagtaagaatctgtgaacaacattacaacagtcatgttgtatggtaatgtgtgctgtgggatagaagcagagtcagaacccttctctatttgtaaaaggctttcatggctagctaaataataatgccttgttcccagactactactagtgtgaggttatttgggttacttcatcagctccagmataagtcttgcttggtcttcatcagcttttggtttctattcctatttggcmggcctaatgttttctctccatggtaagctgggaattttttttttactcccttgccacttcaagcaggtagagcaggtcttatatttgaggtcacctggaactattcagtcactgaactcttgtacaatcctgagtcccgccacagctaaaggagataccttgggagaagagattaaaggtatggggtggtaggagaacttgcctttcccaccagctgcgtgctccaggctgcaatccctgctcagcact

SEQ ID NO: 21918 - DNA, 570 bp, Chicken  19866894233723_3
gagctgagttgtattcatctaaaacygagtttgtctgaggtcaatgggagcatctcctagttgagaaagtaagaatctgtgaacaacattacaacagtcatgttgtatggtaatgtgtgctgtgggatagaagcagagtcagaacccttctctatttgtaaaaggctttcatggctagctaaataataatgccttgttcccagactactactagtgtgaggttatttgggttacttcatcagctccagmataagtcttgcttggtcttcatcagcttttggtttctattcctatttggcmggcctaatgttttctctccatggtaagctgggaattttttttttactcccttgccacttcaagcaggtagagcaggtcttatatttgaggtcacctggaactattcagtcactgaactcttgtacaatcctgagtcccgccacagctaaaggagataccttgggagaagagattaaaggtatggggtggtaggagaacttgcctttcccaccagctgcgtgctccaggctgcaatccctgctcagcactgcagtgacataaacatccatt

SEQ ID NO: 21919 - DNA, 600 bp, Chicken  19866894233726_1
tttaatacattcctaacccctccaatactgcgaccccaatccaggcactgagtctggccccataggatcccattgcctctgagcacagggaaggtcagaaaagcagggggctttgggactttattggtgacagcagtgaggctttgtgtgccgcatgtattttgggtaccacgctgagatctgtgccatcccaatgcatctcttactgaacgcatctggtccctaaatcagcactagtttttcaagtatgaggtctttttgatcacgtgcagcagatagatttgatcgcctgcattgtgygctgctcttcagctgctttaaacaaatctgccttgcgctgtttgtttgatagcagtctgcttttctgctctgctctgcatttttgattagctgctttttggcttttcctctaacgtttctcaggtaggagaggtggtttccagcaatccggccaactttgtttgaaccaaattcccgtggctgcatcacggtatgactacccaaaatcagattgctaattgtgccttcagctagcaagctgtttcctgcccacattcatacttcttgagcccatggattcattatatggtgtcccatggc

SEQ ID NO: 21920 - DNA, 600 bp, Chicken  19866894233726_2
agagctgaaaccgggctggtggtggcactgggatgggtgttgctgatgggagataatctcttggatcacatttcaggttggatattagggaaaaaactcttctcagcaagaccggtgaggtgttggaacaggctgcccagggatgtaatggagtcaccatcccctggaggagttgagtgaaagagtagatgtcacactgagggatgtggtctggagcggtctcaggtgtgggttggtggttggactggatgatcttatcggtctttccaaccttaatggttctctgacgtctgccccctkccctgcacagctgtgcctgcatctggacagtgtcctttgggtctgtgtggggtgtgggtgctgcagatgtgttcctgatgctctctgagcttgaagccaccggggaagggctgcagtggccacgttggctgatgcttggctgcagggggttcagcacagcaatctcatgccactgtctgggtgggagtccctaaaagcaccagcagcacagggaccagatgtcaagtcacctattttcagtgcttaaccaccaattggtggcattgcagccatgttcatgtgcagtgatttatcagcacc

SEQ ID NO: 21921 - DNA, 600 bp, Chicken  19866894233726_3
ccctttctcccttccaccagctcagcaccacgtatcttgcaaagatgctcatggtggggatgcattgcagagacttgtccataggaacttgctgatggtgttggatgagcttcctgggtcttgtgcccagcgaaccccattttgttggttcagatgcctacctgcttgccaaggcttgcaaaaggagccaagagctgtcctttctggcctgtttaacccaatctgatcagacacagtactacttctaatctgtcagtgttcacttggtgggctctgaagaccgtgcaacacaagcacctscaagyagagcagcaaggagcctgcagtgatgcacaggagaaggaaggtggaatgaaacagtggcagaaccacggggaggagggaggaggcagctatggagaggatgtgtcctcatcttcagcagcaggagtaatgaggcagcaagggggggactttcagcttcatgggaggaagagtcaacgtggagctcctggagagatgcattgggtggagtgccctggcttaaagccatcactgcctgacttttaggcatcattggaagttgtgtccttgaggggctattgaatggccttgtgctga

SEQ ID NO: 21922 - DNA, 600 bp, Chicken  19866894233726_4
tctcccttccaccagctcagcaccacgtatcttgcaaagatgctcatggtggggatgcattgcagagacttgtccataggaacttgctgatggtgttggatgagcttcctgggtcttgtgcccagcgaaccccattttgttggttcagatgcctacctgcttgccaaggcttgcaaaaggagccaagagctgtcctttctggcctgtttaacccaatctgatcagacacagtactacttctaatctgtcagtgttcacttggtgggctctgaagaccgtgcaacacaagcacctscaagyagagcagcaaggagcctgcagtgatgcacaggagaaggaaggtggaatgaaacagtggcagaaccacggggaggagggaggaggcagctatggagaggatgtgtcctcatcttcagcagcaggagtaatgaggcagcaagggggggactttcagcttcatgggaggaagagtcaacgtggagctcctggagagatgcattgggtggagtgccctggcttaaagccatcactgcctgacttttaggcatcattggaagttgtgtccttgaggggctattgaatggccttgtgctgatttcc

SEQ ID NO: 21923 - DNA, 600 bp, Chicken  19866894233730_1
atggagagagaaatccatatgatccaccggcagatcatgagttcatttcaataaatcttgcacaaatagcaccaaacatggattgggaggggcaagctacagtaagagcacttcttttaacagttatttgtattgcagaggtgttagttagctagttaattactaaattttcaagagttatcatgaattctcaaataaaatcagatgagtgtttctttgcacctataaatggaagaaaaaagttactgtgtgagcacttcagcattactgtacaaaagctgattttcagagctgcaataycttcccctttttacactagacaaatttcaggcatctccatgtttgaaactgtaaagacaaccatggcagaaaagtggtccatatgactcaaagatgtgaccagctaaggaaatgaytgcattaaaagcgttctccttactaaaaacaagcagtgaggaaagacagctgcacacagaaacaaacaggaaccaatcaatgactgggaagatgctgtgaagttggtgagccaagtttttcatgcgttctgtaayggtaattcatcactcctcagtgataaaaacagagcaaagtttaacaaaa

SEQ ID NO: 21924 - DNA, 600 bp, Chicken  19866894233730_2
ttaacagttatttgtattgcagaggtgttagttagctagttaattactaaattttcaagagttatcatgaattctcaaataaaatcagatgagtgtttctttgcacctataaatggaagaaaaaagttactgtgtgagcacttcagcattactgtacaaaagctgattttcagagctgcaataycttcccctttttacactagacaaatttcaggcatctccatgtttgaaactgtaaagacaaccatggcagaaaagtggtccatatgactcaaagatgtgaccagctaaggaaatgaytgcattaaaagcgttctccttactaaaaacaagcagtgaggaaagacagctgcacacagaaacaaacaggaaccaatcaatgactgggaagatgctgtgaagttggtgagccaagtttttcatgcgttctgtaayggtaattcatcactcctcagtgataaaaacagagcaaagtttaacaaaatgctatcaaacttgcctggcctttggaagctgagagtcacctagggaagtacacagtcgttctgatgtcatccacaatatgtatttgaaaattgttaatcccactgaatactgaac

SEQ ID NO: 21925 - DNA, 543 bp, Chicken  19866894233730_3
gagcacttcagcattactgtacaaaagctgattttcagagctgcaataycttcccctttttacactagacaaatttcaggcatctccatgtttgaaactgtaaagacaaccatggcagaaaagtggtccatatgactcaaagatgtgaccagctaaggaaatgaytgcattaaaagcgttctccttactaaaaacaagcagtgaggaaagacagctgcacacagaaacaaacaggaaccaatcaatgactgggaagatgctgtgaagttggtgagccaagtttttcatgcgttctgtaayggtaattcatcactcctcagtgataaaaacagagcaaagtttaacaaaatgctatcaaacttgcctggcctttggaagctgagagtcacctagggaagtacacagtcgttctgatgtcatccacaatatgtatttgaaaattgttaatcccactgaatactgaacagctatacatgtacgaatgagaagaaatctgttcttatgctgccacttaagttaaaaatcaggtgaaggtaaaaatca

SEQ ID NO: 21926 - DNA, 600 bp, Chicken  19866894233737_1
gatccattacatgctgacacagacagagcgtgtctctgcgattgtgcattttgtgcagtagatacgtgaaccgcaccaggcagtgtcagtgtccagatgaaatgcagcagtccaggttcaacagtgggtcagctcatcttctcagcttcttttaccttcagtgttaccactgcttttattcagcaagagagatttatcgctgattttgacatctgtgcccacttcctcttcataaacagtgtatcaacttccctccctatggcctctttacttgctgatgaaaatagttagtttaaataygatgattaatctcattattggttattatctttctggaagagtcatgtcagttgacgtatgtctgaccagcatcagaagggttcaaggctgagccacctaagagagaataaaaatcaccattttttcaagagttattcaccttagattcccttccacaatccagaatattttatctgataactggccattttatttcactgctgtagaagaggattctaaatggctacaactcccatgtatttccacagctttcactttgttggtctttcgacacctgtctttgtaaacagcaccaggaag

SEQ ID NO: 21927 - DNA, 600 bp, Chicken  19866894233740_1
gggccgatgggcgagtcctcatcatagtggtgttggtagtaccccccgtagtactcgctgccaccacgccccatgctcgtccagtaggacatgtcgtcttcaaatttctgccaggaagaaaagaagagaacgaaacggaaagaaaaaggtgaaagagggcttccctttgtctcacgcaggtaattcaggtctggaatttctcctcagaaattcagatccttcgtgcgcttctaaatgcatttaagagactttctctgtgagatgtaccagtctggtttcccaatgcccctcgcctgtagycgtggcatacctgagtgcaaagtgagcgcatcaccctttgcattgcgcctgctatttttctcttgtaaaatcataaggctctagaagcagttcagttccgctcacagcagcagtggaaaaacagtatgcgaggatatcaaatgcttgccaagccaaagcctttccatctgaatggctctttggaaatatttctggctgaggtttgtaaaggaagttttgcaaaatacacaatgggtgagcacggcctaagccctttctgaagcgttgctggaacctggcagttatctcattgttaaagct

SEQ ID NO: 21928 - DNA, 600 bp, Chicken  19866894233741_1
cagaagtcacaaacagccccactgaccgaactccacgcagcccctccagcaacgaactgaaaacctccacatttctttcccagcttggagctgttttgctaacagagcctggcttttggtcgtaccacatctcagctccgctgcaaggactccagctttgctgctcccgtggcagcattcggtttgatggtgtttattactgacacagcagcagctcctttggaggtggatatttgatcatcatttccacaatgggctttaaggtggtcgtgattacctcctgcttgcattcaaacaaascactcctctcctctgcctctccacagcacacaaacaccttttgagtgccacataaagccacagacgtagagctgtcacctccctctcctcctcccaaaacacacggatgcacacacacacgtgcaaacaaacaccacagggtcagccaaagcagcgtcgctcaccaggtgctccctccctcccttcactccatcagaaggattgcttttttaaccaagcagtgacctacctcgggttttttttcagtgtatttactaaaaactcatgcaaatctatcccagtggagtctgtatattcctg

SEQ ID NO: 21929 - DNA, 600 bp, Chicken  19866894233757_1
tagcaccagcatcaccagcatatacttgtgcctctgacaactgcaaagatggacatgaataaatgaaagacgagaatactgacaacactttatagttttactattcaagataaactaggaacgtggataaactttgaagtaccacgtctggtagatgatcaaacaaggacagcaatgctttatctattcctatccctgattcaagattttagttcaagaaattcacttgagttgtgtctgcaagcatttgtccatgtgctacttaagtgaccaatccttccagcatcctttgaagacaayaygtataaaataacagaaccttcatacrgatygcaaagtgttttaaaagaatcattaaaaaacaataaaatatttcctttatagattcagatcacacagctaaacaagagtactccttaccaaaactgatccttgaaacatcaacagagcttgctggagtttcaggctcaaccagaacacggggaggatctgaggatttaagacaacttcaaataggtgtcagcaatacacatttcaaaacatggatcaaacactatttccagcacatttaactttctaattctttaagaattagagatt

SEQ ID NO: 21930 - DNA, 600 bp, Chicken  19866894233757_2
gcaccagcatcaccagcatatacttgtgcctctgacaactgcaaagatggacatgaataaatgaaagacgagaatactgacaacactttatagttttactattcaagataaactaggaacgtggataaactttgaagtaccacgtctggtagatgatcaaacaaggacagcaatgctttatctattcctatccctgattcaagattttagttcaagaaattcacttgagttgtgtctgcaagcatttgtccatgtgctacttaagtgaccaatccttccagcatcctttgaagacaayaygtataaaataacagaaccttcatacrgatygcaaagtgttttaaaagaatcattaaaaaacaataaaatatttcctttatagattcagatcacacagctaaacaagagtactccttaccaaaactgatccttgaaacatcaacagagcttgctggagtttcaggctcaaccagaacacggggaggatctgaggatttaagacaacttcaaataggtgtcagcaatacacatttcaaaacatggatcaaacactatttccagcacatttaactttctaattctttaagaattagagatttt

SEQ ID NO: 21931 - DNA, 600 bp, Chicken  19866894233757_3
tgcctctgacaactgcaaagatggacatgaataaatgaaagacgagaatactgacaacactttatagttttactattcaagataaactaggaacgtggataaactttgaagtaccacgtctggtagatgatcaaacaaggacagcaatgctttatctattcctatccctgattcaagattttagttcaagaaattcacttgagttgtgtctgcaagcatttgtccatgtgctacttaagtgaccaatccttccagcatcctttgaagacaayaygtataaaataacagaaccttcatacrgatygcaaagtgttttaaaagaatcattaaaaaacaataaaatatttcctttatagattcagatcacacagctaaacaagagtactccttaccaaaactgatccttgaaacatcaacagagcttgctggagtttcaggctcaaccagaacacggggaggatctgaggatttaagacaacttcaaataggtgtcagcaatacacatttcaaaacatggatcaaacactatttccagcacatttaactttctaattctttaagaattagagattttttctggagtccttataagcatagaac

SEQ ID NO: 21932 - DNA, 600 bp, Chicken  19866894233757_4
tctgacaactgcaaagatggacatgaataaatgaaagacgagaatactgacaacactttatagttttactattcaagataaactaggaacgtggataaactttgaagtaccacgtctggtagatgatcaaacaaggacagcaatgctttatctattcctatccctgattcaagattttagttcaagaaattcacttgagttgtgtctgcaagcatttgtccatgtgctacttaagtgaccaatccttccagcatcctttgaagacaayaygtataaaataacagaaccttcatacrgatygcaaagtgttttaaaagaatcattaaaaaacaataaaatatttcctttatagattcagatcacacagctaaacaagagtactccttaccaaaactgatccttgaaacatcaacagagcttgctggagtttcaggctcaaccagaacacggggaggatctgaggatttaagacaacttcaaataggtgtcagcaatacacatttcaaaacatggatcaaacactatttccagcacatttaactttctaattctttaagaattagagattttttctggagtccttataagcatagaactact

SEQ ID NO: 21933 - DNA, 600 bp, Chicken  19866894233761_1
cagacttgctgcacaaagcactgagtattcaagttgtgactgggtcactagagcaagcaaggaaggggaagtctcgacttcaaaatgattcagtgaagaatgtgagtataaccaaaacaaactcagatgagacaaagcattcagataaaggaactctttatctcactcacatgaaatggtggaacaggcagatgctccaaatgaaaaataatatctgctgagcattaagatttatcttaggaatcttgtacgtatgtgaaaacagttacaatacatggatgatgttcactgatagattgygttgaaaaagtgtattttctgttgaggaatcacagtgagaaaacagtctgatctgagataagggaatgggaatgctgtggggttcctaggttgaagttgagggaagagctgagctgactaggtactctagaagtaccttggggaagtggtttgatctgcaaagctgtaagtgcagctgcatcccttctcattcctcttgtccatgtctgcctttgcatcggttgcacatcctggctcccaaagatgctgatgacacatgtgtgtccctgactaatcagaaaacctataattttcaaataa

SEQ ID NO: 21934 - DNA, 600 bp, Chicken  19866894233773_1
ggatcacttctttcttctcccttgtaatgaaattgaagacaaaatggacctgtggtgttgttcagactagcatgatcctagctttcttcaggaacacaaatagaacaaatcctgaaatggtgttgaattgtggattttttttttcctcccagttactgaggagagtcacgaagaaccagcctttaaaaactttatgcaggaaacacggatgagataccagagaagaagcaatgaggatgaatgaggcacccagaaataaatggcttgaaattccttgaattaatggaattaacagtaaargaacagcataaagaaagctgcatggaaacatgcttgaagtctgaagtccctgaacagcttcttctgatatactgtaccttcctgcagtaagtgttggtcatgtgagtacagggttttctatccaactgactgcacatatggccatctgctacaaaaccacagaaccctgggagttggaagggacccctggagatcccccagtccaagccctgctgaagcaggttccctaaagcaggttgcacaggaaagcatccaggtgggtttggatatctccagagaaggagaccccaccatctccct

SEQ ID NO: 21935 - DNA, 510 bp, Chicken  19866894233776_1
ggcaggagggatggagcttgatgatccttgaggtccctcccaacccaagccattctgtgattctatgatccatcttcatattttgtttttgaagttctgagcaataaaagttgtttgtaaaactagtgtggctcagtctgttctatttattactattgaattcagagaaactttataaatacctatctatcaaactgatatcatcctgaaggagttttcttccctgcctttctttctaccaatcaacctttcttccttcatgccatttgtaatcctgaagtatcctttttatttgttttygagtcacactgacactgaggattattttttattgtttttgttgattaaatctcatcctaactcctatctgcctctaactttcacagcctctcttcatctcaatgtgcttcacagcacattcttgtcttctgatcccaggaaagccttctgtaattccatctgtctttcaaaggcacttacccctgcaagataccaactgcatctacaaat

SEQ ID NO: 21936 - DNA, 600 bp, Chicken  19866894233784_1
aggggaagagttattgaaaatgaggatgtttgctggggctgtgctgatggagcagaacaaggaaaggctgtttctttgttgctctaattacaaatggaaaataacctacagtgctgaacaagttgagctccctagctgaattgaatggagcatagtgcttatgttctacgtcatggattgatttatcttgattatcagtagtttgcactacttcttcccctccccagaaggaccggtttggcattctcttatactgaagtaaatgaaattttttggctctgaaaagaatgaggtgggagrggggcttgccacagtagaaatgcccttctcgtacaaaactctaattctcacacaggaaatacttctcaaatgatggaattttgtttgtgacagrgtttcattatggtaaagcaacaaattgctggtgactaaatcacagtcggctctgtgccgccgttgtattcagacatgatgaaattctgcaaagcagatcaattcagaagaacagggatgttgcaagaggaaaccgggagggagaaaaaggctgagaagacagaaacaatcagagtcgggtaggaagcgaagctggcggggatgaag

SEQ ID NO: 21937 - DNA, 600 bp, Chicken  19866894233784_2
tggaaaataacctacagtgctgaacaagttgagctccctagctgaattgaatggagcatagtgcttatgttctacgtcatggattgatttatcttgattatcagtagtttgcactacttcttcccctccccagaaggaccggtttggcattctcttatactgaagtaaatgaaattttttggctctgaaaagaatgaggtgggagrggggcttgccacagtagaaatgcccttctcgtacaaaactctaattctcacacaggaaatacttctcaaatgatggaattttgtttgtgacagrgtttcattatggtaaagcaacaaattgctggtgactaaatcacagtcggctctgtgccgccgttgtattcagacatgatgaaattctgcaaagcagatcaattcagaagaacagggatgttgcaagaggaaaccgggagggagaaaaaggctgagaagacagaaacaatcagagtcgggtaggaagcgaagctggcggggatgaagaagaaaacaatagctgagagtaaaatgagatgaggaagcagaaaacacaaagaagtgaagtaggaagtaggaggaaatgggtgcaagttaaagt

SEQ ID NO: 21938 - DNA, 599 bp, Chicken  19866894233785_1
  misc_feature (1)..(89): n is any nucleotide
nnnnnnnnnnnnnnnnnnnnnnnnnnnnnnnnnnnnnnnnnnnnnnnnnnnnnnnnnnnnnnnnnnnnnnnnnnnnnnnnnnnnnnnnntgcgtggtgtctctgcaggctctcttcaagctgtggggctcctcagagctgcatcccaaggatgtcctgacatacacagagctggtgctggactcgcagggacagctggtgcagatgaacaggctccctggagggaatgaggtagcagggaggggtttgggagtggggtgcagggaagctgtgctgccacaggtgggatttgctggtggcytccctsgtccaagctttgtttcaagcccaagggatgctcctcaaacagctctgcctgtcagttgatgcagtctccacctctgggaggagccaaccctgtgacacygtgccattttggggcaggtggggatggttgccttcaaaatgaagctgaagacccctgagtacccaaagggccgggacatcatgctcatctgcaacgacatcacacacatgattggctcctttgggccagaggaggacctggtgttcctgcgagcctcggagctggcacgggctgaaggcatcccacgtgtctac

SEQ ID NO: 21939 - DNA, 599 bp, Chicken  19866894233785_2
  misc_feature (1)..(83): n is any nucleotide
nnnnnnnnnnnnnnnnnnnnnnnnnnnnnnnnnnnnnnnnnnnnnnnnnnnnnnnnnnnnnnnnnnnnnnnnnnnnnnnnnnntgcgtggtgtctctgcaggctctcttcaagctgtggggctcctcagagctgcatcccaaggatgtcctgacatacacagagctggtgctggactcgcagggacagctggtgcagatgaacaggctccctggagggaatgaggtagcagggaggggtttgggagtggggtgcagggaagctgtgctgccacaggtgggatttgctggtggcytccctsgtccaagctttgtttcaagcccaagggatgctcctcaaacagctctgcctgtcagttgatgcagtctccacctctgggaggagccaaccctgtgacacygtgccattttggggcaggtggggatggttgccttcaaaatgaagctgaagacccctgagtacccaaagggccgggacatcatgctcatctgcaacgacatcacacacatgattggctcctttgggccagaggaggacctggtgttcctgcgagcctcggagctggcacgggctgaaggcatcccacgtgtctacattgct

SEQ ID NO: 21940 - DNA, 600 bp, Chicken  19866894233785_3
aggctctcttcaagctgtggggctcctcagagctgcatcccaaggatgtcctgacatacacagagctggtgctggactcgcagggacagctggtgcagatgaacaggctccctggagggaatgaggtagcagggaggggtttgggagtggggtgcagggaagctgtgctgccacaggtgggatttgctggtggcytccctsgtccaagctttgtttcaagcccaagggatgctcctcaaacagctctgcctgtcagttgatgcagtctccacctctgggaggagccaaccctgtgacacygtgccattttggggcaggtggggatggttgccttcaaaatgaagctgaagacccctgagtacccaaagggccgggacatcatgctcatctgcaacgacatcacacacatgattggctcctttgggccagaggaggacctggtgttcctgcgagcctcggagctggcacgggctgaaggcatcccacgtgtctacattgctgccaacagcggtgcgcgtatcggctttgcagatgagataaagcacatgttccaggtggcctgggtggaccctgaggacccctacaaggtgtgtgggtgac

SEQ ID NO: 21941 - DNA, 600 bp, Chicken  19866894233788_1
ctcttatgtactgctttcattcatatgtctctaagtgcataataaagaaaggtcactatctgcttaacagaaggagaagcaacagcccaggaaggtcaggtgatgtgaatctggttttaacaactggggtgtcacaacagcaacaaaccagacaaggaagcaaattacaggctaatgacttcatgctacataagagctatcaaaggaatcctgctagtcttctagcaggattcttccagcatgttctccaggtcaggatgaaggcagcaggatgacacagttgtgagcagctattgtgtraagcccattttctgcattagtggaggactaatttatattcaacacgttgatctcttcaaactctggcagtgtttctgtgtccggtataagaggttctcactgggacatatgaggaacacagtcacagaaaaaaaaatagcatataataagggggaaacgtaacctaagtgactattttgtgtctgaagtgctgaaccattgttcttgctgctgaaggctcggaggagaagtcagcaaatatataaatcagccaatccattttcacacttggacagtcagggcccctgggagactccaccg

SEQ ID NO: 21942 - DNA, 600 bp, Chicken  19866894233788_2
ctgtgtccggtataagaggttctcactgggacatatgaggaacacagtcacagaaaaaaaaatagcatataataagggggaaacgtaacctaagtgactattttgtgtctgaagtgctgaaccattgttcttgctgctgaaggctcggaggagaagtcagcaaatatataaatcagccaatccattttcacacttggacagtcagggcccctgggagactccaccgtgattctatgttctagtgttgcgcttcacattaatttaaaatacctaagaaaagaacccctgagcctgctctgkgggtcttatatctcttactgtctcttacggctgctctgctacagacagaggagggaagtgtgagtgacacagatgctatcctgggctggggattctaaacgagcttgcatggaactatatatagcatgttgcagcagtctcagttttctgcagctgttggtttgacagtacataattttaattctcagtatttctgatgaatttaaaagggagtttaaaaagacacatcccttgcagaaattggattatgatactgcagtcaaatcaagtttaaatgtgttagtgagagcaccagcttgt

SEQ ID NO: 21943 - DNA, 599 bp, Chicken  19866894233795_1
  misc_feature (1)..(22): n is any nucleotide
nnnnnnnnnnnnnnnnnnnnnntgaaagcagaaaatatgaatgtatggtaagtgtagaagtactgcaaaacagatttgcccgactgtaatacatatcaaactcaacattaaaaagtgataagaaactgccaccttatttacatgggaagtacttcaaggcttctaactagtgcctgaaggtttgaattaaagcaacttgcatcccagggcatttttcttgcagtaagttgtcttcatgtagttgctttgaggactctggtccccatgcttcagcacagcctaacaacccctatgggagcraatggttatgtgaacacagatcagaagaatatctttgaatgaaccaagaaagatgaagaacttgatgtaagagatgaaaatcttcagtttaagattttattggatttttggaaagacaataaaggcagaaaggtgctagtccgtaaaacttgggacttcaatcgctggttgttcaaatacttcttgcagtacctgggggtgctggtggatgggaagctggacatgagccagcaatgtgccctcacagcccagaaagccaaccataccctgggctgcatccaaaaaagcacggccagcag

SEQ ID NO: 21944 - DNA, 599 bp, Chicken  19866894233797_1
  misc_feature (1)..(102): n is any nucleotide
nnnnnnnnnnnnnnnnnnnnnnnnnnnnnnnnnnnnnnnnnnnnnnnnnnnnnnnnnnnnnnnnnnnnnnnnnnnnnnnnnnnnnnnnnnnnnnnnnnnnnntctgctcacacagcaaaagcctttaagatgacagtaggctttatatgctgaacagagcgactggctggaggcagcaggacttatacagacccgactgagtaacaaaggtcatatccagatctgaacacctttttttcttgcaaatccaaggcttggcttcaactattcactgttttcagtttccatttctttgacagyggggaattagacctcaaacaattaagtccatgacacccagagagacacatcccaaagggaayggaactccytggggccagatcttcctggtgagctggactcttttaaagccaagcaaagctggggtgcagccctgctgtcctacrgcaggcagcgctttgcagccaccttgcactgatgcacgatacacagcagaagttgtccaacaggcacagactagaggaaacagccttaagttagaccagagaggttcaggttgaatgtaaggaaacatttcttctcagaaagagtgttaatgc

SEQ ID NO: 21945 - DNA, 599 bp, Chicken  19866894233797_2
  misc_feature (1)..(40): n is any nucleotide
nnnnnnnnnnnnnnnnnnnnnnnnnnnnnnnnnnnnnnnntctgctcacacagcaaaagcctttaagatgacagtaggctttatatgctgaacagagcgactggctggaggcagcaggacttatacagacccgactgagtaacaaaggtcatatccagatctgaacacctttttttcttgcaaatccaaggcttggcttcaactattcactgttttcagtttccatttctttgacagyggggaattagacctcaaacaattaagtccatgacacccagagagacacatcccaaagggaayggaactccytggggccagatcttcctggtgagctggactcttttaaagccaagcaaagctggggtgcagccctgctgtcctacrgcaggcagcgctttgcagccaccttgcactgatgcacgatacacagcagaagttgtccaacaggcacagactagaggaaacagccttaagttagaccagagaggttcaggttgaatgtaaggaaacatttcttctcagaaagagtgttaatgcattggaacaggctgctcggggatagtgggtggagtaaccgtccctgggaggtgttcatgaac

SEQ ID NO: 21946 - DNA, 599 bp, Chicken  19866894233797_3
  misc_feature (1)..(31): n is any nucleotide
nnnnnnnnnnnnnnnnnnnnnnnnnnnnnnntctgctcacacagcaaaagcctttaagatgacagtaggctttatatgctgaacagagcgactggctggaggcagcaggacttatacagacccgactgagtaacaaaggtcatatccagatctgaacacctttttttcttgcaaatccaaggcttggcttcaactattcactgttttcagtttccatttctttgacagyggggaattagacctcaaacaattaagtccatgacacccagagagacacatcccaaagggaayggaactccytggggccagatcttcctggtgagctggactcttttaaagccaagcaaagctggggtgcagccctgctgtcctacrgcaggcagcgctttgcagccaccttgcactgatgcacgatacacagcagaagttgtccaacaggcacagactagaggaaacagccttaagttagaccagagaggttcaggttgaatgtaaggaaacatttcttctcagaaagagtgttaatgcattggaacaggctgctcggggatagtgggtggagtaaccgtccctgggaggtgttcatgaaccatgggaga

SEQ ID NO: 21947 - DNA, 557 bp, Chicken  19866894233797_4
atgctgaacagagcgactggctggaggcagcaggacttatacagacccgactgagtaacaaaggtcatatccagatctgaacacctttttttcttgcaaatccaaggcttggcttcaactattcactgttttcagtttccatttctttgacagyggggaattagacctcaaacaattaagtccatgacacccagagagacacatcccaaagggaayggaactccytggggccagatcttcctggtgagctggactcttttaaagccaagcaaagctggggtgcagccctgctgtcctacrgcaggcagcgctttgcagccaccttgcactgatgcacgatacacagcagaagttgtccaacaggcacagactagaggaaacagccttaagttagaccagagaggttcaggttgaatgtaaggaaacatttcttctcagaaagagtgttaatgcattggaacaggctgctcggggatagtgggtggagtaaccgtccctgggaggtgttcatgaaccatgggagaagtggcatcgaggggaagtggttagtgggcatg

SEQ ID NO: 21948 - DNA, 530 bp, Chicken  19866894233802_1
tccttggctacactctgaaatgtggtataaaaaacatctcagtaatagtaacaaaatgctcattttgaagccataaagttcttcttaattccacagatgaagacatactcttctgtactaaaccttttttatttgaataatttctcagttgttggatatttcacatatttattctagaactcccataaaaagagcaaaagaagggaagtagcttcttagaaatcttccacaaattgccattccaagattatcgtattagcccagtagattagcttgatagatggaatataatgctctctyattttagctaatgctgctttactaaaggagctaacaaacttaattctactgagggcaggattacctgacagagtaattgagtaactttgtgtacttacagataggatgaaacagatcaactcatttctttgctctatttgcattgctttgttggaaatttttttgtccctgaacatgctccaaaggctctcactggtgttgggaccaagctatggtgaattcctactgcc

SEQ ID NO: 21949 - DNA, 600 bp, Chicken  19866894233805_1
ttcacaatccttttttaattatttttgctgcattattttattttcaacagtgcctctccttcatatcagaagccttaagttaaaaagtaacagtgcaaaagtcaacttctcacttatatacagtagcaaccatgtgtgtctcatttcctctcactaaatcacttagaccactctgggctgtttctataaaaataaacagaaggcagttacaaggtaggacagaagcaactgtaattactacaaaagaaacactccacaacaaattcaattaagatacctgcattcaatcttagagtaaamatgtttttgaaaaataaaaattaataaagtatcagatgagaatctggctaaaacatattaatgtttttagtagtgagatcacaccattaaaaacggtcctcattaacagtttgttttattaccgatttctgaatctagagtgagacctacctaaaaagaagtggtaacagaatcatatatttcaattttcttctatttggaactaacatttgattttgtccggcatagaaaatggaatagtggaatgcagttgrttcttaaatcacctgttctcttaaggaaaaaaaaattaaacagtya

SEQ ID NO: 21950 - DNA, 600 bp, Chicken  19866894233805_2
cacaacaaattcaattaagatacctgcattcaatcttagagtaaamatgtttttgaaaaataaaaattaataaagtatcagatgagaatctggctaaaacatattaatgtttttagtagtgagatcacaccattaaaaacggtcctcattaacagtttgttttattaccgatttctgaatctagagtgagacctacctaaaaagaagtggtaacagaatcatatatttcaattttcttctatttggaactaacatttgattttgtccggcatagaaaatggaatagtggaatgcagttgrttcttaaatcacctgttctcttaaggaaaaaaaaattaaacagtyacaacataatcagtcagatcatttatgtacttcatgtagtctcactgaggcattttgattgcttgtttttggacaaacttgaataaaaatatgaagtatttaaaatatatactggtataaaataaggctcttctgattcgtatatatttgtttatgtttgtgttcaaaactgtgaccaccactgtactggaacctaaatggtcttttaagttattttatgtattttaggatgtgtattaggtatgcatgtatgta

SEQ ID NO: 21951 - DNA, 600 bp, Chicken  19866894233805_3
matgtttttgaaaaataaaaattaataaagtatcagatgagaatctggctaaaacatattaatgtttttagtagtgagatcacaccattaaaaacggtcctcattaacagtttgttttattaccgatttctgaatctagagtgagacctacctaaaaagaagtggtaacagaatcatatatttcaattttcttctatttggaactaacatttgattttgtccggcatagaaaatggaatagtggaatgcagttgrttcttaaatcacctgttctcttaaggaaaaaaaaattaaacagtyacaacataatcagtcagatcatttatgtacttcatgtagtctcactgaggcattttgattgcttgtttttggacaaacttgaataaaaatatgaagtatttaaaatatatactggtataaaataaggctcttctgattcgtatatatttgtttatgtttgtgttcaaaactgtgaccaccactgtactggaacctaaatggtcttttaagttattttatgtattttaggatgtgtattaggtatgcatgtatgtatatatgtatgaatacatacacatactaacctttcatctataaaaa

SEQ ID NO: 21952 - DNA, 600 bp, Chicken  19866894233806_1
tagcagtgccagttactgctgactgcttgacctggtgtgctgttgtgttggaaggcctgctctgtctgccctctgcccatcaccatcccgaccaaagagctctgcaggagaaccccctgcactcagcacaggcatagcccagaatcccaagggattccctttatccaggagaaatctctcagtgcttcatagaagctgaagcaccagtctttctcaggggcatttcttgtcaaggacacctgaatgaaatggtgtaattacttcaggaataacctttggtcaaacacatttgatagcccragggctgtaccctcaccagctgtgcacatactggcagaagtgactgtttggcagcagctcagagggaatgctcatcagaagagaaacctttcttttagaatgctacagtctgtgaaagcagagacccgaatcmttctgctcagtcaaggtgaaggaactgaaagctcatgcaaaatcagttcaaattgraaaaaagaggaaaacattcttaaygaggaggttagttccagctggttgtattccacaggaaygagtccagtcccccctgtgctacatcacttctctttagactcctgtgga

SEQ ID NO: 21953 - DNA, 600 bp, Chicken  19866894233806_2
atagcccagaatcccaagggattccctttatccaggagaaatctctcagtgcttcatagaagctgaagcaccagtctttctcaggggcatttcttgtcaaggacacctgaatgaaatggtgtaattacttcaggaataacctttggtcaaacacatttgatagcccragggctgtaccctcaccagctgtgcacatactggcagaagtgactgtttggcagcagctcagagggaatgctcatcagaagagaaacctttcttttagaatgctacagtctgtgaaagcagagacccgaatcmttctgctcagtcaaggtgaaggaactgaaagctcatgcaaaatcagttcaaattgraaaaaagaggaaaacattcttaaygaggaggttagttccagctggttgtattccacaggaaygagtccagtcccccctgtgctacatcacttctctttagactcctgtggagttgatgcttccaactgagcacaacagctcatgaaactgtataggtggtggagtgatggcaatgctggagggcaggattcactgaccaaacacagatgtttcctttaggtgatcagttccgccccagatgtta

SEQ ID NO: 21954 - DNA, 600 bp, Chicken  19866894233806_3
ccaggagaaatctctcagtgcttcatagaagctgaagcaccagtctttctcaggggcatttcttgtcaaggacacctgaatgaaatggtgtaattacttcaggaataacctttggtcaaacacatttgatagcccragggctgtaccctcaccagctgtgcacatactggcagaagtgactgtttggcagcagctcagagggaatgctcatcagaagagaaacctttcttttagaatgctacagtctgtgaaagcagagacccgaatcmttctgctcagtcaaggtgaaggaactgaaamctcatgcaaaatcagttcaaattgraaaaaagaggaaaacattcttaaygaggaggttagttccagctggttgtattccacaggaaygagtccagtcccccctgtgctacatcacttctctttagactcctgtggagttgatgcttccaactgagcacaacagctcatgaaactgtataggtggtggagtgatggcaatgctggagggcaggattcactgaccaaacacagatgtttcctttaggtgatcagttccgccccagatgttagcactacggacttctcagcatttatccaagt

SEQ ID NO: 21955 - DNA, 600 bp, Chicken  19866894233806_4
tagaagctgaagcaccagtctttctcaggggcatttcttgtcaaggacacctgaatgaaatggtgtaattacttcaggaataacctttggtcaaacacatttgatagcccragggctgtaccctcaccagctgtgcacatactggcagaagtgactgtttggcagcagctcagagggaatgctcatcagaagagaaacctttcttttagaatgctacagtctgtgaaagcagagacccgaatcmttctgctcagtcaaggtgaaggaactgaaagctcatgcaaaatcagttcaaattgraaaaaagaggaaaacattcttaaygaggaggttagttccagctggttgtattccacaggaaygagtccagtcccccctgtgctacatcacttctctttagactcctgtggagttgatgcttccaactgagcacaacagctcatgaaactgtataggtggtggagtgatggcaatgctggagggcaggattcactgaccaaacacagatgtttcctttaggtgatcagttccgccccagatgttagcactacggacttctcagcatttatccaagtgaatcccatctctgggaatcccatc

SEQ ID NO: 21956 - DNA, 600 bp, Chicken  19866894233806_5
tcaggggcatttcttgtcaaggacacctgaatgaaatggtgtaattacttcaggaataacctttggtcaaacacatttgatagcccragggctgtaccctcaccagctgtgcacatactggcagaagtgactgtttggcagcagctcagagggaatgctcatcagaagagaaacctttcttttagaatgctacagtctgtgaaagcagagacccgaatcmttctgctcagtcaaggtgaaggaactgaaagctcatgcaaaatcagttcaaattgraaaaaagaggaaaacattcttaaygaggaggttagttccagctggttgtattccacaggaaygagtccagtcccccctgtgctacatcacttctctttagactcctgtggagttgatgcttccaactgagcacaacagctcatgaaactgtataggtggtggagtgatggcaatgctggagggcaggattcactgaccaaacacagatgtttcctttaggtgatcagttccgccccagatgttagcactacggacttctcagcatttatccaagtgaatcccatctctgggaatcccatcttcatctccagatgaagagggaat

SEQ ID NO: 21957 - DNA, 600 bp, Chicken  19866894233806_6
gtgtaattacttcaggaataacctttggtcaaacacatttgatagcccragggctgtaccctcaccagctgtgcacatactggcagaagtgactgtttggcagcagctcagagggaatgctcatcagaagagaaacctttcttttagaatgctacagtctgtgaaagcagagacccgaatcmttctgctcagtcaaggtgaaggaactgaaagctcatgcaaaatcagttcaaattgraaaaaagaggaaaacattcttaaygaggaggttagttccagctggttgtattccacaggaaygagtccagtcccccctgtgctacatcacttctctttagactcctgtggagttgatgcttccaactgagcacaacagctcatgaaactgtataggtggtggagtgatggcaatgctggagggcaggattcactgaccaaacacagatgtttcctttaggtgatcagttccgccccagatgttagcactacggacttctcagcatttatccaagtgaatcccatctctgggaatcccatcttcatctccagatgaagagggaatatgcagtaagatttcagacagagtccctggttgtttta

SEQ ID NO: 21958 - DNA, 600 bp, Chicken  19866894233809_1
tttctgagcttgcctctcactgctcagggatgccagaaaacccacttctgcactggtgatggtttcatctctctctgccctgggccttgctccccagagtgactgagtcaacgtctgtgctgaacataatggcttacaccacttcttcatggacccagtccagaatttgtcttttccacatgtgaaaagctgggccatagcagttctttgtccccaactacagttgtttgcttcttgaagcaatataataaggaaactgttgcagaaaccagttgtgccatgattgaatgagaaattctkcttctggtaactttctgctattttgcttttatttttcacctccaaaaaatactctacaacagctgttcatcccacactgaagcctctgaccatctcacccctgtcagtatttggcaatgaggcagccaataaaacaaatgctatgcatagctgatacaggacaatcctagcatgggaaagtcagaggctgaaaaaaaaaaagtattagactggtcatctagcaagggtatagttatgctgcaggaggctctgggattctggacatgtaccgtgtggggcacatctcattttttttctctt

SEQ ID NO: 21959 - DNA, 600 bp, Chicken  19866894233811_1
ggccggcccatatttcactggttagagttgcagtaaagaggaaatgtgggtttttttttcacatttcaagctatcattgctaaaccttgcatatgtaaagagcaaacaccttttaaatcctcatgggctcctcaggagatggaatgcttttagtattctcccctcctcccaagcacagtggaaattaagaccagaaataaaacgctcaaaaataaaccgtatttcagcacggccacagatttcaagccggtctgttggatgctggggacagagttagagtttctgagccctctctgtgcygcccttggccagcctggataacccttgcagcagtgactgcagatgaagycctgccagaggaaatataccagggtttgtaaggaggatggatgcacagctgctgcatggggtgctgggaggggttagctgtattggcagcacacactggtaatagccccaacctgggctccccaaccagggaagtgaacacaggtgtacccaaagttgccaggaaggcacccgctgccctccagcccctgttttcatggcaccagagaacagcagcatcactccacctgttgggtaccattaggagcaatg

SEQ ID NO: 21960 - DNA, 600 bp, Chicken  19866894233811_2
gtttttttttcacatttcaagctatcattgctaaaccttgcatatgtaaagagcaaacaccttttaaatcctcatgggctcctcaggagatggaatgcttttagtattctcccctcctcccaagcacagtggaaattaagaccagaaataaaacgctcaaaaataaaccgtatttcagcacggccacagatttcaagccggtctgttggatgctggggacagagttagagtttctgagccctctctgtgcygcccttggccagcctggataacccttgcagcagtgactgcagatgaagycctgccagaggaaatataccagggtttgtaaggaggatggatgcacagctgctgcatggggtgctgggaggggttagctgtattggcagcacacactggtaatagccccaacctgggctccccaaccagggaagtgaacacaggtgtacccaaagttgccaggaaggcacccgctgccctccagcccctgttttcatggcaccagagaacagcagcatcactccacctgttgggtaccattaggagcaatggttctcattggctgctacagggaacaggacatcggtgagcccccactcc

SEQ ID NO: 21961 - DNA, 600 bp, Chicken  19866894233817_1
aggcctttcacagggttattatcacaaatgcttccttaggtggctgtagagagagctctggtccttcctaaggaaggctggcactttgcaggatgaatctccacctgtagataaagctggtgtactagaagatgatggcttagcccctggatggatagatggcctcacagttgggtgtattaaaccattatttgcttaaatgagtccaagatgttcactagtccatgcctctctattccattattctgacatcttactaacccactatttttttcttttaaatctgcaggtttttttttycccccctccttctttgttgttaccaacagataagtctgatagtactcaatgcttatcagctctgcagcaaggtactagaaagctctttgtcgtgttctttcacaggggctctctagtaggagcactcactggggccccagaaacatggctgagggacaaatgacttatcccaggctgcctggctactgacatagggagccacaagcaggagccatttaaaagctgtatgactgaatggcatttcaaggtttgtataaagtgaggtagttgcatctcacatgaaataaaaacttcagtgca

SEQ ID NO: 21962 - DNA, 599 bp, Chicken  19866894233820_1
  misc_feature (1)..(131): n is any nucleotide
nnnnnnnnnnnnnnnnnnnnnnnnnnnnnnnnnnnnnnnnnnnnnnnnnnnnnnnnnnnnnnnnnnnnnnnnnnnnnnnnnnnnnnnnnnnnnnnnnnnnnnnnnnnnnnnnnnnnnnnnnnnnnnnnnnntgattacagcataccaaagtcatcacagtctattttctatccagggtctttctctgggaactgtaatggtagttgaactctttttaagcatgaaaagaactataaacctgctacagcttttctagggtcagcagcacattctggagatgtaagcaaggcagacactaarcatgaagcaaaaatggaatttgttatttatgaagaattcaatcagtcgttatctttgaattattttttgtatacgttactaagcttaaagcaattaatgaatgtaataattagaaacttgatcattcttgatggatatcctcagtgaaaggaagtgttcccccgtcaccaccatggaacgctagggtttagccatcattagaagaatgttcaaattgaacatgaaacaccagttacttccccgtacttgcagacacagggtctttgagcaaagaatacctctacaaatgtctgaactgc

SEQ ID NO: 21963 - DNA, 600 bp, Chicken  19866894233822_1
gaacgggcctgtcctcacaggcacacacttcacccatgttcatcccagctggcttggaacagcacgaggctgggagccccttgtcccctcggctccagcccgtcatcatcctcgagccctcagtcacccacactccacttgtggcaggtaagcatcgagcctggggcaggcagtggggccagcagcactcaaggcatagcactgagcttcctttgggagcaaggcagccttttgatttcccgtttctcttccacgagctgcagctgaggagatggaagacgttgatcttagtgcctgccyagtggacaaagaaacacctcacctctccctcctttcccctgcagtgccaggtctggggactgtccccttctccttcgccccatcgctcatctctgcagagcgcctgtcrctcccaggccaccacaaaccactgggcaggacccgctcggagcccctgccccagaaccccaaggccatccagcagcagctggtgtaccagcagcaccacacccagttcctggagaggctcaagcagcagacgcatctgggcaaggtaagcacagagctatagcgtggggtgcaggaggygctgggggaagg

SEQ ID NO: 21964 - DNA, 600 bp, Chicken  19866894233822_2
cctcgagccctcagtcacccacactccacttgtggcaggtaagcatcgagcctggggcaggcagtggggccagcagcactcaaggcatagcactgagcttcctttgggagcaaggcagccttttgatttcccgtttctcttccacgagctgcagctgaggagatggaagacgttgatcttagtgcctgccyagtggacaaagaaacacctcacctctccctcctttcccctgcagtgccaggtctggggactgtccccttctccttcgccccatcgctcatctctgcagagcgcctgtcrctcccaggccaccacaaaccactgggcaggacccgctcggagcccctgccccagaaccccaaggccatccagcagcagctggtgtaccagcagcaccacacccagttcctggagaggctcaagcagcagacgcatctgggcaaggtaagcacagagctatagcgtggggtgcaggaggygctgggggaaggatgctggcaggatgcaggatcacagccttttctgcagggcagcaattagctgatacccagggccaagcctgcgtgctgctgcctcgcagtgagctgtggggctgtgctc

SEQ ID NO: 21965 - DNA, 600 bp, Chicken  19866894233822_3
tagtgcctgccyagtggacaaagaaacacctcacctctccctcctttcccctgcagtgccaggtctggggactgtccccttctccttcgccccatcgctcatctctgcagagcgcctgtcrctcccaggccaccacaaaccactgggcaggacccgctcggagcccctgccccagaaccccaaggccatccagcagcagctggtgtaccagcagcaccacacccagttcctggagaggctcaagcagcagacgcatctgggcaaggtaagcacagagctatagcgtggggtgcaggaggygctgggggaaggatgctggcaggatgcaggatcacagccttttctgcagggcagcaattagctgatacccagggccaagcctgcgtgctgctgcctcgcagtgagctgtggggctgtgctcagcttcagtgtctcccatgtccatcattcttgggctctggagtgccctgctacccccagcctctcctcagcctgccctgtccccatcacctctgtgtgctcacttgtcacccctctgcatgcagcgcatggtgaaaaccagtgagaagccccggctgcggcagatcccctcttcagagg

SEQ ID NO: 21966 - DNA, 600 bp, Chicken  19866894233825_1
acctgtgctccagtacattgtccaagcaagtaaagagacactcaaaacaagaggctttggcagctgagattctgaagtaattgctctgcaaaaccttatagcaacacctggttttggtgaaaatgcagcaggtacaagactggagagttttaagggacagaaatcaccacaatgttgtgcaagaatagcactctctgggaatacagggaaacacatgcatggaatgcaacagactaacctgcattgcgatagcagatggaagacatgcaaatcctgtcttctaatcccttctgtttgcawtcagaaagttaggamgtgtggggggatacaaagtgaaagtctaaactctaagagcccaggactttcagaaagaagtgacaggcatgtgcagctctctctggatgctatggcactaaaatcctatgccagtttgcagcagttgagtgcaattgcgtcttccctggctcagctggctggaacctgctgcaccaaccatagcaagagagtgcagctcagccccagcaaaatgtagaaggataattgcttttggtagatcaactaactagattaaagcaaaagtctccattacttctgctgttt

SEQ ID NO: 21967 - DNA, 600 bp, Chicken  19866894233825_2
cattgtccaagcaagtaaagagacactcaaaacaagaggctttggcagctgagattctgaagtaattgctctgcaaaaccttatagcaacacctggttttggtgaaaatgcagcaggtacaagactggagagttttaagggacagaaatcaccacaatgttgtgcaagaatagcactctctgggaatacagggaaacacatgcatggaatgcaacagactaacctgcattgcgatagcagatggaagacatgcaaatcctgtcttctaatcccttctgtttgcawtcagaaagttaggamgtgtggggggatacaaagtgaaagtctaaactctaagagcccaggactttcagaaagaagtgacaggcatgtgcagctctctctggatgctatggcactaaaatcctatgccagtttgcagcagttgagtgcaattgcgtcttccctggctcagctggctggaacctgctgcaccaaccatagcaagagagtgcagctcagccccagcaaaatgtagaaggataattgcttttggtagatcaactaactagattaaagcaaaagtctccattacttctgctgtttgcacccgatgttaca

SEQ ID NO: 21968 - DNA, 599 bp, Chicken  19866894233831_1
  misc_feature (1)..(80): n is any nucleotide
nnnnnnnnnnnnnnnnnnnnnnnnnnnnnnnnnnnnnnnnnnnnnnnnnnnnnnnnnnnnnnnnnnnnnnnnnnnnnnnncagagagcgctggatctgccttcctgaagagcataaaactccaacccctccttcttcctcctcaagtgacacttgactcatccccttgccagagctgttcccgagacacacctgtgaaacatagcccaagaaacaggttgtaatagcagccagtacaaagcagcatgcatggtatggcaaaaagcaagagagaagaatagttagccaagatcaatcttckctagcaaaacactcattatccagaaagtaccagaaaacataaagtggtttaagccttagactaataaatcatagaatcatggaattacagaatggctggggttggaaggggcctcaaaaactattcaattccaacctcccattgtgagcagggctgccacacaccagatgaggttaagaacctgcaatacacgtgtaggtagagaaaaggagataagactacaggttattcatgtaaaaacaagcacccatattacagccagaaaagacagagagaatgactgtcataaaatgacagtt

SEQ ID NO: 21969 - DNA, 600 bp, Chicken  19866894233831_2
ataaagtggtttaagccttagactaataaatcatagaatcatggaattacagaatggctggggttggaaggggcctcaaaaactattcaattccaacctcccattgtgagcagggctgccacacaccagatgaggttaagaacctgcaatacacgtgtaggtagagaaaaggagataagactacaggttattcatgtaaaaacaagcacccatattacagccagaaaagacagagagaatgactgtcataaaatgacagtttgtgaaacagatttgatgacggtacttccatgaaaaggygcatttaatggctcaagaagaatacatggagtgatcagtctgggtaagaaagaagacctgtacagtttcaagttcacacatactttaagaaccatagagtggcctgggttgaaaaggatctcaaagatcatcgagtttcaacccccctgctatgtgcaggatcgccaaccaccagaccaggctgcccagagccacatccagcctggccttgaacacctccagggatggggcatccacagcctccttgggcaacctgttccagtgcgtcaccaccctctgtgtgaaaaactttcttctaat

SEQ ID NO: 21970 - DNA, 600 bp, Chicken  19866894233844_1
gagctttatggattaaatccttcttatgaaatcccactgtgatctttgtgttctaggcaataaagtgcactgcataatatgtgcacattttatgtttattggcttgagaaaaatagaactacttatgtcagcctttaagaagtcttctgcatctttcctgttactgtcttaagggactgctaagttatggtgtatcgagaaacaaacaaaaacccatgatatgcatgatttttcttgctatccaccatcctctatttcagagtcttccttgggcctgaaccgttttgccaagtcattccwggccacaagtttttgccattatttggtaaagtgcctctggtttgggcagccttgttcactgagttgttgtactttgaaagtatagtgaaattctttaacattagctattcaagctattctgcatgcatgggaataatccagttgaatgtgttagagatcttacagaatctttaaaacataacagtgcaaaattgaaatgttcttctccccttaacagaggcagcactagaaactgatgttacaatttataccacagcaccggatatctacttagattatattagcctaatgttttttcta

SEQ ID NO: 21971 - DNA, 600 bp, Chicken  19866894233846_1
tgtgttaacaaaataagatgccttccggtaattctagaattctttagtagataaggaaaaacaactgaagaattttgatgcaaagctgtcgaggtcaaacaatgaactgcacacatgatgtgtttgtgatgggagaaaggtggaagtcaatattcattttctttcttcacattcattgttgtcttaaaaataatcataaaacagatgatttctctttcaaatatttagtataaagctataaatagcattttgatatttaatggtttgaagaatcattgaccataaaaggaagaatgtgtkttttagtgatccctttaattgctttctcagttattttggcagtaactccactttccactgttattttaaatattaatgaaggaatcttagaaaatactagtaataatttcttgttatgttcaagtgatggctacatgatggccagagatatctggtattctacaccatacctctcttgtttctgcacccatcacgatcatgtttttagcagtttaagatttgttagcagcaaaataaaaaatatatgtatattatatctgccctatttataagtttactttcacctgacagtcctcctga

SEQ ID NO: 21972 - DNA, 560 bp, Chicken  19866894233850_1
atgcagggacaccaacctccatatctaagactagaccaggctgcccggcgccccatccaacctggccttgaacacctccagggatggatggggcatccacagcctctctgggcagctgttccagcaccgcatcgatctctctgtaaagaatttcccccgtatccaacttaaatcttccctccctcacaacttaaaacagtttccccttatcctgccatcacctacccttgaaaagagttgactccccccctgtttgtagtctccctttaggtatgggaaggatgcaatgaggtcaccctkcagccttcccttctccaggctgaacaagcccagctccctcagcctgtcctcaaaggggagttgctgcagccytccgatcatctttgtggccctcctctggaccctctccaacagctctttctttattgaggggcttcatgacctggacgcagtaatgcagatggggctccacgagggcagagtagagagagacaatcaacaccctgtgcctgctgccacccctcttctgatggagccaatcataccatttgctttctggg

SEQ ID NO: 21973 - DNA, 488 bp, Chicken  19866894233850_2
cacctccagggatggatggggcatccacagcctctctgggcagctgttccagcaccgcatcgatctctctgtaaagaatttcccccgtatccaacttaaatcttccctccctcacaacttaaaacagtttccccttatcctgccatcacctacccttgaaaagagttgactccccccctgtttgtagtctccctttaggtatgggaaggatgcaatgaggtcaccctkcagccttcccttctccaggctgaacaagcccagctccctcagcctgtcctcaaaggggagttgctgcagccytccgatcatctttgtggccctcctctggaccctctccaacagctctttctttattgaggggcttcatgacctggacgcagtaatgcagatggggctccacgagggcagagtagagagagacaatcaacaccctgtgcctgctgccacccctcttctgatggagccaatcataccatttgctttctggg

SEQ ID NO: 21974 - DNA, 600 bp, Chicken  19866894233855_1
tgtttttacatctccacagatccagactgcgaagctttttgcattttgctcccatcatgcttgctataagatcatagtcttcaatctgcaaggaaaataaacactttgtcatgtatactgcccttccagacacacacaggtgtttcaagatttgcttgctaacacatctacggatccatcctaagcatttgtcacttctaaagatctctgaaaattactcactgtacactaaggtctactcctacataagacaaaaataaagttcctatttactcccagacatacacatgcttttatatycacctgatgctgaggaccagtgaaaatgcagttagaagttcatttgctttgagaactccctccttttcttcaagagattattaaaattgtatttatgacaataggaatggcaactataagcgtatgtgcattaaagagggcacctattccctttccaggttgatcatctgctacacttccttatggaagcattgctatttacctcagacaagcctaagaggcccatagtaccccaactccacaggtagaaggaatgaaatccactatcaaaaatcataggaagtctagagttgttggaaa

SEQ ID NO: 21975 - DNA, 600 bp, Chicken  19866894233856_1
acaggcactcctgcaagccagggtggccggtccctggtgcagcaataataatgaaatgactgaaattcaacagcagtcctggcatggatatcaccctttaaaaggcagaagactccggaattaaccttagctgccacatactatagctagcagcacctgggacccattagttcatacataatttcccctggaacgctgattaatgtggttgtcccaaacgcatttcagtgctctgtgagatgcaggactggggctctgtggctgtgttgctattaaagtgtgaaaaaatgccatcctatrctccagctgcaccttgaccccttgtagtgcaaagggggcaagtggcttagttgggaaggatgtctgagactggttatgtgttggttttagagcctcagaaatctgctgaagacaggaaacagtcacagttaaatgcaggcatctctatatctgttggtggagcgagcataaagccctcctgcctttagaagactgcttccttgctcactagggattttgcttaggctctcacaaacctcagcagtcagctctggtcccacaaaagtgggatgtcaaagtgtgtctcagtgctttctgaga

SEQ ID NO: 21976 - DNA, 600 bp, Chicken  19866894233856_2
gtggagcgagcataaagccctcctgcctttagaagactgcttccttgctcactagggattttgcttaggctctcacaaacctcagcagtcagctctggtcccacaaaagtgggatgtcaaagtgtgtctcagtgctttctgagagctggatttctggtatgtggtgaaccctggtctgctcaggccttgaagactgaagtgcgtggaacgggggctaggagccagcgaaacaggcatctgctgtctttcctcgtgccttgcagatgcgtgaacacgttctgcacagggcaccgtctgcaytgcctcagatttcaaatcccattacaggtgattacaataaycaagagaacaaattcacaaaccatcttacccaagtccttgtatgaaagaaagggcatcatttccgtcaggctggatgtggaaaaaattgatttcctggcgtccaaacrtaagaacagccatgctggttgagacaagtccatccagcccaacagcctgtctcttgcataaaaaccagctgatgcttagggaatggcagaagagagggctgagcacacagtgatggctccctggcacactgtcccaaaatccagcaagctg

SEQ ID NO: 21977 - DNA, 600 bp, Chicken  19866894233856_3
tccttgctcactagggattttgcttaggctctcacaaacctcagcagtcagctctggtcccacaaaagtgggatgtcaaagtgtgtctcagtgctttctgagagctggatttctggtatgtggtgaaccctggtctgctcaggccttgaagactgaagtgcgtggaacgggggctaggagccagcgaaacaggcatctgctgtctttcctcgtgccttgcagatgcgtgaacacgttctgcacagggcaccgtctgcaytgcctcagatttcaaatcccattacaggtgattacaataaycaagagaacaaattcacaaaccatcttacccaagtccttgtatgaaagaaagggcatcatttccgtcaggctggatgtggaaaaaattgatttcctggcgtccaaacrtaagaacagccatgctggttgagacaagtccatccagcccaacagcctgtctcttgcataaaaaccagctgatgcttagggaatggcagaagagagggctgagcacacagtgatggctccctggcacactgtcccaaaatccagcaagctgtggctcagggagttccccaagccagatgtggtatctttaat

SEQ ID NO: 21978 - DNA, 600 bp, Chicken  19866894233856_4
atttctggtatgtggtgaaccctggtctgctcaggccttgaagactgaagtgcgtggaacgggggctaggagccagcgaaacaggcatctgctgtctttcctcgtgccttgcagatgcgtgaacacgttctgcacagggcaccgtctgcaytgcctcagatttcaaatcccattacaggtgattacaataaycaagagaacaaattcacaaaccatcttacccaagtccttgtatgaaagaaagggcatcatttccgtcaggctggatgtggaaaaaattgatttcctggcgtccaaacrtaagaacagccatgctggttgagacaagtccatccagcccaacagcctgtctcttgcataaaaaccagctgatgcttagggaatggcagaagagagggctgagcacacagtgatggctccctggcacactgtcccaaaatccagcaagctgtggctcagggagttccccaagccagatgtggtatctttaatagcccttgatagattttttgcttccatgaatttgtgtaattgctttttgaacctgtatcaattcttgacattgcagcatcctgtgacaatcagaggcaggctccagca

SEQ ID NO: 21979 - DNA, 600 bp, Chicken  19866894233858_1
ccccctagaatcaatttactttctagaaatcattatgagatcaagtaaagtttgtctgctgtggaagataaacacatacagaaggcgctgggctgtggagtaatgaagacatcgttgaagtgcggttgcaattttataagagtagaggagaaattattgaatttgttttacactccccatttatcaatttccttcccaagtagctgcagttcttaaaaggcaaaagaagggtgaagggaagtctataaggaagagaatgatctctggaagtttaagccttcagacataaagaaaaggtcytatctctgtcttttgagacttaaaagcaatgaatagtaggtggatatgattctctcctcatttttatagctattgtttagctactacagtgtttgtaaaatacattagaaaattctttataattctcttaagcagcttaaatcccttttcactttccccaggcaaaacctgattcacttgcatgtttttgggctctgaccttcacaatgctgatctcccaacagtagtagccagtttcttattctttaagtgctggaggaatcatgaaaaattcagacactgggtttccctgagaccaat

SEQ ID NO: 21980 - DNA, 600 bp, Chicken  19866894233860_1
ttgagtattctctatatctgagtatttactgaacaaaagggtttcttgctgctaatctcgtttttttccattactaatatatggccctaatgggatggaaaatttccccatggattccaaggacctaaaagccagagaggagcgaaatcagtttaaagttaatgtacttcacacatacctactttgccactccaccaagtgtcagcattcccttggcagtcttaaaaaccactctctactcaaaaacgtagaatcagaattagaatcttagaatcgtggaatgctttgggttggaagggmccttaaagcccatccagttccgactccctcctagggggctccttctaaggaaaaagtaagaatctggttcgttctaagaaaataaataaatgtttgagcatgcttggggactgacccaggaaaagcagtccatgtccaccattatttggtctctgttgagctcccagaggcagccagcacagagggcagatggaggtctgaactgtgggacttggtgctgacatgcagcatcctacagcctttggttcctgcgttgaagcttcaacctgggcgaagctttccctgttccctggagatgct

SEQ ID NO: 21981 - DNA, 600 bp, Chicken  19866894233869_1
ctgacaaacagttatgctgcagcagctcaagaagtgcaatattctctgtgctaatttcagtaaaacagcacgtttttgaaatgagctaatccacagaaagtgacagaatgttacattgctgaggcccggctgagctaatggtacaaaatgaaagaatgttttcactccctgttctctgagttcagttggcataataaaatactgttttccttcgtataatatacatccttctactttgcttctctgtcaaaataaatgactggcagggaattaaatgggttgttcctggacataggatgktaggatggaaaggagtgtttgcccagcccatatctttgctagtacagtgctccttaccttgcattttgcagtgctctttccaatttagtgttaaatgtctcaagcaggcagccctccagtgctcttcttacaggtcttttgctcagcttcagggtgtgaacttgcaagcaaatagagtcacgttaccgaggcttaatgaagtagcccactgtaattatgagcaaaaacacttgaacttgccccaacagcaraatacagcatgtgaacataaattacagctgacaaaaatgagaagagacc

SEQ ID NO: 21982 - DNA, 600 bp, Chicken  19866894233869_2
ataaatgactggcagggaattaaatgggttgttcctggacataggatgktaggatggaaaggagtgtttgcccagcccatatctttgctagtacagtgctccttaccttgcattttgcagtgctctttccaatttagtgttaaatgtctcaagcaggcagccctccagtgctcttcttacaggtcttttgctcagcttcagggtgtgaacttgcaagcaaatagagtcacgttaccgaggcttaatgaagtagcccactgtaattatgagcaaaaacacttgaacttgccccaacagcaraatacagcatgtgaacataaattacagctgacaaaaatgagaagagaccttctcaataccacacgttagcatgattttgtccacggctggggtggaataaaagctttaagtagtctgtaatagtaataatagtatcacaactgtcaactgagaagtgggataacatggacactttttcttgtgcttgttggaaagttttgtctccctgtttgtctcctgcttttctcttacgactcctagctatatgcctgtgcagcaggggcaatcaattccattcctttggggttaatatccttgaaa

SEQ ID NO: 21983 - DNA, 600 bp, Chicken  19866894233875_1
gtttactcgtgtgagcagtgcagctttgctggagtttgattccttattgtctttgtggtactgagggcataatgcttaattggagcctctgctgaaccaagctcataaacttgtgtctgctgcagtacgctcttcttatttcttcctcactgggagtgacagcccttccaaacatcagcagtgacttgtccagtcaagattttagttacgaaggattttcttttaagatttgtaattccttctagactaccgttgtcctttaattaaaagcgtggtgattgtgattattatttttcagtygtgtagctataaatgtttctccagattgttcttaaagtgttgcctttctctaaatttgaagacttwgctttctgtgacttctgccaggagatgctgcagttgccttaaagcagcttttcagacatccttgtttgtaattttagtttacgttttacctctgtgtggcagtgtttgggtgcagtgaaaccatatgtgatgactgcatgcctgaaaagacaacacagcatcttaaatgttagggaggtacgttaatggaaaatcrcttataaccccaactgtttagtaaacaacaagtatata

SEQ ID NO: 21984 - DNA, 600 bp, Chicken  19866894233875_2
gcataatgcttaattggagcctctgctgaaccaagctcataaacttgtgtctgctgcagtacgctcttcttatttcttcctcactgggagtgacagcccttccaaacatcagcagtgacttgtccagtcaagattttagttacgaaggattttcttttaagatttgtaattccttctagactaccgttgtcctttaattaaaagcgtggtgattgtgattattatttttcagtygtgtagctataaatgtttctccagattgttcttaaagtgttgcctttctctaaatttgaagacttwgctttctgtgacttctgccaggagatgctgcagttgccttaaagcagcttttcagacatccttgtttgtaattttagtttacgttttacctctgtgtggcagtgtttgggtgcagtgaaaccatatgtgatgactgcatgcctgaaaagacaacacagcatcttaaatgttagggaggtacgttaatggaaaatcrcttataaccccaactgtttagtaaacaacaagtatatatcttaagtctrtaaagatcggaatttgatgtgagatttttagtcaacttctatatcttgactttcc

SEQ ID NO: 21985 - DNA, 600 bp, Chicken  19866894233875_3
attaaaagcgtggtgattgtgattattatttttcagtygtgtagctataaatgtttctccagattgttcttaaagtgttgcctttctctaaatttgaagacttwgctttctgtgacttctgccaggagatgctgcagttgccttaaagcagcttttcagacatccttgtttgtaattttagtttacgttttacctctgtgtggcagtgtttgggtgcagtgaaaccatatgtgatgactgcatgcctgaaaagacaacacagcatcttaaatgttagggaggtacgttaatggaaaatcrcttataaccccaactgtttagtaaacaacaagtatatatcttaagtctrtaaagatcggaatttgatgtgagatttttagtcaacttctatatcttgactttccataaaactcaaatggcagttctaaaactcctgtacataaactaactggaaatatggctgggttttaatgacggagtggtatcaatgtaagtcccctactgtaagaaaaattagttaaaagctctccgtttcagaggggaaattatgtctctgaaattaagttactgagatcactgaacataattggagaaagggga

SEQ ID NO: 21986 - DNA, 600 bp, Chicken  19866894233875_4
aatgtttctccagattgttcttaaagtgttgcctttctctaaatttgaagacttwgctttctgtgacttctgccaggagatgctgcagttgccttaaagcagcttttcagacatccttgtttgtaattttagtttacgttttacctctgtgtggcagtgtttgggtgcagtgaaaccatatgtgatgactgcatgcctgaaaagacaacacagcatcttaaatgttagggaggtacgttaatggaaaatcrcttataaccccaactgtttagtaaacaacaagtatatatcttaagtctrtaaagatcggaatttgatgtgagatttttagtcaacttctatatcttgactttccataaaactcaaatggcagttctaaaactcctgtacataaactaactggaaatatggctgggttttaatgacggagtggtatcaatgtaagtcccctactgtaagaaaaattagttaaaagctctccgtttcagaggggaaattatgtctctgaaattaagttactgagatcactgaacataattggagaaaggggattttgtatgtaaacaatctaaaaggcttaatcaggcgtgacagaatact

SEQ ID NO: 21987 - DNA, 599 bp, Chicken  19866894233884_1
  misc_feature (1)..(244): n is any nucleotide
nnnnnnnnnnnnnnnnnnnnnnnnnnnnnnnnnnnnnnnnnnnnnnnnnnnnnnnnnnnnnnnnnnnnnnnnnnnnnnnnnnnnnnnnnnnnnnnnnnnnnnnnnnnnnnnnnnnnnnnnnnnnnnnnnnnnnnnnnnnnnnnnnnnnnnnnnnnnnnnnnnnnnnnnnnnnnnnnnnnnnnnnnnnnnnnnnnnnnnnnnnnnnnnnnnnnnnnnnnnnnnnnnnnnnnnnnnnnnnnnnnnnctcctaataagctcatgttagaagcaagttctgtgtcagctgaagcttaacccttytacatttttccctgactgggcacttcttaaaaaaggataatgatttagtctcattttctatgttattgcagcattggaaagtcttggatcagactttcggatgttcagwcaacttctggatctgctgcaaagcaatggctttaggcagcgcctgggttttgaaaaatatgcagacactttctgtgagttattcaaactgcagcgctgggtttaaactcactgacctactttaaactgcctttgagtggctcaatttcagacttatcttcattttatctgaatgttaaatattgcttggt

SEQ ID NO: 21988 - DNA, 599 bp, Chicken  19866894233884_2
  misc_feature (1)..(135): n is any nucleotide
nnnnnnnnnnnnnnnnnnnnnnnnnnnnnnnnnnnnnnnnnnnnnnnnnnnnnnnnnnnnnnnnnnnnnnnnnnnnnnnnnnnnnnnnnnnnnnnnnnnnnnnnnnnnnnnnnnnnnnnnnnnnnnnnnnnnnnnctcctaataagctcatgttagaagcaagttctgtgtcagctgaagcttaacccttytacatttttccctgactgggcacttcttaaaaaaggataatgatttagtctcattttctatgttattgcagcattggaaagtcttggatcagactttcggatgttcagwcaacttctggatctgctgcaaagcaatggctttaggcagcgcctgggttttgaaaaatatgcagacactttctgtgagttattcaaactgcagcgctgggtttaaactcactgacctactttaaactgcctttgagtggctcaatttcagacttatcttcattttatctgaatgttaaatattgcttggttttcagaattattgtgcacggctccatctgtagtaaatctcttctcgaggtaggtggtttcctgtcttcaatttccgttactaattgtagtcattcctaatgcagacaa

SEQ ID NO: 21989 - DNA, 451 bp, Chicken  19866894233884_3
aaactcactgacctactttaaactgcctttgagtggctcaatttcagacttatcttcattttatctgaatgttaaatattgcttggttttcagaattattgtgcacggctccatctgtagtaaatctcttctcgaggtaggtggtttcctgtcttcaatttccgttactaattgtagtcattcctaatgcagacaaaatacagtgtcccaggctacaatgtcatccatgcatgctgtcatccctgagaggctttcagacatctgtggctttatgcagttaagtacttctgcatctaaatwtattaaaacaagtatatgcaaaataagaataatagcaaagtgtttttcattgttgtttttcttgctgttggttgtttttttttttttttttttcctttaaaatcccaccagctgacagcctatcaaggcattcattcaatttgcagcaatg

SEQ ID NO: 21990 - DNA, 600 bp, Chicken  19866894233885_1
ttttctttgaggtaaaaaagttgtaaagtgtatgggaatattcttggcatttcccactgaattgcactgaactgagtaatgtaaatcatacactttgctcagatgtttgatctgtcattggctggtttgggcctcctctaaggtggagttctgctacatccgcactctgaaaatgtgcctttggatctgctgatctgctcttcattggagcttgtacttcagagaaataaaagctataggtcattgagctgtatcaggatcttatgtggttaattcagttaaatttacttggaagagagwgtgttgattctgactcttcttgtatcccaccttaaagccacgtttttgtcctatagcagtagtctgtaggcagataagaatgaaaaagcatgtgcattcgcagtgctggaaatgttgatgtgaaattgcagactctcagtctattcaaattgctgcttattccacagattctgtctttttttttttccccccccccactgcatttctagatgaccttttgaagacatagccaataggattcagaaggctctgggctgggtggtagagaaatgactgtaaagctctgttattcgctgcatc

SEQ ID NO: 21991 - DNA, 600 bp, Chicken  19866894233887_1
gggtagtcctgcattgatgcattcggactgcacaagagcaccaactgaacaggcacttctgcctaattttgcatgcttcctagtttgcatctaaccacgtgccttactgcagtggtatttgttgccttgaaacaaaaccattccagcagcgtgtgatattttactgccttaatatattgcctcagagagaagactgctcttagctgccatcccatcgcttcccaagtctccagaaggtccccaggaaggcctggagataggaggtagtacaacggcagcagcaccaaagtcagccccagyggcacacactggctgtcctattgtaaccaacagccagttgccaaaaaccatctgcctgaacctgcttcgtacttttgctgtttgggatcgctttggttttccttgttcatttcttcgttgtatatttcttagagagtgaaaaggcgttttgaagcttacctgttatgtcggtagtttgtgctttcaaaaggagaacattaatcataaacctgtagtacagtttgttatttcgtagagtcattttaaaatcattacatgtctagggtgttgtttgttttggtttttttttttaataaaaaa

SEQ ID NO: 21992 - DNA, 600 bp, Chicken  19866894233897_1
aagccatgcttggcagcaggatgaagctccttatcacggcagcacaaatgggaccaagtggtgctgccactgcgctgtccccacccatgcgctgcacgcctcacccgtgttctctcccctctctctctcgcaccagtttgaagatgagatcttggccatctgcctcgagatgctggacatcaaccccaaattcctgcgggaccagaacctggactgctcccgtcgcaatgaccctgtttatattggcagggtggtgagcgccatggtgagtgctgcggggctctgcaaaccaaccctctrcagcacctgcartgcacaagcacacagcgtgctcctgcatcacagccgtgtgcatgccggtgcaattcttgcaccatggctgcacgcatcccggtgcagctcttgcatccctccatgctgccttacaacagtggcaacaagagtaagctggaggaaggcactccactgagcctgctcttaggcactgcgccctgtccctttgtacccaggggctgcacagtgccatctcctcatgtcaccccacaggtcaactgcaatgacgaggaccacggggtgctgctggggcgctgggacaatcac

SEQ ID NO: 21993 - DNA, 600 bp, Chicken  19866894233897_2
gcagcaggatgaagctccttatcacggcagcacaaatgggaccaagtggtgctgccactgcgctgtccccacccatgcgctgcacgcctcacccgtgttctctcccctctctctctcgcaccagtttgaagatgagatcttggccatctgcctcgagatgctggacatcaaccccaaattcctgcgggaccagaacctggactgctcccgtcgcaatgaccctgtttatattggcagggtggtgagcgccatggtgagtgctgcggggctctgcaaaccaaccctctrcagcacctgcartgcacaagcacacagcgtgctcctgcatcacagccgtgtgcatgccggtgcaattcttgcaccatggctgcacgcatcccggtgcagctcttgcatccctccatgctgccttacaacagtggcaacaagagtaagctggaggaaggcactccactgagcctgctcttaggcactgcgccctgtccctttgtacccaggggctgcacagtgccatctcctcatgtcaccccacaggtcaactgcaatgacgaggaccacggggtgctgctggggcgctgggacaatcactatgaggatggg

SEQ ID NO: 21994 - DNA, 599 bp, Chicken  19866894233899_1
  misc_feature (1)..(80): n is any nucleotide
nnnnnnnnnnnnnnnnnnnnnnnnnnnnnnnnnnnnnnnnnnnnnnnnnnnnnnnnnnnnnnnnnnnnnnnnnnnnnnnncttcagtctctcctcatagggcatactctccaagcccttcagtagcctcgttgcccttctttggacctgctccagtacctcccatgtcctttctgtactgaggtgcccaaaactgaacacagtactcgaggagaggcctcaccagtgctgagtacaggggctcaccacaccgcaccattcctgatacaagccaggatgccattgtccttcttggccacastgctagctcatattcagctgactgtccatcagtacaccaaggttcctttccatcaggcaactttccagccactcctccccaagcctgtagggttgcctggggttgctgtgrccaaaatgcaggacccaacatttggccctattgaaactctggcccatccgtcccctctatccaggtccctctgtagtgcctttctcacctctggcagctcaaaactccctcccagcttggtgtyagaaaaaaagctgttcttggtgttaaaggcaaaagactggaaaacaagtattctgggttttgta

SEQ ID NO: 21995 - DNA, 600 bp, Chicken  19866894233899_2
aagcccttcagtagcctcgttgcccttctttggacctgctccagtacctcccatgtcctttctgtactgaggtgcccaaaactgaacacagtactcgaggagaggcctcaccagtgctgagtacaggggctcaccacaccgcaccattcctgatacaagccaggatgccattgtccttcttggccacastgctagctcatattcagctgactgtccatcagtacaccaaggttcctttccatcaggcaactttccagccactcctccccaagcctgtagggttgcctggggttgctgtgrccaaaatgcaggacccaacatttggccctattgaaactctggcccatccgtcccctctatccaggtccctctgtagtgcctttctcacctctggcagctcaaaactccctcccagcttggtgtyagaaaaaaagctgttcttggtgttaaaggcaaaagactggaaaacaagtattctgggttttgtaacattctcatgcaagtgcaaaatggtcattttaactgacatttctgtgtcacagtaatttcatattccaaatatattttgatatgataagtaattacaaaattgttcaatcc

SEQ ID NO: 21996 - DNA, 600 bp, Chicken  19866894233899_3
aggggctcaccacaccgcaccattcctgatacaagccaggatgccattgtccttcttggccacastgctagctcatattcagctgactgtccatcagtacaccaaggttcctttccatcaggcaactttccagccactcctccccaagcctgtagggttgcctggggttgctgtgrccaaaatgcaggacccaacatttggccctattgaaactctggcccatccgtcccctctatccaggtccctctgtagtgcctttctcacctctggcagctcaaaactccctcccagcttggtgtyagaaaaaaagctgttcttggtgttaaaggcaaaagactggaaaacaagtattctgggttttgtaacattctcatgcaagtgcaaaatggtcattttaactgacatttctgtgtcacagtaatttcatattccaaatatattttgatatgataagtaattacaaaattgttcaatccatgaaaataaaaatgaggggagggagacgaaacacttacaatttcttctataagatatatgcacaatatttgccagtagtgttttgagtttcacacttcaagagttgttttggtttgcttttca

SEQ ID NO: 21997 - DNA, 599 bp, Chicken  19866894233901_1
  misc_feature (1)..(123): n is any nucleotide
nnnnnnnnnnnnnnnnnnnnnnnnnnnnnnnnnnnnnnnnnnnnnnnnnnnnnnnnnnnnnnnnnnnnnnnnnnnnnnnnnnnnnnnnnnnnnnnnnnnnnnnnnnnnnnnnnnnnnnnnnnncctgtttctaaaagtaggcttagtggtcctgccaataacagaaatttatgctatgtaaaacatataattaattgacaaccttttatcagttttattcctggttcgttaaattaaagccaaatatattttcagttgttatttcatatagagtaattaaatatctttaaaatgaatatktgatgggtaaatataatagggccttaatcagacagttcctgttgacaggtcagaattgaaagcagatgtaatattaacaacaaatgtgatactgattgctttttttgagatgctttcacttactgtgaagttctggagaactttccttgacccaagaggtcacagttgacatttagctgcctgcggagctacgtatagaggttatttattttgttttaaagtcctgtgctctttggaggaagaaattacctattagcttggagaagagaaggcctgggggagacctcattgtggccttt

SEQ ID NO: 21998 - DNA, 600 bp, Chicken  19866894233901_2
agaaggcctgggggagacctcattgtggcctttgaatacttgaagggagcatataaacaggagggggtttatgagagtgggtagtgataggacaagggggaatggttttaaattgaggaagggtggagatctagcttagatattaggaagaagtttttcacccagatggtggtgacgcactggaacaggttgtccaaggaggctgtggatgccccatccctggaggcattcaaggccaggctggatgtggctctgggcagcctggtctgctggttggcgagcctgcacgtagcagggggytggaactggatgagcattgtggtccttttcaacccaggccattctatgatcttgaggaaaactgtaaaagaatatttmatgtttggaaacactgcccagtttgatagctaacattaggaactgtttagtagtcatacacccttattacagattctaaataatacatgtctgatgttgctaaacaagggtaatgttgtataataatgacagcggtgacacaaaagatttttttttttgccagttccagtggaatgatttcatttttagtcacgattcaataagcgtgaataaagcgaaacy

SEQ ID NO: 21999 - DNA, 600 bp, Chicken  19866894233901_3
gggtagtgataggacaagggggaatggttttaaattgaggaagggtggagatctagcttagatattaggaagaagtttttcacccagatggtggtgacgcactggaacaggttgtccaaggaggctgtggatgccccatccctggaggcattcaaggccaggctggatgtggctctgggcagcctggtctgctggttggcgagcctgcacgtagcagggggytggaactggatgagcattgtggtccttttcaacccaggccattctatgatcttgaggaaaactgtaaaagaatatttmatgtttggaaacactgcccagtttgatagctaacattaggaactgtttagtagtcatacacccttattacagattctaaataatacatgtctgatgttgctaaacaagggtaatgttgtataataatgacagcggtgacacaaaagatttttttttttgccagttccagtggaatgatttcatttttagtcacgattcaataagcgtgaataaagcgaaacyttcacaagaagggagaaattatcaggaatttaaacwtcattgtcattcatagtaatattgttttaattttttatagaa

SEQ ID NO: 22000 - DNA, 600 bp, Chicken  19866894233901_4
tggaactggatgagcattgtggtccttttcaacccaggccattctatgatcttgaggaaaactgtaaaagaatatttmatgtttggaaacactgcccagtttgatagctaacattaggaactgtttagtagtcatacacccttattacagattctaaataatacatgtctgatgttgctaaacaagggtaatgttgtataataatgacagcggtgacacaaaagatttttttttttgccagttccagtggaatgatttcatttttagtcacgattcaataagcgtgaataaagcgaaacyttcacaagaagggagaaattatcaggaatttaaacwtcattgtcattcatagtaatattgttttaattttttatagaaacaatgctacatcataaaacattttcaggaagctaattatgtgatggatgtctatatgcaaatgtattttatatagtcaaactggctgttgacgacacttctacatacagtacacaacctatagaaaacaagctgctgaagttgcaatgtagggggtacactataaaagggctttctcagcttgacttttctcacttcagttgaggttgttgtcaagcacta

SEQ ID NO: 22001 - DNA, 600 bp, Chicken  19866894233901_5
ggccattctatgatcttgaggaaaactgtaaaagaatatttmatgtttggaaacactgcccagtttgatagctaacattaggaactgtttagtagtcatacacccttattacagattctaaataatacatgtctgatgttgctaaacaagggtaatgttgtataataatgacagcggtgacacaaaagatttttttttttgccagttccagtggaatgatttcatttttagtcacgattcaataagcgtgaataaagcgaaacyttcacaagaagggagaaattatcaggaatttaaacwtcattgtcattcatagtaatattgttttaattttttatagaaacaatgctacatcataaaacattttcaggaagctaattatgtgatggatgtctatatgcaaatgtattttatatagtcaaactggctgttgacgacacttctacatacagtacacaacctatagaaaacaagctgctgaagttgcaatgtagggggtacactataaaagggctttctcagcttgacttttctcacttcagttgaggttgttgtcaagcactatttcattccacctttcagtttcagagctaaatggcc

SEQ ID NO: 22002 - DNA, 600 bp, Chicken  19866894233906_1
tggcttttaaagctgtaagactgtatgtgctcaccttagttaaccacatatataacagttgccaaaaaagctttgttttgtacatcacttgtatctcacagggattatcctcaaatgtacattcatttataatgaaaaaatatcagctcatggaatttgtagttctcagctctctaatgctgtccctgagtgagagaaggtttgctgtctagctgtccccttagttcagagaaaaatgaagctgagagactgaatgactgcctgctcatgccatgcacccacggaagccattttgctgtytgctttgtcacttctcctccactttagtggtgcagaacgctgttasacccagtgactttgccgacctgctcaagcgacactrctagacctgctggggaattttgcagtgctacctttcttctcccaggttcaygcttcaagttaggtgtgatgttgtgcagagaggatttcatgaccgtacatttctgttctgtgtcttttatcattggcccttggaattctctgctgacttttctctttttttttttcttgccactttcttcctttttgtagtagagcccaaaaggtaccagagagcct

SEQ ID NO: 22003 - DNA, 600 bp, Chicken  19866894233906_2
catatataacagttgccaaaaaagctttgttttgtacatcacttgtatctcacagggattatcctcaaatgtacattcatttataatgaaaaaatatcagctcatggaatttgtagttctcagctctctaatgctgtccctgagtgagagaaggtttgctgtctagctgtccccttagttcagagaaaaatgaagctgagagactgaatgactgcctgctcatgccatgcacccacggaagccattttgctgtytgctttgtcacttctcctccactttagtggtgcagaacgctgttasacccagtgactttgccgacctgctcaagcgacactrctagacctgctggggaattttgcagtgctacctttcttctcccaggttcaygcttcaagttaggtgtgatgttgtgcagagaggatttcatgaccgtacatttctgttctgtgtcttttatcattggcccttggaattctctgctgacttttctctttttttttttcttgccactttcttcctttttgtagtagagcccaaaaggtaccagagagccttttgtgataatggtattctatttcaaattatcacttgctatctgtt

SEQ ID NO: 22004 - DNA, 600 bp, Chicken  19866894233906_3
catcacttgtatctcacagggattatcctcaaatgtacattcatttataatgaaaaaatatcagctcatggaatttgtagttctcagctctctaatgctgtccctgagtgagagaaggtttgctgtctagctgtccccttagttcagagaaaaatgaagctgagagactgaatgactgcctgctcatgccatgcacccacggaagccattttgctgtytgctttgtcacttctcctccactttagtggtgcagaacgctgttasacccagtgactttgccgacctgctcaagcgacactrctagacctgctggggaattttgcagtgctacctttcttctcccaggttcaygcttcaagttaggtgtgatgttgtgcagagaggatttcatgaccgtacatttctgttctgtgtcttttatcattggcccttggaattctctgctgacttttctctttttttttttcttgccactttcttcctttttgtagtagagcccaaaaggtaccagagagccttttgtgataatggtattctatttcaaattatcacttgctatctgtttcaagttacaatttgtatacatcctcctagtaaaac

SEQ ID NO: 22005 - DNA, 600 bp, Chicken  19866894233906_4
gaaaaaatatcagctcatggaatttgtagttctcagctctctaatgctgtccctgagtgagagaaggtttgctgtctagctgtccccttagttcagagaaaaatgaagctgagagactgaatgactgcctgctcatgccatgcacccacggaagccattttgctgtytgctttgtcacttctcctccactttagtggtgcagaacgctgttasacccagtgactttgccgacctgctcaagcgacactrctagacctgctggggaattttgcagtgctacctttcttctcccaggttcaygcttcaagttaggtgtgatgttgtgcagagaggatttcatgaccgtacatttctgttctgtgtcttttatcattggcccttggaattctctgctgacttttctctttttttttttcttgccactttcttcctttttgtagtagagcccaaaaggtaccagagagccttttgtgataatggtattctatttcaaattatcacttgctatctgtttcaagttacaatttgtatacatcctcctagtaaaacatatttgtatacatcctactgtaaaacagtaatgtaagctgattctttgac

SEQ ID NO: 22006 - DNA, 600 bp, Chicken  19866894233911_1
aatgtttaattgccttcaaattatagatatactttaacaaccccaaacaaagagcattctcaactatagcatagtaacctaataacaatgtttaacataatttcagatgaaggagcctcaaatcctagatagaatatgggccaatttcatctccctgttgactgggcaggaagcctgaccacagttttgcagaacaactgagccatgaatctgtggctccttgagctattatggtctttgagcagagcttccttcagggcattcagtgacagcccagctccacctcttcctggacagtgraattagtgactcctgttcatgccttatgtgactacagtctattaataacaaatcctaattttgttcttctacagtgttggtaaatgcaatgctgtaccataatattgtagaatattgctgttaagatttttgagcatgacctgtatcagacacaagtttgcacaccttcaaatgggcatcttttccataaagtaagtgctaagtgatttcayaaaacatttttctgaagtactgtctagaattgcaggtatagcacatcactgttccttttggtacctgtggtcacagtatttaatacta

SEQ ID NO: 22007 - DNA, 600 bp, Chicken  19866894233911_2
gtggctccttgagctattatggtctttgagcagagcttccttcagggcattcagtgacagcccagctccacctcttcctggacagtgraattagtgactcctgttcatgccttatgtgactacagtctattaataacaaatcctaattttgttcttctacagtgttggtaaatgcaatgctgtaccataatattgtagaatattgctgttaagatttttgagcatgacctgtatcagacacaagtttgcacaccttcaaatgggcatcttttccataaagtaagtgctaagtgatttcayaaaacatttttctgaagtactgtctagaattgcaggtatagcacatcactgttccttttggtacctgtggtcacagtatttaatactacagtaactgcactgacatcctattttttgtgatgcttacttagataacccaaactatggtttctctatggttttggggtactgtgcttggaatcatggcttcatgaaagctggtgatactcttgacttttatagagctaggatgtcgtggtaggattttacattattttgactttcatgtagtctccttactttgtgtctgttttagcaata

SEQ ID NO: 22008 - DNA, 600 bp, Chicken  19866894233924_1
ctgtcaaaagtgattgaaaaggtggctgcaattatgaaaatatgggaaagtttctgcataactcagtgtctgttatccccacttcggaggtggcggtatgcaaatattcacgttctgtagctgaagaggaatagtatgaatatttctgatggaataatgataaacagcacagaataattcaggttggaaggatcatagaatatcaggaatcatagaaaggttgaagttgggagggacctttaaaaatccagttccacccaacctgccatgggcaggggcaccttccaccagatcacattkcccaaagccctctgatttaaattacttttagtgattttgacttaagatgcttgattttgtcgtcttaaaaattccatattagcagctagatgtgattagttctttctcctcctctcttttctatttatcatgaaaataatgaattaatttcctaatttgggacgagaaggttggtgctcagagaaatccaaatagttggtaacactgcatttttgtgtcactgttttgtaggacaagtctcgctgcctcgctgtacactctgtacaggcgctgttgagtacggatgatgatgttattctg

SEQ ID NO: 22009 - DNA, 600 bp, Chicken  19866894233924_2
atttgggacgagaaggttggtgctcagagaaatccaaatagttggtaacactgcatttttgtgtcactgttttgtaggacaagtctcgctgcctcgctgtacactctgtacaggcgctgttgagtacggatgatgatgttattctggctcacctgggttcccacctcaccgttgcccatatggcggcactgagacatgacagcacgtccacggtttttgtttgtggtgtaaaaacttctgcaaaagcagctgaactgggagacttgttcagtcacatgggatgtaaaagtatgtgctgamacagttggtatgagtaaggtttttaagatagattttggtagagtttgtggtaactataaataggtcataaatctatcagaatttagagaccccttctttgaggatttgggagggtagtaatagattatttttgtcatagagtgaactgacaactccttagctacaatcaggcccaacatggttgcagatcagccagattcctgaaatgttatagtcaagttctccacaaaagtagttcctgtgtaatgcctgggatctgcaactttggcacccgtgtatctggtgtcttgactgttactt

SEQ ID NO: 22010 - DNA, 600 bp, Chicken  19866894233924_3
tttttaagatagattttggtagagtttgtggtaactataaataggtcataaatctatcagaatttagagaccccttctttgaggatttgggagggtagtaatagattatttttgtcatagagtgaactgacaactccttagctacaatcaggcccaacatggttgcagatcagccagattcctgaaatgttatagtcaagttctccacaaaagtagttcctgtgtaatgcctgggatctgcaactttggcacccgtgtatctggtgtcttgactgttacttttcaggttgatttttatcrgtttctgagattgctaattttaaattcatacatttgtccagtttacccagaggacgtgatcagaacaaactgtataacaagagtggcaaccaattagcagtctgttcagtggaagatgctaaggcttcatccctcagtctgcctgaaatcaatgggatgttgaggggtctggtccagcaggctgtagctctgtggaattttgtgcaacactgctgtctcttcaatcccatcacttcaaaattgggcaggcttgccttagtgttgaactgctgagtttcccccccctttttgttttatttc

SEQ ID NO: 22011 - DNA, 600 bp, Chicken  19866894233932_1
gcaagtaaaaatttatagtcttcaagaggactaatcagaagcttacagttaagcagagatgtgagtgctttgctagatcagagcccttacaggtcttacaataccagctggactatttttaactgagtattttgtggtgagatcagaggcgccatcaactccgattccaaatgactatggcccacatcccagctgcctcactcacactgcacagggatgtaacatgtaactggatctcatcatacatcttcagctaaagtgactctttaggtaatgtttttggaagaaaaaaaaaaagcraagtgtgttgttttaatcacgcatttaaaaaatacacacctaaaatgctgggtcctgctcagccttaaaggatttttacaaaccatctgtacccaactgaagtaagttaccagcaatgtcctatgggagcgtaatcatatcgtcccctaacatctgaacagcattcataggaaaggcacaacaagtgtacagaaataaaacagatccaaagctgaaccctgatgaagttccctgatgcaatcccagcactgcagaaagagctagaaatcacacagcagctcagctggtgactatcaggtg

SEQ ID NO: 22012 - DNA, 599 bp, Chicken  19866894233933_1
  misc_feature (1)..(75): n is any nucleotide
nnnnnnnnnnnnnnnnnnnnnnnnnnnnnnnnnnnnnnnnnnnnnnnnnnnnnnnnnnnnnnnnnnnnnnnnnnncccccccccacgccatctgtccccgcagcaccgagcagcgccccctgcattcagtgccctctgggctttattcaaccaggaaaccaaacagctcttcccctcagcggggtgaaaacaacaacaaccaaaccgcaacggcgcggagacaacaatgtgaaaggcacccccacggtgaccacagcatcaccgacccaacggggaacacgaagaacgaggcacggagcrgccctgggaacgcagcagggcagtggcttccagaggggggccgaggcatcccgggggagatttggggacaccgcggccgggtttgtcccctccggtggttacagagggcagctggaaagcagttccgagtcggtgtagagatgcaactcgtagtgaaacgggcgctgttgatgcggggggtgctgtgatatggggcaggcacttcgcttctcaaaaagcatccaacgctgcggccagcaggggtagaaacagctctgtggggtccatacacaccatcagcccttgacctctatactttg

SEQ ID NO: 22013 - DNA, 600 bp, Chicken  19866894233938_1
ccagtgctcactgagggttgcctgaaaagtagttcaacagagaaagacctgagggtcctgaccatcagcaatttgaacatgagcaagctatgggtacttgtttttattaaataaataaataaataaataaaatagcattcttggcttcattaggcagagttttgccagcaagacaagggaggtgagtcttcccctctactcatgactggcaagtcgttcctgaagatttgattctaggtctcaacttctcagtgcaatagagaagtagacatacaggttcaagtttaatgaagaactgtraagatgatgaagagactggagcatctctcatgcaagaatagtctgggactgttcagcttggagaagactcagatggatgttatcagtgcgtataaataaaaatgtgtggggtcctaggcaaccttctttgagtaaggggtttggttttgatgtaccttccaagcccaccaattctatgtgattttatacagtgaggaatgaggaatgacttgggttctttttttttagttgcttcttctttcaggttggtttcaagcatgtatgctggaacttgagcagcatctacagcagatatatctt

SEQ ID NO: 22014 - DNA, 600 bp, Chicken  19866894233938_2
acacagatgaagaagtctaaacaaatcctggtcaagggttgagaaatcctttgtctgagaaaacagatggacaagtcccgggcaagggttgcaaaatcctttgtctgagggacatagatggacaaggccaggggcaacgagacaccgagacacatataagccagagcttaatggccagggagcagtcttttgtgtgggcttatcttgagggagatagccatttcagggggtactacacatgactcttacccaagcacccaggaatgccacatttgcagaagaagaaggatgaaaaagggrtgaacaaccatgagattaggtttctgacaacagattcctcatgaagaagaacaggaaggtttctgacatgagaaacctcacgacctgcctctccctcctggacttgctctgcgctctacctgtttgctgcctaaggccggccactctgctgctgctctccccctgagaaggtgtctgccatcagatccatcactacagaaggcctgcatgcagacaaactctccagggcctgctaccggagaccttctggctcctcccggacttcttcctgtaactacccggtacctgcattctcttgct

SEQ ID NO: 22015 - DNA, 600 bp, Chicken  19866894233941_1
ttccatctgggtcaactgggaatagagatagcacttgcaaagggaagtcaggcaggggatgcattcagcagcacccatttggaagaccactcccgtgtgatctcagggagcacacaataaatggcaaagtgttatacatggcaaagggaaactctggcttgtaaaacagctgtttttgggagtgccaccgaaatctgtcaagtgttcttccttcagaagatgttactgtgcaggccaagagctcctcacctgcgtggagatcaaaaacaatgcctgtaagttaagaaagtgtgaaggggrcatagtcttcccctcacatttgcacactggtccttagattgcattatataaatcagccccaccaacggaatgcgagtgttctgaaatattgtatttgctttggatcagttcacaaccagattgcttttattttgtttcataagaagttgagattggagatgtatggacatgttactctttatgtttgcatctgccacgctggcaggagaaaaatggttgcttgggttttgtgaacgttctccaattatttttctaaaatggtttggatgaaatactgttggttcatataattagctgaaa

SEQ ID NO: 22016 - DNA, 600 bp, Chicken  19866894233943_1
catgaaaaaaagaatcactatgtccaaaagaaacttttaatcacaattttcttggcatataaacaacaaaaatgcctagaacttgtttgacgagcttttaccatttcctgttcacctgatcattgtacacatgagcaaaaaaggttaaatgacagtcaatgtacatgttgaagggaaaggagaagactgttgtttgttttttaacttaaaaccaaagggaaaacttttggcctgctatttttttgcagtctgtatttcattttctagagtgttaacagaaaaccaagcagagtttgtttkaacaaagatacaaatattcctcacaaccacaaaatttgktttttgtagctcactatctctcatccatgggagagtctctattcattcacctgttctaaagagtctattactttctaactggacttataactaaacagggggggcgggagggaagggagaggaaagcaaaaaacaaacccaaacccatacatactttccatcagatgaaattccaactattctcctgagatcaagtggccttcccatatcaaagggtgggcctgaggcctcaaaagacaagcgtcttctaaatggctccca

SEQ ID NO: 22017 - DNA, 600 bp, Chicken  19866894233943_2
atcacaattttcttggcatataaacaacaaaaatgcctagaacttgtttgacgagcttttaccatttcctgttcacctgatcattgtacacatgagcaaaaaaggttaaatgacagtcaatgtacatgttgaagggaaaggagaagactgttgtttgttttttaacttaaaaccaaagggaaaacttttggcctgctatttttttgcagtctgtatttcattttctagagtgttaacagaaaaccaagcagagtttgtttkaacaaagatacaaatattcctcacaaccacaaaatttgktttttgtagctcactatctctcatccatgggagagtctctattcattcacctgttctaaagagtctattactttctaactggacttataactaaacagggggggcgggagggaagggagaggaaagcaaaaaacaaacccaaacccatacatactttccatcagatgaaattccaactattctcctgagatcaagtggccttcccatatcaaagggtgggcctgaggcctcaaaagacaagcgtcttctaaatggctcccagattccttgagcttctaggtaggctgttccaattaccaa

SEQ ID NO: 22018 - DNA, 600 bp, Chicken  19866894233950_1
tttctgaatgcaccccagtggtctgagtgcccaaagcctgagggactccactggagcagactggtgcagacctcgcagggcttccctgtggtcagcctgctctagctctctccatatctcgggttcccacagctcccatgaatgagctccatgctcaccaattccggatggttttgtgtgcatcccctccataaatataccagcattatttccaatgccagtttagcctaagctgagctgcagagctccctgaagctgtcagtcaggtatggagaacccagagcagcttccctgtacctygagagaagaaatgcacacacacattcacgctcacactacttgcttagcacagcccattgaactcaacatgaaccccagacccagcagtaacccatgatatttatggagggaataacttcctgggaaggatgtggaagaataatatggctgctgtagagcccttgcccttccttgcatcactttcatctcacacrtgtgatcctagaaccatttcacttagctgggactggaagagcgggatcatatcctggctgctttttcctctgtaggaaaggacaggggaaatgctgttgccttcct

SEQ ID NO: 22019 - DNA, 600 bp, Chicken  19866894233950_2
atataccagcattatttccaatgccagtttagcctaagctgagctgcagagctccctgaagctgtcagtcaggtatggagaacccagagcagcttccctgtacctygagagaagaaatgcacacacacattcacgctcacactacttgcttagcacagcccattgaactcaacatgaaccccagacccagcagtaacccatgatatttatggagggaataacttcctgggaaggatgtggaagaataatatggctgctgtagagcccttgcccttccttgcatcactttcatctcacacrtgtgatcctagaaccatttcacttagctgggactggaagagcgggatcatatcctggctgctttttcctctgtaggaaaggacaggggaaatgctgttgccttccttcccaagctctgtggttctctaagaaaagggcaagcatagggtacgtgggaagggttgttgctaccttgtacctggtcgctgttgtcatctgaagggagaatctgacagacaagaaatatggggatggacgattgctggctgctctggctgtagctctggtgatgctctctgaaagccagaggttcctattgag

SEQ ID NO: 22020 - DNA, 600 bp, Chicken  19866894233953_1
atgcttacatttgctctcgctcttctatggacttttcttttaaaacaagctgtacaggccactcctctgcagccatgttttaggctttgacaaaagctggcagatcttctcatcttctgtgcttggctcttgttttcaaggctgtcacatcaactagtcctgactttgtttctgaatgaaatggtaagttgtaaagtacaaggagctagcatgaaagatatgccaacctgtttttttgtgttggcctagcatcctgccagcatacaaggagatacaggatgaggtgagcagagggtcttrttcatagcagtgagtttgagaagccctatttctttctttttttttttttttttaagtcatgagatggtagaattatggttttctgtacaggtagtttgaaactcttttagctgttttgcactgtagatcttggtccatgtgctgtgaatttaaaggtcagaaagttataactgaactgaaggtaataatgcttttgatattgcttgaaagctgagcatttttggatactactgtcagaacaaaccagactctaatttagggtttataagtatatatttcatgatcgtttgtttttctttg

SEQ ID NO: 22021 - DNA, 600 bp, Chicken  19866894233958_1
tgcacaacctttacttgtttttaaacttgtgtaactgcttctagcaaaatagcaataggtgcggtggtgtcagattaagtggagagctgaattggagagtgtggagctaatcctatagcctgtccacactgacaggctgatgaaaggcagttgaggagtgactgtttcaacccatccgctgacgcattcctctgtccccacccatgcagagaacagcctggcactgagctcactctgggagccggatcctcccatttcagagaccacgagagaatgtattttgtatttttctgtcatgargccataagaacaaggatatgaataatctgtcagttctggcaaggaagagatatttgtgtgttgtcatgccaaatgtatgagaggtcactggcaaaaggtgtgcacaaagcagaagctgtgcagagagcagcctgttcctgsatactgtctggaatcagtcacagctctctgctcctacatagaaaggcaggatggaaaccacagaacaatgaaatccctgtaggcagagggggacccggtgtctggctccaacatcttcaggctggtttcaagggatggtgcttgaattggactcacgtg

SEQ ID NO: 22022 - DNA, 532 bp, Chicken  19866894233958_2
gaaaggcagttgaggagtgactgtttcaacccatccgctgacgcattcctctgtccccacccatgcagagaacagcctggcactgagctcactctgggagccggatcctcccatttcagagaccacgagagaatgtattttgtatttttctgtcatgargccataagaacaaggatatgaataatctgtcagttctggcaaggaagagatatttgtgtgttgtcatgccaaatgtatgagaggtcactggcaaaaggtgtgcacaaagcagaagctgtgcagagagcagcctgttcctgsatactgtctggaatcagtcacagctctctgctcctacatagaaaggcaggatggaaaccacagaacaatgaaatccctgtaggcagagggggacccggtgtctggctccaacatcttcaggctggtttcaagggatggtgcttgaattggactcacgtgacctgaggagtcatctggtataaagcacaggaaaggatttaattaaagggaacagataatctttgttctaatg

SEQ ID NO: 22023 - DNA, 524 bp, Chicken  19866894233964_1
tacacctgggtcatctggatatctgaagggagaaagcagcattctctgctggctctgtgattaaaatgatttatcttgccacatctcacagtatcacattgagcacaatgccaccactcttcttgaacacaggctcctgcacaagactgcactaatgggttttcttcccccaggcaggaatgatttcaaaaccccaatgttttgttctgtggctacaaaaatacatgatgctcaaagccaaattcagagggaagcaatacattaggtgggaaccacagtaaaactcaaagcaaccttgtstattagtcaggtaatgtaaagccagcrtccagaatgatgatagcaggaatatgttcattaactgaaggcatcacacctgcctttctgctgctgagctctgcaatagcatgcagttctcacacccagaaacatctctcagaatcaggtaatatagtttaatctaagcattacctcatttatcctattatagactgaaattttatcttccttcttacatcactttt

SEQ ID NO: 22024 - DNA, 497 bp, Chicken  19866894233964_2
gggagaaagcagcattctctgctggctctgtgattaaaatgatttatcttgccacatctcacagtatcacattgagcacaatgccaccactcttcttgaacacaggctcctgcacaagactgcactaatgggttttcttcccccaggcaggaatgatttcaaaaccccaatgttttgttctgtggctacaaaaatacatgatgctcaaagccaaattcagagggaagcaatacattaggtgggaaccacagtaaaactcaaagcaaccttgtstattagtcaggtaatgtaaagccagcrtccagaatgatgatagcaggaatatgttcattaactgaaggcatcacacctgcctttctgctgctgagctctgcaatagcatgcagttctcacacccagaaacatctctcagaatcaggtaatatagtttaatctaagcattacctcatttatcctattatagactgaaattttatcttccttcttacatcactttt

SEQ ID NO: 22025 - DNA, 600 bp, Chicken  19866894233965_1
gtactgcaaacagtggtggcaacattgcaatgttgtggcttgcgccacatgggtcccatgactgctcacacaggagcagaaagaaaaccatgtataagtctactgggatatattgaacaaatatgaggctgaaggtgatggtttccttgactgcatcattaccagtgacaatatgtgatgttgccactatgagttggagtcaaagcagcagtccatggaatggagatgtgaattccccattaaagaaaaagttcaagatgcagctgtcaatgggtaaagtgatgtgcactgtcttttgarataggaaatggatgatccttctggattctttggaacccagacaaaccatcaaatctgagggctacattgtgacactgactaagatgcagactggaacttccagagtcaggccagagaagaagacaactttcctcttacaatacagtaactcttggccctatgccagtttgaagaccattggggcacattgccaattttggctggactatcctatcacaccccctatatagtttggatttggcttctcctgatttccatctgtgggggccaatgaaaaacggamkgtgtgggccaatgaaa

SEQ ID NO: 22026 - DNA, 600 bp, Chicken  19866894233965_2
gtgcactgtcttttgarataggaaatggatgatccttctggattctttggaacccagacaaaccatcaaatctgagggctacattgtgacactgactaagatgcagactggaacttccagagtcaggccagagaagaagacaactttcctcttacaatacagtaactcttggccctatgccagtttgaagaccattggggcacattgccaattttggctggactatcctatcacaccccctatatagtttggatttggcttctcctgatttccatctgtgggggccaatgaaaaacggamkgtgtgggccaatgaaagatggactgtgcgagcaacgatgccatcatagcaactgtgaaacagtargtcatctcctccggtactgatttttacaagcattattgtctgtcctgcttattttgaatgtcagctaaccttcttttccactgtgtatatatacagaggktttttttttagtatgaatagaggaagcacttaattctactgaagggcgctttggtattatcattacaaggagattttgtggagatgtgattgctttgagtgtcttgacagctcagatattcagatggctgtggt

SEQ ID NO: 22027 - DNA, 600 bp, Chicken  19866894233965_3
tgcactgtcttttgarataggaaatggatgatccttctggattctttggaacccagacaaaccatcaaatctgagggctacattgtgacactgactaagatgcagactggaacttccagagtcaggccagagaagaagacaactttcctcttacaatacagtaactcttggccctatgccagtttgaagaccattggggcacattgccaattttggctggactatcctatcacaccccctatatagtttggatttggcttctcctgatttccatctgtgggggccaatgaaaaacggamkgtgtgggccaatgaaagatggactgtgcgagcaacgatgccatcatagcaactgtgaaacagtargtcatctcctccggtactgatttttacaagcattattgtctgtcctgcttattttgaatgtcagctaaccttcttttccactgtgtatatatacagaggktttttttttagtatgaatagaggaagcacttaattctactgaagggcgctttggtattatcattacaaggagattttgtggagatgtgattgctttgagtgtcttgacagctcagatattcagatggctgtggta

SEQ ID NO: 22028 - DNA, 600 bp, Chicken  19866894233965_4
caaatctgagggctacattgtgacactgactaagatgcagactggaacttccagagtcaggccagagaagaagacaactttcctcttacaatacagtaactcttggccctatgccagtttgaagaccattggggcacattgccaattttggctggactatcctatcacaccccctatatagtttggatttggcttctcctgatttccatctgtgggggccaatgaaaaacggamkgtgtgggccaatgaaagatggactgtgcgagcaacgatgccatcatagcaactgtgaaacagtargtcatctcctccggtactgatttttacaagcattattgtctgtcctgcttattttgaatgtcagctaaccttcttttccactgtgtatatatacagaggktttttttttagtatgaatagaggaagcacttaattctactgaagggcgctttggtattatcattacaaggagattttgtggagatgtgattgctttgagtgtcttgacagctcagatattcagatggctgtggtaaggttggtgttcgtttttgatatacactattacagttattcatgccactgctaacttcaggttaa

SEQ ID NO: 22029 - DNA, 600 bp, Chicken  19866894233965_5
tcttggccctatgccagtttgaagaccattggggcacattgccaattttggctggactatcctatcacaccccctatatagtttggatttggcttctcctgatttccatctgtgggggccaatgaaaaacggamkgtgtgggccaatgaaagatggactgtgcgagcaacgatgccatcatagcaactgtgaaacagtargtcatctcctccggtactgatttttacaagcattattgtctgtcctgcttattttgaatgtcagctaaccttcttttccactgtgtatatatacagaggktttttttttagtatgaatagaggaagcacttaattctactgaagggcgctttggtattatcattacaaggagattttgtggagatgtgattgctttgagtgtcttgacagctcagatattcagatggctgtggtaaggttggtgttcgtttttgatatacactattacagttattcatgccactgctaacttcaggttaatctgctgtaacatggcctgtactagtcctttctgtacaggtagacagttcagagtcttttgctgatgtacagcacaatgtactgcttgttaaattgatac

SEQ ID NO: 22030 - DNA, 600 bp, Chicken  19866894233970_1
gcatgttaaaggttggcctcattttttataacccagcagtagtctcgggtggccaggctgctctaaaaaggctttttgccttgcagtctcttcctacataccgttccttgcatattgattcccttttcctttttaagacgaaaccaagttaaaactgtggaatatcaccaacaagaatgtgctgcaccttcccaccatcttccatcatttgccacatttgctgtcaaaggagaacagtctgcagccagccgtgcatgtgggacaggggcgcactggaggtaaatgggaattagtactgcyttagtgctcttcctctcacctggtgcctgttcctgccttttcctccgggcctggctgcactgcrgggatgagcaggactggaggaacggctgcatgtatcatgtgagcttccttggtgctgcagcacacggggtgggtaagccacagagcatctgcgtgccagggtgtcatggggatgtttgtgctcctgaagtgttctcagtgcttctctcagatggtttttgctgctttccatctccrgagygctctaggctttgcctgcaaggtggtcagatgaaagcacagtttgtggagactcta

SEQ ID NO: 22031 - DNA, 600 bp, Chicken  19866894233970_2
aaaaaggctttttgccttgcagtctcttcctacataccgttccttgcatattgattcccttttcctttttaagacgaaaccaagttaaaactgtggaatatcaccaacaagaatgtgctgcaccttcccaccatcttccatcatttgccacatttgctgtcaaaggagaacagtctgcagccagccgtgcatgtgggacaggggcgcactggaggtaaatgggaattagtactgcyttagtgctcttcctctcacctggtgcctgttcctgccttttcctccgggcctggctgcactgcrgggatgagcaggactggaggaacggctgcatgtatcatgtgagcttccttggtgctgcagcacacggggtgggtaagccacagagcatctgcgtgccagggtgtcatggggatgtttgtgctcctgaagtgttctcagtgcttctctcagatggtttttgctgctttccatctccrgagygctctaggctttgcctgcaaggtggtcagatgaaagcacagtttgtggagactctaaactgtgttaggagacaaatcccatccagagcaggacttgggttcttaaacatttcctcccctg

SEQ ID NO: 22032 - DNA, 600 bp, Chicken  19866894233970_3
gcagccagccgtgcatgtgggacaggggcgcactggaggtaaatgggaattagtactgcyttagtgctcttcctctcacctggtgcctgttcctgccttttcctccgggcctggctgcactgcrgggatgagcaggactggaggaacggctgcatgtatcatgtgagcttccttggtgctgcagcacacggggtgggtaagccacagagcatctgcgtgccagggtgtcatggggatgtttgtgctcctgaagtgttctcagtgcttctctcagatggtttttgctgctttccatctccrgagygctctaggctttgcctgcaaggtggtcagatgaaagcacagtttgtggagactctaaactgtgttaggagacaaatcccatccagagcaggacttgggttcttaaacatttcctcccctgctcccaaatcccracccaaagccaagcagctgactgattcctcttaaaccaaggtgcttctggccatgggagggctttggagaacaagggtgttcttgaagttaccattcacgtgccggaaaggaccttgggcagggagagtctggggcatttcctaagtctctgggggagaaaag

SEQ ID NO: 22033 - DNA, 600 bp, Chicken  19866894233970_4
ccagccgtgcatgtgggacaggggcgcactggaggtaaatgggaattagtactgcyttagtgctcttcctctcacctggtgcctgttcctgccttttcctccgggcctggctgcactgcrgggatgagcaggactggaggaacggctgcatgtatcatgtgagcttccttggtgctgcagcacacggggtgggtaagccacagagcatctgcgtgccagggtgtcatggggatgtttgtgctcctgaagtgttctcagtgcttctctcagatggtttttgctgctttccatctccrgagygctctaggctttgcctgcaaggtggtcagatgaaagcacagtttgtggagactctaaactgtgttaggagacaaatcccatccagagcaggacttgggttcttaaacatttcctcccctgctcccaaatcccracccaaagccaagcagctgactgattcctcttaaaccaaggtgcttctggccatgggagggctttggagaacaagggtgttcttgaagttaccattcacgtgccggaaaggaccttgggcagggagagtctggggcatttcctaagtctctgggggagaaaagaaag

SEQ ID NO: 22034 - DNA, 600 bp, Chicken  19866894233970_5
ctggaggaacggctgcatgtatcatgtgagcttccttggtgctgcagcacacggggtgggtaagccacagagcatctgcgtgccagggtgtcatggggatgtttgtgctcctgaagtgttctcagtgcttctctcagatggtttttgctgctttccatctccrgagygctctaggctttgcctgcaaggtggtcagatgaaagcacagtttgtggagactctaaactgtgttaggagacaaatcccatccagagcaggacttgggttcttaaacatttcctcccctgctcccaaatcccracccaaagccaagcagctgactgattcctcttaaaccaaggtgcttctggccatgggagggctttggagaacaagggtgttcttgaagttaccattcacgtgccggaaaggaccttgggcagggagagtctggggcatttcctaagtctctgggggagaaaagaaagagcttttagttcctttctgcttttcgtaaaacagcacaaagccaagtctgtttgctgattgaacctacccagcgttaggggcagccaggctgccggtgggctgtgtccaccttgatgccccagattttcaaaa

SEQ ID NO: 22035 - DNA, 528 bp, Chicken  19866894233988_1
ttctccgagggttggagtgctgttggtagcagactggtgcctccaagagctggtggtgggaccccggcactcctttggctttgtccttttgtccttcccagccagcaggaagtacggcccgatgtccggggtattctgggataccttcgtctcattcatggcttgcagcatcggcactccccgtgcctttgtcagctgccacgagcatcctcctcgcctgggaagcaggagccctggctttgccattttaaaagcgtagttagaaagtgggtctgctccctcctcctcctcccccagcarctttcccaaatgaacatcaccgtcaatgggccggggtcgaagaagctaaatgttatgctgccgtcctattaaattacatcagatgttatcaacaacccactccgatgttagcgcaaaggaaggcaaataggggtaaatggaagcatctccccatccagtccttatcttaatttaaatgtaaagtgaatttttttttattaaaaaaagggggggggggggggggggggg

SEQ ID NO: 22036 - DNA, 600 bp, Chicken  19866894233994_1
tcaatcctgatcagtttttacactttattaaatacatcccagatgtagaagccagcttattcgttttcctcactgcgcagtctggcatttggattggtgatcttgatggcgagctgagctgctctctccacaatgaccttccggttcttggaagacacgttgtgagcgatctccgcacagtacgacctgcagggaacagaccacatgttaagctcgcctcaatccaatgtgtggcagcagtgcaggcaaagcagtgagggctatcctgccgacagcaaagcacaggagttttaacagacrcagcgagccacagacagagcttygacagccttgagctctccatacacttcccagcaccgccattgccaccgagtagtgccrcggcgctgagtaaagcaagacggcacctgtgttccccaaagctgctcacctcccaggtctcccacccgcatcgtcctgtccccagtgccattatgggatgggcagcacagcagcacacagccacagcrctgactgcagaactgcagcaatgactcaaggcaaggatgaggaataaacccagggacttacttgttgctcatcatgagcacctccagctct

SEQ ID NO: 22037 - DNA, 600 bp, Chicken  19866894233994_2
tttattaaatacatcccagatgtagaagccagcttattcgttttcctcactgcgcagtctggcatttggattggtgatcttgatggcgagctgagctgctctctccacaatgaccttccggttcttggaagacacgttgtgagcgatctccgcacagtacgacctgcagggaacagaccacatgttaagctcgcctcaatccaatgtgtggcagcagtgcaggcaaagcagtgagggctatcctgccgacagcaaagcacaggagttttaacagacrcagcgagccacagacagagcttygacagccttgagctctccatacacttcccagcaccgccattgccaccgagtagtgccrcggcgctgagtaaagcaagacggcacctgtgttccccaaagctgctcacctcccaggtctcccacccgcatcgtcctgtccccagtgccattatgggatgggcagcacagcagcacacagccacagcrctgactgcagaactgcagcaatgactcaaggcaaggatgaggaataaacccagggacttacttgttgctcatcatgagcacctccagctctttgacrttgtggaccagaaactt

SEQ ID NO: 22038 - DNA, 600 bp, Chicken  19866894233994_3
ctggcatttggattggtgatcttgatggcgagctgagctgctctctccacaatgaccttccggttcttggaagacacgttgtgagcgatctccgcacagtacgacctgcagggaacagaccacatgttaagctcgcctcaatccaatgtgtggcagcagtgcaggcaaagcagtgagggctatcctgccgacagcaaagcacaggagttttaacagacrcagcgagccacagacagagcttygacagccttgagctctccatacacttcccagcaccgccattgccaccgagtagtgccrcggcgctgagtaaagcaagacggcacctgtgttccccaaagctgctcacctcccaggtctcccacccgcatcgtcctgtccccagtgccattatgggatgggcagcacagcagcacacagccacagcrctgactgcagaactgcagcaatgactcaaggcaaggatgaggaataaacccagggacttacttgttgctcatcatgagcacctccagctctttgacrttgtggaccagaaacttcctgaatcccgtgggcagcatatgcttcgtcttcttgttgctcccataaccaatgttg

SEQ ID NO: 22039 - DNA, 534 bp, Chicken  19866894233994_4
aagctcgcctcaatccaatgtgtggcagcagtgcaggcaaagcagtgagggctatcctgccgacagcaaagcacaggagttttaacagacrcagcgagccacagacagagcttygacagccttgagctctccatacacttcccagcaccgccattgccaccgagtagtgccrcggcgctgagtaaagcaagacggcacctgtgttccccaaagctgctcacctcccaggtctcccacccgcatcgtcctgtccccagtgccattatgggatgggcagcacagcagcacacagccacagcrctgactgcagaactgcagcaatgactcaaggcaaggatgaggaataaacccagggacttacttgttgctcatcatgagcacctccagctctttgacrttgtggaccagaaacttcctgaatcccgtgggcagcatatgcttcgtcttcttgttgctcccataaccaatgttgggcatcaggatctggcccttgaacctcctgcgaactctgttatcgatacctcttggtttccg

SEQ ID NO: 22040 - DNA, 437 bp, Chicken  19866894233994_5
gccacagacagagcttygacagccttgagctctccatacacttcccagcaccgccattgccaccgagtagtgccrcggcgctgagtaaagcaagacggcacctgtgttccccaaagctgctcacctcccaggtctcccacccgcatcgtcctgtccccagtgccattatgggatgggcagcacagcagcacacagccacagcrctgactgcagaactgcagcaatgactcaaggcaaggatgaggaataaacccagggacttacttgttgctcatcatgagcacctccagctctttgacrttgtggaccagaaacttcctgaatcccgtgggcagcatatgcttcgtcttcttgttgctcccataaccaatgttgggcatcaggatctggcccttgaacctcctgcgaactctgttatcgatacctcttggtttccg

SEQ ID NO: 22041 - DNA, 599 bp, Chicken  19866894233995_1
  misc_feature (1)..(26): n is any nucleotide
nnnnnnnnnnnnnnnnnnnnnnnnnnaattatcttatgatccagtattaaaagtgtatcaaatattgagaagtgggagaaaatcagtctctttgagttacttgctgtgttctgatccaaacagctcattatgatgttggccccctttgatgccagggctccctgcaggctcatgctcaggttgctgtctcctaaaatccccagggcttttgcagaagaggtagtgctcagcctggtcccaccactgtagagttttttccttcccttgtgcaggattttgcttctgttctagtcaaatttyatgaggttcccatcactccactcctctagcatgtccaggtccctctggatagtagtcatgcccttaaacatgtcaattagttctcctagtttgtgtctctcccctcaggtgagctctcagacttgaagaacatgcatctgtgtgtctatctggtcactgataaacaaggacaggttccaagatagatccctgggcaattctagctgctgctagcaccagatagagtacagtctgttaacagctatgctctaggtttgaccatctagcaagttattcgaccctctagattccacctatat

SEQ ID NO: 22042 - DNA, 600 bp, Chicken  19866894233995_2
tgtgtctatctggtcactgataaacaaggacaggttccaagatagatccctgggcaattctagctgctgctagcaccagatagagtacagtctgttaacagctatgctctaggtttgaccatctagcaagttattcgaccctctagattccacctatatggtctgtaacgtcctagtttggatacaaaaatgttctggaagaaagagtagaaaacctgatacagccacatccactgttcaccacttgtccatgcattcagccattttaacgcagaagacagtcagattgttcaggctaamtttacccttggtaaattcatgttgaccattcccattcaccattttctcttttgtgtgtatccaaatgtgttccaagaggattcaccctaggattctcctagaggcagaaacaggactgactgacctgtagtagttagggaatcaagcaaatgtacccatgtatcagtgacaaaccaacagatgtaaaagtaaatactttcagtattatatattaatgtcactaatgaaatggtatttcaggaagggagcagtatattcctagtgcatactgacatttcctgatgaaaatacacaagtata

SEQ ID NO: 22043 - DNA, 350 bp, Chicken  19866894233995_3
ttcccattcaccattttctcttttgtgtgtatccaaatgtgttccaagaggattcaccctaggattctcctagaggcagaaacaggactgactgacctgtagtagttagggaatcaagcaaatgtacccatgtatcagtgacaaaccaacagatgtaaaagtaaatactttcagtattatatattaatgtcactaatgaaatggtatttcaggaagggagcagtatattcctagtgcatactgacatttcctgatgaaaatacacaagtatagaatttactgagtgaaaggtgcttttcwttatactacattcccatcaccaaaaaaaaaaaaaaaaaaaaaaaaaaaaa

SEQ ID NO: 22044 - DNA, 600 bp, Chicken  19866894234004_1
tggtcagttcataatgtctcctccctgaagctccttcctccatatgatattccccagttccagcacgggttctccagaagccacagcttccttcagggcacatccacctgctctggcatgggatcctccataggctgcagagtgaatatctgctccatggtgctcactccacaggctctgccctgcagtggggccactggagcacagggcagctccggactcacttcacatagccatcccacagcaccctgacaccaatggggcacccacacccagtacatcagtaaagccatgttttcwgtaaagatatttctaggatcagtttccataagtcatatgcattatttctgaagtttttattttcttccacaagatacttataaaayactacataacccagaaaacagatcaaaactgactgatgaaatttcacaagtaaagagggaaagtacagatgcccagaaacaagattcactggtgtactgacactgcatagcaagaatttagcacttacagaaatattcaggataaagactcataccctggactcttggaattacctttgtgaaaaggaagaagaggtgggacctctccagcctt

SEQ ID NO: 22045 - DNA, 600 bp, Chicken  19866894234004_2
cttccttcagggcacatccacctgctctggcatgggatcctccataggctgcagagtgaatatctgctccatggtgctcactccacaggctctgccctgcagtggggccactggagcacagggcagctccggactcacttcacatagccatcccacagcaccctgacaccaatggggcacccacacccagtacatcagtaaagccatgttttcwgtaaagatatttctaggatcagtttccataagtcatatgcattatttctgaagtttttattttcttccacaagatacttataaaayactacataacccagaaaacagatcaaaactgactgatgaaatttcacaagtaaagagggaaagtacagatgcccagaaacaagattcactggtgtactgacactgcatagcaagaatttagcacttacagaaatattcaggataaagactcataccctggactcttggaattacctttgtgaaaaggaagaagaggtgggacctctccagccttatgggtgcttacacacttgcagaaatttacttcatgagtgatcttagaacaacagttgatgtattaattattccagatttatgaag

SEQ ID NO: 22046 - DNA, 600 bp, Chicken  19866894234004_3
aacaacagttgatgtattaattattccagatttatgaagaacaattatgtttttcctcatcactatttctcattatcttgctgtgtaaagcatttccatacattacagaaacctgggctaacttttggttatagagtcacagaatcattaagattggaaaagacctttgagaccacctatcccaaccatcagcccaccccaccacgcccactgcccacatccctcagtgccacatccacacggctcttcaacacctccagggacggtgactccaccacctccctgggcagcctgtgccaytgcctcactgctcttgctgtgaaaaaattcttcctactgctcaacctgaacctcccctggcacaatctgaggccattccctctcatcctatcactgttacctaggagaagaggctaacacccatctcaccacctcctttcaggaagatgtagagagagatgagctctcccctgagcctcctcttctccagactgaacaatccctgttccctcagctgctctccataagacttgtgctccagactcttcaccatcttccttgcccttctttgaacaggcatatataaagtatgctaagaaa

SEQ ID NO: 22047 - DNA, 600 bp, Chicken  19866894234010_1
agggactgggagatggtgcagtagttgggctttggaattatatgggtgagaggaaggggacttgcaggtctccctctgagctcaagaagggcatccaaaccccttctgccctttgctgggcagctcgttgcccactggtttataccaagcagaagtaaggttcctctcccattttccctctgctgacgtcccatctcatcccgctgactgcagcagtactgcactgaatggtagaactgcctaaaaggtgaaggctgttctgccagatgcttctggcaggagctgaagctgtgtgcctcrtttagcttaaggaagtgcccagcagcgtctctgtttcctgcacctgtctcaggggctgtagggcatgggaagagtctgtccctgtgatggtcccctctcctctatgttcattctttgccagctgagcgagccctggacaccatgaactttgaagtgatcaagggccgacctgtccgaatcatgtggtcccagcgagaccctgggctcaggaagtcaggggttggaaacgtctttatcaagaacctggatgactccattgacaataaagccctgtacgacacattctcagcctttgggaac

SEQ ID NO: 22048 - DNA, 599 bp, Chicken  19866894234011_1
  misc_feature (1)..(19): n is any nucleotide
nnnnnnnnnnnnnnnnnnntttataaagcacctgagaactttctcgtattctacaaaataactttaagaacaaaatcaaaacacagcaaaggcaagagtcatttacagttaaataagggctaatgagattttcagcttaattactagatcttattatttgcaattttaaaaaaaagttcacatgcagcacaacacaactgatccttcacacaaaaaacaaggttttttgttctccatttcccactccttcccatccctttccacctccaacacctatttccatcctgctcaagtttacgyccactgttcttctcccacctctcaattttccatggaacgtaagcttctgtttaaaaaaactcaattagcacacatagatttttatagcttaactaacctcaggactgctctctcactttctactccatttcttccaacacaaattttacaactcatatttctcagtctgcttcaggcaagtacgaatagagatgggcttctgttgtttctgctaagcctattccatcccactcccatccaacacattctttgtatacatatgctttccttatcctatccacactgtgctactacattac

SEQ ID NO: 22049 - DNA, 600 bp, Chicken  19866894234015_1
ccaaaacaaaacccttctttataagccttaagtcagcttgtgtatccattaaacttgatggagagctgggtcatttctaacggaaacttggagatcttgcagcagtcagctggaatgcagaaaatggggccctgtttttttgacccgcagttgattctgcattcccctgtggtatcacttaactgctttagtagaaccaatggcatgtatagtttcaagtgctcagagttttttacttcttgtattttattgtttatttctgcagtcacatttggcgtgtttatcctaattgacctttaygtatacctaatgtgcaaacacagattctgtaaagcattaacaaatcgatctcctgtacagatctgcctgcagtcatttgtgagcttgtcctttggaagagcatttcatttttggtagtgacagtatattgggagctgtgttgtcagtgtgccaaatcctagagttggtagctattcttttgtgctagcagagctgcgagcctgatctgaagtggtgaaatttcatgtgagtgaactccaagagcctgggagctgtgcatgtgattgctgagcttgttctgccattgcacggcctgatttg

SEQ ID NO: 22050 - DNA, 599 bp, Chicken  19866894234018_1
  misc_feature (1)..(106): n is any nucleotide
nnnnnnnnnnnnnnnnnnnnnnnnnnnnnnnnnnnnnnnnnnnnnnnnnnnnnnnnnnnnnnnnnnnnnnnnnnnnnnnnnnnnnnnnnnnnnnnnnnnnnnnnnnccaaaaaaaatctgaattaatgtaattattcctagtttcagtgcctatgaataaaaaggaatactaactttgaactgttttccaaaaataatcacttaatgtttaatggtagtgaattgtaacatccctgtgtgggggaaaatctgtagcatttgaatgagctttctgaattaactctgcttagtactgctatrtggattggagattcttttacgcttgtatgcaaacaaaagtctttaacataaatggattccttttgatctgtatacatacgcatatacacatatatctctggaattattacaatgcttcataatttacgcttcaraagttcaaactgaatggtaatgtactgatgcaaggctaatgtgaagggattaatacctttcctgatttttgacagggaaaaggaaaatctatgtccacaataagctaagccatatattttaatgaaaatgacatatgcataatgattttataaaaatgaggctgc

SEQ ID NO: 22051 - DNA, 600 bp, Chicken  19866894234018_2
ttcctagtttcagtgcctatgaataaaaaggaatactaactttgaactgttttccaaaaataatcacttaatgtttaatggtagtgaattgtaacatccctgtgtgggggaaaatctgtagcatttgaatgagctttctgaattaactctgcttagtactgctatrtggattggagattcttttacgcttgtatgcaaacaaaagtctttaacataaatggattccttttgatctgtatacatacgcatatacacatatatctctggaattattacaatgcttcataatttacgcttcaraagttcaaactgaatggtaatgtactgatgcaaggctaatgtgaagggattaatacctttcctgatttttgacagggaaaaggaaaatctatgtccacaataagctaagccatatattttaatgaaaatgacatatgcataatgattttataaaaatgaggctgccattttttttttttttctgacaaagttccccatgtaatgcattaaattaaactcttgtagattagtgtgtacggtattggttcacaacagtttgtgactgtttacttctaatgaaataaattatgaaacatagaa

SEQ ID NO: 22052 - DNA, 600 bp, Chicken  19866894234018_3
ctgtgttggcagttaacttgtctgctgtgagctactagtcgttgaactgggtcaggaaaggaaaaagaaagcctgtcaatatgactgcagaaactcaggtgcccagtggaaaacctgtctgtaaggaaaacagaattacacaaaatgcacattgtcatttttgcatccctttgaggctttatggaatacatggagcactgagagagattaccaaaacctgtagagttgaaataagggtttaaaactgaaagagccaatttaaagtgtgcataaggaagaaatttttcactgtgtgtgtartagaacactagaacaggttgcccagagaaactgtgaatggtctatctctggaagtgttcaaagtcaggttcgatggggatttgaacaacttgatcttgtgaacgatgtcctttcccttgggagtaggagtggatgtccttgtctcctggctttgcattaacaaattcctttcctacttctgacaccaggaattcaaaacacagacagatcatcaggaaaatatgtcgatttacctctgcacaggaagttggtccttccttgacaaagggacccctattcctgttgaagtgaggtgtgcac

SEQ ID NO: 22053 - DNA, 599 bp, Chicken  19866894234021_1
  misc_feature (1)..(99): n is any nucleotide
nnnnnnnnnnnnnnnnnnnnnnnnnnnnnnnnnnnnnnnnnnnnnnnnnnnnnnnnnnnnnnnnnnnnnnnnnnnnnnnnnnnnnnnnnnnnnnnnnnntgggcttgaatgtcagttattcttctacagaaaaagagctttgagggttgtatggtgagaatgcctttatataatttattcattctctttattcctggagtttgattcagtttgactaataaaaatttcagcagagcccctgaattgctctgatttacactctgtttttcatagttattttagaaggaggtgagaagacakaatgactgtactgtgccacttcatatatagcccgtatctcctcctagcctttgatcaaaacacctctcccctccagacaggagtgttctgaaaagttatccatgttcctatatagcagggaaggcctgagagttcaaggtctctttaaaatcataacracgtggatccatatttatatttgttaactaattttttagagcaaagaagttaaggtactgcatgttcacaagaaaagcaaaaaatcatgcagaatttaaaaattccctgtgtttgtgctgcatacgttgtataaatatttt

SEQ ID NO: 22054 - DNA, 600 bp, Chicken  19866894234021_2
aatgcctttatataatttattcattctctttattcctggagtttgattcagtttgactaataaaaatttcagcagagcccctgaattgctctgatttacactctgtttttcatagttattttagaaggaggtgagaagacakaatgactgtactgtgccacttcatatatagcccgtatctcctcctagcctttgatcaaaacacctctcccctccagacaggagtgttctgaaaagttatccatgttcctatatagcagggaaggcctgagagttcaaggtctctttaaaatcataacracgtggatccatatttatatttgttaactaattttttagagcaaagaagttaaggtactgcatgttcacaagaaaagcaaaaaatcatgcagaatttaaaaattccctgtgtttgtgctgcatacgttgtataaatatttttagtctcaaaggaaataagcattttggaaagttgcctagtgtatttcattacgttgagtggttgctattttagccattgcttggcttgtaacagtaagattttcaagcctgtaagattttaagcatattgaatcatgatattttaaagctatttagtac

SEQ ID NO: 22055 - DNA, 599 bp, Chicken  19866894234024_1
  misc_feature (1)..(8): n is any nucleotide
nnnnnnnnataatgtgtagatgttgcttgatgtcttaagagagttatctctgtgtgattctccattcgacttacttgatttactgggttaattgttaattttggtaaatataaacacaaaaccctttctattctcaagtgcactgagtatgtgtgtcaccaaaatgatttcagacctgcataaatatttctttattatctcaaagtagaaaattcaaaataggcttactttggagttgtgccagaatttctgtaggttccatactacaagatgctgtcagtgtataatactgtatcatayttttgtctgtggagaggaacacttgattataaattgctttataattgattaattgttataaattgttttctgaagatcartaatttttgtytgtttgttttgcacagtgcctttggtgtttcaccaacaacacttgtattgattatcctgtaagaagcattcttccaccatcttcrttatgttcactctcaaatgctcgatggggagtttgctggagtaggtactarttcttcttctgtggtagtgatgtatctacaagtatgctcagtctgaagtgaggctgccacttactgcagctt

SEQ ID NO: 22056 - DNA, 600 bp, Chicken  19866894234024_2
tactgggttaattgttaattttggtaaatataaacacaaaaccctttctattctcaagtgcactgagtatgtgtgtcaccaaaatgatttcagacctgcataaatatttctttattatctcaaagtagaaaattcaaaataggcttactttggagttgtgccagaatttctgtaggttccatactacaagatgctgtcagtgtataatactgtatcatayttttgtctgtggagaggaacacttgattataaattgctttataattgattaattgttataaattgttttctgaagatcartaatttttgtytgtttgttttgcacagtgcctttggtgtttcaccaacaacacttgtattgattatcctgtaagaagcattcttccaccatcttcrttatgttcactctcaaatgctcgatggggagtttgctggagtaggtactarttcttcttctgtggtagtgatgtatctacaagtatgctcagtctgaagtgaggctgccacttactgcagcttttccctgataatttactgggagggttygggaagggcagtggttacgattggaatgtggaatatcccttcggtcagttcagg

SEQ ID NO: 22057 - DNA, 600 bp, Chicken  19866894234024_3
ttgttaattttggtaaatataaacacaaaaccctttctattctcaagtgcactgagtatgtgtgtcaccaaaatgatttcagacctgcataaatatttctttattatctcaaagtagaaaattcaaaataggcttactttggagttgtgccagaatttctgtaggttccatactacaagatgctgtcagtgtataatactgtatcatayttttgtctgtggagaggaacacttgattataaattgctttataattgattaattgttataaattgttttctgaagatcartaatttttgtytgtttgttttgcacagtgcctttggtgtttcaccaacaacacttgtattgattatcctgtaagaagcattcttccaccatcttcrttatgttcactctcaaatgctcgatggggagtttgctggagtaggtactarttcttcttctgtggtagtgatgtatctacaagtatgctcagtctgaagtgaggctgccacttactgcagcttttccctgataatttactgggagggttygggaagggcagtggttacgattggaatgtggaatatcccttcggtcagttcaggacaagtgtccc

SEQ ID NO: 22058 - DNA, 600 bp, Chicken  19866894234024_4
tgcataaatatttctttattatctcaaagtagaaaattcaaaataggcttactttggagttgtgccagaatttctgtaggttccatactacaagatgctgtcagtgtataatactgtatcatayttttgtctgtggagaggaacacttgattataaattgctttataattgattaattgttataaattgttttctgaagatcartaatttttgtytgtttgttttgcacagtgcctttggtgtttcaccaacaacacttgtattgattatcctgtaagaagcattcttccaccatcttcrttatgttcactctcaaatgctcgatggggagtttgctggagtaggtactarttcttcttctgtggtagtgatgtatctacaagtatgctcagtctgaagtgaggctgccacttactgcagcttttccctgataatttactgggagggttygggaagggcagtggttacgattggaatgtggaatatcccttcggtcagttcaggacaagtgtcccagcagtgccccctcccagtctgtgcacttctagcagactcactgctgcagtagcaagtcaaagagctgcctagatgttgagcaag

SEQ ID NO: 22059 - DNA, 600 bp, Chicken  19866894234024_5
ctttggagttgtgccagaatttctgtaggttccatactacaagatgctgtcagtgtataatactgtatcatayttttgtctgtggagaggaacacttgattataaattgctttataattgattaattgttataaattgttttctgaagatcartaatttttgtytgtttgttttgcacagtgcctttggtgtttcaccaacaacacttgtattgattatcctgtaagaagcattcttccaccatcttcrttatgttcactctcaaatgctcgatggggagtttgctggagtaggtactarttcttcttctgtggtagtgatgtatctacaagtatgctcagtctgaagtgaggctgccacttactgcagcttttccctgataatttactgggagggttygggaagggcagtggttacgattggaatgtggaatatcccttcggtcagttcaggacaagtgtcccagcagtgccccctcccagtctgtgcacttctagcagactcactgctgcagtagcaagtcaaagagctgcctagatgttgagcaaggcctgttcagcaataaccaaaacgttggtgtgttatcagcactgtttgagt

SEQ ID NO: 22060 - DNA, 532 bp, Chicken  19866894234024_6
ttataaattgctttataattgattaattgttataaattgttttctgaagatcartaatttttgtytgtttgttttgcacagtgcctttggtgtttcaccaacaacacttgtattgattatcctgtaagaagcattcttccaccatcttcrttatgttcactctcaaatgctcgatggggagtttgctggagtaggtactarttcttcttctgtggtagtgatgtatctacaagtatgctcagtctgaagtgaggctgccacttactgcagcttttccctgataatttactgggagggttygggaagggcagtggttacgattggaatgtggaatatcccttcggtcagttcaggacaagtgtcccagcagtgccccctcccagtctgtgcacttctagcagactcactgctgcagtagcaagtcaaagagctgcctagatgttgagcaaggcctgttcagcaataaccaaaacgttggtgtgttatcagcactgtttgagtcagaactccaaattacaaaatacagcaccat

SEQ ID NO: 22061 - DNA, 600 bp, Chicken  19866894234025_1
aggtattatttctgaatctgactttgattttctgcgtgatttggaggtaaccctctgccctcagggtgtttggagaggcttagccttagtctgacagaagttgttatagaaacatgaagtgctgctgctgaaggggaagaagcagatcagcattgccttgaatagaaaagatccatttcccttttccttctccctagtgtcactcagagaagagggtaaacaatgtcccaggtttgtcccaagtccatactttggaggttatagaggtcctgaatttcttatgagctggtacccttctaygtgtctcagtttttaccacactacccagaaactcagtgtgcccccaacagtgctgcccaccatgtaattgtaggatcaggaagccaaagaaacaggtgtgctttggccagggcagcccagatgtgttttgtttcatcactggaaaaggtgtcttcatctttcttctcttgtgttttgttgcatttcttttcctttccagggcactgctggtttggaagtgacagcatatgaggaaatgtccagcctcgttaattacatacagcccatcaaatttgactcctttgaagtctctgcccgtaa

SEQ ID NO: 22062 - DNA, 600 bp, Chicken  19866894234030_1
ttccggtgctctgtcgcaacactgccgccgagacctgcagccggtctgtatgggagaatttcacctcctacgtcgtgcttgaggaaagacacagttacatgtgggcaaacagaaaaatctcaaaactggaatggggaggcaatgagagtagcgcaggaaaaggcagcaccactaacaaaatgaaccaaatgaacaaagtgaatgtaggtgcagttgtaaagtgctttttacctgtaaaatccaccagagaagtggactttggttttgccagggaaaaaatacaatcactaaatcatggaytcttattttcatgaactccactggcaaccctgctcatggcagasggctggagctcaatgagctttaagatcccttccaacctaagccatgccatgactctatgattctaagattttgtgattctgatttcataagatcatagaattgttatgattcgaaaagaccaacaagatcatcttgtccaatcatcagcccacccccaccatgcccactgtgtccctcagtgccacatccacatgtttcttgaacacctccagggatggtgactccaccacctccctgggcagcctgtgccactgc

SEQ ID NO: 22063 - DNA, 600 bp, Chicken  19866894234030_2
tctgtatgggagaatttcacctcctacgtcgtgcttgaggaaagacacagttacatgtgggcaaacagaaaaatctcaaaactggaatggggaggcaatgagagtagcgcaggaaaaggcagcaccactaacaaaatgaaccaaatgaacaaagtgaatgtaggtgcagttgtaaagtgctttttacctgtaaaatccaccagagaagtggactttggttttgccagggaaaaaatacaatcactaaatcatggaytcttattttcatgaactccactggcaaccctgctcatggcagasggctggagctcaatgagctttaagatcccttccaacctaagccatgccatgactctatgattctaagattttgtgattctgatttcataagatcatagaattgttatgattcgaaaagaccaacaagatcatcttgtccaatcatcagcccacccccaccatgcccactgtgtccctcagtgccacatccacatgtttcttgaacacctccagggatggtgactccaccacctccctgggcagcctgtgccactgcctcactgctcttactgagaagaattttttcctaacatccaacct

SEQ ID NO: 22064 - DNA, 600 bp, Chicken  19866894234030_3
tgagctttaagatcccttccaacctaagccatgccatgactctatgattctaagattttgtgattctgatttcataagatcatagaattgttatgattcgaaaagaccaacaagatcatcttgtccaatcatcagcccacccccaccatgcccactgtgtccctcagtgccacatccacatgtttcttgaacacctccagggatggtgactccaccacctccctgggcagcctgtgccactgcctcactgctcttactgagaagaattttttcctaacatccaacctgattgatttcctyaatttccatactgtattagccatttctttagtacacagragtttatttctggtccagtgaaataggcatcactcaggtataccacaaaggrctgttgtgattaccaccatctgtctagttgcaatgcatgttttttagctaaactcaattttctgtgctctaaatacccagcataccgattaccctcacgtgtacttgaacaccaaagaattcaatcttccaggggttgcagaaatcagcacagatctctcataagctctgagttttggtgtggagcttttgaatttgaatttctggggt

SEQ ID NO: 22065 - DNA, 600 bp, Chicken  19866894234030_4
ctctatgattctaagattttgtgattctgatttcataagatcatagaattgttatgattcgaaaagaccaacaagatcatcttgtccaatcatcagcccacccccaccatgcccactgtgtccctcagtgccacatccacatgtttcttgaacacctccagggatggtgactccaccacctccctgggcagcctgtgccactgcctcactgctcttactgagaagaattttttcctaacatccaacctgattgatttcctyaatttccatactgtattagccatttctttagtacacagragtttatttctggtccagtgaaataggcatcactcaggtataccacaaaggrctgttgtgattaccaccatctgtctagttgcaatgcatgttttttagctaaactcaattttctgtgctctaaatacccagcataccgattaccctcacgtgtacttgaacaccaaagaattcaatcttccaggggttgcagaaatcagcacagatctctcataagctctgagttttggtgtggagcttttgaatttgaatttctggggtgcattaaaaagaacatggccagcaggtcaagggaggtga

SEQ ID NO: 22066 - DNA, 600 bp, Chicken  19866894234030_5
tatgattcgaaaagaccaacaagatcatcttgtccaatcatcagcccacccccaccatgcccactgtgtccctcagtgccacatccacatgtttcttgaacacctccagggatggtgactccaccacctccctgggcagcctgtgccactgcctcactgctcttactgagaagaattttttcctaacatccaacctgattgatttcctyaatttccatactgtattagccatttctttagtacacagragtttatttctggtccagtgaaataggcatcactcaggtataccacaaaggrctgttgtgattaccaccatctgtctagttgcaatgcatgttttttagctaaactcaattttctgtgctctaaatacccagcataccgattaccctcacgtgtacttgaacaccaaagaattcaatcttccaggggttgcagaaatcagcacagatctctcataagctctgagttttggtgtggagcttttgaatttgaatttctggggtgcattaaaaagaacatggccagcaggtcaagggaggtgattctccccctctactctgccctgatgaggccacgtttagaatactatgtcca

SEQ ID NO: 22067 - DNA, 600 bp, Chicken  19866894234031_1
aagagagctttttggtctcaaactatgcagcttgcataagtttcagaactaaccactggctgggcagaggagacaaactttgtgcacccgttgtatagaagaaaaagctgtagtgtaagcttgtgacttagcaaataccaaagattccgtggcagagaatattgggaaaacctttgaaagcttcttatgtttatcacacatcagagaatcctgtcaatctcaagagaatctcaggaagctaggcatcactagtccatgtggcagtttgtttcaatgagattgttttccagagccatagtrataactagaaacagattttcacagaattttgtatttttagtaattctgttgatgctgtattgctgacgttcttaggttactagcgtagcatgtaggcatgtagccctgggcaaactgatctagtacttgatctagcggtaggcaaacctgcttgtggcaggggggctggaacttgatacttgaggtccctttcaacccaagccattctatgatctttattcggaaaaaaccaaaacaacaacaacaataaaagaaagtaattttacacagtgagacctgaaactggcaccaggcacgctg

SEQ ID NO: 22068 - DNA, 600 bp, Chicken  19866894234036_1
cccatcggcttgtcttccgtgatgtggggatggtcagctcctgcaaatagctctggatcaacgggccaaggttaactgtatgagtttcagtagggccaagtgtcaggtcttgcattttggtcacaacaaccccaggcaaccctacaggcttggggaggagtgtctggaaaactgcctgacagaaagggaccttggtgtactgatggacagtggactgaatatgagccagcagtgtgcccaggtggccaagaaggccagtggcatcctggcttgtatgaggagcgactgaaggaactgggrttgtttagtctggagaagaggaggctgaggggagactttattgctctcttccaatatctgaaaggtgcttacagtgagagcggggttggtctcttctcactggtgacaggtgacaggacagggggaaatggtcttaagttgcaccagggtaagtttaggttggagatgagggaaaacttctttacagaaaggattgttaagcactggaataggctccccagggaggcrgttgagtcaccatcgctgaatgtgtttaaaacccatttggatgtggtgctcagggaygtgatttagcagggg

SEQ ID NO: 22069 - DNA, 596 bp, Chicken  19866894234036_2
gcagtgtgcccaggtggccaagaaggccagtggcatcctggcttgtatgaggagcgactgaaggaactgggrttgtttagtctggagaagaggaggctgaggggagactttattgctctcttccaatatctgaaaggtgcttacagtgagagcggggttggtctcttctcactggtgacaggtgacaggacagggggaaatggtcttaagttgcaccagggtaagtttaggttggagatgagggaaaacttctttacagaaaggattgttaagcactggaataggctccccagggaggcrgttgagtcaccatcgctgaatgtgtttaaaacccatttggatgtggtgctcagggaygtgatttagcagggggttgttagaattagggtagtatggttaggttgtggttggactcgatgatcttgaaggtcttcttgaacctgagtgattctgtgattctattattgtatgaatgagactgtatgcaaaggcatcttttctcttagtttatcaaattaaaattatttttctttcagttctttctgaagtaaattgttggaaagctcagtattcaaaataggaatattgattgattg

SEQ ID NO: 22070 - DNA, 539 bp, Chicken  19866894234036_3
ctgaaggaactgggrttgtttagtctggagaagaggaggctgaggggagactttattgctctcttccaatatctgaaaggtgcttacagtgagagcggggttggtctcttctcactggtgacaggtgacaggacagggggaaatggtcttaagttgcaccagggtaagtttaggttggagatgagggaaaacttctttacagaaaggattgttaagcactggaataggctccccagggaggcrgttgagtcaccatcgctgaatgtgtttaaaacccatttggatgtggtgctcagggaygtgatttagcagggggttgttagaattagggtagtatggttaggttgtggttggactcgatgatcttgaaggtcttcttgaacctgagtgattctgtgattctattattgtatgaatgagactgtatgcaaaggcatcttttctcttagtttatcaaattaaaattatttttctttcagttctttctgaagtaaattgttggaaagctcagtattcaaaataggaatattgattgattg

SEQ ID NO: 22071 - DNA, 497 bp, Chicken  19866894234046_1
gtgtgcattacgtgttctgtgatctgtaaggtcctttcagtgccaaccttgcagtgattccatcctcctatcactcagatgtggagagccagccccccgcccctcagtgacagcagtgggactgggtgaggacggggatcgtggcagtagcaccggtgggattgggtggggcacgcggggccactgcatggggggagtgatgctgggaataggtaccagggtggtcagatggcacctgaggacaacactgatggcagcaggtcctgtctgggacagaggctgtgtgcggctggcgacatygcaagcggcccgcagcgaggacaaggacccaaaaggaacggcggcaccgtccgatggggacggcggcggtgttcccaagggctggcactcaccgttgctgcacttgggctgggaggggtccgtgctgaggacctgtagggcagcgggatcaggaggggcgggtgggggtcctgatgggacccaggggcactggggga

SEQ ID NO: 22072 - DNA, 600 bp, Chicken  19866894234058_1
aacgtagcagtgctttctgtcagaatcagtgtgtttcacaactggtggagttattttgccgtccttataaaattaatttctattagcctagcctagatgagacacttctgagcacagaggctgcttgtaaatgtcagcttacagcaggagtttggactctgcacgttaaagaaacagaactaaaactttgtggtgtacaaagactttctttttaaatcctcttcccagaagtctacagaaaaactattttattctctcttgttgtatcaagtatttaagttctttaaataccaccatttygtaactgtgccctggcaacctaggtagaaactgatgcatattcatcagatattcacagtactgcagtacagtggtgaaactctttgctctgagctaagaatagtgtttcactttcagcagttgctgtttgatatataaatctttcaatcttttctaattcttaatatgcttctgagtgtatggaagacaaatactgttcttatcagttaatgtactggcagggcgtcttactgaatgaagaaaacagttacacgttagcagatgttttgtggggaaggtttggtttgttttttttccttc

SEQ ID NO: 22073 - DNA, 600 bp, Chicken  19866894234070_1
ctatctatacacagtagcacccaaaggatctctctctgaagtcccgtccagtctccctctgtgtgcatttcatccactcacatctctgccagggagttccagtgttcgtctcttaaatgcagaaccactcctctgtttgttttgaaccaggattaatttgttgtcaaaacaatgatccaattctccaggactcattttgaagaccactgattgtgtgaacatgggaatgttgatgatcattacctttttcacattacattgggtaattgtttttggtaattcttgtaattgcctggaaawctactaattattttattgtctgagaaaggaaaayatcatttacaaattagggataaaatagcataaaatatttctttttaaatgtataatcacaatggaaccatttgggaaaccaagttgccctacaacttagcccctacacttttggaaaatcttgatatactcagyactgctttggccacaaaccctcaaatccattcacatggtctttcctcagtcccascctggacattccatccctgtccactgatgaatgggcactgttcactaacagcagatcctgaggatatgtgcacatga

SEQ ID NO: 22074 - DNA, 600 bp, Chicken  19866894234070_2
tctgaagtcccgtccagtctccctctgtgtgcatttcatccactcacatctctgccagggagttccagtgttcgtctcttaaatgcagaaccactcctctgtttgttttgaaccaggattaatttgttgtcaaaacaatgatccaattctccaggactcattttgaagaccactgattgtgtgaacatgggaatgttgatgatcattacctttttcacattacattgggtaattgtttttggtaattcttgtaattgcctggaaawctactaattattttattgtctgagaaaggaaaayatcatttacaaattagggataaaatagcataaaatatttctttttaaatgtataatcacaatggaaccatttgggaaaccaagttgccctacaacttagcccctacacttttggaaaatcttgatatactcagyactgctttggccacaaaccctcaaatccattcacatggtctttcctcagtcccascctggacattccatccctgtccactgatgaatgggcactgttcactaacagcagatcctgaggatatgtgcacatgattgaagctctttggtttctttccgctgtgaagaa

SEQ ID NO: 22075 - DNA, 600 bp, Chicken  19866894234070_3
acaatgatccaattctccaggactcattttgaagaccactgattgtgtgaacatgggaatgttgatgatcattacctttttcacattacattgggtaattgtttttggtaattcttgtaattgcctggaaawctactaattattttattgtctgagaaaggaaaayatcatttacaaattagggataaaatagcataaaatatttctttttaaatgtataatcacaatggaaccatttgggaaaccaagttgccctacaacttagcccctacacttttggaaaatcttgatatactcagyactgctttggccacaaaccctcaaatccattcacatggtctttcctcagtcccascctggacattccatccctgtccactgatgaatgggcactgttcactaacagcagatcctgaggatatgtgcacatgattgaagctctttggtttctttccgctgtgaagaaatagttggaagttattttacttctagaatatttaaggaaactttgtatcttgaaataggaacttctgtttaaggaccatggtatgaacaaagttcagttaaaaagaagggtactaaaattagcagtcttgataa

SEQ ID NO: 22076 - DNA, 600 bp, Chicken  19866894234070_4
ggaatgttgatgatcattacctttttcacattacattgggtaattgtttttggtaattcttgtaattgcctggaaawctactaattattttattgtctgagaaaggaaaayatcatttacaaattagggataaaatagcataaaatatttctttttaaatgtataatcacaatggaaccatttgggaaaccaagttgccctacaacttagcccctacacttttggaaaatcttgatatactcagyactgctttggccacaaaccctcaaatccattcacatggtctttcctcagtcccascctggacattccatccctgtccactgatgaatgggcactgttcactaacagcagatcctgaggatatgtgcacatgattgaagctctttggtttctttccgctgtgaagaaatagttggaagttattttacttctagaatatttaaggaaactttgtatcttgaaataggaacttctgtttaaggaccatggtatgaacaaagttcagttaaaaagaagggtactaaaattagcagtcttgataaacatgttttagaaagacaaaactaacaaacaaaacaacacaaactaataaaagtt

SEQ ID NO: 22077 - DNA, 600 bp, Chicken  19866894234070_5
ctgaggatatgtgcacatgattgaagctctttggtttctttccgctgtgaagaaatagttggaagttattttacttctagaatatttaaggaaactttgtatcttgaaataggaacttctgtttaaggaccatggtatgaacaaagttcagttaaaaagaagggtactaaaattagcagtcttgataaacatgttttagaaagacaaaactaacaaacaaaacaacacaaactaataaaagtttacccaaatgatgcaaacaaagacatcttcagaaagaaagacaaagtgggatgtggsgagagaattctttaaaacctgaaacaaactcaagttcagyagaagcctaaaagaaacaatcttcacacaagtgatcacatacacaataaagcagatctgaaagtttggccttcctattttgaaacctgacttctttaaacattcatcttaaattatgtaaaatgctgtagcaaatctgttttaaagaacatcagaaatgcatttagggaatgtaaacggttgttgggtttttttgttagttagttagtttgtttttaagtggaaataactggtaaatacctgattggatagtagctcccc

SEQ ID NO: 22078 - DNA, 600 bp, Chicken  19866894234070_6
tccgctgtgaagaaatagttggaagttattttacttctagaatatttaaggaaactttgtatcttgaaataggaacttctgtttaaggaccatggtatgaacaaagttcagttaaaaagaagggtactaaaattagcagtcttgataaacatgttttagaaagacaaaactaacaaacaaaacaacacaaactaataaaagtttacccaaatgatgcaaacaaagacatcttcagaaagaaagacaaagtgggatgtggsgagagaattctttaaaacctgaaacaaactcaagttcagyagaagcctaaaagaaacaatcttcacacaagtgatcacatacacaataaagcagatctgaaagtttggccttcctattttgaaacctgacttctttaaacattcatcttaaattatgtaaaatgctgtagcaaatctgttttaaagaacatcagaaatgcatttagggaatgtaaacggttgttgggtttttttgttagttagttagtttgtttttaagtggaaataactggtaaatacctgattggatagtagctcccccatagctcacaagcagctttacacttggcataaaaacaaa

SEQ ID NO: 22079 - DNA, 600 bp, Chicken  19866894234077_1
caatactcacgatgactgaggaaagcaagaggtgaggattgagttttcctctcactgactaaaaagtcaataagcaacaggcaaactgcttcacagtgccacaatggtatcctttgtctttttaagtgagaattctcatggaaatcagtgtggtttctggtcaactgtcagttatggtaccaaaaatgcgtgtaagaatctattattgtagaggcttggacacaaatgccggacaattcgtaaaagtccagtggcactgctgaaggactgaaaaggaatgagctatccagtctgacaaasagtagaataattttattagctctctgccttcctttcttctctctaatcaccaagcagtcggtctcctgccacacgtttacagcccatttacaccagtgtaatgccactggaatttacgtcagcctacgatgtatgcagaaaacattcagtcagacaaaggtgagatgaaggtagaaaagcagcgcactgagaaagtgtcagacacgacacttcgaaattacccttattactccacactataacaggacgttcctattttcttctacaaactgcattcaacaaaagcttctttcttcagca

SEQ ID NO: 22080 - DNA, 600 bp, Chicken  19866894234080_1
ttgcttctgacagcttttatagcagcgttacgctatgctaaatcccggggtgctgtaccaggttgacagcatttcctagtgctgtccaatttatctttgggccaaatgtcagggtatctgcttgtgaagagagcagtattttcaggatctctggccttgctaacccctaatcaaatcctactgttggtggaatttgatttataaaatgctcctgcagaaagtaacactgacgagttcctaaggtgtgcttttgtggcttagctactcttggataactaatctcaaagaataacatttagrygtgtgcaaggtagaaaagaacctctctcggctgcttcaggaaaaagatgaactgcattcgtcgtgataaaactgcttgaacataaagctgtgaatacaaccaggcattcattttcatgttttttttctcttattcttgccttgtgccagaagctccctagtgtctgctcacactccccaggttaatgctgagaatgctggctctgtgttcctgataggtttttgtaggtgaagttgaaatagctgtgaatgcagcrcttgaacttttcaaggccatatccttcttcatcaccataaata

SEQ ID NO: 22081 - DNA, 600 bp, Chicken  19866894234080_2
tgcttctgacagcttttatagcagcgttacgctatgctaaatcccggggtgctgtaccaggttgacagcatttcctagtgctgtccaatttatctttgggccaaatgtcagggtatctgcttgtgaagagagcagtattttcaggatctctggccttgctaacccctaatcaaatcctactgttggtggaatttgatttataaaatgctcctgcagaaagtaacactgacgagttcctaaggtgtgcttttgtggcttagctactcttggataactaatctcaaagaataacatttagrygtgtgcaaggtagaaaagaacctctctcggctgcttcaggaaaaagatgaactgcattcgtcgtgataaaactgcttgaacataaagctgtgaatacaaccaggcattcattttcatgttttttttctcttattcttgccttgtgccagaagctccctagtgtctgctcacactccccaggttaatgctgagaatgctggctctgtgttcctgataggtttttgtaggtgaagttgaaatagctgtgaatgcagcrcttgaacttttcaaggccatatccttcttcatcaccataaatat

SEQ ID NO: 22082 - DNA, 600 bp, Chicken  19866894234080_3
cttgtgaagagagcagtattttcaggatctctggccttgctaacccctaatcaaatcctactgttggtggaatttgatttataaaatgctcctgcagaaagtaacactgacgagttcctaaggtgtgcttttgtggcttagctactcttggataactaatctcaaagaataacatttagrygtgtgcaaggtagaaaagaacctctctcggctgcttcaggaaaaagatgaactgcattcgtcgtgataaaactgcttgaacataaagctgtgaatacaaccaggcattcattttcatgytttttttctcttattcttgccttgtgccagaagctccctagtgtctgctcacactccccaggttaatgctgagaatgctggctctgtgttcctgataggtttttgtaggtgaagttgaaatagctgtgaatgcagcrcttgaacttttcaaggccatatccttcttcatcaccataaatatttatcagtggcagagrgtgtttatagaatatctagggagactgactgtaatgtaagatcagtgacattatggtaatgcttggagtatttgggatgaatggaagaaggcaaaatagaagg

SEQ ID NO: 22083 - DNA, 600 bp, Chicken  19866894234080_4
ttagctactcttggataactaatctcaaagaataacatttagrygtgtgcaaggtagaaaagaacctctctcggctgcttcaggaaaaagatgaactgcattcgtcgtgataaaactgcttgaacataaagctgtgaatacaaccaggcattcattttcatgttttttttctcttattcttgccttgtgccagaagctccctagtgtctgctcacactccccaggttaatgctgagaatgctggctctgtgttcctgataggtttttgtaggtgaagttgaaatagctgtgaatgcagcrcttgaacttttcaaggccatatccttcttcatcaccataaatatttatcagtggcagagrgtgtttatagaatatctagggagactgactgtaatgtaagatcagtgacattatggtaatgcttggagtatttgggatgaatggaagaaggcaaaatagaaggctagctgtgatagcttacggcttagctggggtggagagatggagttggaatgatctgctaataggagcgtaagaatgctcttcaggatctttataagtgggattagctgcaaaaccaactgatgcccttttattaca

SEQ ID NO: 22084 - DNA, 600 bp, Chicken  19866894234080_5
agaacctctctcggctgcttcaggaaaaagatgaactgcattcgtcgtgataaaactgcttgaacataaagctgtgaatacaaccaggcattcattttcatgttttttttctcttattcttgccttgtgccagaagctccctagtgtctgctcacactccccaggttaatgctgagaatgctggctctgtgttcctgataggtttttgtaggtgaagttgaaatagctgtgaatgcagcrcttgaacttttcaaggccatatccttcttcatcaccataaatatttatcagtggcagagrgtgtttatagaatatctagggagactgactgtaatgtaagatcagtgacattatggtaatgcttggagtatttgggatgaatggaagaaggcaaaatagaaggctagctgtgatagcttacggcttagctggggtggagagatggagttggaatgatctgctaataggagcgtaagaatgctcttcaggatctttataagtgggattagctgcaaaaccaactgatgcccttttattacaacttcagcaccattagagaactgttttttgggtttgagataacatcgtctgagtatctgt

SEQ ID NO: 22085 - DNA, 600 bp, Chicken  19866894234083_1
gctggaaatatataaacagcatttaatccataaaatcctaagaatacaccaatagcagaactatcaagactggtatgccatggtggaatcactcaccagagggcccaaaatgaatctaatacttaaacagtaattaactaatatcagctaatggcataacacactaaaaagaagaactcagatatgaaaacggacttgagatgtgtgcctggtaaaaaatattctgccatagtagtgtctgtctgttgcatgctatgcattatattgatatctataaatacttaagttgcaaattgtagraatgtataatggagacagaaaaattttatgtttggctgttagtcacactcttctttaggcatctgctgctggccattactacagaaagtacacagtgctcagtggacatttaatttgacacagtacaaactgtctgtacgttcttccaattggctacattaaaaaaaagttaagattattaacttgattcatatcartaactttcttgttctgttcctgtgaattctttcatcacctccacaacaacattacacagtcagcacttcattggaattgtgcaagggaaaactgagttacttc

SEQ ID NO: 22086 - DNA, 600 bp, Chicken  19866894234083_2
gagatgtgtgcctggtaaaaaatattctgccatagtagtgtctgtctgttgcatgctatgcattatattgatatctataaatacttaagttgcaaattgtagraatgtataatggagacagaaaaattttatgtttggctgttagtcacactcttctttaggcatctgctgctggccattactacagaaagtacacagtgctcagtggacatttaatttgacacagtacaaactgtctgtacgttcttccaattggctacattaaaaaaaagttaagattattaacttgattcatatcartaactttcttgttctgttcctgtgaattctttcatcacctccacaacaacattacacagtcagcacttcattggaattgtgcaagggaaaactgagttacttctgagatttctaggtggtgaatctcaattactgaccaatttggctgacccatttttcaaatggtcctgcaacatacagcatcaagcactagttttggttaagttaccttcacattggcaaggatcgttggtccaacaaaattgccgttctcatagcccttaactttgatattacgtccatccagaagaagactggcac

SEQ ID NO: 22087 - DNA, 600 bp, Chicken  19866894234085_1
tctttagcagggtctgttgtgataggacaaggggaaatggtttcaaatggaaacagcagagatttagatgggatgtaaggaagaggctttttagaggaagggcggtgaggcactggaacaagttgcccagagaggaggtggatgctccgtccctggagacgttcaaggtcaggctgaacagggctttgcgcagcctgttggagctgtaggtgtccctcttcactgcaggagagttggactagatgacctttaaggattccttccatctgaaataattctatgatcttctgtacagttaayaactaagagcaagtgagcatgggagtgaaggcagtatggttcaygtactkcagtttccagaagactttctggaagatccatcaccatactctctcaaagataatgatttgccagggatcaagtaacacattatctcatagattaacagctcattgaaagatagggggcaaatctgtcagaaaaaatgaaggcatagatttaaaggtattgcaaagacttctgaatccctgtgggatttgctaactgtcttgctggaggtggggatgtactttggagaagatcaaaactgtactttcattt

SEQ ID NO: 22088 - DNA, 600 bp, Chicken  19866894234085_2
aaatggaaacagcagagatttagatgggatgtaaggaagaggctttttagaggaagggcggtgaggcactggaacaagttgcccagagaggaggtggatgctccgtccctggagacgttcaaggtcaggctgaacagggctttgcgcagcctgttggagctgtaggtgtccctcttcactgcaggagagttggactagatgacctttaaggattccttccatctgaaataattctatgatcttctgtacagttaayaactaagagcaagtgagcatgggagtgaaggcagtatggttcaygtactkcagtttccagaagactttctggaagatccatcaccatactctctcaaagataatgatttgccagggatcaagtaacacattatctcatagattaacagctcattgaaagatagggggcaaatctgtcagaaaaaatgaaggcatagatttaaaggtattgcaaagacttctgaatccctgtgggatttgctaactgtcttgctggaggtggggatgtactttggagaagatcaaaactgtactttcatttaatagcatttccttcgtgagtgacatgtgacaaatgaagctcat

SEQ ID NO: 22089 - DNA, 600 bp, Chicken  19866894234085_3
aaacagcagagatttagatgggatgtaaggaagaggctttttagaggaagggcggtgaggcactggaacaagttgcccagagaggaggtggatgctccgtccctggagacgttcaaggtcaggctgaacagggctttgcgcagcctgttggagctgtaggtgtccctcttcactgcaggagagttggactagatgacctttaaggattccttccatctgaaataattctatgatcttctgtacagttaayaactaagagcaagtgagcatgggagtgaaggcagtatggttcaygtactkcagtttccagaagactttctggaagatccatcaccatactctctcaaagataatgatttgccagggatcaagtaacacattatctcatagattaacagctcattgaaagatagggggcaaatctgtcagaaaaaatgaaggcatagatttaaaggtattgcaaagacttctgaatccctgtgggatttgctaactgtcttgctggaggtggggatgtactttggagaagatcaaaactgtactttcatttaatagcatttccttcgtgagtgacatgtgacaaatgaagctcatgtctcc

SEQ ID NO: 22090 - DNA, 599 bp, Chicken  19866894234088_1
  misc_feature (1)..(85): n is any nucleotide
nnnnnnnnnnnnnnnnnnnnnnnnnnnnnnnnnnnnnnnnnnnnnnnnnnnnnnnnnnnnnnnnnnnnnnnnnnnnnnnnnnnnngcgacccctgcgttataactacagcatgtgggacacgtcctgctcccattctttgactgggatgaacttcagagtccttctgccagcagggttagaagcaagcggtgagctaacccagctgatccagcccagcagaaggcagccccatcagcccccagaggccacgcgcacggagacctccccaaatcaagaaaccaagcatgatgcaattaaawacattacacattgcaatcttcctcccttagaaataacagcaactgccaaagcattctgctcctgcctttcctgctcatgcagaagtccctttgggcttcacggaaattttggactcacaaaaagctgcagaacaggggccccatggcaccgtgtaataattcttagaagttaacagccagaactgtgctaaatgtgatgggttttgctttgtgtaggatcatgaaaataatgcgttctggctcgctaagttgggcctggtgcaccaaggccaatgctctgctgctgctgctgctaatgg

SEQ ID NO: 22091 - DNA, 600 bp, Chicken  19866894234089_1
actcttgtacattgcgggtgaaaatgcacagctaatggtaataagtatgctgaaaaagactgttttgtagctgagaatttgcccgatcaaacattgttattttgcactttgtattggttgtactttccatagaaaaaaataggaggcatcacttttggagcaactgatatatatgtagcctaagacaatccctctttactccttgtggccaaggcaagccaaaaggttggacatcgatgtagttgaggttgaaccttcctgccagtattctgttaaatattgttgctgtgtgacagatgrcaggagaggggcagtctgactgaacggtgtcttacatgcaagtgtatatgaagtaaaggtgtgtcattgaattcctccatgtggaaaaattacacccgttgaccttcatcaacacttgctgaatgtttatggagatcaaagagtgaatgtgagcacagtgaggcagtgggtggtgtttttcagcaacagtatcatcatgtcagtcatgacatggtgggtcacttccactggtgaacatttttgcgagcatggcatgaaggttcttgttcattgctggcaaaaatacatagccagtggtgg

SEQ ID NO: 22092 - DNA, 600 bp, Chicken  19866894234089_2
tgagcatttatatacttgctatccctatcaattaaattaatgaattagcatagaaaacagggtttttgagtactaaaattataagttgttattttttttttcatttcttttcccattgtatcattctatgaggtctgaatcccaacaggttgcaagtaactgtaaggtgaaagagaataaagattcaaaaccaaaatacatagatttttccataacagaaaagtctctattttactatttgaatctggctgtgactattgcttgattctttagaagtgggagatatacaatatagcgtakagtttagataaccagaccactgggacccctaacttctggtattcagtgattaatgtgtgccctggagtgtaggggatacatacttataatccttatgaaacagagtaaatgattttcataattctcataaattcatactactttgtctacagccattttaccttatgcaagaagaaaggaaaccaaaaccactgaaaagccaaaaaaaataccgacactgaaaatgtgcttacatgttcacaactgcatgagatcattttaaatatgaagtccagattctttaaaatacatccatttaaa

SEQ ID NO: 22093 - DNA, 600 bp, Chicken  19866894234091_1
ctgagacaaattctgttattagacatttgtggaaggttcttggttcactgtccggggcagtttatattatggctgtaaattataatgatattcaaggctgcaaacttgcatgagctattgctgctggcagcagtgactgaagtacctgctgtaatagtagaaacagaatgaaatgattttgagtatgaaatataaaattgtaatctttgcagtgaatgatagtgatttccatgtgtatctgtgcatatatacatcaaaattgcagatgcctccatttatggagtactcccaagtgatatracaacttttaaataagccaggccgttgtttgtttcctaaagctagtggtgaatcaagactgaaatctagatccatactgacaaatgggcaaatattgacttggaataatgtgactgactgtagagatcactggtagcccccccccaataatgtgttccctgatagtcragggaaagaactaactcacatgttaatgaaaccttctgattatgctttggttgtactctgcatgagttgtgataaaaaaaaaaaaaaggaaaggaagcaagtgggaatcaacctgtttcttggaggtcttaa

SEQ ID NO: 22094 - DNA, 600 bp, Chicken  19866894234091_2
tgaaatgattttgagtatgaaatataaaattgtaatctttgcagtgaatgatagtgatttccatgtgtatctgtgcatatatacatcaaaattgcagatgcctccatttatggagtactcccaagtgatatracaacttttaaataagccaggccgttgtttgtttcctaaagctagtggtgaatcaagactgaaatctagatccatactgacaaatgggcaaatattgacttggaataatgtgactgactgtagagatcactggtagcccccccccaataatgtgttccctgatagtcragggaaagaactaactcacatgttaatgaaaccttctgattatgctttggttgtactctgcatgagttgtgataaaaaaaaaaaaaaggaaaggaagcaagtgggaatcaacctgtttcttggaggtcttaaaaaattgagaaaatacatgaaaaactgatttcaactggggaaaatgccagccattctatctaaaagacaataacattcaagatttacatatctgcttttgtgagggacaaatctgtagagcagtaatgtgaaggacagagaaatggttggattgcagcatcaatcagg

SEQ ID NO: 22095 - DNA, 600 bp, Chicken  19866894234093_1
ctattcattgcagggggattggactagatgccctttaaaagtcctttccaactcaaatgagtctatgattctatgacctcacactggagtacgctgttctcatatatatatgtatgtatatatatatatgtatgtatgtatttacacatttatacacacacacaagataaaaaaaagtggtgagaagaaaaggaaataaaagatggtctgatttgttctggacagaatgttgtggcttttctggctcgctgttgggcatgcagtggcctgagggaggagcacagaggtggtttgcagtaygtgaatggtgcttaaatccacgctgctccctcttctgcaagtatgttcacatctcagcccagcagggctttcatatgaggcacggaggcaggcattgcaatggagaagctctcactggctgcaggcttccgtgttccagtacacatctttaatatttgtgtgtctcttggtttcccataatgggggtttcccatagtggattagtcctaaggcccatctagcctagcrtctcataatggatgtttcaggagagaatataaataaacagggcaattacaactgatctactccagctttcag

SEQ ID NO: 22096 - DNA, 600 bp, Chicken  19866894234093_2
gttgtggcttttctggctcgctgttgggcatgcagtggcctgagggaggagcacagaggtggtttgcagtaygtgaatggtgcttaaatccacgctgctccctcttctgcaagtatgttcacatctcagcccagcagggctttcatatgaggcacggaggcaggcattgcaatggagaagctctcactggctgcaggcttccgtgttccagtacacatctttaatatttgtgtgtctcttggtttcccataatgggggtttcccatagtggattagtcctaaggcccatctagcctagcrtctcataatggatgtttcaggagagaatataaataaacagggcaattacaactgatctactccagctttcagaagctggtagccgaagtttcagaggagttttgagctccatgttgaaatgcacataccaatgacctaagtgcaggaaaaaaaaattaacaaaatcttgttgggagggcagggagctgacgcctcaagtctgttaacagttttccgtgttctttaagcagttgtgtttcccttttaacagcacccggaataaatccctgctatttgtaaattttcttactatttttaatt

SEQ ID NO: 22097 - DNA, 600 bp, Chicken  19866894234099_1
ttattgtcagatgccagcatttttgggaatagctgatgttaatatgctgcgttttcttccccttttcccataaaaagaatttagtattgcatgtgctgaattctgagctggcctgtgtctcttcttttgtttctatagatggtgatctttttttcttagaggcactgtatgcatcttgtgctctcaatcatgatgatgagtcattctcattgaaatagtagttgaattgagtgtgatggttataatatatattaattcgtagccataaaataaagatccaattatatatatatatatatwtttttttttctgagaggtagtataatgttacagaargatttctgaggcagaaaatcagaagccaactatccctactgctgtggctttatgctttgttattggtattccccatcataacatcttgcagtgcactgagagttaaagatgcagctctggtctcagaagaaaagagtgaactacagatcccttccaagatggacttggttattccatttctgttttccgttcagagggaaagataaaactgactgggagtcatgaggctgttttctttttcagctcatctgtgctccctagctg

SEQ ID NO: 22098 - DNA, 600 bp, Chicken  19866894234099_2
tgttaatatgctgcgttttcttccccttttcccataaaaagaatttagtattgcatgtgctgaattctgagctggcctgtgtctcttcttttgtttctatagatggtgatctttttttcttagaggcactgtatgcatcttgtgctctcaatcatgatgatgagtcattctcattgaaatagtagttgaattgagtgtgatggttataatatatattaattcgtagccataaaataaagatccaattatatatatatatatatwtttttttttctgagaggtagtataatgttacagaargatttctgaggcagaaaatcagaagccaactatccctactgctgtggctttatgctttgttattggtattccccatcataacatcttgcagtgcactgagagttaaagatgcagctctggtctcagaagaaaagagtgaactacagatcccttccaagatggacttggttattccatttctgttttccgttcagagggaaagataaaactgactgggagtcatgaggctgttttctttttcagctcatctgtgctccctagctgtcccacctacagcattagagtaaggccttcagtttt

SEQ ID NO: 22099 - DNA, 600 bp, Chicken  19866894234101_1
ggtagttcttgatgccatcagtgagtctttaaaattgcatgttactaacaccagcgaggatgcccaaattagcaggttactggcagttgttgtgcacctggtacgtatctcagggtgtttttgataggtggaaaaaaaacaacaaaccaaaacaaacaagcaaaaacataacaaaaaccccaccacgagatggctgttagaatagcagtgtggttgtgtatgtaaaaaacttcaaacgttttgcaaataaaatgactgtggtatcccataccatactcagtatacgtattggaagaaatkgttgaagcatgtgcttttgtagtttcacagcccygaaaactgaagtttgccttgcaaatgcctgcagatgcaacacccgaaatccgagagaagttcaggaagaactgttaacagctgcactgggaaattacctctgcacttaaatatgagcacatctgagaatgaccccagtgaggaacaaaaactttctgctgatagcttgctagtgtttgtctttatgtctattttatgttattttacattgttgttcatggatataacaaagcctgtttcatttcttcccgatcatttttcccaagg

SEQ ID NO: 22100 - DNA, 600 bp, Chicken  19866894234101_2
ttgcatgttactaacaccagcgaggatgcccaaattagcaggttactggcagttgttgtgcacctggtacgtatctcagggtgtttttgataggtggaaaaaaaacaacaaaccaaaacaaacaagcaaaaacataacaaaaaccccaccacgagatggctgttagaatagcagtgtggttgtgtatgtaaaaaacttcaaacgttttgcaaataaaatgactgtggtatcccataccatactcagtatacgtattggaagaaatkgttgaagcatgtgcttttgtagtttcacagcccygaaaactgaagtttgccttgcaaatgcctgcagatgcaacacccgaaatccgagagaagttcaggaagaactgttaacagctgcactgggaaattacctctgcacttaaatatgagcacatctgagaatgaccccagtgaggaacaaaaactttctgctgatagcttgctagtgtttgtctttatgtctattttatgttattttacattgttgttcatggatataacaaagcctgtttcatttcttcccgatcatttttcccaagggatgcagggaggctgattgcagttgtaaattctt

SEQ ID NO: 22101 - DNA, 599 bp, Chicken  19866894234102_1
  misc_feature (1)..(90): n is any nucleotide
nnnnnnnnnnnnnnnnnnnnnnnnnnnnnnnnnnnnnnnnnnnnnnnnnnnnnnnnnnnnnnnnnnnnnnnnnnnnnnnnnnnnnnnnnnttttgagtgtaggggcatccccctcacaatggcgctctagcctgtagtgggactctaacccagaaccccaaagctgggatgcagagtgactcaaagccccttatcttagtgggactctaacccacaaccctatagccggcattcagagggactaaaaccctcctcctatcttagttcgctgcacaggtcatgtccgtcaggtcccggatygcccagaagaggagaacccaggagaaaagattccagtgtgygctgaatgtccaatgccgggatgatctggtcctcaatcggagaggctcctacctggctcaccaaaattgacctgtggaacaccactcagactccagagagtcagaatgtaaggtagttttattagttttaaaggtgccacaccagcgcacagtgggcttgcatcaccccaattgcacaactagtagctcttaagcagatatatttataccacaccaaatgcacaatcataattcygcaaggcaagaaatgctaactca

SEQ ID NO: 22102 - DNA, 599 bp, Chicken  19866894234102_2
  misc_feature (1)..(49): n is any nucleotide
nnnnnnnnnnnnnnnnnnnnnnnnnnnnnnnnnnnnnnnnnnnnnnnnnttttgagtgtaggggcatccccctcacaatggcgctctagcctgtagtgggactctaacccagaaccccaaagctgggatgcagagtgactcaaagccccttatcttagtgggactctaacccacaaccctatagccggcattcagagggactaaaaccctcctcctatcttagttcgctgcacaggtcatgtccgtcaggtcccggatygcccagaagaggagaacccaggagaaaagattccagtgtgygctgaatgtccaatgccgggatgatctggtcctcaatcggagaggctcctacctggctcaccaaaattgacctgtggaacaccactcagactccagagagtcagaatgtaaggtagttttattagttttaaaggtgccacaccagcgcacagtgggcttgcatcaccccaattgcacaactagtagctcttaagcagatatatttataccacaccaaatgcacaatcataattcygcaaggcaagaaatgctaactcattctagacaatgggtcgtcctatgctaactaattctgcaaa

SEQ ID NO: 22103 - DNA, 512 bp, Chicken  19866894234102_3
gtcatgtccgtcaggtcccggatygcccagaagaggagaacccaggagaaaagattccagtgtgygctgaatgtccaatgccgggatgatctggtcctcaatcggagaggctcctacctggctcaccaaaattgacctgtggaacaccactcagactccagagagtcagaatgtaaggtagttttattagttttaaaggtgccacaccagcgcacagtgggcttgcatcaccccaattgcacaactagtagctcttaagcagatatatttataccacaccaaatgcacaatcataattcygcaaggcaagaaatgctaactcattctagacaatgggtcgtcctatgctaactaattctgcaaatgtcttcttgctctcccctccttcttggacatgctgttggtcttttgaatatgatttcctttgtagtgggtgggttcgggtttcttatctgaaagcttcagacccggaattcaagggaattttcccacctcgcaatgtaccatcaata

SEQ ID NO: 22104 - DNA, 600 bp, Chicken  19866894234105_1
tgtacgtggtcttggataagggcagtggatttgggtgaaaaagaaaaataaaacatgagggacagtaaaatgagaggaaatagagacctgatgctgctgtacacatctcttttcactaatgtctgcaagataattaattactggtcacaaagtcctactgttgtgacattagctggagcatttcagatatagccaagcacaactgttcttacctttgaaatctgtgaacaactaattgtgctatctcaaaaattcattatttgctttgcaaggttagatactgcatgtaatgtttctctycgtttgatcttctgtctgtcttagcaattttatggggaaagcggatgcattgttgctggttctcttacaaattaatcacagggcgcaacattaacatgcagactttactattctacagtgtgcagtgcaaaagtatactgaagtgattttaaatacgctttcctggctattgtttctggctggattatttaaacacagttgaaatcaagatactccaagtaaagaaagtaaagcttcaacttctgtggtacaaataaaattgaaaaagggctttatgtttggtgtactcctaaaacagtc

SEQ ID NO: 22105 - DNA, 600 bp, Chicken  19866894234107_1
tgacataaaacctaagaatcaggagtggggcagaccgtgtaatttagagctatttcaaaaggatgctaaatggaaagatagaaaataatagcaggagctaaattttcctcctgcaaatgacagcagtttcagtcagagccctttaagtgcttctggcagcaaaaatataaaagaaattgttttttttaaaaaagaggttccaaacaacaattgcatgtgttgataacgtagggatttcttgccaatttattctgcatggctacttctccctaatcgcaatgctgatggcattcctacctrtgtctcaaaaaagtaatcccaataaacacatatcgctgctatatttagcagcctgaaagcaaggcatagctcatgtgaaataaatacaatcagaaaaaaagttatctgaagaagttaattcagcgattctttgctagataaagcattgttggcttgaacaaattaaggacaaattaaacaaacaaaagacagagattgtgaaagaaaaaaacccaaaagattcagagataggtttaaaaaaaaaataatgattggattctttggaacgaaattcattttcagcttggatagcatccatct

SEQ ID NO: 22106 - DNA, 600 bp, Chicken  19866894234107_2
gaacgaaattcattttcagcttggatagcatccatctaaagattttttcccctataaattaatagtataaaagtcccagtctgtgataagtcttattcagagctattttgtgtttgctaaatggaatgtgacagggatctgaaacactgcaatactacagaaaataattagttgagaagtaacttgataattttaccactgtgaagaatgaatggaaatcaaccttcactttaattatgtgcaaaggagaagtataattacctgcacaagatactaatcagagaaaatgataatacattyccctcttatctagtagatagcaaactagcttgcttcatctgttcacctctggtgtatcagagatagcaaattagttactgctgagctatctatatgctaaggttacttgaatggttttattcagtccttgagataaatgcttatgtagaaattctgaaaaataaaattaccaactgctatttgaatatttaaatgttaaaggagaaagtcaaaatcactttctgcagcttcagaatatcaacagactgtgacagtgaaggtgcccagaggtaagaggtggtcaagcaaagaagtgttact

SEQ ID NO: 22107 - DNA, 600 bp, Chicken  19866894234107_3
cggtgtttgcctgttcgatggctgagaggttttgttcatgtgtttatgacatcctcggggtcaccagaaatttagtggtaatgtcaaagaagtctgggtttggagaggaaataatgaaatttttcattgttcctatttcctccttgtagttgtgttggtttatttgtggcagtaaaactgtatccagttccagttctaactgtcatgatgacttcaagccagcttgagcaggaggagaaaaacattaaatgcatcccttgcgtcatctcaggcttggcagagttgcagtagaggtgtctwtgtcmcagtgcacatttctacggcaggacagtctgtattgtaacctgagtttgtcggctctgtttaagaataaggggaagttcttttagccaagttgcctttcagactcaggagattctgaaactcaatgagtgctggcagagctgtttgtgaatgtggagtaaaggtagctgaagctgatgatagagacaaggttagcccagacatgcagayaggagataactgatattgaagcagtagttttaaaatgtgctctagcctaccagggtaccaatttcaagatatcttataatgatacac

SEQ ID NO: 22108 - DNA, 600 bp, Chicken  19866894234107_4
tttgcctgttcgatggctgagaggttttgttcatgtgtttatgacatcctcggggtcaccagaaatttagtggtaatgtcaaagaagtctgggtttggagaggaaataatgaaatttttcattgttcctatttcctccttgtagttgtgttggtttatttgtggcagtaaaactgtatccagttccagttctaactgtcatgatgacttcaagccagcttgagcaggaggagaaaaacattaaatgcatcccttgcgtcatctcaggcttggcagagttgcagtagaggtgtctwtgtcmcagtgcacatttctacggcaggacagtctgtattgtaacctgagtttgtcggctctgtttaagaataaggggaagttcttttagccaagttgcctttcagactcaggagattctgaaactcaatgagtgctggcagagctgtttgtgaatgtggagtaaaggtagctgaagctgatgatagagacaaggttagcccagacatgcagayaggagataactgatattgaagcagtagttttaaaatgtgctctagcctaccagggtaccaatttcaagatatcttataatgatacacttaca

SEQ ID NO: 22109 - DNA, 600 bp, Chicken  19866894234107_5
tcaagccagcttgagcaggaggagaaaaacattaaatgcatcccttgcgtcatctcaggcttggcagagttgcagtagaggtgtctwtgtcmcagtgcacatttctacggcaggacagtctgtattgtaacctgagtttgtcggctctgtttaagaataaggggaagttcttttagccaagttgcctttcagactcaggagattctgaaactcaatgagtgctggcagagctgtttgtgaatgtggagtaaaggtagctgaagctgatgatagagacaaggttagcccagacatgcagayaggagataactgatattgaagcagtagttttaaaatgtgctctagcctaccagggtaccaatttcaagatatcttataatgatacacttacatatttttggtaagaaacataaatatagcttgaaattagtactgtctctacagtgcagcatagcaccattgcatggccacgtgtgtgatgaatgcaaagtgagggtgaaccacaggagcacaagaagttacttaccagtcctctcttccccaccttcactgtttgaaaactgtaatcatcatctttcctagaacgtgttgctttctgag

SEQ ID NO: 22110 - DNA, 599 bp, Chicken  19866894234109_1
  misc_feature (1)..(26): n is any nucleotide
nnnnnnnnnnnnnnnnnnnnnnnnnnttttcagcaagcaaaagacagctgcaaaacacaaggagtaatagaatagactggatggccaacatggccaactgagatccctgctagctctgtctgttgtgattctagacaggcacctttccaggagctctttgctattgacggttttagagtacaagttgaattgtatggttttgtttgtgcatatgcttgtccatatgctttctgggttactctttaaaattttgagtttaatttgtggattaaggaccggttgcaaaatgctgtgattatyaaagtgtacatgatgcttccagagtcctcctattaacttgatagagtggaaragcttccctttgaagcgtttgaagaacagtgaaatacattactatttattacaaagacccattgcrgaactattgaatcatgcttctttcctccagttacaaattattttatacattaatattatcagtatgttatagtggctctgttttacggaataccttatttcaaaggatgcttaacgttgtcagtctcaattcttttgttggttttttccctctcgttgttcaatggcttggtgaatcaaag

SEQ ID NO: 22111 - DNA, 600 bp, Chicken  19866894234109_2
aaacacaaggagtaatagaatagactggatggccaacatggccaactgagatccctgctagctctgtctgttgtgattctagacaggcacctttccaggagctctttgctattgacggttttagagtacaagttgaattgtatggttttgtttgtgcatatgcttgtccatatgctttctgggttactctttaaaattttgagtttaatttgtggattaaggaccggttgcaaaatgctgtgattatyaaagtgtacatgatgcttccagagtcctcctattaacttgatagagtggaaragcttccctttgaagcgtttgaagaacagtgaaatacattactatttattacaaagacccattgcrgaactattgaatcatgcttctttcctccagttacaaattattttatacattaatattatcagtatgttatagtggctctgttttacggaataccttatttcaaaggatgcttaacgttgtcagtctcaattcttttgttggttttttccctctcgttgttcaatggcttggtgaatcaaaggcttgctgtcaggctgctgctgatatgtagcaggggaaacatctccaaaaatc

SEQ ID NO: 22112 - DNA, 600 bp, Chicken  19866894234109_3
tctgttgtgattctagacaggcacctttccaggagctctttgctattgacggttttagagtacaagttgaattgtatggttttgtttgtgcatatgcttgtccatatgctttctgggttactctttaaaattttgagtttaatttgtggattaaggaccggttgcaaaatgctgtgattatyaaagtgtacatgatgcttccagagtcctcctattaacttgatagagtggaaragcttccctttgaagcgtttgaagaacagtgaaatacattactatttattacaaagacccattgcrgaactattgaatcatgcttctttcctccagttacaaattattttatacattaatattatcagtatgttatagtggctctgttttacggaataccttatttcaaaggatgcttaacgttgtcagtctcaattcttttgttggttttttccctctcgttgttcaatggcttggtgaatcaaaggcttgctgtcaggctgctgctgatatgtagcaggggaaacatctccaaaaatctacaatttaaatatataaatatctcctcttgtgttaggtcagttgaattactactgggtttttttt

SEQ ID NO: 22113 - DNA, 585 bp, Chicken  19866894234113_1
cagcaataaattaatcacagcacacatttctgcacaaatcttccatctctggacttcagtacattcagttaaatgaaatcttcacaaattatttctgaagcatagaaatgatgggcgaagcttgtaacaacaatgcacatgaaacagtaagccaggctatttcattaagtggaaacagaattgaggctttctacaaaataataatgcaactatattctacaaacatattttaagatcattcttcatggcgtcatcactgaatatgcacatattcactttccaggggtcttcagtttcacygaagttgccatgatgattaagtatactctgtatgtaaaaatcattgctgttgacctcctcaggtcacaaactgctcaataagcaaaatccaagtgcatgctcagtccttcaaattaattggcactttatattctaagttctaaaaccaaacttccgccagctcattatggatatttggggttcataaacaattcagaaataatgagaatcgttaattcgaactccaaaaactaatacagtttaatcttgcataatgtacatggaacaagaaataaatgctgggaa

SEQ ID NO: 22114 - DNA, 600 bp, Chicken  19866894234114_1
atgaaattctacttatctcagtgggtagtaacatatccccaggtacagaagaaagtgtcttcaatgcattaatattgatagcattatttgtgtcttagaattatgaatgtgggatgttaaaaaaaattcttagcacttaagaagttctatgttgcttcaaagataatcctccagggataaatcctcctgtcagcctcaaagagcttcacagagcacatacacataagaacaggaggctgaagggagagtgctgaggatgtcgcattttgtctttgcaactgtgactcttgtctaaactcragttggtttattcagactcggcattttgtttcaaaggatggaagaagtcaatctaaggctccgttctgcctggtttggtccaagaaataggagtgcacgtgacacataagaagggagtcaaaagagatcgcttgcacttcttattcttttttttttccctaaaagacaactcagtagcatttgagctggggagcactaaaagcctaaagccaaaagggccttctcacaggccaactctcatctgaaaatatcactgctgctgctaattcttctctacacttccctgctgtactgttgctc

SEQ ID NO: 22115 - DNA, 600 bp, Chicken  19866894234119_1
ggtgcgtccccatggtgggcagcccctagcttggtctctgtgccctcagtcctgctgcaagcccttgatgccttggggttgctgctggcccctctgaggggctatgggaggctacgctttggcaccgtccccacaaacctgccagcccttcccactccagcagggctttcggggtgcagcttgggggttccaaaagcagctggtacctgggccccagcatgtctctggcagtgcagaacagcattcctggcattgttcctcctcagcaacctcctggcacatcaccccagtgtgctgccrctgtgtccgtgctcccgctgaggcctccagcccttccaaggggtttccccactgagaagaaagctgcacaccttgggcaaggggcaccagcactccaaggtcttatataaccctgcagatgaatccagagccatggaaaggtgttgggaagctgctggggacctcaggacaccaatgtgggatgaggacaggtctcatcctatgggatgcaaaaggatgggcacatgagctgggatctgtgctgtgggtcccacagttgaacagggcctcaaggaatggctctgtctcatgttttggagg

SEQ ID NO: 22116 - DNA, 600 bp, Chicken  19866894234119_2
caaggggtttccccactgagaagaaagctgcacaccttgggcaaggggcaccagcactccaaggtcttatataaccctgcagatgaatccagagccatggaaaggtgttgggaagctgctggggacctcaggacaccaatgtgggatgaggacaggtctcatcctatgggatgcaaaaggatgggcacatgagctgggatctgtgctgtgggtcccacagttgaacagggcctcaaggaatggctctgtctcatgttttggagggtcacacgagatggagcatcccagtagcacagcagsgctgcaacaaaccagtgggaccagtgctgaactggtgatctttcagatgatgcgatgggtgccttgtaagagagaccagccccgtgtgtttgacagggagaagaagggatctgcagcaaacctcagggctcactgccttgaatttggcacgccaaaaaactggtggccaccaggtgccaatggccttcgtgtcggtgacatcgtgccattggacacgcaggtgtgcccggccgcccgtrcaggctgggggactttcccaagagtgctggcttttggcagagctggttgcccaagcagccc

SEQ ID NO: 22117 - DNA, 391 bp, Chicken  19866894234119_3
atggctctgtctcatgttttggagggtcacacgagatggagcatcccagtagcacagcagsgctgcaacaaaccagtgggaccagtgctgaactggtgatctttcagatgatgcgatgggtgccttgtaagagagaccagccccgtgtgtttgacagggagaagaagggatctgcagcaaacctcagggctcactgccttgaatttggcacgccaaaaaactggtggccaccaggtgccaatggccttcgtgtcggtgacatcgtgccattggacacgcaggtgtgcccggccgcccgtrcaggctgggggactttcccaagagtgctggcttttggcagagctggttgcccaagcagccccatgcccctgccaagctgcgtgccacggcc

SEQ ID NO: 22118 - DNA, 600 bp, Chicken  19866894234126_1
aaacactcccacctggcatgctgccttaccgactgggagtgtagaagaagagtcatacaagctttgaatgccagaagaaaagcctaataagggggaaaacaagggagagaattgtggcatgcactgaataaatgtgaggaataggacaaggctgaactcaccttgtcacattccctgaaagcactacagaagcaatgacagtgatgtaagtctgatccaataatttattttgaacaaaaatcgggagtgttacgtggcaaaaaacaaacaaacaaaccaacagcactcaaagcagacagmatacctgcaagcagtgatggcgtgtgatcttcattcagtctgttttcaaaggaaggctgaggttgcacactcatgtattctgctgccctcttagggagcgtttgctgtgtatggtgcattcaccccartgcgttcatcctccaacacagctggatttggctttcagaagtttctgaagttctacagtaagccctgcaaaaggtgatgttttaaaaacatctcttaagagtgtcaaccttagagtaaagcagcagcactgagccaccttctgcaggagtgtgtcatagagacagctcttct

SEQ ID NO: 22119 - DNA, 600 bp, Chicken  19866894234126_2
taaatgtgaggaataggacaaggctgaactcaccttgtcacattccctgaaagcactacagaagcaatgacagtgatgtaagtctgatccaataatttattttgaacaaaaatcgggagtgttacgtggcaaaaaacaaacaaacaaaccaacagcactcaaagcagacagmatacctgcaagcagtgatggcgtgtgatcttcattcagtctgttttcaaaggaaggctgaggttgcacactcatgtattctgctgccctcttagggagcgtttgctgtgtatggtgcattcaccccartgcgttcatcctccaacacagctggatttggctttcagaagtttctgaagttctacagtaagccctgcaaaaggtgatgttttaaaaacatctcttaagagtgtcaaccttagagtaaagcagcagcactgagccaccttctgcaggagtgtgtcatagagacagctcttctttccctgctgtcctttttaatacaagcgaggggaggctaatggggaattgcagagggagttgctttgagggggtattttgcggtcactgtgggacccaaggatagtttgatttattttgtctccttgg

SEQ ID NO: 22120 - DNA, 529 bp, Chicken  19866894234128_1
aacttgggacacgaaggaaactgtactgtggggcccaatatagtgactggcaggctaccaggctcctccctgctattagagccatcttccctaacagcaagcgttaaagaagtgcctctctttaggctccgtcacttcccctgtgggaatgtcaactatggataccaacagcagggcttgcctttggaagcctccacgccaccttgtgctaccagttacgaggaccccacccttagaaacaagagccacatatcccagcaggggccctgagagccctctaccctcttgacttttccctcrgtagtcccaagccttgaagaaatatcctgttacccagtacaccatgagcaagtgatgtgatggcattaccttctatttgtgccaacttgctctagaagtgccaccttcgaagctgtaatttcaaataacccaagaggcttcaaatcaccagagccccggaacagtaaaataagcaarggggagggagggagggtacaggaaacaaacgttaactgcaaggcccagcttc

SEQ ID NO: 22121 - DNA, 352 bp, Chicken  19866894234128_2
ttgcctttggaagcctccacgccaccttgtgctaccagttacgaggaccccacccttagaaacaagagccacatatcccagcaggggccctgagagccctctaccctcttgacttttccctcrgtagtcccaagccttgaagaaatatcctgttacccagtacaccatgagcaagtgatgtgatggcattaccttctatttgtgccaacttgctctagaagtgccaccttcgaagctgtaatttcaaataacccaagaggcttcaaatcaccagagccccggaacagtaaaataagcaarggggagggagggagggtacaggaaacaaacgttaactgcaaggcccagcttc

SEQ ID NO: 22122 - DNA, 600 bp, Chicken  19866894234142_1
cacagggatcagacaagcgtctgctctgttaagctgaaggcacagagataattatcatagctgatactgcatcagtaggaatgacagtgtggtttgtaaatacgaaccaaactaggattctctcattcactaacagggatttggcattactgtgggaacctgacacaaaccttatggatctgaatgcgcccttgatccaaatgagggcacatttgtctgtgattacaaagccattcacgagctgcagcacgcacacacttctcacagtttttgcagggctgctggcaggagctgcgcagwcayggtatgacaacgacctgaggaacacatgggaagggaggaggaccagggccaccagtggagggctggaggctgtgagcaccttgcactttgctaagtgcttgctgtagagtcagggacgagcaggcccagggcccagaccagcatcctagcagaggtttctggctgcagagccacaccacagtgctttgggtgcatgcaggcaactgcatgtgtcctcaccaaaaatcaactggtaataaaaagagctttaaattcctcatctgcaggagattagcatataaaagaagagatcctcca

SEQ ID NO: 22123 - DNA, 600 bp, Chicken  19866894234142_2
agggatcagacaagcgtctgctctgttaagctgaaggcacagagataattatcatagctgatactgcatcagtaggaatgacagtgtggtttgtaaatacgaaccaaactaggattctctcattcactaacagggatttggcattactgtgggaacctgacacaaaccttatggatctgaatgcgcccttgatccaaatgagggcacatttgtctgtgattacaaagccattcacgagctgcagcacgcacacacttctcacagtttttgcagggctgctggcaggagctgcgcagwcayggtatgacaacgacctgaggaacacatgggaagggaggaggaccagggccaccagtggagggctggaggctgtgagcaccttgcactttgctaagtgcttgctgtagagtcagggacgagcaggcccagggcccagaccagcatcctagcagaggtttctggctgcagagccacaccacagtgctttgggtgcatgcaggcaactgcatgtgtcctcaccaaaaatcaactggtaataaaaagagctttaaattcctcatctgcaggagattagcatataaaagaagagatcctccaaag

SEQ ID NO: 22124 - DNA, 600 bp, Chicken  19866894234159_1
tttccatccctagagaatttgagggcattccattgtgtatctggactagctgattgtgctagtgccttgcaggaggtaatggttttggaaagaatatccaaagaaagagtttgcttagaccatgcctttactgaggtccggcttatctgtatttgtgtcccaactggtaaatctttgactgttaagctcctatctactttcaagaaatcggggtaggtactgcctgctactgtgttgtccccatttccagaacaggaaagggtagccaggaaagggccctgactacagcctgcctcaagrgcagctggattaggaatgtatccaaactgttttgatttgtgacactgacagaaaaggtagtgcagatacatttattctacacttgctacatgcaagttacatgaagtggccctctgcctttctcttgctgstagaatgagatgcttggcctgtgctcatacaagattaagcattactgatttaagtaggtaagcatgcagtcccggttacttgatatccagaattctatatgcagtacacataaataataaagtatattttaaaaaaagccagtacatctttttcttcgcagattgcgtc

SEQ ID NO: 22125 - DNA, 600 bp, Chicken  19866894234159_2
tgaggtccggcttatctgtatttgtgtcccaactggtaaatctttgactgttaagctcctatctactttcaagaaatcggggtaggtactgcctgctactgtgttgtccccatttccagaacaggaaagggtagccaggaaagggccctgactacagcctgcctcaagrgcagctggattaggaatgtatccaaactgttttgatttgtgacactgacagaaaaggtagtgcagatacatttattctacacttgctacatgcaagttacatgaagtggccctctgcctttctcttgctgstagaatgagatgcttggcctgtgctcatacaagattaagcattactgatttaagtaggtaagcatgcagtcccggttacttgatatccagaattctatatgcagtacacataaataataaagtatattttaaaaaaagccagtacatctttttcttcgcagattgcgtctttcgcattttcattaggacttagaggtgtagttttattagaaacagtggtagtaatggaactgtcctgcctttctagcatccaagtgaccttatccagtaccaaaaggcatcgtaccagtccttactttc

SEQ ID NO: 22126 - DNA, 599 bp, Chicken  19866894234161_1
  misc_feature (1)..(21): n is any nucleotide
nnnnnnnnnnnnnnnnnnnnntggagtaccctaaggataactggtctgacttttaaagacaaacaaaaagaaggcattcaaaacctctgccttttccttatcctcagtggtcacattcccagcctcatccagtaaagaatggaggttcttcctggttgtcctcttactgttgttatatttgtaaaagagtttcttgttcctttttaccccagcggtcaggttgagttcaagctgggcttttgcctttctgattttctccctgcacatcttaacaacttctctgtattctttctgagttgyctgtcccttcctccacaggaggtagattctctttttctcctggatcctcaagaatagctccctattcatctgtgccagtcttcttctgtgccagctcattttgctactcagggggacagcctgctcctgtgcctttaagacttccttcttgaagagcgatcagccatcttggacccctttattctctaagactgaaccccaggggactccccctactagttttctgaacaattcaaagtccgccctccggaagtccaaggtagcagttttgctcttccccctcctgactccagcaagaa

SEQ ID NO: 22127 - DNA, 600 bp, Chicken  19866894234163_1
ccaccagtgcaactttttcagaggtgttgacctacaaaaggtatttgggtgttgtttgtcaggtccttatccgtgtctgttcttactctggctcatcttcagagaggtgttgcatgaggggcagcagggcagggaagggcaggtgttattgttaggaagaactgagatacaggaccatccagttcctcatcccctccctgagaagggccagacaccagggatagaatctcaagggagtgtaacaggacggggatgcagatgttctgcctccacagcctttgcagcagccagtatcttccrtttcctgccacatatattcaggtgaatgtgagattgtgctttctatggtcactcagtgagcctactcaccatggacttttcgttttgcattaacttttcatttattatcattaaatttaatatgcttttttatcacttgatatcacgagatcctctatagttttttttccagtcagttacagacactcatggataattccgtagcagcagcaaattttgtcacataatcctccatcccctttccaggcctcttaagatggacgttgatgtgaaaaatgcacacttagccctatttcaggc

SEQ ID NO: 22128 - DNA, 600 bp, Chicken  19866894234168_1
cctcattgctacaaggagcagggctgctcggtaccacttgaatgcagctccagctgtccagcttccagtccttaaataacacgacagtattggggaaatggcaagagacaaggactgatgtgcctccctttgtccccattcgccttctaatttgctatcttgtccacgcagaatacaaacccttctgggcaaaggctctttgttcccacacagtgcagtaacacaatgggacccgaacatgcctacagaagttgcctgatatatttgtattaccccgtatgtcatcctgggggttgttgrcttttacatttctgtttttaacatgagaattcagaaaagggcccataaaagagcagaaccaccatcagaatgcattttaaaaccgtttcccatttcacacatccccatcttccttgaacacagagagctcaagggagctgagataaggagcagagcctttcaggttcccttccctcccagcagacaccaaacaatttaactcccttcttttctagatggctgcatctgctcgtcatgggcttgatttatatcaggcattacagcactgtgctcaggagcttgctaaccttccaaaaactc

SEQ ID NO: 22129 - DNA, 493 bp, Chicken  19866894234168_2
taactcccttcttttctagatggctgcatctgctcgtcatgggcttgatttatatcaggcattacagcactgtgctcaggagcttgctaaccttccaaaaactctttagtgcatcagctctatccatacccatatccgtgtttctttctttagacctttcttattctcccttgtgagaatgctgtacttttggcacagactgaaactattattccagttactgtgggcaaatgagtgcaatggacaacatgaataacacataccacatatgtcactgagtcagagggctctgaggacacrctggagatgcctctgctggctcccacagaagcactcagcagttggtacagggtctaaaatttcacttttcatcacttagagctctggtatagtgaagaagttggaaaccacatgccatgttattgttcatatgccagggcaaagaatggaggagctcctgaactccatgggaagtccatagtggtacacaaag

SEQ ID NO: 22130 - DNA, 599 bp, Chicken  19866894234169_1
  misc_feature (1)..(22): n is any nucleotide
nnnnnnnnnnnnnnnnnnnnnnaatggcaggcacacacatgctttcacagtcctctctctctgcagcaaatctggcatcttatttaggatgaacaaaataacctctacctgttttaacctagaacttagagccctcaactgagaatatacttaaaactgctctttaaaaagcctgaaaatacactgtgttccttttagagtcattcacaaagatgatgacattactggggtcttggctatcatactagagtggttgaagcattccccatgaaataggggagacagatttcaatgcctacyccagactggggaggccccagtccaacaccacaccttgtgaacaaaagtgttttgctctccacgttttgaatttgtttctcagcacaaggtaataagaaggagacactatacattgaagttgcagcactcatttaaaaagcactcatcccacgcttctccccatgcggggagtgagactgctaattccagccttgagagggatttttgtgcttgagttcttcatagaattataaaatcacaggacagttttggctggaaaggaccttaaagaccatccagttccaatgccctgatgtggg

SEQ ID NO: 22131 - DNA, 600 bp, Chicken  19866894234178_1
ttcagattgtacctacttgcatcttaaaacagagtctatgagggaaaaacctgagtattcaatctaataatacacaaagcaagtctttggctacaatgaggtcttgttgcaaaagtgggaatcaaaagggcgatttcctaattctttcttaattttgtattcactttaggcatgtgagctctgatcatgttgtttaatgcaccttctgtatactaaaagctcataagcacatggaaaatagatactatttcttcattaccttcagtaacagatgaaccataaccagaagagactatagasccacttctcatttgaattgacaaatccaataacattgcaaaaggaataaagcaaaacaaaacaaaacaaaacaaaaaaaacccctacattttgtttctttctgtcactcatacctacacaatgctgcctgattagtttgaccaatttattactttccacttagctacaaatagggaactgggaatatatacaagtggaattaggcaaaattagaccatkttatctaataatttatatactaatatcctatgtgcttcctgtcagagttgattatttctagcatcagtggtacactccrct

SEQ ID NO: 22132 - DNA, 600 bp, Chicken  19866894234178_2
ctcataagcacatggaaaatagatactatttcttcattaccttcagtaacagatgaaccataaccagaagagactatagasccacttctcatttgaattgacaaatccaataacattgcaaaaggaataaagcaaaacaaaacaaaacaaaacaaaaaaaacccctacattttgtttctttctgtcactcatacctacacaatgctgcctgattagtttgaccaatttattactttccacttagctacaaatagggaactgggaatatatacaagtggaattaggcaaaattagaccatkttatctaataatttatatactaatatcctatgtgcttcctgtcagagttgattatttctagcatcagtggtacactccrcttttgccttgacagtatgtttgacatttaaattttcaatctgctcagctaaatccgttagaatactaaggccactactagaatatgaaattctgctgttcagagagccacaggttctgggaacaaaactaccaagtatttctcttctttaaacccttcctcatcgtttaggaagcatttcttggtcaaaacactgtaatgtcattgtactctgtcgctag

SEQ ID NO: 22133 - DNA, 600 bp, Chicken  19866894234178_3
asccacttctcatttgaattgacaaatccaataacattgcaaaaggaataaagcaaaacaaaacaaaacaaaacaaaaaaaacccctacattttgtttctttctgtcactcatacctacacaatgctgcctgattagtttgaccaatttattactttccacttagctacaaatagggaactgggaatatatacaagtggaattaggcaaaattagaccatkttatctaataatttatatactaatatcctatgtgcttcctgtcagagttgattatttctagcatcagtggtacactccrcttttgccttgacagtatgtttgacatttaaattttcaatctgctcagctaaatccgttagaatactaaggccactactagaatatgaaattctgctgttcagagagccacaggttctgggaacaaaactaccaagtatttctcttctttaaacccttcctcatcgtttaggaagcatttcttggtcaaaacactgtaatgtcattgtactctgtcgctagtaattttgagaaagaatcctggttacagttaaaagagctttcctagtacaaaccagttaagctggaaaaagatatagaa

SEQ ID NO: 22134 - DNA, 600 bp, Chicken  19866894234180_1
tgtatgtgtcatacatatgggtttcggctcttgttctggagatgtattactatagcttgtacagttttctccacccttgagacaaactgcatgtatgcctgtacagaatgcagagaatgcatttatctgtgcagacttgtgttagttacacaatgtgaaggcacatgtggatctgtttagcttaaaggagcaagttcagggcattttttcctgctctttgctgactggagctctctgtgtgtgcctccttagctttcttttctttgacagagtagaaaaactgatgattgtttctccttrtaggtggaactttatccaggcttggtcactgtgttcttctgtgttaccccttgtcttcagctgagcaaatgctgtctagggttgaatatgtcatttagagactgtaattccattctagtgttcatttgaaggatttaatacaaggccagaaataatgagtagcttcctgtgtgtcatttcagttcttcatttctgcttttgcatcctayttgtaggcttttctctgacacttaatcactgtgctctggcacaaatacctttctcctctcttgctgtgattttgctgatgtgtgagcagag

SEQ ID NO: 22135 - DNA, 600 bp, Chicken  19866894234180_2
cctgctctttgctgactggagctctctgtgtgtgcctccttagctttcttttctttgacagagtagaaaaactgatgattgtttctccttrtaggtggaactttatccaggcttggtcactgtgttcttctgtgttaccccttgtcttcagctgagcaaatgctgtctagggttgaatatgtcatttagagactgtaattccattctagtgttcatttgaaggatttaatacaaggccagaaataatgagtagcttcctgtgtgtcatttcagttcttcatttctgcttttgcatcctayttgtaggcttttctctgacacttaatcactgtgctctggcacaaatacctttctcctctcttgctgtgattttgctgatgtgtgagcagagatgagcgctcttggtgaggctgtctcatgagcagttcttaaatcaccatttgttttaaatgtaactgtctcgtttgctgttgaaaggatgcccttttgtctgtactttcctttttcacgtagtgttgaaggtagaattcttgctcctaaaggggacggtgaaagttttaaaacccttagcacttctgggtaagttttttgctcgctgct

SEQ ID NO: 22136 - DNA, 600 bp, Chicken  19866894234180_3
tagaattcttgctcctaaaggggacggtgaaagttttaaaacccttagcacttctgggtaagttttttgctcgctgctaccctcagttttgtccctgctcctcagactgaacttggagatcattgctgggttgtaggagtgggacctcccgttgcattatctttacactgctgggatgacgccctcttgtggctgtaggtccgggttgccgtgagttttggtgaaaacgttttccacctcaacttggtctgaatgatcttaagtggttactgttcatatcctctctgagatttgccttgytcyccagcagcactacctcactgagagtggagaaaggaagttctgtaagtcttctctgtactaacaggcctttcggatgagttgtgatttyaaaagatctgggattagtcaaaytgggttttcctctctcaccgggacttataaaagtaaacttttctttcctctaataaaaacaaaaggtattttggtattcaaaacaacgtgctccagaaacataaatgaaaggcttgatttatgactttaggatgaacttgtgctgtaaggcagctttggacttgatccaatctagtctacttatgt

SEQ ID NO: 22137 - DNA, 600 bp, Chicken  19866894234180_4
aattcttgctcctaaaggggacggtgaaagttttaaaacccttagcacttctgggtaagttttttgctcgctgctaccctcagttttgtccctgctcctcagactgaacttggagatcattgctgggttgtaggagtgggacctcccgttgcattatctttacactgctgggatgacgccctcttgtggctgtaggtccgggttgccgtgagttttggtgaaaacgttttccacctcaacttggtctgaatgatcttaagtggttactgttcatatcctctctgagatttgccttgytcyccagcagcactacctcactgagagtggagaaaggaagttctgtaagtcttctctgtactaacaggcctttcggatgagttgtgatttyaaaagatctgggattagtcaaaytgggttttcctctctcaccgggacttataaaagtaaacttttctttcctctaataaaaacaaaaggtattttggtattcaaaacaacgtgctccagaaacataaatgaaaggcttgatttatgactttaggatgaacttgtgctgtaaggcagctttggacttgatccaatctagtctacttatgtgat

SEQ ID NO: 22138 - DNA, 542 bp, Chicken  19866894234180_5
tccctgctcctcagactgaacttggagatcattgctgggttgtaggagtgggacctcccgttgcattatctttacactgctgggatgacgccctcttgtggctgtaggtccgggttgccgtgagttttggtgaaaacgttttccacctcaacttggtctgaatgatcttaagtggttactgttcatatcctctctgagatttgccttgytcyccagcagcactacctcactgagagtggagaaaggaagttctgtaagtcttctctgtactaacaggcctttcggatgagttgtgatttyaaaagatctgggattagtcaaaytgggttttcctctctcaccgggacttataaaagtaaacttttctttcctctaataaaaacaaaaggtattttggtattcaaaacaacgtgctccagaaacataaatgaaaggcttgatttatgactttaggatgaacttgtgctgtaaggcagctttggacttgatccaatctagtctacttatgtgatgggtgtttttgtttgtaaccaggaactttt

SEQ ID NO: 22139 - DNA, 519 bp, Chicken  19866894234180_6
ggagatcattgctgggttgtaggagtgggacctcccgttgcattatctttacactgctgggatgacgccctcttgtggctgtaggtccgggttgccgtgagttttggtgaaaacgttttccacctcaacttggtctgaatgatcttaagtggttactgttcatatcctctctgagatttgccttgytcyccagcagcactacctcactgagagtggagaaaggaagttctgtaagtcttctctgtactaacaggcctttcggatgagttgtgatttyaaaagatctgggattagtcaaaytgggttttcctctctcaccgggacttataaaagtaaacttttctttcctctaataaaaacaaaaggtattttggtattcaaaacaacgtgctccagaaacataaatgaaaggcttgatttatgactttaggatgaacttgtgctgtaaggcagctttggacttgatccaatctagtctacttatgtgatgggtgtttttgtttgtaaccaggaactttt

SEQ ID NO: 22140 - DNA, 600 bp, Chicken  19866894234185_1
ggaaaggcctttctgccagtgtgaggctatgaaatctctcagctggagctcattggatgttgcctgtgattttgaaaagcttggccatcttcatggaatgtgatctcttggagtgtcgtggtgatgtgctgtgcatctggtgatgctgtgccctgagatagccacgcttcagtagcgtgtgaggtgactgccccgcaggatgccctgcattcaaggcaagggaaatgctgtgcattataatatgagtttgcaaagtacgtcgcctgaaaagtagagcttctcctgccctctttccaagtrcaaaggaggagcagatgttttggggcaatccagaaccacttccagcttgttagccagtcctctgtgccatctgaggagctgtgcctctttaccattccaaccttcacttggcagacggagtctgttgggaagaaaaacccccatccaagcctgctgtggtgtyctctcttttcttaccctgtgtttcagactcaccccactcagacagctttcctctccagcgtcgacctgcacacgcactgctcctaccagatgatgctgccagagtccatcgctattgtgtgctctccaaagtaccag

SEQ ID NO: 22141 - DNA, 600 bp, Chicken  19866894234185_2
acgcttcagtagcgtgtgaggtgactgccccgcaggatgccctgcattcaaggcaagggaaatgctgtgcattataatatgagtttgcaaagtacgtcgcctgaaaagtagagcttctcctgccctctttccaagtrcaaaggaggagcagatgttttggggcaatccagaaccacttccagcttgttagccagtcctctgtgccatctgaggagctgtgcctctttaccattccaaccttcacttggcagacggagtctgttgggaagaaaaacccccatccaagcctgctgtggtgtyctctcttttcttaccctgtgtttcagactcaccccactcagacagctttcctctccagcgtcgacctgcacacgcactgctcctaccagatgatgctgccagagtccatcgctattgtgtgctctccaaagtaccaggagtaagtgtggttgcccacccgtggcagggagcagctctgcagccacaaagctggcagaggggtgccttgcagagcrtgtggggccccrtgcttgagaccagcagattaaaacacgcttttgaagtgcagaagcagccctttctgcctgcagaagcttgagc

SEQ ID NO: 22142 - DNA, 600 bp, Chicken  19866894234185_3
ctgtgcctctttaccattccaaccttcacttggcagacggagtctgttgggaagaaaaacccccatccaagcctgctgtggtgtyctctcttttcttaccctgtgtttcagactcaccccactcagacagctttcctctccagcgtcgacctgcacacgcactgctcctaccagatgatgctgccagagtccatcgctattgtgtgctctccaaagtaccaggagtaagtgtggttgcccacccgtggcagggagcagctctgcagccacaaagctggcagaggggtgccttgcagagcrtgtggggccccrtgcttgagaccagcagattaaaacacgcttttgaagtgcagaagcagccctttctgcctgcagaagcttgagctgtatgcactttgtgcttatttctaggacagggtttttcaaactgacagaacacggcctggaggagatctcttcttgtcgacagaaaggattccacccccaytccaaagaccctcccctcttcactgtaagtcgcctcccggggcagtggggactgtagtaccatatgttggcatactgaacagttcacttgagtttctatctacggtgagtcac

SEQ ID NO: 22143 - DNA, 600 bp, Chicken  19866894234185_4
accattccaaccttcacttggcagacggagtctgttgggaagaaaaacccccatccaagcctgctgtggtgtyctctcttttcttaccctgtgtttcagactcaccccactcagacagctttcctctccagcgtcgacctgcacacgcactgctcctaccagatgatgctgccagagtccatcgctattgtgtgctctccaaagtaccaggagtaagtgtggttgcccacccgtggcagggagcagctctgcagccacaaagctggcagaggggtgccttgcagagcrtgtggggccccrtgcttgagaccagcagattaaaacacgcttttgaagtgcagaagcagccctttctgcctgcagaagcttgagctgtatgcactttgtgcttatttctaggacagggtttttcaaactgacagaacacggcctggaggagatctcttcttgtcgacagaaaggattccacccccaytccaaagaccctcccctcttcactgtaagtcgcctcccggggcagtggggactgtagtaccatatgttggcatactgaacagttcacttgagtttctatctacggtgagtcactggtctatggcc

SEQ ID NO: 22144 - DNA, 532 bp, Chicken  19866894234185_5
agtccatcgctattgtgtgctctccaaagtaccaggagtaagtgtggttgcccacccgtggcagggagcagctctgcagccacaaagctggcagaggggtgccttgcagagcrtgtggggccccrtgcttgagaccagcagattaaaacacgcttttgaagtgcagaagcagccctttctgcctgcagaagcttgagctgtatgcactttgtgcttatttctaggacagggtttttcaaactgacagaacacggcctggaggagatctcttcttgtcgacagaaaggattccacccccaytccaaagaccctcccctcttcactgtaagtcgcctcccggggcagtggggactgtagtaccatatgttggcatactgaacagttcacttgagtttctatctacggtgagtcactggtctatggcccaggacaggagagagcctcacaggagcctgcttctcactggggttgggatgcaaaagctttctgacttgataagtctttgttccttcactgcaaagagagggcagtt

SEQ ID NO: 22145 - DNA, 518 bp, Chicken  19866894234196_1
  misc_feature (1)..(7): n is any nucleotide
nnnnnnnacctacctggcagagacagagaagaacagatgccattgtgcatgggactgcaagatcctacccagagtcacatgggaaagaaactaagcgcagaggatgtgcagagaatggtgattatgaaaaagaaaggaatgggagggtgatgaaagatgtgcttaaccttgcaaaacaaagtctaatggacaatgtgcatactgtgattaaacatagtttgaagtgatgaaccagaacggaaaacaaatgcttttcttctcagttgaaaagaacagcaaaacaacaaagagatataaacrgatcactaagaactttaatctggaaattaatagggtttcagctgccagagaaatgataatccaaaacagcttctagcaacagaaacaaggatcaaaaaatccaataaaagtttctaggtagtctttgctaagtttgatgacgtagctctggcagtagctggaaagaaaatacagggaaccagatttccttccattcctgtatcctatctggctgatag

SEQ ID NO: 22146 - DNA, 599 bp, Chicken  19866894234214_1
  misc_feature (1)..(17): n is any nucleotide
nnnnnnnnnnnnnnnnnggaggagacagaagtgtgagagcccaccagacagagcgtacagcaacacagagagctgcaggtaacatcttccctctgcaggggaagccctaatgggctccccagccagcacttatgtacgtgagccatttacttcctccccaagctcccagattgccctgccacatcacccatgagcctgatcacaagcaacacgatgggtcccagcctagcacccgctcattagcactctgcatttccactccgctccaccccatcgggaaaagcccagcctggggacagygcaggaccagaactgctgtaaatgctgcagatgagcagtgagtgctgttagctgaaagccagacctgaaagaacctcagaagccccaggaccagcccatacaagtcctgacttgttcctgcagctttccttcatcttggttagctccagtacatttccgcattagaatatatttaaaaccacactgatgacagcacattcagacatgtgaccaccggggtgagggtgatgcctatgcaacacatcacaaatgggctgaaggagcacgttaccctgcgagtctgctctgggtggaaacct

SEQ ID NO: 22147 - DNA, 600 bp, Chicken  19866894234216_1
tggggtgcataaggcccagaactgccagccgggcggggggaagggctgtctcactctgctctgctctgtgtggcctcacctcctgcactgggtgcagctttgggtgccacaatagaaataggacataaaactgtgagacagtatccaaagtagggttacaaagatggtgaagagtctggaaggtaaagtgtgtgaggagcagctgaggtcccagggtgtgctcagcacagagctgaggagctgaggggaggcctcatggtggctgtagctcctcacagggagcggaggggcagcgctgarctctgctctgtgtgacagcgacagggcccgagggaacggcatggagctgtgtcaggggagggggagctgggggttagggacaggggctgcaccacagggtggtgggcacggccccgagtgccagagtgcaaggagtgtttggacactgctctcagagatagggtttggattttggatggtgctgtgtagggccaggagtcagacctggtgatccttgtaggtcccttccaactcagaacagtctatgattctatgctttagctccttgtccttgtctgagattatgttgtagatatgtct

SEQ ID NO: 22148 - DNA, 600 bp, Chicken  19866894234220_1
cggtcccagcagtcaaaccctgagcagggcaggtgattgtgtgagggaaggaggaaggagaactttgcccactacaggagggatggcagctgagctgagaagtctgaaccttccttttcttatccatcttatttgattgctttgcttgagggttgctttttttttttcaccctttctcattcactgttttaaagctaatcctgaactagccagatcatgccctggagttcatagcagccagcacagccatgtgttgttctcaggcaccacaagcacagccagcttgcccagcactgttgygctgctttgtaattgagggcaggggagagtttggggctgtttccatctggttgtgcaggcgagaggatggtcctggctgccacttctgccctgtctggcagagctgctttgccatggccatccttggtctgcttcacattgcactgaactctcctacctgattttctcgcactgcttgctggggaagatgaatgtgttccctgaggcagggacactgagagcccctgctctggccagcagagctgctgatggcaggctgttgccagacagtgcttcgggactgtaagctgaagggctgga

SEQ ID NO: 22149 - DNA, 600 bp, Chicken  19866894234247_1
aacacaccaccagagcacggctgacccccatctcgctgcttgtgagtgtgagcctcctgtcaatgatgaccaaaaggcaataatatgcccccagagctcacaggtggccctaaagagagcaagtacacctctgccttccagtagcagggattactcttgccatgctatgcagcaggcccagcaaagacaaccagaaaaaagcaaaaaacctgcagaatctcccaagtcagtctgaatttatcctttcagggctctcatccaagtaatgaatagactctggagctgtttagcttctatgarctgtcaaagattgcagaacagggaacagcacagctaaaacactgagtgtctattccaataaatccatacccaggcttcaaaaattagacagagctaccgatagcagctgctgtaaacaaagcccactaggtatgcctgcctacaagataaaacaaacagcacgatagctcatgctcccagtcccttacagacacagcagaataaaattagctactgctcaggagcctccatacggatgaagaaataaagggcagagagggtcaggacctgggaaacctgcatcagctgggttcaagtgaa

SEQ ID NO: 22150 - DNA, 600 bp, Chicken  19866894234248_1
acatgcagctctgtgtttttctaagatgcagcagctagccatctgcctcaagtatacaaaagcacccgtgctttctataactcaagtgtgctcttgtgtaatgggaaaaaaaatgttctagttgctttctgaaaagtgacagtaaataattccattttcatgctagggatattgaattaggctgtctcttttgagtgatacagtcttgcagtctccaaattgatcctgtctctacagatctgttgagcacagtgagttgctgctgacctagctgcaggcagtgtccatcccattcccagygatccatgaggaaaagaatccagcttttaaaatccttccttggctaggctgaatttggcagcttgcagatacatgtgagtagataagctacttcagaaaggactgtttcagtgttctttggagtaggatgatcttataaaaaagaataaatgcagccagtagctgaaagcctgactaaaacaggttgaaattgaatcatttgtctcaaatttctcccttttatttctccctttttatccaaattagcagctgttttcatgagcacttgttctttctcttagataagaggttatttctgag

SEQ ID NO: 22151 - DNA, 600 bp, Chicken  19866894234257_1
cacacatttaatgaaagtaagtatccaaatcaaaccaaaccactagaaatcaaaatgagcagaatgcctgtttctgtctggatgggaggcatcaggtaactccccagatacatttctatatcagatgcttctcatggaggtttgagtcccacagcgacacatccaagagttgtaatcctgtggtttcaaatcctggagagagggtatagtgttcctccttggagatcagccagacggactgagccgtggatctgcccattgccagcttcatctcacgtgggacgttcctctaggggaggytcatcagaggagagcatctcccctttgtggtcctgggcctgcacttggtccacactgctctagggtgacccttcccacgtgagttgcaggctgatcagctgcacatctagatggggccggtttatttcttgtgtgtccttaatgttctgttcagagtcatgtctgtattttctgaaataatgttctggaaagatctctgggcctcgagtcaaggagatggatgaaaaagcttatgtattaataaaaacatgcatgtatgtatattttagatgtacatttcactccttttaacagctctgg

SEQ ID NO: 22152 - DNA, 600 bp, Chicken  19866894234257_2
cccaggaatgctggacactttatttctcacagttcctgtaggcacgcaaaccccttgcacacttctagcacaaggaagtagaagtcagctaaagctttcccaagtggggatcagtgcttcttatttgtgtcagcaaaagtttcaagtgagtgccacctttcaaaagctttcttaagctgtttctgtgcagacaaagtttttcttcaaagtttctaaaatatatcgttatcagactttggaggcagacaatgatccgacttgtgaccctgagaattaaagttttaataaaaatggtgaccrgaagaatcctctccatgtggcacagtcaccatttacaagcaagtcggcgctgatatccctaagcaaccgtgctacagccttatcaaactcctgcacatcaaatgcagactttaatctttctatcaaaagtgaaaaagagtgcacatctatcgtcttccgtcttctgccattaaattacaaacccatttgctccttgatattatcagcattttaaagatgtgtaatcctggccatgggattgcttttaatcctctaatagctatttagctgatttctttgtgaaagcccatccactctcct

SEQ ID NO: 22153 - DNA, 600 bp, Chicken  19866894234259_1
atttgcagaatttgcactacacagaactgtcatgtctcaagccctgtgtttcagaggccagccttctggaatacctacatacacagtgtgagggagaattttatcaaagaagtaatcttgtgttgtatcatccaaaagcagatatatttattttgaatgccatgtaataacttcaaatatttgagctttttgccaggtcaagactctagtaacaaaacaaagaaaggaaggaaggaaattatctcctgttacgtatggagaaaaatgtcagcggaaattgtgtgactttttaaactcccygtagcsaaaggaaggagacacctgtctctggagccatgggtcagacttggtcataatttcacttcttgtctaaaactgtgaagccaaaaaagagataagtcactgctattcaaaccttactaataacaaagatgttgagaacagtttgccagagctgtgcttcaaaacaaacattttcgacatgtttctgcctagcatagcttcctccatctcatgcatttgtctaacatattctactattttctatcctgtcagatcccaagaagccttttcctgtgctatcaggatctggacgtcagc

SEQ ID NO: 22154 - DNA, 600 bp, Chicken  19866894234259_2
agaatttgcactacacagaactgtcatgtctcaagccctgtgtttcagaggccagccttctggaatacctacatacacagtgtgagggagaattttatcaaagaagtaatcttgtgttgtatcatccaaaagcagatatatttattttgaatgccatgtaataacttcaaatatttgagctttttgccaggtcaagactctagtaacaaaacaaagaaaggaaggaaggaaattatctcctgttacgtatggagaaaaatgtcagcggaaattgtgtgactttttaaactcccygtagcsaaaggaaggagacacctgtctctggagccatgggtcagacttggtcataatttcacttcttgtctaaaactgtgaagccaaaaaagagataagtcactgctattcaaaccttactaataacaaagatgttgagaacagtttgccagagctgtgcttcaaaacaaacattttcgacatgtttctgcctagcatagcttcctccatctcatgcatttgtctaacatattctactattttctatcctgtcagatcccaagaagccttttcctgtgctatcaggatctggacgtcagcatgctg

SEQ ID NO: 22155 - DNA, 599 bp, Chicken  19866894234260_1
  misc_feature (1)..(23): n is any nucleotide
nnnnnnnnnnnnnnnnnnnnnnnaaacatacccacttcccaacatactccttacagtgctgaaaggtatggagccttttttcccccttcccccgtgtttccaggctgttttgcagtacatgagaaataaaatacaaattttggaagaggcagttgttacatgcaacaggatttatcaccttttccaggcaatggaaattccagtccttatactagcaccagtcagaaatgtcctcaagggctctctctactcatgtattccagatattcccatttgtatctgttcagtgatgccttagarttgttttgtagaatcatagaatggcttaggctggaagggaccttaaagatcttgaagcttcaatcccagcaccatgatcagggctgccaaccaatgggttgagctgctcagggccccatctgtaggttggatcttcaagatcaccaaattcaaccatcaaactttataataacctagagttagaagaggacaagatacttttccagaccaatgtatagtttagtaggtaaaatatataagcacataatcaaaagctagcattaccttgtaggaaatatatacaaatccacaagaatagt

SEQ ID NO: 22156 - DNA, 600 bp, Chicken  19866894234260_2
atcttgaagcttcaatcccagcaccatgatcagggctgccaaccaatgggttgagctgctcagggccccatctgtaggttggatcttcaagatcaccaaattcaaccatcaaactttataataacctagagttagaagaggacaagatacttttccagaccaatgtatagtttagtaggtaaaatatataagcacataatcaaaagctagcattaccttgtaggaaatatatacaaatccacaagaatagtggagggctgtaatggtccttacttgcagttcaggtgcctattgtaaagrcacaggttataccaagagactgggggagcacactgcagtcctaccgaatgccatatttctcgttcccaggaaaaggaaacccaactcaacattacacacaggaataggcaagcacagatgtaccaaccacttttcaagtcttggtgctgcaaatagtgggttggaaagtaagtatgttgagtgctaaaaaacagcctaagcattaaatgttttcttgttgctagcaaagatacagcaatcaattatcacagcatcagctaatgaaaaatttagatgaaaatcccaaggacrtctacaatt

SEQ ID NO: 22157 - DNA, 600 bp, Chicken  19866894234260_3
ttgtaaagrcacaggttataccaagagactgggggagcacactgcagtcctaccgaatgccatatttctcgttcccaggaaaaggaaacccaactcaacattacacacaggaataggcaagcacagatgtaccaaccacttttcaagtcttggtgctgcaaatagtgggttggaaagtaagtatgttgagtgctaaaaaacagcctaagcattaaatgttttcttgttgctagcaaagatacagcaatcaattatcacagcatcagctaatgaaaaatttagatgaaaatcccaaggacrtctacaatttgattagtttgagaagtaaggttgtgttgtgaaagtctagtttggtctcagtggctgtgtgtctttcatttttctttgcacctgttagcaattattctataaaaattactccagagattttttagaggattttttttaattattattttttaatttataactatatatagccttggtctctagactctttcttgaatgtacagacttatgtgccaactgtttcttttgattattcactgttttccaaattaatattcagttctcaggcattttttttcatttactatcttt

SEQ ID NO: 22158 - DNA, 600 bp, Chicken  19866894234264_1
cttggatgcttactatatgccatctcacatggctctctctgtgtacataataaaggaaatagtaacttccattgtctgcattaatggctgttctaaacttctgacttccctaaagggatatggcttttgtgtagtccacttgatacctgcgtactgtaactttgctgtgtacagtacaagaaagcaaaccttgtaaaatctacacaccagctgctgttgttattcccccgacacccatctggaggtatattaactacagctgctgattgatcgttaggtccaaggtcagtcactgtaacraatattggtggctatacatatttgtgcagtgtcttaagtaagaatcgtgccaacacaagggtgtgtgctattaggcactttacacatattgcagtgtgaaggaattctctagctaaggttgcagtttctgttatgaagcctattttcatctgtttataygtttacagatctccctactttctgcctaaagtcttctgtgcctcctgtcagcctgatgttttcaggtaaactgaaaacagttctttcaggcatttggatttgaaaggcagaaaagcagtttaaaaatatatatatatactc

SEQ ID NO: 22159 - DNA, 600 bp, Chicken  19866894234264_2
ctttgctgtgtacagtacaagaaagcaaaccttgtaaaatctacacaccagctgctgttgttattcccccgacacccatctggaggtatattaactacagctgctgattgatcgttaggtccaaggtcagtcactgtaacraatattggtggctatacatatttgtgcagtgtcttaagtaagaatcgtgccaacacaagggtgtgtgctattaggcactttacacatattgcagtgtgaaggaattctctagctaaggttgcagtttctgttatgaagcctattttcatctgtttataygtttacagatctccctactttctgcctaaagtcttctgtgcctcctgtcagcctgatgttttcaggtaaactgaaaacagttctttcaggcatttggatttgaaaggcagaaaagcagtttaaaaatatatatatatactcttataaaatttttgattgttttctgcatcatcatttaactgtgaacgggtggaccctaaatgctgctctaacaaagcccatgcgtattataggtcatgtcttgggattatttatttatttgttttaaaaaaggatatgaggtgctatatctattggaaa

SEQ ID NO: 22160 - DNA, 549 bp, Chicken  19866894234265_1
gatcagtagaggcttcgttaacatcattttttttttaatgattttgaaattgctgctgcttcctcctttctggttaatatcatcaccaaaattccctaaaaactgtttcccaaagagggactatccactttctgtttctgctaattgttttcattctgttaaatgagtgcataatttcttggtcatctgaaggatttggtaacattggagcggtatgtgattcatcaggtggtgaaatctctcttcttaattgctgttgggcaataaaatgtgactgcgcagcctttatgaccaagtccycggtcactgataagcaaataacgcaragccagggaacagttggaggtttagacaatcttttcctggagtcacaaggaaatggatttctttgttaaagctggtatggctcagggttttgtaatgaagcgtgaggctgcaaagacaatgctgagacatgtaattatgctttagaaatacagagccctggctactcgagccaacaattgattatgataagggagggaataaaaaggggctaggtactgactg

SEQ ID NO: 22161 - DNA, 523 bp, Chicken  19866894234265_2
ttttttttttaatgattttgaaattgctgctgcttcctcctttctggttaatatcatcaccaaaattccctaaaaactgtttcccaaagagggactatccactttctgtttctgctaattgttttcattctgttaaatgagtgcataatttcttggtcatctgaaggatttggtaacattggagcggtatgtgattcatcaggtggtgaaatctctcttcttaattgctgttgggcaataaaatgtgactgcgcagcctttatgaccaagtccycggtcactgataagcaaataacgcaragccagggaacagttggaggtttagacaatcttttcctggagtcacaaggaaatggatttctttgttaaagctggtatggctcagggttttgtaatgaagcgtgaggctgcaaagacaatgctgagacatgtaattatgctttagaaatacagagccctggctactcgagccaacaattgattatgataagggagggaataaaaaggggctaggtactgactg

SEQ ID NO: 22162 - DNA, 600 bp, Chicken  19866894234270_1
ccttatctctctgactcagaattatttggtacttgggttaggtttgtgagatttaactcttccttctgaacaacaaggaaataatgttattcctttcttgaacctcaatctgtttctcactgactggcatatttatccctatagttgctaattattgatggacagcagctaagaagtgacccagctactgtgatggatgaagtgcagaagttccttggagtctctcctcactataattactctgaagctctaacgtgagtcttttttatcatctgtcctatggaatcacagattagtacmtcattagttgcaaacaacaacaaaaactcacaagaaaaacaattttgcaaagaaaaaagcatttttttcaaagttgtgtttaagatgcattcagttttcccctaacttgcatacacgcattacagaatttacttgcaaggttccatacattttcatgtgcaaattctacttcacacaacryacagagcaaatgattgctcagtattttgtattaggcacagaatggaggcccaggttcatgtaaaaaatgtctgctacatttgagtgttaaaccacagatgcccaagatgtttcctctgg

SEQ ID NO: 22163 - DNA, 516 bp, Chicken  19866894234270_2
ccagctactgtgatggatgaagtgcagaagttccttggagtctctcctcactataattactctgaagctctaacgtgagtcttttttatcatctgtcctatggaatcacagattagtacmtcattagttgcaaacaacaacaaaaactcacaagaaaaacaattttgcaaagaaaaaagcatttttttcaaagttgtgtttaagatgcattcagttttcccctaacttgcatacacgcattacagaatttacttgcaaggttccatacattttcatgtgcaaattctacttcacacaacryacagagcaaatgattgctcagtattttgtattaggcacagaatggaggcccaggttcatgtaaaaaatgtctgctacatttgagtgttaaaccacagatgcccaagatgtttcctctggttctagtgctgctttcttggctataacgattaaaatggggggttcagtcgatgtaagttgtgcatgtacaagctcagcacacatttgcaaatcaca

SEQ ID NO: 22164 - DNA, 515 bp, Chicken  19866894234270_3
cagctactgtgatggatgaagtgcagaagttccttggagtctctcctcactataattactctgaagctctaacgtgagtcttttttatcatctgtcctatggaatcacagattagtacmtcattagttgcaaacaacaacaaaaactcacaagaaaaacaattttgcaaagaaaaaagcatttttttcaaagttgtgtttaagatgcattcagttttcccctaacttgcatacacgcattacagaatttacttgcaaggttccatacattttcatgtgcaaattctacttcacacaacryacagagcaaatgattgctcagtattttgtattaggcacagaatggaggcccaggttcatgtaaaaaatgtctgctacatttgagtgttaaaccacagatgcccaagatgtttcctctggttctagtgctgctttcttggctataacgattaaaatggggggttcagtcgatgtaagttgtgcatgtacaagctcagcacacatttgcaaatcaca

SEQ ID NO: 22165 - DNA, 600 bp, Chicken  19866894234278_1
catatttcatagcacaaagaaaccttggaaatgaaactaagattccttactcccaatatttgtttctacataatatgtatttgttgttctggttttggtactggagtaaaagtatttggtgtacaaggatgaatattgttgggtgcgtgctgcatggacacacctttagagtatttccagtagcaacaaccggacaggcactttgtatttgtttcactttcaggatgcttggcttgtctttaacagccatctatttgtttaaaaaaaaacaaaacctctctttgaagcaaaaaaaatacyattttcagatagagggtctaaatgtcacgttttgaaagcagcacattctgaattctttctccccacttctggcagaactgctttcagtcactcgtgccaaaactgtgtgttacagcaaatttattagatgttaaaaactgatattagcccaattttagcttgcactgaaataacagaggttccccagctttctctttctggttatttgtttggtatcctgagctccctactactgcccagacagctctactcaagaagtgaagtcccagtgaaacaagttatgtcttgtctaatcactga

SEQ ID NO: 22166 - DNA, 599 bp, Chicken  19866894234282_1
  misc_feature (1)..(158): n is any nucleotide
nnnnnnnnnnnnnnnnnnnnnnnnnnnnnnnnnnnnnnnnnnnnnnnnnnnnnnnnnnnnnnnnnnnnnnnnnnnnnnnnnnnnnnnnnnnnnnnnnnnnnnnnnnnnnnnnnnnnnnnnnnnnnnnnnnnnnnnnnnnnnnnnnnnnnnnnnnnnnnccccataaaaagccactcctcagggtagccttggggcttggagaggtctggggacagagcgctgtgggtctggctgcccccaggtgaggggctgggaggggggacattgggcactgtaccccctgagctccagccctgacaygggcccaccgggcaggggctgtcccatgggcaaagctatgggcactgggaccacgtccccatccctgtggtgcccaccctggtgggtgccctgarctggggacacctggagctgsaggggccccaggaagggtccctgcrtsatatggagatgcagggctggggctgacagtggggctgtccctgacgctgcggattctccattaacactgccwmcagatcttcttctctggaggttgggaagcggtgagcgatggtgaggatggtgcggcggcggtgggatgggacccccgtgggtat

SEQ ID NO: 22167 - DNA, 599 bp, Chicken  19866894234282_2
  misc_feature (1)..(63): n is any nucleotide
nnnnnnnnnnnnnnnnnnnnnnnnnnnnnnnnnnnnnnnnnnnnnnnnnnnnnnnnnnnnnnnccccataaaaagccactcctcagggtagccttggggcttggagaggtctggggacagagcgctgtgggtctggctgcccccaggtgaggggctgggaggggggacattgggcactgtaccccctgagctccagccctgacaygggcccaccgggcaggggctgtcccatgggcaaagctatgggcactgggaccacgtccccatccctgtggtgcccaccctggtgggtgccctgarctggggacacctggagctgsaggggccccaggaagggtccctgcrtsatatggagatgcagggctggggctgacagtggggctgtccctgacgctgcggattctccattaacactgccwmcagatcttcttctctggaggttgggaagcggtgagcgatggtgaggatggtgcggcggcggtgggatgggacccccgtgggtatgggcatcgtggccacggtgctgctctgggtggtgactgaggctgccagagggtgagtgctgcagccccgcgggtccccacaccaggatgggtgca

SEQ ID NO: 22168 - DNA, 599 bp, Chicken  19866894234282_3
  misc_feature (1)..(43): n is any nucleotide
nnnnnnnnnnnnnnnnnnnnnnnnnnnnnnnnnnnnnnnnnnnccccataaaaagccactcctcagggtagccttggggcttggagaggtctggggacagagcgctgtgggtctggctgcccccaggtgaggggctgggaggggggacattgggcactgtaccccctgagctccagccctgacaygggcccaccgggcaggggctgtcccatgggcaaagctatgggcactgggaccacgtccccatccctgtggtgcccaccctggtgggtgccctgarctggggacacctggagctgsaggggccccaggaagggtccctgcrtsatatggagatgcagggctggggctgacagtggggctgtccctgacgctgcggattctccattaacactgccwmcagatcttcttctctggaggttgggaagcggtgagcgatggtgaggatggtgcggcggcggtgggatgggacccccgtgggtatgggcatcgtggccacggtgctgctctgggtggtgactgaggctgccagagggtgagtgctgcagccccgcgggtccccacaccaggatgggtgcaccgagggtcccggtgacgct

SEQ ID NO: 22169 - DNA, 599 bp, Chicken  19866894234282_4
  misc_feature (1)..(18): n is any nucleotide
nnnnnnnnnnnnnnnnnnccccataaaaagccactcctcagggtagccttggggcttggagaggtctggggacagagcgctgtgggtctggctgcccccaggtgaggggctgggaggggggacattgggcactgtaccccctgagctccagccctgacaygggcccaccgggcaggggctgtcccatgggcaaagctatgggcactgggaccacgtccccatccctgtggtgcccaccctggtgggtgccctgarctggggacacctggagctgsaggggccccaggaagggtccctgcrtsatatggagatgcagggctggggctgacagtggggctgtccctgacgctgcggattctccattaacactgccwmcagatcttcttctctggaggttgggaagcggtgagcgatggtgaggatggtgcggcggcggtgggatgggacccccgtgggtatgggcatcgtggccacggtgctgctctgggtggtgactgaggctgccagagggtgagtgctgcagccccgcgggtccccacaccaggatgggtgcaccgagggtcccggtgacgctggttgggtggtgggtgccactgcag

SEQ ID NO: 22170 - DNA, 599 bp, Chicken  19866894234282_5
  misc_feature (1)..(16): n is any nucleotide
nnnnnnnnnnnnnnnnccccataaaaagccactcctcagggtagccttggggcttggagaggtctggggacagagcgctgtgggtctggctgcccccaggtgaggggctgggaggggggacattgggcactgtaccccctgagctccagccctgacaygggcccaccgggcaggggctgtcccatgggcaaagctatgggcactgggaccacgtccccatccctgtggtgcccaccctggtgggtgccctgarctggggacacctggagctgsaggggccccaggaagggtccctgcrtsatatggagatgcagggctggggctgacagtggggctgtccctgacgctgcggattctccattaacactgccwmcagatcttcttctctggaggttgggaagcggtgagcgatggtgaggatggtgcggcggcggtgggatgggacccccgtgggtatgggcatcgtggccacggtgctgctctgggtggtgactgaggctgccagagggtgagtgctgcagccccgcgggtccccacaccaggatgggtgcaccgagggtcccggtgacgctggttgggtggtgggtgccactgcagga

SEQ ID NO: 22171 - DNA, 600 bp, Chicken  19866894234282_6
gagcgctgtgggtctggctgcccccaggtgaggggctgggaggggggacattgggcactgtaccccctgagctccagccctgacaygggcccaccgggcaggggctgtcccatgggcaaagctatgggcactgggaccacgtccccatccctgtggtgcccaccctggtgggtgccctgarctggggacacctggagctgsaggggccccaggaagggtccctgcrtsatatggagatgcagggctggggctgacagtggggctgtccctgacgctgcggattctccattaacactgccwmcagatcttcttctctggaggttgggaagcggtgagcgatggtgaggatggtgcggcggcggtgggatgggacccccgtgggtatgggcatcgtggccacggtgctgctctgggtggtgactgaggctgccagagggtgagtgctgcagccccgcgggtccccacaccaggatgggtgcaccgagggtcccggtgacgctggttgggtggtgggtgccactgcaggaggtggtgtgagcggacagagcaggtaacagaggaggaggtggtgatgccccggcgtgaggacgtggtgccgtg

SEQ ID NO: 22172 - DNA, 600 bp, Chicken  19866894234282_7
agcgctgtgggtctggctgcccccaggtgaggggctgggaggggggacattgggcactgtaccccctgagctccagccctgacaygggcccaccgggcaggggctgtcccatgggcaaagctatgggcactgggaccacgtccccatccctgtggtgcccaccctggtgggtgccctgarctggggacacctggagctgsaggggccccaggaagggtccctgcrtsatatggagatgcagggctggggctgacagtggggctgtccctgacgctgcggattctccattaacactgccwmcagatcttcttctctggaggttgggaagcggtgagcgatggtgaggatggtgcggcggcggtgggatgggacccccgtgggtatgggcatcgtggccacggtgctgctctgggtggtgactgaggctgccagagggtgagtgctgcagccccgcgggtccccacaccaggatgggtgcaccgagggtcccggtgacgctggttgggtggtgggtgccactgcaggaggtggtgtgagcggacagagcaggtaacagaggaggaggtggtgatgccccggcgtgaggacgtggtgccgtgc

SEQ ID NO: 22173 - DNA, 526 bp, Chicken  19866894234288_1
cagcaataacgctgcccgcttccacccagtcagtgcctcagctgttcgggtaaagcccacgctcccgcgggactcacgtttgagtacaaccccaggattgtcagggctctggctggcagtgctgccgaggggacagtctaaggctctattttaatcttctggagcccagccaagcactggaacggagctgccagcacaaggggggccctcctgctcactgcgcctgacctcccatcaggagaggtgctgctgtgttccttctcaaactactagggccctttcattgcgctgacctcccarcatgctgctcgtctccagatgcacgacgcactgcgtgcaccgcggggcttcgctgcagcaccgttctgctgcagcaccattttgctgcagcgccgttttgcagcgccgtctgcgcactgcatctcactgagctggacgttcccctgcacagttctcagctgtgacgtgttattttattttgggtggaagcgtgtgatgagcactcctgcatggctttggtcccagc

SEQ ID NO: 22174 - DNA, 599 bp, Chicken  19866894234290_1
  misc_feature (1)..(71): n is any nucleotide
nnnnnnnnnnnnnnnnnnnnnnnnnnnnnnnnnnnnnnnnnnnnnnnnnnnnnnnnnnnnnnnnnnnnnnnattttagaagccgtgcaggtgttactttcttgaatgattcaaaaattacaagcagccaatcctccagctaattgcagatggaagttatgaacatctaaaatgcattttttaaatgtccaaaaggggcctctgaggagattgtgccttaatgctgctaagctgattgattttcagtgtccagaaataattcccctagtacaatttctggctttttcacgatgtgtcaaaygtccatctattaaaaaggttaggctgcctgttcttggagaaagaaacatttcaggcttgcttccatctaaacctcccatggtccccatttcagagtgtcagtcattttatatcagtggcggcagcagcaataaatgcctactttcaacgacagcataagggtttttatattacaggggcttgccatattttttcattttctttaatgacaataggagagtatgtgtttgaaagcagtaagtaaccctggtaaaactgtttaaaatattcttatagtgttgagttttggtaacttcttgg

SEQ ID NO: 22175 - DNA, 600 bp, Chicken  19866894234290_2
tctaaacctcccatggtccccatttcagagtgtcagtcattttatatcagtggcggcagcagcaataaatgcctactttcaacgacagcataagggtttttatattacaggggcttgccatattttttcattttctttaatgacaataggagagtatgtgtttgaaagcagtaagtaaccctggtaaaactgtttaaaatattcttatagtgttgagttttggtaacttcttggcaaatacctgtgatacaaggcctctcttcccatctggcttattctccaggttactccaccgcatcrcaaattgaatcaagagaagttttcaatgtctcaaattctaatgaaaacacagctgactggggatatatatatcacatttgtactacagagtgtttcaacattagattgtttgtgacagcaattcaaaagcaccaaatctcccaactccgttctctcctgggtgcttcagtggctctttttcaatcactcttgaaatagctgtataatggagttacgtgggccttgctatagaaacgatagagagctgataagtgcaaaaaactttacttttagcacatcgtatcctcccccacatcactg

SEQ ID NO: 22176 - DNA, 600 bp, Chicken  19866894234292_1
atttcttgtatcactctgaaacctgaagtctaagttgtgaaatagaaacaaaagagttaaaaggtctttgatgactactattattactagaaattaaaattcaaccatttagatcacttctacaaaaatgctgttgaagaggatatttcaggagaagtcatcttcatgaaataaaaaaatcagattgtgagaatgaatacccttagcaactacagcaggttttactctaagaaggtggtacgtcccaggaaatgacaaattatccctgataggaaaaaaaataacaagaactgaaaagawttcaacgagatggcaattaaaacgacgacataaactcaaaactcaaactataagaaaatagctcatttctatctaaaatctagttgatgtgaaatctaatgatttacaaaacaagaagggtggacaacagccgtaaaattgtatctggaatttcaatcatcaaaaaattatgccttcatatgcaaatattacagtgttgagctatttgacaagtgctttcttctctgtttgtccatgtaaagaagaacaaaacaaatctgaaaggaaaatcatgaaacaaaataatttaatatagtgaag

SEQ ID NO: 22177 - DNA, 550 bp, Chicken  19866894234299_1
ttgactcccactgagtcttatttcactcacaggtacactctttttcctggactgtcatgcttgaaataagctaagccaagagcggatgatctttcagcagaacaagtaatatgctgaaggctacattcagcaatattttccttatttcacttgatcaaagtgctgtttaagcagagggctatgttctgctcagcagcagagtggtgttactgatatgtgacagcagtgatcgcagcagcatggctctgagcgcccattgacaaagcagagagatcaggaatctggcccagcatcctcaarataagaatactgggaatggagctatgccaggggagaatatggcccatactgtttctgaaatgaaggagccaaataatacaaagatgtaagcggatctgtaatctgtttataagaaaatccgtgatttatagagcccagctagaggaagggtaagtttcaagagcaatacagcataactaaaagaagttatttctccctgtaaaaagacactttaatagaaatgaggacaaataaaattctcaaaacatga

SEQ ID NO: 22178 - DNA, 600 bp, Chicken  19866894234306_1
cttccactgttgttgtccagtttttttttttcttattttttttcttcctagagaataacctgccttgtctcttgtcattcccttctgatagccatactcactgaaacacatatattgttgcacaagctagctttctttctttccttcctgaaaaaatgtctggtttactggggctgctgaggctacatccataaaaatccacttaactgctgacctatgatccacactcatccatgtgctttttcataatattgttctataaaatcgttattaggaagttccagttcagctttgtgattstggatgtagatgacatgcgcatcgtaccagggacctttcatcgtggtccccttctgcagtagaatgtcctattcagcccaccatcaaacctgtcctctcctagaacaattgcctctgattccaaatagctgcagcattctatagacctaccttattaactcttaacttctgagtgggttgtttgaagactggcttaaaagaacgttactactatgcagaacaaattgtcccatttgtagttcacaagtgtaaaattagatacataacttctgatttctttgcaatgcattgataccacag

SEQ ID NO: 22179 - DNA, 599 bp, Chicken  19866894234307_1
  misc_feature (1)..(4): n is any nucleotide
nnnncagaggtccctgtcaccctcagccattctatgctcctgtggttctgtatctgtagcacaggacacacttactagctgaacacctaaagaaaaattagaatgaatgaatgaatgaacagtaaccacaaaaacaaaccattaccaggaatcgttcctctttctcaagccagcgttgatcttcttccatctcttgctgttgtcttattaacctctcctccatgagatgtgtgggcagaacctgccccattcctcgtacatccaaagtgcccgaatcctataaaacaattaagtttatgyagtcttacagcaactgkcaatttgtgaacactygaacaatttgaacacgtgcaaagtagtcacattctgccaacactttattcaagcacagcataattaaactatgttgtttctattgcccctctagaataaacaggaatgctgaactacctgggatgacaacactcaactaaactatacagagtgtgaacaactgcatggctgcaagcagtaatggcagaatatacgaccaaatcaactaagatagcttgaggcaaactgaagatgtgaatacctatctgctctcctgtatttatggt

SEQ ID NO: 22180 - DNA, 600 bp, Chicken  19866894234307_2
caccctcagccattctatgctcctgtggttctgtatctgtagcacaggacacacttactagctgaacacctaaagaaaaattagaatgaatgaatgaatgaacagtaaccacaaaaacaaaccattaccaggaatcgttcctctttctcaagccagcgttgatcttcttccatctcttgctgttgtcttattaacctctcctccatgagatgtgtgggcagaacctgccccattcctcgtacatccaaagtgcccgaatcctataaaacaattaagtttatgyagtcttacagcaactgkcaatttgtgaacactygaacaatttgaacacgtgcaaagtagtcacattctgccaacactttattcaagcacagcataattaaactatgttgtttctattgcccctctagaataaacaggaatgctgaactacctgggatgacaacactcaactaaactatacagagtgtgaacaactgcatggctgcaagcagtaatggcagaatatacgaccaaatcaactaagatagcttgaggcaaactgaagatgtgaatacctatctgctctcctgtatttatggtgtaagtctcagttctcac

SEQ ID NO: 22181 - DNA, 600 bp, Chicken  19866894234307_3
atgctcctgtggttctgtatctgtagcacaggacacacttactagctgaacacctaaagaaaaattagaatgaatgaatgaatgaacagtaaccacaaaaacaaaccattaccaggaatcgttcctctttctcaagccagcgttgatcttcttccatctcttgctgttgtcttattaacctctcctccatgagatgtgtgggcagaacctgccccattcctcgtacatccaaagtgcccgaatcctataaaacaattaagtttatgyagtcttacagcaactgkcaatttgtgaacactygaacaatttgaacacgtgcaaagtagtcacattctgccaacactttattcaagcacagcataattaaactatgttgtttctattgcccctctagaataaacaggaatgctgaactacctgggatgacaacactcaactaaactatacagagtgtgaacaactgcatggctgcaagcagtaatggcagaatatacgaccaaatcaactaagatagcttgaggcaaactgaagatgtgaatacctatctgctctcctgtatttatggtgtaagtctcagttctcacataagcacttactaga

SEQ ID NO: 22182 - DNA, 600 bp, Chicken  19866894234307_4
gaccaaatcaactaagatagcttgaggcaaactgaagatgtgaatacctatctgctctcctgtatttatggtgtaagtctcagttctcacataagcacttactagaggctcaaggactagagcactgcttagagagcaaatggatttagacagaaaatttgtggaacgataacatgaaatgaaaaaagtggaaaatattggagaagaacagaaaaaaaaaataaaacaaatgctgcaaggttagagggggaaataattccacgttccttgaggctatatgcaggatctggttaaagaacmgaattcagtcatgactcatgactcccatcccactgcaggaaggcaatttaaaaaacactactgaaacacacttgattttcctacagtactctccagatatatctaaggaattaaaaaagtgtgtttactgtacagagtgcaacaatgtctgtatcagttcaccatacctccatgtttggctgccatgctgatacttcctgaggtcgatggttccaggaatctgtttgatccaagagagaagcttgcccaggataaatgctgcctgccatggctggtatcccatgagaaccagagtagcca

SEQ ID NO: 22183 - DNA, 499 bp, Chicken  19866894234312_1
tgaacatgaggcgtatgaaagcttttaggaatatgttgtcacttggcccctatttaactgaaacctctaaattatacacccgaacccacaatagagcgtgctaaatctttagctagaactaaaaacccaaagggactttcacaaattgcatggggttaggggagcttgaaatcctttctgttaaatattgctgaaggcaaaactaattcttcctctccaccgtctgtgagtttttaaaatgtgttgtgcactgagctacttttgtgtaaggtaactttctgatatatgacagcaaacacrtgcttgaacataaacttcccatctaaatcagtccggagagaagcgcttactctccttcaraaggaaaaagatattccaggtgtacagccctatgtagaggcacctttttgtcttttcagcttaggagggctgaaaaatgattagagggctggagcacctctcctatgaagagaggctgagagagctgggaggtgttccg

SEQ ID NO: 22184 - DNA, 439 bp, Chicken  19866894234312_2
aaacctctaaattatacacccgaacccacaatagagcgtgctaaatctttagctagaactaaaaacccaaagggactttcacaaattgcatggggttaggggagcttgaaatcctttctgttaaatattgctgaaggcaaaactaattcttcctctccaccgtctgtgagtttttaaaatgtgttgtgcactgagctacttttgtgtaaggtaactttctgatatatgacagcaaacacrtgcttgaacataaacttcccatctaaatcagtccggagagaagcgcttactctccttcaraaggaaaaagatattccaggtgtacagccctatgtagaggcacctttttgtcttttcagcttaggagggctgaaaaatgattagagggctggagcacctctcctatgaagagaggctgagagagctgggaggtgttccg

SEQ ID NO: 22185 - DNA, 600 bp, Chicken  19866894234315_1
cttaaatgatctgaatcaaagtgtcagtgtcaggtgacatgtctgtttgaagggtcccaagtcctgataatcttctgtcattatttctttcttccatgtaggattgaaaaatgcactttatttagtacaacagttctgaaagtttgtagcatatttcatgctactcacacaaagaatcaaaatcggaaaagtttctcaaacctaaaatcctgcaaagagaacttatacctttagaggaattcttgccaaatatcttttgtcagtttgctgtcatgaatgttatcacttctacttgtaacrgtggaaaagattacaggtatttgaaaagtagctaggagggaaaaaaattccttttctaatttttgcaaatagatagtaaaatatatcaataatttcttaccttactctcaaatagaaatggagtacgtatggatgcacacgaatatgcatatttaaacacatatggatatactgctctgaaattatagctaattaatatctctttccagttttgaagatctagtgatacagagaaagtaataaaaatacaccagaacattttctacaggcccacagatgcagagagagtagacacatagg

SEQ ID NO: 22186 - DNA, 600 bp, Chicken  19866894234318_1
acagatcaacagccagatttgcttcaaaacaatgaagagaaataatccagtgccagtgaaaataggcaaggaattttgtaaaagtaaaatagaccagataaatcaaaaagcatttgcaagtcatttaacaatctaaatttttcacatgaagattacgttttgtgttcatctttatttaagatgctattgggttaataacacttttacacttattacaggacaacagacttctcctattttactgctcacatagggtcaatagctgcttcctcacactgtcctaccacactacttcaccamctggagagcctgtctttaaaacaagagaaaaagattaaatatgttgagtcttgtccttttctctacacttgtagcaacacaaccttaaaatacagccatcttgttcttgctgttctttacgtaaggtgtaccagaatcacagcacttccccaataacctcaatgaggatgcgtaaaagaaatctcgtaataatatggaaaagaagaacacctacaaaaaatccaaggtagttgatgctgacaggcaatttacttatgggattcaaaaaccctgtatacttaacatgtatgctgcaatgat

SEQ ID NO: 22187 - DNA, 343 bp, Chicken  19866894234324_1
cctgtgacagaaataggttctctgaaagcaaatcttgccctaatcagttttgtttatcttgctttctctgctcaatatttccactgcttttaggttagcaaacaagtaacactattttgcttttgtggagaacaaaaagcactgtgggctgttaaagacagggtgctgaatgaaaggttattccaaaatgcatctctggtggctaggaaacaataggccagtaaaactttgagcaagcagggtgggaagggaagacgatatgctgaagttcagcagaatggggttcatgtagaccccagyagctctgcttcccactgagccctaacctcagcacaaaacttgc

SEQ ID NO: 22188 - DNA, 600 bp, Chicken  19866894234330_1
gaatacagaggcctgtattgaaatatcttatgtcactgcctcagaattttaaattatattaacatcagtacatgtgtatatcaatacaaagtggtgcatcatccataactcctgttacttgagctagtttgtcaaccgaaattcgtcgaagccttttcaggcaaaatctctgcagaaagtgcctgtcattggggtgacacagcagctgccaaaaccctgagaggacagtggtcctgtcctatttcacaatggtacaagcagtcatctgacacgtcaacacagactgaagtcaaaggtgaktagtccatgcagaatagagctataatttctggctgaagaacactagatttmctcattaagttttcatagctatgtgcttccrtggcttctggagctcttttgttgttccagcctttgtctcacttagtttcaaggtgtgagtattactttaaaagtctagcaatattaacataaggagttgctgaacttcacaagataggaatgaaaagcagaggatagttccttatcaagatgctattgaggccacagtattcccccccatccacaggtgacagaaatggcttaacacgctacaaaaaa

SEQ ID NO: 22189 - DNA, 600 bp, Chicken  19866894234330_2
aattatattaacatcagtacatgtgtatatcaatacaaagtggtgcatcatccataactcctgttacttgagctagtttgtcaaccgaaattcgtcgaagccttttcaggcaaaatctctgcagaaagtgcctgtcattggggtgacacagcagctgccaaaaccctgagaggacagtggtcctgtcctatttcacaatggtacaagcagtcatctgacacgtcaacacagactgaagtcaaaggtgaktagtccatgcagaatagagctataatttctggctgaagaacactagatttmctcattaagttttcatagctatgtgcttccrtggcttctggagctcttttgttgttccagcctttgtctcacttagtttcaaggtgtgagtattactttaaaagtctagcaatattaacataaggagttgctgaacttcacaagataggaatgaaaagcagaggatagttccttatcaagatgctattgaggccacagtattcccccccatccacaggtgacagaaatggcttaacacgctacaaaaaatcaatgaaagcaaaaattcaactgcgtctgagataggttccacaagacaaa

SEQ ID NO: 22190 - DNA, 600 bp, Chicken  19866894234330_3
aatacaaagtggtgcatcatccataactcctgttacttgagctagtttgtcaaccgaaattcgtcgaagccttttcaggcaaaatctctgcagaaagtgcctgtcattggggtgacacagcagctgccaaaaccctgagaggacagtggtcctgtcctatttcacaatggtacaagcagtcatctgacacgtcaacacagactgaagtcaaaggtgaktagtccatgcagaatagagctataatttctggctgaagaacactagatttmctcattaagttttcatagctatgtgcttccrtggcttctggagctcttttgttgttccagcctttgtctcacttagtttcaaggtgtgagtattactttaaaagtctagcaatattaacataaggagttgctgaacttcacaagataggaatgaaaagcagaggatagttccttatcaagatgctattgaggccacagtattcccccccatccacaggtgacagaaatggcttaacacgctacaaaaaatcaatgaaagcaaaaattcaactgcgtctgagataggttccacaagacaaagaaaaaaaaattattagctgagaacaccaag

SEQ ID NO: 22191 - DNA, 600 bp, Chicken  19866894234343_1
caaggatggggcatccatcacctctctgggcaacctgtgccagtgcctcaccacccttgttgtaaaaaactttttctttactcagtttaaatctcccctcttttagttggaaaccatttccccttgttctatcacaataggccatgcttaagagtctttctcctttcttatacccccctttagatactgaaaggaacaacatttctactaagattcagcttttccttttccttatgtttgcttgtaactggcaccttctactgagataaaatattattcatccttcaggtaattcaaacrttacaaatcacatgttccaaactctgctgtgtatagacacagctctataccacataaagttcatgtgagctctggagagaaaaatcwtggattaggtattttgctgacaatgggatgatgcttctcctatctggaaggagacagccttgagaacaggatctctgatggtkctgggaggcagtgaaaggcagcacygtgttgcacaccatrcctctaatgtgcagtggggcacgacacaaagagctagaagcaaattttgaatgagttgacactgctcaagcagaaagaccagctcatagc

SEQ ID NO: 22192 - DNA, 600 bp, Chicken  19866894234343_2
taaatctcccctcttttagttggaaaccatttccccttgttctatcacaataggccatgcttaagagtctttctcctttcttatacccccctttagatactgaaaggaacaacatttctactaagattcagcttttccttttccttatgtttgcttgtaactggcaccttctactgagataaaatattattcatccttcaggtaattcaaacrttacaaatcacatgttccaaactctgctgtgtatagacacagctctataccacataaagttcatgtgagctctggagagaaaaatcwtggattaggtattttgctgacaatgggatgatgcttctcctatctggaaggagacagccttgagaacaggatctctgatggtkctgggaggcagtgaaaggcagcacygtgttgcacaccatrcctctaatgtgcagtggggcacgacacaaagagctagaagcaaattttgaatgagttgacactgctcaagcagaaagaccagctcatagctcagctgctgtgatagcatggcattgcatctgaggcaataaatcctctctgcagacatgactaatgaagttgggcagagcactaagc

SEQ ID NO: 22193 - DNA, 600 bp, Chicken  19866894234343_3
tacccccctttagatactgaaaggaacaacatttctactaagattcagcttttccttttccttatgtttgcttgtaactggcaccttctactgagataaaatattattcatccttcaggtaattcaaacrttacaaatcacatgttccaaactctgctgtgtatagacacagctctataccacataaagttcatgtgagctctggagagaaaaatcwtggattaggtattttgctgacaatgggatgatgcttctcctatctggaaggagacagccttgagaacaggatctctgatggtkctgggaggcagtgaaaggcagcacygtgttgcacaccatrcctctaatgtgcagtggggcacgacacaaagagctagaagcaaattttgaatgagttgacactgctcaagcagaaagaccagctcatagctcagctgctgtgatagcatggcattgcatctgaggcaataaatcctctctgcagacatgactaatgaagttgggcagagcactaagcagatgtcgtgtgttgcttctatttcttggttgatggtggctggagtattatagacttgcacagcacacagaatttcaatccca

SEQ ID NO: 22194 - DNA, 600 bp, Chicken  19866894234343_4
acaacatttctactaagattcagcttttccttttccttatgtttgcttgtaactggcaccttctactgagataaaatattattcatccttcaggtaattcaaacrttacaaatcacatgttccaaactctgctgtgtatagacacagctctataccacataaagttcatgtgagctctggagagaaaaatcwtggattaggtattttgctgacaatgggatgatgcttctcctatctggaaggagacagccttgagaacaggatctctgatggtkctgggaggcagtgaaaggcagcacygtgttgcacaccatrcctctaatgtgcagtggggcacgacacaaagagctagaagcaaattttgaatgagttgacactgctcaagcagaaagaccagctcatagctcagctgctgtgatagcatggcattgcatctgaggcaataaatcctctctgcagacatgactaatgaagttgggcagagcactaagcagatgtcgtgtgttgcttctatttcttggttgatggtggctggagtattatagacttgcacagcacacagaatttcaatcccatttggttaacctctcagagcttgca

SEQ ID NO: 22195 - DNA, 600 bp, Chicken  19866894234343_5
agattcagcttttccttttccttatgtttgcttgtaactggcaccttctactgagataaaatattattcatccttcaggtaattcaaacrttacaaatcacatgttccaaactctgctgtgtatagacacagctctataccacataaagttcatgtgagctctggagagaaaaatcwtggattaggtattttgctgacaatgggatgatgcttctcctatctggaaggagacagccttgagaacaggatctctgatggtkctgggaggcagtgaaaggcagcacygtgttgcacaccatrcctctaatgtgcagtggggcacgacacaaagagctagaagcaaattttgaatgagttgacactgctcaagcagaaagaccagctcatagctcagctgctgtgatagcatggcattgcatctgaggcaataaatcctctctgcagacatgactaatgaagttgggcagagcactaagcagatgtcgtgtgttgcttctatttcttggttgatggtggctggagtattatagacttgcacagcacacagaatttcaatcccatttggttaacctctcagagcttgcaacacactgaccacag

SEQ ID NO: 22196 - DNA, 600 bp, Chicken  19866894234346_1
gcatgtagcttggattaattacttacacctgaaaatgctagaagtcatgccttgattccttttctgctggttctttctttctttaaacggtacaagttgttaaaatttgctgggcagatgataagtcctcgttcttctatgggaccaattcccatggaagtccagtgtctcctttctctactcttcactcactctccaaagcaaatgtggcaaaatcccacttttccagctacttcataggtgttccccacttcagacaggagaaaacaaatgtgttagtttattgcttcacttggtggrtatcctcttctgattttgatgggcattttattacagcatccagttggagacacttaagaataagtagtattgagagaagcagttgatgcaaaatccgtccttacagttttctcgatagccagaaaggagtggtgttttacctaccaagcattattaaaggaaactcagccatagcagccggtgtcagcaatatgcttcacaatcaaacaagaaatatggtagatactcaaagacatgagataactgccaaggcttattgcagagcaaagagcttttcaaaaaatgttttctctgaagagc

SEQ ID NO: 22197 - DNA, 600 bp, Chicken  19866894234346_2
attacagcatccagttggagacacttaagaataagtagtattgagagaagcagttgatgcaaaatccgtccttacagttttctcgatagccagaaaggagtggtgttttacctaccaagcattattaaaggaaactcagccatagcagccggtgtcagcaatatgcttcacaatcaaacaagaaatatggtagatactcaaagacatgagataactgccaaggcttattgcagagcaaagagcttttcaaaaaatgttttctctgaagagcatcagatttcactcacttctcacagcacrgacatgccttggcaatcatgattagcctcatttgggcctgtggaatccattattttatagctagtctcgaagctggcagtatgacaaacagtttattcctctttggagagaaatctgaccaaaagacacagagctttatttcagcattaccctacctaagacattttcccttcccgctcattgcttaaggcaagatacctaatgtttgccttgatggttctgtcaggctcttgacatcccaaatttatcttgttcctggatgagaacaaatctttaatgaacttcaggcttttgttcctt

SEQ ID NO: 22198 - DNA, 599 bp, Chicken  19866894234347_1
  misc_feature (1)..(91): n is any nucleotide
nnnnnnnnnnnnnnnnnnnnnnnnnnnnnnnnnnnnnnnnnnnnnnnnnnnnnnnnnnnnnnnnnnnnnnnnnnnnnnnnnnnnnnnnnnntaccttttgcaaagtatcagaagaattactggcctttattaagtaggcctaaattgaagaaaattgtagcaatgtgagaatattttataagtccaatcctggatatttttttgcatcccattgttgtggtcttgataagaacagtctttgtatttgggatgttggcgctaccattggtttctgtttgtctcctgtttctgctttccccsttacttttctttcagaggaataactctcgtctgttttcttctgacagactgcaatgcaattgttcacaaaggctgtaaggagagctttgcttcctgtgcaaaggtgaaaatgaaggttagtggtatcatctactttactgcattataagaaggaactgtaaacgattcrgtctgcacatatagaccgtctcagggtggtctgmagtgaggagcaaagacagcagcagacctggggaggaagtgatgcataaagatactgtgagggtatccaaaatctgaaactagatattcccagagcg

SEQ ID NO: 22199 - DNA, 600 bp, Chicken  19866894234347_2
aatattttataagtccaatcctggatatttttttgcatcccattgttgtggtcttgataagaacagtctttgtatttgggatgttggcgctaccattggtttctgtttgtctcctgtttctgctttccccsttacttttctttcagaggaataactctcgtctgttttcttctgacagactgcaatgcaattgttcacaaaggctgtaaggagagctttgcttcctgtgcaaaggtgaaaatgaaggttagtggtatcatctactttactgcattataagaaggaactgtaaacgattcrgtctgcacatatagaccgtctcagggtggtctgmagtgaggagcaaagacagcagcagacctggggaggaagtgatgcataaagatactgtgagggtatccaaaatctgaaactagatattcccagagcgaacaccatccttcctgtgcacrtgtaatatgatcagtgcrtatgattaaagaaagtttctcactggcaaaacttgaggtctacccaacacccataaatgcagcatcccttcatttttgaatactatatccttttatgcagcatcacatgcatatataatgcatgatgaaa

SEQ ID NO: 22200 - DNA, 600 bp, Chicken  19866894234347_3
aagtccaatcctggatatttttttgcatcccattgttgtggtcttgataagaacagtctttgtatttgggatgttggcgctaccattggtttctgtttgtctcctgtttctgctttccccsttacttttctttcagaggaataactctcgtctgttttcttctgacagactgcaatgcaattgttcacaaaggctgtaaggagagctttgcttcctgtgcaaaggtgaaaatgaaggttagtggtatcatctactttactgcattataagaaggaactgtaaacgattcrgtctgcacaratagaccgtctcagggtggtctgmagtgaggagcaaagacagcagcagacctggggaggaagtgatgcataaagatactgtgagggtatccaaaatctgaaactagatattcccagagcgaacaccatccttcctgtgcacrtgtaatatgatcagtgcrtatgattaaagaaagtttctcactggcaaaacttgaggtctacccaacacccataaatgcagcatcccttcatttttgaatactatatccttttatgcagcatcacatgcatatataatgcatgatgaaatgtattaaat

SEQ ID NO: 22201 - DNA, 600 bp, Chicken  19866894234347_4
gcatcccattgttgtggtcttgataagaacagtctttgtatttgggatgttggcgctaccattggtttctgtttgtctcctgtttctgctttccccsttacttttctttcagaggaataactctcgtctgttttcttctgacagactgcaatgcaattgttcacaaaggctgtaaggagagctttgcttcctgtgcaaaggtgaaaatgaaggttagtggtatcatctactttactgcattataagaaggaactgtaaacgattcrgtctgcacatatagaccgtctcagggtggtctgmagtgaggagcaaagacagcagcagacctggggaggaagtgatgcataaagatactgtgagggtatccaaaatctgaaactagatattcccagagcgaacaccatccttcctgtgcacrtgtaatatgatcagtgcrtatgattaaagaaagtttctcactggcaaaacttgaggtctacccaacacccataaatgcagcatcccttcatttttgaatactatatccttttatgcagcatcacatgcatatataatgcatgatgaaatgtattaaatatgtatgctgtttgtatgagggat

SEQ ID NO: 22202 - DNA, 600 bp, Chicken  19866894234347_5
aactctcgtctgttttcttctgacagactgcaatgcaattgttcacaaaggctgtaaggagagctttgcttcctgtgcaaaggtgaaaatgaaggttagtggtatcatctactttactgcattataagaaggaactgtaaacgattcrgtctgcacatatagaccgtctcagggtggtctgmagtgaggagcaaagacagcagcagacctggggaggaagtgatgcataaagatactgtgagggtatccaaaatctgaaactagatattcccagagcgaacaccatccttcctgtgcacrtgtaatatgatcagtgcrtatgattaaagaaagtttctcactggcaaaacttgaggtctacccaacacccataaatgcagcatcccttcatttttgaatactatatccttttatgcagcatcacatgcatatataatgcatgatgaaatgtattaaatatgtatgctgtttgtatgagggatgtgcagaatccgtgcttgttccaaatgtgaggagcctcttctgcagcatggctctccgagccagttactgcttgtatcatttttgagctaagaacacctcatctgttgttcccttcag

SEQ ID NO: 22203 - DNA, 600 bp, Chicken  19866894234347_6
tctgacagactgcaatgcaattgttcacaaaggctgtaaggagagctttgcttcctgtgcaaaggtgaaaatgaaggttagtggtatcatctactttactgcattataagaaggaactgtaaacgattcrgtctgcacatatagaccgtctcagggtggtctgmagtgaggagcaaagacagcagcagacctggggaggaagtgatgcataaagatactgtgagggtatccaaaatctgaaactagatattcccagagcgaacaccatccttcctgtgcacrtgtaatatgatcagtgcrtatgattaaagaaagtttctcactggcaaaacttgaggtctacccaacacccataaatgcagcatcccttcatttttgaatactatatccttttatgcagcatcacatgcatatataatgcatgatgaaatgtattaaatatgtatgctgtttgtatgagggatgtgcagaatccgtgcttgttccaaatgtgaggagcctcttctgcagcatggctctccgagccagttactgcttgtatcatttttgagctaagaacacctcatctgttgttcccttcagtagtcagccctttctctt

SEQ ID NO: 22204 - DNA, 600 bp, Chicken  19866894234350_1
gaatcaatggcagaagtacattttcctcctaagaagccatgatagacagaagtttatgcagagtgtgtacaccctgtttcttcatgactcagtgatgctggtcactggagtatagcaagaacatcagcaaaaggttgacagtatgttttcagaaagtcttgctgaaccttgttttccttgctaccatcttgtgacataagattttggggaatggaaggggtagctttcacgtgtagctgactttcagtgatgacaattcatccccttgcagtcatatggcaatttatgtgccttataacrctagccacatatgtgacatacacgaacagtgttgaaaccatataattcagtgtgtatctattgtatatgtaagtatatgcttatgtttgcatattgttagataaatatatgtcatagtcattatatacttaaaagtaaatatatacaaagagacactaaacttttagactggagtgaactgtggcaaaatggagaaaaggttagcagcaggcagatctttgatttgactttctggtgaaggaatcaaaagagcactcgatccctttgcctcttcttgccctgaactcactgcagtaagaa

SEQ ID NO: 22205 - DNA, 600 bp, Chicken  19866894234351_1
agtggagggaacagacttagaagcagaaccaatgcgtatcagtgctttatactagttgagctgtagctgtcttttcagttcagacacttctgtgcatgtatctaagttagaaagactgaacaaactgctctgtgagaaggaagcacagtgaaacaaagtcatatttctgcaaggggaatccctaacaaccactgattgagcaggttcttgacatttttggtttaataatgtgtctttcacatctatttgacagaggtgaattgttagaagacgagtagatgtattggaaaatgaagagcyaaggccctaatgaattcacccctgacagacygcaaaggcctaaagcatggtgtctataggacaagtttgttttggtaccatctatgatgttctcttgatttttaccagtgtaatgttccctgtggattaactgttctgttaattatttattattggacatataaatccttgttagtattgtagtgatagaactgctaacagaacttggaagtgaatgatgcaggttagagacttcaagctgaccttttaaaacatctgttgcacagctggcaaaataatatactgcagcgcacggtttag

SEQ ID NO: 22206 - DNA, 600 bp, Chicken  19866894234351_2
atgcgtatcagtgctttatactagttgagctgtagctgtcttttcagttcagacacttctgtgcatgtatctaagttagaaagactgaacaaactgctctgtgagaaggaagcacagtgaaacaaagtcatatttctgcaaggggaatccctaacaaccactgattgagcaggttcttgacatttttggtttaataatgtgtctttcacatctatttgacagaggtgaattgttagaagacgagtagatgtattggaaaatgaagagcyaaggccctaatgaattcacccctgacagacygcaaaggcctaaagcatggtgtctataggacaagtttgttttggtaccatctatgatgttctcttgatttttaccagtgtaatgttccctgtggattaactgttctgttaattatttattattggacatataaatccttgttagtattgtagtgatagaactgctaacagaacttggaagtgaatgatgcaggttagagacttcaagctgaccttttaaaacatctgttgcacagctggcaaaataatatactgcagcgcacggtttagcatagtggatgtacacagaaataatgaacat

SEQ ID NO: 22207 - DNA, 562 bp, Chicken  19866894234360_1
atttcacttcttactgaatgcatcttcatccaggttacagtcaatcagtcagtaaatccctaccctatgaaaacagtcagcaccagctgtagctcaattaaactcaatacttgagtagttcacaagagaaccaacaattgtatacacacattaatcaaataaatctattttaatctgtagatgttttccaaattttcagttaatagattggacaatgaaatgtgggctagatatgtctgatggaaatagcagataattaagccttctaacagcatttaaacttgtggtgttctaactgcyatgcacaatgaacaagggagggtaaaggaacctgaagaacacattcttattatacttaagtattgacaagcacttctgctaagtaatagaatcaattcagctgttcagaaaatgtttgatgtgttcctattttgaaaatatggaaaaataattctgcttttttttttttttttttttccccctgagattagggaatggaccagcatgcaaaaagatggtaatttctgtatgtagtcttaaatcagcttcaaaacgttgcaga

SEQ ID NO: 22208 - DNA, 600 bp, Chicken  19866894234364_1
gtaagaatgggacgtgccttcttgagatgtcctctgtcaaggaggagttggtgatgctgctcttctcccagttggagcagcccagggctggatgcatagctccttgcagcagttgcgctcagcagctctgtcctgaggctgatgaatgacgttatccaaacacgtcaaatcagagcactgaggcacaaaattgttaaaatggttctcccacatccagcatatgaggtcaaggcaaagcaaggagcagggctctggagccacatttcttctttgttgccattccttcagccttccttggcrtggtggcttgtacacagccttrttccgtccatggagttcrcttcgctctggmcttgctcagcccttaaaaacacagcatgagctgctcccagctgtctccaggygaactcgcatgaggtgtgcatgcgagagggaagcctcagggaattcctgagattgctgctgcaggaagagttgctctgaagtgatacttatctttaggatacaagcagcaggttgacggtaaaatgtcactaaatggaatggtatgtgtcccaagtgtgctggccaccacgggagccagacacatgggaagtgact

SEQ ID NO: 22209 - DNA, 600 bp, Chicken  19866894234364_2
tgagatgtcctctgtcaaggaggagttggtgatgctgctcttctcccagttggagcagcccagggctggatgcatagctccttgcagcagttgcgctcagcagctctgtcctgaggctgatgaatgacgttatccaaacacgtcaaatcagagcactgaggcacaaaattgttaaaatggttctcccacatccagcatatgaggtcaaggcaaagcaaggagcagggctctggagccacatttcttctttgttgccattccttcagccttccttggcrtggtggcttgtacacagccttrttccgtccatggagttcrcttcgctctggmcttgctcagcccttaaaaacacagcatgagctgctcccagctgtctccaggygaactcgcatgaggtgtgcatgcgagagggaagcctcagggaattcctgagattgctgctgcaggaagagttgctctgaagtgatacttatctttaggatacaagcagcaggttgacggtaaaatgtcactaaatggaatggtatgtgtcccaagtgtgctggccaccacgggagccagacacatgggaagtgactctcgtctttattccatccctgg

SEQ ID NO: 22210 - DNA, 600 bp, Chicken  19866894234364_3
ggaggagttggtgatgctgctcttctcccagttggagcagcccagggctggatgcatagctccttgcagcagttgcgctcagcagctctgtcctgaggctgatgaatgacgttatccaaacacgtcaaatcagagcactgaggcacaaaattgttaaaatggttctcccacatccagcatatgaggtcaaggcaaagcaaggagcagggctctggagccacatttcttctttgttgccattccttcagccttccttggcrtggtggcttgtacacagccttrttccgtccatggagttcrcttcgctctggmcttgctcagcccttaaaaacacagcatgagctgctcccagctgtctccaggygaactcgcatgaggtgtgcatgcgagagggaagcctcagggaattcctgagattgctgctgcaggaagagttgctctgaagtgatacttatctttaggatacaagcagcaggttgacggtaaaatgtcactaaatggaatggtatgtgtcccaagtgtgctggccaccacgggagccagacacatgggaagtgactctcgtctttattccatccctggaggtagttccagtttcct

SEQ ID NO: 22211 - DNA, 600 bp, Chicken  19866894234364_4
gatgctgctcttctcccagttggagcagcccagggctggatgcatagctccttgcagcagttgcgctcagcagctctgtcctgaggctgatgaatgacgttatccaaacacgtcaaatcagagcactgaggcacaaaattgttaaaatggttctcccacatccagcatatgaggtcaaggcaaagcaaggagcagggctctggagccacatttcttctttgttgccattccttcagccttccttggcrtggtggcttgtacacagccttrttccgtccatggagttcrcttcgctctggmcttgctcagcccttaaaaacacagcatgagctgctcccagctgtctccaggygaactcgcatgaggtgtgcatgcgagagggaagcctcagggaattcctgagattgctgctgcaggaagagttgctctgaagtgatacttatctttaggatacaagcagcaggttgacggtaaaatgtcactaaatggaatggtatgtgtcccaagtgtgctggccaccacgggagccagacacatgggaagtgactctcgtctttattccatccctggaggtagttccagtttcctttatttactaat

SEQ ID NO: 22212 - DNA, 600 bp, Chicken  19866894234364_5
tgcagcagttgcgctcagcagctctgtcctgaggctgatgaatgacgttatccaaacacgtcaaatcagagcactgaggcacaaaattgttaaaatggttctcccacatccagcatatgaggtcaaggcaaagcaaggagcagggctctggagccacatttcttctttgttgccattccttcagccttccttggcrtggtggcttgtacacagccttrttccgtccatggagttcrcttcgctctggmcttgctcagcccttaaaaacacagcatgagctgctcccagctgtctccaggygaactcgcatgaggtgtgcatgcgagagggaagcctcagggaattcctgagattgctgctgcaggaagagttgctctgaagtgatacttatctttaggatacaagcagcaggttgacggtaaaatgtcactaaatggaatggtatgtgtcccaagtgtgctggccaccacgggagccagacacatgggaagtgactctcgtctttattccatccctggaggtagttccagtttcctttatttactaatgttctccctatttcccttgacctcatttcctctggcttttcggaagcaacca

SEQ ID NO: 22213 - DNA, 600 bp, Chicken  19866894234366_1
gcagttccttttttgttcacagatttttcaactgatgctttcaattaaccgtgtgatttagaatcaaacttttactgcataacccttggtttcttgatactatattcagtatcccaagggttgagctgcacaagttctgagtgtctccagggtaattaaatgtaaagtgaatcacaatttgaacatttaaacatcctatataatattaaattgctttgaaaaattatgtcctaattcactattcagattctattctatgctacagtgtctcatcagtaagaatgaaactaatattttttyccctatctcagattcatttttattgataatgactgataacaatgacaatgattactctgatccagtagtagtatttttttttcctgaaaatgacatggaagagtgtgtttagtctttttctcagaggaacaatacatacttttatagcagacatcagcatcacctttcttgatcttcccagcagctagatgacgcactaaattttcctatagcaagtctattttattttatggatttgcagatccctaagatttttggactgaaccaaaaccttccgacaagatgaacttttctcttctt

SEQ ID NO: 22214 - DNA, 600 bp, Chicken  19866894234374_1
accttaagagaactcagtattctcctatcaccagacggactgatagaaaaattggaactgagataaaaataaaagaaattcagtattcctaacttgaagtaacagatttcttcagaagaaaggaaggaaacaaatataccaaacacagatttatttgaaaaatgtgtgattatatatgtgtcaaagttttcagctgtcactgcagcttattaggaaaaactattttaattattttattattttagagtcatacaagcttaagggtaatttgataataacatgttattctatagtttgagygtttttttgttttttgtttttttgcagtagttcatgttcgaatatttatgctacttatgtaaattcatgcagtaattataaagatgtctacattgccaggatacagcaataaaataaaagcttcagggctgcttctgtcttctgctttgaaaacaaaaataaaattgtggagaagatttagatttttccagatcgttactttttcccctggcacctcttatctttatcaacaattccaacccattaaaatgtctgatctttgccaagtgcagttttgtctcacacttcaagaagtatttc

SEQ ID NO: 22215 - DNA, 600 bp, Chicken  19866894234374_2
cagtagttcatgttcgaatatttatgctacttatgtaaattcatgcagtaattataaagatgtctacattgccaggatacagcaataaaataaaagcttcagggctgcttctgtcttctgctttgaaaacaaaaataaaattgtggagaagatttagatttttccagatcgttactttttcccctggcacctcttatctttatcaacaattccaacccattaaaatgtctgatctttgccaagtgcagttttgtctcacacttcaagaagtatttcttaacaatttactccttcaaaaawatcctcttctacatggcttagaaaaatatttgttattttttctcaaaaatkttgggcatttctaagaaaggacattacagtgctgcagagaagttaattctatcttataagtggtagtaaaactgttgatcatgacttcttgcatgtatttcatttctatttaaaaaaaaatgtgcttcattttatctatttggtgttaacgtgtaagaaactggctgcaaaacaacgtaatctttccctgcataaataccttcattttatgagatatttcagtactctcctctatatttaagtacagca

SEQ ID NO: 22216 - DNA, 600 bp, Chicken  19866894234374_3
ttataaagatgtctacattgccaggatacagcaataaaataaaagcttcagggctgcttctgtcttctgctttgaaaacaaaaataaaattgtggagaagatttagatttttccagatcgttactttttcccctggcacctcttatctttatcaacaattccaacccattaaaatgtctgatctttgccaagtgcagttttgtctcacacttcaagaagtatttcttaacaatttactccttcaaaaawatcctcttctacatggcttagaaaaatatttgttattttttctcaaaaatkttgggcatttctaagaaaggacattacagtgctgcagagaagttaattctatcttataagtggtagtaaaactgttgatcatgacttcttgcatgtatttcatttctatttaaaaaaaaatgtgcttcattttatctatttggtgttaacgtgtaagaaactggctgcaaaacaacgtaatctttccctgcataaataccttcattttatgagatatttcagtactctcctctatatttaagtacagcaaatatattaacagttcacaactgtgagtcatctttccatgccatagatgtg

SEQ ID NO: 22217 - DNA, 600 bp, Chicken  19866894234374_4
tgttgatcatgacttcttgcatgtatttcatttctatttaaaaaaaaatgtgcttcattttatctatttggtgttaacgtgtaagaaactggctgcaaaacaacgtaatctttccctgcataaataccttcattttatgagatatttcagtactctcctctatatttaagtacagcaaatatattaacagttcacaactgtgagtcatctttccatgccatagatgtgttatggcagtaatccacttctatgcctttttagctttgaaactattttacacgtttcctaataactgcaaamtcactagataagcttttggaaacctccagaaagtgcataatgagtaaaagtttgtactgcaggtaattaaaagtactcccattattctgaccaatggatgttataataattacatgttgtcttgctggagaaaatagcctgggatttctgtaccaaaaagacttttactatcaaaattgtctaatattttcacctccgaaaatattttctctagttttccaagactatagcgaatctcctgttaatcttgatttttcaaatatgagaccaggggagatggaagcagtattctgtgtaaca

SEQ ID NO: 22218 - DNA, 599 bp, Chicken  19866894234375_1
  misc_feature (1)..(199): n is any nucleotide
nnnnnnnnnnnnnnnnnnnnnnnnnnnnnnnnnnnnnnnnnnnnnnnnnnnnnnnnnnnnnnnnnnnnnnnnnnnnnnnnnnnnnnnnnnnnnnnnnnnnnnnnnnnnnnnnnnnnnnnnnnnnnnnnnnnnnnnnnnnnnnnnnnnnnnnnnnnnnnnnnnnnnnnnnnnnnnnnnnnnnnnnnnnnnnnnnnnnnnnttcctaccatcaaaggtaggaggtcaggtgaagcagccagccttcctctgccttgaaatggtgttgtctaccactaggctgagcctttaaagtgtgacttytatgatattctttcctccgagttcttcctggcttgctgaagacttcctgagagtgaatattttgccaaagttatccaagttctggaggtgaaggaaaaggacgygtgtccctgacctagtgaagctcagaagtggttctgaccgttcaggtcccctcacactctctccttcttccagcacttcatggccgtggggatgtggtatcactgcttgccctttcttcatggtgctgcaatagcctgtgatcagtggcartgttctgtctttgaaaggctcttctttgcatgaatccttctcac

SEQ ID NO: 22219 - DNA, 599 bp, Chicken  19866894234375_2
  misc_feature (1)..(95): n is any nucleotide
nnnnnnnnnnnnnnnnnnnnnnnnnnnnnnnnnnnnnnnnnnnnnnnnnnnnnnnnnnnnnnnnnnnnnnnnnnnnnnnnnnnnnnnnnnnnnnnttcctaccatcaaaggtaggaggtcaggtgaagcagccagccttcctctgccttgaaatggtgttgtctaccactaggctgagcctttaaagtgtgacttytatgatattctttcctccgagttcttcctggcttgctgaagacttcctgagagtgaatattttgccaaagttatccaagttctggaggtgaaggaaaaggacgygtgtccctgacctagtgaagctcagaagtggttctgaccgttcaggtcccctcacactctctccttcttccagcacttcatggccgtggggatgtggtatcactgcttgccctttcttcatggtgctgcaatagcctgtgatcagtggcartgttctgtctttgaaaggctcttctttgcatgaatccttctcactgtctttggcaaaagctttgtggtagaacgtcaagtttggagctttattaactccctgttgtttttataggggttgtctgtatggtagacccagtcagcagagc

SEQ ID NO: 22220 - DNA, 600 bp, Chicken  19866894234375_3
aatggtgttgtctaccactaggctgagcctttaaagtgtgacttytatgatattctttcctccgagttcttcctggcttgctgaagacttcctgagagtgaatattttgccaaagttatccaagttctggaggtgaaggaaaaggacgygtgtccctgacctagtgaagctcagaagtggttctgaccgttcaggtcccctcacactctctccttcttccagcacttcatggccgtggggatgtggtatcactgcttgccctttcttcatggtgctgcaatagcctgtgatcagtggcartgttctgtctttgaaaggctcttctttgcatgaatccttctcactgtctttggcaaaagctttgtggtagaacgtcaagtttggagctttattaactccctgttgtttttataggggttgtctgtatggtagacccagtcagcagagctcttgctgctggtagcccagctggacaagggagagtaggagcaatcagcatctgttctccttctcggccmcttctccccaccaggtgggaggatgggcaggtctccttgggayaccccaaagctgtttgtgtcaggagagggtaagtgtgag

SEQ ID NO: 22221 - DNA, 432 bp, Chicken  19866894234375_4
ccagcacttcatggccgtggggatgtggtatcactgcttgccctttcttcatggtgctgcaatagcctgtgatcagtggcartgttctgtctttgaaaggctcttctttgcatgaatccttctcactgtctttggcaaaagctttgtggtagaacgtcaagtttggagctttattaactccctgttgtttttataggggttgtctgtatggtagacccagtcagcagagctcttgctgctggtagcccagctggacaagggagagtaggagcaatcagcatctgttctccttctcggccmcttctccccaccaggtgggaggatgggcaggtctccttgggayaccccaaagctgtttgtgtcaggagagggtaagtgtgagctggtcagctcttgagggcaggatatgaacagaggctgatttgtcacctc

SEQ ID NO: 22222 - DNA, 389 bp, Chicken  19866894234375_5
tttcttcatggtgctgcaatagcctgtgatcagtggcartgttctgtctttgaaaggctcttctttgcatgaatccttctcactgtctttggcaaaagctttgtggtagaacgtcaagtttggagctttattaactccctgttgtttttataggggttgtctgtatggtagacccagtcagcagagctcttgctgctggtagcccagctggacaagggagagtaggagcaatcagcatctgttctccttctcggccmcttctccccaccaggtgggaggatgggcaggtctccttgggayaccccaaagctgtttgtgtcaggagagggtaagtgtgagctggtcagctcttgagggcaggatatgaacagaggctgatttgtcacctc

SEQ ID NO: 22223 - DNA, 600 bp, Chicken  19866894234376_1
gatgagcaatcaaaaaagttagctggtactgaggcttgattttagctaatctttaatgtttttgccaaagcctttccagggaatattttgaaggaagtttaccacacatacatacaaaatctgaagtgagtaaactgtgaaatatctgtattatacagagataaagaacttcccagcgatcaggccacagaactaagctcaaaatcaggatattacatgaacacatcgactagcctggcttctttaaggcgcctctcttcaaagagttacaaacagaatttctagaaattaaaatatctrtatgttgctgcactgagatccagcatcrcagtcagatgctctgaggcctaaattcttatttgaagtcaaaagccattctcctaatgacagctgaatcgatgcctttgggtattctaggaaacctcctgaactgaagcccagggacagcaaagaaactggaactcgtgccaagccactagggaagatgccaggcatgcacaaagacttgaaacaccaggactccgcaatttgaggcagacagcactttcttctcattagaggaagacatgataggaaaaacaattatttgggaactgccaa

SEQ ID NO: 22224 - DNA, 600 bp, Chicken  19866894234376_2
ctgaggcttgattttagctaatctttaatgtttttgccaaagcctttccagggaatattttgaaggaagtttaccacacatacatacaaaatctgaagtgagtaaactgtgaaatatctgtattatacagagataaagaacttcccagcgatcaggccacagaactaagctcaaaatcaggatattacatgaacacatcgactagcctggcttctttaaggcgcctctcttcaaagagttacaaacagaatttctagaaattaaaatatctrtatgttgctgcactgagatccagcatcrcagtcagatgctctgaggcctaaattcttatttgaagtcaaaagccattctcctaatgacagctgaatcgatgcctttgggtattctaggaaacctcctgaactgaagcccagggacagcaaagaaactggaactcgtgccaagccactagggaagatgccaggcatgcacaaagacttgaaacaccaggactccgcaatttgaggcagacagcactttcttctcattagaggaagacatgataggaaaaacaattatttgggaactgccaacccacccctcacccaccaccaaaaaccc

SEQ ID NO: 22225 - DNA, 600 bp, Chicken  19866894234378_1
cctattatctgttatgcaagaaatgaagactctttcaggtgctttttgcactgcagacctctggaaacctcacatctttcacaaagaacagtgaagactggggtggaaagaagaagggtgagctaccaaatttggaccttagactgacattgttactacaactgtgtcttcaaatagcgagacagaaaaacaatagaatcaaatagttgattgtttctgaaagatcacccagtggatatgagggaaattcagtgatacttgagaagcaaattgttagaacagacattgtgaattaaaaakaaataagggggagtagaggtttagtgaaccgtaggagtacagtcaaacccagacggaatttataaagaaacagggctactctatttcagcctgcaaagcaacattaataataataattggcaacagaaatgtaatgatgttgcttttttgaagtttctgtaatcttttgtgaatctctcactcagaatcatttcttaattttttcacacwctaataaattctacagtcatttttttacaagaaatatctaaaagtgtcaggattggtgcctgagtttcgtgctggcttcctatatcataa

SEQ ID NO: 22226 - DNA, 600 bp, Chicken  19866894234378_2
ttgtttctgaaagatcacccagtggatatgagggaaattcagtgatacttgagaagcaaattgttagaacagacattgtgaattaaaaakaaataagggggagtagaggtttagtgaaccgtaggagtacagtcaaacccagacggaatttataaagaaacagggctactctatttcagcctgcaaagcaacattaataataataattggcaacagaaatgtaatgatgttgcttttttgaagtttctgtaatcttttgtgaatctctcactcagaatcatttcttaattttttcacacwctaataaattctacagtcatttttttacaagaaatatctaaaagtgtcaggattggtgcctgagtttcgtgctggcttcctatatcataaatactgtctatttgataccatatatagcagacrtactgatctaagattccttgagctgccaaagcctggcttggctccaggggacgtccgttgactgcaaactccattatacagcccacaaaatcgtggctttccacctgtcctctcctttgaaggatgggctcaacagacctgataccaccaacggtaagtcgatttggttgtacatca

SEQ ID NO: 22227 - DNA, 548 bp, Chicken  19866894234378_3
ggagtacagtcaaacccagacggaatttataaagaaacagggctactctatttcagcctgcaaagcaacattaataataataattggcaacagaaatgtaatgatgttgcttttttgaagtttctgtaatcttttgtgaatctctcactcagaatcatttcttaattttttcacacwctaataaattctacagtcatttttttacaagaaatatctaaaagtgtcaggattggtgcctgagtttcgtgctggcttcctatatcataaatactgtctatttgataccatatatagcagacrtactgatctaagattccttgagctgccaaagcctggcttggctccaggggacgtccgttgactgcaaactccattatacagcccacaaaatcgtggctttccacctgtcctctcctttgaaggatgggctcaacagacctgataccaccaacggtaagtcgatttggttgtacatcaagggtcctataagaaagaaaaaaaaaggtttaatgacatcagacataaaatagcaggtacaacaaagggga

SEQ ID NO: 22228 - DNA, 600 bp, Chicken  19866894234379_1
atcacatggaaaatgtgataaatggaattctatttaatccaatatacttgatgttatatcaagttcctttgacacctattagcagaagaccagggcacagtccagagctgcaacttcactgaaagtccttcatggttctttactatagttctttgttaatatataaaataatttgtttttcaggactgaccattgtttaagccagaaaatattcccctgagttcttttcagtcataaaatgtttcaacattttcactacctgcatgtgtttcagccatcctttgactctgagactcaagyagttgcagcagctactggtgcaytgaaagctgccagggaaggtgagagaaggaataaggcctcagcccagacttgacttaaaaaataaatccaagagtgagaaagaacctcagattcttttttttggtcagttctcttcctctgaggttaataaataaaagaaggatcatgaaagaagttatgtattttccagtttgactttattttgtgttactcagagaggcagaagcatatattctgacaggaggcattaagctcagtgaacattttccagttcaaaagcttcacccccttaaagca

SEQ ID NO: 22229 - DNA, 600 bp, Chicken  19866894234379_2
ggaattctatttaatccaatatacttgatgttatatcaagttcctttgacacctattagcagaagaccagggcacagtccagagctgcaacttcactgaaagtccttcatggttctttactatagttctttgttaatatataaaataatttgtttttcaggactgaccattgtttaagccagaaaatattcccctgagttcttttcagtcataaaatgtttcaacattttcactacctgcatgtgtttcagccatcctttgactctgagactcaagyagttgcagcagctactggtgcaytgaaagctgccagggaaggtgagagaaggaataaggcctcagcccagacttgacttaaaaaataaatccaagagtgagaaagaacctcagattcttttttttggtcagttctcttcctctgaggttaataaataaaagaaggatcatgaaagaagttatgtattttccagtttgactttattttgtgttactcagagaggcagaagcatatattctgacaggaggcattaagctcagtgaacattttccagttcaaaagcttcacccccttaaagcaaaatacttcaaaaagaggagaga

SEQ ID NO: 22230 - DNA, 600 bp, Chicken  19866894234382_1
tcttgagcacatcccaatgaaatgcagtgaaatacaacccaaccacttggtatgagggtgctgtgctgtggaacctctggttaaccctacccagcaaatcctttgtcaaaaagtcacaccccagccaagggttggagatgagaacatggagatgagatggagatgagagctgtgccatgcaaatgtaagaaccagcagagaaacgttctttgttgatggcaatgctgagataatggcaaacattaatatctaatgaggattaatgaggggaaaagggaatgaggtgtgggagtgcttatwtgccagccttctgactgccttcagtgaagaaggaaactacaggaaggaggaaaatgctgcaaattcagatgccaaagaatagctcagaagtacatcagccacagtgcccaaagtacatcttgggctcctaagaagccatcagcatgttagaagggttgagaggaggaaagcaaacgcaaagccaatgtctgaagggaagctgtgggatgagaagaactactttttagaactctaacttctatcttcgttaaatcagtgcaacggttgccaagagggaaaatatctctacctttcgtttgt

SEQ ID NO: 22231 - DNA, 600 bp, Chicken  19866894234385_1
ttatgattctgcatagtacgtctctggcatcacattttataatgcagtaatgttttccctcaaataaagcagagcatgaagaatactaagggttagaagtccacctacctgctgacattgccatagtagtcccagccaccatccccatggtcacaccatttcctcttggtggtggaataggagcagggtacatggttgctggcatgccattaggctgcacaactgtggtatggtgaattacgtggggtggtgctgcatataaaggctgtgtgtagtaagtgccttgctgttgagaaaaartaaagcaattactgtgtaccttttggggaaaataaaaaacayrtgtcttctttcactaacaaacttagtaacatttaacccttcattttaaggcatttagtataacattcartggcagaggcaaaaatagctctcccatgctgacggcaccttcaacaataaggtctctttgtttcatatattttcatacattaacacatgaaagaacatctttcacaactttttattcaactgtttttggttaaagaacccaaggtttctgacaaatccaatatactaagcagtctggataagccccgc

SEQ ID NO: 22232 - DNA, 600 bp, Chicken  19866894234385_2
aatgcagtaatgttttccctcaaataaagcagagcatgaagaatactaagggttagaagtccacctacctgctgacattgccatagtagtcccagccaccatccccatggtcacaccatttcctcttggtggtggaataggagcagggtacatggttgctggcatgccattaggctgcacaactgtggtatggtgaattacgtggggtggtgctgcatataaaggctgtgtgtagtaagtgccttgctgttgagaaaaartaaagcaattactgtgtaccttttggggaaaataaaaaarayrtgtcttctttcactaacaaacttagtaacatttaacccttcattttaaggcatttagtataacattcartggcagaggcaaaaatagctctcccatgctgacggcaccttcaacaataaggtctctttgtttcatatattttcatacattaacacatgaaagaacatctttcacaactttttattcaactgtttttggttaaagaacccaaggtttctgacaaatccaatatactaagcagtctggataagccccgctacatgctcattaatccccttctactaacacgtatgcacc

SEQ ID NO: 22233 - DNA, 600 bp, Chicken  19866894234385_3
tgcagtaatgttttccctcaaataaagcagagcatgaagaatactaagggttagaagtccacctacctgctgacattgccatagtagtcccagccaccatccccatggtcacaccatttcctcttggtggtggaataggagcagggtacatggttgctggcatgccattaggctgcacaactgtggtatggtgaattacgtggggtggtgctgcatataaaggctgtgtgtagtaagtgccttgctgttgagaaaaartaaagcaattactgtgtaccttttggggaaaataaaaaacayrtgtcttctttcactaacaaacttagtaacatttaacccttcattttaaggcatttagtataacattcartggcagaggcaaaaatagctctcccatgctgacggcaccttcaacaataaggtctctttgtttcatatattttcatacattaacacatgaaagaacatctttcacaactttttattcaactgtttttggttaaagaacccaaggtttctgacaaatccaatatactaagcagtctggataagccccgctacatgctcattaatccccttctactaacacgtatgcaccat

SEQ ID NO: 22234 - DNA, 600 bp, Chicken  19866894234385_4
gcagtaatgttttccctcaaataaagcagagcatgaagaatactaagggttagaagtccacctacctgctgacattgccatagtagtcccagccaccatccccatggtcacaccatttcctcttggtggtggaataggagcagggtacatggttgctggcatgccattaggctgcacaactgtggtatggtgaattacgtggggtggtgctgcatataaaggctgtgtgtagtaagtgccttgctgttgagaaaaartaaagcaattactgtgtaccttttggggaaaataaaaaacayrtgtcttctttcactaacaaacttagtaacatttaacccttcattttaaggcatttagtataacattcartggcagaggcaaaaatagctctcccatgctgacggcaccttcaacaataaggtctctttgtttcatatattttcatacattaacacatgaaagaacatctttcacaactttttattcaactgtttttggttaaagaacccaaggtttctgacaaatccaatatactaagcagtctggataagccccgctacatgctcattaatccccttctactaacacgtatgcaccatg

SEQ ID NO: 22235 - DNA, 600 bp, Chicken  19866894234385_5
tgacattgccatagtagtcccagccaccatccccatggtcacaccatttcctcttggtggtggaataggagcagggtacatggttgctggcatgccattaggctgcacaactgtggtatggtgaattacgtggggtggtgctgcatataaaggctgtgtgtagtaagtgccttgctgttgagaaaaartaaagcaattactgtgtaccttttggggaaaataaaaaacayrtgtcttctttcactaacaaacttagtaacatttaacccttcattttaaggcatttagtataacattcartggcagaggcaaaaatagctctcccatgctgacggcaccttcaacaataaggtctctttgtttcatatattttcatacattaacacatgaaagaacatctttcacaactttttattcaactgtttttggttaaagaacccaaggtttctgacaaatccaatatactaagcagtctggataagccccgctacatgctcattaatccccttctactaacacgtatgcaccatgcaaatttcctctacagaagcacctacttttcccccaagtattgtgtttatccaagtgtcttcattctgt

SEQ ID NO: 22236 - DNA, 600 bp, Chicken  19866894234389_1
atggttggccttttgcattgtgtgtgggaaagcataaggaggaatcctgtggaagagacaatttttattgtaaaaccagaataactgcaggaaacatctgaagaaaaaggactgaatgaggaaatatgttttattaaacttgtaactgctgtacacatttttgggaactgaaaagtgttcagaacacacatttaatggcctttttgcattttactttcttgattattattattatttttttaaatgttaatgcagattgattggggcgcttgtcttggcatagggcatgcagcagtctayaaagggaagaggaaggagaagtgggccttaaatctgattcttacmattccttaacctggagttcttttcctccttgttcctcaggttttgggaagcaagtatttgtgtagttctggtctccttattgagaaggagactgaggtttccttgctcatcatctcatgttaaagatggattgttccgattcatccagcagggcacatgaccttccatttagctatttgagctgtaacgtacaacttgccttgctacctctatttttttttttactcatcccacttgttctttgtaaaacatgac

SEQ ID NO: 22237 - DNA, 600 bp, Chicken  19866894234389_2
cctgtggaagagacaatttttattgtaaaaccagaataactgcaggaaacatctgaagaaaaaggactgaatgaggaaatatgttttattaaacttgtaactgctgtacacatttttgggaactgaaaagtgttcagaacacacatttaatggcctttttgcattttactttcttgattattattattatttttttaaatgttaatgcagattgattggggcgcttgtcttggcatagggcatgcagcagtctayaaagggaagaggaaggagaagtgggccttaaatctgattcttacmattccttaacctggagttcttttcctccttgttcctcaggttttgggaagcaagtatttgtgtagttctggtctccttattgagaaggagactgaggtttccttgctcatcatctcatgttaaagatggattgttccgattcatccagcagggcacatgaccttccatttagctatttgagctgtaacgtacaacttgccttgctacctctatttttttttttactcatcccacttgttctttgtaaaacatgacagtcatgcattgcgtggtgctggtttctctgagagagatgaggtg

SEQ ID NO: 22238 - DNA, 600 bp, Chicken  19866894234393_1
catgacggagatgaaagaagtgttcctccaactgttttccacagggttcttctgagaggaacctcaaaggacttctggtgaatgttctgaaccagatctgcaaccacacttcctctccagccagcaccactcactttttatgaactgttaaccattcatacgacaattgtcaaaggagtggtcagtgactcactttggtcctacaccagtttgacttaccactgcaagaggttgtgaacctcagtcaaaactagaaaatagacaactgagagcctcttccctccttactcatccttgtargctgtggaaagggctacagaaacacaggacaccgccagactgtgaacaggtatagtgaatacagatccctacaacgctgaagatatctatggcacatttacttgaatgcattcagatgtactgaacctggggcttggtaggtaaagtaccttttgctctgtgttacatacaatctctctctcatacaaatagtttcacatgtgctttgaatactcattttgattattcaacttacagcaatgccgctttaagaccacacgcattcatgaaatactctggttactttttaagaatgaagcc

SEQ ID NO: 22239 - DNA, 600 bp, Chicken  19866894234407_1
cgtgtctgttcaggctgatgtgacatctgaaaatgcactttgacgcctttgaaaagaagttgccagtgtagttcaaagtattatcagtttccagctcacggacccttgccaaaatgagaaatttgtgctgagacttacagagttgtgccaagcaattgtactgaaaggaacacacaagctgcactggttaaataacaaaacatagtgagtttgggagcttatgttagctggagtcagagctgggctagagctgctctgcattcccagctgtgagaggggcacgaagctgcagggtagacygtgggttgtattccccagccagttggaacagtgcgttttacagtaatggttagctagaacaatgaccagtatggaaatgtgctgaaatgctgaatttttggatagccatttgcaggatgctttgtcatgaagtctccagaaatctctgggtggctctagtagctcacagccaaaacttgctgctgattccttcttaccaacctcacgctgctgcaggcaactgtcctggcacagccctggtgccggggcatggagagaggctgctgcctgcctgggtgccgatagctgagtgtgccggcc

SEQ ID NO: 22240 - DNA, 599 bp, Chicken  19866894234453_1
  misc_feature (1)..(174): n is any nucleotide
nnnnnnnnnnnnnnnnnnnnnnnnnnnnnnnnnnnnnnnnnnnnnnnnnnnnnnnnnnnnnnnnnnnnnnnnnnnnnnnnnnnnnnnnnnnnnnnnnnnnnnnnnnnnnnnnnnnnnnnnnnnnnnnnnnnnnnnnnnnnnnnnnnnnnnnnnnnnnnnnnnnnnnnnnnnnnntttaaaagtaaagatctggaagaagcttaaaagagtctacaccaactggttggaatctggcatcctttgaggaagtacaaattgaaacaacatttttagaagaaaaaattcaaatcattttttttwaaatatggtactgaagcaaacaaaatcaataatgtagcaatgccttgaccktgggaatagctgtattttgtcactcagagtatacagaactttcagaaaccttcactaacaattgtataaagtttgtataaaacagttaccaagaacctgagttcacagtgcatcagctcgcactacctgtagtacatctgctcccaaacaaaaagtttccagtttacagtgctgttatttactctacaagaatcttcagagagttacaagagagaagaggacagagtagtactccatgaccacccagg

SEQ ID NO: 22241 - DNA, 599 bp, Chicken  19866894234453_2
  misc_feature (1)..(123): n is any nucleotide
nnnnnnnnnnnnnnnnnnnnnnnnnnnnnnnnnnnnnnnnnnnnnnnnnnnnnnnnnnnnnnnnnnnnnnnnnnnnnnnnnnnnnnnnnnnnnnnnnnnnnnnnnnnnnnnnnnnnnnnnnnntttaaaagtaaagatctggaagaagcttaaaagagtctacaccaactggttggaatctggcatcctttgaggaagtacaaattgaaacaacatttttagaagaaaaaattcaaatcattttttttwaaatatggtactgaagcaaacaaaatcaataatgtagcaatgccttgaccktgggaatagctgtattttgtcactcagagtatacagaactttcagaaaccttcactaacaattgtataaagtttgtataaaacagttaccaagaacctgagttcacagtgcatcagctcgcactacctgtagtacatctgctcccaaacaaaaagtttccagtttacagtgctgttatttactctacaagaatcttcagagagttacaagagagaagaggacagagtagtactccatgaccacccagggcaaaaagataacaacacaagtgcaaaaacacaagcattttcagcagcaga

SEQ ID NO: 22242 - DNA, 599 bp, Chicken  19866894234456_1
  misc_feature (1)..(96): n is any nucleotide
nnnnnnnnnnnnnnnnnnnnnnnnnnnnnnnnnnnnnnnnnnnnnnnnnnnnnnnnnnnnnnnnnnnnnnnnnnnnnnnnnnnnnnnnnnnnnnnntcttggagtgaaatgatttaattagaaagtaatcaagaagtgtctactgttaattgaaggaattataaaagatctacatttttaatatatttcttggtaataaaattaaagtctatgataattattttttaaactgataagaaaagtttgatactaaaaatgagattttgtgtataataattcccatagctgcatttgccttckgcaggtataagccaaaataaggatactttggacatattccattatctgtcattttgcatcttatcatacttcaagaacatccattcatgctcacagttcttacaagtatatcagtaattatcattatttccattttctcaactaataaagtgaagttaggcacatcaggatagatcatggctatttgtacgttatattgaaatatttttgtctaagctgttcgtgatagaaaactggaattataattaagctgttcttaaaagaaatgaatttaattttcttttcatgaacattttaac

SEQ ID NO: 22243 - DNA, 482 bp, Chicken  19866894234461_1
ttacaatgctggcaagaaagcaattctcaaaaaatggggtagtcttctctcaggaattgatctgtgattggcttaatggatcgtacgggccagactgtgacatgcccacgcacagcagcgctgctgcagaggcgcatgagaagcggtcccttaggagactgctgccggcagcccagcgctcctacccgcagggtaacatctccagccgagcaagagtaacgcagggccgtgctcagtgctccgcgtacacagagcttacaggaagagcgggcaacgccgccccgaaggcagtgcaagccraatgtgtccctgtgagggcttggtgagggaaatttctaattaatcccaactgaagtgtttggaagtaccaccagcaagatgtatcagtcagcacgcagaaggttaatggtctcgctgtgcattttaatattagtgattggactttacgatgtagctcctatacagaactgcagttcacggcg

SEQ ID NO: 22244 - DNA, 600 bp, Chicken  19866894234467_1
ctcttcaggttacttggcagtctcaaattgcatatagtgccattacatagaacactgctgacttactgcagtcatttgccacagtacaaatgctgccatttgtctgcattttcaaacaagtaagcttgaaaggagggggagattttagttactctttcacagccaggagttcaggagcttcgttctgaagtatttgattgtcttgaaatggatttaagattcttactctgttcttcccattatatagggtgaactggatccattatcaagtattaaatcattgacttacctgaggtatgwaatcttgaaaagaaaagcamttgtttgtagtttattgtaatrtatttcatattaagtaattctttataacctttatttgccttgtagcattttaaggaatccagtaacaaataagaagcattacagattatatgttatctacaaagttccccaagtcagagtgctggattttcagaaagtgaaactcaaagtaagtctgtcaccttctgattgaacaccagatggaggccttttctcctgttatctcctgaaactgtagtgaaaacgataaggtttttgccccagttgtaaattgcagtg

SEQ ID NO: 22245 - DNA, 600 bp, Chicken  19866894234467_2
tctcaaattgcatatagtgccattacatagaacactgctgacttactgcagtcatttgccacagtacaaatgctgccatttgtctgcattttcaaacaagtaagcttgaaaggagggggagattttagttactctttcacagccaggagttcaggagcttcgttctgaagtatttgattgtcttgaaatggatttaagattcttactctgttcttcccattatatagggtgaactggatccattatcaagtattaaatcattgacttacctgaggtatgwaatcttgaaaagaaaagcamttgtttgtagtttattgtaatrtatttcatattaagtaattctttataacctttatttgccttgtagcattttaaggaatccagtaacaaataagaagcattacagattatatgttatctacaaagttccccaagtcagagtgctggattttcagaaagtgaaactcaaagtaagtctgtcaccttctgattgaacaccagatggaggccttttctcctgttatctcctgaaactgtagtgaaaacgataaggtttttgccccagttgtaaattgcagtgaaactgtgtatcctaygagg

SEQ ID NO: 22246 - DNA, 600 bp, Chicken  19866894234467_3
ttacatagaacactgctgacttactgcagtcatttgccacagtacaaatgctgccatttgtctgcattttcaaacaagtaagcttgaaaggagggggagattttagttactctttcacagccaggagttcaggagcttcgttctgaagtatttgattgtcttgaaatggatttaagattcttactctgttcttcccattatatagggtgaactggatccattatcaagtattaaatcattgacttacctgaggtatgwaatcttgaaaagaaaagcamttgtttgtagtttattgtaatrtatttcatattaagtaattctttataacctttatttgccttgtagcattttaaggaatccagtaacaaataagaagcattacagattatatgttatctacaaagttccccaagtcagagtgctggattttcagaaagtgaaactcaaagtaagtctgtcaccttctgattgaacaccagatggaggccttttctcctgttatctcctgaaactgtagtgaaaacgataaggtttttgccccagttgtaaattgcagtgaaactgtgtatcctaygaggctttaaaactcatgcttctctt

SEQ ID NO: 22247 - DNA, 535 bp, Chicken  19866894234467_4
gcamttgtttgtagtttattgtaatrtatttcatattaagtaattctttataacctttatttgccttgtagcattttaaggaatccagtaacaaataagaagcattacagattatatgttatctacaaagttccccaagtcagagtgctggattttcagaaagtgaaactcaaagtaagtctgtcaccttctgattgaacaccagatggaggccttttctcctgttatctcctgaaactgtagtgaaaacgataaggtttttgccccagttgtaaattgcagtgaaactgtgtatcctaygaggctttaaaactcatgcttctctttgatggtttcacactgttaaggatgtaatctacttcatgatttttaatgatgttttactgcccgttgtttgtttagtctgattcttttctggctggccagtgttactggtggtaagacaaacccagaggaaggaaggagatcacagcagagccctctgctttccctggtagaagtgtggggtcattccttttaagagcactaaagtgat

SEQ ID NO: 22248 - DNA, 600 bp, Chicken  19866894234469_1
ttccagttctggagcccccaacacaagaaggacatggagttattggagaaggtccataggagcttctggtttttcaagaatgttaattattcactataatttatcacaattctctgataaaatttggatatgaacaaagacaaggtccagaacagagatctgtctataggaaagcatcctgtttctaaggtcgtgaatttatctttgtgacaagtggaattaatagcttagtcaactaaaaacttgacttcaatggcttaagttgcagcaagttgtctggatcatttctgtgatcagtgrgaagatgcagccttctgcagcaggtgtttcatcccatcttgagaaaagtatttaagatagggaggagtgtatgtttcttttttattgactgtggatagaacctgcatagtagatctttggccttatagtagatcttttggaaagctcagtttgttcatatcaatggtaaggagaactccatctaaagacaataaattttcactatgaatcatccttaaaaggcatttatttctggagaagaaaacatgttaggtagaagaggcagccatggttatagtcttgtttaattcatgaaaaata

SEQ ID NO: 22249 - DNA, 600 bp, Chicken  19866894234470_1
caatataagcctgaaaataacagattcctgacatgtattttttccagtgatgataagatgtggtacctacatgacaacccagagtcaaaacaacagtgaatgcagaggcaacatttgaattccccattgaagaaaaagttcaagatacagcccttagtgggtaaagagatgtgcactgtcttttgggataagaatcatacaatcatagaacgatttgagttggaagggatctttaagatcagttagttccatcttctctgctataggcagggacacttcccactagaccagattgctcaragccccatctagcctggccttgaacatctgcagggtggcagcatccacaacctctctgggcaacttgttccagtgtctcatcactttcacagtaaagaacttcttcctaatatctagtctaaatctaccgttttacagttctaaaccatttctccccatcctgtcactacatgcccttataaaagctcctccctagctttcctgtaggccgccttcaggaactggaagtctgctataagataccccagagctttctcttctccaggctaaagatctccagctctctcatcctgtcctagt

SEQ ID NO: 22250 - DNA, 600 bp, Chicken  19866894234513_1
tatttctccgcgactctgactttatgccttaaaatatcgcctgtcatccccccacagcttgcagaaaggtggaagaaaattgaagttggcacaaaaaacctcagagtgtgtgctctggctcgttcgggaaggcgtgatgccacaaagatacctgctccagtcaggtctgtgcggctggcggagcccaagctgtgcacatccagtggtgacacccagggaggtgtggggaccaaccatggccccatctcagctcaccccgctgcctgcagccgtcctgcggagctcggagaggctatttasacacttaaagctaatcacatgcataaatcttcgagagatcaaggctgtgggggaaaccaggagaaggcagtgaggaggcacatgtcaaacagggctgtggtcgagagctctccgagacttaaacataacatttgagaaaatgagtccatttgtttcagaggcatcctgaacattggcatgtagtaattccgtaatggatccatttaaccagccctataactgaaatatccttcgcaaatatttcctttaatagcacttaaagagggaatgcaagcagagaaattttaaagcacagctgca

SEQ ID NO: 22251 - DNA, 599 bp, Chicken  19866894234525_1
  misc_feature (1)..(128): n is any nucleotide
nnnnnnnnnnnnnnnnnnnnnnnnnnnnnnnnnnnnnnnnnnnnnnnnnnnnnnnnnnnnnnnnnnnnnnnnnnnnnnnnnnnnnnnnnnnnnnnnnnnnnnnnnnnnnnnnnnnnnnnnnnnnnnnnccaaagtttgtgcttctttctccgtgctgctgaatgtcaggatggcaccactgcagagtttatagcacacgccatccgttcggaagaacatcttttgtttttgtcgcttagcaattccaggctgagcttctatttcaccagcaaaaattcacccttcccttacccggagctygaggagctttcgcattaggaggtgtattttctagccaagaaggtattgcaaatcacatatatacgtatagatcattatacgtgcgygtgtttggctattcgattgggaacaaagcrgtgctcrgcgcgtcgcacctgacttacacacagctctgaggaggaaacagaaactcttggaaatcctggctgcagcccagcctgaaatctggaggaggaggcatcgctgcagggcgttccggcgagcccagtgacaaacccagcaggaggatggcccgtgtgtcctacagctgaccatgggct

SEQ ID NO: 22252 - DNA, 599 bp, Chicken  19866894234525_2
  misc_feature (1)..(42): n is any nucleotide
nnnnnnnnnnnnnnnnnnnnnnnnnnnnnnnnnnnnnnnnnnccaaagtttgtgcttctttctccgtgctgctgaatgtcaggatggcaccactgcagagtttatagcacacgccatccgttcggaagaacatcttttgtttttgtcgcttagcaattccaggctgagcttctatttcaccagcaaaaattcacccttcccttacccggagctygaggagctttcgcattaggaggtgtattttctagccaagaaggtattgcaaatcacatatatacgtatagatcattatacgtgcgygtgtttggctattcgattgggaacaaagcrgtgctcrgcgcgtcgcacctgacttacacacagctctgaggaggaaacagaaactcttggaaatcctggctgcagcccagcctgaaatctggaggaggaggcatcgctgcagggcgttccggcgagcccagtgacaaacccagcaggaggatggcccgtgtgtcctacagctgaccatgggctgttcgtccccaaggagcagcacccaggtggacgcacgcggaggaactcgcagctgcagatttggggtgggtagaaggaaaatggta

SEQ ID NO: 22253 - DNA, 599 bp, Chicken  19866894234525_3
  misc_feature (1)..(12): n is any nucleotide
nnnnnnnnnnnnccaaagtttgtgcttctttctccgtgctgctgaatgtcaggatggcaccactgcagagtttatagcacacgccatccgttcggaagaacatcttttgtttttgtcgcttagcaattccaggctgagcttctatttcaccagcaaaaattcacccttcccttacccggagctygaggagctttcgcattaggaggtgtattttctagccaagaaggtattgcaaatcacatatatacgtatagatcattatacgtgcgygtgtttggctattcgattgggaacaaagcrgtgctcrgcgcgtcgcacctgacttacacacagctctgaggaggaaacagaaactcttggaaatcctggctgcagcccagcctgaaatctggaggaggaggcatcgctgcagggcgttccggcgagcccagtgacaaacccagcaggaggatggcccgtgtgtcctacagctgaccatgggctgttcgtccccaaggagcagcacccaggtggacgcacgcggaggaactcgcagctgcagatttggggtgggtagaaggaaaatggtaattttagcacgggtaagcatgtttaacatt

SEQ ID NO: 22254 - DNA, 599 bp, Chicken  19866894234525_4
  misc_feature (1)..(5): n is any nucleotide
nnnnnccaaagtttgtgcttctttctccgtgctgctgaatgtcaggatggcaccactgcagagtttatagcacacgccatccgttcggaagaacatcttttgtttttgtcgcttagcaattccaggctgagcttctatttcaccagcaaaaattcacccttcccttacccggagctygaggagctttcgcattaggaggtgtattttctagccaagaaggtattgcaaatcacatatatacgtatagatcattatacgtgcgygtgtttggctattcgattgggaacaaagcrgtgctcrgcgcgtcgcacctgacttacacacagctctgaggaggaaacagaaactcttggaaatcctggctgcagcccagcctgaaatctggaggaggaggcatcgctgcagggcgttccggcgagcccagtgacaaacccagcaggaggatggcccgtgtgtcctacagctgaccatgggctgttcgtccccaaggagcagcacccaggtggacgcacgcggaggaactcgcagctgcagatttggggtgggtagaaggaaaatggtaattttagcacgggtaagcatgtttaacattcagcaag

SEQ ID NO: 22255 - DNA, 599 bp, Chicken  19866894234528_1
  misc_feature (1)..(29): n is any nucleotide
nnnnnnnnnnnnnnnnnnnnnnnnnnnnntccagactggcacagacattggtaaaaagcatctgagctagcagcagcccggaggtgagagcacagagctcagggaactctgcctccagtaccacctctgcctcccagtgatctgtacgagacccctcactctgtacctcagtttctgcaaaacctctctgtaaaatgggctggtgggcaccattctgacccgatcttggcaaggaggaaagggaagcagtaattctgggtgaaggacaagaaataaacagccaggcaagatgcctgacayagatggagaaagcgaggcagaaacaagccttagctgggagctcattcactgacaccctcagtagaacgtctcatcaaccactgagactgggacaatgctgtcagacagaagttcatattttaccttaaataatgtaaaaagtcccagctgctgcaagcaaaggcgtcctccccctaggacggagccagggcggctcaggaggacgtgagcgtgctgcaaagcaaacctcacgtagaggctactgcatgcttttctcatttaaaacgatgctgtgcttattcatctttgtgcagtgtccc

SEQ ID NO: 22256 - DNA, 600 bp, Chicken  19866894234531_1
ccaggcccattgagccccgaaaggtgggtgaccactgggacaagacagcataggatggattctgtcctttcagggctccgagccctagcagaggttccgtgggctgatctgggttgggttgcagtggggacagcgggtgggagagctgccctgacccacccctctgcccctcacccaggaaatccaggcataccgccagcgaagcctcatggagaaggagctgctcttcttcagctacgacgtctttgggatcccatttgtggacccggtgagtggcactgcaccgaggctggtggcagstggagggacgtgtctgcaggagaaggggatgtgtggtatcagaggcaggtcctcatccagctactgatgctgtccttgtggctgtaggacacgtggacgcccgaagaggtgataccaaagaggctgcgagagaaacaaaagtgagtgtttggcctgctgccattgtgggggggcaaccaacgggrgcacctctctgccttccttgggttcaagacagcaattgcagagggaattatgtgatgctggggctgggagaggctgctggagggcagagcttggtccttgggtcaccccaagcag

SEQ ID NO: 22257 - DNA, 600 bp, Chicken  19866894234531_2
aggcataccgccagcgaagcctcatggagaaggagctgctcttcttcagctacgacgtctttgggatcccatttgtggacccggtgagtggcactgcaccgaggctggtggcagstggagggacgtgtctgcaggagaaggggatgtgtggtatcagaggcaggtcctcatccagctactgatgctgtccttgtggctgtaggacacgtggacgcccgaagaggtgataccaaagaggctgcgagagaaacaaaagtgagtgtttggcctgctgccattgtgggggggcaaccaacgggrgcacctctctgccttccttgggttcaagacagcaattgcagagggaattatgtgatgctggggctgggagaggctgctggagggcagagcttggtccttgggtcaccccaagcagctcggggtagggggtgagggccgcgctgagatgacaccttcacgccttgggctttgtcagcagcccttagacacaacttgtcctgtccttgccttggcatgccttcttcccgacttggggacagtggggcagtggagctgatggccactgtgtgcccagggtggagcgggagacagcggcgcgca

SEQ ID NO: 22258 - DNA, 600 bp, Chicken  19866894234535_1
ttctactttcagaccagaaatgttaatgctggatggagcttcctattagtttcaggaataaaagatgccaagtgaaactgcctaaaaccaggaggaaacacaaaagcagtgtacatgaatcatataatcttttgagttggaagagaccctaggagtttgatccagttctggagcaaaaaacacaacacagctgtatttgtagccgattcttaagacgaattattttgctggctttgtttttgtttttgtttttccaggggatgctgctgcatttcttctctcatttttttactttaaacrtgatagtccattctccttatgctctgtgaaagccaaaagaatgtcacatttattgcaaatactctgtattacagccagccaaattctcactttaaactttagttcacactgcaaatatcagtctagccataagctgagaaatatcctccagatttatgtttttgttaaagacttgaaaaagaaactgggtcctgagatagatccttgtaccatgggccacattcatccgtgctcagcacatccttggaagaagactaccaagttgtttcaaatgaacacatattgaactggtttccaggc

SEQ ID NO: 22259 - DNA, 600 bp, Chicken  19866894234540_1
cttcaatggcagtgagaatgagggacggggagcacctcactctgccctgcatccttctgcagccccccggccacgctgccactgattacaggagcagaagccctgtgcttacggcatcaacacatgagcaaggcactctcagcctcccagagcgtaacaagtccccggccaagtcctcctggtggagaattcaccagagcagaagggcagtgccgtggccacaacagagcagccgcagggtcccagtggcttcagaagcaatggcactaactgcatccctgctgagcaacaggcaattcygatggcaaatatacagccagagaagagcgagcaccattatacccrgtgccatcacccagtgctctcaggctgggcaaacaggctggatggtggatgcagatgaagaaagcacccaaggcaaaggctggamagccaccgggaaggtggagggctgctgagagccctgagtgcagccagcagccagccagggctgcatgcagggagagggcagcactggtcatgctgtgcgagtgtatttaatactgacagaagagccttgccctgggacggagtgatgagggtggtgctgggcagccatgc

SEQ ID NO: 22260 - DNA, 600 bp, Chicken  19866894234540_2
cctgcatccttctgcagccccccggccacgctgccactgattacaggagcagaagccctgtgcttacggcatcaacacatgagcaaggcactctcagcctcccagagcgtaacaagtccccggccaagtcctcctggtggagaattcaccagagcagaagggcagtgccgtggccacaacagagcagccgcagggtcccagtggcttcagaagcaatggcactaactgcatccctgctgagcaacaggcaattcygatggcaaatatacagccagagaagagcgagcaccattatacccrgtgccatcacccagtgctctcaggctgggcaaacaggctggatggtggatgcagatgaagaaagcacccaaggcaaaggctggamagccaccgggaaggtggagggctgctgagagccctgagtgcagccagcagccagccagggctgcatgcagggagagggcagcactggtcatgctgtgcgagtgtatttaatactgacagaagagccttgccctgggacggagtgatgagggtggtgctgggcagccatgccttcctccagcccgcctagctgctgtagaagatgcggacgtgctg

SEQ ID NO: 22261 - DNA, 600 bp, Chicken  19866894234540_3
aggcactctcagcctcccagagcgtaacaagtccccggccaagtcctcctggtggagaattcaccagagcagaagggcagtgccgtggccacaacagagcagccgcagggtcccagtggcttcagaagcaatggcactaactgcatccctgctgagcaacaggcaattcygatggcaaatatacagccagagaagagcgagcaccattatacccrgtgccatcacccagtgctctcaggctgggcaaacaggctggatggtggatgcagatgaagaaagcacccaaggcaaaggctggamagccaccgggaaggtggagggctgctgagagccctgagtgcagccagcagccagccagggctgcatgcagggagagggcagcactggtcatgctgtgcgagtgtatttaatactgacagaagagccttgccctgggacggagtgatgagggtggtgctgggcagccatgccttcctccagcccgcctagctgctgtagaagatgcggacgtgctgtgtgatgtccctgcggcacaggggacaggtctgtagccgcttgcagcaggtctggcagcagcacacatggccacaaggcaggaaa

SEQ ID NO: 22262 - DNA, 600 bp, Chicken  19866894234544_1
ctagggctggcctgagcattctgcttgggaggtagcaggccaactgcacatcagcacaggctgttttgaaagatgggtttcaaagagtattttgaaatctgtgctgaatggttttcagtctctgctgtgttctatggcacctacagcctgagagcctgctgcccatagcttctctgtctttgctgcctggccacgggctcgtccagccacgtctgcttacaggccagcatccagctaagtatttctcaactggaaaaatctacaccagcctttcccattgctacagtcttgagctccttyccctgcaacatcacaaccatatgcaggattgagctgcaatttaggatcactgagaccatctgagttttgttttcaagccgaaaaggcttatttcagtgcaagtgattatcagtttcaggactgagagtggtgctgtgactaccactcgggatcaaggggatgaattcaggttagctgtgcttggcagaaaggaccaagggcaaatcccatgggtccctagccagaaatgaagcaagagaaggaaggtttattctacggtcagctcattccaaatctccaggtttgcaaaataaccctcat

SEQ ID NO: 22263 - DNA, 600 bp, Chicken  19866894234544_2
ggtcagctcattccaaatctccaggtttgcaaaataaccctcatgactgtttctggtgacctgggggagtgcctgtcccatgggcatctagcagctctggagaggtggctgagtgttgtatccctggggaggacactgggaatacacagactgagtgagaccttgcaatgagtgatagggaagaagttagggcatttactgggaggtacaccacaaaaaggagggctggctatttcagcttgttcaaaaccacaagaaacctggcctttgctattgcaactgagaagaagttcagataastggtttgcaaagctattcttgggcaagtccaccaactatctattgatacagcttgtattgggaacggctcccctgggcctcaatgggagggagggggccgtgtccagggcacagtgtgagagcagcacacccttcccctttgttttgagcctaggattcagccccagtgggtgctttaacatggagccggtggctgttctgcagagaaattttcctctgggagccacttctgcattgtataactaattaaatatttcctgggaaccggtgagacggcatctgcagccgagtgattggagc

SEQ ID NO: 22264 - DNA, 599 bp, Chicken  19866894234545_1
  misc_feature (1)..(82): n is any nucleotide
nnnnnnnnnnnnnnnnnnnnnnnnnnnnnnnnnnnnnnnnnnnnnnnnnnnnnnnnnnnnnnnnnnnnnnnnnnnnnnnnnnaagaaatgacgctaattaactgtcccttgtccttcttaccaaggcttctctgtaagtcagtgagagtggcaaagtcagcgcacaggttccaactgttggcatccagtctgggcttgaacgaggcagagctattaagtggctggcgcaggttatgaaaaattgatagagaaacaaccaaacagaaactgtagaaccaagagaagcacttacactgaaargcctcatccaaggaatgtaaaaatagcatctcttcaaggaacagaattccagacaaaggtgtatgcaatactgygttttagactgtctgttccgcaaggaggtgaacttcaggcagtaagcgagttgcttcagtagtaagccagcagtgagatgttacgtctgtattcctatccttccatataatagaaattgtatgggtttgtgttacgtctgttttccagaaagatttttattctccttaatcccaccagtgttactgccatgggaaactgcctgtctgtttggaattaggtaaaag

SEQ ID NO: 22265 - DNA, 599 bp, Chicken  19866894234545_2
  misc_feature (1)..(8): n is any nucleotide
nnnnnnnnaagaaatgacgctaattaactgtcccttgtccttcttaccaaggcttctctgtaagtcagtgagagtggcaaagtcagcgcacaggttccaactgttggcatccagtctgggcttgaacgaggcagagctattaagtggctggcgcaggttatgaaaaattgatagagaaacaaccaaacagaaactgtagaaccaagagaagcacttacactgaaargcctcatccaaggaatgtaaaaatagcatctcttcaaggaacagaattccagacaaaggtgtatgcaatactgygttttagactgtctgttccgcaaggaggtgaacttcaggcagtaagcgagttgcttcagtagtaagccagcagtgagatgttacgtctgtattcctatccttccatataatagaaattgtatgggtttgtgttacgtctgttttccagaaagatttttattctccttaatcccaccagtgttactgccatgggaaactgcctgtctgtttggaattaggtaaaagaatcttctactgcgtcaagaaaacctatgtaaagctattaatgtggattattttcttcatgttttatcactaag

SEQ ID NO: 22266 - DNA, 600 bp, Chicken  19866894234550_1
taatcttacagggtgctcctcaggatcaagacctacaatttatgtgacagttaaatgccactaaaaaaaagttccacatatgcaagtaatgaaagcaggccattttctcgtggaagacaagctacatttcacatgataacacagctgtcactatcagcaatgagggaccaagaactactattgccacgggattcaaaaccctatttgcaaagagaggtaaaatactgccaccttgtatggggtaggtttcacatagaaaaccaccacgattctaacttaactcttttacagttttaagasggaccraggactaaaaaaaaaatacataagctggagtgtcatataaatctctttggctcttttgtgcccccactagctcgaggcaaaagaaacagtcagcctttcaggatggcccagctaataggttttccctgcaaaaatgattccaactattctgccatcgttttctgctgcggcttccaaggagacaggaaacagcaaaacacaggtttcatgccgagccagacatccaaatgctcctaacctgctactcccacacagcctactgttcagagctgagcccctcctgtctcagctcag

SEQ ID NO: 22267 - DNA, 600 bp, Chicken  19866894234550_2
tacagggtgctcctcaggatcaagacctacaatttatgtgacagttaaatgccactaaaaaaaagttccacatatgcaagtaatgaaagcaggccattttctcgtggaagacaagctacatttcacatgataacacagctgtcactatcagcaatgagggaccaagaactactattgccacgggattcaaaaccctatttgcaaagagaggtaaaatactgccaccttgtatggggtaggtttcacatagaaaaccaccacgattctaacttaactcttttacagttttaagasggaccraggactaaaaaaaaaatacataagctggagtgtcatataaatctctttggctcttttgtgcccccactagctcgaggcaaaagaaacagtcagcctttcaggatggcccagctaataggttttccctgcaaaaatgattccaactattctgccatcgttttctgctgcggcttccaaggagacaggaaacagcaaaacacaggtttcatgccgagccagacatccaaatgctcctaacctgctactcccacacagcctactgttcagagctgagcccctcctgtctcagctcaggtccat

SEQ ID NO: 22268 - DNA, 600 bp, Chicken  19866894234551_1
tacaatagaggctagaatatggaatgttacacccaaaacagaaacaaaggtaggaagtacatcacaagcttgcagttgggtatccactgccataaagtaagatgccataaactaacgtgtctgaaaaagatgatgaaaaagattcaaatatatcaaccaaccataggagcagcatatgctgacgtgatgccatcatgactaaagcaaatacaataaagatacatgaagcagaatgcctctccctgttatgagtttattgatgtccctgtataaagcatgtggtatatatgctttcatacwcagaatgaaaattttcataagccatcttcccatcttcaaaaataggaaaaaaagccacagttaagagaggctaacccaatggagacagaagttgtaatgaaagctggcagaaactagtttttcttataatacattgagggtgttgaccctcaaaagcattcttattcttcagtagctgctgtttcatcctgctaagaaaactggccaagaactagttaggaatggacttctataatgacaatcagaggactgacaacgacagcaagggactggaatagcctttaaattgggaggcagcaa

SEQ ID NO: 22269 - DNA, 600 bp, Chicken  19866894234552_1
gctctgcttagctgcaggtcaggtcctgaacagagaaatgagcacaaataatgagagacagggcatcttggtaactggattactaacttgggcagacttgatttacttctgaataggactgcttcagtcctgttccacaggagctgttaggaaaggatttagaaaaaagtcgcggtgaagcagatgacacacaaacttaccgtgctgcaaatgtttgtggagatggtaggagctaagaatgaggtgactgatctgggaaatagcaaagcattagcttcctgctgaactaagtgcatttcrtatttattaatagatattgacaagtactggagtgatttgtgggccagtgacttcgaattaaatcaggatttacaccttccagaagaaaacaaatacataggtaaggcacctgagcatgaatgaattcttctggtaatgtatttgagaggttaatgtggttaatgtagaaacaatctttatttccatctgaacatcaacctttgtttgcaaatcaaaacaaatgggaattctgttcacctgaactttatttaataacttcttatgtgtaagtttgaaaaccgactttataaaaagtgtaaa

SEQ ID NO: 22270 - DNA, 600 bp, Chicken  19866894234553_1
ttcagaaactaggtgattcaaaatcacgtgcagcacacacactagctactgtggacttgcagttccagaatcacagtgtttccaggaaaagtatattgtcattatataccatatactttaatgtatcttctgtctcccttataaaaactaattagcagatttcaaataccagaatcttacgattacctgaaaaatcctttaaaagttattacactgtgggcactgggcaatcgctggtaattactttaaatgcatttttatattctacatccaattactcttataggaacctttcacctrgggagctgcaaatctttttttaaactgagcaaaacacattcttttttttttttttttccttctttatcaygaggaaaaggaagaargactcccagttggacatccttgcatacagcatttccaaattcagtgagtcaggaggcttgagctttcagaaataaagcttatttctctgaatggcttccatcagacttgcattagaaacgaacaagcacttcagcacactgacagcttgatctgtgagaatggatcttggaagagaacacatcagcctgcccgtttagaaatatgtatgctgaa

SEQ ID NO: 22271 - DNA, 600 bp, Chicken  19866894234553_2
tcacagtgtttccaggaaaagtatattgtcattatataccatatactttaatgtatcttctgtctcccttataaaaactaattagcagatttcaaataccagaatcttacgattacctgaaaaatcctttaaaagttattacactgtgggcactgggcaatcgctggtaattactttaaatgcatttttatattctacatccaattactcttataggaacctttcacctrgggagctgcaaatctttttttaaactgagcaaaacacattcttttttttttttttttccttctttatcaygaggaaaaggaagaargactcccagttggacatccttgcatacagcatttccaaattcagtgagtcaggaggcttgagctttcagaaataaagcttatttctctgaatggcttccatcagacttgcattagaaacgaacaagcacttcagcacactgacagcttgatctgtgagaatggatcttggaagagaacacatcagcctgcccgtttagaaatatgtatgctgaaatagaggaagcattctgtgggctctcgcagagaagttccaattctgaagaacaagctatataaaagcaaa

SEQ ID NO: 22272 - DNA, 600 bp, Chicken  19866894234553_3
aaaagtatattgtcattatataccatatactttaatgtatcttctgtctcccttataaaaactaattagcagatttcaaataccagaatcttacgattacctgaaaaatcctttaaaagttattacactgtgggcactgggcaatcgctggtaattactttaaatgcatttttatattctacatccaattactcttataggaacctttcacctrgggagctgcaaatctttttttaaactgagcaaaacacattcttttttttttttttttccttctttatcaygaggaaaaggaagaargactcccagttggacatccttgcatacagcatttccaaattcagtgagtcaggaggcttgagctttcagaaataaagcttatttctctgaatggcttccatcagacttgcattagaaacgaacaagcacttcagcacactgacagcttgatctgtgagaatggatcttggaagagaacacatcagcctgcccgtttagaaatatgtatgctgaaatagaggaagcattctgtgggctctcgcagagaagttccaattctgaagaacaagctatataaaagcaaaggtataagaagtggaa

SEQ ID NO: 22273 - DNA, 600 bp, Chicken  19866894234553_4
tttccagtagctggaatgtttgtgctagaacaaacaaaagagcaaaaatggcttttatcatagaaatacactttgtttgaccaagactgcagcagcatatgagatctgtttgaaatatcctgtcagatgatcggttttacagaaaatggggttatcagaggcaacaataaatgaagacaaaacaactacaaaatggagaaaatgactttgaaagtctgccataatctgcttcacagacttccataatgtgcttccaaagctgcctgatatacagcctttagatccttctcagaaaacagwgtrttgggtggtgtcataaaaataaagttcacctcttgaaaaatgctttgtaatttgaggataaaatatttaggtaaacatttctgaacaaaaactcatgtatgatcactattaggttatttctgcaataccgcagatctgtaaataactgtatttctgtaaatgattacttttttttttttctcattcaggcaatgatataacatgttatttgcaaggactgtcagtatctattacattatcatttgttcactgctgtcttcatccagtaggggatcacagtttatcaggaggaagatt

SEQ ID NO: 22274 - DNA, 600 bp, Chicken  19866894234553_5
ccagtagctggaatgtttgtgctagaacaaacaaaagagcaaaaatggcttttatcatagaaatacactttgtttgaccaagactgcagcagcatatgagatctgtttgaaatatcctgtcagatgatcggttttacagaaaatggggttatcagaggcaacaataaatgaagacaaaacaactacaaaatggagaaaatgactttgaaagtctgccataatctgcttcacagacttccataatgtgcttccaaagctgcctgatatacagcctttagatccttctcagaaaacagwgtrttgggtggtgtcataaaaataaagttcacctcttgaaaaatgctttgtaatttgaggataaaatatttaggtaaacatttctgaacaaaaactcatgtatgatcactattaggttatttctgcaataccgcagatctgtaaataactgtatttctgtaaatgattacttttttttttttctcattcaggcaatgatataacatgttatttgcaaggactgtcagtatctattacattatcatttgttcactgctgtcttcatccagtaggggatcacagtttatcaggaggaagattttc

SEQ ID NO: 22275 - DNA, 599 bp, Chicken  19866894234557_1
  misc_feature (1)..(19): n is any nucleotide
nnnnnnnnnnnnnnnnnnntagctttgcctgcccagctttgttgaagaaccaaacccagcagatgtagcgttgcagcagccccatgggaacaatctgcagtcctgcacccatgctctccagatactggctcctttttgctggaagcagcgagaaggccatgcatggcaggggtcgagtcaaagatcacagccagaaggcagcttcagagcaaatcacgtgagctgcagagaactgggctcactttgctgatccaggggaacatgagggccactcctttctgagagggacagctttgaacrgatattttcttaactgtagagaattccttatcagtgcaattctacatcaagcgtcccagtagttgtgtgttacaaagtaagtattactgtcacaggtccttgaaagcaggaggctgtgccagcctccctgcagtgctgcagcrcaccctgctcacagcttttcctccagcagccactgggctgtcactgcagcacgagatgtttctgcagccccagatgctttccttcaggacctgagtcccgtcttttccagagcagtagatatcactgggcttctgttctttgttatcctagaagta

SEQ ID NO: 22276 - DNA, 600 bp, Chicken  19866894234557_2
agcagcgagaaggccatgcatggcaggggtcgagtcaaagatcacagccagaaggcagcttcagagcaaatcacgtgagctgcagagaactgggctcactttgctgatccaggggaacatgagggccactcctttctgagagggacagctttgaacrgatattttcttaactgtagagaattccttatcagtgcaattctacatcaagcgtcccagtagttgtgtgttacaaagtaagtattactgtcacaggtccttgaaagcaggaggctgtgccagcctccctgcagtgctgcagcrcaccctgctcacagcttttcctccagcagccactgggctgtcactgcagcacgagatgtttctgcagccccagatgctttccttcaggacctgagtcccgtcttttccagagcagtagatatcactgggcttctgttctttgttatcctagaagtaggtttgcctagagcaaggttagagtctggaagtggtctgtataaagatgttaccacaccagcaggtgagaaacctgtctgctgtttgcagcattgtatttgtctttcctcctttgtaaaagcgtttcaaattttgaagtgtacc

SEQ ID NO: 22277 - DNA, 600 bp, Chicken  19866894234563_1
caacatctccccaccagagggctttctcatccgcaagggaccgggcaactgccactttgactttgcccaagaaattctcttcgttgactatctccagccccagctgattaacaggctacaaaagaggtaaagtaggatatttttacaatctgaactactcttatttgttcagtgtttgtattctcttttgaaccaaatctgtatgagacgcctggatgaagtgggatgttttcttgagatcaggagacaatctgctacataatctggaggggaaaggtgtgtgtgatagcttattttttyttattctgttcttttctcaatgagccaagagtatgtaaataaactattttgtgttggttatattttggcagaactggttcaaagagaatggaacaagctagtatggactatgaagcaccactcatgccgtgtggttgtatcctctgtcattttcttgtttagtatataactgttatattctgtataacgtagttatgaattccaatagttctgaatacaacaacttctgatgctgtaagaaatgaatgagatatgatgaatatgatgagaaaggcatttgttaaatatgacttgagaata

SEQ ID NO: 22278 - DNA, 599 bp, Chicken  19866894234564_1
  misc_feature (1)..(53): n is any nucleotide
nnnnnnnnnnnnnnnnnnnnnnnnnnnnnnnnnnnnnnnnnnnnnnnnnnnnnatggatgcagagatccctagctattctttcaatgcacagaaattacgggcatgtatgctagtacttctttttttttcctctgttaattgctgccatattttttagataaccacactctgaatctgatctccctccacaaaagctgtgctgcgttacgctgggttgattaaccagatatgagtccctctccatgttctgccagtaccatgggccataacttcctctgcagaaaagcggaacaatcgcrcatctcctcctgagctatctgagtttacagctcagagaacaaccataaaccactgctgactgcagtttatgttaacagctggactgtaaagtccatcagccttggcaccgaggtcccaggacagcgcaggaagggaggatgagccagaagagcacagtttggccgtgccccagctgttgcaccagccagcccttagctgggcatcactgccccaccagcagcttggatgtaaatgaaaacagcagagctttgggtggtggtgacccaggagctgctgcctgtgcccctgccatccccgt

SEQ ID NO: 22279 - DNA, 600 bp, Chicken  19866894234565_1
aatcttaaacaattattttctttgggactgatgactggaattgcacagcaacatgtctactttaaaacaaaacagatcacccattcctctacaatgaacatgtttttaaaaagtgccaatataaagcactgcctttgttgttggccaaactcaagaacttaaccgttcgaacaattattaactttcaagtacattttttgctatcttggattctcagaatattaatttctgacaggttatgctggttactttctcttacctatttaacttgattttacttcctagcaactgcattatctytgctctgattacaaaactatacacaaccaatgacttccccacccaatctgaaggcccacaacacttacacaattgttttcatttcaaaatagaagagaaatactatgcagatcttcagcttatgctttataggtaattttttgcactctctgatcaggagaactatgacgcattaatatatagtctttgaaagacactaagttacttgtaaagctctacacagcatatctgcatgcccttacctgccgcttgaccatcttcatatcttctgggtagtcttctgtcatctcctgcagaaaa

SEQ ID NO: 22280 - DNA, 600 bp, Chicken  19866894234576_1
gttttaacctggttgccagtaaaagaaacaaagtgaaattaaatcaatgcatcagggaaggattcattgttgtaagtagcctcatgtaccctcagtagctggcagcccgtggcttggataggtacactctttgctgggtaaagaatggactggagagccaggcccagagagtggtggtgaatggagttaaatccagctggcgactggtcacaaatggtgctcccgaggggtcggtgctggggcctgtcctgttcagtatctgtattgatgaccttatgaggggattgagtgcaccctcaktaagtctgcagatgacaccaagctggctggaagagttgatcagcctgagggtaggatgaccctgcagagattaagtgttgccagcaggagcagggaaatgattatcccatccctctrtactcagctctggtgaggctgcacctcaagtactgcattcagttttgggcccctcactacaagaaaaatattgaggccctggagcgtgtccagagaagggcaacaaagctggtgagggatctggaacacaagtcttatgggggtgtgactgagggaaatgggactgttcagtctagaggagag

SEQ ID NO: 22281 - DNA, 600 bp, Chicken  19866894234576_2
ataggtacactctttgctgggtaaagaatggactggagagccaggcccagagagtggtggtgaatggagttaaatccagctggcgactggtcacaaatggtgctcccgaggggtcggtgctggggcctgtcctgttcagtatctgtattgatgaccttatgaggggattgagtgcaccctcaktaagtctgcagatgacaccaagctggctggaagagttgatcagcctgagggtaggatgaccctgcagagattaagtgttgccagcaggagcagggaaatgattatcccatccctctrtactcagctctggtgaggctgcacctcaagtactgcattcagttttgggcccctcactacaagaaaaatattgaggccctggagcgtgtccagagaagggcaacaaagctggtgagggatctggaacacaagtcttatgggggtgtgactgagggaaatgggactgttcagtctagaggagaggaggctcaggggagaccttattgctctctacaacgacttgaagggaggctgtggtatggtagaggtcagcctcgtctcccacgtaactagtgctaggatagagtgaatggcattaag

SEQ ID NO: 22282 - DNA, 599 bp, Chicken  19866894234578_1
  misc_feature (1)..(142): n is any nucleotide
nnnnnnnnnnnnnnnnnnnnnnnnnnnnnnnnnnnnnnnnnnnnnnnnnnnnnnnnnnnnnnnnnnnnnnnnnnnnnnnnnnnnnnnnnnnnnnnnnnnnnnnnnnnnnnnnnnnnnnnnnnnnnnnnnnnnnnnnnnnnnncctgtgagaacaggctgagggagctggggtgttcagcctggagaagggaaggccctggggagacctctttgttgccttcctgtacccagaggcctatgggacagctgaggagggactcttttagtgaagcactgatacaggttgcctaaagaggtggyggatgtccctgcagacacccaaggtcaggctggatggggctctgagcacctgatggagctgtgggtgtccctgttcagtgcagggagttgggccagatgactttaaaagatcccttccagctcaaacagttccatgatcctttgtcagagggtgcaatgataggacaggggataacaactctaaacyaaaaagggagatttagattagacacraggaagaaattcctcactaatgagggtagtttttgaacagatgctctttgtcctttattttttttaatagaccagtaatgcacatg

SEQ ID NO: 22283 - DNA, 600 bp, Chicken  19866894234578_2
gggaaggccctggggagacctctttgttgccttcctgtacccagaggcctatgggacagctgaggagggactcttttagtgaagcactgatacaggttgcctaaagaggtggyggatgtccctgcagacacccaaggtcaggctggatggggctctgagcacctgatggagctgtgggtgtccctgttcagtgcagggagttgggccagatgactttaaaagatcccttccagctcaaacagttccatgatcctttgtcagagggtgcaatgataggacaggggataacaactctaaacyaaaaagggagatttagattagacacraggaagaaattcctcactaatgagggtagtttttgaacagatgctctttgtcctttattttttttaatagaccagtaatgcacatgttgttctcttccctctattcrttggaattcatccataaagcacattcttctggaagctagcttgcactctttaaatgccaatctaagctgttctctaacacagagcctatataggatgattgcttcccagtcacctctgcttcagctgtaagtgctggccattctgcccctctcctggcagcctgctg

SEQ ID NO: 22284 - DNA, 600 bp, Chicken  19866894234578_3
ttgccttcctgtacccagaggcctatgggacagctgaggagggactcttttagtgaagcactgatacaggttgcctaaagaggtggyggatgtccctgcagacacccaaggtcaggctggatggggctctgagcacctgatggagctgtgggtgtccctgttcagtgcagggagttgggccagatgactttaaaagatcccttccagctcaaacagttccatgatcctttgtcagagggtgcaatgataggacaggggataacaactctaaacyaaaaagggagatttagattagacacraggaagaaattcctcactaatgagggtagtttttgaacagatgctctttgtcctttattttttttaatagaccagtaatgcacatgttgttctcttccctctattcrttggaattcatccataaagcacattcttctggaagctagcttgcactctttaaatgccaatctaagctgttctctaacacagagcctatataggatgattgcttcccagtcacctctgcttcagctgtaagtgctggccattctgcccctctcctggcagcctgctgctacggataacagcaggtaatagttt

SEQ ID NO: 22285 - DNA, 600 bp, Chicken  19866894234578_4
aaggtcaggctggatggggctctgagcacctgatggagctgtgggtgtccctgttcagtgcagggagttgggccagatgactttaaaagatcccttccagctcaaacagttccatgatcctttgtcagagggtgcaatgataggacaggggataacaactctaaacyaaaaagggagatttagattagacacraggaagaaattcctcactaatgagggtagtttttgaacagatgctctttgtcctttattttttttaatagaccagtaatgcacatgttgttctcttccctctattcrttggaattcatccataaagcacattcttctggaagctagcttgcactctttaaatgccaatctaagctgttctctaacacagagcctatataggatgattgcttcccagtcacctctgcttcagctgtaagtgctggccattctgcccctctcctggcagcctgctgctacggataacagcaggtaatagtttggctttgcttgcactgagacagcttgggcattttgatctgagtggggcagcaaatactgctgttcctgaggtgtggcagcacctgaagcgaatgaggtgaatgcagt

SEQ ID NO: 22286 - DNA, 600 bp, Chicken  19866894234580_1
cgagcatcttccggccattgtgcttacaggttttgctaatcagagcaaaccaggcttgcaaatgaaatctgattaagtagttttcacctctcaaaaaggggattagccagacctttgatcttcagatactgatttgcaactcaaaggaggtgtgacctcagctggacttgctgctggtctcagccccttcccctttcactcctcctcctgtttaccagaaaaaaaatcagttcatgtcttctcacgtagccagatctaaagcctattgaaggcggtggaaagccacccactgacttcaaygggctttggatcagtcccacaatggctgacttagccctaagtcctaggttgtttcaaagccagcagaaccaatttcccatcaaaatgaccagaagctgggaagatatgttcgcctttcagacctacaaattccaacttctttccctcttccatgacaactcttcagctggagatgctgaaaatgctgttgattttttcctcgcgccttccatagagaagctgcccaccataagtggaaaggctctgagccagacttaccaatgcaattaaaggataactcctgcaggcagaacagggagc

SEQ ID NO: 22287 - DNA, 600 bp, Chicken  19866894234582_1
ctggatggctcatgcaatgatgggctgatggttggatgtgatctcggagatcttttccgtgattctatgagatggaggtgttcttttgtgcatgactgtaaaaaggtggagtggaatatggcctcttgccttgtgaggctggagggaaagaaggccatttaggacttgcagcctggcaaagtgttccctagctcatgtcctggggaactgctgccttcagcagaactgctgttggtacattgcatcgccttggtttccactacagcccttccccgggagctgcacacagagctgcttctyttgtgggcactacaactgtttcaaagctgaaaactacctgaggctgaattccttacagtgacagccttgatgctgatacactatagttggtaggctgctggcttgactttgcttttctgatgcctggatttgtgatgagatcagagcttatttatctttcaagtaacatctcttctttttgaatggcagtagtggtgcccacgtgtgggtttctgtactcgggcttccaatgaccctttttatcttaggtttttgtgtgtaaatatgagctttccaagctactatcaaagtttcagggat

SEQ ID NO: 22288 - DNA, 600 bp, Chicken  19866894234583_1
atttaagtaactcccttcttgtggtacacattatattgcaagaaaaaagaaaatatacctttggcaacacataattacttaattccatgaaatagtccctctttgttaaaatcgttggttgtgttaaaatccatgtgtgactgcctcctgggcactgttcttttagcatcagtggtagatgatagcagtaattgccttttgcatttgtgtgtcagacatggtaagagttctgctgcacacacaatctctttctgatctttgttttcagaaataagattgtggggaaactgaggagaagaygctcagagtcagctctgtaaatggaaaagtcttacaactttgcccaaggagacttgtggcattcatgtttaaactttgtaatcataatgtcatttagtttaatatgttatggatggattttcttaattggatcagtattctgccttaagtctgcattaaaaagacatctcctgccccatgcctaactctccccacggagctgtaggtgctgctgattctgtcttagggataataaagcatcagaagttctcatggacagaacttatttcacatgactcaaaatagaagcacgtgagattg

SEQ ID NO: 22289 - DNA, 600 bp, Chicken  19866894234584_1
caagccactgtagactgagacatacttagaagataccacacaaaccacaacagtcagcaaaactgaaaatttcaggcatataatctattctgcctccgtcatccagcttgagcctcgtgagctattcacatctcaacgataaccttgaatcattcatcagatcagttcacaccgtgctacccaatgcatgactaaagttcaggcaggaattagacctttcttaccttctaatcttcagcagcaatgataccatgtgagccatgaaatgagcgggggcctctgggactgatgctgaagaayttcccatacttaaggtttgcagaacctagggttgcaaagacatactcaggatgagattaatatgttagcacatggaaggagacttcaccttccatcactaatttcagagcattttgtgtttgctttgacctagcactcagtaacaaatatctgtatggggacggtcagtgaatcagaggtctacagtaactgaaaggtcagtcaatggcaactatttaaaacacactgacatgaaaatagtatttggaatacaatataaatttgtaagtttgccttttcaatttttgtgtggcaggacta

SEQ ID NO: 22290 - DNA, 600 bp, Chicken  19866894234591_1
tcgggaggtaaacgtgtgaagacttttgtgcaataattttgcattgagaaattgcattgaggccagcatttttttgatgcctgcaattaagatattgttttttatctgtcttttcagaaaaaaaaagaaaaagaaaaactaacaaaataagacaaaacaaacaaacaaagaatcatattactcatctagtgggagacatttgcttcctttctggataaaccacatgatttgtgattcccattttcaaggccagtttggtatgtttaggtacagagattaaatgtctgggatcagaaagtwcagttattaggtgaagtaaggaactgcgattttgtagatacagcattttgagatttaacaagataaaagattgaaggccaaagttattccatgtaccagagggaaggctgctttggccactctttttcaagagcttctgatttcactgcatgccattgttggtgaatatctgtcaacatctggtgaaaaaataagatcaagtgattttcagtccattaatagatgatttgagaacatagaaaatggatgatattaacaagtttttttacaatggaactcataaataaaagaacatccatc

SEQ ID NO: 22291 - DNA, 599 bp, Chicken  19866894234595_1
  misc_feature (1)..(70): n is any nucleotide
nnnnnnnnnnnnnnnnnnnnnnnnnnnnnnnnnnnnnnnnnnnnnnnnnnnnnnnnnnnnnnnnnnnnnngctcccatccttcccttccaagagcagggatgccactgacactgggaaagtgaagcttgctgctgcacacccagctgtacttttcagttacacgttcgtgcactatccccagcacaaatggaaaccatccactgcattttcctccagagcacttctttggaaagccacaatgcacagcagcatatatgctgctacctggcactcctgcagcaggggatggccataccacrccagccaagctcaaagtcacagcaatctgatgggaaagaattgggaggaccatgaggtacctactggccaggaaaccattcattgttgtagcttgcacaagcaaaatttgcaaagttatatacaaaccataaaattatgtatgtataacatwaaaaaaaaaacccaaatctacaaaagtctaaaaggaaaaagkaaataaagcataagaatttgcttcagtggagccagaattttaagtgaaggagatactggtaacataccggytactagcaggtaacaactgcctaaaaaccctaaa

SEQ ID NO: 22292 - DNA, 600 bp, Chicken  19866894234595_2
ttcagttacacgttcgtgcactatccccagcacaaatggaaaccatccactgcattttcctccagagcacttctttggaaagccacaatgcacagcagcatatatgctgctacctggcactcctgcagcaggggatggccataccacrccagccaagctcaaagtcacagcaatctgatgggaaagaattgggaggaccatgaggtacctactggccaggaaaccattcattgttgtagcttgcacaagcaaaatttgcaaagttatatacaaaccataaaattatgtatgtataacatwaaaaaaaaaacccaaatctacaaaagtctaaaaggaaaaagkaaataaagcataagaatttgcttcagtggagccagaattttaagtgaaggagatactggtaacataccggytactagcaggtaacaactgcctaaaaaccctaaatgacatagaagtatttgcctacaggatagagcgaaagtgcttcttacttaaaaccctccaagcaaagaaggactgtgatacttaaacaaaggaatagctgcattcattgctggaacatcgtcatccagtaggaagttcttccaaattagttag

SEQ ID NO: 22293 - DNA, 600 bp, Chicken  19866894234595_3
ccatccactgcattttcctccagagcacttctttggaaagccacaatgcacagcagcatatatgctgctacctggcactcctgcagcaggggatggccataccacrccagccaagctcaaagtcacagcaatctgatgggaaagaattgggaggaccatgaggtacctactggccaggaaaccattcattgttgtagcttgcacaagcaaaatttgcaaagttatatacaaaccataaaattatgtatgtataacatwaaaaaaaaaacccaaatctacaaaagtctaaaaggaaaaagkaaataaagcataagaatttgcttcagtggagccagaattttaagtgaaggagatactggtaacataccggytactagcaggtaacaactgcctaaaaaccctaaatgacatagaagtatttgcctacaggatagagcgaaagtgcttcttacttaaaaccctccaagcaaagaaggactgtgatacttaaacaaaggaatagctgcattcattgctggaacatcgtcatccagtaggaagttcttccaaattagttagaattagtctatttttaagagctgggcaaccagaccagctgtg

SEQ ID NO: 22294 - DNA, 600 bp, Chicken  19866894234595_4
ctggcactcctgcagcaggggatggccataccacrccagccaagctcaaagtcacagcaatctgatgggaaagaattgggaggaccatgaggtacctactggccaggaaaccattcattgttgtagcttgcacaagcaaaatttgcaaagttatatacaaaccataaaattatgtatgtataacatwaaaaaaaaaacccaaatctacaaaagtctaaaaggaaaaagkaaataaagcataagaatttgcttcagtggagccagaattttaagtgaaggagatactggtaacataccggytactagcaggtaacaactgcctaaaaaccctaaatgacatagaagtatttgcctacaggatagagcgaaagtgcttcttacttaaaaccctccaagcaaagaaggactgtgatacttaaacaaaggaatagctgcattcattgctggaacatcgtcatccagtaggaagttcttccaaattagttagaattagtctatttttaagagctgggcaaccagaccagctgtggcttccttgatccctcctggtacttgcaagaggacccacaggaatggctaggacctaaatgcaaggcagat

SEQ ID NO: 22295 - DNA, 600 bp, Chicken  19866894234604_1
gatatatgagagagacttcatctcatttgtacattagttttcatgtttgttcaccacaatatttaattaagtctatttcttgcagagacatgaagaccagatagcactgacagaactgtactctcaatccttcgctgtagtctgctctttcacctgtctattggcttagaacttaactctacagacagagctgaaagagttctccatgaacataacacattggaccagtggcactaaatactaagatgaaattacataccactagaatgaaattgcatacttgcataatttggtttctartctgagcatttcatggagcatkgagtacggaggcatccttttcttaaatagaagaaaagggtggaaaagtcacagatagcaaatacaaggctaatattttttaaaactagttcagaataatttttaatagatcattataattgtttgaataagtatctttaattactctgtggaagcctgggagatggatctggtaggaaacttacgattcagtgatatgtctcttcactcttggaaacttaaaagcagttgataaattctcgggaatctatttgatcctccgtgcagtctgaaaaaata

SEQ ID NO: 22296 - DNA, 599 bp, Chicken  19866894234604_2
tcatttgtacattagttttcatgtttgttcaccacaatatttaattaagtctatttcttgcagagacatgaagaccagatagcactgacagaactgtactctcaatccttcgctgtagtctgctctttcacctgtctattggcttagaacttaactctacagacagagctgaaagagttctccatgaacataacacattggaccagtggcactaaatactaagatgaaattacataccactagaatgaaattgcatacttgcataatttggtttctartctgagcatttcatggagcatkgagtacggaggcatccttttcttaaatagaagaaaagggtggaaaagtcacagatagcaaatacaaggctaatattttttaaaactagttcagaataatttttaatagatcattataattgtttgaataagtatctttaattactctgtggaagcctgggagatggatctggtaggaaacttacgattcagtgatatgtctcttcactcttggaaacttaaaagcagttgataaattctcgggaatctatttgatcctccgtgcagtctgaaaaaatattcttgacacatctcagccag

SEQ ID NO: 22297 - DNA, 599 bp, Chicken  19866894234627_1
  misc_feature (1)..(115): n is any nucleotide
nnnnnnnnnnnnnnnnnnnnnnnnnnnnnnnnnnnnnnnnnnnnnnnnnnnnnnnnnnnnnnnnnnnnnnnnnnnnnnnnnnnnnnnnnnnnnnnnnnnnnnnnnnnnnnnnnnncaaaacctcactggcaaaagagggagggaaataatttatgagaaaggaaaaatgaagagaaatttaagtcattctgaagtaaccttgacctagagttattgtttctctagaagtgagaacatggaagtacttttgtgtatgtattttggtttggctcaaggaggaaagagttaactgctgaagtrtaggaatgtgtgaagtgtacatagtgctgaaaggctgaagtttggtttcaagcttatctgaagggtgaggcacaattgaagagagaatgtgccaagatctaagcagataaggaaaatggagtctctctcttatatttctttcttattttctgattgttgtatgtgaacactacatataggtttccgaagggtgaaacaggaaagaaaactacatttaatactgcatatggtgttaaatattctctacacatagggggcatatcctaattcatatatttttatattatgactttcattca

SEQ ID NO: 22298 - DNA, 600 bp, Chicken  19866894234631_1
aggaaaaaaagcactttgaactgaaaaagccagaaagtttcttttagaaaacgttgaagggaaaaaacgtcagtgttctgagaggaagcttttcattttagctgtgccctgaaatgcaggagattgagctcttctcctttaggttccccttgcagctgcagccttcccatccctcacccactgtgcctcagtgactgccactcgcccggttcacctgccgttcagttagatgtccttaaaacctggtttcttggtaaatttattatctgccaagcccctaatctcttttcttgaaggaayacaccactctcctagtgaggaactgagttacgaagtgacacrtcccagattgcattaagaaatgcttggcggttcccctgagacttggtcctcagccccaccttcctgcagcccctctctccttaatggctgcaagctgctgggtaataaagcgttagctgtcctgtcgcagggctgcgcaggratgtggtgttctgactgtgggaggaaatcagatgatttctgttttcccttagactgctctgataaatgacatccagtgcacagcagaggtcactgaatgcagccaagctccaggcg

SEQ ID NO: 22299 - DNA, 600 bp, Chicken  19866894234631_2
tttagaaaacgttgaagggaaaaaacgtcagtgttctgagaggaagcttttcattttagctgtgccctgaaatgcaggagattgagctcttctcctttaggttccccttgcagctgcagccttcccatccctcacccactgtgcctcagtgactgccactcgcccggttcacctgccgttcagttagatgtccttaaaacctggtttcttggtaaatttattatctgccaagcccctaatctcttttcttgaaggaayacaccactctcctagtgaggaactgagttacgaagtgacacrtcccagattgcattaagaaatgcttggcggttcccctgagacttggtcctcagccccaccttcctgcagcccctctctccttaatggctgcaagctgctgggtaataaagcgttagctgtcctgtcgcagggctgcgcaggratgtggtgttctgactgtgggaggaaatcagatgatttctgttttcccttagactgctctgataaatgacatccagtgcacagcagaggtcactgaatgcagccaagctccaggcgaggtttggaatgggagaggtcaagatgatgttttcagactta

SEQ ID NO: 22300 - DNA, 600 bp, Chicken  19866894234631_3
gcctcagtgactgccactcgcccggttcacctgccgttcagttagatgtccttaaaacctggtttcttggtaaatttattatctgccaagcccctaatctcttttcttgaaggaayacaccactctcctagtgaggaactgagttacgaagtgacacrtcccagattgcattaagaaatgcttggcggttcccctgagacttggtcctcagccccaccttcctgcagcccctctctccttaatggctgcaagctgctgggtaataaagcgttagctgtcctgtcgcagggctgcgcaggratgtggtgttctgactgtgggaggaaatcagatgatttctgttttcccttagactgctctgataaatgacatccagtgcacagcagaggtcactgaatgcagccaagctccaggcgaggtttggaatgggagaggtcaagatgatgttttcagacttacatttaatgaccaattttgaatttcatatgtgctgggttagagaaatctccataaagtggtttggcctgtgcattggagggrcaggctaagtttgatgcagaaggtgtgaactccaagagggcccaggtaagtggaagcatg

SEQ ID NO: 22301 - DNA, 508 bp, Chicken  19866894234631_4
aatggctgcaagctgctgggtaataaagcgttagctgtcctgtcgcagggctgcgcaggratgtggtgttctgactgtgggaggaaatcagatgatttctgttttcccttagactgctctgataaatgacatccagtgcacagcagaggtcactgaatgcagccaagctccaggcgaggtttggaatgggagaggtcaagatgatgttttcagacttacatttaatgaccaattttgaatttcatatgtgctgggttagagaaatctccataaagtggtttggcctgtgcattggagggrcaggctaagtttgatgcagaaggtgtgaactccaagagggcccaggtaagtggaagcatggaagcctcagaatgtgctgcttctgtgcgctgtgccattttcagagctacttaacagaataccaaaacctcacagcaatgtgaccttgcaggaagaaggaggtcttcctgggagcagccctgggttgaccttctggtgggctgctgtg

SEQ ID NO: 22302 - DNA, 600 bp, Chicken  19866894234639_1
cggatgcactttttatgggtcaaagcaagtccgtatgaaagaagtttcagccggtggagtttatgccagttctccaagtggatgaacaaagcacttctggaggggattatgccgatgttcaccacagctgcaatcagtgtggaagcatagcctaagaccccacagccctatctggcatttggtacctgcagacgctccttgtgcgggcctggtagtgggtagccagcagccaattctgacggagtgtgggagaggctgggcagcagtggggtccatgccacactgtgtcaatggggaagktctggctttcctcagtcaccctcctgtgtaactccagtctcttcagtcaatttgcttttccctctgaaggccaatgaaaagggctctggttgacataccaggacagaacacaatgaactaaatgggtagatataaaaggctgtactgatctttgactgaatggaattaacattagaggagatcagccttggtaaaaccatatccatttcaggagttcatgtttccagtagagcagggaaaattgattgggatgaaatttaattattgtaaggatttaaaagctcgacttacatagctgaa

SEQ ID NO: 22303 - DNA, 600 bp, Chicken  19866894234641_1
ctcagttaatagctctccaggagcagaaagaagcagaaatgtgctgtttttctttgggcagcaatgtatcgtgactatctccttggttcctcctgttttggtccacaacttaagatcttgtgaaaatgtaagtgtgagaaaaatcttgtattcctgtcactgcaggcacagctttcagcattagatgaaggaggtggtgagaagggaactgcaacacctcggtgaaacaggttactacacctccactaatcttttatatgccactatcactcctgcgcaggactttccaattccatttcmtgccctgtaacaagccctcgccacactagcattaccggaatgaaaggttggtgggaatgatttaattatttggaggctattaacctatctaacaaggtcctcttttattcctgttttgttgtgtggggttgttttggttttgttttatttgtttggttggttttgtgaatgccttgaggcaaaaaccaggatgctgaaggcagtgctaatcaaccacttcattaggaacactgctgtactccgaagcacataatatttatcatgaaaycatcatgtgtgtgaacactcatctacctcacc

SEQ ID NO: 22304 - DNA, 600 bp, Chicken  19866894234641_2
actcctgcgcaggactttccaattccatttcmtgccctgtaacaagccctcgccacactagcattaccggaatgaaaggttggtgggaatgatttaattatttggaggctattaacctatctaacaaggtcctcttttattcctgttttgttgtgtggggttgttttggttttgttttatttgtttggttggttttgtgaatgccttgaggcaaaaaccaggatgctgaaggcagtgctaatcaaccacttcattaggaacactgctgtactccgaagcacataatatttatcatgaaaycatcatgtgtgtgaacactcatctacctcacctgctgaggaaacttgcacactggcatctcctgccttttccccctccagttttgtttacatcctcagagatacacatttcctctttagcccatgcaaaggaagggatatttgtggcatcagtgtatgcattgccatggttacctagttcatctgcagcaaaaggggttggtccatgacctgacactacagctccaggaaagcattcctcccttgttggccactacagaagtgtgggggttttttttccataaaaatctgaatgcaagca

SEQ ID NO: 22305 - DNA, 599 bp, Chicken  19866894234642_1
  misc_feature (1)..(10): n is any nucleotide
nnnnnnnnnntgtttgtctgctaagggcatcaaaaaaaggttttctgttttgtttttgctctgtgtttgtattggtgattctgtttctgccttgattctagaagtctttagctttgtatgattctcttccacgttagccactttcatagaatcacaggatggtttgggttggaggcgaccctaaaacccacccagccatgggcagggctgccccccaccagctcagactgcccagggcccatccaacctggccttgggcacctccagggatggggcacccacaactctgggcagcagtgycagggcctcaccgccccgagtaaagaatttcctcctaacgtctaatacagatctccccttttctattttgaaaccattctatcttgtcctattcactatcagatcatgtaaaagatcagtcttcttcctatttataagctctcttcaagyactggaaggccacactttggtcagcccagagctgaacaagcccagatccctcaacttttcttcataggacaaaygttccatccctccraacacctttgtggcctactctggacctgcttcaacatctccacrtccttctcagccccagg

SEQ ID NO: 22306 - DNA, 600 bp, Chicken  19866894234642_2
atcacaggatggtttgggttggaggcgaccctaaaacccacccagccatgggcagggctgccccccaccagctcagactgcccagggcccatccaacctggccttgggcacctccagggatggggcacccacaactctgggcagcagtgycagggcctcaccgccccgagtaaagaatttcctcctaacgtctaatacagatctccccttttctattttgaaaccattctatcttgtcctattcactatcagatcatgtaaaagatcagtcttcttcctatttataagctctcttcaagyactggaaggccacactttggtcagcccagagctgaacaagcccagatccctcaacttttcttcataggacaaaygttccatccctccraacacctttgtggcctactctggacctgcttcaacatctccacrtccttctcagccccaggcctggacacagtactccagatgggtctcgggagagcagagcagaggagggaaatcacctctctctgctgccacccctctttggatgctgcccaggatacagttgagcttctgggctgcaggtgcacactgctggctcactttcatagctga

SEQ ID NO: 22307 - DNA, 600 bp, Chicken  19866894234642_3
agactgcccagggcccatccaacctggccttgggcacctccagggatggggcacccacaactctgggcagcagtgycagggcctcaccgccccgagtaaagaatttcctcctaacgtctaatacagatctccccttttctattttgaaaccattctatcttgtcctattcactatcagatcatgtaaaagatcagtcttcttcctatttataagctctcttcaagyactggaaggccacactttggtcagcccagagctgaacaagcccagatccctcaacttttcttcataggacaaaygttccatccctccraacacctttgtggcctactctggacctgcttcaacatctccacrtccttctcagccccaggcctggacacagtactccagatgggtctcgggagagcagagcagaggagggaaatcacctctctctgctgccacccctctttggatgctgcccaggatacagttgagcttctgggctgcaggtgcacactgctggctcactttcatagctgaaggttttcaggtctgttgctacagtccattgcttcctctttgctaaaggaaagctactctcctttctgtttgtt

SEQ ID NO: 22308 - DNA, 600 bp, Chicken  19866894234642_4
ccatccaacctggccttgggcacctccagggatggggcacccacaactctgggcagcagtgycagggcctcaccgccccgagtaaagaatttcctcctaacgtctaatacagatctccccttttctattttgaaaccattctatcttgtcctattcactatcagatcatgtaaaagatcagtcttcttcctatttataagctctcttcaagyactggaaggccacactttggtcagcccagagctgaacaagcccagatccctcaacttttcttcataggacaaaygttccatccctccraacacctttgtggcctactctggacctgcttcaacatctccacrtccttctcagccccaggcctggacacagtactccagatgggtctcgggagagcagagcagaggagggaaatcacctctctctgctgccacccctctttggatgctgcccaggatacagttgagcttctgggctgcaggtgcacactgctggctcactttcatagctgaaggttttcaggtctgttgctacagtccattgcttcctctttgctaaaggaaagctactctcctttctgtttgtttataaagaacgcaa

SEQ ID NO: 22309 - DNA, 600 bp, Chicken  19866894234642_5
aactctgggcagcagtgycagggcctcaccgccccgagtaaagaatttcctcctaacgtctaatacagatctccccttttctattttgaaaccattctatcttgtcctattcactatcagatcatgtaaaagatcagtcttcttcctatttataagctctcttcaagyactggaaggccacactttggtcagcccagagctgaacaagcccagatccctcaacttttcttcataggacaaaygttccatccctccraacacctttgtggcctactctggacctgcttcaacatctccacrtccttctcagccccaggcctggacacagtactccagatgggtctcgggagagcagagcagaggagggaaatcacctctctctgctgccacccctctttggatgctgcccaggatacagttgagcttctgggctgcaggtgcacactgctggctcactttcatagctgaaggttttcaggtctgttgctacagtccattgcttcctctttgctaaaggaaagctactctcctttctgtttgtttataaagaacgcaaatgatagttttaaaaggctttctttagcttaaaaatctgcctta

SEQ ID NO: 22310 - DNA, 600 bp, Chicken  19866894234648_1
attatcactgcaaagactttttatttttattgggacctgtaacagcattgtggtatgttaattatcagcgatgtaacaaaaacgcagcaagcttttctccttccttccttcctttccttctccgtgggcataatgaaaacagaggtggcctgaccgtgggccggcatttcagctggcatgctttatgctgtagctcagaggaacaaggaggtcactttcccatggcaggcagccacacccctacgatgtgcatagcctcctgtatcccaggtgacccctaacaacgtgcctggagatgcrctcagggcacyatttggtgaggacaggcccttttgggaaaaagggaagtaaggcagggcttgcaggtcacaatctcagcagatgcaggcaccagaaagtcagcaactgtgatcagatttattttaggatatcctggtctgcagaacatcctgaggatcgagaaagctgcagtcccacatgccagactcgtcagtggtcagaccacaaaggtgatgtcagtcctaaaatgcagcaagcaggaagagagcaagcagcaagttatcatctcctgcctttgaaagacatagcttcctccagtac

SEQ ID NO: 22311 - DNA, 600 bp, Chicken  19866894234648_2
aaagactttttatttttattgggacctgtaacagcattgtggtatgttaattatcagcgatgtaacaaaaacgcagcaagcttttctccttccttccttcctttccttctccgtgggcataatgaaaacagaggtggcctgaccgtgggccggcatttcagctggcatgctttatgctgtagctcagaggaacaaggaggtcactttcccatggcaggcagccacacccctacgatgtgcatagcctcctgtatcccaggtgacccctaacaacgtgcctggagatgcrctcagggcacyatttggtgaggacaggcccttttgggaaaaagggaagtaaggcagggcttgcaggtcacaatctcagcagatgcaggcaccagaaagtcagcaactgtgatcagatttattttaggatatcctggtctgcagaacatcctgaggatcgagaaagctgcagtcccacatgccagactcgtcagtggtcagaccacaaaggtgatgtcagtcctaaaatgcagcaagcaggaagagagcaagcagcaagttatcatctcctgcctttgaaagacatagcttcctccagtacttgaccacttt

SEQ ID NO: 22312 - DNA, 599 bp, Chicken  19866894234651_1
  misc_feature (1)..(135): n is any nucleotide
nnnnnnnnnnnnnnnnnnnnnnnnnnnnnnnnnnnnnnnnnnnnnnnnnnnnnnnnnnnnnnnnnnnnnnnnnnnnnnnnnnnnnnnnnnnnnnnnnnnnnnnnnnnnnnnnnnnnnnnnnnnnnnnnnnnnnnngcaatactgctttaatggcttcacccaaacccttcttccttgcctgctttttcccattgctcactatctatgtggactcacgcagctgccagcagggcggtgggggatctcctttggttaaattctatggcttatgatttttatttgtccattgattgtagacayagacataaaaacaaaacaaaactaatgtgctcttcatcagccaatccaacattttgttcaaatacctgcattaatattcttgtacattctagctctcaaacccaggaaacctcacragtgacttccgtgctataacaccccgagggaaatcgagagctttaaggtatctttagcattttgacatcaaagccttcacagaaagagactcgcctgatgccatctggaagcagaagatggcacaattatatccgcaatcccatttgcccactgttcagccttgcatgaaacggctccttgag

SEQ ID NO: 22313 - DNA, 599 bp, Chicken  19866894234651_2
  misc_feature (1)..(19): n is any nucleotide
nnnnnnnnnnnnnnnnnnngcaatactgctttaatggcttcacccaaacccttcttccttgcctgctttttcccattgctcactatctatgtggactcacgcagctgccagcagggcggtgggggatctcctttggttaaattctatggcttatgatttttatttgtccattgattgtagacayagacataaaaacaaaacaaaactaatgtgctcttcatcagccaatccaacattttgttcaaatacctgcattaatattcttgtacattctagctctcaaacccaggaaacctcacragtgacttccgtgctataacaccccgagggaaatcgagagctttaaggtatctttagcattttgacatcaaagccttcacagaaagagactcgcctgatgccatctggaagcagaagatggcacaattatatccgcaatcccatttgcccactgttcagccttgcatgaaacggctccttgagtgcagagacactggaccaaattcatgtgaacaacgtggtaagcaatattcctatttattaaatgaacgctgttctactcatcacgacacgattygttttcatgatttctgacgaca

SEQ ID NO: 22314 - DNA, 540 bp, Chicken  19866894234651_3
tctcaaacccaggaaacctcacragtgacttccgtgctataacaccccgagggaaatcgagagctttaaggtatctttagcattttgacatcaaagccttcacagaaagagactcgcctgatgccatctggaagcagaagatggcacaattatatccgcaatcccatttgcccactgttcagccttgcatgaaacggctccttgagtgcagagacactggaccaaattcatgtgaacaacgtggtaagcaatattcctatttattaaatgaacgctgttctactcatcacgacacgattygttttcatgatttctgacgacaacaataccctcagcctcccttcctgttttcagagtccttcaccttttcttaaaatcaaattaaattgaaaaacaaagtagcatcaactctagttaattgctgtgtatcctcagggtggccaaatgaagaacctaaggctaacagatatgcagcacacatgagactccgtggtccaaaaatagagaaacaacaccatgtgcaagaaacccaagtaatac

SEQ ID NO: 22315 - DNA, 600 bp, Chicken  19866894234656_1
gtcttgattttctgctcattcatacatctcacatacctttactatttgaggtgcctacaataccttttcttttaaacaatacactaaaaatctagttttataagcaatttttcacatttctgtagctttgtttacctagaatacctatcatggaacatttaacaccagagcagtaacttagatttatctagagtttcttctggaatacctaggccaacatgaattatccaggaaagtaaggacttcgattacagaatagagcatgcaaacaaaatgttctggaatagtatagtttatctwgtaaacttctcttaaaaaaaaaatatttagtggtgatcacttagggctaaaaatattttcataagttgcaatagaagaataactagcttctgaatgaatgttattgatgtctgttcaaagcatgactcatctgctccaacatacttgtgggaatgacagtcaatattctctgacttggaagtctcacaaatgtttttagataaagcatttaatgtcatattcaaggaggaaaggagggaaaggagagagcttgaaagataagtaaaaagacctttatcgggaaatatgtaatcttggtga

SEQ ID NO: 22316 - DNA, 600 bp, Chicken  19866894234658_1
ttgatctaccaatagattcttttcctacagcacattcacttattaaagcttctgatggtaagagaggaatggccttctgtagaaattaaactactgctgaagagcccttttgtggggggcgttcactgctcgccacaaacagcccaagtgattggggagggctggaattcacatgcagaaatgacgagcaatttctctgtaggtgttgttccaatttagagacagaaatagtggcctctgtcccctaccctacatggatgggtgacgtgggagtttgaggccaatgggtttgtgtaagcrtggagacaacacagagaaatataatactgtaagttcctcctcttcttgactgtagctggatgggctggatctgtttaccatcacactgagcgttttgtcacttggttacttctgcagggtgtaatgccaaactgctttaggaatccccaggctgactctgaggaggcttgcacctatacagtgctaaacctcatgcagaactgggggcagtttactcagtgagctcaaagtctctgcagcaccctgtcttgtgggagaggtgcaagcatgctatgtcccacgctcattgtgcttcccctg

SEQ ID NO: 22317 - DNA, 600 bp, Chicken  19866894234662_1
tatgctccattgacctcatagtaaagaagtgcctcttgatgtttaggcagaacttaatgtacaccagcttgttctcagtgcttattgccctggcactggacactgttgccctggccaatctttgcctttcttgcacccaacctcctggtattgtgatggtttcatactgatgggcagctacattctaccatgcagctctctcattcctctcttcaaaagaataaggggagaaaatatgatgtaaaaagtctcaaagattgatataatgacagaggcatcattcaccaattgctgtcatgrgcaaaataaactcagagtaaagagaktaaaatagtttactgcatctagtaaccagatagagcartgataaactataaaccagttaaaaccaccttcttcccatccactcycttctacctcttgtacccaaggcacaatgaaacaataaatgggggctgcagtcagcccacagttcttagactcttctctcataagtctgcctatagcactgcccacccatctcgccctcccccctccagaaaaaaaaaaaacaaccaccctactatgcattatatgcacagataaggtcccccccgagtc

SEQ ID NO: 22318 - DNA, 600 bp, Chicken  19866894234662_2
aagtgcctcttgatgtttaggcagaacttaatgtacaccagcttgttctcagtgcttattgccctggcactggacactgttgccctggccaatctttgcctttcttgcacccaacctcctggtattgtgatggtttcatactgatgggcagctacattctaccatgcagctctctcattcctctcttcaaaagaataaggggagaaaatatgatgtaaaaagtctcaaagattgatataatgacagaggcatcattcaccaattgctgtcatgrgcaaaataaactcagagtaaagagaktaaaatagtttactgcatctagtaaccagatagagcartgataaactataaaccagttaaaaccaccttcttcccatccactcycttctacctcttgtacccaaggcacaatgaaacaataaatgggggctgcagtcagcccacagttcttagactcttctctcataagtctgcctatagcactgcccacccatctcgccctcccccctccagaaaaaaaaaaaacaaccaccctactatgcattatatgcacagataaggtcccccccgagtcttcttttcttaacaccagccttctgt

SEQ ID NO: 22319 - DNA, 600 bp, Chicken  19866894234662_3
cagcttgttctcagtgcttattgccctggcactggacactgttgccctggccaatctttgcctttcttgcacccaacctcctggtattgtgatggtttcatactgatgggcagctacattctaccatgcagctctctcattcctctcttcaaaagaataaggggagaaaatatgatgtaaaaagtctcaaagattgatataatgacagaggcatcattcaccaattgctgtcatgrgcaaaataaactcagagtaaagagaktaaaatagtttactgcatctagtaaccagatagagcartgataaactataaaccagttaaaaccaccttcttcccatccactcycttctacctcttgtacccaaggcacaatgaaacaataaatgggggctgcagtcagcccacagttcttagactcttctctcataagtctgcctatagcactgcccacccatctcgccctcccccctccagaaaaaaaaaaaacaaccaccctactatgcattatatgcacagataaggtcccccccgagtcttcttttcttaacaccagccttctgttgtatctgttcgacttcctgcacataaagttgggccgt

SEQ ID NO: 22320 - DNA, 600 bp, Chicken  19866894234662_4
ctggccaatctttgcctttcttgcacccaacctcctggtattgtgatggtttcatactgatgggcagctacattctaccatgcagctctctcattcctctcttcaaaagaataaggggagaaaatatgatgtaaaaagtctcaaagattgatataatgacagaggcatcattcaccaattgctgtcatgrgcaaaataaactcagagtaaagagaktaaaatagtttactgcatctagtaaccagatagagcartgataaactataaaccagttaaaaccaccttcttcccatccactcycttctacctcttgtacccaaggcacaatgaaacaataaatgggggctgcagtcagcccacagttcttagactcttctctcataagtctgcctatagcactgcccacccatctcgccctcccccctccagaaaaaaaaaaaacaaccaccctactatgcattatatgcacagataaggtcccccccgagtcttcttttcttaacaccagccttctgttgtatctgttcgacttcctgcacataaagttgggccgtttgtgtgctcagaggaggatgcccttgaagatcaatgggctattct

SEQ ID NO: 22321 - DNA, 600 bp, Chicken  19866894234665_1
gttgtaccttagatcaaatcataacttccctcatgaattctgagcaaaatgcattttttttttaacatcagaaccccccacctttttaatggcaaaaatgacattgactatattgttggagaagcaaagtgcatgtgttcttatagttgtcatttttcaccagcctcatttaccatgcttgccttgacccaataaagtctggaagggatgaaaccacatgaccaaatgaaatggaaaaacattctgtcaactcagattaaaacaactgaaacttctccttgtccactgtgtaactgataytaaagccttaaaggtcttagaagtacattgttcaggaatatcaggcagtccctgtggcaggtttttatgagaaaattgmtgttgctttcacagtccagcacttggaatattcacagggaaagaagcaattcccacatttttttttttattatttatctgaaaaaaaaaaaaaaattaaaaagagytgtgacaatctctcatggaaagtgagatgaattttagaactcctgtaagcacacccagtgtgagcactgcttgaagaaaaataccagcctaatcatgagaaaatattatcattta

SEQ ID NO: 22322 - DNA, 600 bp, Chicken  19866894234665_2
acctttttaatggcaaaaatgacattgactatattgttggagaagcaaagtgcatgtgttcttatagttgtcatttttcaccagcctcatttaccatgcttgccttgacccaataaagtctggaagggatgaaaccacatgaccaaatgaaatggaaaaacattctgtcaactcagattaaaacaactgaaacttctccttgtccactgtgtaactgataytaaagccttaaaggtcttagaagtacattgttcaggaatatcaggcagtccctgtggcaggtttttatgagaaaattgmtgttgctttcacagtccagcacttggaatattcacagggaaagaagcaattcccacatttttttttttattatttatctgaaaaaaaaaaaaaaattaaaaagagytgtgacaatctctcatggaaagtgagatgaattttagaactcctgtaagcacacccagtgtgagcactgcttgaagaaaaataccagcctaatcatgagaaaatattatcatttaattgatctctgtactgtctaaaactttaatttgaagttgaactgactccttcaggaaggataaaatatagtggagataa

SEQ ID NO: 22323 - DNA, 577 bp, Chicken  19866894234665_3
ttcttatagttgtcatttttcaccagcctcatttaccatgcttgccttgacccaataaagtctggaagggatgaaaccacatgaccaaatgaaatggaaaaacattctgtcaactcagattaaaacaactgaaacttctccttgtccactgtgtaactgataytaaagccttaaaggtcttagaagtacattgttcaggaatatcaggcagtccctgtggcaggtttttatgagaaaattgmtgttgctttcacagtccagcacttggaatattcacagggaaagaagcaattcccacamttttttttttattatttatctgaaaaaaaaaaaaaaattaaaaagagytgtgacaatctctcatggaaagtgagatgaattttagaactcctgtaagcacacccagtgtgagcactgcttgaagaaaaataccagcctaatcatgagaaaatattatcatttaattgatctctgtactgtctaaaactttaatttgaagttgaactgactccttcaggaaggataaaatatagtggagataatatgtagcaggaataggtaagcctctaacctagaa

SEQ ID NO: 22324 - DNA, 529 bp, Chicken  19866894234665_4
gacccaataaagtctggaagggatgaaaccacatgaccaaatgaaatggaaaaacattctgtcaactcagattaaaacaactgaaacttctccttgtccactgtgtaactgataytaaagccttaaaggtcttagaagtacattgttcaggaatatcaggcagtccctgtggcaggtttttatgagaaaattgmtgttgctttcacagtccagcacttggaatattcacagggaaagaagcaattcccacatttttttttttattatttatctgaaaaaaaaaaaaaaattaaaaagagytgtgacaatctctcatggaaagtgagatgaattttagaactcctgtaagcacacccagtgtgagcactgcttgaagaaaaataccagcctaatcatgagaaaatattatcatttaattgatctctgtactgtctaaaactttaatttgaagttgaactgactccttcaggaaggataaaatatagtggagataatatgtagcaggaataggtaagcctctaacctagaa

SEQ ID NO: 22325 - DNA, 599 bp, Chicken  19866894234671_1
  misc_feature (1)..(45): n is any nucleotide
nnnnnnnnnnnnnnnnnnnnnnnnnnnnnnnnnnnnnnnnnnnnnacgttatgatccaagacatattttaactgttagtacaaggtcaaggctagtggtaagctgattctcgctattgtagaactgaaaaggaatacttgattttataattctagactctgctgtggtatacatgtgtatatataatgaggactggcacattcagcattaaattctgcttctctgagtagttaagtattttactgttcaagaattagatgcagatgaagtgaggaagaaagttttccttccatgttcttkcatatcagtggatgtcatctatagatatttcttccaaattcacattcatcttgcaacaaagagtaaagggtcagcatggattcccttgggtccttggccttccatatattttggccattacaagtgagtacactattaacactgccagyttcaaggtcagcaataagttttagaaaactgtaggtattgccagcctgctaaccacattaacttgygtctatattttctcagccaaatcagggaagatgtgtaattacccataataaaatcaccagcaataaaaaacagtagcttttcca

SEQ ID NO: 22326 - DNA, 600 bp, Chicken  19866894234671_2
ttctagactctgctgtggtatacatgtgtatatataatgaggactggcacattcagcattaaattctgcttctctgagtagttaagtattttactgttcaagaattagatgcagatgaagtgaggaagaaagttttccttccatgttcttkcatatcagtggatgtcatctatagatatttcttccaaattcacattcatcttgcaacaaagagtaaagggtcagcatggattcccttgggtccttggccttccatatattttggccattacaagtgagtacactattaacactgccagyttcaaggtcagcaataagttttagaaaactgtaggtattgccagcctgctaaccacattaacttgygtctatattttctcagccaaatcagggaagatgtgtaattacccataataaaatcaccagcaataaaaaacagtagcttttccagtaaacatgtttccttatgcctttacaaatgccaagtctgactaagtagtccrgatcacagtaggaggtgaataccatgatcaaagtgctcacaaagtgccctaattttaatgaatcacttttacagatagagcaaaagcagccatcatt

SEQ ID NO: 22327 - DNA, 600 bp, Chicken  19866894234671_3
tgcttctctgagtagttaagtattttactgttcaagaattagatgcagatgaagtgaggaagaaagttttccttccatgttcttkcatatcagtggatgtcatctatagatatttcttccaaattcacattcatcttgcaacaaagagtaaagggtcagcatggattcccttgggtccttggccttccatatattttggccattacaagtgagtacactattaacactgccagyttcaaggtcagcaataagttttagaaaactgtaggtattgccagcctgctaaccacattaacttgygtctatattttctcagccaaatcagggaagatgtgtaattacccataataaaatcaccagcaataaaaaacagtagcttttccagtaaacatgtttccttatgcctttacaaatgccaagtctgactaagtagtccrgatcacagtaggaggtgaataccatgatcaaagtgctcacaaagtgccctaattttaatgaatcacttttacagatagagcaaaagcagccatcattgcctctcaratgtggctgataagtaagtagaaaatctccatctataaacaggaaactgaagcaact

SEQ ID NO: 22328 - DNA, 600 bp, Chicken  19866894234671_4
gcaacaaagagtaaagggtcagcatggattcccttgggtccttggccttccatatattttggccattacaagtgagtacactattaacactgccagyttcaaggtcagcaataagttttagaaaactgtaggtattgccagcctgctaaccacattaacttgygtctatattttctcagccaaatcagggaagatgtgtaattacccataataaaatcaccagcaataaaaaacagtagcttttccagtaaacatgtttccttatgcctttacaaatgccaagtctgactaagtagtccrgatcacagtaggaggtgaataccatgatcaaagtgctcacaaagtgccctaattttaatgaatcacttttacagatagagcaaaagcagccatcattgcctctcaratgtggctgataagtaagtagaaaatctccatctataaacaggaaactgaagcaactgaaaagaacaactgcagtttgtgcagacaggaaggtttcatgcctcccattgaacctccaaaaatataattttcagatgaaccaagataaagccagtstacataaagcagaggaagaggatttgaaaaaaaacccaa

SEQ ID NO: 22329 - DNA, 600 bp, Chicken  19866894234671_5
agcaataagttttagaaaactgtaggtattgccagcctgctaaccacattaacttgygtctatattttctcagccaaatcagggaagatgtgtaattacccataataaaatcaccagcaataaaaaacagtagcttttccagtaaacatgtttccttatgcctttacaaatgccaagtctgactaagtagtccrgatcacagtaggaggtgaataccatgatcaaagtgctcacaaagtgccctaattttaatgaatcacttttacagatagagcaaaagcagccatcattgcctctcaratgtggctgataagtaagtagaaaatctccatctataaacaggaaactgaagcaactgaaaagaacaactgcagtttgtgcagacaggaaggtttcatgcctcccattgaacctccaaaaatataattttcagatgaaccaagataaagccagtstacataaagcagaggaagaggatttgaaaaaaaacccaaatgtggactcagaatctttgggttaattcagtgactttttaaaagttaatgttgtaccattacagtgccaggtgcctctcttcccagaattaaaatgctggagtgg

SEQ ID NO: 22330 - DNA, 600 bp, Chicken  19866894234671_6
ttatgcctttacaaatgccaagtctgactaagtagtccrgatcacagtaggaggtgaataccatgatcaaagtgctcacaaagtgccctaattttaatgaatcacttttacagatagagcaaaagcagccatcattgcctctcaratgtggctgataagtaagtagaaaatctccatctataaacaggaaactgaagcaactgaaaagaacaactgcagtttgtgcagacaggaaggtttcatgcctcccattgaacctccaaaaatataattttcagatgaaccaagataaagccagtstacataaagcagaggaagaggatttgaaaaaaaacccaaatgtggactcagaatctttgggttaattcagtgactttttaaaagttaatgttgtaccattacagtgccaggtgcctctcttcccagaattaaaatgctggagtggtgtttattgtggcccgttcatccaattggatcaataagttatttcttcatctgaggattacattttcaccttctgtcttttctaacattttgtttcctcatactgcatttcatatttgtttctccaagacattctgattttgaatttgtacctaa

SEQ ID NO: 22331 - DNA, 600 bp, Chicken  19866894234680_1
ccaggcacgatttgatgcaattaaactgtgttaaatgcgttccagaactgtttcttggcctagatagcaaactagttaaactctggctttggaatctatttctgtatggtttgaccctgtacccctaggtaagctctctacttttttagatctcagatacacacagggtctgctgtcttcaaacccatggccctcccatgtctccgtgggctttttcattactctcagctcatctcagccttgtctcgagaaccatgcactgtggtgatctcattccaccacccgtaaggactgaatgcrttgcagtgagaggattttccctggcatcagctggactggtacaaaccccactgtatagctgctcagtgtatcgtagtgcagaggcaggctgtgaggttgaggcttttgtgaaggtttgccattttaattaaagaagaaggtaagccaggccttgacaaaatctcaccctggcrtctagaagtgcatatcagcattgggaaggaaataatgatgtgtttcagaggcagtgccttactgagaacgccaggctccttttcccttataggttaattgccgtataggcaaaccttgaactcttac

SEQ ID NO: 22332 - DNA, 507 bp, Chicken  19866894234680_2
tgtcttcaaacccatggccctcccatgtctccgtgggctttttcattactctcagctcatctcagccttgtctcgagaaccatgcactgtggtgatctcattccaccacccgtaaggactgaatgcrttgcagtgagaggattttccctggcatcagctggactggtacaaaccccactgtatagctgctcagtgtatcgtagtgcagaggcaggctgtgaggttgaggcttttgtgaaggtttgccattttaattaaagaagaaggtaagccaggccttgacaaaatctcaccctggcrtctagaagtgcatatcagcattgggaaggaaataatgatgtgtttcagaggcagtgccttactgagaacgccaggctccttttcccttataggttaattgccgtataggcaaaccttgaactcttacctgagtttttggcttaattttccttcttcccattccacacaaacccccctctaactcatgctttgaagtatttaaaacta

SEQ ID NO: 22333 - DNA, 600 bp, Chicken  19866894234681_1
tctatcacatcacccaggagaagaagccaacccccacttcaccacaaacctcccttttaggcagttgtagagagcagtaataaggtctcccctgtgacccgggtcatctggccagtcccatcaaacatgaccccatacagatgtcatgcttgcggccatcaactctgccctgctgttgcatgaaacatccatgtgtgttctggccttggctgcagtcccctgcctatcaagtgacattatttcagaaaggtcttcaacttcacactgtctttgagtggggttaatactattaacctttaytttgctatcctgcagctaccctactgttatttcttcagcataaaaacactttaggtgaaatgcctgaaaaatggtaacgccgacgttttcaggcttaccaatcatggctggacagagacaaagccttctgaggccgtgcattcagtgctgctggactgtggctccagctgccttaagaagccatctggggtttgttagagctttttagggctctgcgtttgtctctgtttctggagaggagaagagcatgacccattgccttccagttgcaatctggggtattcatgtctagaccattgt

SEQ ID NO: 22334 - DNA, 599 bp, Chicken  19866894234683_1
  misc_feature (1)..(250): n is any nucleotide
nnnnnnnnnnnnnnnnnnnnnnnnnnnnnnnnnnnnnnnnnnnnnnnnnnnnnnnnnnnnnnnnnnnnnnnnnnnnnnnnnnnnnnnnnnnnnnnnnnnnnnnnnnnnnnnnnnnnnnnnnnnnnnnnnnnnnnnnnnnnnnnnnnnnnnnnnnnnnnnnnnnnnnnnnnnnnnnnnnnnnnnnnnnnnnnnnnnnnnnnnnnnnnnnnnnnnnnnnnnnnnnnnnnnnnnnnnnnnnnnnnnnnnnnnnaaacagagtgttttaaaagcttgctgaaattcagaagcctgttaaagggkacggccaaaattcagtgcaaagaagacaggcagcagacagaaggggaaaaaaataagagtagcaaaccraatgggatacctcgttgatggaattacaggctgtgtttggggcagatcaagcccggtctgaaataggtgatttgccaatgtgactgtgtgcaaattcgggtgtgcaggcacacayacagcccccgcagagtgcgtgcacttagcgctggtatgaagctggatattcagctcggctgaagctgaagcaaactctgtgacccgaagtcatttcgttaaccccagccccaccg

SEQ ID NO: 22335 - DNA, 599 bp, Chicken  19866894234683_2
  misc_feature (1)..(181): n is any nucleotide
nnnnnnnnnnnnnnnnnnnnnnnnnnnnnnnnnnnnnnnnnnnnnnnnnnnnnnnnnnnnnnnnnnnnnnnnnnnnnnnnnnnnnnnnnnnnnnnnnnnnnnnnnnnnnnnnnnnnnnnnnnnnnnnnnnnnnnnnnnnnnnnnnnnnnnnnnnnnnnnnnnnnnnnnnnnnnnnnnnnnnaaacagagtgttttaaaagcttgctgaaattcagaagcctgttaaagggkacggccaaaattcagtgcaaagaagacaggcagcagacagaaggggaaaaaaataagagtagcaaaccraatgggatacctcgttgatggaattacaggctgtgtttggggcagatcaagcccggtctgaaataggtgatttgccaatgtgactgtgtgcaaattcgggtgtgcaggcacacayacagcccccgcagagtgcgtgcacttagcgctggtatgaagctggatattcagctcggctgaagctgaagcaaactctgtgacccgaagtcatttcgttaaccccagccccaccggtggatgtggttccatgcagtgctttgtgctgggaaggacrgacacctcgccgcaaggtgctgcgggar

SEQ ID NO: 22336 - DNA, 599 bp, Chicken  19866894234683_3
  misc_feature (1)..(72): n is any nucleotide
nnnnnnnnnnnnnnnnnnnnnnnnnnnnnnnnnnnnnnnnnnnnnnnnnnnnnnnnnnnnnnnnnnnnnnnnaaacagagtgttttaaaagcttgctgaaattcagaagcctgttaaagggkacggccaaaattcagtgcaaagaagacaggcagcagacagaaggggaaaaaaataagagtagcaaaccraatgggatacctcgttgatggaattacaggctgtgtttggggcagatcaagcccggtctgaaataggtgatttgccaatgtgactgtgtgcaaattcgggtgtgcaggracacayacagcccccgcagagtgcgtgcacttagcgctggtatgaagctggatattcagctcggctgaagctgaagcaaactctgtgacccgaagtcatttcgttaaccccagccccaccggtggatgtggttccatgcagtgctttgtgctgggaaggacrgacacctcgccgcaaggtgctgcgggarggcggccrcgcagtcaccctccacaagtactgaggtgtgggygctgtgccacacagctgccgtttgtcacaccggcactctgcttttcccagcggtcccaacaaagtgg

SEQ ID NO: 22337 - DNA, 599 bp, Chicken  19866894234683_4
  misc_feature (1)..(71): n is any nucleotide
nnnnnnnnnnnnnnnnnnnnnnnnnnnnnnnnnnnnnnnnnnnnnnnnnnnnnnnnnnnnnnnnnnnnnnnaaacagagtgttttaaaagcttgctgaaattcagaagcctgttaaagggkacggccaaaattcagtgcaaagaagacaggcagcagacagaaggggaaaaaaataagagtagcaaaccraatgggatacctcgttgatggaattacaggctgtgtttggggcagatcaagcccggtctgaaataggtgatttgccaatgtgactgtgtgcaaattcgggtgtgcaggcrcacayacagcccccgcagagtgcgtgcacttagcgctggtatgaagctggatattcagctcggctgaagctgaagcaaactctgtgacccgaagtcatttcgttaaccccagccccaccggtggatgtggttccatgcagtgctttgtgctgggaaggacrgacacctcgccgcaaggtgctgcgggarggcggccrcgcagtcaccctccacaagtactgaggtgtgggygctgtgccacacagctgccgtttgtcacaccggcactctgcttttcccagcggtcccaacaaagtggg

SEQ ID NO: 22338 - DNA, 599 bp, Chicken  19866894234683_5
  misc_feature (1)..(66): n is any nucleotide
nnnnnnnnnnnnnnnnnnnnnnnnnnnnnnnnnnnnnnnnnnnnnnnnnnnnnnnnnnnnnnnnnnaaacagagtgttttaaaagcttgctgaaattcagaagcctgttaaagggkacggccaaaattcagtgcaaagaagacaggcagcagacagaaggggaaaaaaataagagtagcaaaccraatgggatacctcgttgatggaattacaggctgtgtttggggcagatcaagcccggtctgaaataggtgatttgccaatgtgactgtgtgcaaattcgggtgtgcaggcacacayacagcccccgcagagtgcgtgcacttagcgctggtatgaagctggatattcagctcggctgaagctgaagcaaactctgtgacccgaagtcatttcgttaaccccagccccaccggtggatgtggttccatgcagtgctttgtgctgggaaggacrgacacctcgccgcaaggtgctgcgggarggcggccrcgcagtcaccctccacaagtactgaggtgtgggygctgtgccacacagctgccgtttgtcacaccggcactctgcttttcccagcggtcccaacaaagtggggtccc

SEQ ID NO: 22339 - DNA, 600 bp, Chicken  19866894234683_6
aaggggaaaaaaataagagtagcaaaccraatgggatacctcgttgatggaattacaggctgtgtttggggcagatcaagcccggtctgaaataggtgatttgccaatgtgactgtgtgcaaattcgggtgtgcaggcacacayacagcccccgcagagtgcgtgcacttagcgctggtatgaagctggatattcagctcggctgaagctgaagcaaactctgtgacccgaagtcatttcgttaaccccagccccaccggtggatgtggttccatgcagtgctttgtgctgggaaggacrgacacctcgccgcaaggtgctgcgggarggcggccrcgcagtcaccctccacaagtactgaggtgtgggygctgtgccacacagctgccgtttgtcacaccggcactctgcttttcccagcggtcccaacaaagtggggtcccacatccatggagcacggtgggagatccgcagcaaatcccagggctgagcttgctgcacaaaagccgtgttaagacacaagcactgtcatgcagaacaaaccccgagagcagaagaaaagggctcagcgcccggctgaggagtggggtcacgcactgg

SEQ ID NO: 22340 - DNA, 600 bp, Chicken  19866894234683_7
raatgggatacctcgttgatggaattacaggctgtgtttggggcagatcaagcccggtctgaaataggtgatttgccaatgtgactgtgtgcaaattcgggtgtgcaggcacacayacagcccccgcagagtgcgtgcacttagcgctggtatgaagctggatattcagctcggctgaagctgaagcaaactctgtgacccgaagtcatttcgttaaccccagccccaccggtggatgtggttccatgcagtgctttgtgctgggaaggacrgacacctcgccgcaaggtgctgcgggarggcggccrcgcagtcaccctccacaagtactgaggtgtgggygctgtgccacacagctgccgtttgtcacaccggcactctgcttttcccagcggtcccaacaaagtggggtcccacatccatggagcacggtgggagatccgcagcaaatcccagggctgagcttgctgcacaaaagccgtgttaagacacaagcactgtcatgcagaacaaaccccgagagcagaagaaaagggctcagcgcccggctgaggagtggggtcacgcactgggagcgctttgtgctcggcggggacagga

SEQ ID NO: 22341 - DNA, 600 bp, Chicken  19866894234683_8
tacctcgttgatggaattacaggctgtgtttggggcagatcaagcccggtctgaaataggtgatttgccaatgtgactgtgtgcaaattcgggtgtgcaggcacacayacagcccccgcagagtgcgtgcacttagcgctggtatgaagctggatattcagctcggctgaagctgaagcaaactctgtgacccgaagtcatttcgttaaccccagccccaccggtggatgtggttccatgcagtgctttgtgctgggaaggacrgacacctcgccgcaaggtgctgcgggarggcggccrcgcagtcaccctccacaagtactgaggtgtgggygctgtgccacacagctgccgtttgtcacaccggcactctgcttttcccagcggtcccaacaaagtggggtcccacatccatggagcacggtgggagatccgcagcaaatcccagggctgagcttgctgcacaaaagccgtgttaagacacaagcactgtcatgcagaacaaaccccgagagcagaagaaaagggctcagcgcccggctgaggagtggggtcacgcactgggagcgctttgtgctcggcggggacaggacggtggct

SEQ ID NO: 22342 - DNA, 600 bp, Chicken  19866894234683_9
gcagatcaagcccggtctgaaataggtgatttgccaatgtgactgtgtgcaaattcgggtgtgcaggcacacayacagcccccgcagagtgcgtgcacttagcgctggtatgaagctggatattcagctcggctgaagctgaagcaaactctgtgacccgaagtcatttcgttaaccccagccccaccggtggatgtggttccatgcagtgctttgtgctgggaaggacrgacacctcgccgcaaggtgctgcgggarggcggccrcgcagtcaccctccacaagtactgaggtgtgggygctgtgccacacagctgccgtttgtcacaccggcactctgcttttcccagcggtcccaacaaagtggggtcccacatccatggagcacggtgggagatccgcagcaaatcccagggctgagcttgctgcacaaaagccgtgttaagacacaagcactgtcatgcagaacaaaccccgagagcagaagaaaagggctcagcgcccggctgaggagtggggtcacgcactgggagcgctttgtgctcggcggggacaggacggtggctccccaggctcacagcgagggcttggaggaaacac

SEQ ID NO: 22343 - DNA, 600 bp, Chicken  19866894234684_1
aagtaccattagaaagcaatgaataatttaactgctggcacaacttcaaccctctgtcagtcagtaagcagacccactgatgatttgcaccctcactaagggagcatctgcaaggtctgctatctctatgaagccttttcttccctaccctgccaggaaatgcacatgatttgtaccattacatttttgtacttaatcttcagcatcagccaggaacaccacagtgagggcacaacaagcaaagtttctgttaaataactgtggctcctgcaataatagatgagacagtcaagccaacayattttaggacataaccatgaaagaagcaaacataattacagttgctaaattcatcctagtttttacagctttgcactgggaaggagagaggggtttctccaccccttaccctcttcttgtttgtcatttgttttgctttccctactcctttatcatctgcaaaatccatgttctttaatgctgttctggtatgatagacagtaactttaataatgcatgccatacccttccaggccagcaaattagtgtgaaaccccacacggaactcatatgtacctgactcctagaccactcacttca

SEQ ID NO: 22344 - DNA, 600 bp, Chicken  19866894234685_1
aatccttctgtccttgcaaatctcacttgaactttccttcaggacagaatgttttctctcttggagaagagaaggctctggggagatctcattgtgatcttccagtacttataaggagccttacaagcaggagggaaatccaatttattactcagataatgataggacaagggggaatgattgaaactaaaagaggggaggtttaagttggatgttaggaagaaattcttcacttgtagggtggtgagatgctggagtgggctgcccagagaagctgtggatgtcccatctctggaggcygggcttgatgggttgctgggcagtctgatctagtggctggcaatcctgcccacagcaagggagttggaaatagatgatccttataaatgatgaggtgtatacaagtgtaaatatggagcaaaccatagctatggacattcttgtctgggttttttttagtgtgaagttccctagcaagtgcttccttggcatgttttctatgatcagagtagctctcgagcccagacatccagactgctcaggcatttgtaagcatgcagtcaagctcagctaaagtgggtcctggggaacttgaatgca

SEQ ID NO: 22345 - DNA, 599 bp, Chicken  19866894234687_1
  misc_feature (1)..(46): n is any nucleotide
nnnnnnnnnnnnnnnnnnnnnnnnnnnnnnnnnnnnnnnnnnnnnntctctttctgtccttctgctctgttcagtttgatatcaaaaacatctttcattactttttgaaatagatgctattattccttttgatggttcctttctatgggcattacggtcaactgtatgtgattggttttagatgactttccttgaatgctgttcagtaattaggtctgaccaatgatgtaagcatatctgaataaaaagttcagtaggtgtcttgatagtaatcattagaacctgtgtagatttttcatrgatatggacatttacagatgattatcttaagcataattatgagactagagtattacattatcagttagcttttccacatatttacayctggtgcagagagaaagggaaaagctggggaatttgttttgtgcacacagcatcctaaaatcaggtacttcttgagctgtgatctaggtacagttccatgtggagtgattacttagctcagtgatgtgtttgtcattctcaaattctacatacaaacatgaataatttcaattgtgattgcaaaatgtttgtataattgcaattctgtytta

SEQ ID NO: 22346 - DNA, 600 bp, Chicken  19866894234687_2
acatctttcattactttttgaaatagatgctattattccttttgatggttcctttctatgggcattacggtcaactgtatgtgattggttttagatgactttccttgaatgctgttcagtaattaggtctgaccaatgatgtaagcatatctgaataaaaagttcagtaggtgtcttgatagtaatcattagaacctgtgtagatttttcatrgatatggacatttacagatgattatcttaagcataattatgagactagagtattacattatcagttagcttttccacatatttacayctggtgcagagagaaagggaaaagctggggaatttgttttgtgcacacagcatcctaaaatcaggtacttcttgagctgtgatctaggtacagttccatgtggagtgattacttagctcagtgatgtgtttgtcattctcaaattctacatacaaacatgaataatttcaattgtgattgcaaaatgtttgtataattgcaattctgtyttagtctcctttctacccccacctaataaaatatgagattaggtagaaaagaagaaatacatacaaagacaatgctggatggccagatata

SEQ ID NO: 22347 - DNA, 600 bp, Chicken  19866894234687_3
catrgatatggacatttacagatgattatcttaagcataattatgagactagagtattacattatcagttagcttttccacatatttacayctggtgcagagagaaagggaaaagctggggaatttgttttgtgcacacagcatcctaaaatcaggtacttcttgagctgtgatctaggtacagttccatgtggagtgattacttagctcagtgatgtgtttgtcattctcaaattctacatacaaacatgaataatttcaattgtgattgcaaaatgtttgtataattgcaattctgtyttagtctcctttctacccccacctaataaaatatgagattaggtagaaaagaagaaatacatacaaagacaatgctggatggccagatatattcagtggcttccacataaaaagtgactaagtagtctaggagtcttcagactggaaagattactgaagagtgagatcatagccgtctattaaaatcatgaatatgacgtgaaagaagagaagtaggatacagctatttatttacgtattgtctttttctgttacaagagctaggagtatcagagtagcaagcggatagtccaaaaaaag

SEQ ID NO: 22348 - DNA, 600 bp, Chicken  19866894234689_1
tccactgagaaggggaacaagaagtcactgggcttaatttgcattaaagagaatttacatcggcaacttttctcagataaactcactaatcttttagaaaagaggtagaaaagttgggaaatcaaaaagctgtatagctttaagtgcacacacaacactgtcctgtgtgactgcagcctacaatttctatgctagctttgtacacagtctctgagtctcttttgttcactcttcactgatgtctacaggtaattttaacaaatatacaaactattaacatttcagatgtattttctctcktatctccattccaaaaagaaaaagaaagatcattaggaagatttttggtgttcactggcatattggcgatataaggaaggatgcactcgatgttttatttatattcataaaatttgtgacaagtataaggtgtttaataccatttgttttctacattagaggatatgaatgatccaaaagtataagtgaaagtgagtatatacctaaaaggtagagtattttgaaatagaaaccattcatagataggtgaaatagggaaaagggagaaagaagggactggaggagaactttttttacttg

SEQ ID NO: 22349 - DNA, 600 bp, Chicken  19866894234692_1
agcccaggggatgctgctggtggggaggggagggaggctgtgatggcttttgcccccccactatgcctcatgggttttggtccccgggggggaggcacagaacaaagggtgggggttggaagcccccggcatggccccccccagacccctgtctctgtttacatgcccggctccctgcagtttacagcccctcctctgtgtgccatgagggtccgggctgccacgtggggactgtccccttcctgggaccctcctgtccctctgctgctccccagctgggcgctgcagggctcggggaakgggggggggggtcacaggtggcctttttctcatagtggcttctccaagggctattctccaggctgggctccccgcctgctgctcctttctgacactaattcctgccatgggtgggtttgggatgggatcacgctgggggacggggagggcaggggcatgatgctggctcccggccctgtgcaacccccctgccattccctgggggtgtcactgtgccaaattcctgctgggctccccatccctgcaggggctgtggtgatgtggctctgtccctgcggggctcagcctggtgcccgccca

SEQ ID NO: 22350 - DNA, 600 bp, Chicken  19866894234693_1
acaattgctaagctactcttctgttccaccttcagatttagaaatatgtttaaatactgaggattccaacagttttcatcataattccctgaaaaaaaaggtcagcaaattcgtttggcagtcctttttgtttgttgtataattcccatttcctgtttccctaggcaaccatccttccaaaatgtatttgtgaaaaacacgtgatctttgtttacagatcctgtttgtctcatttctctttctgggtcagtttacaaaggctggtaaaggttcctggacttcaatcaagattttggcatkaaaaattctcagaactcttgtattttgcaaattcttccctgcaattaactacacacacagcctagaaaacaagacctgtgcaaataagccatttaatattgcttttcaagaacacacaaaacagtgttttgtaaacctattctctaatagacttgcatctcatactttactgttttcatttggtacgctaggaaagtaataaatgtcaatttgaaaattctaggcaaaaaagcgttaccagaatgtttagcaaaactgaaaagcaaacatttcttaaaaacaattacctttttatgtaaa

SEQ ID NO: 22351 - DNA, 600 bp, Chicken  19866894234696_1
cactttgggataaatccaataaaaggctttggtgactgcaagcaaggtgcttatcgcagcttacctggagcctggatttatttatttatttatttatttatttattttgcaacatcatcaccccttttgtattgcaccttcctcaatcctgatgtttagtttgcgttctgtagtactcctttgatatgaagacttaagggaggacgatcttaccgggcaacaacattccatcccctgcatatctttatgaatgttgttgtgcatcactttgatcaaacccctggggaaggatagcctccytttatctagtttttattatctaacagagattggcttgaaatgccagtgtcagacagacagaatgcaagaggcagaaggacttgcagacaaaaattgaaagtcttttatacagtgggccagtggatgtcatacagggagaaagaggagggtctggatcacacaggtaacctgcggtatgtaaactccacctaaatcctgctgtgggtgcctgcatcttcagagatggcagaaagcactcagcctccaatgggccctgcacaggtagatgtatctgttaagctcactgtacagctggagctt

SEQ ID NO: 22352 - DNA, 600 bp, Chicken  19866894234704_1
tctccttaccagtcctttttcttttctttttctgggtgtgaggagaaagagaaacagaatttcctggaagtgtgacctaagtaattttcctctccagagtacaagagatgcaaatatcatttgttgcgaagatgatcatttaggaatggaagggtctttttcttccatcactctgtgatgtgtgtggtgtatataaaacatagaattatatactgtgcatgtgtattatgtcatctcagatatggtagtgtatttgttatcaatgaatgataactgtagactaaaaaatgaatattcctkaaatctttctgtgctataaagattaaagcatctttcctttgaaattgagactaaggagatacaagtctgagcccttgttstaggtgtgaagatattggataatgttgctgatgaacagtatgaatttttggtttgtactgagatcaggaaaagagtttgacattacagtgcaagcgctgaatagcttgcatacatttctctgcttttgctctctatcacctttgcatgaatcctgcattgcaatagctcctgtgcacacttaagtacaggcatacaagacttgaagaaaagtgtattact

SEQ ID NO: 22353 - DNA, 600 bp, Chicken  19866894234704_2
gtaattttcctctccagagtacaagagatgcaaatatcatttgttgcgaagatgatcatttaggaatggaagggtctttttcttccatcactctgtgatgtgtgtggtgtatataaaacatagaattatatactgtgcatgtgtattatgtcatctcagatatggtagtgtatttgttatcaatgaatgataactgtagactaaaaaatgaatattcctkaaatctttctgtgctataaagattaaagcatctttcctttgaaattgagactaaggagatacaagtctgagcccttgttstaggtgtgaagatattggataatgttgctgatgaacagtatgaatttttggtttgtactgagatcaggaaaagagtttgacattacagtgcaagcgctgaatagcttgcatacatttctctgcttttgctctctatcacctttgcatgaatcctgcattgcaatagctcctgtgcacacttaagtacaggcatacaagacttgaagaaaagtgtattactcctgtattgatagcagatggcattacagagataaaaagtaagccttactctcaccttgtcttgcatttcttttgtaagcc

SEQ ID NO: 22354 - DNA, 600 bp, Chicken  19866894234705_1
ttaacctttcctcagagattttattttctaaacctttgatggattttgctgccctcctgctgatgtttttcatttattggaaaagaataaaataataattatcataataaaacccactattttgctggaggcaattcagtggttgaggttttcatgtgaacccagccctcttaatcctaccaaacaggattctcctcttaatccttaatccctgagtactttagctattaatcttgagaagcatttttcccctcctcatctcagattaaccagagagtggttacccaggttactggcccstttttttcttgtacgcttccatgagttttggatctcagagagatgcatgcccagttctgtccctttcattctgatgcacttggattatgggcctttggaactttcatttatctgactggcttgctgaatgcttgctcagcaggaaaaatttaggtaacacctaatcacttgccaccttccacttgatcagaaacagcaacgtgctgtaaacatttcctgatgcttttcctactcatgtcatgttcccccactgcttgtgctgggtctgtgggagtggaaaggggaacatgaatgcagcag

SEQ ID NO: 22355 - DNA, 600 bp, Chicken  19866894234705_2; identical to SEQ ID NO: 22354

SEQ ID NO: 22356 - DNA, 600 bp, Chicken  19866894234705_3; identical to SEQ ID NO: 22354

SEQ ID NO: 22357 - DNA, 600 bp, Chicken  19866894234706_1
agatagccgttctcccaactgtgtaaagctggtctggctgttcaggctgtcacctgcctgcagagctcaggtccctcttatcagctttcgctggaatggttcaggtccaccagcagcacagtctatcaacaccagactgtgtaaaaaaatcactctcctgcttatcagctccctttaggcacaggaaggccacagttaggcctccccaggtctccccttctgttcctcaggttgcacacccccagctctcagcctgtccccattgtagaggtgctccaagctccgagcatctccgtgccytctgcagaccccactccaacagcagatgggttgagaaaaaaaccccaacaaaaaagacaaaaagacagacatacagtggagcatcatgcattgctcagaagccagtcgtgttctccatccctactgcagcaagatgctcctcgtgcaagggcacacagctccccaggacaagggcgctgctcccagcagccaggtgctgttcctttggcagatggctgcattggctccacagcctcacctgtactcacagtggaaagaaagatactgagcctcagcacagaaggctgtaatgaggattaa

SEQ ID NO: 22358 - DNA, 600 bp, Chicken  19866894234708_1
gagctgtcaaatgagaccaattgctttgacacctgccataaggcacttttaagagagagaactgtcaggaagagggagcctggggcaggtctgatttactttgtggatgggtttttcagtgctttaaaaagagaaccaaagcaacatcttgatctgatgacacccagtgtggcctcttgttgcagggtatgcttgagagctgtgggcaaccacagagctgaagctgatggggcttgagctttgactcatcatgtgtcatagcaaccagctatcaagagcataaagcttaatagggaaaarcagttatttttaasatcaaaatcaaaatgaaacaaagggattgttttctgttaaakatagagctaggagctgtaaattgtatgcagacttggagcttggacgtgagctcatcccaaaagagtttataaagagccytgttgttcttttctmatcaatgcaggtgttgatgacgttttaccagctggaaattctggaagaagatgtaattctcaactggttctctctgcgggacacatctgacaagggaaagcagcttcgtaaaaaccagagggtaagtcccagaagtgtggagtttaktgt

SEQ ID NO: 22359 - DNA, 600 bp, Chicken  19866894234708_2
gaccaattgctttgacacctgccataaggcacttttaagagagagaactgtcaggaagagggagcctggggcaggtctgatttactttgtggatgggtttttcagtgctttaaaaagagaaccaaagcaacatcttgatctgatgacacccagtgtggcctcttgttgcagggtatgcttgagagctgtgggcaaccacagagctgaagctgatggggcttgagctttgactcatcatgtgtcatagcaaccagctatcaagagcataaagcttaatagggaaaarcagttatttttaasatcaaaatcaaaatgaaacaaagggattgttttctgttaaakatagagctaggagctgtaaattgtatgcagacttggagcttggacgtgagctcatcccaaaagagtttataaagagccytgttgttcttttctmatcaatgcaggtgttgatgacgttttaccagctggaaattctggaagaagatgtaattctcaactggttctctctgcgggacacatctgacaagggaaagcagcttcgtaaaaaccagagggtaagtcccagaagtgtggagtttaktgtgtgtgtgkgtgtgt

SEQ ID NO: 22360 - DNA, 600 bp, Chicken  19866894234708_3
gagaactgtcaggaagagggagcctggggcaggtctgatttactttgtggatgggtttttcagtgctttaaaaagagaaccaaagcaacatcttgatctgatgacacccagtgtggcctcttgttgcagggtatgcttgagagctgtgggcaaccacagagctgaagctgatggggcttgagctttgactcatcatgtgtcatagcaaccagctatcaagagcataaagcttaatagggaaaarcagttatttttaasatcaaaatcaaaatgaaacaaagggattgttttctgttaaakatagagctaggagctgtaaattgtatgcagacttggagcttggacgtgagctcatcccaaaagagtttataaagagccytgttgttcttttctmatcaatgcaggtgttgatgacgttttaccagctggaaattctggaagaagatgtaattctcaactggttctctctgcgggacacatctgacaagggaaagcagcttcgtaaaaaccagagggtaagtcccagaagtgtggagtttaktgtgtgtgtgkgtgtgtgtgtgtgtgtgttgcaacagctactagaaggaactgcagtgt

SEQ ID NO: 22361 - DNA, 600 bp, Chicken  19866894234708_4
ccaaagcaacatcttgatctgatgacacccagtgtggcctcttgttgcagggtatgcttgagagctgtgggcaaccacagagctgaagctgatggggcttgagctttgactcatcatgtgtcatagcaaccagctatcaagagcataaagcttaatagggaaaarcagttatttttaasatcaaaatcaaaatgaaacaaagggattgttttctgttaaakatagagctaggagctgtaaattgtatgcagacttggagcttggacgtgagctcatcccaaaagagtttataaagagccytgttgttcttttctmatcaatgcaggtgttgatgacgttttaccagctggaaattctggaagaagatgtaattctcaactggttctctctgcgggacacatctgacaagggaaagcagcttcgtaaaaaccagagggtaagtcccagaagtgtggagtttaktgtgtgtgtgkgtgtgtgtgtgtgtgtgttgcaacagctactagaaggaactgcagtgttgggttcaatgccactgtcaccttctgtggaatagctgctgttgcatggttggccagtaatgcaccagtgtattgaatg

SEQ ID NO: 22362 - DNA, 600 bp, Chicken  19866894234708_5
gatctgatgacacccagtgtggcctcttgttgcagggtatgcttgagagctgtgggcaaccacagagctgaagctgatggggcttgagctttgactcatcatgtgtcatagcaaccagctatcaagagcataaagcttaatagggaaaarcagttatttttaasatcaaaatcaaaatgaaacaaagggattgttttctgttaaakatagagctaggagctgtaaattgtatgcagacttggagcttggacgtgagctcatcccaaaagagtttataaagagccytgttgttcttttctmatcaatgcaggtgttgatgacgttttaccagctggaaattctggaagaagatgtaattctcaactggttctctctgcgggacacatctgacaagggaaagcagcttcgtaaaaaccagagggtaagtcccagaagtgtggagtttaktgtgtgtgtgkgtgtgtgtgtgtgtgtgttgcaacagctactagaaggaactgcagtgttgggttcaatgccactgtcaccttctgtggaatagctgctgttgcatggttggccagtaatgcaccagtgtattgaatgctgaacagtgcaact

SEQ ID NO: 22363 - DNA, 600 bp, Chicken  19866894234708_6
aarcagttatttttaasatcaaaatcaaaatgaaacaaagggattgttttctgttaaakatagagctaggagctgtaaattgtatgcagacttggagcttggacgtgagctcatcccaaaagagtttataaagagccytgttgttcttttctmatcaatgcaggtgttgatgacgttttaccagctggaaattctggaagaagatgtaattctcaactggttctctctgcgggacacatctgacaagggaaagcagcttcgtaaaaaccagagggtaagtcccagaagtgtggagtttaktgtgtgtgtgkgtgtgtgtgtgtgtgtgttgcaacagctactagaaggaactgcagtgttgggttcaatgccactgtcaccttctgtggaatagctgctgttgcatggttggccagtaatgcaccagtgtattgaatgctgaacagtgcaactttactgtccagaatggatatttctgtgcattctgctgtaatcatccttttttgatgaagaatagaggtaggaggaggggagcattgtttttagtgagttcagtagcatgtggcttgtgctttctggagtagcagcacggttttctct

SEQ ID NO: 22364 - DNA, 600 bp, Chicken  19866894234708_7
rcagttatttttaasatcaaaatcaaaatgaaacaaagggattgttttctgttaaakatagagctaggagctgtaaattgtatgcagacttggagcttggacgtgagctcatcccaaaagagtttataaagagccytgttgttcttttctmatcaatgcaggtgttgatgacgttttaccagctggaaattctggaagaagatgtaattctcaactggttctctctgcgggacacatctgacaagggaaagcagcttcgtaaaaaccagagggtaagtcccagaagtgtggagtttaktktgtgtgtgkgtgtgtgtgtgtgtgtgttgcaacagctactagaaggaactgcagtgttgggttcaatgccactgtcaccttctgtggaatagctgctgttgcatggttggccagtaatgcaccagtgtattgaatgctgaacagtgcaactttactgtccagaatggatatttctgtgcattctgctgtaatcatccttttttgatgaagaatagaggtaggaggaggggagcattgtttttagtgagttcagtagcatgtggcttgtgctttctggagtagcagcacggttttctctaa

SEQ ID NO: 22365 - DNA, 600 bp, Chicken  19866894234708_8
tttaasatcaaaatcaaaatgaaacaaagggattgttttctgttaaakatagagctaggagctgtaaattgtatgcagacttggagcttggacgtgagctcatcccaaaagagtttataaagagccytgttgttcttttctmatcaatgcaggtgttgatgacgttttaccagctggaaattctggaagaagatgtaattctcaactggttctctctgcgggacacatctgacaagggaaagcagcttcgtaaaaaccagagggtaagtcccagaagtgtggagtttaktgtgtgtgtgkgtgtgtgtgtgtgtgtgttgcaacagctactagaaggaactgcagtgttgggttcaatgccactgtcaccttctgtggaatagctgctgttgcatggttggccagtaatgcaccagtgtattgaatgctgaacagtgcaactttactgtccagaatggatatttctgtgcattctgctgtaatcatccttttttgatgaagaatagaggtaggaggaggggagcattgtttttagtgagttcagtagcatgtggcttgtgctttctggagtagcagcacggttttctctaagccaacacc

SEQ ID NO: 22366 - DNA, 599 bp, Chicken  19866894234710_1
  misc_feature (1)..(69): n is any nucleotide
nnnnnnnnnnnnnnnnnnnnnnnnnnnnnnnnnnnnnnnnnnnnnnnnnnnnnnnnnnnnnnnnnnnnnctgtctttaagggtgttcctgaccatctcggcactgtttcatttatttatgggaagataacacctattacctattttgtgaattgtcatcgttacttttaccagctactcttacacggttctcgtattagtaaaacatttttgagataatactattttgtaatctaattcctgtcttttcatccatgagtgagaaatgaacctcgctggccaagttgaatgatagacatgwatacatgtatgtagactgaggtgtcatttgtaaaagaatgaattatttggagagttaatgggagcaacctttgatgatacagtgtcaactaaagctatttatccatcataatacctacctttatggattaaaaatagttgtatattcaaaagtaatctgaaattcagtgcctcggttgttgatstgtcagtaatttatccaaaataggccatattttatcataatatccccaaactattgggagttcatttaatagcatgctatgsttcagaaaaatatactgttcaattacagaaaaa

SEQ ID NO: 22367 - DNA, 600 bp, Chicken  19866894234710_2
cggttctcgtattagtaaaacatttttgagataatactattttgtaatctaattcctgtcttttcatccatgagtgagaaatgaacctcgctggccaagttgaatgatagacatgwatacatgtatgtagactgaggtgtcatttgtaaaagaatgaattatttggagagttaatgggagcaacctttgatgatacagtgtcaactaaagctatttatccatcataatacctacctttatggattaaaaatagttgtatattcaaaagtaatctgaaattcagtgcctcggttgttgatstgtcagtaatttatccaaaataggccatattttatcataatatccccaaactattgggagttcatttaatagcatgctatgsttcagaaaaatatactgttcaattacagaaaaaaaaaagttatattcaaacttttcttcaygtccttgctattttgaaaaagagactttagaattgcaatatatggatattaaggaacttcaaaatgtgacactttgcctaactagtaggaaaaaaaatgcaaagacaattaatttctttctataataataaaacaatgaatgttctacygcctccga

SEQ ID NO: 22368 - DNA, 561 bp, Chicken  19866894234710_3
gaacctcgctggccaagttgaatgatagacatgwatacatgtatgtagactgaggtgtcatttgtaaaagaatgaattatttggagagttaatgggagcaacctttgatgatacagtgtcaactaaagctatttatccatcataatacctacctttatggattaaaaatagttgtatattcaaaagtaatctgaaattcagtgcctcggttgttgatstgtcagtaatttatccaaaataggccatattttatcataatatccccaaactattgggagttcatttaatagcatgctatgsttcagaaaaatatactgttcaattacagaaaaaaaaaagttatattcaaacttttcttcaygtccttgctattttgaaaaagagactttagaattgcaatatatggatattaaggaacttcaaaatgtgacactttgcctaactagtaggaaaaaaaatgcaaagacaattaatttctttctataataataaaacaatgaatgttctacygcctccgaataaaaatttagtccactaaataataaaagagaacctgtaggt

SEQ ID NO: 22369 - DNA, 532 bp, Chicken  19866894234710_4
catgwatacatgtatgtagactgaggtgtcatttgtaaaagaatgaattatttggagagttaatgggagcaacctttgatgatacagtgtcaactaaagctatttatccatcataatacctacctttatggattaaaaatagttgtatattcaaaagtaatctgaaattcagtgcctcggttgttgatstgtcagtaatttatccaaaataggccatattttatcataatatccccaaactattgggagttcatttaatagcatgctatgsttcagaaaaatatactgttcaattacagsaaaaaaaaagttatattcaaacttttcttcaygtccttgctattttgaaaaagagactttagaattgcaatatatggatattaaggaacttcaaaatgtgacactttgcctaactagtaggaaaaaaaatgcaaagacaattaatttctttctataataataaaacaatgaatgttctacygcctccgaataaaaatttagtccactaaataataaaagagaacctgtaggt

SEQ ID NO: 22370 - DNA, 500 bp, Chicken  19866894234710_5
ttgtaaaagaatgaattatttggagagttaatgggagcaacctttgatgatacagtgtcaactaaagctatttatccatcataatacctacctttatggattaaaaatagttgtatattcaaaagtaatctgaaattcagtgcctcggttgttgatstgtcagtaatttatccaaaataggccatattttatcataatatccccaaactattgggagttcatttaatagcatgctatgsttcagaaaaatatactgttcaattacagaaaaaaaaaagttatattcaaacttttcttcaygtccttgctattttgaaaaagagactttagaattgcaatatatggatattaaggaacttcaaaatgtgacactttgcctaactagtaggaaaaaaaatgcaaagacaattaatttctttctataataataaaacaatgaatgttctacygcctccgaataaaaatttagtccactaaataataaaagagaacctgtaggt

SEQ ID NO: 22371 - DNA, 351 bp, Chicken  19866894234710_6
tgttgatstgtcagtaatttatccaaaataggccatattttatcataatatccccaaactattgggagttcatttaatagcatgctatgsttcagaaaaatatactgttcaattacagaaaaaaaaaagttatattcaaacttttcttcaygtccttgctattttgaaaaagagactttagaattgcaatatatggatattaaggaacttcaaaatgtgacactttgcctaactagtaggaaaaaaaatgcaaagacaattaatttctttctataataataaaacaatgaatgttctacygcctccgaataaaaatttagtccactaaataataaaagagaacctgtaggt

SEQ ID NO: 22372 - DNA, 600 bp, Chicken  19866894234714_1
ttccattatcagtactatcatttattaaccagaaattttcagtcttccctcatatggtgatgcagccttaaatattgtatggcagtgctggaaagcactgagtgttttgtagagaaactgtcatggatttgtctgaaaatcaataacattcattataaataaattatatattaccattcccagattttttctgtcgttggtgttaggttatgtgctgggaaaatgtttgtgttcaggctatttttaataatcttaatgtaggacttttttttttaagagtacttgaagtactcctaataytattggttagctctcctgcagtggaatgttactagcaaatgagctgtttcctatgctttaaagtgtactatttagggatcaaaactgaacgtttcactttttctaggctttacatcagtatttcagcatacraatagcctggaaaggccataagtcttgctttcatataagaaatgtttgttccaatctttaggcacacctttatggacagtgggaaagcactttagggggagcactcctctgttggctattttttcctctcctgtcatgtattttgagtctttcagtctatgaattcaa

SEQ ID NO: 22373 - DNA, 504 bp, Chicken  19866894234714_2
ctgaaaatcaataacattcattataaataaattatatattaccattcccagattttttctgtcgttggtgttaggttatgtgctgggaaaatgtttgtgttcaggctatttttaataatcttaatgtaggacttttttttttaagagtacttgaagtactcctaataytattggttagctctcctgcagtggaatgttactagcaaatgagctgtttcctatgctttaaagtgtactatttagggatcaaaactgaacgtttcactttttctaggctttacatcagtatttcagcatacraatagcctggaaaggccataagtcttgctttcatataagaaatgtttgttccaatctttaggcacacctttatggacagtgggaaagcactttagggggagcactcctctgttggctattttttcctctcctgtcatgtattttgagtctttcagtctatgaattcaatgtaggtcaagggcaagctttgaaaatgctggccct

SEQ ID NO: 22374 - DNA, 595 bp, Chicken  19866894234720_1
aacacaaagcattgctctttgggtgtaacagcaatagcaaagataagtgttacggcgctgatgtggttctgacgttggacaaatggattgggactcaactcctggagttcagatgtctagaaattaggtgtctacatctaagcctgtcagttgggttccttttatcgttattgggacacaacagtcaccttcaaaaggtgactcagccttgctatttcgggatctgtgccctaaaggggggcatccatagcagctgcagtgagagaaagagggcagaatgggatctgggacgcacacgaytcatggtgacccagacagaagttttgcagctatgagcagtaagctttaaaacctcttagattcaggtttcggagtcgtatcacgtatctctggcagataactgcagtcgcaatgccagctttgcatattttctgctttacccttggagcctcacactgaatcattgttgtacttgcacatttttgtgtgtgtgcgctgatctccaggtcttaatacacaaggagcaaaagcaactctaaccataacggtaaaacacatcccacaagctaaaggacaatgacaagccacctggtgt

SEQ ID NO: 22375 - DNA, 600 bp, Chicken  19866894234725_1
agaatgattcgagcaactacttctgcagattcttaactgatttttaaaagacgcatttcacattcattacttcttatatactgcaacttaatttttatattttgctctcagagatctcttttgactttcagatgctagcaggtaagctatgcatcctgaacgtgtatcagggattcaaaaggaaaaaaaaaaatcttattttcccatgaatttaattgcagatacagtaagagatgctcctcttcgggatatgaggtcttatatgcctgcccactatggaaagattttaaataatacaayttttctatttttagtttcatcttttaatagttacgtgaaaggaatttactgtcagaagatataggcataggcagaatgaaatgatttggcatagttctggcaccacttgtctcaaactggttttggagcaaacgccgtataataggagatacacctgctcaggacttaagtcatggctattttttacacccagagtaaagtacagaatgccaggacttctggtactctgtgttagcataatattcctaaaaggaatcagaacattaacaagtggatgcaagacatactaaaatatgtttt

SEQ ID NO: 22376 - DNA, 599 bp, Chicken  19866894234729_1
  misc_feature (1)..(20): n is any nucleotide
nnnnnnnnnnnnnnnnnnnnctgttgagaatgcagtgactgggcactttcctatttgttctgaactactgaataataaatataactgaaacccgaaagtctgagatgaacagtaacacacacctgaggaatttatagaaccatagaatcatagaatggtctgggttgaaaaggaccacaatgatcatcgagtttcaacccccctgctttgtgcggggtcactaaccactagaccaggctgcccagagccacatccagcctggccttgaatgcatccagtgatggggcacccacaacctcyttgggyaacctgttccagtgtstcaccaccctctgtgtgaaaaacttcctcctaatatctagcctaaatcccccctgtgttactttaaaaccattcccccttgtcttatcagtatacttaaaatcatagaatcattgaatcctttgagttggaagggacccttaaagaacatctactccaactcccctgcaatgaacagggacatctatttcatgcataaccctgatctcagacagcctagaaataggtgacagaacaaaatgatgtaggattcataattacaatactttcttatgaac

SEQ ID NO: 22377 - DNA, 599 bp, Chicken  19866894234729_2
  misc_feature (1)..(14): n is any nucleotide
nnnnnnnnnnnnnnctgttgagaatgcagtgactgggcactttcctatttgttctgaactactgaataataaatataactgaaacccgaaagtctgagatgaacagtaacacacacctgaggaatttatagaaccatagaatcatagaatggtctgggttgaaaaggaccacaatgatcatcgagtttcaacccccctgctttgtgcggggtcactaaccactagaccaggctgcccagagccacatccagcctggccttgaatgcatccagtgatggggcacccacaacctcyttgggyaacctgttccagtgtstcaccaccctctgtgtgaaaaacttcctcctaatatctagcctaaatcccccctgtgttactttaaaaccattcccccttgtcttatcagtatacttaaaatcatagaatcattgaatcctttgagttggaagggacccttaaagaacatctactccaactcccctgcaatgaacagggacatctatttcatgcataaccctgatctcagacagcctagaaataggtgacagaacaaaatgatgtaggattcataattacaatactttcttatgaacagagat

SEQ ID NO: 22378 - DNA, 600 bp, Chicken  19866894234729_3
gttgagaatgcagtgactgggcactttcctatttgttctgaactactgaataataaatataactgaaacccgaaagtctgagatgaacagtaacacacacctgaggaatttatagaaccatagaatcatagaatggtctgggttgaaaaggaccacaatgatcatcgagtttcaacccccctgctttgtgcggggtcactaaccactagaccaggctgcccagagccacatccagcctggccttgaatgcatccagtgatggggcacccacaacctcyttgggyaacctgttccagtgtstcaccaccctctgtgtgaaaaacttcctcctaatatctagcctaaatcccccctgtgttactttaaaaccattcccccttgtcttatcagtatacttaaaatcatagaatcattgaatcctttgagttggaagggacccttaaagaacatctactccaactcccctgcaatgaacagggacatctatttcatgcataaccctgatctcagacagcctagaaataggtgacagaacaaaatgatgtaggattcataattacaatactttcttatgaacagagatgtattcacatttaaagt

SEQ ID NO: 22379 - DNA, 600 bp, Chicken  19866894234729_4
taaagagttggaattcattctgtaaacaggaatcatacaatgacattttataaaacagcattattattaattgcttattcttaatctataaaccttatcattaatcttctttcattaatctttatgtaaataataggcttgacatagaatcatagaatcatagaatggcttgggtttgaagggaacccaaggatcatcaagttccaacccttctgccacaggcagggccaccaacctccacatctggtagtagaccggattgctcagggccttatccaaccttgtcttgaacacctctamggacacaacatccacagcaactctggggagcctgttccagcaccacaccactctctgtaaagatcttccccctggcaccctatctaaaccttccctccttgagcttagaaccattcccccttgtcctatcattgtctacccttgtaagaaattgattccactcctttttataatcctgtttttaacactggaagtttgcaatgaggtttcctcacagccttctcttctccaggatgaacaagcccagctttcttagcctgtcttcatagcagaggtgctccagctctctgatcatcttca

SEQ ID NO: 22380 - DNA, 600 bp, Chicken  19866894234732_1
atgttttaaatatcctttactttccacataatcccctgtagtgttttcctctgaagcccaccagtgttgttcaaggacagggttttaagccaatgagattttatagatacacaaaagaaacgcaatcattatgcatggaaaagaaacctgtttaactcttgggtccagtttttataggtactacatcatttaagcccaagtacttacataactactgtggaacaggggacacagctaagttaaagagacctcatgtttctaacaagaaagacacactgtaaaattctacctgttggaacrcatggtgtgtttttatctgtacagacagaaaaccracttcttctgtaaactagagcaatttaaataagaaattagaaaaccaaaacagatgtgggcccctaaagtgtaatttttatagcattgcccttcagcctcgattagaattcacaactgccagcaatgaaataaaaacaaaattgaaatataatatagccatactgcatgcatcgcttcctttctctctccacctacccagagaaaaagcccttactgtgtaacacttactggggaggttatgtctcagatcattctgtcttaatg

SEQ ID NO: 22381 - DNA, 600 bp, Chicken  19866894234732_2
ctgtagtgttttcctctgaagcccaccagtgttgttcaaggacagggttttaagccaatgagattttatagatacacaaaagaaacgcaatcattatgcatggaaaagaaacctgtttaactcttgggtccagtttttataggtactacatcatttaagcccaagtacttacataactactgtggaacaggggacacagctaagttaaagagacctcatgtttctaacaagaaagacacactgtaaaattctacctgttggaacrcatggtgtgtttttatctgtacagacagaaaaccracttcttctgtaaactagagcaatttaaataagaaattagaaaaccaaaacagatgtgggcccctaaagtgtaatttttatagcattgcccttcagcctcgattagaattcacaactgccagcaatgaaataaaaacaaaattgaaatataatatagccatactgcatgcatcgcttcctttctctctccacctacccagagaaaaagcccttactgtgtaacacttactggggaggttatgtctcagatcattctgtcttaatgtgattcctgacttccttgcaatagttttcaaacac

SEQ ID NO: 22382 - DNA, 600 bp, Chicken  19866894234736_1
tcggaccttttgtaagaagtgtgaaaggggtctgaatccctcagccttctccttcagtccctctacttcctccttaatttctctgggaaataattttctctcttttaaagattttcttttttcctaaaaagaagaaaatgaattgcaaggacagtgtggctgtgtcaggagtgctgtgctgctctgcccctcccatcccagagtgtaggagggaaagctgcaaaagatgttaagtgaaggggaaacaatcctgcgtgaggaatggctgcaaacgtgagtgctcttcaggctgggaaagaraaagctgagaggggatgtgagagaacctgtgaaatcacgtgccacrgggcggatgtacactctttgttgcagacaagaacaaggaggcatcaaatgaaaggagcacatggcagggtcagaaaaaaggaggctctttccacagcatggagtttagctgcagagggaatattgcaattcaagaaagtgaacaactttgtggagaagaaatctgtcaagagcagttaaatacaaagatggaacttctgcctcaggatgtcactgcacaacagaggttgcagtccatggaaatactctggggaa

SEQ ID NO: 22383 - DNA, 600 bp, Chicken  19866894234736_2
ttctccttcagtccctctacttcctccttaatttctctgggaaataattttctctcttttaaagattttcttttttcctaaaaagaagaaaatgaattgcaaggacagtgtggctgtgtcaggagtgctgtgctgctctgcccctcccatcccagagtgtaggagggaaagctgcaaaagatgttaagtgaaggggaaacaatcctgcgtgaggaatggctgcaaacgtgagtgctcttcaggctgggaaagaraaagctgagaggggatgtgagagaacctgtgaaatcacgtgccacrgggcggatgtacactctttgttgcagacaagaacaaggaggcatcaaatgaaaggagcacatggcagggtcagaaaaaaggaggctctttccacagcatggagtttagctgcagagggaatattgcaattcaagaaagtgaacaactttgtggagaagaaatctgtcaagagcagttaaatacaaagatggaacttctgcctcaggatgtcactgcacaacagaggttgcagtccatggaaatactctggggaaagtctctctatacgcttcctgtatacttgcaatttttcagtttcat

SEQ ID NO: 22384 - DNA, 600 bp, Chicken  19866894234743_1
caggttgcccaaggaggctgtggatgccccatccctggaggcattcagtgccaggctggatgtggctctgggcagcctgggctggtggttggtgaccctgcacatagcagggggttggaactggatgatcaccgtggtccttttcaacccaggccattctataattctatgattctttggaggacacacagcagcacactgagcaggggtaccactacttctcagtgcattctaaaatgatgtagcaaatggtcatgcttatataaaggggtccaaagagataagcaactaaggccagcytggccttctgtgccataatgaacagctcagacacaggaatgaagaaccaacctggtgaaaagcacgatttgccctgtaggcagctctcagtaccttcttcccaagctatcctacaaagcactgcttcccttgaataccaaaacagggcagaaggaacaaattaacagagttgtgggaaggatactttcgataacaaaatagttctttaactggtttcagagtccaaaatcttttgtttcatgccctggtccctgtagcacctcttgcctgggctcaaagcagcgctaaggccagtagact

SEQ ID NO: 22385 - DNA, 600 bp, Chicken  19866894234745_1
acacctgcagcttgtaccaccttctctcagacaccaagtaaaacagcaatcacagtgtaggtacttgtcaccacatcctgtttaacttgggcagcactcttttggcatttctgttttggcttgtattctcggtcgtagggagaatgattgcaactgttttagatgattaagggtttctcatgcatggtgctcatttcatgactagtactgtttaacattaaaagaagctgaagtttgtaatatcatttttggacaaaaagtaaatacatttttgaacaaaaaaataacattttttggagmctctgattgactaaatcttggtgtaacttttcagtgaaaatccagagactataatgtcttctccacatttttctttggttttgaatctgcccaaaaaatcatcttttgaaaactgagtctttttacaaataacagatagacattttaccataattagctttcaaaactattttagaaatcaattagaaatagaaatatgttttttttttcttgttttagaaaattaacattaaaacaatgttatatggaacagagatatcaatggtgtaaataactctatagaattaagtgcatagaaaa

SEQ ID NO: 22386 - DNA, 600 bp, Chicken  19866894234745_2
ggtgtaacttttcagtgaaaatccagagactataatgtcttctccacatttttctttggttttgaatctgcccaaaaaatcatcttttgaaaactgagtctttttacaaataacagatagacattttaccataattagctttcaaaactattttagaaatcaattagaaatagaaatatgttttttttttcttgttttagaaaattaacattaaaacaatgttatatggaacagagatatcaatggtgtaaataactctatagaattaagtgcatagaaaactggtacttaaaactaacrtacatgctctttgcaacactgattagagcatggtaattaacagaaaaagaatatcatgttgcctctggtactttgtgtattacaaattttttgcctattactcagtgctcagaacagtaaaatattacaactattgacataatgaggtagaggtggaaatacagcttgttgatttcaactgtggaagaagactcaagaaaaaactgagtctgcaccagaccccagctcctatcaaggataatgccttcctactttagtaacatcaaaactgtgttccgagtaatgactgtgataccttac

SEQ ID NO: 22387 - DNA, 600 bp, Chicken  19866894234754_1
tttcttttgattttaaggacctgtttcattcatttaaacattcatccagcatctaataaataaaaaatgtgctgtataccactttctgcattacagactggaaaatgtaaagtcatgtcattgcttcaaaaacagataccgtgtttgctgaacaggagaaagctcttgttaacaaaaacagctgcctcatcctctggagagacatcaatgcggcccaattgaaaaggaaaacattcaaagcaaaatgaagacatgagcttaggtgcactgctgcactgggcagcccgctgggtgtgctgyggggctgagcacggtgctgaggtgcagcttccagcccccagctctgcctgtgctctgtcacccctgtcctgcaggcactgctccctgttctgcctgtgtgtctgctgccagagcagtgtgctgctgtccttatcaccacactgaaggtgtgcacatggtcctgactgcaccccacacgtgcacaatttgccccccccagcggctgtgtgcctgtggttttcctgtgcccatattaatctgtcagagaggattcttcgatcctccctgagagtcagacaggcaggtctggctgtgagcagc

SEQ ID NO: 22388 - DNA, 600 bp, Chicken  19866894234755_1
gaggaacaacccaaggaaccatgacatgctgggggtgaaccagctgaaaagcaacattgttgaaaagggcttggaagtcgtggtagacatcaaattgaatgtgagccagagatgaaacttttcatcaaaggcatctgacagtgcccgggactgccttaagcaagtattgacagtgggtgaaggggaggtgacccttccccctcagcactggtgaggctgctcctggagtgctgagtcaagttatgggcccctcagtacaagaaataattgagtgaaggaccatagagaggatgaagggaytggactctcctgtgaggagaggctgagagagctgggatgactcagcatggagaagaggaggctcaggaaagatcttaatggtgtgtataaaaacctacagagggagcccaaagagaacagaattagtctcttgttggttgtgttcagtgccaggacaagagacgaagggcacaacctggaacacagaaggtgccatctgaacttaaggaaacacttattacagagtgctaacataggctgcacagagagaatgcaaggtctcctgctatgagatcttcacacactgcctggacagggcct

SEQ ID NO: 22389 - DNA, 600 bp, Chicken  19866894234758_1
agaagtcagagttgtggccaatgagacagagtttaattggaggcctgtatctagtggagtccctcaagggtcggtactggggccagtacactttaagttattcaccagtacactgtcatacttctttactacatgagaattaagctttcattgcttccactgcagtggaagctatcactgacttcagttacagcaaacatatttgaaatcagtattttttgaatgttaggttttgcttaagtgaaagacatgcaggtatttttactgaatcaatatgtagtattgcaagtagactaaatrtaacttttccttgacttcctgtttggmtgtctcatgcagttgggaaggagaaagaccwggagaatgggagccacatcacccatactaagaacaggaaagaatacccraagttttataactaaagaatgtgaaattctgagcacattgtgtgccttgcgctccaagctacagtaatattaacatatgaggaactgaaaacctggttttatgacacaacttgacagacttcagagaaggcgtcaccaaatggagtggaccctgtttcctaccactttcaatcacaggttcccactcttccct

SEQ ID NO: 22390 - DNA, 600 bp, Chicken  19866894234758_2
agagtttaattggaggcctgtatctagtggagtccctcaagggtcggtactggggccagtacactttaagttattcaccagtacactgtcatacttctttactacatgagaattaagctttcattgcttccactgcagtggaagctatcactgacttcagttacagcaaacatatttgaaatcagtattttttgaatgttaggttttgcttaagtgaaagacatgcaggtatttttactgaatcaatatgtagtattgcaagtagactaaatrtaacttttccttgacttcctgtttggmtgtctcatgcagttgggaaggagaaagaccwggagaatgggagccacatcacccatactaagaacaggaaagaatacccraagttttataactaaagaatgtgaaattctgagcacattgtgtgccttgcgctccaagctacagtaatattaacatatgaggaactgaaaacctggttttatgacacaacttgacagacttcagagaaggcgtcaccaaatggagtggaccctgtttcctaccactttcaatcacaggttcccactcttcccttgcttcattactaatgattagtgggtt

SEQ ID NO: 22391 - DNA, 600 bp, Chicken  19866894234758_3
gtccctcaagggtcggtactggggccagtacactttaagttattcaccagtacactgtcatacttctttactacatgagaattaagctttcattgcttccactgcagtggaagctatcactgacttcagttacagcaaacatatttgaaatcagtattttttgaatgttaggttttgcttaagtgaaagacatgcaggtatttttactgaatcaatatgtagtattgcaagtagactaaatrtaacttttccttgacttcctgtttggmtgtctcatgcagttgggaaggagaaagaccwggagaatgggagccacatcacccatactaagaacaggaaagaatacccraagttttataactaaagaatgtgaaattctgagcacattgtgtgccttgcgctccaagctacagtaatattaacatatgaggaactgaaaacctggttttatgacacaacttgacagacttcagagaaggcgtcaccaaatggagtggaccctgtttcctaccactttcaatcacaggttcccactcttcccttgcttcattactaatgattagtgggttactgactcatccagatcctcttcctacttgt

SEQ ID NO: 22392 - DNA, 600 bp, Chicken  19866894234758_4
gtacactgtcatacttctttactacatgagaattaagctttcattgcttccactgcagtggaagctatcactgacttcagttacagcaaacatatttgaaatcagtattttttgaatgttaggttttgcttaagtgaaagacatgcaggtatttttactgaatcaatatgtagtattgcaagtagactaaatrtaacttttccttgacttcctgtttggmtgtctcatgcagttgggaaggagaaagaccwggagaatgggagccacatcacccatactaagaacaggaaagaatacccraagttttataactaaagaatgtgaaattctgagcacattgtgtgccttgcgctccaagctacagtaatattaacatatgaggaactgaaaacctggttttatgacacaacttgacagacttcagagaaggcgtcaccaaatggagtggaccctgtttcctaccactttcaatcacaggttcccactcttcccttgcttcattactaatgattagtgggttactgactcatccagatcctcttcctacttgtatgggaactgttgagtcatggcctgaactactgattgagcaccaaggga

SEQ ID NO: 22393 - DNA, 600 bp, Chicken  19866894234760_1
agtcaccagagaagcgtgcactattctgcagagagcagcagaagcctgtgttgtacacaggacatgcttaccactctacaggcttggtactttttgcatgcatgctaaagatggtattaacatattttgtcattgaaagtatgcgatgcttgcattcaatgtccctcagattctcttcatcgtccctaaattcagacatttcaccaattctctacgtaggagaggtctgcagtccttttgtaactggtatagttttggaatcttcccctttactgatcaaaatgtttaataatacaaggrctgtgcctagtgcccatgcagtgctatccatcccagcactatgtaagactgaaaatcttacgtctactgttggctcctacctgctgtgctggtatcatgtagtgcaaatgctttgcctgaatgctaaactggggtagctcagatatcacaccaaaatctgcacttaaacatatatttaaygttttccaccacactcaagttctaaggtgaataatagcaatggaatacaagggggagggcctataaaatatctactcagagatatataaaataaatggtacttcttatcacaatcctatt

SEQ ID NO: 22394 - DNA, 600 bp, Chicken  19866894234760_2
cgtccctaaattcagacatttcaccaattctctacgtaggagaggtctgcagtccttttgtaactggtatagttttggaatcttcccctttactgatcaaaatgtttaataatacaaggrctgtgcctagtgcccatgcagtgctatccatcccagcactatgtaagactgaaaatcttacgtctactgttggctcctacctgctgtgctggtatcatgtagtgcaaatgctttgcctgaatgctaaactggggtagctcagatatcacaccaaaatctgcacttaaacatatatttaaygttttccaccacactcaagttctaaggtgaataatagcaatggaatacaagggggagggcctataaaatatctactcagagatatataaaataaatggtacttcttatcacaatcctattattttactggattttcaacatattacactttccagaataactagatctgtcccaaaatttttaaggtactctggaataaccacagaggaattttttttagcatttcttgacctaatctctgccaaattctgcaataatgctaccactttcctggtacttactattatggttttaagcggt

SEQ ID NO: 22395 - DNA, 600 bp, Chicken  19866894234760_3
ttagaatgtgaggtgttgaggtaggaactggtgtgtgggtcagccctacaatgatcacttgcctccactgtctaactgcagcatttcccaagaagagcattcacctggtggccaccacaagagctttgaacctgtactccacaaaatgtatttccttcagaaaatacctcaaagctctgagaaataaccatgagaagcatttctctgagcatccttctaagtattatcttgacacaactgctgtgttctgggtacttaacccaggagattaaatctttatgcaccagtgcaaaaagatcrtatccctgtaatttttcatgtatgtaatttctcagctgccttagtttaaacctgtcatatttatggtgcaactgtaatttaggtgaacactttaaaatgccattctaaaaggacaattctcttgaactactacaacaaacgcctttgcaagtatattgggtggtggaacagatcattgcagtcagttatatttctgagtcagtgacttcttaatattctctaagagaaaagtcattagggagcccataccaatagattatagtacagtgtaattgaagtaggaacaaaaagtaaaactcc

SEQ ID NO: 22396 - DNA, 600 bp, Chicken  19866894234770_1
acctcagaaaagggagtgctgtggaacagtacagaagatgggcaattcaagtaactcaagaacactctctcatcacatatattggtgcaggaagactggaatcagaccaggtcttcagaatttctagttgctggataccagtgtggcttggaacggcattcagtgtcctgtctttgtttcttcattagggaatagcttcttatcttgaaacagctatcagcaggagactgaatgctgtgaaattcttacattttatagggcaggcaaaggtgtttggttaaaatagaacaaatacagagyggacagtgagctggctgaagagtgtgatggcctacaaggcacagtactgttggttctcctctccacaactcatgctgccagtccttcattttccacctctcttttggttcattccagttatctaattcctcccttcctcagtgtcttgagtcaagcacgtcagtccctttatagccttttgtgtctgttgatcaaactctgtcatctccttgactatccttatctgcaattgaaccttccaaacctgggcctctccacccctccttctccacaaacctctctctaccccttaccctgggc

SEQ ID NO: 22397 - DNA, 600 bp, Chicken  19866894234774_1
tcagacactctatatacaggactgttgcattctcctaacgcaatgaatgattcattccagtcgtgactgaaaagcttagggcttgcctgcaattggaaatttaccaaaagagttattctggaataactcttggggtagcagctcttcttctgggataaaaatgcccacacagcatgtggtaagagtggggttattctggaagggctgttctggagcatttgcaagcatagacttcctaacgccagaggctgcctccctggtgatcccagctgtggggtttgcaacaaggaggtatgaaargtatttgttttggtgtctgagcataacagtagaacagatctgcagctgcattttggagagatccataaaaataagcgggtggaaacaacgtagaaaattattggcatcaaggtcctcagccaagccagtgccctcatgctacagtggaacttattttatcacctaatttgtaacttgactgcctgggacataaggatatattgctataagttcagtcatatttctttctgggttcatattaaaagctgttagtagaaagaaggactaaaatattcgggactgattgtggcccttgctact

SEQ ID NO: 22398 - DNA, 600 bp, Chicken  19866894234781_1
gttaacaagaaaaagtttgccaattaaataaaaaatggagttaagggtaaagcaagaaacaatgggagtaagtgactatagctgtatatactttctgtaagtttttgctttgtagagacatctaacttagtggtttgttctattttgtgagcaggtgttccacctgggctctgtatcatgcactggccatgcagatgtggagcacaagtggaaaaaccctgcagaccctgacaagattaaaaactagagagaatctgtgatgggtgagaaaggaaaagtgcacttcggagcaggggatgscctgcaggcactgcctcttgcatgcacagtcgatatgttctctctctctccttttggtggtttgccatctctcaggggtcaataagtaataacacattagcttagaaagtttccattccccacttatggaattgtctaaaatagatgcctgtgtgagtgtgtatatatcgactcaataaattgtgacttatgtaactttttttcttatgcttagtgtgttatcactcaaggctttgattgagttacaatgattacgttattaatataattagagttattgttttatagtgtggtaatagt

SEQ ID NO: 22399 - DNA, 600 bp, Chicken  19866894234783_1
ctgttccaatactgcatcgctctttggagaagaaatttttcctaacatccaacctgaacctcccctggtgcaacttgaggccattccctctcattctatcactagttaactgggaaaagaggccaacccccatcacactgcaacctcctttctggtagttgtagagagagatgaggtccctgctgaacattcttttctccagacttaacaataccagttccctcagccacttcttataagacttgcattacaggtgctttgcaagctttgttgcccttctctagacatgctccagggctycgatatctttcttgtagtgagaggcccaaaactgaacacagtactcgaggtgtggcctcaccagtatggagtagagaggagcaaacatttccttgctcctgctgactatgctatttctgatacaagccaggatkctgttggccttcttggccatctgggcacactgctggctcatgtgcagctgcctgtcaactaacaccccyacatccttttcctctgygcagtcttccagccactctgccccaagcctgtagcaatgcatggggtttttaggtctcaagtgcaggacctggcacttgg

SEQ ID NO: 22400 - DNA, 600 bp, Chicken  19866894234783_2
acactgcaacctcctttctggtagttgtagagagagatgaggtccctgctgaacattcttttctccagacttaacaataccagttccctcagccacttcttataagacttgcattacaggtgctttgcaagctttgttgcccttctctagacatgctccagggctycgatatctttcttgtagtgagaggcccaaaactgaacacagtactcgaggtgtggcctcaccagtatggagtagagaggagcaaacatttccttgctcctgctgactatgctatttctgatacaagccaggatkctgttggccttcttggccatctgggcacactgctggctcatgtgcagctgcctgtcaactaacaccccyacatccttttcctctgygcagtcttccagccactctgccccaagcctgtagcaatgcatggggtttttaggtctcaagtgcaggacctggcacttggtcttcttgaaactcacaaaattggcctcagcccaccgattcagcctatcctgatccatctctaagacctttgtaccctcaggtagattaaattcagcgcttaactttagcccttgtttgaccaaactctcctca

SEQ ID NO: 22401 - DNA, 600 bp, Chicken  19866894234783_3
cttaacaataccagttccctcagccacttcttataagacttgcattacaggtgctttgcaagctttgttgcccttctctagacatgctccagggctycgatatctttcttgtagtgagaggcccaaaactgaacacagtactcgaggtgtggcctcaccagtatggagtagagaggagcaaacatttccttgctcctgctgactatgctatttctgatacaagccaggatkctgttggccttcttggccatctgggcacactgctggctcatgtgcagctgcctgtcaactaacaccccyacatccttttcctctgygcagtcttccagccactctgccccaagcctgtagcaatgcatggggtttttaggtctcaagtgcaggacctggcacttggtcttcttgaaactcacaaaattggcctcagcccaccgattcagcctatcctgatccatctctaagacctttgtaccctcaggtagattaaattcagcgcttaactttagcccttgtttgaccaaactctcctcatctcatgtttaygctactgtaacatctgggcaggttttatttattaattattaatttcgcaatcaaaac

SEQ ID NO: 22402 - DNA, 600 bp, Chicken  19866894234783_4
cctcagccacttcttataagacttgcattacaggtgctttgcaagctttgttgcccttctctagacatgctccagggctycgatatctttcttgtagtgagaggcccaaaactgaacacagtactcgaggtgtggcctcaccagtatggagtagagaggagcaaacatttccttgctcctgctgactatgctatttctgatacaagccaggatkctgttggccttcttggccatctgggcacactgctggctcatgtgcagctgcctgtcaactaacaccccyacatccttttcctctgygcagtcttccagccactctgccccaagcctgtagcaatgcatggggtttttaggtctcaagtgcaggacctggcacttggtcttcttgaaactcacaaaattggcctcagcccaccgattcagcctatcctgatccatctctaagacctttgtaccctcaggtagattaaattcagcgcttaactttagcccttgtttgaccaaactctcctcatctcatgtttaygctactgtaacatctgggcaggttttatttattaattattaatttcgcaatcaaaacttctgctatcctgcatc

SEQ ID NO: 22403 - DNA, 600 bp, Chicken  19866894234783_5
ttggccatctgggcacactgctggctcatgtgcagctgcctgtcaactaacaccccyacatccttttcctctgygcagtcttccagccactctgccccaagcctgtagcaatgcatggggtttttaggtctcaagtgcaggacctggcacttggtcttcttgaaactcacaaaattggcctcagcccaccgattcagcctatcctgatccatctctaagacctttgtaccctcaggtagattaaattcagcgcttaactttagcccttgtttgaccaaactctcctcatctcatgtttaygctactgtaacatctgggcaggttttatttattaattattaatttcgcaatcaaaacttctgctatcctgcatcttgagttgggtgagggagggtgctggatccatgcaatcccatgagcagcggaagggcaagcatccatctgaggatggcaygtagcagatgcactggggctttgagcaggaggccccatgtttagcccttgagtttgggtcagagcaggtttttttttttcccctgctggtcttgccatgctgttaacgctgtgcctggagccactttgagaactcacatcattgcc

SEQ ID NO: 22404 - DNA, 600 bp, Chicken  19866894234783_6
tcttcttgaaactcacaaaattggcctcagcccaccgattcagcctatcctgatccatctctaagacctttgtaccctcaggtagattaaattcagcgcttaactttagcccttgtttgaccaaactctcctcatctcatgtttaygctactgtaacatctgggcaggttttatttattaattattaatttcgcaatcaaaacttctgctatcctgcatcttgagttgggtgagggagggtgctggatccatgcaatcccatgagcagcggaagggcaagcatccatctgaggatggcaygtagcagatgcactggggctttgagcaggaggccccatgtttagcccttgagtttgggtcagagcaggtttttttttttcccctgctggtcttgccatgctgttaacgctgtgcctggagccactttgagaactcacatcattgccaaggacttcactttgctgcattcttctggttaatagaaatatttagctgaagcatgaaggcattgtatttccaaaaggaaaacacacagaaaaaggtccgatctttttttttctttgggcctgattgtctctgcttgtttatggctgccactaa

SEQ ID NO: 22405 - DNA, 600 bp, Chicken  19866894234785_1
gacttctgcaagactcttgccccataaagtggtttcttttctccataaaccagtgaaatcaattcatttagttttatctccctcttcaataagacctaatctcagtctaaatgtgcagttaacacacaggtaagttctttatttgtgttccatacacaactgcgataagagccgttcttttctcgtgctcaggagatcactggttctgtcttctatctcatcttggacgtagtggatactgaatgccacgtactcagcaaacagttgtggaagaactgcacagtcagaccggctcatacmactgtaaggattttgttttcatatttaatctcagatatgagggttattcaggtactactagagacagcaaaatccctatgcgtgcattcttagtagacagcagagtcttagtaagaaaaaaatcaaacctcatttttaaggttcacagttttcctctgcactttctagccagtttatagagtggtaagatttgttttataaaatggaaattgaaagaaaatttttgaccataactaataagcagacatagctaaacagttatkctagggcactatttagccctgtaagagtttgttttga

SEQ ID NO: 22406 - DNA, 558 bp, Chicken  19866894234785_2
gttgtggaagaactgcacagtcagaccggctcatacmactgtaaggattttgttttcatatttaatctcagatatgagggttattcaggtactactagagacagcaaaatccctatgcgtgcattcttagtagacagcagagtcttagtaagaaaaaaatcaaacctcatttttaaggttcacagttttcctctgcactttctagccagtttatagagtggtaagatttgttttataaaatggaaattgaaagaaaatttttgaccataactaataagcagacatagctaaacagttatkctagggcactatttagccctgtaagagtttgttttgaagacagactgtcaaaaagagaataaaataaatttgtttttatataacatgggatttttagcttgctttaattctacttttatttcaacaactttgcaaaaattatgttggaaaggggagaaaacagaaagcccagcaagataggctgcaaagacaaagtgatttatgactgttactgcaggcgaccaaaattattccaaacaagtaaaagcaacatcaagg

SEQ ID NO: 22407 - DNA, 600 bp, Chicken  19866894234786_1
tcaccagatagcaaataaggaatggattaaagttcttgtaaatagtgaaaaatagtattcctcctggccagctagctgagctcaaacacaattagcactgaaaaaaaaaataatcaagtttgttatcagtaaagcatgtattagaaagccttatctgctcccacagactaagttcaacaataacagctttgattctcatccaaatctctaagatttgtctagaggcatctaaaagaagcgtaattataacattaggattaactataaggagataagggaaaatgaattcattttactacraaatgaagaggaagttggcataccaagagaaaaaatgacctagaaacctaaatgaaaaggtatatttatttttccttttttttttttcctccagtatttgattagaaatattcttaattttattcctgataattattcaggatatccatggatctggatggatccagacagccaacagctcacaacagcaagtatctgggaaattgcaattgctaatataagcctggctgctcttcagtttggaaaaaaaaaatccttccacttattttgtccttattttaacctctccaaggagaaaga

SEQ ID NO: 22408 - DNA, 599 bp, Chicken  19866894234789_1
  misc_feature (1)..(67): n is any nucleotide
nnnnnnnnnnnnnnnnnnnnnnnnnnnnnnnnnnnnnnnnnnnnnnnnnnnnnnnnnnnnnnnnnnnaacatcacatggaattcttgtgcttgatactcataaaagctattccttgcagttccagaaataatgtaaaggaaatccaaaatccatccatccatctagtctgtcttgtgattattttttttccttttgcatgactcagaaggctggaattactgatactgttaattcatcacatctgtatttgatgttctactggcagaactggagggtcagttgctgaagtgctttaggtyagagtggcttgtgaaactgtttctccagtctgtctgtctgccctactctccactgctgttcatgtacctgctcctggaaggtcctgcctctgtgtttggcactgcagggggttcctgctcctcttccttctggtccctggatgttgggacgagggccsctcctgcctgcactgtctgcctctgccactctgcccttttccttcttsctcwtcccttgaactttgttgtaaggttrgtagtgtctgtgtctgtcttaatgcacagaataggactgtgccgattctcattaatgattcagt

SEQ ID NO: 22409 - DNA, 600 bp, Chicken  19866894234789_2
ccatctagtctgtcttgtgattattttttttccttttgcatgactcagaaggctggaattactgatactgttaattcatcacatctgtatttgatgttctactggcagaactggagggtcagttgctgaagtgctttaggtyagagtggcttgtgaaactgtttctccagtctgtctgtctgccctactctccactgctgttcatgtacctgctcctggaaggtcctgcctctgtgtttggcactgcagggggttcctgctcctcttccttctggtccctggatgttgggacgagggccsctcctgcctgcactgtctgcctctgccactctgcccttttccttcttsctcwtcccttgaactttgttgtaaggttrgtagtgtctgtgtctgtcttaatgcacagaataggactgtgccgattctcattaatgattcagtgccttgggacttcagtacaccctaaccaatgaagctgagattgtctatggattcgacattattctgcatcctttgctggtgcatgaaatgtggctgggggagcgtttctgagattttaatttcctggtattagccttgttgctttcttgaaataaggtt

SEQ ID NO: 22410 - DNA, 600 bp, Chicken  19866894234789_3
aaggctggaattactgatactgttaattcatcacatctgtatttgatgttctactggcagaactggagggtcagttgctgaagtgctttaggtyagagtggcttgtgaaactgtttctccagtctgtctgtctgccctactctccactgctgttcatgtacctgctcctggaaggtcctgcctctgtgtttggcactgcagggggttcctgctcctcttccttctggtccctggatgttgggacgagggccsctcctgcctgcactgtctgcctctgccactctgcccttttccttcttsctcwtcccttgaactttgttgtaaggttrgtagtgtctgtgtctgtcttaatgcacagaataggactgtgccgattctcattaatgattcagtgccttgggacttcagtacaccctaaccaatgaagctgagattgtctatggattcgacattattctgcatcctttgctggtgcatgaaatgtggctgggggagcgtttctgagattttaatttcctggtattagccttgttgctttcttgaaataaggttcttaaatgtgaataaagtgaaaacacattctcaggttgttttcattgt

SEQ ID NO: 22411 - DNA, 600 bp, Chicken  19866894234789_4
ctggaattactgatactgttaattcatcacatctgtatttgatgttctactggcagaactggagggtcagttgctgaagtgctttaggtyagagtggcttgtgaaactgtttctccagtctgtctgtctgccctactctccactgctgttcatgtacctgctcctggaaggtcctgcctctgtgtttggcactgcagggggttcctgctcctcttccttctggtccctggatgttgggacgagggccsctcctgcctgcactgtctgcctctgccactctgcccttttccttcttsctcwtcccttgaactttgttgtaaggttrgtagtgtctgtgtctgtcttaatgcacagaataggactgtgccgattctcattaatgattcagtgccttgggacttcagtacaccctaaccaatgaagctgagattgtctatggattcgacattattctgcatcctttgctggtgcatgaaatgtggctgggggagcgtttctgagattttaatttcctggtattagccttgttgctttcttgaaataaggttcttaaatgtgaataaagtgaaaacacattctcaggttgttttcattgtattg

SEQ ID NO: 22412 - DNA, 600 bp, Chicken  19866894234789_5
atcacatctgtatttgatgttctactggcagaactggagggtcagttgctgaagtgctttaggtyagagtggcttgtgaaactgtttctccagtctgtctgtctgccctactctccactgctgttcatgtacctgctcctggaaggtcctgcctctgtgtttggcactgcagggggttcctgctcctcttccttctggtccctggatgttgggacgagggccsctcctgcctgcactgtctgcctctgccactctgcccttttccttcttsctcwtcccttgaactttgttgtaaggttrgtagtgtctgtgtctgtcttaatgcacagaataggactgtgccgattctcattaatgattcagtgccttgggacttcagtacaccctaaccaatgaagctgagattgtctatggattcgacattattctgcatcctttgctggtgcatgaaatgtggctgggggagcgtttctgagattttaatttcctggtattagccttgttgctttcttgaaataaggttcttaaatgtgaataaagtgaaaacacattctcaggttgttttcattgtattgcattcaatactggtaactcagtgca

SEQ ID NO: 22413 - DNA, 600 bp, Chicken  19866894234797_1
gcagcttaactttcatcactatcactagaatgaatgattcatagcacttgaaaaacagcagcctgatatctcagatagggagtttgctgaaggttcaatgtgccagcccctgtggggctgctgacatggggtagggttaggtgaggctgagcaaaacctggtcagaatggtgccaggtatgttgtggcatgttctgcagacttagagaagtgataagaggaactttgctccctggcacaggcttttcattaacagctatcagttatcagcaagagctgaaagttgggcagagcagaaaarctccaacttgggaaaaagrtgctgcagaaggcacatcagacacttgcagtgtgggtgaagcagcttattgccttgccttttattttctgcttagctgactgcagtcataacctataaaccagcagcacagactgcatggaaatccagaackgataggatatctgagcttaccgagctgtactggctgctataaatgtatgctggtacttaccatgagttgcaacctatgtcactcaggttctgctctctcttatttttatctgatgacctttctgcttctgtttctgtgtggtaatgggt

SEQ ID NO: 22414 - DNA, 600 bp, Chicken  19866894234797_2
tatcactagaatgaatgattcatagcacttgaaaaacagcagcctgatatctcagatagggagtttgctgaaggttcaatgtgccagcccctgtggggctgctgacatggggtagggttaggtgaggctgagcaaaacctggtcagaatggtgccaggtatgttgtggcatgttctgcagacttagagaagtgataagaggaactttgctccctggcacaggcttttcattaacagctatcagttatcagcaagagctgaaagttgggcagagcagaaaarctccaacttgggaaaaagrtgctgcagaaggcacatcagacacttgcagtgtgggtgaagcagcttattgccttgccttttattttctgcttagctgactgcagtcataacctataaaccagcagcacagactgcatggaaatccagaackgataggatatctgagcttaccgagctgtactggctgctataaatgtatgctggtacttaccatgagttgcaacctatgtcactcaggttctgctctctcttatttttatctgatgacctttctgcttctgtttctgtgtggtaatgggtcattgtgtcagtgattaaa

SEQ ID NO: 22415 - DNA, 600 bp, Chicken  19866894234797_3
caaaacctggtcagaatggtgccaggtatgttgtggcatgttctgcagacttagagaagtgataagaggaactttgctccctggcacaggcttttcattaacagctatcagttatcagcaagagctgaaagttgggcagagcagaaaarctccaacttgggaaaaagrtgctgcagaaggcacatcagacacttgcagtgtgggtgaagcagcttattgccttgccttttattttctgcttagctgactgcagtcataacctataaaccagcagcacagactgcatggaaatccagaackgataggatatctgagcttaccgagctgtactggctgctataaatgtatgctggtacttaccatgagttgcaacctatgtcactcaggttctgctctctcttatttttatctgatgacctttctgcttctgtttctgtgtggtaatgggtcattgtgtcagtgattaaatatttacctttgtgaaatgacgagcgctcacaggtttcctgtgtagcagtgacaccgtgctgtgctgtgctgcaggtgaggtgttgctgtgccccatgtgtccctgggctgccctctgctttgggcacactt

SEQ ID NO: 22416 - DNA, 600 bp, Chicken  19866894234806_1
gtgaggaggggatgtggggctgagcaccacggtaccagagccacaggcagagccctttggcgtggcattgcctcagtgattttgggagtgctgcagaatctccccaaaggcttctggcataggaacataatgagctgattgattttttggtgtctggaacacaagagccagcacatcggtttgcttcagactccagtgtgacttgcccaaagtgcttacggtccaaaccaagcttggtgtcttcatgctgtgcatgtcattggccttctgctgtgtgcattggagctctctgagctgcayggggttgyggtgygtgtgcaatttgggttttatctgggagaagctcyatgctgcgtgtaccttgagacacggtgctgctcacaaatgcacactcagacaaatctatctacacaaatgcacrtgcaaaacagccttttcctttgtcttctgattcctgactaattctctgcacacaaagggagattatgccccagaggggaggcaataaacgggaggccgtaaagaggatcccataggatgccactgcagccactctgagcctcaagttccttaagtcctgaaaatgttcttcctttttat

SEQ ID NO: 22417 - DNA, 600 bp, Chicken  19866894234806_2
gggatgtggggctgagcaccacggtaccagagccacaggcagagccctttggcgtggcattgcctcagtgattttgggagtgctgcagaatctccccaaaggcttctggcataggaacataatgagctgattgattttttggtgtctggaacacaagagccagcacatcggtttgcttcagactccagtgtgacttgcccaaagtgcttacggtccaaaccaagcttggtgtcttcatgctgtgcatgtcattggccttctgctgtgtgcattggagctctctgagctgcayggggttgyggtgygtgtgcaatttgggttttatctgggagaagctcyatgctgcgtgtaccttgagacacggtgctgctcacaaatgcacactcagacaaatctatctacacaaatgcacrtgcaaaacagccttttcctttgtcttctgattcctgactaattctctgcacacaaagggagattatgccccagaggggaggcaataaacgggaggccgtaaagaggatcccataggatgccactgcagccactctgagcctcaagttccttaagtcctgaaaatgttcttcctttttatatatttat

SEQ ID NO: 22418 - DNA, 600 bp, Chicken  19866894234806_3
gtggggctgagcaccacggtaccagagccacaggcagagccctttggcgtggcattgcctcagtgattttgggagtgctgcagaatctccccaaaggcttctggcataggaacataatgagctgattgattttttggtgtctggaacacaagagccagcacatcggtttgcttcagactccagtgtgacttgcccaaagtgcttacggtccaaaccaagcttggtgtcttcatgctgtgcatgtcattggccttctgctgtgtgcattggagctctctgagctgcayggggttgyggtgygtgtgcaatttgggttttatctgggagaagctcyatgctgcgtgtaccttgagacacggtgctgctcacaaatgcacactcagacaaatctatctacacaaatgcacrtgcaaaacagccttttcctttgtcttctgattcctgactaattctctgcacacaaagggagattatgccccagaggggaggcaataaacgggaggccgtaaagaggatcccataggatgccactgcagccactctgagcctcaagttccttaagtcctgaaaatgttcttcctttttatatatttattttgc

SEQ ID NO: 22419 - DNA, 600 bp, Chicken  19866894234806_4
cagagccctttggcgtggcattgcctcagtgattttgggagtgctgcagaatctccccaaaggcttctggcataggaacataatgagctgattgattttttggtgtctggaacacaagagccagcacatcggtttgcttcagactccagtgtgacttgcccaaagtgcttacggtccaaaccaagcttggtgtcttcatgctgtgcatgtcattggccttctgctgtgtgcattggagctctctgagctgcayggggttgyggtgygtgtgcaatttgggttttatctgggagaagctcyatgctgcgtgtaccttgagacacggtgctgctcacaaatgcacactcagacaaatctatctacacaaatgcacrtgcaaaacagccttttcctttgtcttctgattcctgactaattctctgcacacaaagggagattatgccccagaggggaggcaataaacgggaggccgtaaagaggatcccataggatgccactgcagccactctgagcctcaagttccttaagtcctgaaaatgttcttcctttttatatatttattttgctaatgctgtatttacagcaggcactttctaacac

SEQ ID NO: 22420 - DNA, 600 bp, Chicken  19866894234806_5
ggaacataatgagctgattgattttttggtgtctggaacacaagagccagcacatcggtttgcttcagactccagtgtgacttgcccaaagtgcttacggtccaaaccaagcttggtgtcttcatgctgtgcatgtcattggccttctgctgtgtgcattggagctctctgagctgcayggggttgyggtgygtgtgcaatttgggttttatctgggagaagctcyatgctgcgtgtaccttgagacacggtgctgctcacaaatgcacactcagacaaatctatctacacaaatgcacrtgcaaaacagccttttcctttgtcttctgattcctgactaattctctgcacacaaagggagattatgccccagaggggaggcaataaacgggaggccgtaaagaggatcccataggatgccactgcagccactctgagcctcaagttccttaagtcctgaaaatgttcttcctttttatatatttattttgctaatgctgtatttacagcaggcactttctaacacactgatgctgaacaaaacatttctcgctgaaagagttaatggcaaaacaggagccgtgccctgcagcagaaagg

SEQ ID NO: 22421 - DNA, 600 bp, Chicken  19866894234806_6
ccagaggggaggcaataaacgggaggccgtaaagaggatcccataggatgccactgcagccactctgagcctcaagttccttaagtcctgaaaatgttcttcctttttatatatttattttgctaatgctgtatttacagcaggcactttctaacacactgatgctgaacaaaacatttctcgctgaaagagttaatggcaaaacaggagccgtgccctgcagcagaaaggccatcccagccagtgctgttccaggggatcctctcttcttgatactcaagagcttacaatggaagctayaragtttgtaatattcccacttggcagcatcctcacatttatttaggctgtgatgtataagtggtgcctccaactccatttctaagaggagctacttgccgtattgatcagcatgcgggcgggggggaggatcagctgtggatgcagcgctccacgtcatttcatacctggtttcctatcgattatctcatgatttttcctcagcccacgttatgagatggatgcaggtgttcctcagcattgactgtgcttggcagacgtcccaccagcagggagcaaacaggaagaaacctcttttca

SEQ ID NO: 22422 - DNA, 600 bp, Chicken  19866894234806_7
agaggggaggcaataaacgggaggccgtaaagaggatcccataggatgccactgcagccactctgagcctcaagttccttaagtcctgaaaatgttcttcctttttatatatttattttgctaatgctgtatttacagcaggcactttctaacacactgatgctgaacaaaacatttctcgctgaaagagttaatggcaaaacaggagccgtgccctgcagcagaaaggccatcccagccagtgctgttccaggggatcctctcttcttgatactcaagagcttacaatggaagctayaragtttgtaatattcccacttggcagcatcctcacatttatttaggctgtgatgtataagtggtgcctccaactccatttctaagaggagctacttgccgtattgatcagcatgcgggcgggggggaggatcagctgtggatgcagcgctccacgtcatttcatacctggtttcctatcgattatctcatgatttttcctcagcccacgttatgagatggatgcaggtgttcctcagcattgactgtgcttggcagacgtcccaccagcagggagcaaacaggaagaaacctcttttcatc

SEQ ID NO: 22423 - DNA, 599 bp, Chicken  19866894234808_1
  misc_feature (1)..(30): n is any nucleotide
nnnnnnnnnnnnnnnnnnnnnnnnnnnnnnatcctgacctgcaaacctctgctgctctacagactgcatttcttaaagagaaactgttactaatgtgatgctagatccaattgttctgtgacaatgagcacatctctccgaggaattagaccaaacatatttcatgggcgatccaaagcagccttgaattctgctgtgggtctaaaagaaaaaaaaaatacctaattaaatctgcagggggaaaagaagccagattttcagacttcgccaaagaccgctccaaatcctggcaaactcacygaaaaatgagcaagcctcaccttgctaacagctttctggaatgctccagtaayctggccaaagagtctcaaagatatgataaaagtgaactgttttcattagggctcattagaagcgtgcctatcgcagtgcatctcgcagtcctgggagacactgacaaaagtgctggaatagattctgccactttttgtgcccttgttctgctcttggtctttgagttgccctcaagctccattatgaagtgattctatataatgagtggactagagaattgcatatrtaygatttccctaattgcc

SEQ ID NO: 22424 - DNA, 600 bp, Chicken  19866894234808_2
gctctacagactgcatttcttaaagagaaactgttactaatgtgatgctagatccaattgttctgtgacaatgagcacatctctccgaggaattagaccaaacatatttcatgggcgatccaaagcagccttgaattctgctgtgggtctaaaagaaaaaaaaaatacctaattaaatctgcagggggaaaagaagccagattttcagacttcgccaaagaccgctccaaatcctggcaaactcacygaaaaatgagcaagcctcaccttgctaacagctttctggaatgctccagtaayctggccaaagagtctcaaagatatgataaaagtgaactgttttcattagggctcattagaagcgtgcctatcgcagtgcatctcgcagtcctgggagacactgacaaaagtgctggaatagattctgccactttttgtgcccttgttctgctcttggtctttgagttgccctcaagctccattatgaagtgattctatataatgagtggactagagaattgcatatrtaygatttccctaattgcccgttgcgtgctgtagttgatcacgcaataacaatgaatccattataattaaatc

SEQ ID NO: 22425 - DNA, 600 bp, Chicken  19866894234808_3
caaatcctggcaaactcacygaaaaatgagcaagcctcaccttgctaacagctttctggaatgctccagtaayctggccaaagagtctcaaagatatgataaaagtgaactgttttcattagggctcattagaagcgtgcctatcgcagtgcatctcgcagtcctgggagacactgacaaaagtgctggaatagattctgccactttttgtgcccttgttctgctcttggtctttgagttgccctcaagctccattatgaagtgattctatataatgagtggactagagaattgcatatrtaygatttccctaattgcccgttgcgtgctgtagttgatcacgcaataacaatgaatccattataattaaatctgggaattattaattggttccatttacatacattgtcatcttccataggagctgcaggaatctgttgtctttaatgaacttgcgctagaaatcttggcgactgtttgaagtcacacaagayagagatttactcgtggtaggtagtttccagcactgcttgcagtgcaccagtattcctagtgaagattaggtcattaattttgtgcatgaataaargctgaaatgca

SEQ ID NO: 22426 - DNA, 600 bp, Chicken  19866894234808_4
atcctggcaaactcacygaaaaatgagcaagcctcaccttgctaacagctttctggaatgctccagtaayctggccaaagagtctcaaagatatgataaaagtgaactgttttcattagggctcattagaagcgtgcctatcgcagtgcatctcgcagtcctgggagacactgacaaaagtgctggaatagattctgccactttttgtgcccttgttctgctcttggtctttgagttgccctcaagctccattatgaagtgattctatataatgagtggactagagaattgcatatrtaygatttccctaattgcccgttgcgtgctgtagttgatcacgcaataacaatgaatccattataattaaatctgggaattattaattggttccatttacatacattgtcatcttccataggagctgcaggaatctgttgtctttaatgaacttgcgctagaaatcttggcgactgtttgaagtcacacaagayagagatttactcgtggtaggtagtttccagcactgcttgcagtgcaccagtattcctagtgaagattaggtcattaattttgtgcatgaataaargctgaaatgcacat

SEQ ID NO: 22427 - DNA, 600 bp, Chicken  19866894234808_5
attctgccactttttgtgcccttgttctgctcttggtctttgagttgccctcaagctccattatgaagtgattctatataatgagtggactagagaattgcatatrtaygatttccctaattgcccgttgcgtgctgtagttgatcacgcaataacaatgaatccattataattaaatctgggaattattaattggttccatttacatacattgtcatcttccataggagctgcaggaatctgttgtctttaatgaacttgcgctagaaatcttggcgactgtttgaagtcacacaagayagagatttactcgtggtaggtagtttccagcactgcttgcagtgcaccagtattcctagtgaagattaggtcattaattttgtgcatgaataaargctgaaatgcacattgtaatcattaggtctgtttggctttttaatgtcaaaaattaagaaccttaacttgtttactgcctaactatagatcggtttgtgtggagatgtttataatgaaattcagcagcaagggagcaatataaaaaccaaggaactggaaccgatctcaggaatagaagttcagtattgtcctaataattacact

SEQ ID NO: 22428 - DNA, 600 bp, Chicken  19866894234808_6
aattgcatatrtaygatttccctaattgcccgttgcgtgctgtagttgatcacgcaataacaatgaatccattataattaaatctgggaattattaattggttccatttacatacattgtcatcttccataggagctgcaggaatctgttgtctttaatgaacttgcgctagaaatcttggcgactgtttgaagtcacacaagayagagatttactcgtggtaggtagtttccagcactgcttgcagtgcaccagtattcctagtgaagattaggtcattaattttgtgcatgaataaargctgaaatgcacattgtaatcattaggtctgtttggctttttaatgtcaaaaattaagaaccttaacttgtttactgcctaactatagatcggtttgtgtggagatgtttataatgaaattcagcagcaagggagcaatataaaaaccaaggaactggaaccgatctcaggaatagaagttcagtattgtcctaataattacactggcagctgtatttgcatggaaccatgctttttctgtagtactcaattaaggttattcagctgccttgatgtgtttagaaacaaaaccactggcat

SEQ ID NO: 22429 - DNA, 599 bp, Chicken  19866894234810_1
  misc_feature (1)..(2): n is any nucleotide
nnactgttaataaattaaagtctgatgcaaccatcaggaaattacatgtggaaaagcttatcatactaagtgaaataaatattataacctagtaggaatgacctcagagagaaacaaagtatttttaagcaaactgtaagtaatttattgtttaattatcaattgcagaagagacaaataagctatataatagtatcaagctgtagacaagaactgtgtattaagctgtcataagtttgtgttgctggggcaacaggaagttaacaaggtaggaaataaacttcatttcatatagggaayaagagtttttagcttttctgtgttcatttatgaattttcagaatgtttatccataatataagagagagaaccacttcagcaaaaactgaaaaaagaaatggcttcagtctatgatgttctagagtcaggtggataagcagtcatcatatctaccctagaattcaaccacttaagagtctcaatctttcctagttatttctgtttcttaaaacactttgtaaagtatagaatggaattagctatgactttgcttgaagtagatggatttaggaaagtgaaagatttagtgttgtgtgcta

SEQ ID NO: 22430 - DNA, 600 bp, Chicken  19866894234811_1
gcaaagtgcacctctgtttttctaccgggcattatctactgagcagtgagaagagatctgaatttgtatgttttcttccttaaaagggatcccagcagaagaacaccatgttttacaactggagaaatgcatgcgtactgctggatacgtgcactgcaagctccatcagtaggggagaaattgagttccacttgcaaatgcagtagtgaaaatgctccgaagttgcaatagtgaaaatgctaattatagaacattagcaaaataattggtttgtacttaggctctgtgcaaatggactcrgtgggactgcttccacatacctgctcacacaggtaggactgggccttttctggattttgtgactatttcraaatgggcaggtggaaacgttcaagttaccatacatcactttatacattctttgctttatgtaagggaactgtgcatcccatttactaatcagtgagtgtttttttcacccatgatgacaactgcagagctttaaatattcaattatctctaggatcattcctccatctcctaaacaaagcacttggattataataatctaaaacactgaaggaatggattgaagctaaa

SEQ ID NO: 22431 - DNA, 600 bp, Chicken  19866894234811_2
ttttcttccttaaaagggatcccagcagaagaacaccatgttttacaactggagaaatgcatgcgtactgctggatacgtgcactgcaagctccatcagtaggggagaaattgagttccacttgcaaatgcagtagtgaaaatgctccgaagttgcaatagtgaaaatgctaattatagaacattagcaaaataattggtttgtacttaggctctgtgcaaatggactcrgtgggactgcttccacatacctgctcacacaggtaggactgggccttttctggattttgtgactatttcraaatgggcaggtggaaacgttcaagttaccatacatcactttatacattctttgctttatgtaagggaactgtgcatcccatttactaatcagtgagtgtttttttcacccatgatgacaactgcagagctttaaatattcaattatctctaggatcattcctccatctcctaaacaaagcacttggattataataatctaaaacactgaaggaatggattgaagctaaataggcctcagatccacccaaacttggcccttctccctgttcagtctatttccctttgtccaactctcacc

SEQ ID NO: 22432 - DNA, 599 bp, Chicken  19866894234812_1
  misc_feature (1)..(43): n is any nucleotide
nnnnnnnnnnnnnnnnnnnnnnnnnnnnnnnnnnnnnnnnnnnccttttgtcatctttcagaaaaggaagcaagaatagcaaaagagaaagaacttgggatttataaggaacacaaggtatcaaactgtgtgctaattgtgtctgtttgaaaatgtcttggaaatgcattgtatctgttgatcaccctgtgtaggatggaggggggtaaagggacgggtcaccactaaacaagccaaacccagtatatttatttttatctgttacataaatagaatgctataatttctcaggtgttgagyaaagcactttcttgcccaaatgtctattctgagctactatcaggaaaaaaatcagtgcatggcaatatcagagctacttcttgcatttaggattgcacccctaattgctgacttatttaaatacagtttttaggacatgcctgacctttttaacaygtgcatggggaatttgtttgtacttgccctaactttagcagcttcctctgctcttgctataatgatttctttatgaacaactgaagagtctttgttatagccacttaaagaagtatttagttgtacctttcataaagaaggcg

SEQ ID NO: 22433 - DNA, 600 bp, Chicken  19866894234812_2
cttggaaatgcattgtatctgttgatcaccctgtgtaggatggaggggggtaaagggacgggtcaccactaaacaagccaaacccagtatatttatttttatctgttacataaatagaatgctataatttctcaggtgttgagyaaagcactttcttgcccaaatgtctattctgagctactatcaggaaaaaaatcagtgcatggcaatatcagagctacttcttgcatttaggattgcacccctaattgctgacttatttaaatacagtttttaggacatgcctgacctttttaacaygtgcatggggaatttgtttgtacttgccctaactttagcagcttcctctgctcttgctataatgatttctttatgaacaactgaagagtctttgttatagccacttaaagaagtatttagttgtacctttcataaagaaggcgacggttatgttaacaaatggcacgtcctgtctccatgtttagcagcttaaagcaacctaattggctgtatattcacaatttacagcgttagtgttttgtgtaattgagcaagtgacaagtcaaatcttccacatgcaactagaacccgcgatcgttt

SEQ ID NO: 22434 - DNA, 600 bp, Chicken  19866894234822_1
cagcacattctatgatgatcaaagacaaaactggtcaattatgtttgagtcagaaaaggcagcaatggatttcagtaaacaggtaactacttactctgtgcaggatatgacttgctgcttgttgtttgaacagcaggcagattaggatgcatccctttgtttctggaaggtgaaaaagtcttttcagttgaagttcagctgtgagtgtcttcacgattgtgactgaggcaggtttgcaaagagcttggctgagttctgtttattaaaggcagggagcctgttatttctgatgggtttttmaatcaagtttctgaggtacttyaagaccaacagctccaagggagaaaaaggtatttttttctttatctagtaatgcraaattyagcacagggaaacrtggaatgcctcctgagtgtgtctataacctgtgcgtgatcagtacagtaagaaatgcatcagatgtgtaaggcagtcatgatgaaacctgccactctgttttaatggccaagatgctgatgtgcctttcttttgcaggtgtgtattgccaaatacaacagctccccagtgcttgattcagtcctctgccaggatctccttctt

SEQ ID NO: 22435 - DNA, 600 bp, Chicken  19866894234822_2
agacaaaactggtcaattatgtttgagtcagaaaaggcagcaatggatttcagtaaacaggtaactacttactctgtgcaggatatgacttgctgcttgttgtttgaacagcaggcagattaggatgcatccctttgtttctggaaggtgaaaaagtcttttcagttgaagttcagctgtgagtgtcttcacgattgtgactgaggcaggtttgcaaagagcttggctgagttctgtttattaaaggcagggagcctgttatttctgatgggtttttmaatcaagtttctgaggtacttyaagaccaacagctccaagggagaaaaaggtatttttttctttatctagtaatgcraaattyagcacagggaaacrtggaatgcctcctgagtgtgtctataacctgtgcgtgatcagtacagtaagaaatgcatcagatgtgtaaggcagtcatgatgaaacctgccactctgttttaatggccaagatgctgatgtgcctttcttttgcaggtgtgtattgccaaatacaacagctccccagtgcttgattcagtcctctgccaggatctccttcttggagaagggcagggagttgaag

SEQ ID NO: 22436 - DNA, 600 bp, Chicken  19866894234822_3
aacaggtaactacttactctgtgcaggatatgacttgctgcttgttgtttgaacagcaggcagattaggatgcatccctttgtttctggaaggtgaaaaagtcttttcagttgaagttcagctgtgagtgtcttcacgattgtgactgaggcaggtttgcaaagagcttggctgagttctgtttattaaaggcagggagcctgttatttctgatgggtttttmaatcaagtttctgaggtacttyaagaccaacagctccaagggagaaaaaggtatttttttctttatctagtaatgcraaattyagcacagggaaacrtggaatgcctcctgagtgtgtctataacctgtgcgtgatcagtacagtaagaaatgcatcagatgtgtaaggcagtcatgatgaaacctgccactctgttttaatggccaagatgctgatgtgcctttcttttgcaggtgtgtattgccaaatacaacagctccccagtgcttgattcagtcctctgccaggatctccttcttggagaagggcagggagttgaaggaggggactctctggagattgcctacacaggttggctgttccagaacaatgggat

SEQ ID NO: 22437 - DNA, 600 bp, Chicken  19866894234822_4
taactacttactctgtgcaggatatgacttgctgcttgttgtttgaacagcaggcagattaggatgcatccctttgtttctggaaggtgaaaaagtcttttcagttgaagttcagctgtgagtgtcttcacgattgtgactgaggcaggtttgcaaagagcttggctgagttctgtttattaaaggcagggagcctgttatttctgatgggtttttmaatcaagtttctgaggtacttyaagaccaacagctccaagggagaaaaaggtatttttttctttatctagtaatgcraaattyagcacagggaaacrtggaatgcctcctgagtgtgtctataacctgtgcgtgatcagtacagtaagaaatgcatcagatgtgtaaggcagtcatgatgaaacctgccactctgttttaatggccaagatgctgatgtgcctttcttttgcaggtgtgtattgccaaatacaacagctccccagtgcttgattcagtcctctgccaggatctccttcttggagaagggcagggagttgaaggaggggactctctggagattgcctacacaggttggctgttccagaacaatgggattggaca

SEQ ID NO: 22438 - DNA, 600 bp, Chicken  19866894234822_5
gtgcaggatatgacttgctgcttgttgtttgaacagcaggcagattaggatgcatccctttgtttctggaaggtgaaaaagtcttttcagttgaagttcagctgtgagtgtcttcacgattgtgactgaggcaggtttgcaaagagcttggctgagttctgtttattaaaggcagggagcctgttatttctgatgggtttttmaatcaagtttctgaggtacttyaagaccaacagctccaagggagaaaaaggtatttttttctttatctagtaatgcraaattyagcacagggaaacrtggaatgcctcctgagtgtgtctataacctgtgcgtgatcagtacagtaagaaatgcatcagatgtgtaaggcagtcatgatgaaacctgccactctgttttaatggccaagatgctgatgtgcctttcttttgcaggtgtgtattgccaaatacaacagctccccagtgcttgattcagtcctctgccaggatctccttcttggagaagggcagggagttgaaggaggggactctctggagattgcctacacaggttggctgttccagaacaatgggattggacaggtaaagacatttc

SEQ ID NO: 22439 - DNA, 600 bp, Chicken  19866894234830_1
caaccaccagaccaggctgcccagagccacatccagcctggccttgaatgcctccagggatggggcatccacagcctccttgggcaacctgttccagtgtgtcatcacccactggaacaggttgtgaacaggaatgatagaatcacagaatcattaaggttgaaaaagacctctaagatcacccaatccaatcatctacccatcaccaccatgcccactgtatcaaagtgttcctcttacattaatatttctttctttcttagttatgtgttaaggcatttagagtttttcctaggcatmatttgactgttatttaagtcaaaaagatgatatattaaagccctctgtcatttattgctgtctgcttgaaacatcattatttctccttgcaaattattgcaatcattgatttaattacacctttctgtatctttgttcattcacctatttgatatatgatattttttatagtgtagcatcaatatcagatacatttttgtaattcagcagatttctggtgacttcttctgcctcctctcccgcctcctgatgctccatttggaaatatgggttcttgaagtgctcttcggtggataagtg

SEQ ID NO: 22440 - DNA, 600 bp, Chicken  19866894234844_1
aaggaggagcccaaggcagcggcacagagcagccccacatccacccccagcagcgccccggagcagcccaaggaggacgaggcgtccagcatcttcgacgagctcatcgagaaggtgaagaacaacgacgccgacgtcaccgaggtgaacgtgaacaactcggactgcatcaacaacgagaccttggtgcgcttcaccgaggcgctggagttcaacaccgtggtcaagctgttcgccttggccaacacccgcgccgacgaccacgtggccttcgccatcgccatcatgctgaagtccaayaaggtgctgaccagcatcaacctggactccaaccacatcacggggaaaggcatcctggccatcttccgggcgctgctgcagaacgacacgctgacggagctgcgcttccacaaccagcggcacatctgcgggggtaaaacggagatggagatcgccaagctgctgaaggagaacaccacgctgctcaagctgggctaccacttcgagctggccgggccccgcatgaccgtcaccaacctgctgagccgcaacatggaccggcagaggcagaagcgcctccaggagcagaagctggcgcag

SEQ ID NO: 22441 - DNA, 600 bp, Chicken  19866894234850_1
aattatttggaagggggaggggggcgggggggagagaagcagtttggagcagctcgactggagagcactgcccgcagtcccctccccttggtgctctcttggcattgctctcctcatcccatcccatttaaccccatccctgtggtgcccattgcagttggttaacagctccttgcttggctgcaggctcagcgctggcgcaatgagaactacgagaggccggtggacctggagggctctggggatgatgatccctttggggacgatgaactggatgacatctactcgggctccggctcmggctgtgagtagctgcagggctcccagggtagggcgtggggtcatggggtggggtttggtgggactgaaactgtgggatggggggaatggattgccccatgcccatctcctcagcagccattctgctctctcccagccaaaagcaaagggaacrgtaccaaaagctgggctcaagtgcttgcacttcccatttcggtctctggccctaccaggcaggattagcccttttctaacggcctgtactggtgttttaaaggttgacctgagagaggggctttggccaacacctcgaaatctgca

SEQ ID NO: 22442 - DNA, 600 bp, Chicken  19866894234850_2
cagttggttaacagctccttgcttggctgcaggctcagcgctggcgcaatgagaactacgagaggccggtggacctggagggctctggggatgatgatccctttggggacgatgaactggatgacatctactcgggctccggctcmggctgtgagtagctgcagggctcccagggtagggcgtggggtcatggggtggggtttggtgggactgaaactgtgggatggggggaatggattgccccatgcccatctcctcagcagccattctgctctctcccagccaaaagcaaagggaacrgtaccaaaagctgggctcaagtgcttgcacttcccatttcggtctctggccctaccaggcaggattagcccttttctaacggcctgtactggtgttttaaaggttgacctgagagaggggctttggccaacacctcgaaatctgcaccccttgccttctgctgagcccacaactgttctgtgctttctgacttatgggcgtgaggccacatggccagccagtcctgggaaatgcccacttcatcctctgctcttctcccactcttccagattttgagcaggagtcagggttggagacagc

SEQ ID NO: 22443 - DNA, 599 bp, Chicken  19866894234862_1
  misc_feature (1)..(225): n is any nucleotide
nnnnnnnnnnnnnnnnnnnnnnnnnnnnnnnnnnnnnnnnnnnnnnnnnnnnnnnnnnnnnnnnnnnnnnnnnnnnnnnnnnnnnnnnnnnnnnnnnnnnnnnnnnnnnnnnnnnnnnnnnnnnnnnnnnnnnnnnnnnnnnnnnnnnnnnnnnnnnnnnnnnnnnnnnnnnnnnnnnnnnnnnnnnnnnnnnnnnnnnnnnnnnnnnnnnnnnnnnnnnnnnnnacaaccacaaaatctaccattttagagtccagttttaaaactatattagttttatgttttacagtaaagtagaawacttattagatacaatgggcaatgcttgataatactgaaagaatgagaaaccaatttcagaaaacctgttctcaaaattagatatatatttcagttagtatataactgatgagaaaaaataaaatcttgacctctcataaaaatgtaagctttacatacaagctgttgcasaagatgctagatatggattaatacagttgaaagtgttatcactgggaaatatttgtcatattcaatatttacaactaatctatttaaaggatgacttagattgtttgctttaataaagcttagtttat

SEQ ID NO: 22444 - DNA, 599 bp, Chicken  19866894234862_2
  misc_feature (1)..(54): n is any nucleotide
nnnnnnnnnnnnnnnnnnnnnnnnnnnnnnnnnnnnnnnnnnnnnnnnnnnnnnacaaccacaaaatctaccattttagagtccagttttaaaactatattagttttatgttttacagtaaagtagaawacttattagatacaatgggcaatgcttgataatactgaaagaatgagaaaccaatttcagaaaacctgttctcaaaattagatatatatttcagttagtatataactgatgagaaaaaataaaatcttgacctctcataaaaatgtaagctttacatacaagctgttgcasaagatgctagatatggattaatacagttgaaagtgttatcactgggaaatatttgtcatattcaatatttacaactaatctatttaaaggatgacttagattgtttgctttaataaagcttagtttataaatcagcatttyttctttcttttttataataaggctgaattacttgtagcatatatgtaaaaaaatgtgtaaactagtattagtagacagctaagaactggtctgtgagggaccatcaggcacctcggtctgattctagcattctgcagcattttctagcaggccgatgg

SEQ ID NO: 22445 - DNA, 600 bp, Chicken  19866894234862_3
caatgggcaatgcttgataatactgaaagaatgagaaaccaatttcagaaaacctgttctcaaaattagatatatatttcagttagtatataactgatgagaaaaaataaaatcttgacctctcataaaaatgtaagctttacatacaagctgttgcasaagatgctagatatggattaatacagttgaaagtgttatcactgggaaatatttgtcatattcaatatttacaactaatctatttaaaggatgacttagattgtttgctttaataaagcttagtttataaatcagcatttyttctttcttttttataataaggctgaattacttgtagcatatatgtaaaaaaatgtgtaaactagtattagtagacagctaagaactggtctgtgagggaccatcaggcacctcggtctgattctagcattctgcagcattttctagcaggccgatggctggttcatttccttcaccttacagtgtcaactttttttgcatagaaatagatatagattcatccgtggcgtttcacatgcctaccattgcaacactggtctgtgctgactggtgctgccaggctctatgtgctcagcctgt

SEQ ID NO: 22446 - DNA, 600 bp, Chicken  19866894234862_4
aaaatgtgtaaactagtattagtagacagctaagaactggtctgtgagggaccatcaggcacctcggtctgattctagcattctgcagcattttctagcaggccgatggctggttcatttccttcaccttacagtgtcaactttttttgcatagaaatagatatagattcatccgtggcgtttcacatgcctaccattgcaacactggtctgtgctgactggtgctgccaggctctatgtgctcagcctgtgtctgcaaatgctcctggcatgaaagtcactgtccacattgtagaaatmaaatattaataggtatcttgaactccaccgtgactatctccatgaaagtactccttctggctcaagctttatcaatatgtatttgttttaggaaattaattcttgtgttggaggaaaatgatgctggtgtaatgagaacaaggagtctggtcatggtggttttggaaaatgaaaccagtcgctactccacaaaaaggctgttgatcagttttaaactattcctagggcgtgtgatacaaatattgggatagaggatgaggtctaaaaccaactcccagccactgtggcttttatttgagt

SEQ ID NO: 22447 - DNA, 543 bp, Chicken  19866894234862_5
ttgaactccaccgtgactatctccatgaaagtactccttctggctcaagctttatcaatatgtatttgttttaggaaattaattcttgtgttggaggaaaatgatgctggtgtaatgagaacaaggagtctggtcatggtggttttggaaaatgaaaccagtcgctactccacaaaaaggctgttgatcagttttaaactattcctagggcgtgtgatacaaatattgggatagaggatgaggtctaaaaccaactcccagccactgtggcttttatttgagtttactttcatctttcgygtgagagccttgttctgtctgtcctgttctcttatgcagagtaatgcctgctttaaggtgaaaagcaaaagtcctggtgatatgccaataaaattttgtcaatttacatgtagaagataaactaaaattaactcccttttcagtgcccagcagggcatcagaaatgcatgtcctggcgtaaggggagacttgggaataagactctgtaaaagtgggctgtttcaaataagtctcaaagcagca

SEQ ID NO: 22448 - DNA, 515 bp, Chicken  19866894234863_1
ggaacagagacgctgaaatgcagccatgggctttgcaggcctgccgcatgctggcttggtgtggttttggtgtttgtgtcaggaacaaaaaaatggcagggacacgggtggtgcagctgtcaggggaggaaagtcagaggagaggttaaaagggaacataaacagcgggaagcgcagtggggacggtgttgcaatagcagaggggagaaagggtaaagtagagcagggcagcaggcaagaggagagccaggagaaacacggagcaggaggcaggggtttggcttgggctgctgctctgcrgggcacagggcagctccacagggcagtggtcacagctcggagctcaaggagcctttgggcagtgctgtcagacatcaggtttgaatgttgggtgtgcgagccaggagttggaccccataatcccggtgggacccttctgttcagggtgttctgtgattctgtgcctttgtgcaggagagatacccctcttatttcccatttctggagcttctgtt

SEQ ID NO: 22449 - DNA, 592 bp, Chicken  19866894234874_1
aaacagagggaaatgtactactcagatcttctgaatatcatggtaaagggagcatgctttacgttgcgtatgtgtctgcaaagctgtggtattattagaaattcatttcaaactgagaagctcaaaataaaactcccatttaggaacacttctactgctcagcttaccacactgaaatttacagccaactaatctgaatgcctcaattccttagaaatctttgagcctcttgaaggtgtaagcatcttcccacactgtcagatttgaatatttaatctagaagccgaactgagtcaaaaygcagctcctttggcaatggaaactgcctttgaagtttttggatctcctacattccttgtttcctgttttaaattaaaagaacaaagcgttctcggataacgcactgcaagcaccgtgcgaaacctgtgcctcagctggctggcgcggcgagccagacgttcccctgcccatcaaacaacccgccccgggcatgagaagttcgtgcaagtcagagctaacgtggttgggttgtgttcttgactacaggccagccagaatgagtgcttcataaagaacacctgtgctttgttga

SEQ ID NO: 22450 - DNA, 599 bp, Chicken  19866894234876_1
  misc_feature (1)..(21): n is any nucleotide
nnnnnnnnnnnnnnnnnnnnngagggatcccctctcacacacacacacaacaaaaagtgacaaaaacgttgtcaatcgctggtatggccatcttaattcttagcaaccataaacattgaagcacaccattagtaaatcaaaggtggtgataaggattataacaagataaatttttgaaatcgatattctgttattccagaataaccttcacctatttaactgagatcaatggaattaccctagcataaaacagaaataagctggtggtgaatctaggccttcgggtgtaaaacacaagarcggcagtgtagcagatgccacgcacacagcttaacaggagcaggccagggacagaaacaaacagtcttaattttctagatgaaggcacagtgatgaccatttggtggttagctgtttgtgctgctttacttcatagtttggtcttgtctttcaagatgaaatacacttaaatgattaactagctatgttcctagaacttctggaagtaagttmtctttataactgttataaacataagaaatggttcrtgtgtctcaaataagaccttaagtagactgctttttctcsttcccttttcc

SEQ ID NO: 22451 - DNA, 600 bp, Chicken  19866894234876_2
atttaactgagatcaatggaattaccctagcataaaacagaaataagctggtggtgaatctaggccttcgggtgtaaaacacaagarcggcagtgtagcagatgccacgcacacagcttaacaggagcaggccagggacagaaacaaacagtcttaattttctagatgaaggcacagtgatgaccatttggtggttagctgtttgtgctgctttacttcatagtttggtcttgtctttcaagatgaaatacacttaaatgattaactagctatgttcctagaacttctggaagtaagttmtctttataactgttataaacataagaaatggttcrtgtgtctcaaataagaccttaagtagactgctttttctcsttcccttttccagacctcaacagtctgcttttttttaacagaatcattttcagttgcttgttggattcaagcaatgctactcacaaaagtatattagaaattaagctcctacatttgaaagaattattatagttatttgaaagaaactaagctttttgtatactatctgcctcttcatatgtctcttggctagcctctcccggtcaccttcagttgtgccctgtt

SEQ ID NO: 22452 - DNA, 600 bp, Chicken  19866894234876_3
aacagaaataagctggtggtgaatctaggccttcgggtgtaaaacacaagarcggcagtgtagcagatgccacgcacacagcttaacaggagcaggccagggacagaaacaaacagtcttaattttctagatgaaggcacagtgatgaccatttggtggttagctgtttgtgctgctttacttcatagtttggtcttgtctttcaagatgaaatacacttaaatgattaactagctatgttcctagaacttctggaagtaagttmtctttataactgttataaacataagaaatggttcrtgtgtctcaaataagaccttaagtagactgctttttctcsttcccttttccagacctcaacagtctgcttttttttaacagaatcattttcagttgcttgttggattcaagcaatgctactcacaaaagtatattagaaattaagctcctacatttgaaagaattattatagttatttgaaagaaactaagctttttgtatactatctgcctcttcatatgtctcttggctagcctctcccggtcaccttcagttgtgccctgttagtaatcagaggcacattcctcctatgatttggca

SEQ ID NO: 22453 - DNA, 600 bp, Chicken  19866894234876_4
aaaacacaagarcggcagtgtagcagatgccacgcacacagcttaacaggagcaggccagggacagaaacaaacagtcttaattttctagatgaaggcacagtgatgaccatttggtggttagctgtttgtgctgctttacttcatagtttggtcttgtctttcaagatgaaatacacttaaatgattaactagctatgttcctagaacttctggaagtaagttmtctttataactgttataaacataagaaatggttcrtgtgtctcaaataagaccttaagtagactgctttttctcsttcccttttccagacctcaacagtctgcttttttttaacagaatcattttcagttgcttgttggattcaagcaatgctactcacaaaagtatattagaaattaagctcctacatttgaaagaattattatagttatttgaaagaaactaagctttttgtatactatctgcctcttcatatgtctcttggctagcctctcccggtcaccttcagttgtgccctgttagtaatcagaggcacattcctcctatgatttggcattgtaattagcataatcttatttccagcccccacttactt

SEQ ID NO: 22454 - DNA, 599 bp, Chicken  19866894234879_1
  misc_feature (1)..(81): n is any nucleotide
nnnnnnnnnnnnnnnnnnnnnnnnnnnnnnnnnnnnnnnnnnnnnnnnnnnnnnnnnnnnnnnnnnnnnnnnnnnnnnnnncaatacttcctcctacttctgagttagaatataatggagtaaaattgatgcataggactacaggaacacattaacttgctcgtgcttatttttattcttttattttttattattattattattatttttaagaaccaagtcagacttggacaaattgcagacattcttttctggaacagaagactgtcagcctagaacttaagggcagacagccaaatrcaaatttaaaaatggataatcagatcagacagtttagcaagtgatgtaaagggggcatacagattattattttgctgcctgtgctgttacattctagaaggaaagggtcatgggaggtaaaaaatgaatttaaccatctcaaagaaaaaatcagatttagactgctaaaaacttgtaaggtggaatcttgccaacagtttggagagctgtgtaaggattctgtaatggacatcatcaaatgcagcatatcagctctcaaaatacagatcaaagcaggccagccataaatactatgtagt

SEQ ID NO: 22455 - DNA, 600 bp, Chicken  19866894234879_2
ctgtgctgttacattctagaaggaaagggtcatgggaggtaaaaaatgaatttaaccatctcaaagaaaaaatcagatttagactgctaaaaacttgtaaggtggaatcttgccaacagtttggagagctgtgtaaggattctgtaatggacatcatcaaatgcagcatatcagctctcaaaatacagatcaaagcaggccagccataaatactatgtagtcagacagctgtagtgatctgtccagacttcaagcctgcctggaacttttcaaacaggaaaccttgttgtctttaccctkacattgccctcagtacctgtgtgatcatttaaaggagtaaaacagaaataggagaaaaatgtttggcactgagaaattgtgtgctgaggaggtatgggtggagaagccaaagcaattccagagctgctttgttttgttttaaagctgtttaatttatgtttaaaatagcctgaacgtgtttcttaacggtggtatactcctgaaggttagtagcaaacagaatccctaacatgcttttaaaacatacctttactagctaccttcctcttatctgcctttgactcttacgtatgaatgcta

SEQ ID NO: 22456 - DNA, 600 bp, Chicken  19866894234880_1
actgttgtagatgccgaagttactttataatcagttttgctgggaacagcagctagataatttcattttactgtgttacacttttctgatttctgattgctgctttaaagcatcccaactctgactgcttttcccataaagcctgcagtaagctcctttaaaacctacagctggataagtggaccagaaatgaccttctaaataaactggaagttgaatccaagcctgcccttagccctttgtacatggattatagctccatcctttgggactaagttcatactttaaatgtagcatcartgttctttggcaccagaaaggatgattctatcatcagattcccataggactgaaagatgyaggggaaaatgaaaagagatgggcaacacttcttgcagggtggggtcactgcatttttaatgyggattttcatgactgtattatatcagccctaaggagcacagttttccataatgggtgcatcagtctgttggctgcctgctgctgaagagggcattgcttttctcgcattggtactcatgctagtctgaccacatctgctgaactgtagcatttgattttcagccagtctagctcctt

SEQ ID NO: 22457 - DNA, 600 bp, Chicken  19866894234880_2
tttcattttactgtgttacacttttctgatttctgattgctgctttaaagcatcccaactctgactgcttttcccataaagcctgcagtaagctcctttaaaacctacagctggataagtggaccagaaatgaccttctaaataaactggaagttgaatccaagcctgcccttagccctttgtacatggattatagctccatcctttgggactaagttcatactttaaatgtagcatcartgttctttggcaccagaaaggatgattctatcatcagattcccataggactgaaagatgyaggggaaaatgaaaagagatgggcaacacttcttgcagggtggggtcactgcatttttaatgyggattttcatgactgtattatatcagccctaaggagcacagttttccataatgggtgcatcagtctgttggctgcctgctgctgaagagggcattgcttttctcgcattggtactcatgctagtctgaccacatctgctgaactgtagcatttgattttcagccagtctagctcctttgattttcctgctgtggcatgtgatgaataacaatgctggtgcaaaaaaaggctgggaag

SEQ ID NO: 22458 - DNA, 600 bp, Chicken  19866894234880_3
actgcttttcccataaagcctgcagtaagctcctttaaaacctacagctggataagtggaccagaaatgaccttctaaataaactggaagttgaatccaagcctgcccttagccctttgtacatggattatagctccatcctttgggactaagttcatactttaaatgtagcatcartgttctttggcaccagaaaggatgattctatcatcagattcccataggactgaaagatgyaggggaaaatgaaaagagatgggcaacacttcttgcagggtggggtcactgcatttttaatgyggattttcatgactgtattatatcagccctaaggagcacagttttccataatgggtgcatcagtctgttggctgcctgctgctgaagagggcattgcttttctcgcattggtactcatgctagtctgaccacatctgctgaactgtagcatttgattttcagccagtctagctcctttgattttcctgctgtggcatgtgatgaataacaatgctggtgcaaaaaaaggctgggaagggaggaatgggagaggaggcaagatggaggtgagccctccatgaaggtggccctttcagcagc

SEQ ID NO: 22459 - DNA, 600 bp, Chicken  19866894234881_1
cgttgagtaacagcacaacattctgagctatgcccttttaggagggtggaagaaaactcccccaagcagcctaggctttcacacttgcatgtccatgaacacaagaacttgccctttttaactgaactcgtttgccacgttgcttaatgccactgaacattgagtgctccgtgggaaagctgctcctgcccatgtgtgctcctggagccctgggtatttttagcatggctgcagagcatgctgacatgggagccatgcagacacagcccatgtcctccagctgcaccaatctgtgcagcratttctttactgcaggcagctgcatgcttgtaagaaaccgaatctgcaaatctcagcgagtgctttaagtgtacggagtgtgagtgctctcatacatcatcccactgctctgatagggctttcatacttgaagagcaggacaatgatagcaaaagaactgcatttacatcctggtgatggggttttctgaaaatgarttaatttgttacgtacaatacatttttcaacacgcagctctgctctcggaggtgttccttgggggatatcaatgagcctatttcataagagaggtgctcatga

SEQ ID NO: 22460 - DNA, 600 bp, Chicken  19866894234881_2
gctcctggagccctgggtatttttagcatggctgcagagcatgctgacatgggagccatgcagacacagcccatgtcctccagctgcaccaatctgtgcagcratttctttactgcaggcagctgcatgcttgtaagaaaccgaatctgcaaatctcagcgagtgctttaagtgtacggagtgtgagtgctctcatacatcatcccactgctctgatagggctttcatacttgaagagcaggacaatgatagcaaaagaactgcatttacatcctggtgatggggttttctgaaaatgarttaatttgttacgtacaatacatttttcaacacgcagctctgctctcggaggtgttccttgggggatatcaatgagcctatttcataagagaggtgctcatgacaaaagtatgcattattattcacartctgagggtattttacccatcctaatgattctttgctgagtcaaaattaaagacaccccagtggagggaacttcaaaaacaatgagcatcaaactggaaacgtagaactacagtgcattaggaagggagcaataaccagttcattattctatgtgagaaatactgaagtatc

SEQ ID NO: 22461 - DNA, 600 bp, Chicken  19866894234881_3
gcttgtaagaaaccgaatctgcaaatctcagcgagtgctttaagtgtacggagtgtgagtgctctcatacatcatcccactgctctgatagggctttcatacttgaagagcaggacaatgatagcaaaagaactgcatttacatcctggtgatggggttttctgaaaatgarttaatttgttacgtacaatacatttttcaacacgcagctctgctctcggaggtgttccttgggggatatcaatgagcctatttcataagagaggtgctcatgacaaaagtatgcattattattcacartctgagggtattttacccatcctaatgattctttgctgagtcaaaattaaagacaccccagtggagggaacttcaaaaacaatgagcatcaaactggaaacgtagaactacagtgcattaggaagggagcaataaccagttcattattctatgtgagaaatactgaagtatctgatatttctcttagaaatcctatttcactttaatacagatcatgccaaaaaaatagatactgtattcctgatatttcaggagtaagaaagaagaaatccattatacccattgaactcaaaacactca

SEQ ID NO: 22462 - DNA, 600 bp, Chicken  19866894234882_1
atcgctgctgttatccaaactagagccttcctgtgctttatctgtttccagctgacaaggagactcccgagctctactctcaggtggaggagtctgagtgactttaagaacagtttttgcaggagaactggaattatattcaaattcagacctcactttcagtttctttccatttacaattccctctgttagctcatttataagtcccagcaggatgatcttcttctttagcagatccacctaatgtgagagagaggcagccgtcaggaatttgtcctaaacaagaccagcaagtgggcyctggytctggaggagctggaaatatctccccagcatcagtagtgggaaaaccaagctcctcacctaccttgttcagaaccaggacactgggaatgtggrgaaactgagaaagacatttcagcacctccaggctcagagagtttcgtgtccagtggtctgacacgtccaccaaaaccagaactgccaggagagagtgaaggaaaaataaggaacctacattttccaaaggttctttctaagcttctctgtagcctgtgtttgaatcacttccctcctgccattactccactcacttctaca

SEQ ID NO: 22463 - DNA, 600 bp, Chicken  19866894234882_2
tgctgttatccaaactagagccttcctgtgctttatctgtttccagctgacaaggagactcccgagctctactctcaggtggaggagtctgagtgactttaagaacagtttttgcaggagaactggaattatattcaaattcagacctcactttcagtttctttccatttacaattccctctgttagctcatttataagtcccagcaggatgatcttcttctttagcagatccacctaatgtgagagagaggcagccgtcaggaatttgtcctaaacaagaccagcaagtgggcyctggytctggaggagctggaaatatctccccagcatcagtagtgggaaaaccaagctcctcacctaccttgttcagaaccaggacactgggaatgtggrgaaactgagaaagacatttcagcacctccaggctcagagagtttcgtgtccagtggtctgacacgtccaccaaaaccagaactgccaggagagagtgaaggaaaaataaggaacctacattttccaaaggttctttctaagcttctctgtagcctgtgtttgaatcacttccctcctgccattactccactcacttctacagggca

SEQ ID NO: 22464 - DNA, 600 bp, Chicken  19866894234882_3
gactttaagaacagtttttgcaggagaactggaattatattcaaattcagacctcactttcagtttctttccatttacaattccctctgttagctcatttataagtcccagcaggatgatcttcttctttagcagatccacctaatgtgagagagaggcagccgtcaggaatttgtcctaaacaagaccagcaagtgggcyctggytctggaggagctggaaatatctccccagcatcagtagtgggaaaaccaagctcctcacctaccttgttcagaaccaggacactgggaatgtggrgaaactgagaaagacatttcagcacctccaggctcagagagtttcgtgtccagtggtctgacacgtccaccaaaaccagaactgccaggagagagtgaaggaaaaataaggaacctacattttccaaaggttctttctaagcttctctgtagcctgtgtttgaatcacttccctcctgccattactccactcacttctacagggcagcatgcacatgtaatccaaaaacggtgttttaaatgataaaacaacaaacccagtttacacatgctgtcctacaaatatcacacatgctaaagt

SEQ ID NO: 22465 - DNA, 600 bp, Chicken  19866894234884_1
aattgtctcgcgaccacttctaaggcacttttctttactctgagttctttggaatcaaatattcaaatagcctaattctctccttatcacagctttgtatagaggaggaaattaagtactgcatgaatgctgaactccccagtgtgaaatcaacctggcaggcaccacttcatgccctaataagttgaaatagaaggcgtatagttcaggatgtttatgaattacatacacaatcctcccttcatttatgatcctaagggacgctgctaacaatccaatttgcttttcttcttttctttmtaaaagccctgctattggcacaagggaagcaaagcgatgaggcaaacaaactcccactctctccccgtcccccgccccctcatttgtttacaccatgcatttcacagcactgtacaaaggcaagacttgtttcccttataaagtctggtaaaaagcaaagaaaaaaaacaaaacaggagaattataaaaaaaatatttgggaaaagtattagaactggcaggagcaactgaagggcggcaaactgcagcagatctgctttcatagtagttaccaacaggatggttaatagttgtaatata

SEQ ID NO: 22466 - DNA, 600 bp, Chicken  19866894234885_1
ccgttcccttttgtcctatcactagttacctggaagaagaggctgatccccacctcgccacaatcacttaagcattcaaatgaagttaacaacacttttctcttagttttcaaattttctctccagtacatatctgtgtaatcagaaacagtgagaaaactgtactgagagatggctatttttgacttgagacagtgagttccaagggtaagcttcctgcactctctacaaagttacactgatcaaacaatttcaggtaacatcttgatttgcaacacctctccaactgtagttgcaatrccataaacatcataaaagtatatataaatacctctactttacaaaaaagtggttaaacaaaacaaaattaaaatcttctgtcctccagtaagtaaacatcctgttttggctttcgagcatttctgtgaatctgcaattgacagtggtaaaatgacttaggaagaacataagtgaagctagttccaaggttgaagtccaactgtgctcttattaaaaggagagcatcagcacaaaggccaaagaatgaatcacgacccaagcctaactacaccttcttaactcagcaataaacatgactgc

SEQ ID NO: 22467 - DNA, 600 bp, Chicken  19866894234890_1
aagataagcaccagaggcagcacagacgcacacctgtgattgccaaacctctgcgtgcactggagaagccctctctgctttgctgtgtgctgcctggactcgtctttggactgggtgaagagctagaacagctcctgggttacgtgagcagtgctggagatgctttctccaatgaaagtgaagtgcctttatcccccagggctctgggaggtccagcctgtgatgtcctggcagtggttttccagcacaagtggcagtgtggctcctcttctgctgccacctgtttggagcacagccccytgcatggctacacatcagctggcatgtgctgagtgtgctgccagctcttggcatgtggcaggcagcagctggtactgttgttgtagtttgtcaccagatgcaagaagatgggcaagcaaacagaagcttgagtggtacacaggctggaatgaggcaatgttactggcagagctctggggacaaattacacagtcttggcatgtactcaaatcttccagtggtagagaggagcggtgtgctggttgtgttgttacagaagcgctgggcaaagtgctggcaggaagatgggcttcctggtgt

SEQ ID NO: 22468 - DNA, 600 bp, Chicken  19866894234890_2
ggtacacaggctggaatgaggcaatgttactggcagagctctggggacaaattacacagtcttggcatgtactcaaatcttccagtggtagagaggagcggtgtgctggttgtgttgttacagaagcgctgggcaaagtgctggcaggaagatgggcttcctggtgtgtgaggaggcttaaaccagccctgtggccctgccctgctccacttcctgctagtggtgactagtgagcacgtggagagtgagctgactcagaccactctgataatgcaaggagaaaccctgttttaaatgcaygcctgcactcagcagcatgcaactcaaccactggagggcttctgtctgtctttycagaggatgtgtcctgacaaacctgcctgaaaatacactgcttgaggcctggccagaggattgctaaggtcctctttcatttgcaacaggtcacctttttgtagttgctttgggtagtgctgtgtcctcctgtgctgtgtaagctgttatctggaaggctgtgttgctcagacttgctgctgacaagctgtgggccctattaggagcgctgcttgtactggtgacttctgagagtctgtcaattta

SEQ ID NO: 22469 - DNA, 600 bp, Chicken  19866894234890_3
cacagtcttggcatgtactcaaatcttccagtggtagagaggagcggtgtgctggttgtgttgttacagaagcgctgggcaaagtgctggcaggaagatgggcttcctggtgtgtgaggaggcttaaaccagccctgtggccctgccctgctccacttcctgctagtggtgactagtgagcacgtggagagtgagctgactcagaccactctgataatgcaaggagaaaccctgttttaaatgcaygcctgcactcagcagcatgcaactcaaccactggagggcttctgtctgtctttycagaggatgtgtcctgacaaacctgcctgaaaatacactgcttgaggcctggccagaggattgctaaggtcctctttcatttgcaacaggtcacctttttgtagttgctttgggtagtgctgtgtcctcctgtgctgtgtaagctgttatctggaaggctgtgttgctcagacttgctgctgacaagctgtgggccctattaggagcgctgcttgtactggtgacttctgagagtctgtcaatttatcaaccattaactgcataatgtttcctttgcaacttgagccaggcatcatttca

SEQ ID NO: 22470 - DNA, 600 bp, Chicken  19866894234898_1
agggcaataagatagcaaatcagcactcctaagcctcaagccagactgaagcaattattataggcagtgcagtttccaaatcttggacatggctaactgtcttgcacctataaggcacaaaataaagcctgtctggaaagtatactgggaagaaagatagaaagcatgaaaagtcaaaagaagaaaggcaggctctactccagataaggagttgaaaattaatgacaaacaaacaaaccacaactagtccttctgaggctcacattttacaaatgcatttttttgctctatttttatttyagtgcattgggtgatgcagcagaaatatcctacggtcaagacagtacagtacatgaagtagattttattcaaagtttagtccttcatgcactatttagaccagctaagtagttttaagctaagtttcaagacataagctaaactgcacaaaaaacttttaatctgtaaggctcagtgmttttgtcagctctcctcacagctttttgccgtagacaaattctgaatggtatcctcatcttgtttctgacagtagaaacatcttgtctttaccaaggagaagcttttattggctttttaact

SEQ ID NO: 22471 - DNA, 600 bp, Chicken  19866894234898_2
agaagaaaggcaggctctactccagataaggagttgaaaattaatgacaaacaaacaaaccacaactagtccttctgaggctcacattttacaaatgcatttttttgctctatttttatttyagtgcattgggtgatgcagcagaaatatcctacggtcaagacagtacagtacatgaagtagattttattcaaagtttagtccttcatgcactatttagaccagctaagtagttttaagctaagtttcaagacataagctaaactgcacaaaaaacttttaatctgtaaggctcagtgmttttgtcagctctcctcacagctttttgccgtagacaaattctgaatggtatcctcatcttgtttctgacagtagaaacatcttgtctttaccaaggagaagcttttattggctttttaactgacagataaataagcagtaacacagctttctctmcagcatattaagtcaacagtgtaatataggtcacgtaaaatgtaaaaagtcatagaaaatgttattcttctttactcacagccatcctacttcggatatttggtatgtaggcatatataaaacatacattttgcacttccccct

SEQ ID NO: 22472 - DNA, 544 bp, Chicken  19866894234898_3
gtcaagacagtacagtacatgaagtagattttattcaaagtttagtccttcatgcactatttagaccagctaagtagttttaagctaagtttcaagacataagctaaactgcacaaaaaacttttaatctgtaaggctcagtgmttttgtcagctctcctcacagctttttgccgtagacaaattctgaatggtatcctcatcttgtttctgacagtagaaacatcttgtctttaccaaggagaagcttttattggctttttaactgacagataaataagcagtaacacagctttctctmcagcatattaagtcaacagtgtaatataggtcacgtaaaatgtaaaaagtcatagaaaatgttattcttctttactcacagccatcctacttcggatatttggtatgtaggcatatataaaacatacattttgcacttccccctagagatgcaatgaaaataccacctcatctagcaatattcttttgcattaactgcacatatcagttaaacaaaacacgaacaataaaaaaactacaaatac

SEQ ID NO: 22473 - DNA, 600 bp, Chicken  19866894234903_1
gcacttggtaaccttccttccgtatcactggatatttttgttgacaaagattacattctgattaagaaggcagtgtgctggactttcctccaattgttctgcctgctgaaagatactaccgcttcctattcaaaacctttttttgacaagtgctgaaagaattttgggatgtatatatttttaaaaccgattctgataatgcgagcaatggtattatcttcagattctctgcatgtcttctgcaatcatctgtgaaaggtagggaagagctaactagccttttgtatttgttcatagacmttttacatgggccttaagcattagattgtgttgtcagcgcccttcccttctgttttgtccctcaagatgaaggtcaccactatacatgtgtcccgttttgtttttcattgtaagtgcttagctgaattctatcaagtatcagctatttttgtccataaaatttcagaggtctaaactaaggaaatatatgggatgtccatgtcttaatgctggttcttggccaactgattcctcacgatatggatcaaaggaatgatagtgaattatttatgcagagtacagcattactattgtttcatg

SEQ ID NO: 22474 - DNA, 599 bp, Chicken  19866894234904_1
  misc_feature (1)..(183): n is any nucleotide
nnnnnnnnnnnnnnnnnnnnnnnnnnnnnnnnnnnnnnnnnnnnnnnnnnnnnnnnnnnnnnnnnnnnnnnnnnnnnnnnnnnnnnnnnnnnnnnnnnnnnnnnnnnnnnnnnnnnnnnnnnnnnnnnnnnnnnnnnnnnnnnnnnnnnnnnnnnnnnnnnnnnnnnnnnnnnnnnnnnnnnnggtcataagcaattcatgttgttagcagctgacttgaccgtgtgaagatgattcttttagaagagagtgtttccatgcaatctcattttggctctaacaaaacattcccaggagtgyttagagcagtagccatttcaggtacaactggtcaagaggaattttaagttattctttttcctcaccttgcaataggaagtacattggaacccgtgtacatcatgataaagaagaacactccactcaaatagaaacgaggtaactgagggttatcttgcatgacatgaaacaacaatatagcaactttttccacaagtataggatcaaaagtcagcagcagctgaaatcaaagaacaagcatttacacattagctgctcaagtaactcaaactacctatccaaaattccagttttaacca

SEQ ID NO: 22475 - DNA, 600 bp, Chicken  19866894234904_2
gagcagtagccatttcaggtacaactggtcaagaggaattttaagttattctttttcctcaccttgcaataggaagtacattggaacccgtgtacatcatgataaagaagaacactccactcaaatagaaacgaggtaactgagggttatcttgcatgacatgaaacaacaatatagcaactttttccacaagtataggatcaaaagtcagcagcagctgaaatcaaagaacaagcatttacacattagctgctcaagtaactcaaactacctatccaaaattccagttttaaccaattyagtatcaggacaagcaattcaacttcaaaatttcatttaaggaatacttcatacagaagcaagttccaagtcagacttttcctcatttccatgcrtttttgggcagttgattacctgagtgatatgaggaaggcaagtactatctgacaggagtctcttcactctaggcaaaggccttataatagcgttgtcttgatccctaaaaaaataaattggtaatgcattaagacgacatgtcttttctcctgcaagaatgaacgactttattaagccataattatcaagctattgagatcagat

SEQ ID NO: 22476 - DNA, 600 bp, Chicken  19866894234904_3
atcatgataaagaagaacactccactcaaatagaaacgaggtaactgagggttatcttgcatgacatgaaacaacaatatagcaactttttccacaagtataggatcaaaagtcagcagcagctgaaatcaaagaacaagcatttacacattagctgctcaagtaactcaaactacctatccaaaattccagttttaaccaattyagtatcaggacaagcaattcaacttcaaaatttcatttaaggaatacttcatacagaagcaagttccaagtcagacttttcctcatttccatgcrtttttgggcagttgattacctgagtgatatgaggaaggcaagtactatctgacaggagtctcttcactctaggcaaaggccttataatagcgttgtcttgatccctaaaaaaataaattggtaatgcattaagacgacatgtcttttctcctgcaagaatgaacgactttattaagccataattatcaagctattgagatcagattcagtgccattctttttaagttttttttttaaatcagactttggaagtgtggtttaatattatacattaaaggcgctttatttccaagttgaatg

SEQ ID NO: 22477 - DNA, 600 bp, Chicken  19866894234907_1
acacaactcctttcatatattagtgaaaaaaaaaacaaacagtattttgttgttatttagtgattgtattcagcaactggaggtttttaagctaagccatcagtggtgccaacagtgggaagcactcagaataagtctgtcctctgtctgaaaacctatggtcaccctcgacaatgacattctcttggtaactacaggagcctttcccgttccttgaccaccataaaggcaatatctttcagtgtaagggcagtggtgtaatggaacttcaccactatgattgctgcaaaaagcagctcmattgcgggtgaatagaaataaagaagattattcacccttcagaccttctgtcaacaaaaacagtctggttgtctagagcagtagccggtaagaatctgagtgaggatgttgcaccataacaccttggatcagaacaacacaggagatgtagaggaagttttgcttccaactagtgtgactgaaacttaaagacctcacccataaaagcacttgtgttggtacagaccaaagatgtagctagcctcatactttttctttaactgtaagatgtaagcagacactcatggaaaaaactgagaa

SEQ ID NO: 22478 - DNA, 600 bp, Chicken  19866894234909_1
gtgttacctatgcattaacagcatttactctaataaaagtgttaaaaacccacagtgttatttcctagcctgaacatgcaaatactattaaaagggagtggattacaaactgtataatatattttttgctgtacataggagattcacaaattttgtagagttctttttgacacagtcacatttcatgaagaattatgccccatccagttagacatgaccgcaaagccaatcaaagtcatggagagatcatggctggaatgtcagtgtgattaagaagagttaagaataggtttctgaagktcttatgcaaagtacttaatgtccttttttccctccaattgtcattcccccccccccccyttttttttttgtccatttcttccccattcttatttttaatagtttttttataagaaaaacaaatcaaagagctcttgagtctagccttaaaagctccaaagcctaactgaatgtgagatcagataaaattaataaaacccagcctcaaaaggaatcatttatgatagttctcatttaagtttctcaatgctttcctgcttacgaatacagctgtcatctttcatcttctctttttatcta

SEQ ID NO: 22479 - DNA, 600 bp, Chicken  19866894234909_2
tttcctagcctgaacatgcaaatactattaaaagggagtggattacaaactgtataatatattttttgctgtacataggagattcacaaattttgtagagttctttttgacacagtcacatttcatgaagaattatgccccatccagttagacatgaccgcaaagccaatcaaagtcatggagagatcatggctggaatgtcagtgtgattaagaagagttaagaataggtttctgaagktcttatgcaaagtacttaatgtccttttttccctccaattgtcattcccccccccccccyttttttttttgtccatttcttccccattcttatttttaatagtttttttataagaaaaacaaatcaaagagctcttgagtctagccttaaaagctccaaagcctaactgaatgtgagatcagataaaattaataaaacccagcctcaaaaggaatcatttatgatagttctcatttaagtttctcaatgctttcctgcttacgaatacagctgtcatctttcatcttctctttttatctagactgttctttcatttatctttagatgatgcaaatcactgtagctccactgaaagtaact

SEQ ID NO: 22480 - DNA, 600 bp, Chicken  19866894234915_1
tttaacttcttagggctaccacatactatttgaatggattggctttgtagttgtgacaatgaggctcagtgtgcttcttgatttccagccattgtgtggcctcttcactgttacacaactgtaccatgcagtaatgacacaacttcttgccattcaatccaaaaatgtcaggtggccaaagagtaaatttggactgtctcatgggcaacttaagttcatgtaatattgcccctgggctgcttcctagccagaatgcttaattgctgagaaaagtgtttacagcactgtatgtgcatctcygtccatttgggaccaagacaggtgtgacagaatcctaccagcctaggactggccgacaggttgcaacaggctgctgccagtgggmagtgcaaagagtgaacatccataacaaaacttgtatctgacccagtgaggaaggaaaagaaaagcagagaggggtttgaaggcccttatctgctctggaagagcctatttttgcaaaaaaatgattgtgcactttagattgggaggtctattttcctttatacacactcattgtactttattgcttactaacagaacaacaaagaaatggtctaa

SEQ ID NO: 22481 - DNA, 600 bp, Chicken  19866894234915_2
cagccattgtgtggcctcttcactgttacacaactgtaccatgcagtaatgacacaacttcttgccattcaatccaaaaatgtcaggtggccaaagagtaaatttggactgtctcatgggcaacttaagttcatgtaatattgcccctgggctgcttcctagccagaatgcttaattgctgagaaaagtgtttacagcactgtatgtgcatctcygtccatttgggaccaagacaggtgtgacagaatcctaccagcctaggactggccgacaggttgcaacaggctgctgccagtgggmagtgcaaagagtgaacatccataacaaaacttgtatctgacccagtgaggaaggaaaagaaaagcagagaggggtttgaaggcccttatctgctctggaagagcctatttttgcaaaaaaatgattgtgcactttagattgggaggtctattttcctttatacacactcattgtactttattgcttactaacagaacaacaaagaaatggtctaaatctaatcrtgctacagctgactacagctgaaaaaaaagctggagcagagagtatcagataccacactggtgctcccctatacaa

SEQ ID NO: 22482 - DNA, 389 bp, Chicken  19866894234915_3
ggaccaagacaggtgtgacagaatcctaccagcctaggactggccgacaggttgcaacaggctgctgccagtgggmagtgcaaagagtgaacatccataacaaaacttgtatctgacccagtgaggaaggaaaagaaaagcagagaggggtttgaaggcccttatctgctctggaagagcctatttttgcaaaaaaatgattgtgcactttagattgggaggtctattttcctttatacacactcattgtactttattgcttactaacagaacaacaaagaaatggtctaaatctaatcrtgctacagctgactacagctgaaaaaaaagctggagcagagagtatcagataccacactggtgctcccctatacaaactcctcctgtta

SEQ ID NO: 22483 - DNA, 600 bp, Chicken  19866894234923_1
gatatacttgaatgaatttattaatgaagtattccctcacaacaaacagatttctgctctcctataattaaacagtgcatcagtagtatttctcaccttccttttagagaaagtgaaaacaagcaccatgcaatgctagatagttttctgcaaaacgaaagttttgttgcttttgaatacttgcgagtattatattatcataaacatatgttttattttcttatatgttaatatagttttttgtttgcattcaaatattctcctgaagaaagagtgttgtttgcacatgaaaatcttaartgagactaacttgaaacagaagtaaagctagcacatctgttttaatatctcagaaagtaaaccagctgtgtatatatgatatatacatgctaatggtggatgttaaattagattttaagaatttgtttcagcttaatagcctaaaatgttattagtaacataggtaaggaaattacttaataaaaaatatatgatttttaacctgacaatgtccctcttaattaagttatgagatccttagatgaatgatgttataaaagtacagtgtgtagcttctattatttataacagaatgccaaa

SEQ ID NO: 22484 - DNA, 600 bp, Chicken  19866894234931_1
aaagcacacggcttggaagcacacccactcctctgcatggctaccagagagtgagagcattagcctgatcacgtgactcaaatcctgtgatttctgtgacatatcttccttccctgaccgtgaggtcctctgggatacgttgttcttcatctcttttgataagcaagtatctggaaggttgtcaattcatggaactggagtattaaccctttaattacccatgctgtccatgatgttatgatgtggaataccaatagcaaaattacaaaaccatgacattccaccacatattctacatcwttacatcatgcttaatatatatacatatatatatacaaacaataattaaaatgcattacacacacatctatatagatatatatacatagagctattgactgcactcccccaacatcaaattcccttgtggtacacactgaacatccccatctttctgcatcagccaccaagtggacccaggtccctgggcaaaaacagttccacggagaggtttgcccttcccagaggctggaaagacccgatctgcttttcccaacatgctctttacacgtactacagagaccttatctccctttacag

SEQ ID NO: 22485 - DNA, 525 bp, Chicken  19866894234931_2
tgctctttacacgtactacagagaccttatctccctttacagtatgtagggaactggattgggtaggaccatcacgactgatagatcctctagtgttgaccaaccaggtggcttcagccagatgcttctcccagtgcttaaatgttctaccacccattgctttcagcatagtttttaacaacccactgtactgttcaattttaccagaagctggttcatgatagggagtatgataaatctgttcaatgccatgttctttggcccaagaatttataagagaatttttgaaataagtctcaytatctgattcaattctttctgggatgccatgtcaccacaggacttgtttctccagacctaacacaatgttttgggcagtagcatagggtactgcatatgtttcaagccacccagtggttgcttccaccatggtaagcacataacgcttaccactgcaagattgtggcaaggtgatatagtcaacctgccacgcctccccatatttatacttttgccatcctcctt

SEQ ID NO: 22486 - DNA, 600 bp, Chicken  19866894234932_1
atctcttcattgatggcccaaggtctcatgggcctactgagctagaaataattcacccttgttctgctagtccaagtctatttgagccacctcaattctggcagcttgatctacctgatggctatttttctgttcttcagtagcctgactcatgagcatctacatggcgcacctttacaaccatattctttattcgggcagcaatgtctttccacagttcagcagcagcccaaataggtttacccctccgctgccagttattttgctcccactgctgtaaccacccccattaagcatttrccaccatccatgagtcagaataaagatagagcattggccacctctcctgttcagcagcatctaaggccagttggacagcctttacctctgcaaagtagcttgattctccttttccttcagtggcctctgcaacttgttatgtggggctccacagagcaactttccatctgtgatgcttccccacaatacgacacaatccatctgtgaacagggcatacttcttttcattttctggtagttcactgtatggtggggcctctttagcacgcgatatctcttctcctgatgatgttccaaacc

SEQ ID NO: 22487 - DNA, 600 bp, Chicken  19866894234932_2
ggccagttggacagcctttacctctgcaaagtagcttgattctccttttccttcagtggcctctgcaacttgttatgtggggctccacagagcaactttccatctgtgatgcttccccacaatacgacacaatccatctgtgaacagggcatacttcttttcattttctggtagttcactgtatggtggggcctctttagcacgcgatatctcttctcctgatgatgttccaaacctgtcgccttcaggccagtccataatcacctctaagattcctggacgactgaggttccccatccraactcattgtgtagtcagtgcaatccacttgcttcaagtggcatcagtagcatgatgggtgtaggaaacctttccattgaacatccagttcagcacgggcagtcaaggtgccaggaggagctgcgtctcagtaccgactacttcggaagcagacctaaccccctcctacacagctaagatctccttctcagttgaagtgtagcactcttcagaccccctgtatgctcgactccagaatcccaggggtcggcctcgagtgtctctccccatgtaaaaatcattcttcttccgcatcacctg

SEQ ID NO: 22488 - DNA, 600 bp, Chicken  19866894234932_3
gcatgatgggtgtaggaaacctttccattgaacatccagttcagcacgggcagtcaaggtgccaggaggagctgcgtctcagtaccgactacttcggaagcagacctaaccccctcctacacagctaagatctccttctcagttgaagtgtagcactcttcagaccccctgtatgctcgactccagaatcccaggggtcggcctcgagtgtctctccccatgtaaaaatcattcttcttccgcatcacctgataaagggggcttacaatgaggctgtagcttggaacatgcattctccaraagcccactacacccagaaaagattgtttctcttccttatcagtgggcggagacatggcagtgactttgtcgatcacatctgctgggatgtgatgatatctatcttgccactttatagctaggaactgaatctcctggacaggtcctttcacttagctttgcttaatagcaaaaccagtttgcagaaggatctggattgtttgctctcctttctcaaaaacttcctctgctgtatcgccccacacaacaatatcatcaatgtattgcaggtgctcaggggcactgccctgttccaacaca

SEQ ID NO: 22489 - DNA, 600 bp, Chicken  19866894234934_1
actggagtactgtatgtaaaaacaagtcagagcactgtgcaaatacagtgtctatacaactacctgcaactaagagtcagcagtgttttttccaaagttccagtctgtagcaagaagtcatgctggaatgcatccaacattcttaaaagattcactccttacgcacatgtacaccctatactttgtaaggtgatgttatctgtatttggctttgagagtctggatctaatttgagctactgttacaagtcacatttatatcctggcctgctgtgtagtttgatttaggatgtagacatayctcctttccggaaccctacaccctcccagttggaatctgcatttcataggctatggtttttttctaagaataaataatgtgcttacctttaaatgcttaaaatagcagtacccaaaacatggcatgtcattagggctgaattccctacccttcttgcagaaaggatggagagacatagttttaccaagtcaagaaaacaagaatttcaaacaaacatcactatcaggcttttcctgtactgtagtttctatttaaagaactacaaagaaagcacacttaggataatattgtttccaggaa

SEQ ID NO: 22490 - DNA, 600 bp, Chicken  19866894234942_1
ttgtaagaaagatattgttacatacacttgaataagcagtgggtacttcttggatctatcaaattgtgggggtataagcattttgtaccacaaagctagaagagacacatcaaagttatatcattaatggttacaatgatttctccaagcacaacccagtttgatgcaatagtaatgcaatagtaatagaaaatgaatcagcacaaactacagagtacataaacagtaaaccacaaaactcatacaagtaactgtttatgctgaactgtttagaaataattttgaaaaaaaacaagtgcycatttttattatttaaattatgtcaggtataaagttatgacttcacctagcagttggtttctagtttttctggtgtctaaaaatacacaattaggagtacaactgttattaagattttgagaaatgagttttggaaacattacactgattcactactatggaatattatttgtaaagttactaagaaaaacaacagtgtatgcgagtcaatataacacataaatcgcagtttatgtttcactttttattaactccatactgtaatgtttctatgtgatattcaaacactacagaaatcta

SEQ ID NO: 22491 - DNA, 600 bp, Chicken  19866894234942_2
gaaaaacaacagtgtatgcgagtcaatataacacataaatcgcagtttatgtttcactttttattaactccatactgtaatgtttctatgtgatattcaaacactacagaaatctacagaaatattgttttgttttttttgttttaattacattatgaagaagaaatgtgttttaacttttactttatttataggtacactgaggcacagatacagcggttactgtcagaaaaggcagaatgagggtctgatgtccaatctaacgtgctaacaagtttgatctatgaaaagattatactyactataacaaaatgaaggcaaaataaaaaagttaggaataaaaaatataacaaaaatgtataattcttacttataccatccacttcaagtttattaatttcttcttttggcagtatgatctcttgcaaagcagactgcaattcttgattgtcctctaatattctgagctctagggaaaaaaaatgtccaaatcattaattagtttatttcttaacttctctttgttaaatgagatatgttttgtattatttgaacagtaagaaaatctgtgaaagtttacaagtagaataatgaaatcag

SEQ ID NO: 22492 - DNA, 600 bp, Chicken  19866894234942_3
cttttactttatttataggtacactgaggcacagatacagcggttactgtcagaaaaggcagaatgagggtctgatgtccaatctaacgtgctaacaagtttgatctatgaaaagattatactyactataacaaaatgaaggcaaaataaaaaagttaggaataaaaaatataacaaaaatgtataattcttacttataccatccacttcaagtttattaatttcttcttttggcagtatgatctcttgcaaagcagactgcaattcttgattgtcctctaatattctgagctctagggyaaaaaaatgtccaaatcattaattagtttatttcttaacttctctttgttaaatgagatatgttttgtattatttgaacagtaagaaaatctgtgaaagtttacaagtagaataatgaaatcagctcagttcaatttgggtttgatcaaatagctgaataaaagcaaggcactggggttacagtgaacaaatgttccttagttttttataggatacatattttgcaatgcaaataatttcatatactagcggtgtatgttagaattctggatgtcaggagaaaacttttctcctgcagca

SEQ ID NO: 22493 - DNA, 600 bp, Chicken  19866894234944_1
gtttttgttaccgaataattgtttcaggaaatgatactcctgtttctgaatgtaaaacagaatccagcatgaaaaaggcaataatacagacgggttttgttgccaacagaatctgcacaagtgttggggctggctgattgcttgggcagagcgctttggagagcagcaggagtgtgcttagagagcagtgatggctcatggacaagtggctgagaccacctcttaaaatccatgtccttgacagctgagactctctactggcttaatgacacactggaactgcatctcgaggaagaggcrcactggccagtttcccctcccccatgtccaacacatgcttactttgaagataccagctttctttattcatattcttacaggagtaattaagaattacygttactcagacygtttgactgaaatgattcaataaacgtcactaaaagaagataatactacttaccttgacagctctaggcactgccaccttmcaaacattcctaccaaaactgagccatgttgctggtcgtgatgggcttgttggatacctcacatccaggccagtgggcaaggagtgccaatgtcctggttcccactgtc

SEQ ID NO: 22494 - DNA, 587 bp, Chicken  19866894234944_2
gttgccaacagaatctgcacaagtgttggggctggctgattgcttgggcagagcgctttggagagcagcaggagtgtgcttagagagcagtgatggctcatggacaagtggctgagaccacctcttaaaatccatgtccttgacagctgagactctctactggcttaatgacacactggaactgcatctcgaggaagaggcrcactggccagtttcccctcccccatgtccaacacatgcttactttgaagataccagctttctttattcatattcttacaggagtaattaagaattacygttactcagacygtttgactgaaatgattcaataaacgtcactaaaagaagataatactacttaccttgacagctctaggcactgccaccttmcaaacattcctaccaaaactgagccatgttgctggtcgtgatgggcttgttggatacctcacatccaggccagtgggcaaggagtgccaatgtcctggttcccactgtcatgacaacaacctgatgctatgatgcatctttctttattgacagcataatatacatggaaagaagggcagagggaacagcacctt

SEQ ID NO: 22495 - DNA, 575 bp, Chicken  19866894234944_3
atctgcacaagtgttggggctggctgattgcttgggcagagcgctttggagagcagcaggagtgtgcttagagagcagtgatggctcatggacaagtggctgagaccacctcttaaaatccatgtccttgacagctgagactctctactggcttaatgacacactggaactgcatctcgaggaagaggcrcactggccagtttcccctcccccatgtccaacacatgcttactttgaagataccagctttctttattcatattcttacaggagtaattaagaattacygttactcagacygtttgactgaaatgattcaataaacgtcactaaaagaagataatactacttaccttgacagctctaggcactgccaccttmcaaacattcctaccaaaactgagccatgttgctggtcgtgatgggcttgttggatacctcacatccaggccagtgggcaaggagtgccaatgtcctggttcccactgtcatgacaacaacctgatgctatgatgcatctttctttattgacagcataatatacatggaaagaagggcagagggaacagcacctt

SEQ ID NO: 22496 - DNA, 494 bp, Chicken  19866894234944_4
tggctcatggacaagtggctgagaccacctcttaaaatccatgtccttgacagctgagactctctactggcttaatgacacactggaactgcatctcgaggaagaggcrcactggccagtttcccctcccccatgtccaacacatgcttactttgaagataccagctttctttattcatattcttacaggagtaattaagaattacygttactcagacygtttgactgaaatgattcaataaacgtcactaaaagaagataatactacttaccttgacagctctaggcactgccaccttmcaaacattcctaccaaaactgagccatgttgctggtcgtgatgggcttgttggatacctcacatccaggccagtgggcaaggagtgccaatgtcctggttcccactgtcatgacaacaacctgatgctatgatgcatctttctttattgacagcataatatacatggaaagaagggcagagggaacagcacctt

SEQ ID NO: 22497 - DNA, 600 bp, Chicken  19866894234949_1
aaataaaacatggttcctttaaccacaaaatgtttagatattttgaatgaactaaatattgctcacagtgacttaaggaattattagggtttactgaggaaaaaaaagcaggaatactgaaaaaaaaaaaaacacaactgattttttttctgaaaatctgtaggcgactattactgaaagtaatgcctattgaatttccatggaaactacaagagacataatgagcacagtaactacttgatagtgcgatgaacaagggtctgcatgccatgcttgtaaaaatctgcaccagcagtgttycacagctgctaatgatgacacagttggaagatgttgcccacgcagtccatctttcatcagcccagacagatggaagtaaaaagttgtcaaatctggacagtattgtgggtatggtagaacagtccagccaaacctgcaatatgctccatgatctccaaactggtatggggcaaggaaaaggttgtcttcttctctagcctgaggctggaagttggaaccttcagctcagtcagtgtcacaatgtagaagtctgagttgacggtttgctccaggaaaaacatgaatcacccccttcctcat

SEQ ID NO: 22498 - DNA, 600 bp, Chicken  19866894234950_1
ccattatgagccagcctcagattggcaaccggatggagcgagccacacaccagccagtcccctacacagaactcaggcaatccacgggcacagggacaccagtgtcaccaggggaggagacaagactgcagagaggtgagcaagcagagacacttgcggccaccatgagaaccctgggcactgctggacgaagggcacacagacctgccgttctctgctccagccaacacatgagtttaccttacttatgtgacttatcaaagtggattatcatgcaaataagcatgagtgtattgagcraaagtgatgtttaatatgttttggaaaccttcttgtgcacataaatgatcttagatttcactgggatatccgtagcactcttcggaacagcacaggtctgaactcttctggtacactaattcaaccttttaggtatcatttttccttgcactgtgttaaaaaagtgattcctataaatttcagccactcaaatagtatatacagatgtttaatgtcagaaattcttagaacagtgacagtgactcactgtatatcacctgatagctccttgctgacaggaggtctgacctacccactcat

SEQ ID NO: 22499 - DNA, 600 bp, Chicken  19866894234959_1
ttccagtaccgcaaagtgtaaagggccaacgacacgaagttctgaagcccttaaaatcaatcagtgcctgcagatgcacggcacctcccatagataacatgcgcctcagtcatgctttctccaatatgcccattcaacactcgctgccaccctccccaccagaaatacctacatttcagcagttctgagtgtacataatttgtaaagtgcccttaaaggaaagccttattgacaggctacctggcaccgagctcgcaacccaccaggaacgtcgggaggccagatttgcacatgtcaagyccatcatctccggatgctttcaaagttttgctttttgtgactgtacgaaacgcatctctggagccattataggaattagttggaaagggtgggggagaaggaggagcggttaagaacggccatacacccctatgaggacatttagaagcatctggctctgagatattaagaaaggggraaaaaaaattaatcacgttggctaggagaaaaaaaaaaacctggcatcagcacagccaccttgtcataaggcagatattaataatgtgagcctccagggaacgctccgacatctgaaagatc

SEQ ID NO: 22500 - DNA, 600 bp, Chicken  19866894234959_2
gcagttctgagtgtacataatttgtaaagtgcccttaaaggaaagccttattgacaggctacctggcaccgagctcgcaacccaccaggaacgtcgggaggccagatttgcacatgtcaagyccatcatctccggatgctttcaaagttttgctttttgtgactgtacgaaacgcatctctggagccattataggaattagttggaaagggtgggggagaaggaggagcggttaagaacggccatacacccctatgaggacatttagaagcatctggctctgagatattaagaaaggggraaaaaaaattaatcacgttggctaggagaaaaaaaaaaacctggcatcagcacagccaccttgtcataaggcagatattaataatgtgagcctccagggaacgctccgacatctgaaagatccactcgctggctatcacaacgcgggcagctttaactgatgcctttttgaaaccttctgaatttcagtcttaagcactgctttggtatattcttttttttttttttttttcttttccgcagcaaaatgaaaccctcggtgttaaagatcgaacgttcaatgcattactctctttcctag

SEQ ID NO: 22501 - DNA, 600 bp, Chicken  19866894234960_1
tgaaaataaaatataaaatttatgtaaatgtttacattgtgtatgtgtttatatatacagtatccctacacacacacaattatatgtatgcaacacgcataatgcactgcatgtatattgactgtacaactatacatacatatacatacatgcatacttacatatgttatatatacattcaatagattattttaaaattaataaatccaaaatattatctgcaagtttgctttaattaaacttgttttctgtttttgactaaaaatgagtatgctacttgaaaatagttggatgtgtgargagccacagacactcagtaagtgggagatggggaaggcaagggaaagcgaccatgtcctttctcagttccagcagtaacactgagttgaagagctccttcctctctctgtctcaggtcatttatttctacttctgcagcacagttcaactcttctatcacatattttttactttactgaggcagagccattgcccaagaaataaggtaaatcacagtaagggtgtactactcacacctgactgcctttccatatgggaagaactgccttttrgtttgctgctctcttcagactagcatcg

SEQ ID NO: 22502 - DNA, 600 bp, Chicken  19866894234960_2
gctacttgaaaatagttggatgtgtgargagccacagacactcagtaagtgggagatggggaaggcaagggaaagcgaccatgtcctttctcagttccagcagtaacactgagttgaagagctccttcctctctctgtctcaggtcatttatttctacttctgcagcacagttcaactcttctatcacatattttttactttactgaggcagagccattgcccaagaaataaggtaaatcacagtaagggtgtactactcacacctgactgcctttccatatgggaagaactgccttttrgtttgctgctctcttcagactagcatcgttttctcaaatgaccctttctggatcatttgttctgcttttgtaaaaatgctgttacaaaataaatgcctcctataaaatatccatgaaagtttccatttttgtttgtcctaaaataccttttccagcaaatatgaaaaaatgttcattttctatttttacaaatattatttcatctattcaatttacaaaccacaaaaggcagttgtaaaaggctatattcaatataaaagaacaacactaaacactaaaggatttgtttcattctgatgt

SEQ ID NO: 22503 - DNA, 600 bp, Chicken  19866894234965_1
ccttaaaagctatatattctaaatgtcaaacaagagacaaaggtacattcagagagctaggagtgcagaggaaacagagatgtcacttgtcatctcataaaagttgtcatcacataacagactaagaagaacttgcttctgtatcaagaaacagaagcaaatagtatacatttaggacagtaaaaaaaaaagcatgctgctaaaggggatacaaagagacgcatcaaacaggtcagggaggcattacctttgaagcagcgctgatatacacaagaaaacattaagaataaatttaaggcyaggattttgtgatatttgagattggaaatactaaaatgtttgtttcacaattcagtcgattatcttagaggatatatgagagacaaactgctcaatggaaaaatgattttacagtaaaaatctaagagggatacacctacatgttcactgcaaacatctatgagattaagaagaaaaaatacatacggaaatgaaaaaggttgctaaagatataaatgtacagaaagatgtagggtggggaaaataaaaatgaagtactttttgaaaaataaattcaatagcaattaggagaaagaagtc

SEQ ID NO: 22504 - DNA, 600 bp, Chicken  19866894234966_1
catctctttcttttcccaggtagctttgtttcttggggtcaaacagagttatgattagagatcttggtacctatggaggaagattaagctctttccatccaaaagagacagagggaagttatatttctactttttctgtgttttcttgtaaggaaaggattgtatgtaaatgttttcagttgtgtttttttgtttgtttgtttttaagcatagcccaggttgctcagcaggcattgagtctgtctgaatggaaatgtccaagagaattccctcatgaagtcagcgcttcatgaaagatgracaactcagctggtgctgagaatgacgttcagattgcctggtcttgaactcgtccctgaccttctgagcagaagagggcagraaatgcttagataaaattagtctatgtagctaaagactccaaccctacacatacactcagagaggacagttctgtattctgcctatgactttttaaatcttgagtgcctaaccacgccaacttaatagcgttgttttaacatagttattacttgaatggcatagggaaaatttacactgtgtatgaagaacagaagtataagctagttatccagaacc

SEQ ID NO: 22505 - DNA, 600 bp, Chicken  19866894234966_2
attaagctctttccatccaaaagagacagagggaagttatatttctactttttctgtgttttcttgtaaggaaaggattgtatgtaaatgttttcagttgtgtttttttgtttgtttgtttttaagcatagcccaggttgctcagcaggcattgagtctgtctgaatggaaatgtccaagagaattccctcatgaagtcagcgcttcatgaaagatgracaactcagctggtgctgagaatgacgttcagattgcctggtcttgaactcgtccctgaccttctgagcagaagagggcagraaatgcttagataaaattagtctatgtagctaaagactccaaccctacacatacactcagagaggacagttctgtattctgcctatgactttttaaatcttgagtgcctaaccacgccaacttaatagcgttgttttaacatagttattacttgaatggcatagggaaaatttacactgtgtatgaagaacagaagtataagctagttatccagaaccttcaatttttagacttcagtattgaggttaaacatttttttttttaaattgcatagtgttcaagtggaataggagtcagtag

SEQ ID NO: 22506 - DNA, 600 bp, Chicken  19866894234967_1
ctaaccttccttccctggttcagaaacacaaccctttgttatctacatgaaccgcagggcaggggtatccatcaacaaacactagcaagcctcacaatgttacatattgatgcaagttgtaacaataagtaatgtatttaagcagaagatcttttgtgtgaggaatgtactttaggtggaagaatccccagtgcagcctgtactgtaataagaatgcctgcttcttaatacctcattgttcttaacgagtttcattcagactgaagtttgaatgacgaactcgtgtttctacatgccccyacacacttctattcccacttcagaacaacccaagtatttatgttgcaagtttctgcacaagttccaaataagtttgaggttaatttgcaagatcagatttcaaacttcatacacgagtgctgtatgccaaacaaagtgtcaccagggcacctcagagaacagttgaatctgcttaagaacagtgtatttaagcacaggcagctgcagaaaggatttcagaacagcatatttaatccaatgtgattatcagtagtttctcagactgtaaaatgattcaaggaagtgctcaagaactactaa

SEQ ID NO: 22507 - DNA, 599 bp, Chicken  19866894234969_1
  misc_feature (1)..(99): n is any nucleotide
nnnnnnnnnnnnnnnnnnnnnnnnnnnnnnnnnnnnnnnnnnnnnnnnnnnnnnnnnnnnnnnnnnnnnnnnnnnnnnnnnnnnnnnnnnnnnnnnnnnaatggagcaaagcactgcccttcttggagctgagaattctcctcctgtacagtgaacaacggatgtgctgcagaggttaaggatgtttcctggtacttatagtgtttgattcattctgtccccttggcagaatgtccctctgggtaagaggtgttcctccccattgatctttgcatgtgatttgagataggagggacttcwggcagcagttgtgattgtgtgatttgcacttcrtttctgtgtgcctggtcctcatttccatgctctttgcccacgcatgttaatgaaatacaaaggagtgagttgatatttgaatgggtcgtacgcttctcatgtcacacgtacagctgcccttatacctcacaatggtttctgtagttttgtgtcaaaatcaagaatatttttttyttycccatgtaaaacacaaatttaaacattggctttggaaggttttcacaccagttacattgaattggtaattgagtctgcaccayagctta

SEQ ID NO: 22508 - DNA, 599 bp, Chicken  19866894234969_2
  misc_feature (1)..(66): n is any nucleotide
nnnnnnnnnnnnnnnnnnnnnnnnnnnnnnnnnnnnnnnnnnnnnnnnnnnnnnnnnnnnnnnnnnaatggagcaaagcactgcccttcttggagctgagaattctcctcctgtacagtgaacaacggatgtgctgcagaggttaaggatgtttcctggtacttatagtgtttgattcattctgtccccttggcagaatgtccctctgggtaagaggtgttcctccccattgatctttgcatgtgatttgagataggagggacttcwggcagcagttgtgattgtgtgatttgcacttcrtttctgtgtgcctggtcctcatttccatgctctttgcccacgcatgttaatgaaatacaaaggagtgagttgatatttgaatgggtcgtacgcttctcatgtcacacgtacagctgcccttatacctcacaatggtttctgtagttttgtgtcaaaatcaagaatatttttttyttycccatgtaaaacacaaatttaaacattggctttggaaggttttcacaccagttacattgaattggtaattgagtctgcaccayagcttatagagtcatactgaacagagacatcttgctaaa

SEQ ID NO: 22509 - DNA, 600 bp, Chicken  19866894234969_3
attcattctgtccccttggcagaatgtccctctgggtaagaggtgttcctccccattgatctttgcatgtgatttgagataggagggacttcwggcagcagttgtgattgtgtgatttgcacttcrtttctgtgtgcctggtcctcatttccatgctctttgcccacgcatgttaatgaaatacaaaggagtgagttgatatttgaatgggtcgtacgcttctcatgtcacacgtacagctgcccttatacctcacaatggtttctgtagttttgtgtcaaaatcaagaatatttttttyttycccatgtaaaacacaaatttaaacattggctttggaaggttttcacaccagttacattgaattggtaattgagtctgcaccayagcttatagagtcatactgaacagagacatcttgctaaaatacagccaacttctaatgaggctacaatggatctggtttgttgcctgtttattgagggtctccctccggctcctctttggtggagtactggaaataatcctctctgttcaaatcgggcttcagcaagaggatgtagcatttggggatgtagtacgtccccacaatacccaaact

SEQ ID NO: 22510 - DNA, 600 bp, Chicken  19866894234969_4
cattctgtccccttggcagaatgtccctctgggtaagaggtgttcctccccattgatctttgcatgtgatttgagataggagggacttcwggcagcagttgtgattgtgtgatttgcacttcrtttctgtgtgcctggtcctcatttccatgctctttgcccacgcatgttaatgaaatacaaaggagtgagttgatatttgaatgggtcgtacgcttctcatgtcacacgtacagctgcccttatacctcacaatggtttctgtagttttgtgtcaaaatcaagaatatttttttyttycccatgtaaaacacaaatttaaacattggctttggaaggttttcacaccagttacattgaattggtaattgagtctgcaccayagcttatagagtcatactgaacagagacatcttgctaaaatacagccaacttctaatgaggctacaatggatctggtttgttgcctgtttattgagggtctccctccggctcctctttggtggagtactggaaataatcctctctgttcaaatcgggcttcagcaagaggatgtagcatttggggatgtagtacgtccccacaatacccaaactgac

SEQ ID NO: 22511 - DNA, 600 bp, Chicken  19866894234969_5
gacttcwggcagcagttgtgattgtgtgatttgcacttcrtttctgtgtgcctggtcctcatttccatgctctttgcccacgcatgttaatgaaatacaaaggagtgagttgatatttgaatgggtcgtacgcttctcatgtcacacgtacagctgcccttatacctcacaatggtttctgtagttttgtgtcaaaatcaagaatatttttttyttycccatgtaaaacacaaatttaaacattggctttggaaggttttcacaccagttacattgaattggtaattgagtctgcaccayagcttatagagtcatactgaacagagacatcttgctaaaatacagccaacttctaatgaggctacaatggatctggtttgttgcctgtttattgagggtctccctccggctcctctttggtggagtactggaaataatcctctctgttcaaatcgggcttcagcaagaggatgtagcatttggggatgtagtacgtccccacaatacccaaactgaccatcagaatggtactgatctgaatcacagacatgaggactgtcctcagagtggcgaagacggtaatgaagaagatccagatga

SEQ ID NO: 22512 - DNA, 600 bp, Chicken  19866894234999_1
gaatactttcctttcttataatgaaaatgcaaaaggaagcagttcacttaatttacagtaaacacccagatagcttggcttgagattaaaaatatatactgcctacattttaaaaagttaacagtacaaattggaaacccaaatgggattcatgcactcgctttaactgaatatttgactcaatactaagtgctgtctttcctacatgccatcctggagatacagtggaagcattcaaccacataacaaatacagaaccacctgacttaaacaagcagccccacgctctccctggttccmctcacctctctatacacagctatgaatcataagcctcaaattctgactttyagcacttccattttccccttatgtactatttctttgttgtcatagtccctgactctaatgatcttgcttttccaccaggtgcattgtattcaagaaaattcaccatagatggggaacagatctccctacaggtgcaagatactccctttgtttcactggaggtaaaacatcttctcagtgcatcagtactttacaacacrgttactgtctcttgttygttgccagcatgttaatctgtaaataactcag

SEQ ID NO: 22513 - DNA, 600 bp, Chicken  19866894234999_2
tttacagtaaacacccagatagcttggcttgagattaaaaatatatactgcctacattttaaaaagttaacagtacaaattggaaacccaaatgggattcatgcactcgctttaactgaatatttgactcaatactaagtgctgtctttcctacatgccatcctggagatacagtggaagcattcaaccacataacaaatacagaaccacctgacttaaacaagcagccccacgctctccctggttccmctcacctctctatacacagctatgaatcataagcctcaaattctgactttyagcacttccattttccccttatgtactatttctttgttgtcatagtccctgactctaatgatcttgcttttccaccaggtgcattgtattcaagaaaattcaccatagatggggaacagatctccctacaggtgcaagatactccctttgtttcactggaggtaaaacatcttctcagtgcatcagtactttacaacacrgttactgtctcttgttygttgccagcatgttaatctgtaaataactcagctttccagaagaaatacacctgggctcaaacccaaatgaagacttacaggt

SEQ ID NO: 22514 - DNA, 600 bp, Chicken  19866894234999_3
acagaaccacctgacttaaacaagcagccccacgctctccctggttccmctcacctctctatacacagctatgaatcataagcctcaaattctgactttyagcacttccattttccccttatgtactatttctttgttgtcatagtccctgactctaatgatcttgcttttccaccaggtgcattgtattcaagaaaattcaccatagatggggaacagatctccctacaggtgcaagatactccctttgtttcactggaggtaaaacatcttctcagtgcatcagtactttacaacacrgttactgtctcttgttygttgccagcatgttaatctgtaaataactcagctttccagaagaaatacacctgggctcaaacccaaatgaagacttacaggtgcaccttaaaccccaccaaaatgagcccctgaagaggttaagtcaggttcctttaagagtaagtcagaattaaaacaaatctgtgtctttctgaggggacagttctcacagaagtggctatttcagctagagtgcttttcaatgctttccttgcttgttttttaattttattcatttcttatttctcagccgttagcatt

SEQ ID NO: 22515 - DNA, 600 bp, Chicken  19866894234999_4
aaacaagcagccccacgctctccctggttccmctcacctctctatacacagctatgaatcataagcctcaaattctgactttyagcacttccattttccccttatgtactatttctttgttgtcatagtccctgactctaatgatcttgcttttccaccaggtgcattgtattcaagaaaattcaccatagatggggaacagatctccctacaggtgcaagatactccctttgtttcactggaggtaaaacatcttctcagtgcatcagtactttacaacacrgttactgtctcttgttygttgccagcatgttaatctgtaaataactcagctttccagaagaaatacacctgggctcaaacccaaatgaagacttacaggtgcaccttaaaccccaccaaaatgagcccctgaagaggttaagtcaggttcctttaagagtaagtcagaattaaaacaaatctgtgtctttctgaggggacagttctcacagaagtggctatttcagctagagtgcttttcaatgctttccttgcttgttttttaattttattcatttcttatttctcagccgttagcatttacatactccctctttc

SEQ ID NO: 22516 - DNA, 600 bp, Chicken  19866894234999_5
gcatgttaatctgtaaataactcagctttccagaagaaatacacctgggctcaaacccaaatgaagacttacaggtgcaccttaaaccccaccaaaatgagcccctgaagaggttaagtcaggttcctttaagagtaagtcagaattaaaacaaatctgtgtctttctgaggggacagttctcacagaagtggctatttcagctagagtgcttttcaatgctttccttgcttgttttttaattttattcatttcttatttctcagccgttagcatttacatactccctctttctattggyatttgagatattatagatttagtacttgaccgggagccaaacagaatccagaattaagatgtctctttctgaagagcagttttaattgcagaacaagatgataaaagtgatgtcagaagagcaggaatagaatgaaatttggttttatgtgaaaggtgaaaatctcaggggagtaataattcctattaaaaaagctgggatttcatggtaaaattagtcatccttctgttgccaccaaatctacccttctgaaaagctattctagaagtcttcccattattctagtgggacttcagagtg

SEQ ID NO: 22517 - DNA, 600 bp, Chicken  19866894235003_1
taatttccagtgaagcacaaccttattgaagtagttctattacagaacggtcttcttcataaatcctgtattaccagttcagtgatttaatcaataagactgtcttaacaaaaatgctaatccttcatttgggtaaagcaaggcacagaggtgttgagtggaactcccaggctgacattgtgacacctgagtcctgcatcagacctctctcccccagccaaaacctgcgtgccacccaaacacgtgctctgttcctcttctgtgcctcaacttgtgagcagtgatgtagctgctggatgraggagcacttcatgggaactaatctttgcataawggctggggttggagagagcagctgtatttcatatctactgtttttcatgagttattcacaatggtgtcaaatacgattgctaatagaacctgaggcatgctgttagaaaggtacatatcacagagggtgtgacagcttaactggggatacattttcagttccgtatattgcagaaccggagttctcttcaaggggaacaacccgcattcatacaatgtatcagtggaaaatgaactggaggcacaaatcaaagcacctgccccagt

SEQ ID NO: 22518 - DNA, 600 bp, Chicken  19866894235003_2
ttctattacagaacggtcttcttcataaatcctgtattaccagttcagtgatttaatcaataagactgtcttaacaaaaatgctaatccttcatttgggtaaagcaaggcacagaggtgttgagtggaactcccaggctgacattgtgacacctgagtcctgcatcagacctctctcccccagccaaaacctgcgtgccacccaaacacgtgctctgttcctcttctgtgcctcaacttgtgagcagtgatgtagctgctggatgraggagcacttcatgggaactaatctttgcataawggctggggttggagagagcagctgtatttcatatctactgtttttcatgagttattcacaatggtgtcaaatacgattgctaatagaacctgaggcatgctgttagaaaggtacatatcacagagggtgtgacagcttaactggggatacattttcagttccgtatattgcagaaccggagttctcttcaaggggaacaacccgcattcatacaatgtatcagtggaaaatgaactggaggcacaaatcaaagcacctgccccagtagttacatgctatgagagagcttttcctctttaa

SEQ ID NO: 22519 - DNA, 599 bp, Chicken  19866894235007_1
  misc_feature (1)..(37): n is any nucleotide
nnnnnnnnnnnnnnnnnnnnnnnnnnnnnnnnnnnnnaaattactcagccttcagatcaagacatcaaaatctcatttacagaatcacttaattattctttagttaatgtaactttgaaaacaaaagtgccactcccttacaaggagtaaaacattttttaattaacttttagaaaataacacgggcagtaagttaaaaaacaggtcaatgatcccgaatggagacatgaaaataagctgaagtttacaaacaggcagaaatctattaccaagagcacatgttgattgttattatacacrgtaaaaatagctaaaatttcatacctgctcccggaatgattgccagcttcgtttcaactaggcccatcttagcagaagaggctaaaaaaataaaagtgtgagttgttgctacagtctatggaaaaacaatttgccaaatatgtaataatgtccttcaagaatgttaatttgttacatttccttaataaagaaccacaaatcacatcataagcacttcctcacgaagaatcttttaatagatttaactgatctgcctttattaaaatatctcagcaaggcaagttctgtacactaataat

SEQ ID NO: 22520 - DNA, 600 bp, Chicken  19866894235008_1
attctatgggtgatgtgaccggtgagataggtcaacagctgtagtgtgttcagaagtctcaatctgagtagtgaaccaatctcctgaattatgtaaactgtcattaccaagatgctctatggactgggtgctattaatataaaatcaaggagcattttcacccgcacgttgtttggaggccttgctgtccctgcttccagagtttaaggtttggagggatggattatggtctgtgagttttctgtggattaaattatagtacagtgatgactgatgaatgcagagagcctttcattttgrctgtgtgagcaaggaaagagcttcctgtgggacgtgagcaccagaaaagagttgttgtgaaggtctgtgttatttttaccgtcttttcaaaatgaggaggttaggacttgcgtgtcatattctttgcctcctccaatctaagctttgtgagcttcattttatggtggataactccaggcctgttttccattttgttttttgttttgttttttattcttttcaagtgagcaggaggatgactgatgtgttttacacagctgatgcctgaactgctgattaaaatctctgcacagcagagag

SEQ ID NO: 22521 - DNA, 600 bp, Chicken  19866894235010_1
ttattgctttcatctttacagccaggtgtgtgatcgaaacatcaggcagaaacttctccagataatttcctgtttcaaaacatcttagaaatggacgtgtttggggtagaccggtagataatacatctgtggcacacaaaaacagaaatggaagcctctgaatccctgggaattcctatccgtgtctcagggatttcttccctcccaagtgtttcaccgcaggcctgggggtctgagggattctttgaagccagcaaagaatgtgcagcccacagactgcttcctcagcaggtgcagtcygaccccagctgcaaaaatgtgggctgctgtcccccaccctctgcagaggagagcttcytygcgtgcacgtgtttgtctctgatcatctctcatccctgcgcacagcttcacagaggttggtttcattaaccccggggtgatgctttgtgtaaatatgcatgtctatctgatttgcatggaraatgtcattttccctgcacgtcccccatccaaatgttagtcgagcctgagcctatgtaacttacaaagtgtgctgtgacggtaactgcagcccgcacagctgtcctgctcaggcagagc

SEQ ID NO: 22522 - DNA, 600 bp, Chicken  19866894235010_2
cagataatttcctgtttcaaaacatcttagaaatggacgtgtttggggtagaccggtagataatacatctgtggcacacaaaaacagaaatggaagcctctgaatccctgggaattcctatccgtgtctcagggatttcttccctcccaagtgtttcaccgcaggcctgggggtctgagggattctttgaagccagcaaagaatgtgcagcccacagactgcttcctcagcaggtgcagtcygaccccagctgcaaaaatgtgggctgctgtcccccaccctctgcagaggagagcttcytygcgtgcacgtgtttgtctctgatcatctctcatccctgcgcacagcttcacagaggttggtttcattaaccccggggtgatgctttgtgtaaatatgcatgtctatctgatttgcatggaraatgtcattttccctgcacgtcccccatccaaatgttagtcgagcctgagcctatgtaacttacaaagtgtgctgtgacggtaactgcagcccgcacagctgtcctgctcaggcagagcgtggctgcgcacacctgacgttttgtacggcgtgttcagtcgcgtgggtagcagaggt

SEQ ID NO: 22523 - DNA, 600 bp, Chicken  19866894235010_3
gataatttcctgtttcaaaacatcttagaaatggacgtgtttggggtagaccggtagataatacatctgtggcacacaaaaacagaaatggaagcctctgaatccctgggaattcctatccgtgtctcagggatttcttccctcccaagtgtttcaccgcaggcctgggggtctgagggattctttgaagccagcaaagaatgtgcagcccacagactgcttcctcagcaggtgcagtcygaccccagctgcaaaaatgtgggctgctgtcccccaccctctgcagaggagagcttcytygcgtgcacgtgtttgtctctgatcatctctcatccctgcgcacagcttcacagaggttggtttcattaaccccggggtgatgctttgtgtaaatatgcatgtctatctgatttgcatggaraatgtcattttccctgcacgtcccccatccaaatgttagtcgagcctgagcctatgtaacttacaaagtgtgctgtgacggtaactgcagcccgcacagctgtcctgctcaggcagagcgtggctgcgcacacctgacgttttgtacggcgtgttcagtcgcgtgggtagcagaggtgc

SEQ ID NO: 22524 - DNA, 600 bp, Chicken  19866894235010_4
gtgtctcagggatttcttccctcccaagtgtttcaccgcaggcctgggggtctgagggattctttgaagccagcaaagaatgtgcagcccacagactgcttcctcagcaggtgcagtcygaccccagctgcaaaaatgtgggctgctgtcccccaccctctgcagaggagagcttcytygcgtgcacgtgtttgtctctgatcatctctcatccctgcgcacagcttcacagaggttggtttcattaaccccggggtgatgctttgtgtaaatatgcatgtctatctgatttgcatggaraatgtcattttccctgcacgtcccccatccaaatgttagtcgagcctgagcctatgtaacttacaaagtgtgctgtgacggtaactgcagcccgcacagctgtcctgctcaggcagagcgtggctgcgcacacctgacgttttgtacggcgtgttcagtcgcgtgggtagcagaggtgcctacacatgatctgccatatagtcttacatgttggcagatggcgtgtgcattaacgcgcagtgtgtgctgatgtctctgggtgaatgagtttctctgcagccagctggcgtacaacacatg

SEQ ID NO: 22525 - DNA, 600 bp, Chicken  19866894235011_1
ctcggggagcaggggcagagccagagaacaaaggatgcgcatagttctatccaggcacaaggggggagaggctgcagccctccggtgagaccacatgccgtgatttctgcaaaaccaggcaagtcacgcacttgtgatgggtcactgggacctgctcaggtggaaacggaaaatgagtttccctccccagcactcagcctttcctagccagccctccttttgtgttttccctctttcattgcctctctgctcacactgcctgctagtagtccagaaaattgaaaaagaaacacagattartaagtgttcgcgaagaggggtctccgtatgaaataacgcacacctgggaaggtacgtgggtcactccagaagtaacgccacctatttatttccatggaaactacaacagatacaaagagcaaataacactgtttgatggagcatattctcagcagcaaaacactgtttttcgacatagccaccaccattagctgtgcattttggccagcgatgaacaagagcctgcgtgctgcactcatcaaaatctgcactagtagaggtgccccactgccactctcaccactgctgaaatgcaccacc

SEQ ID NO: 22526 - DNA, 600 bp, Chicken  19866894235011_2
ctgtttttcgacatagccaccaccattagctgtgcattttggccagcgatgaacaagagcctgcgtgctgcactcatcaaaatctgcactagtagaggtgccccactgccactctcaccactgctgaaatgcaccacctcactgtgctcacatccactgtttggtctctataaacattcagcaagcatcagtgaatgtcagtgggtaacagcaacagaatattggtgggaaagttcaaccaataatgccataccaacatccacctttgacgacgtgggctgacataataaaagaggaggmtttacttttagagcagccctggttctttcatgggttctgacacacagacacggagctggcagcctgcaaaggcatcatcycttcctctacacaaaggtacgctgcacaaatccatcgcattctgaaaaccgctctagagcaaaacaaatagatcagaactgaaggacagaaactggactgccttatgaatggagatgctattagagtgcgctgccaacaggataatggactatcagttacagttaatactgaacaggaatccaacacagagcaagtttaaaatagttctcctaaaatttc

SEQ ID NO: 22527 - DNA, 600 bp, Chicken  19866894235011_3
aatctgcactagtagaggtgccccactgccactctcaccactgctgaaatgcaccacctcactgtgctcacatccactgtttggtctctataaacattcagcaagcatcagtgaatgtcagtgggtaacagcaacagaatattggtgggaaagttcaaccaataatgccataccaacatccacctttgacgacgtgggctgacataataaaagaggaggmtttacttttagagcagccctggttctttcatgggttctgacacacagacacggagctggcagcctgcaaaggcatcatcycttcctctacacaaaggtacgctgcacaaatccatcgcattctgaaaaccgctctagagcaaaacaaatagatcagaactgaaggacagaaactggactgccttatgaatggagatgctattagagtgcgctgccaacaggataatggactatcagttacagttaatactgaacaggaatccaacacagagcaagtttaaaatagttctcctaaaatttcttgtcacttctgctcttcccttcttccagttacagatgagcctgtcaaactccaatcttccctatggctcatgtagaaaa

SEQ ID NO: 22528 - DNA, 600 bp, Chicken  19866894235012_1
tacgaaaaaatgttcattgtaacattttaactgttcttgtttcttttttaaaaataactttgttggaataaattgtttcttttcctgcaatatttttttttctggatgtaattttagtcacttccctgccagatacttgaaataatagagccagcattgaaatgagcaagttactgactttgctaaaaatctggtctgtttgcttctgaataggaagaaatgattatagtactcagtagcagaggatggtttatgtgtttggtgcaataaatagtggttcaagtttcataaaacaaaatyaaaaaatgcagtggatttacttactccagggctgacaagaactcctggctaatcagaggtagagggatctgggccataacacaaccatatcccttttcttctcagatggttctaagacacaccaggtggtttatagcttttcaaaagggttattaggaccagccaataaagcactagttaatttgcatttaggacatggtttgtaaaactgatcagtcacactcagaaaagactgagtctcacaaaagatccaggaaacaaaagagtttttgggattatgcttaagttgaactcagtgtc

SEQ ID NO: 22529 - DNA, 503 bp, Chicken  19866894235014_1
ccctgccatcagttttgggcagccatgtttcacctgggtgctaaacgctgtcctgacttatctctacattatctccatttcatttggttgggatcagaaatttgtattgggttcagggctacatattgcagcaggagtcctatagcagaatcccttgaagtttctggtctaaccacaattactcctctgataaaaagcagatttttaaaggacagcttttttcaccctgctatttctaaagcagagctataaaccgtactaaatgcctccacattatgtaactgggctcctttgcagaaytttcttcatccacgataaacaaagcaaacactccctttgatgattgcccaaaattgccatttcttttgccctttccaaaggggtactttttatctgtgccatcttttctcctgggttatgcattaagaggtgtttagcaggtgctttgtcccagatctccttttgaaaaacagctgtgtttgacctgctctctctctagccct

SEQ ID NO: 22530 - DNA, 600 bp, Chicken  19866894235015_1
gcctggtgcagctcagcactgactgatgtcttgaggcaagagggttgaaatccgttaaggacgtagtgctgcaacgtcctgaagctgaatttgtagactggatagtggaaatctaaatacatgttggcagttttgcaattccagccggcgttgacctcagttatgctttatagctttgaagcatcagtttcaagggatgggagagggatgattttgcttttgaaattggtgtgttatcacttcatttttgttgatgatgaaaggagtttgaggagatgatccagattcttccccataacrttgttctctttaatgtcacatctgttcttctagaaactgtgcaaggctggctgagagcgaggagaggttgagggaaggcataatctgcatacttcattttcccaaagctgcaaaatatttgcataatttagaagtacagtgtgcctcccactggttctggctctgtttttatttatttatttgagacactgcgaggggtgctgagttatttatagcaaggcaagataagtcgtgtttggtcttggttcttacgatgtcctttgtgccagcacaggagtatagcagcactgaagagctccg

SEQ ID NO: 22531 - DNA, 600 bp, Chicken  19866894235015_2
tgcttcccatggcctctccaaagcaagccagcgctcagccattcttaattttgctgctaaccccctgcttatcttctgttttgtttatttactgtagcaagcaaagatgaagtcccattcactggagcacaggagccaggagcaacctttgttacagcccaaacaggtacggtactgctagcttagtgctcacactgccacacacaaggacaggaggtccctgtgcatccagacagctctgcagggagtaaatggcagtccagacaccatgagggatgcttagcttgagggattattttwtgaagttggggtgatttggtggatgaattatttgtgaatggcctgtgtgaattcaggaagaattcataggcctgggcagcagtgccagagagtgtctccgagttacagaaaatagagctgggatggatctccagagtcatctaagttcaaggatttggcaaagagaatttaatatcaggttctaagtcgtgtgctgaactaagtctgagtgagtgattgtgtgacccatccctatgattgcatgcaacgtgtgggtcacaggagttaattctggggcagcctgaaggatgtttgtaatac

SEQ ID NO: 22532 - DNA, 600 bp, Chicken  19866894235017_1
tagctcagaacatgctagctttccaataccatttaccatgctaatttcagtgactctctgcttgttcaaaacaattctggaatccttttggataacgattctgaaattatctttgggtagtcaggaaggtttatggataggtcttcccaatttctaaaagtaattttgagcatatccaccaattatgacaaaataactgtcagtactatcaacttacacttctaatgtggcacaggctcatctatcccagctgtatttttaactcatccagggactgattcattaagcagacaagaaccygtggaagatggtagcgctgcctaacaatgaacagtaacagaattttccatgacactactactgaaaaataattcattcaactgtgagttaacatttcgtaagactgtgctcagaagttagtcgtagtaaactacacaaacaaaccaccagaattattaaccactttytattaagtgcagagyatcaattttaagaacttgacgaattattgagatcatcctttttttaaaatcaaaagaaatgtttttgtactaaggggaaaatgcgtaggttctacaataggtattattataagacaat

SEQ ID NO: 22533 - DNA, 600 bp, Chicken  19866894235017_2
gagcatatccaccaattatgacaaaataactgtcagtactatcaacttacacttctaatgtggcacaggctcatctatcccagctgtatttttaactcatccagggactgattcattaagcagacaagaaccygtggaagatggtagcgctgcctaacaatgaacagtaacagaattttccatgacactactactgaaaaataattcattcaactgtgagttaacatttcgtaagactgtgctcagaagttagtcgtagtaaactacacaaacaaaccaccagaattattaaccactttytattaagtgcagagyatcaattttaagaacttgacgaattattgagatcatcctttttttaaaatcaaaagaaatgtttttgtactaaggggaaaatgcgtaggttctacaataggtattattataagacaatgccaggtgatagggaagcactctctggatacttgttattattatctgaatcactaattgaatagaaattcattaactattttcaggaagagcgaatttgaattttttagaatgcttccattacaccacaatgcattcaaaagcaaggtgatgcccaggtatttggag

SEQ ID NO: 22534 - DNA, 600 bp, Chicken  19866894235017_3
ttatgacaaaataactgtcagtactatcaacttacacttctaatgtggcacaggctcatctatcccagctgtatttttaactcatccagggactgattcattaagcagacaagaaccygtggaagatggtagcgctgcctaacaatgaacagtaacagaattttccatgacactactactgaaaaataattcattcaactgtgagttaacatttcgtaagactgtgctcagaagttagtcgtagtaaactacacaaacaaaccaccagaattattaaccactttytattaagtgcagagyatcaattttaagaacttgacgaattattgagatcatcctttttttaaaatcaaaagaaatgtttttgtactaaggggaaaatgcgtaggttctacaataggtattattataagacaatgccaggtgatagggaagcactctctggatacttgttattattatctgaatcactaattgaatagaaattcattaactattttcaggaagagcgaatttgaattttttagaatgcttccattacaccacaatgcattcaaaagcaaggtgatgcccaggtatttggagtttcaggcacataat

SEQ ID NO: 22535 - DNA, 600 bp, Chicken  19866894235029_1
gcaccaagctacagccatcaaagcacaagctgggtacaaatgtcaggagttggttactctagttgcaagcaacaaaagcagaatggtggaactaggaaacctccccagccatttctagctaatataggtcatggggaaagtccaactgtaaagactggctcgggtattacagctgctgtggagccaggcatcatttctaagtagggtgaaggtgctaaaaaggatactgtggaaggatatagtgaatatcaacagaatgagccagtgtagaagtgtgtatcaaaatgcactgtactgcayytgtaatgcattgtgctggcagagcattacactcttgcaagagcaatctggtgcatctgttctcttggaatgaggayatgygacaaaaagtcctcccctacctccttgtagatacacagagcactaaacacagccraagctgtctgagaactctgtacaaagggtccatacagcttcagctctgctatacaattcctctttaagcataatgcacaaaggattgggatggaataagagataagacaacacaggaaagaatatatctcccttaaataccaaaacatttttagccctgttcta

SEQ ID NO: 22536 - DNA, 600 bp, Chicken  19866894235029_2
caccaagctacagccatcaaagcacaagctgggtacaaatgtcaggagttggttactctagttgcaagcaacaaaagcagaatggtggaactaggaaacctccccagccatttctagctaatataggtcatggggaaagtccaactgtaaagactggctcgggtattacagctgctgtggagccaggcatcatttctaagtagggtgaaggtgctaaaaaggatactgtggaaggatatagtgaatatcaacagaatgagccagtgtagaagtgtgtatcaaaatgcactgtactgcayytgtaatgcattgtgctggcagagcattacactcttgcaagagcaatctggtgcatctgttctcttggaatgaggayatgygacaaaaagtcctcccctacctccttgtagatacacagagcactaaacacagccraagctgtctgagaactctgtacaaagggtccatacagcttcagctctgctatacaattcctctttaagcataatgcacaaaggattgggatggaataagagataagacaacacaggaaagaatatatctcccttaaataccaaaacatttttagccctgttctaa

SEQ ID NO: 22537 - DNA, 600 bp, Chicken  19866894235029_3
gcagaatggtggaactaggaaacctccccagccatttctagctaatataggtcatggggaaagtccaactgtaaagactggctcgggtattacagctgctgtggagccaggcatcatttctaagtagggtgaaggtgctaaaaaggatactgtggaaggatatagtgaatatcaacagaatgagccagtgtagaagtgtgtatcaaaatgcactgtactgcayytgtaatgcattgtgctggcagagcattacactcttgcaagagcaatctggtgcatctgttctcttggaatgaggayatgygacaaaaagtcctcccctacctccttgtagatacacagagcactaaacacagccraagctgtctgagaactctgtacaaagggtccatacagcttcagctctgctatacaattcctctttaagcataatgcacaaaggattgggatggaataagagataagacaacacaggaaagaatatatctcccttaaataccaaaacatttttagccctgttctaattaatcctcttattgacatccaggaaagcggctaaaagttgtatcacactggatggtaatcttcttgcagatacaa

SEQ ID NO: 22538 - DNA, 600 bp, Chicken  19866894235029_4
aatggtggaactaggaaacctccccagccatttctagctaatataggtcatggggaaagtccaactgtaaagactggctcgggtattacagctgctgtggagccaggcatcatttctaagtagggtgaaggtgctaaaaaggatactgtggaaggatatagtgaatatcaacagaatgagccagtgtagaagtgtgtatcaaaatgcactgtactgcayytgtaatgcattgtgctggcagagcattacactcttgcaagagcaatctggtgcatctgttctcttggaatgaggayatgygacaaaaagtcctcccctacctccttgtagatacacagagcactaaacacagccraagctgtctgagaactctgtacaaagggtccatacagcttcagctctgctatacaattcctctttaagcataatgcacaaaggattgggatggaataagagataagacaacacaggaaagaatatatctcccttaaataccaaaacatttttagccctgttctaattaatcctcttattgacatccaggaaagcggctaaaagttgtatcacactggatggtaatcttcttgcagatacaagcaa

SEQ ID NO: 22539 - DNA, 600 bp, Chicken  19866894235029_5
aaagtccaactgtaaagactggctcgggtattacagctgctgtggagccaggcatcatttctaagtagggtgaaggtgctaaaaaggatactgtggaaggatatagtgaatatcaacagaatgagccagtgtagaagtgtgtatcaaaatgcactgtactgcayytgtaatgcattgtgctggcagagcattacactcttgcaagagcaatctggtgcatctgttctcttggaatgaggayatgygacaaaaagtcctcccctacctccttgtagatacacagagcactaaacacagccraagctgtctgagaactctgtacaaagggtccatacagcttcagctctgctatacaattcctctttaagcataatgcacaaaggattgggatggaataagagataagacaacacaggaaagaatatatctcccttaaataccaaaacatttttagccctgttctaattaatcctcttattgacatccaggaaagcggctaaaagttgtatcacactggatggtaatcttcttgcagatacaagcaatcaatttgaaacaacagaatagaccaaaaagcactagtgtatgtgctactctgcc

SEQ ID NO: 22540 - DNA, 600 bp, Chicken  19866894235030_1
agcagaaatgtcccactgtcaccactgctgaaatgcaccaccccaccacctcactgtgctcacatccactggttggtctccattaatgttcagcaagtgtcagtgaatgtcagtggatgctgttttttctgcatggaggaattcagttacacaccgttgcttcgtccatacttcatgtcagatgccattttgtcagactgcccctccgctgccatctgtcacatagcaacaaaacgtaatggaatgttggtgaggagggtcaacctctgctgccatatcaccaacattcacctctgacgycataggccaacagaatgaaataggaggtattacttttggagcagcctacatacattgtgtgactttctagtcttattaaactttaattcttagtgataattggaggtaaaaattaattattctatcaagactyatagtctttgttttttataagatttgctcaaaacttattatttgcaattaaacttttatacttaaaacttttctgaaaataattgttatttttgaaaaattggcagtaactgggaatcccacagaatctgggactgcagtttcattcattctctcttttagagtttg

SEQ ID NO: 22541 - DNA, 600 bp, Chicken  19866894235030_2
tggaggaattcagttacacaccgttgcttcgtccatacttcatgtcagatgccattttgtcagactgcccctccgctgccatctgtcacatagcaacaaaacgtaatggaatgttggtgaggagggtcaacctctgctgccatatcaccaacattcacctctgacgycataggccaacagaatgaaataggaggtattacttttggagcagcctacatacattgtgtgactttctagtcttattaaactttaattcttagtgataattggaggtaaaaattaattattctatcaagactyatagtctttgttttttataagatttgctcaaaacttattatttgcaattaaacttttatacttaaaacttttctgaaaataattgttatttttgaaaaattggcagtaactgggaatcccacagaatctgggactgcagtttcattcattctctcttttagagtttgagttccagagccatgcacagtatggtagctttaatcatggaaagccagggaatggtgtcataagattagccactcttcataaagtcaggtttacgtataatgggccttatgtcaaagatatttgaaattacag

SEQ ID NO: 22542 - DNA, 600 bp, Chicken  19866894235033_1
tctgggggacggggaggaaaaaagagactaaatcgcatcagaccggtgggtaattctctctctccctctaagcaaaaaaaaccctgcacacatcacacggagccacaagtctcagcagtcccattgcacaaccacacacctgctgggtgagcacagcgctctgccccgcagttacctttgctcctgaggagcgcagtggcttcagaagccggaggagcagcaggaggagcagcacgagctggcagcagcgagccgcgggctgcacccgcctcaccccgcacatctcacctgcgccggttrtgcrcgcacccctcagagcaggcaggcgcggctcccggcccgcagccctcacccagcagggccggctcgccccgtgccccttttaaggctcttctctcctcccacccgaactgcctccatctttcaaaagttgatttcattgtcatccaagttacgccgatacattacagcctctcaaaaacgmagcgacgaagtctcgtttacccgtttgccggctggcgctgccaccgtcgcgccgaacgcactccgccccccgcccggctccctctgccgcgcgcggcgcggccctgcacgctgcaa

SEQ ID NO: 22543 - DNA, 600 bp, Chicken  19866894235033_2
ggggacggggaggaaaaaagagactaaatcgcatcagaccggtgggtaattctctctctccctctaagcaaaaaaaaccctgcacacatcacacggagccacaagtctcagcagtcccattgcacaaccacacacctgctgggtgagcacagcgctctgccccgcagttacctttgctcctgaggagcgcagtggcttcagaagccggaggagcagcaggaggagcagcacgagctggcagcagcgagccgcgggctgcacccgcctcaccccgcacatctcacctgcgccggttrtgcrcgcacccctcagagcaggcaggcgcggctcccggcccgcagccctcacccagcagggccggctcgccccgtgccccttttaaggctcttctctcctcccacccgaactgcctccatctttcaaaagttgatttcattgtcatccaagttacgccgatacattacagcctctcaaaaacgmagcgacgaagtctcgtttacccgtttgccggctggcgctgccaccgtcgcgccgaacgcactccgccccccgcccggctccctctgccgcgcgcggcgcggccctgcacgctgcaagcag

SEQ ID NO: 22544 - DNA, 493 bp, Chicken  19866894235033_3
tgaggagcgcagtggcttcagaagccggaggagcagcaggaggagcagcacgagctggcagcagcgagccgcgggctgcacccgcctcaccccgcacatctcacctgcgccggttrtgcrcgcacccctcagagcaggcaggcgcggctcccggcccgcagccctcacccagcagggccggctcgccccgtgccccttttaaggctcttctctcctcccacccgaactgcctccatctttcaaaagttgatttcattgtcatccaagttacgccgatacattacagcctctcaaaaacgmagcgacgaagtctcgtttacccgtttgccggctggcgctgccaccgtcgcgccgaacgcactccgccccccgcccggctccctctgccgcgcgcggcgcggccctgcacgctgcaagcagccgccgtcagcatcaccccgcggcggcaacaaggagggtcgggggaacccctcagcacccgaacttcgccttt

SEQ ID NO: 22545 - DNA, 600 bp, Chicken  19866894235039_1
agtgcagagctgaagaaggagccctgagcccagtgaatagaggcagaaagggaagcagccccaggatcttgctgctgtccatcagggctgctgcaggtcagcagcgcaggatgcgtccccatctggctgggcagcaacagctctgaacagcccaaatcatggaccagaaaggtgaacataaaacaaggaaaaaaatccccaaatggaacccagctgtgacagcagtggtgaccgctgcagagggtgctgccgggcatcaggtggggtgaagctgcatccttcagtgattgctatataacrgggtcccgtcctcagcatcacccatcacctctctgctcagctggggaggacacagccccccrggcaggagggaccctgggaaggtcctggcaacagcagtgccaccactgctgcgaggggaatcatggacatgctgggttctttcaagcgcaagtatcagcatggataagcccagctgacagagccaggcctgagcagagcgcacttcctgtgcctgtttacttcatgtctgaactaaacttggattcagaagcacccctggctcactctttcttcccacagcaaagcccctagatctca

SEQ ID NO: 22546 - DNA, 600 bp, Chicken  19866894235039_2
aggatcttgctgctgtccatcagggctgctgcaggtcagcagcgcaggatgcgtccccatctggctgggcagcaacagctctgaacagcccaaatcatggaccagaaaggtgaacataaaacaaggaaaaaaatccccaaatggaacccagctgtgacagcagtggtgaccgctgcagagggtgctgccgggcatcaggtggggtgaagctgcatccttcagtgattgctatataacrgggtcccgtcctcagcatcacccatcacctctctgctcagctggggaggacacagccccccrggcaggagggaccctgggaaggtcctggcaacagcagtgccaccactgctgcgaggggaatcatggacatgctgggttctttcaagcgcaagtatcagcatggataagcccagctgacagagccaggcctgagcagagcgcacttcctgtgcctgtttacttcatgtctgaactaaacttggattcagaagcacccctggctcactctttcttcccacagcaaagcccctagatctcaaatcctaaggagatccaggctcaaggactgctccatgcccaccgtgctgcctgcaggacaag

SEQ ID NO: 22547 - DNA, 599 bp, Chicken  19866894235041_1
  misc_feature (1)..(134): n is any nucleotide
nnnnnnnnnnnnnnnnnnnnnnnnnnnnnnnnnnnnnnnnnnnnnnnnnnnnnnnnnnnnnnnnnnnnnnnnnnnnnnnnnnnnnnnnnnnnnnnnnnnnnnnnnnnnnnnnnnnnnnnnnnnnnnnnnnnnnntctgctgtatggagtctgattaggagcactgtttcagacatgacaaagcacgctaaagaatcacgcactgaactgagccagtaaggaagcatttacatttctttggagtttagcagataaacactgacttctgaggttcagcaatacactgttctgtgctgctgtycttacacagcatcacaagcgttgcatagcagatcccaagcctctgtcacacataaaaccaaaaggtctgttttaagatctccatgttaagttgtagcagcacttcccttccagatggctggtgcagggctgcagagggattgcagcaggtgcctgcaggcaatagcctgcacaggctactgtgaaatctgcaggctgatcctgcactcagccagagttaaaggagtataaagatgacccayttctaatagcatgcaaggtatttctttcgaatgaaaattgtcctgctatgccattgct

SEQ ID NO: 22548 - DNA, 600 bp, Chicken  19866894235041_2
gtttagcagataaacactgacttctgaggttcagcaatacactgttctgtgctgctgtycttacacagcatcacaagcgttgcatagcagatcccaagcctctgtcacacataaaaccaaaaggtctgttttaagatctccatgttaagttgtagcagcacttcccttccagatggctggtgcagggctgcagagggattgcagcaggtgcctgcaggcaatagcctgcacaggctactgtgaaatctgcaggctgatcctgcactcagccagagttaaaggagtataaagatgacccayttctaatagcatgcaaggtatttctttcgaatgaaaattgtcctgctatgccattgctagcatgcaagatgggaayggaggaaatttggttacagttgaagagttaggaaaatgtgggtttcatgaacgtttctgagcaagcattccttctgtgtgcatgtggaggctgattgcagtgaaacaaaatacagcagccagggcagagaaagctggttcaaccagaatattgttaccttgagagtttstaggcgctcccctgtctcacagttccaaacttttaacctgtgaagcatagaactg

SEQ ID NO: 22549 - DNA, 600 bp, Chicken  19866894235041_3
gcgttgcatagcagatcccaagcctctgtcacacataaaaccaaaaggtctgttttaagatctccatgttaagttgtagcagcacttcccttccagatggctggtgcagggctgcagagggattgcagcaggtgcctgcaggcaatagcctgcacaggctactgtgaaatctgcaggctgatcctgcactcagccagagttaaaggagtataaagatgacccayttctaatagcatgcaaggtatttctttcgaatgaaaattgtcctgctatgccattgctagcatgcaagatgggaayggaggaaatttggttacagttgaagagttaggaaaatgtgggtttcatgaacgtttctgagcaagcattccttctgtgtgcatgtggaggctgattgcagtgaaacaaaatacagcagccagggcagagaaagctggttcaaccagaatattgttaccttgagagtttstaggcgctcccctgtctcacagttccaaacttttaacctgtgaagcatagaactggttatgtggattttctgtcccctgctggagtccttyggagtcyggcattctgattctgcaggccttttttggttct

SEQ ID NO: 22550 - DNA, 600 bp, Chicken  19866894235041_4
tctgcaggctgatcctgcactcagccagagttaaaggagtataaagatgacccayttctaatagcatgcaaggtatttctttcgaatgaaaattgtcctgctatgccattgctagcatgcaagatgggaayggaggaaatttggttacagttgaagagttaggaaaatgtgggtttcatgaacgtttctgagcaagcattccttctgtgtgcatgtggaggctgattgcagtgaaacaaaatacagcagccagggcagagaaagctggttcaaccagaatattgttaccttgagagtttstaggcgctcccctgtctcacagttccaaacttttaacctgtgaagcatagaactggttatgtggattttctgtcccctgctggagtccttyggagtcyggcattctgattctgcaggccttttttggttctgatgtaatgaagagttgcccaatgttgtgatggtttgtgttagtgaagttgatgtattcaagcaggagaaattctctacccatcagggagtccttataaaagattggatccagattctgttcagggaaaagatctcaagtctgctcgctgaactcagcatacatatgaa

SEQ ID NO: 22551 - DNA, 600 bp, Chicken  19866894235041_5
attgtcctgctatgccattgctagcatgcaagatgggaayggaggaaatttggttacagttgaagagttaggaaaatgtgggtttcatgaacgtttctgagcaagcattccttctgtgtgcatgtggaggctgattgcagtgaaacaaaatacagcagccagggcagagaaagctggttcaaccagaatattgttaccttgagagtttstaggcgctcccctgtctcacagttccaaacttttaacctgtgaagcatagaactggttatgtggattttctgtcccctgctggagtccttyggagtcyggcattctgattctgcaggccttttttggttctgatgtaatgaagagttgcccaatgttgtgatggtttgtgttagtgaagttgatgtattcaagcaggagaaattctctacccatcagggagtccttataaaagattggatccagattctgttcagggaaaagatctcaagtctgctcgctgaactcagcatacatatgaaggatttttaagcctcaaataaattctaaccagagagaggtctaattatgtgtggtaaagtgaatttcccatatactgagctcttaggaggg

SEQ ID NO: 22552 - DNA, 600 bp, Chicken  19866894235041_6
tgctatgccattgctagcatgcaagatgggaayggaggaaatttggttacagttgaagagttaggaaaatgtgggtttcatgaacgtttctgagcaagcattccttctgtgtgcatgtggaggctgattgcagtgaaacaaaatacagcagccagggcagagaaagctggttcaaccagaatattgttaccttgagagtttstaggcgctcccctgtctcacagttccaaacttttaacctgtgaagcatagaactggttatgtggattttctgtcccctgctggagtccttyggagtcyggcattctgattctgcaggccttttttggttctgatgtaatgaagagttgcccaatgttgtgatggtttgtgttagtgaagttgatgtattcaagcaggagaaattctctacccatcagggagtccttataaaagattggatccagattctgttcagggaaaagatctcaagtctgctcgctgaactcagcatacatatgaaggatttttaagcctcaaataaattctaaccagagagaggtctaattatgtgtggtaaagtgaatttcccatatactgagctcttaggagggatagctt

SEQ ID NO: 22553 - DNA, 600 bp, Chicken  19866894235055_1
ctatcaggtttccctgaagctctctcttctccaggctgatcagccccagttctctcagactgttctcatagggaaggtgttccatcccttggaccatatcaagaaaagataattcacttgtcagtattattcctttatacttaattaaaaaaagcccaaaacattacaagattagactgtgatacactgataagtcagattaaaccatctactggaaaccactacaaatactctgctgaattaaagacgaagtatgctttaagttgttagtatgcatattaatacatctgacacattaawacaaaatgatttagattggaaaggacctctgggagtcattgaatccaacccccctgctcaaagctgtatctgtatcaggatgctcacatactcagttgagcatctctaagggtaaatgttcctcagcctctctggatgactggttccagtgtttaaagtaaaaatatatagatttaaagagtaatatttatatacaattggaaattctctattacaatttacctcccacccattccctcccattctaccccagtggaccttcaagagtgttctggcttgaagtctccaattatgtaccaa

SEQ ID NO: 22554 - DNA, 600 bp, Chicken  19866894235057_1
tgcattatgaaaggaagagcttactgatacaaactaatcagaattacttggtaaaccaagggcaatccaactgtttgtattttgatagagccaaatgtgtggtgtaacatacccatctaataaataacattcaggccacatgtaaaggactctgttttggcggataagtgcttctgaaaaaaatgtgaggatcctcttacgttaccacttgactgttgattgcctggcatgattctgtgtggctaacataattctcataggtataaaaagagacctttgattagaaatgggggaaatacracaacttcattttcagctttgttgaaactttttttttacaggaacattctcagtgttgctttaagcacttaaaagaaggatgctaaaaactaggagcaacaactgttaaaaaggtttggagttcctttcatgttacgcagcaaacagcaacgaactacaattcattctgttggtaaagttcccagtggaacgcggcaggcaaggttgctctcttgcattcaggatatacgagatggtagggcagaaagttgctgaaactccagtaactaaagcacggccactgcctggggtttctgggaa

SEQ ID NO: 22555 - DNA, 600 bp, Chicken  19866894235059_1
tccatccctgcaggcattcagggccaggttggatgtggccctgggcagcctgatctggtgggtggcagccagcctgtggcagcaggttggaatgagatgatctttaaggtcccctccaacctaaaccactctatgaagtggggtggtgttgggatccctttgggggatgcccctctgctccaagcaggttcctgctcactgggcagtaagtgctgccccgaggaggagcagcagggtcaggctgctcagtcctggctcagctctgcaggagagttcatgagctgcgttgtagcctctaaygaccattaattgtgtgtgtgtgttgttggtaacgaggcttgaattgataactgrcaatcagattgattgctctgtgctgaaaaacacagtggctttcctaagtaatgaagttaaaataccaataaaatcttaggaaaatatgcttcctccctcttttattgttgtctaatcactttatatttctgcagtgcctcgaagaccaaagagcagggctcactgggttcgtgtttaaagccgtgcctgtgcagcgctgagctgtgaggctgcccagctatgggcaggagtgctccatccctcggt

SEQ ID NO: 22556 - DNA, 600 bp, Chicken  19866894235059_2
ctggtgggtggcagccagcctgtggcagcaggttggaatgagatgatctttaaggtcccctccaacctaaaccactctatgaagtggggtggtgttgggatccctttgggggatgcccctctgctccaagcaggttcctgctcactgggcagtaagtgctgccccgaggaggagcagcagggtcaggctgctcagtcctggctcagctctgcaggagagttcatgagctgcgttgtagcctctaaygaccattaattgtgtgtgtgtgttgttggtaacgaggcttgaattgataactgrcaatcagattgattgctctgtgctgaaaaacacagtggctttcctaagtaatgaagttaaaataccaataaaatcttaggaaaatatgcttcctccctcttttattgttgtctaatcactttatatttctgcagtgcctcgaagaccaaagagcagggctcactgggttcgtgtttaaagccgtgcctgtgcagcgctgagctgtgaggctgcccagctatgggcaggagtgctccatccctcggtcagcacagtctgcccgtatcactcggtctgagctcagtggcatctccggagctt

SEQ ID NO: 22557 - DNA, 600 bp, Chicken  19866894235061_1
gacctttattttcataacgttagagtttttttactattattaatattttttattattattattttttatttttgctgtatctttcattctggtttaaaatgttagggcaggcattcagtgtaataaatactttatctgtatttttttgtagcgttggagtgctttgtgcatatgctgccaaccaacacttaactagccaagtccgaggagcaaagaaactggtcaacagtaattttaaggatctgaaagttttccttaacgacactccagcggtaaagaattttttctttataggaaacraaggtgggagggggagaagtataaggaagaagtattgcagaaaataatcatttctttctgtttggtataartgacaaccaacagtgtgrtgttaattctttgtgtgtcactcataaagtagagtaratgagatgtggttagaagctttcacatgaccataaaagtttgagaacaaacattatttgagcagctgttgaactatattgcatctggggagcactgttaaacttttcgatattgggagttgatctgtatacagttattaatttgggcagggtgttgtgacagcctggagatgca

SEQ ID NO: 22558 - DNA, 575 bp, Chicken  19866894235061_10
aactggtgataactmagttgatgtcttatattggaacccaagttgtgcctggaccagatctgtttgtcagtgaaaaccatttgcattaaggcagaatgaccagcttcttttgtaagggaaactctgagaggctgtccccataaaagccactctggactgtgaattgcttcagaaccactatcccataaatttgcttcacaattcttatttcaagagagatcatctttgttactagaaaatcaaatcaaagrgatgragacatgcacaagtgtactgcgcctggctgacttgaagccttcrygttgcacagttcctgctacttaacatttttaagtagagtctttttccccagagatcttccagtaatgtacatttcccaataaaacacctctttttatgtgcagttgtgccaagcagggttttaaaatatttagttaactgaaaacagtagaattctggaatttggggggaagtgaagggggtactgcacaaatatttggattgtttcaaagtgtgacaatttctgactcattatttgaaagtattactttttttttttttctccaattacttta

SEQ ID NO: 22559 - DNA, 574 bp, Chicken  19866894235061_11
actggtgataactmagttgatgtcttatattggaacccaagttgtgcctggaccagatctgtttgtcagtgaaaaccatttgcattaaggcagaatgaccagcttcttttgtaagggaaactctgagaggctgtccccataaaagccactctggactgtgaattgcttcagaaccactatcccataaatttgcttcacaattcttatttcaagagagatcatctttgttactagaaaatcaaatcaaagrgatgragacatgcacaagtgtactgcgcctggctgacttgaagccttcrygttgcacagttcctgctacttaacatttttaagtagagtctttttccccagagatcttccagtaatgtacatttcccaataaaacacctctttttatgtgcagttgtgccaagcagggttttaaaatatttagttaactgaaaacagtagaattctggaatttggggggaagtgaagggggtactgcacaaatatttggattgtttcaaagtgtgacaatttctgactcattatttgaaagtattactttttttttttttctccaattacttta

SEQ ID NO: 22560 - DNA, 600 bp, Chicken  19866894235061_2
ttgctgtatctttcattctggtttaaaatgttagggcaggcattcagtgtaataaatactttatctgtatttttttgtagcgttggagtgctttgtgcatatgctgccaaccaacacttaactagccaagtccgaggagcaaagaaactggtcaacagtaattttaaggatctgaaagttttccttaacgacactccagcggtaaagaattttttctttataggaaacraaggtgggagggggagaagtataaggaagaagtattgcagaaaataatcatttctttctgtttggtataartgacaaccaacagtgtgrtgttaattctttgtgtgtcactcataaagtagagtaratgagatgtggttagaagctttcacatgaccataaaagtttgagaacaaacattatttgagcagctgttgaactatattgcatctggggagcactgttaaacttttcgatattgggagttgatctgtatacagttattaatttgggcagggtgttgtgacagcctggagatgcaggcgtatgtcaggaagtggaggttgcatcaagaaactcttgagacagggtgccttttgtgggcctggagct

SEQ ID NO: 22561 - DNA, 600 bp, Chicken  19866894235061_3
tggtttaaaatgttagggcaggcattcagtgtaataaatactttatctgtatttttttgtagcgttggagtgctttgtgcatatgctgccaaccaacacttaactagccaagtccgaggagcaaagaaactggtcaacagtaattttaaggatctgaaagttttccttaacgacactccagcggtaaagaattttttctttataggaaacraaggtgggagggggagaagtataaggaagaagtattgcagaaaataatcatttctttctgtttggtataartgacaaccaacagtgtgrtgttaattctttgtgtgtcactcataaagtagagtaratgagatgtggttagaagctttcacatgaccataaaagtttgagaacaaacattatttgagcagctgttgaactatattgcatctggggagcactgttaaacttttcgatattgggagttgatctgtatacagttattaatttgggcagggtgttgtgacagcctggagatgcaggcgtatgtcaggaagtggaggttgcatcaagaaactcttgagacagggtgccttttgtgggcctggagctgccttggggcgcagagag

SEQ ID NO: 22562 - DNA, 600 bp, Chicken  19866894235061_4
atactttatctgtatttttttgtagcgttggagtgctttgtgcatatgctgccaaccaacacttaactagccaagtccgaggagcaaagaaactggtcaacagtaattttaaggatctgaaagttttccttaacgacactccagcggtaaagaattttttctttataggaaacraaggtgggagggggagaagtataaggaagaagtattgcagaaaataatcatttctttctgtttggtataartgacaaccaacagtgtgrtgttaattctttgtgtgtcactcataaagtagagtaratgagatgtggttagaagctttcacatgaccataaaagtttgagaacaaacattatttgagcagctgttgaactatattgcatctggggagcactgttaaacttttcgatattgggagttgatctgtatacagttattaatttgggcagggtgttgtgacagcctggagatgcaggcgtatgtcaggaagtggaggttgcatcaagaaactcttgagacagggtgccttttgtgggcctggagctgccttggggcgcagagagccttgcactgagagataaaaccagtggtctcagaacc

SEQ ID NO: 22563 - DNA, 600 bp, Chicken  19866894235061_5
aggattgaaaatagtcacatgtaaagagttcttgtcatagcagattagcagactacgtgaatgctgatctaacattattagttataagaatcgcattttgtctgtgacatcgctggaaacagtgcttatagacttatagacttgcaaaatgttagtcctcaggtttgtctaggaaaaccaaccaacctacacaaaaaaagccagcatctttcttggaaggaaaagccctttttattcttttctccttttattaaaaaaaaaagaagtctgtctcatgctctgtgctttaattacatccastgctgtatgatgtatgggttgttttgtgggtgttttttagtctctttttttcttcacttcactgaaaacgtgaggctgcaagccaaatrcacttctgtgcacatctgagtcacttctgtttaaaattggaagcctgtttactgtgcatattaacttttgcatgattcggttaggattcacactgcactactttaaacatgcagagatcaatcaaagttatttcatacctgtagtaagatttcctcctgggatagttatttaatagccttttatacagaaccaggaactggtgataactma

SEQ ID NO: 22564 - DNA, 600 bp, Chicken  19866894235061_6
atcgcattttgtctgtgacatcgctggaaacagtgcttatagacttatagacttgcaaaatgttagtcctcaggtttgtctaggaaaaccaaccaacctacacaaaaaaagccagcatctttcttggaaggaaaagccctttttattcttttctccttttattaaaaaaaaaagaagtctgtctcatgctctgtgctttaattacatccastgctgtatgatgtatgggttgttttgtgggtgttttttagtctctttttttcttcacttcactgaaaacgtgaggctgcaagccaaatrcacttctgtgcacatctgagtcacttctgtttaaaattggaagcctgtttactgtgcatattaacttttgcatgattcggttaggattcacactgcactactttaaacatgcagagatcaatcaaagttatttcatacctgtagtaagatttcctcctgggatagttatttaatagccttttatacagaaccaggaactggtgataactmagttgatgtcttatattggaacccaagttgtgcctggaccagatctgtttgtcagtgaaaaccatttgcattaaggcagaatgaccagct

SEQ ID NO: 22565 - DNA, 600 bp, Chicken  19866894235061_7
stgctgtatgatgtatgggttgttttgtgggtgttttttagtctctttttttcttcacttcactgaaaacgtgaggctgcaagccaaatrcacttctgtgcacatctgagtcacttctgtttaaaattggaagcctgtttactgtgcatattaacttttgcatgattcggttaggattcacactgcactactttaaacatgcagagatcaatcaaagttatttcatacctgtagtaagatttcctcctgggatagttatttaatagccttttatacagaaccaggaactggtgataactmagttgatgtcttatattggaacccaagttgtgcctggaccagatctgtttgtcagtgaaaaccatttgcattaaggcagaatgaccagcttcttttgtaagggaaactctgagaggctgtccccataaaagccactctggactgtgaattgcttcagaaccactatcccataaatttgcttcacaattcttatttcaagagagatcatctttgttactagaaaatcaaatcaaagrgatgragacatgcacaagtgtactgcgcctggctgacttgaagccttcrygttgcacagttcct

SEQ ID NO: 22566 - DNA, 600 bp, Chicken  19866894235061_8
agatttcctcctgggatagttatttaatagccttttatacagaaccaggaactggtgataactmagttgatgtcttatattggaacccaagttgtgcctggaccagatctgtttgtcagtgaaaaccatttgcattaaggcagaatgaccagcttcttttgtaagggaaactctgagaggctgtccccataaaagccactctggactgtgaattgcttcagaaccactatcccataaatttgcttcacaattcttatttcaagagagatcatctttgttactagaaaatcaaatcaaagrgatgragacatgcacaagtgtactgcgcctggctgacttgaagccttcrygttgcacagttcctgctacttaacatttttaagtagagtctttttccccagagatcttccagtaatgtacatttcccaataaaacacctctttttatgtgcagttgtgccaagcagggttttaaaatatttagttaactgaaaacagtagaattctggaatttggggggaagtgaagggggtactgcacaaatatttggattgtttcaaagtgtgacaatttctgactcattatttgaaagtattacttt

SEQ ID NO: 22567 - DNA, 600 bp, Chicken  19866894235061_9
tcctcctgggatagttatttaatagccttttatacagaaccaggaactggtgataactmagttgatgtcttatattggaacccaagttgtgcctggaccagatctgtttgtcagtgaaaaccatttgcattaaggcagaatgaccagcttcttttgtaagggaaactctgagaggctgtccccataaaagccactctggactgtgaattgcttcagaaccactatcccataaatttgcttcacaattcttatttcaagagagatcatctttgttactagaaaatcaaatcaaagrgatgragacatgcacaagtgtactgcgcctggctgacttgaagccttcrygttgcacagttcctgctacttaacatttttaagtagagtctttttccccagagatcttccagtaatgtacatttcccaataaaacacctctttttatgtgcagttgtgccaagcagggttttaaaatatttagttaactgaaaacagtagaattctggaatttggggggaagtgaagggggtactgcacaaatatttggattgtttcaaagtgtgacaatttctgactcattatttgaaagtattactttttttt

SEQ ID NO: 22568 - DNA, 600 bp, Chicken  19866894235063_1
tagttggcctttttcacgtccatttcacttgtcttgaacaataattaagaacacttgagcaacaaaactatgcaaagcaaaacttgctggctaatgaactggattttttctgattcctgaccttgctgagccattccaccagttcagaggatccttaatcaacaaatctctttcatttaacgtatacatggaaaatgaaaagcttcacacttcgtatttatgtcacacacacacagtttgtacattcgatgaataagtatacactttaataagtgatttaccaggtggtataaaatcacyttggtcaacaaactgcctagaagcatggattctcagctccatcaccatttctgcttttgtattctgttccattgcttttataccatgtttactgttaacagtcaatttaacactttaaaatatcccttcataaawaatatgactgagaatattgaaaatgytttattttaagacttctcctgatagcagggaacaaagaccttattttttttctcactcttgcttaagagaaacaatagaaaccaatgttaccactcgcaaacatatattagtcccttggctttatttctgaaactcctc

SEQ ID NO: 22569 - DNA, 600 bp, Chicken  19866894235063_2
ccaccagttcagaggatccttaatcaacaaatctctttcatttaacgtatacatggaaaatgaaaagcttcacacttcgtatttatgtcacacacacacagtttgtacattcgatgaataagtatacactttaataagtgatttaccaggtggtataaaatcacyttggtcaacaaactgcctagaagcatggattctcagctccatcaccatttctgcttttgtattctgttccattgcttttataccatgtttactgttaacagtcaatttaacactttaaaatatcccttcataaawaatatgactgagaatattgaaaatgytttattttaagacttctcctgatagcagggaacaaagaccttattttttttctcactcttgcttaagagaaacaatagaaaccaatgttaccactcgcaaacatatattagtcccttggctttatttctgaaactcctctattagagcccacttaattagatgcataaatcctgtaaatgatgtcaatgttcataattaaatgagacaattgcaaaatcagctgcggtacaaaatgtagataaatgtgggaatgaacaataagggattgcttta

SEQ ID NO: 22570 - DNA, 600 bp, Chicken  19866894235063_3
acaaatctctttcatttaacgtatacatggaaaatgaaaagcttcacacttcgtatttatgtcacacacacacagtttgtacattcgatgaataagtatacactttaataagtgatttaccaggtggtataaaatcacyttggtcaacaaactgcctagaagcatggattctcagctccatcaccatttctgcttttgtattctgttccattgcttttataccatgtttactgttaacagtcaatttaacactttaaaatatcccttcataaawaatatgactgagaatattgaaaatgytttattttaagacttctcctgatagcagggaacaaagaccttattttttttctcactcttgcttaagagaaacaatagaaaccaatgttaccactcgcaaacatatattagtcccttggctttatttctgaaactcctctattagagcccacttaattagatgcataaatcctgtaaatgatgtcaatgttcataattaaatgagacaattgcaaaatcagctgcggtacaaaatgtagataaatgtgggaatgaacaataagggattgctttattataaatctgcatgactaacactgc

SEQ ID NO: 22571 - DNA, 574 bp, Chicken  19866894235070_1
gcactcattgcctgtgcttatctccctgcaaagcgcacgtggtttccttcttcagggaggtatgatttaaatgtataaaccaaaaagcggtctggaaagctgcatgtgagcctatgcaaaaatatatgcaaacgctctcttacatggctaaacggattcttaattgaactccactggtttcaaaggctttacattaggaaataattggactcggtttatcaatctaacgcttcttaagcattagggaataaacagccgttctcaaagaagggcagggcagggctggttgccacgtctttycttcctttcctccgaaacagcaaaaggcagcgagaagcccgcttttagctattctcctcggcctctgctacgcgcgctgcgccgcagccaggagggaggattcccagcggagcttcctgcccacaggagcggccggggccgggcgagcgcaggaagcgctgactcagtgcccgcgcggagtgggcttccccgtgtgccgtgggagagcccacgcatcgcatcccgcacggccctgccctgcccagcccagcccccgtcgtcacggcaggggagc

SEQ ID NO: 22572 - DNA, 600 bp, Chicken  19866894235073_1
ctcccgctcacagatgttaacaaccgaagttgttttaaattaactgggaaggggtcttaaatgtagaggatcatcataacaaaggcaatgcatattttttctacatcaaggagagctgcgcaggggggaggctgtaacacttgcttaagagcagttatggatcccttgtgatattttagatgctcatttcaagctgaacgcttgaattcctctctgccgcattatcagtttaatattgttgatttgattactgactaaaaagtgtagaaatctttttttgtcagtttctaaatgtttgtktttagctgaagtttgtgcggataaagtgagcagtgagggggttttgttgttgttatttctttcttttcatgccagcatgttcctggaataaaaatcctgttgatttataatttgaataaaggaaaaaaaagaaaagattcccatgtgaggagaaaaacatagcggtctaaacaatgcgaagacataaaaggcattgtgtttataaagatgtgtgaaaacaatagctgctaatttcacaccccatgggacaagagagtacgaaatgtgctttagctttagataacagagttgtatccacta

SEQ ID NO: 22573 - DNA, 600 bp, Chicken  19866894235073_2
gggggttttgttgttgttatttctttcttttcatgccagcatgttcctggaataaaaatcctgttgatttataatttgaataaaggaaaaaaaagaaaagattcccatgtgaggagaaaaacatagcggtctaaacaatgcgaagacataaaaggcattgtgtttataaagatgtgtgaaaacaatagctgctaatttcacaccccatgggacaagagagtacgaaatgtgctttagctttagataacagagttgtatccactagccaagctggtttacagagctttctcttagtctttytgccacgagaggcttggtaggccaggtgccagctgaggtgttagcaaaacctaccgatttcaggcttaatcttttcacctaccttttctgtttccttaatgtgttcattatttgctaagcattactctgttctttgtcctcatttttttttttgtttctaatgcagcttgctttgtatgggtgagatatggaacagcaccaaaatccggcaccctggaaagcaagggatttctaccctgtgacaaaagaataccgccttgacttcagagattgcctaatcccagctgttctgataatata

SEQ ID NO: 22574 - DNA, 600 bp, Chicken  19866894235073_3
gacataaaaggcattgtgtttataaagatgtgtgaaaacaatagctgctaatttcacaccccatgggacaagagagtacgaaatgtgctttagctttagataacagagttgtatccactagccaagctggtttacagagctttctcttagtctttytgccacgagaggcttggtaggccaggtgccagctgaggtgttagcaaaacctaccgatttcaggcttaatcttttcacctaccttttctgtttccttaatgtgttcattatttgctaagcattactctgttctttgtcctcatytttttttttgtttctaatgcagcttgctttgtatgggtgagatatggaacagcaccaaaatccggcaccctggaaagcaagggatttctaccctgtgacaaaagaataccgccttgacttcagagattgcctaatcccagctgttctgataatataattaaggctgcctaatgtctttaattttgcaaccagtttgtgtgaaagggagaatttggcactcaaaaggcttaaacgttaaatagcaatctcaaggcgcctaattagaattctctgacattaagctaattggtgaaactgtat

SEQ ID NO: 22575 - DNA, 600 bp, Chicken  19866894235085_1
gtctggagtatgtttcatgtctcaagtcctcactgccttgcccacaccttatctctgtatatccagaagttcctctggcttccaggtcatgcctctattagcaaataaaacttctcacacaacagccaagaaacctgtggcaataaaagtcatgaacaggttataaaaaacacatcctcctgtaggtgaaatgggtttcttaaaacaagctattattcagaaagggcattaacagaccacaacaaataactggtcatttaccaacacatttgttacatttctatttcactcatgaagcamarrgatgaacttcaatcacttgaactggtcttttgtactctcatttccagcaatgtttttatctaatggagaacagatacctgcacttcctcttggctgtactgcaacgcgtgaaggaacactgtggtactcagaatctgtatttaacctttgaaattttatgctgttccttcaggcttccactgcaccatctgaaacacagttctctccctgtttcaggaaagcgtggccattcgtgactggcctttctcaccagaaatactgcaggaatacttaggtgtgctgggggaacagcgtgga

SEQ ID NO: 22576 - DNA, 600 bp, Chicken  19866894235085_2
ctggagtatgtttcatgtctcaagtcctcactgccttgcccacaccttatctctgtatatccagaagttcctctggcttccaggtcatgcctctattagcaaataaaacttctcacacaacagccaagaaacctgtggcaataaaagtcatgaacaggttataaaaaacacatcctcctgtaggtgaaatgggtttcttaaaacaagctattattcagaaagggcattaacagaccacaacaaataactggtcatttaccaacacatttgttacatttctatttcactcatgaagcamarrgatgaacttcaatcacttgaactggtcttttgtactctcatttccagcaatgtttttatctaatggagaacagatacctgcacttcctcttggctgtactgcaacgcgtgaaggaacactgtggtactcagaatctgtatttaacctttgaaattttatgctgttccttcaggcttccactgcaccatctgaaacacagttctctccctgtttcaggaaagcgtggccattcgtgactggcctttctcaccagaaatactgcaggaatacttaggtgtgctgggggaacagcgtggagt

SEQ ID NO: 22577 - DNA, 600 bp, Chicken  19866894235085_3
tggagtatgtttcatgtctcaagtcctcactgccttgcccacaccttatctctgtatatccagaagttcctctggcttccaggtcatgcctctattagcaaataaaacttctcacacaacagccaagaaacctgtggcaataaaagtcatgaacaggttataaaaaacacatcctcctgtaggtgaaatgggtttcttaaaacaagctattattcagaaagggcattaacagaccacaacaaataactggtcatttaccaacacatttgttacatttctatttcactcatgaagcamarrgatgaacttcaatcacttgaactggtcttttgtactctcatttccagcaatgtttttatctaatggagaacagatacctgcacttcctcttggctgtactgcaacgcgtgaaggaacactgtggtactcagaatctgtatttaacctttgaaattttatgctgttccttcaggcttccactgcaccatctgaaacacagttctctccctgtttcaggaaagcgtggccattcgtgactggcctttctcaccagaaatactgcaggaatacttaggtgtgctgggggaacagcgtggagtt

SEQ ID NO: 22578 - DNA, 585 bp, Chicken  19866894235088_1
aaaaaaccaccaacccaaaacaacacaaatataagagcaaggtacttttcaataatgttcatgctatttattttgcagtatttctgcactggcttattgcacacatgatcaaatgtgtaaaaatgattttcagcagtgtatcttctttctgcagtttaccagaagtgcagcttcaaattcacgtttgtgaagggccaatggaactcacgtgcttgctgtgtcttcatgccctgctgcctgcactcaggctgccacctgtttcctgccaaagctgctggctttatcaatttcagatggatwgctaygtgccacaggaaatacaggcgctagatcccattctccagaaaccttctcagcctacatgaactgctagtaatatacagcagaagtactgaagtcctccaaatatgccgtaagttttcctcccatcaggttacaaagacatggcaggcttggtagcatgtgccatcttatcataaacgtcactctgacagtaatgtctcctatttccttctgtagaaacaacaacagatgcagagagtacaataacaccgtttgacagagcaaattctcagctacagaaca

SEQ ID NO: 22579 - DNA, 580 bp, Chicken  19866894235088_2
accaccaacccaaaacaacacaaatataagagcaaggtacttttcaataatgttcatgctatttattttgcagtatttctgcactggcttattgcacacatgatcaaatgtgtaaaaatgattttcagcagtgtatcttctttctgcagtttaccagaagtgcagcttcaaattcacgtttgtgaagggccaatggaactcacgtgcttgctgtgtcttcatgccctgctgcctgcactcaggctgccacctgtttcctgccaaagctgctggctttatcaatttcagatggatwgctaygtgccacaggaaatacaggcgctagatcccattctccagaaaccttctcagcctacatgaactgctagtaatatacagcagaagtactgaagtcctccaaatatgccgtaagttttcctcccatcaggttacaaagacatggcaggcttggtagcatgtgccatcttatcataaacgtcactctgacagtaatgtctcctatttccttctgtagaaacaacaacagatgcagagagtacaataacaccgtttgacagagcaaattctcagctacagaaca

SEQ ID NO: 22580 - DNA, 600 bp, Chicken  19866894235089_1
acagagagagacggccctccctttctccctacatttaacatttagcatagagtatcttctctaaatgaagtgtgggggaattcgggtaggttaagaattccctggcctaacgcagcattagctaagtttttaatcttccaattcctctttctaattctgaaagttcctaggagtttataagtacactggaaaatgcattgaaaaaaatacgtgtgtacaaaggctgatgactatcagttgtatcagcattttcttaacccatacattcaagtgagggaaccagtaagtccaccatttccrtgtctatttaaatccaagagaggtatcatcttcctggacctctgcaaccttccagtttggttccagattgcattcaagytggtgtctgagaactgtgtgtgagatgacattgtttttgtataagtaatagaatgttgtaccaaagggacgtacctcaggcttgatacaagataggttcttgtctgtggttaaaggatggagtatgcacagtcttgagagatgagactccaggtggcatgttaatgtgtgtactctcctaccgcggggagacagctggggagagggtgggctgccaaaggt

SEQ ID NO: 22581 - DNA, 600 bp, Chicken  19866894235089_2
attcgggtaggttaagaattccctggcctaacgcagcattagctaagtttttaatcttccaattcctctttctaattctgaaagttcctaggagtttataagtacactggaaaatgcattgaaaaaaatacgtgtgtacaaaggctgatgactatcagttgtatcagcattttcttaacccatacattcaagtgagggaaccagtaagtccaccatttccrtgtctatttaaatccaagagaggtatcatcttcctggacctctgcaaccttccagtttggttccagattgcattcaagytggtgtctgagaactgtgtgtgagatgacattgtttttgtataagtaatagaatgttgtaccaaagggacgtacctcaggcttgatacaagataggttcttgtctgtggttaaaggatggagtatgcacagtcttgagagatgagactccaggtggcatgttaatgtgtgtactctcctaccgcggggagacagctggggagagggtgggctgccaaaggtaaaggcatacatgtgagacatacatctacacccagaactgcataagaggaaacaaacaaacaaacctggcagacatata

SEQ ID NO: 22582 - DNA, 599 bp, Chicken  19866894235098_1
  misc_feature (1)..(143): n is any nucleotide
nnnnnnnnnnnnnnnnnnnnnnnnnnnnnnnnnnnnnnnnnnnnnnnnnnnnnnnnnnnnnnnnnnnnnnnnnnnnnnnnnnnnnnnnnnnnnnnnnnnnnnnnnnnnnnnnnnnnnnnnnnnnnnnnnnnnnnnnnnnnnnnctgagacattacagaaattggggaggatttaaccagtgcgagtgctgacatgtgctgaggatcatggtgctttaggtgcacgaccagatggagttaacaggaggtgtgtcttagtgatcctggcttaggcctgtctctgcatgaactggatctatgytagcagtgctgggctgaggctaagctgtgtagcactcaggatggcgctacaccttgctctcccttctccacaggccctgctggttttgcagaatctcgtgtctaggaygttggtcccaaggtggggtgctgcatggggtgctgctgcagctgatgggctctggcagatcccagctgrcacagcagctgggctgtgyatcctcagcactgctgatttgcagccacgtcgagctgcccatagacaactgaattggctgcacattaatatctgagatgccaaatccatccttgagtttggat

SEQ ID NO: 22583 - DNA, 599 bp, Chicken  19866894235098_2
  misc_feature (1)..(35): n is any nucleotide
nnnnnnnnnnnnnnnnnnnnnnnnnnnnnnnnnnnctgagacattacagaaattggggaggatttaaccagtgcgagtgctgacatgtgctgaggatcatggtgctttaggtgcacgaccagatggagttaacaggaggtgtgtcttagtgatcctggcttaggcctgtctctgcatgaactggatctatgytagcagtgctgggctgaggctaagctgtgtagcactcaggatggcgctacaccttgctctcccttctccacaggccctgctggttttgcagaatctcgtgtctaggaygttggtcccaaggtggggtgctgcatggggtgctgctgcagctgatgggctctggcagatcccagctgrcacagcagctgggctgtgyatcctcagcactgctgatttgcagccacgtcgagctgcccatagacaactgaattggctgcacattaatatctgagatgccaaatccatccttgagtttggataattgaactgccaaggggccaatttcagaactgttaatagttttgatgatgtgacgtgtttgttgaaygtattttagtgtgttataccgctcagtcctgtagctggta

SEQ ID NO: 22584 - DNA, 600 bp, Chicken  19866894235098_3
agtgcgagtgctgacatgtgctgaggatcatggtgctttaggtgcacgaccagatggagttaacaggaggtgtgtcttagtgatcctggcttaggcctgtctctgcatgaactggatctatgytagcagtgctgggctgaggctaagctgtgtagcactcaggatggcgctacaccttgctctcccttctccacaggccctgctggttttgcagaatctcgtgtctaggaygttggtcccaaggtggggtgctgcatggggtgctgctgcagctgatgggctctggcagatcccagctgrcacagcagctgggctgtgyatcctcagcactgctgatttgcagccacgtcgagctgcccatagacaactgaattggctgcacattaatatctgagatgccaaatccatccttgagtttggataattgaactgccaaggggccaatttcagaactgttaatagttttgatgatgtgacgtgtttgttgaaygtattttagtgtgttataccgctcagtcctgtagctggtaagacacaggattaaatatctctttggtccttgatgtttctgctgtctgtgacacacatctccagaagtta

SEQ ID NO: 22585 - DNA, 600 bp, Chicken  19866894235098_4
gctgaggatcatggtgctttaggtgcacgaccagatggagttaacaggaggtgtgtcttagtgatcctggcttaggcctgtctctgcatgaactggatctatgytagcagtgctgggctgaggctaagctgtgtagcactcaggatggcgctacaccttgctctcccttctccacaggccctgctggttttgcagaatctcgtgtctaggaygttggtcccaaggtggggtgctgcatggggtgctgctgcagctgatgggctctggcagatcccagctgrcacagcagctgggctgtgyatcctcagcactgctgatttgcagccacgtcgagctgcccatagacaactgaattggctgcacattaatatctgagatgccaaatccatccttgagtttggataattgaactgccaaggggccaatttcagaactgttaatagttttgatgatgtgacgtgtttgttgaaygtattttagtgtgttataccgctcagtcctgtagctggtaagacacaggattaaatatctctttggtccttgatgtttctgctgtctgtgacacacatctccagaagttattttggtatttaagatcaa

SEQ ID NO: 22586 - DNA, 446 bp, Chicken  19866894235098_5
ccacaggccctgctggttttgcagaatctcgtgtctaggaygttggtcccaaggtggggtgctgcatggggtgctgctgcagctgatgggctctggcagatcccagctgrcacagcagctgggctgtgyatcctcagcactgctgatttgcagccacgtcgagctgcccatagacaactgaattggctgcacattaatatctgagatgccaaatccatccttgagtttggataattgaactgccaaggggccaatttcagaactgttaatagttttgatgatgtgacgtgtttgttgaaygtattttagtgtgttataccgctcagtcctgtagctggtaagacacaggattaaatatctctttggtccttgatgtttctgctgtctgtgacacacatctccagaagttattttggtatttaagatcaactgtatcccattttttt

SEQ ID NO: 22587 - DNA, 599 bp, Chicken  19866894235099_1
  misc_feature (1)..(210): n is any nucleotide
nnnnnnnnnnnnnnnnnnnnnnnnnnnnnnnnnnnnnnnnnnnnnnnnnnnnnnnnnnnnnnnnnnnnnnnnnnnnnnnnnnnnnnnnnnnnnnnnnnnnnnnnnnnnnnnnnnnnnnnnnnnnnnnnnnnnnnnnnnnnnnnnnnnnnnnnnnnnnnnnnnnnnnnnnnnnnnnnnnnnnnnnnnnnnnnnnnnnnnnnnnnnnnnnnnaaattacctagtacctagaaatgcgaaccttagcagcacagcatacacctatgtcacaacaatgtctctgtaacttcatggaaggaaaaygtgtttgttgtagatacagaaagtagaagagagtaagtgttcttaaaaatttctcatcagtaaccattttatatcttcctttcattgctggaatcaaggcagttgattgacagcacctcctcccctattccttccacttgtctgcaaaaatgtgtgtgtcatagctcttcttgtccctccacagggagaatattaagtacctctccagtatccagcagcttttggtatcctcacaggcttatcctgtgctgccaggtatatgtgcaccaagctgaatgtaaagtttccttacaaccaca

SEQ ID NO: 22588 - DNA, 429 bp, Chicken  19866894235099_2
ttttggtatcctcacaggcttatcctgtgctgccaggtatatgtgcaccaagctgaatgtaaagtttccttacaaccacagagagcaaggaatgaagagataagatgaaaggaaacagtagcgttttctgtgtgggagtatcatgaggcaggaaggtgtcataaaatacgttcctctagtctaaaaccattccattagaagagtgagataacaaaggtgtctgcagttacatttaatgatatcctgagtgtcagtaattcacagaaagttgttatatatcccaagcatcaggttcagttycttcccaggggcgtggggctcttttagtatgtgcatctacagtgaaaacacaggcagaactattccttaattgagaatttctcatctctgtcctgtaattccttgtgaaaataatgaaattcctgttat

SEQ ID NO: 22589 - DNA, 600 bp, Chicken  19866894235107_1
cctaggggttggaagtgaggctcaggaagaattcagacatcaaaatgcaatgctgtgtctctggaagaagccatctgcacctggatgcatcagagctagtcaggaccacccagactttgaagctttgtgcataaatagtctcagcccaaccagaaccaagacatcaagcactcctctgcttcgattcacaagcaggaccgattccagcaggctttgtcataaagtacttaatgtgcagcattaagaagagaatttctgtattttgaagcacagatgatatatgttcagcagctgagaccyattccatgcttctcttgtgaactacagaaacgataattcaaagatcctcattgcagccttccagtacctaaaggaagcctataaataggaggggagtcaactttttacaagggtagataatggcaggacaaggggaaatggttttaagttgaagaagggaagacttagattgaatatcagaggcaagttctttaccaagagaatggtgaggtgctggaacaggttgtccacagaggctgtgtatgccccgtccctggaggtgttcaaggccaggttggttggggccctgggcagcctggt

SEQ ID NO: 22590 - DNA, 600 bp, Chicken  19866894235114_1
aactgaaagctgaaaactccaaatgccagcaaatttgcatccccagtgcttttcatatatacacatcaaaagctaagaataggaccagagacaagaagaaatatgttaggattgattaatgcatcactgtgtcttcactgaataccactgtatctatctgcactataacttaagaagtatattacacatcaggaacgttaatggcagagctgcaaataaccacctctcctcatcacgcaaaaaggcaccaggaaattcacttacaaattataagtaaaacagtgttatttttctgtttcrttttgtaaactctcgcaatttttttttcaagctattcgtatcataaataattagcctcaccaggttttaattatgaaattctaaacaaatcccacgagcgaacacttatccctatctgtctgctgagttcctatttgtaattccagctaattacttcctctgtcaggaaaataatcttcgaagtcccaggatgccatgcaagtatttccatctccttcattttgcctcccaacgttcgatacagaaaatgtaaattcgtttggctactgtgggaagagtaagaaacttgaaataatctct

SEQ ID NO: 22591 - DNA, 600 bp, Chicken  19866894235114_2
attgaagtttttctgcggagctgtgcagggtagcagtgaacattagataaatggctttcaaaatattgcagtgagtcatactgccgtcagtgactggattaatttgagttcagttaaactattccttcaccttaatcttatatatatgacaacatacattatatgaggatttttagcattatatttggaagctgagcattttgagtataattaagcagcatgttattgcaagaagggcaattaaaacctaaataagaattaaaattcagcaagcttttgttggtaacatcaacttgccaygctaaaacaaattaccttgctgttctacaatagcaacccagataagaatacagtaggcttatatttgattttctttatagaatattgtaaatatattaacacgacagaaatgaaaccaaaggaaaaatacagcttgttcactgctggcrtctatatgcctcagtatgcagttcagtattctaatgactgctggaaagacatcaaatcatcagtacsacatttcctggcatgacataacrtatctgataacttgttttaaattccgtacatacgctgtgaagaactgttctacttccactg

SEQ ID NO: 22592 - DNA, 600 bp, Chicken  19866894235114_3
caacatacattatatgaggatttttagcattatatttggaagctgagcattttgagtataattaagcagcatgttattgcaagaagggcaattaaaacctaaataagaattaaaattcagcaagcttttgttggtaacatcaacttgccaygctaaaacaaattaccttgctgttctacaatagcaacccagataagaatacagtaggcttatatttgattttctttatagaatattgtaaatatattaacacgacagaaatgaaaccaaaggaaaaatacagcttgttcactgctggcrtctatatgcctcagtatgcagttcagtattctaatgactgctggaaagacatcaaatcatcagtacsacatttcctggcatgacataacrtatctgataacttgttttaaattccgtacatacgctgtgaagaactgttctacttccactgtagccttcaaacagcagcaacaaactactgtgtcaatcctcaccttctttttctgctctaaccaacctccagcacgttttcttcttaatgctggggatcttcacccagcctttacagcaaaggtcccagttccatccctactggacggc

SEQ ID NO: 22593 - DNA, 600 bp, Chicken  19866894235114_4
agcatgttattgcaagaagggcaattaaaacctaaataagaattaaaattcagcaagcttttgttggtaacatcaacttgccaygctaaaacaaattaccttgctgttctacaatagcaacccagataagaatacagtaggcttatatttgattttctttatagaatattgtaaatatattaacacgacagaaatgaaaccaaaggaaaaatacagcttgttcactgctggcrtctatatgcctcagtatgcagttcagtattctaatgactgctggaaagacatcaaatcatcagtacsacatttcctggcatgacataacrtatctgataacttgttttaaattccgtacatacgctgtgaagaactgttctacttccactgtagccttcaaacagcagcaacaaactactgtgtcaatcctcaccttctttttctgctctaaccaacctccagcacgttttcttcttaatgctggggatcttcacccagcctttacagcaaaggtcccagttccatccctactggacggctttacctcatttattttttgtcacagttgcagccactgaagccccaacatacagcctgtaatatcat

SEQ ID NO: 22594 - DNA, 600 bp, Chicken  19866894235114_5
attaaaacctaaataagaattaaaattcagcaagcttttgttggtaacatcaacttgccaygctaaaacaaattaccttgctgttctacaatagcaacccagataagaatacagtaggcttatatttgattttctttatagaatattgtaaatatattaacacgacagaaatgaaaccaaaggaaaaatacagcttgttcactgctggcrtctatatgcctcagtatgcagttcagtattctaatgactgctggaaagacatcaaatcatcagtacsacatttcctggcatgacataacrtatctgataacttgttttaaattccgtacatacgctgtgaagaactgttctacttccactgtagccttcaaacagcagcaacaaactactgtgtcaatcctcaccttctttttctgctctaaccaacctccagcacgttttcttcttaatgctggggatcttcacccagcctttacagcaaaggtcccagttccatccctactggacggctttacctcatttattttttgtcacagttgcagccactgaagccccaacatacagcctgtaatatcatactaccttttcagtgtttggagg

SEQ ID NO: 22595 - DNA, 600 bp, Chicken  19866894235115_1
ggatcttatcaacatgtagaacctgatgagagagaatgacaaagacaggtccagattctcccttgtggcacgaagtgatgtgatatttgttatgcagtagatgcaaattaaaaagtctgaaaatccaagaatgaaagtcattgtcatgaagaatcactacaatctgtttcttcatttattatactaataaatcaatattttgttactataataaaatatggagctattgctccatgtatacattatagaaagggggatagttgagatatgaataaccctatttacaggctgttgtgtttytactacagaagtattgatgaagctgcaatcagtcttgtgtgtactaacaaatcaatgaaattgtgatacctctcaagtcttgtttagataaggattctgttgtacgcagcagtctaaaacaaagaatagcaagttcgtgtaagtccagctgaactataagtgacacgcatttgtgtaacacataggcatcattaaactcattgtaggactggactcttctgctttgtgtgtctttattgcacataaatccaaaaattacagtgttatgtatatgatatgggattcatatttttccttgtg

SEQ ID NO: 22596 - DNA, 599 bp, Chicken  19866894235119_1
  misc_feature (1)..(134): n is any nucleotide
nnnnnnnnnnnnnnnnnnnnnnnnnnnnnnnnnnnnnnnnnnnnnnnnnnnnnnnnnnnnnnnnnnnnnnnnnnnnnnnnnnnnnnnnnnnnnnnnnnnnnnnnnnnnnnnnnnnnnnnnnnnnnnnnnnnnnntcctggtaatggcagatagctgctgtctggctatcctgcatctgtctatgggaagtacacatttagtctcagaggactgagataattacacacatttctggtttaaaccgaactaatcttcagtgtagccccttttacctaaacagggggcaacacaataattatycaaatgattagattacagcacagttcagaagtgtacatgttttcaagttgagtaaaactgaagaaaaaatgattattctgtaactcaaaagatttatagctttgctcttcctctcctcctttttcacttgcactgtgtctgtcgtgttgtcagctgttcctctccagttgccttgttttacagctattacttcctacttcttttgatatatttacctataagctacgtctacatctgcttaccaacctttttctgtctaactaacctaagacatatttcactgcagttctgttagttgc

SEQ ID NO: 22597 - DNA, 570 bp, Chicken  19866894235119_2
ccattaaggacaaaaataaaaaaaataaaagattcaaccatattctattacagtaaaactgtagggtgtagggagattgatttaggcaatatgtgtttacccagattggaatatgctttgaagtctgatggtgagtgacatatacttcaaagagctctaagaatttatggaatagattggaagcctgagagtaccacatgaacccagcagcatggacataattccagaaatctggatgctcatgtctgacacaagtgaacatatgaaacacaactaacactgatccctttttataggagrtgggcctgtgatgtttggaactagttacattttgcagtgtcaagtagtagagagcatgggaagaagtgcgtcactggtcagttcaagactgactgataaataggatggatcttgctaactcctttgtaatctatttgctacttagagaaataccttctgcagtgaaatatatcttcctcagaacaatgtggaatctaattatataagaaataaaatcaaatcaagatacagtagaagctatgtccagatcaacagacaaataagaaaaat

SEQ ID NO: 22598 - DNA, 600 bp, Chicken  19866894235125_1
aaacccctccaccaaaatggggtgatggcatcccgcctccaggctgccgcagtgagcaaaaccaacgggagaggatttggccaatctgcttaacctaaagccctaagatgcaggctaatgcaccggggcgacgctggggccacacgccccgctgagagctctcggggagcagctgaagatggtggggagaaaactgccccgagtcaccccccatgatgggaacgtgatgggctgctctgtttgcagcccccagcactgatttcgtgcagggatggtgagctcagccccatcttctgagasgtcccggagctgcacagccaaacctgagagccccaaagggatggggtgactccagcctggccctgtgagccccaaagggatggggtgactccagcctggccctgtgagccccaaagggatggggtgactccagcctggccccrctccccccatcccaatgggcagacatgccaggccccgccgctgcctcgctgcagaggcttaaacattaagtaaacaaaggtcaggatgtcagaggacagatctcttaaatgacctaatttctaaaagagcttagtggctatatttgctgtggtgtga

SEQ ID NO: 22599 - DNA, 600 bp, Chicken  19866894235125_2
acgccccgctgagagctctcggggagcagctgaagatggtggggagaaaactgccccgagtcaccccccatgatgggaacgtgatgggctgctctgtttgcagcccccagcactgatttcgtgcagggatggtgagctcagccccatcttctgagasgtcccggagctgcacagccaaacctgagagccccaaagggatggggtgactccagcctggccctgtgagccccaaagggatggggtgactccagcctggccctgtgagccccaaagggatggggtgactccagcctggccccrctccccccatcccaatgggcagacatgccaggccccgccgctgcctcgctgcagaggcttaaacattaagtaaacaaaggtcaggatgtcagaggacagatctcttaaatgacctaatttctaaaagagcttagtggctatatttgctgtggtgtgacacaaatagctcagcgggttgtgtcgtggaggggggggggaagcagagggaaaccagggcaattccagccccctgcactgcaaacccatcgctgctcccacccacctgactgcaccccgatcccaaacccagcacggaaagca

SEQ ID NO: 22600 - DNA, 600 bp, Chicken  19866894235127_1
cggggatatgacaaccgtgagcgtcaagtctgctcagtgcctctccccaaacctgctgcttttcatctgatgtttgttcttttgtgcctcgtttgattcatgtcagaagcaaagcgtgcctggtaccagcaatctgctgcacgctttgatcggcggcggtgggagggtgggaggaacttcagagggagaggcatcccccagccctgcacccggataacgcagaaagaggtgaaaacctggctgcagggattgtaaatttagtgtggtaggaaaatgaggctggagggatgggagagaggwgggatgggagagaggagggatggcaaagagggagagatggtagagagggaggtatggcagaggggagggatgggagaaaggagggatggcaaagagggaggtatgaaagagaggagggatggcagagaggagggatggtggagagggacgtatggcagaggtgagggatgggagagggggagggatggcaaagtggagagatggcagagggaagggatggcagagagggagggatggtgaacgttgaggaatggcaaactttggagggatggcagatctctctgctttagggtttggcac

SEQ ID NO: 22601 - DNA, 600 bp, Chicken  19866894235134_1
agggtaactgttctgcatatcttagaaagcatccacagaaggtggaggggaaaaaaaaaaaaaaaaaaaaaagctagattctccaagtcatcaggaaagcttcaaaaataaaggagagacagctgttgatttagtcccaagaaaatgagcatcatattaaaatctctctgcccactcttgtctcagctgctgattcccattcccacagatggcctgcctgctctgaaagctttcctgcagcatccagtgccaaaaattgtgcctggaatgtcagcaagtgaaaaaggaaaaaaatgaaamagaatttgcttccaaattttttcagatataagtgccacagagcaaagaytactcaaaagcaccacccaaataaatragatttttactgcttgtctcttggtagcacagcctatgcaaggaagcaacagatgaacttgcctacctgttgtgaaatgtaatcttgktgtagcacatttaggaaaggaaattaaatgatggggagccactcacctaggcatctgatgctgtcaaaggctgagctgcaatggacaatgcaggagctgagtgggcagccaggagggcaaagagagtaatgctgtt

SEQ ID NO: 22602 - DNA, 600 bp, Chicken  19866894235134_2
gaaaaaaaaaaaaaaaaaaaaaagctagattctccaagtcatcaggaaagcttcaaaaataaaggagagacagctgttgatttagtcccaagaaaatgagcatcatattaaaatctctctgcccactcttgtctcagctgctgattcccattcccacagatggcctgcctgctctgaaagctttcctgcagcatccagtgccaaaaattgtgcctggaatgtcagcaagtgaaaaaggaaaaaaatgaaamagaatttgcttccaaattttttcagatataagtgccacagagcaaagaytactcaaaagcaccacccaaataaatragatttttactgcttgtctcttggtagcacagcctatgcaaggaagcaacagatgaacttgcctacctgttgtgaaatgtaatcttgktgtagcacatttaggaaaggaaattaaatgatggggagccactcacctaggcatctgatgctgtcaaaggctgagctgcaatggacaatgcaggagctgagtgggcagccaggagggcaaagagagtaatgctgttccctgaacccatggtgtccacctaaatgaggccaaaggggcagaagcca

SEQ ID NO: 22603 - DNA, 600 bp, Chicken  19866894235134_3
gattctccaagtcatcaggaaagcttcaaaaataaaggagagacagctgttgatttagtcccaagaaaatgagcatcatattaaaatctctctgcccactcttgtctcagctgctgattcccattcccacagatggcctgcctgctctgaaagctttcctgcagcatccagtgccaaaaattgtgcctggaatgtcagcaagtgaaaaaggaaaaaaatgaaamagaatttgcttccaaattttttcagatataagtgccacagagcaaagaytactcaaaagcaccacccaaataaatragatttttactgcttgtctcttggtagcacagcctatgcaaggaagcaacagatgaacttgcctacctgttgtgaaatgtaatcttgktgtagcacatttaggaaaggaaattaaatgatggggagccactcacctaggcatctgatgctgtcaaaggctgagctgcaatggacaatgcaggagctgagtgggcagccaggagggcaaagagagtaatgctgttccctgaacccatggtgtccacctaaatgaggccaaaggggcagaagccatcacatgtatgagggtgtgatgtgtgt

SEQ ID NO: 22604 - DNA, 600 bp, Chicken  19866894235134_4
tctctgcccactcttgtctcagctgctgattcccattcccacagatggcctgcctgctctgaaagctttcctgcagcatccagtgccaaaaattgtgcctggaatgtcagcaagtgaaaaaggaaaaaaatgaaamagaatttgcttccaaattttttcagatataagtgccacagagcaaagaytactcaaaagcaccacccaaataaatragatttttactgcttgtctcttggtagcacagcctatgcaaggaagcaacagatgaacttgcctacctgttgtgaaatgtaatcttgktgtagcacatttaggaaaggaaattaaatgatggggagccactcacctaggcatctgatgctgtcaaaggctgagctgcaatggacaatgcaggagctgagtgggcagccaggagggcaaagagagtaatgctgttccctgaacccatggtgtccacctaaatgaggccaaaggggcagaagccatcacatgtatgagggtgtgatgtgtgtcacagacagacatggctatccgcccactgtatttgcctgtattagcaagtcaattttacattccacatcagtgagtgctgtgattttg

SEQ ID NO: 22605 - DNA, 600 bp, Chicken  19866894235138_1
caggcttcacgcacacctcgatgggctacaaaaacagtaatttagtaactgtcatcaaaaggatgggtatcatataaatcttcctcacaccttctccccagccactcctttatacccacaggttctctaagagcaaaggaaagcaaagatgctactgtgaacatgcccactgacactctactaactccagcagtgtatggagccattgctcacgctgcctttttgctgacaggcaactgcataagaagcgacacccctgaagagcacctcagcatccagaaaaatcaatgacatacacartgctacaattcccagtgcagccaacaggactgggtgctgagctgcaagccccagctcagcattaggcacctaccaggcagagcattttgtggtgacttcattacatttgatgcaaatcgtgtacagtggagccaatggtccctgatacagctcctagaatttggatgcattaaaataaaactgtttttcctcattcatgtatttttaggattgtcatttttgcccttaaacaactatttttagttaacctgatatgtaaagcttctccaaaatcccatggagtcgttatctaagaatcaa

SEQ ID NO: 22606 - DNA, 600 bp, Chicken  19866894235142_1
acaggtgggaaaaacatctggtttccttattatttgtagggttttttgtttgtttgtttgtttgtttttacaaagctgaaaagcatggtaaatcttgctgtgtttggggattcctagtattctatcagtagttaagaaagtagttctggggttcactccactggcaaaagagatgacgtgcacagaaacttcaccgactcagctctgtggttacctcagtctgattcagaccagaacaacacttgtgaaatcaccattcccagccccacagggacatggggcttctcatggcatccaacytgcttccccgcctggcaggatgcctcactcaaggcaagtaattaattcagctggatttccatctgtgtatgaagcaaaacaactacctgacaacaacaggcaaataatcagttaatgtttgtgaagcactaagacctgcaatgccaaatgctggaaaaaatcaggtaatccatctcagtgccacaccaccccagtaccagtcaatcccgtggctgtaggsccttgtctttcccttgtacacactcaccttttgcaccttgttttaatttacacacagtttattttgatggaagtggggtt

SEQ ID NO: 22607 - DNA, 600 bp, Chicken  19866894235142_2
ctgattcagaccagaacaacacttgtgaaatcaccattcccagccccacagggacatggggcttctcatggcatccaacytgcttccccgcctggcaggatgcctcactcaaggcaagtaattaattcagctggatttccatctgtgtatgaagcaaaacaactacctgacaacaacaggcaaataatcagttaatgtttgtgaagcactaagacctgcaatgccaaatgctggaaaaaatcaggtaatccatctcagtgccacaccaccccagtaccagtcaatcccgtggctgtaggsccttgtctttcccttgtacacactcaccttttgcaccttgttttaatttacacacagtttattttgatggaagtggggttttttgtttgctttgttttagtgaggcttattttgttaagccacacaagaaggaaattcgatgtcacgcacattttcctccctcaccaggtatttgtttatctctggtgtctgctctagcaccaagacagactccagctaaatgcagattcaagttggttcctgaaaatactgaccaagtgacagtaatgcacaaaagtgtgcctttttgcygaggcaaat

SEQ ID NO: 22608 - DNA, 600 bp, Chicken  19866894235142_3
gctgtaggsccttgtctttcccttgtacacactcaccttttgcaccttgttttaatttacacacagtttattttgatggaagtggggttttttgtttgctttgttttagtgaggcttattttgttaagccacacaagaaggaaattcgatgtcacgcacattttcctccctcaccaggtatttgtttatctctggtgtctgctctagcaccaagacagactccagctaaatgcagattcaagttggttcctgaaaatactgaccaagtgacagtaatgcacaaaagtgtgcctttttgcygaggcaaatgcttagaaatcattgtcaagctctgtcagattgtttctgccaggacatcagggagctgctgtgcttcagctgctgcaaccccctccccagcaccccatctgcttggcagagccatcccatctcccacagcctgaaacagtgcttttcacaggaatctgcttttgttctgcatcctgccttgcataacggggccttcattcaggattctacatgctaaatacaaatggttggcaggtccacatctctcattatggaggttctcattggctggtgctactgggaagaggagtt

SEQ ID NO: 22609 - DNA, 600 bp, Chicken  19866894235142_4
ccatcctgcacctaacacctgcactcatgtcagcagcctgaggtgtgtgagtgtgaggtatgagctgcagtcctcactctcatgtctgccttacttaagactggagcaacacttcctgtacatataaatgaataaatcctccaattacggcagcctgaaccacctcagataagaacatgcaacccaaagagctctgcccaagtcaaggaattagcttcaggattgtgtttattgcatttggttacttttccagaccaatgcccgctgctgctttttcaagagcactgtatcaaagaacaygagaagacaatgctccgcagccaccctgatgcgggacggtgccacagcaaccccaaaggttttgtgcatgttacacttcctctcctgttttgcttgcagaagagattctgctcaaataccaaaatattgatatgcaaatagaacgagttgcaacgcagtatgcagcaacacagcgtgaaaccttctacagcactggaaggagcagttccatattacagctaccactatgactacagcaatgtagcaaaaacattgacaggcccttaactattatggagcctcctggcaatgccataatta

SEQ ID NO: 22610 - DNA, 600 bp, Chicken  19866894235148_1
ttcttttgcaatttgaaccaatccttatatcaataacagagtaaacctccaaacaattgtttgaggctaagaatccggggaggcttttcaacattggaaggagttctgcttatatatttaagaacaaatttaatatctggaaaagttagccattatttggagtgggtggaaacatttgctagaagtgcttccttatacgggccccgattcagaaaagcacttaagcacacatttagctgttatcacgtgttgaagtgctcctttgcccttctgaaactgtgggcaacggaacgaacccarcgcttctaaatgccagtgaaacgatgctctgtagttccactggatctgtccctttcttgaccactcactatcaattcaataggccagtactaaagcacaagatggtaaaaatgggagcaaagagcttaaaagggagtgtgaaagggcaggtgtgctgtcagacaaagagagamtgtttctggcaaggctctgctgcatttttttcaccttgatttgcacttaggacagtatttctatcaaattcagaatattttctatagtcttttcctttcctctggacagggacaaagaattcagcat

SEQ ID NO: 22611 - DNA, 600 bp, Chicken  19866894235148_2
atttgctagaagtgcttccttatacgggccccgattcagaaaagcacttaagcacacatttagctgttatcacgtgttgaagtgctcctttgcccttctgaaactgtgggcaacggaacgaacccarcgcttctaaatgccagtgaaacgatgctctgtagttccactggatctgtccctttcttgaccactcactatcaattcaataggccagtactaaagcacaagatggtaaaaatgggagcaaagagcttaaaagggagtgtgaaagggcaggtgtgctgtcagacaaagagagamtgtttctggcaaggctctgctgcatttttttcaccttgatttgcacttaggacagtatttctatcaaattcagaatattttctatagtcttttcctttcctctggacagggacaaagaattcagcatcttttcctgagaactaagcacctatttgcaaggtgataacaacctgccttttgtatgtctcctctttacatgttccctttaatactttgcaaatatgcctaaaaaatagctgttggactagaataagtaaactacccttgttgaagggcaagatccctgcacattgactgaac

SEQ ID NO: 22612 - DNA, 600 bp, Chicken  19866894235149_1
ctaaggactcttttgcatatgcaactgctagacagaaagcagaagtcacaagaactatgaactgaaaaactgaaaaacagagctcagttaaaaaaaaaaatcattgttctcttctagacttaggacaagtgttgacatttttctcaggagaagtgagcaaaacttcattttggtggtattcatatttaagcctccttgacattgaatgggatttggcagtaaattcagtcatgttttgatctcagtccttcctagaccagtctcaggataaacaacagctcagacatggcactcctagaratggatctcctgaaacacagcccagtrtcactgaaggctacgtggcattcagcaaaataatcaggcttttgcagaagagagaacacacgtggccctcaaggcaccataacccccttaaatgtatgaacttrctgaaaaaataaaccaagataacagcattaggttatgtactaaaagcacatctgcacacacacaaatgaaggcagatgcagaatggcaggtgcccaaacaacaccctgcccgcccatcacagcatcaagcagccttgcagagacccatctccaaacacaaggcatagag

SEQ ID NO: 22613 - DNA, 600 bp, Chicken  19866894235149_2
ctagacagaaagcagaagtcacaagaactatgaactgaaaaactgaaaaacagagctcagttaaaaaaaaaaatcattgttctcttctagacttaggacaagtgttgacatttttctcaggagaagtgagcaaaacttcattttggtggtattcatatttaagcctccttgacattgaatgggatttggcagtaaattcagtcatgttttgatctcagtccttcctagaccagtctcaggataaacaacagctcagacatggcactcctagaratggatctcctgaaacacagcccagtrtcactgaaggctacgtggcattcagcaaaataatcaggcttttgcagaagagagaacacacgtggccctcaaggcaccataacccccttaaatgtatgaacttrctgaaaaaataaaccaagataacagcattaggttatgtactaaaagcacatctgcacacacacaaatgaaggcagatgcagaatggcaggtgcccaaacaacaccctgcccgcccatcacagcatcaagcagccttgcagagacccatctccaaacacaaggcatagagacaggygggagacccaaagagaggaag

SEQ ID NO: 22614 - DNA, 600 bp, Chicken  19866894235149_3
ttgacatttttctcaggagaagtgagcaaaacttcattttggtggtattcatatttaagcctccttgacattgaatgggatttggcagtaaattcagtcatgttttgatctcagtccttcctagaccagtctcaggataaacaacagctcagacatggcactcctagaratggatctcctgaaacacagcccagtrtcactgaaggctacgtggcattcagcaaaataatcaggcttttgcagaagagagaacacacgtggccctcaaggcaccataacccccttaaatgtatgaacttrctgaaaaaataaaccaagataacagcattaggttatgtactaaaagcacatctgcacacacacaaatgaaggcagatgcagaatggcaggtgcccaaacaacaccctgcccgcccatcacagcatcaagcagccttgcagagacccatctccaaacacaaggcatagagacaggygggagacccaaagagaggaagggatgggcttcccaggagagctgctagctccaggtgcagtgcagtcactgaaggaaataactggggcacctcttggatggagtgaggttactgtattggcagga

SEQ ID NO: 22615 - DNA, 518 bp, Chicken  19866894235149_4
ctcctgaaacacagcccagtrtcactgaaggctacgtggcattcagcaaaataatcaggcttttgcagaagagagaacacacgtggccctcaaggcaccataacccccttaaatgtatgaacttrctgaaaaaataaaccaagataacagcattaggttatgtactaaaagcacatctgcacacacacaaatgaaggcagatgcagaatggcaggtgcccaaacaacaccctgcccgcccatcacagcatcaagcagccttgcagagacccatctccaaacacaaggcatagagacaggygggagacccaaagagaggaagggatgggcttcccaggagagctgctagctccaggtgcagtgcagtcactgaaggaaataactggggcacctcttggatggagtgaggttactgtattggcaggatgcaggggaagagctcttagggattgcacaggacttactatggatatttagagaaggaaccaaaggaagatgtaggtgatgtgggggaagaaa

SEQ ID NO: 22616 - DNA, 599 bp, Chicken  19866894235150_1
  misc_feature (1)..(102): n is any nucleotide
nnnnnnnnnnnnnnnnnnnnnnnnnnnnnnnnnnnnnnnnnnnnnnnnnnnnnnnnnnnnnnnnnnnnnnnnnnnnnnnnnnnnnnnnnnnnnnnnnnnnnnatatttataaaagtttaaagttggtatggaactactaacactaaaactttcgggaacttcaaagagatatacatcttagttagtatatagttgcataatatgcagtttgttccttctgaataatatccagagatttacaccagtctattagtgactgaaagtacagaattatgtccaaagtgttaaaaagcaaaaaawaaaggaaaaaggaggaaaaaaggaaaaaggaaaagggaaagaaaaagagatagagggacagagaccaagtaagagacaaagagaaataaatgayggaaactggctttgtttgtaaatgatttgaaaacagcgtttacagataaaaatcaattaaattaggaacagattagaaaatgatggaaactaatgctcagtgtagcagtcaaaatttatgatcatgattatgagcataaaaggatttattaaatgaacgacagaatgaagtaggagtttcttactaaacacataaaaataataaa

SEQ ID NO: 22617 - DNA, 599 bp, Chicken  19866894235150_2
  misc_feature (1)..(8): n is any nucleotide
nnnnnnnnatatttataaaagtttaaagttggtatggaactactaacactaaaactttcgggaacttcaaagagatatacatcttagttagtatatagttgcataatatgcagtttgttccttctgaataatatccagagatttacaccagtctattagtgactgaaagtacagaattatgtccaaagtgttaaaaagcaaaaaawaaaggaaaaaggaggaaaaaaggaaaaaggaaaagggaaagaaaaagagatagagggacagagaccaagtaagagacaaagagaaataaatgayggaaactggctttgtttgtaaatgatttgaaaacagcgtttacagataaaaatcaattaaattaggaacagattagaaaatgatggaaactaatgctcagtgtagcagtcaaaatttatgatcatgattatgagcataaaaggatttattaaatgaacgacagaatgaagtaggagtttcttactaaacacataaaaataataaagctgaaagtttagattagtatgtacgcccatttcttactaagccatatactactaatgagttcatggtactgcagaaagtagatggtttatctt

SEQ ID NO: 22618 - DNA, 600 bp, Chicken  19866894235156_1
tctatatttgctcatgattcagatagaaagactgcaggcttttgtcactaaaataaactaacaaaaaagcatcaccaacaaccagccaagaaaaaaacaacttcctttacccatgttttgcattttagttctgctggacattaatcttgtggcagtgttgagagccacataaaagatacattaacacctttataattcattcaccagctggccctaaagctggcttttatcacttaagtatttgggtatttgtagaagtgtcctttacctgctgcctgggcatcttccgagatggaaagrgattccaggggatggatgttggcatccggcaagtttgtgaaagggaaaggtcttcctttcctctcctttttctcaagatgggcatyaggagcagggagggatttttggtgccaagtagtccagaactgctttagctgcagctgctgcactgcagaattgaagctgggaattatctcctcctcttctccgccccactcctcctcccagcctcatattcagactgctgctgaggttagcagcacaaggctggcgggctgctgtgacggagccttggtgcccagcagcctgggactgcagcgt

SEQ ID NO: 22619 - DNA, 600 bp, Chicken  19866894235156_2
caagaaaaaaacaacttcctttacccatgttttgcattttagttctgctggacattaatcttgtggcagtgttgagagccacataaaagatacattaacacctttataattcattcaccagctggccctaaagctggcttttatcacttaagtatttgggtatttgtagaagtgtcctttacctgctgcctgggcatcttccgagatggaaagrgattccaggggatggatgttggcatccggcaagtttgtgaaagggaaaggtcttcctttcctctcctttttctcaagatgggcatyaggagcagggagggatttttggtgccaagtagtccagaactgctttagctgcagctgctgcactgcagaattgaagctgggaattatctcctcctcttctccgccccactcctcctcccagcctcatattcagactgctgctgaggttagcagcacaaggctggcgggctgctgtgacggagccttggtgcccagcagcctgggactgcagcgtgttccttggagaactgagcttccatggcggccaggacragggagaagcaaggactgcttctacggagagcttgtttttatcttgtg

SEQ ID NO: 22620 - DNA, 600 bp, Chicken  19866894235156_3
gaaagggaaaggtcttcctttcctctcctttttctcaagatgggcatyaggagcagggagggatttttggtgccaagtagtccagaactgctttagctgcagctgctgcactgcagaattgaagctgggaattatctcctcctcttctccgccccactcctcctcccagcctcatattcagactgctgctgaggttagcagcacaaggctggcgggctgctgtgacggagccttggtgcccagcagcctgggactgcagcgtgttccttggagaactgagcttccatggcggccaggacragggagaagcaaggactgcttctacggagagcttgtttttatcttgtgcagagtcatctttgtagtgggatgttgaaatgtgacgcaatgcctgtttgtttgcaatagctgcaaccctcgtagcagaaattcaagtgggaaacagagggggaatccagagacaaaccagcaggagaattagaaaccgtgacgtcgtgtcctccctcctgtgccggagcaagcaaagaaaggagaggtagaggaaaaaagactgagccttgcatccagccgtcaccctgacaatgtgtcagtcaaacgccc

SEQ ID NO: 22621 - DNA, 600 bp, Chicken  19866894235160_1
acatttagttagctgaagtgcaaacgtagcaaaagagaaagtagtatttctattcatgatgacttggaattttctattgtgtgtatgggatatatgcaaaaatattttggatcatttaatatttatttgcctttttagcttcattaatagtatctttataggtaacttagaaactcttagaataaagttcagaaaaaaaaaaacaatattttctggctgcatccttaggtctgtagtaatttttttttttaatacgtgaagtgcttaacttcaaagaatgcctagtagttactcccaaayttaccaaatgtggcttttttatagactacrttttaatacaaatgatttttccttgctctcataacctttcttctgatttttgtagcaaaacagaaggctttgggttggttttcctctgtttcataagtattgtgtgttcatgcatgtaaacactacccctttcttagttgtgcatctttttttagagccactgtttttgacatgagagataatacagtcagtgatgcctttaaataagttgtcattcatatctctatttggttcttccttcatttaataattgtatcccagttgcatgta

SEQ ID NO: 22622 - DNA, 600 bp, Chicken  19866894235160_2
aaaagagaaagtagtatttctattcatgatgacttggaattttctattgtgtgtatgggatatatgcaaaaatattttggatcatttaatatttatttgcctttttagcttcattaatagtatctttataggtaacttagaaactcttagaataaagttcagaaaaaaaaaaacaatattttctggctgcatccttaggtctgtagtaatttttttttttaatacgtgaagtgcttaacttcaaagaatgcctagtagttactcccaaayttaccaaatgtggcttttttatagactacrttttaatacaaatgatttttccttgctctcataacctttcttctgatttttgtagcaaaacagaaggctttgggttggttttcctctgtttcataagtattgtgtgttcatgcatgtaaacactacccctttcttagttgtgcatctttttttagagccactgtttttgacatgagagataatacagtcagtgatgcctttaaataagttgtcattcatatctctatttggttcttccttcatttaataattgtatcccagttgcatgtagcggattacgggcagaaagtaaatttttgc

SEQ ID NO: 22623 - DNA, 599 bp, Chicken  19866894235161_1
  misc_feature (1)..(184): n is any nucleotide
nnnnnnnnnnnnnnnnnnnnnnnnnnnnnnnnnnnnnnnnnnnnnnnnnnnnnnnnnnnnnnnnnnnnnnnnnnnnnnnnnnnnnnnnnnnnnnnnnnnnnnnnnnnnnnnnnnnnnnnnnnnnnnnnnnnnnnnnnnnnnnnnnnnnnnnnnnnnnnnnnnnnnnnnnnnnnnnnnnnnnnnncttcccgtgttctgcatgtgccgtgtttgctcacgttccctgccaaagccacgtgctggggttttggtgcgtcacttggatgacagctcattggttctgagctttgccctctatcyagttctcttccgtcaggagcactgaactttactgctttccttgagtcatcctagggtagctgtgcagcgtgttcaccagctgctagttgactggtctttcctgaatrttgtaacttaacttttctctcatgtttgcatttccttagtcctaggacttgcacrttgacacctgagctacaattaaatgtcagaaggctctggtctctgacaggcagcacagccttggatcagttacagtggtttccaggagcaggcatgtggctgtaataccacactttgcagctggaaaagcccactgt

SEQ ID NO: 22624 - DNA, 599 bp, Chicken  19866894235161_2
  misc_feature (1)..(77): n is any nucleotide
nnnnnnnnnnnnnnnnnnnnnnnnnnnnnnnnnnnnnnnnnnnnnnnnnnnnnnnnnnnnnnnnnnnnnnnnnnnnncttcccgtgttctgcatgtgccgtgtttgctcacgttccctgccaaagccacgtgctggggttttggtgcgtcacttggatgacagctcattggttctgagctttgccctctatcyagttctcttccgtcaggagcactgaactttactgctttccttgagtcatcctagggtagctgtgcagcgtgttcaccagctgctagttgactggtctttcctgaatrttgtaacttaacttttctctcatgtttgcatttccttagtcctaggacttgcacrttgacacctgagctacaattaaatgtcagaaggctctggtctctgacaggcagcacagccttggatcagttacagtggtttccaggagcaggcatgtggctgtaataccacactttgcagctggaaaagcccactgtgttgtgacttctccgggagctgcaggagggccccttgctgtgctcgggaggtgtgtctgatacctgcactttgctcctgaccatcccaggyactgcagagctttgga

SEQ ID NO: 22625 - DNA, 599 bp, Chicken  19866894235161_3
  misc_feature (1)..(22): n is any nucleotide
nnnnnnnnnnnnnnnnnnnnnncttcccgtgttctgcatgtgccgtgtttgctcacgttccctgccaaagccacgtgctggggttttggtgcgtcacttggatgacagctcattggttctgagctttgccctctatcyagttctcttccgtcaggagcactgaactttactgctttccttgagtcatcctagggtagctgtgcagcgtgttcaccagctgctagttgactggtctttcctgaatrttgtaacttaacttttctctcatgtttgcatttccttagtcctaggacttgcacrttgacacctgagctacaattaaatgtcagaaggctctggtctctgacaggcagcacagccttggatcagttacagtggtttccaggagcaggcatgtggctgtaataccacactttgcagctggaaaagcccactgtgttgtgacttctccgggagctgcaggagggccccttgctgtgctcgggaggtgtgtctgatacctgcactttgctcctgaccatcccaggyactgcagagctttggagctgctgacacattctgttgtggatctctgctgacatatgggtgctgttctgtaa

SEQ ID NO: 22626 - DNA, 571 bp, Chicken  19866894235161_4
ctggtctttcctgaatrttgtaacttaacttttctctcatgtttgcatttccttagtcctaggacttgcacrttgacacctgagctacaattaaatgtcagaaggctctggtctctgacaggcagcacagccttggatcagttacagtggtttccaggagcaggcatgtggctgtaataccacactttgcagctggaaaagcccactgtgttgtgacttctccgggagctgcaggagggccccttgctgtgctcgggaggtgtgtctgatacctgcactttgctcctgaccatcccaggyactgcagagctttggagctgctgacacattctgttgtggatctctgctgacatatgggtgctgttctgtaagtcacggaggggaactgctggaaaaaacatacaaatcattcaggtaatttgtgaatgcatatagaacagcaagcaattggatttaaaaaagaaacacacctttttgggttggaaaagctggtatgattgttttgagtgtctattattctatccttattcttttgcaaggagtgcactttattaaaaccctgtcactgact

SEQ ID NO: 22627 - DNA, 600 bp, Chicken  19866894235163_1
tgggctgtgtgttatcatatgcgtgatagaaagaagccctccggaggctgatgggtccatctcagtgcctgaatggagttcattcatcctatctcgtacttcatacatgtctttgacatccttgctacccaaccaattcactcaacatagtccaacgcatcactattgggaagatgtttcttttcctgaatgctaaactgtgtaatcctgttaaaacagtcatcgtttagtgatgatcaaaaagaaagctaatgtttttcttatattccttgtatgagaggaaaggaatcttaccacagrcgtgtggtacctgtatgatgaaatgctttgtttcacttggcgtaagggacactgagctcagcccctttcctgtgaattcctgttcactttgctgtctgttttctagtacagagcaaagaaagccctgcagtacagggtgtgatgtctcacagtacaagagcaaggcaggggtgctgagaagcacatgcctgcttgatgcttctgagatggctgctgcacatctcaacctgcagaatattatgtctgagctgctgagtgtatcggggctgcttcctttgttcttggctagcttattggcac

SEQ ID NO: 22628 - DNA, 599 bp, Chicken  19866894235168_1
  misc_feature (1)..(78): n is any nucleotide
nnnnnnnnnnnnnnnnnnnnnnnnnnnnnnnnnnnnnnnnnnnnnnnnnnnnnnnnnnnnnnnnnnnnnnnnnnnnnnaataccaatttctgctggaattgaattatttatcagatttccagctcctactttttgaaaaccagtagcaacaaccaaccctctatattggctgatttcactgggaaatgctgactcagcagaacccacattttaagggtggttttcctgcagtcaacgtaaggaagtgtttctggggttgtggatgacagagcagagcctgtgcagggaaagagcatctgytgggctgcaaggcagagcctactaggctcgggaagcacagcaaggagttggggggagatgtgcaagtactgtggggggcagagccagtgaggcaacattttcataaaagctacagaaacagtgctgtcacaatgtaaggtacatgtttgtggaaagggcttcatccatctgtcccttatgtgcagaagaggcttgttagctgcccctgtagaatctgccagtgctgttttatgggtttctgagtagtctaacaaattctggggaactagcttatgctgcctaataatacatcacttcta

SEQ ID NO: 22629 - DNA, 600 bp, Chicken  19866894235168_2
gggaactagcttatgctgcctaataatacatcacttctacacacaggctgtttgtcttgttttgccactgatggatgtcactgagaagcactgtctgtgccgtgcatgttgtaatggcttccaagcacagtgtctgaccatgtattacagaaaagtaaccgcagttgatatcctaccctttctcagaaaaaccactgctaaaggtctgtgtagttctttctgatgtctctgagaacttgtgaaggtgaatgtgcaggaggaacttctctgcttgctccgttttggtgaatttttaagtgyagagagactttctactacctgttggtgctgacctggcagaattttaaaaagttagataatttctttgttttggatgatttatacagcagctgttatttaccattcattccacaggacagtttgggtagagtatgctatctaaagccattgccacaatagggactgtacagaggatttaatactcagtgttgcatgagtgataccactgagctcaagacgtgtagagaaatgctccctggagctcctgtcttccatgaaaaaatatttgcagttctctagtaagacacatttgcaggcatt

SEQ ID NO: 22630 - DNA, 599 bp, Chicken  19866894235169_1
  misc_feature (1)..(64): n is any nucleotide
nnnnnnnnnnnnnnnnnnnnnnnnnnnnnnnnnnnnnnnnnnnnnnnnnnnnnnnnnnnnnnnnctttgagactggattgttgcactgcatcttcctaatgttttgctttaagatacaagtttactgatgtcccaatgagacagagtaacacagaaagccctgcatgtaccttgaggttctggcatacacagtgttctcagtcgccgtgtcctggaagaccgctagcatgtcactcctcagctgccactgcagccctttgggactgctgatagcatcattcctgggagagctttgatttkacagttaaggatcagcagttctagggctactttccaagagaagacaaatcctttgaactacatagccaaagacactgcaaaaattcctttagccagaaaacaatcttggatttttattagttcccaaactttgacttatgaaagactatcatacaaaaacaagggaagaaataaacaaattttagtcggcagtacraagtgcaaatgagttccacataagctgcagtagaaaactgcrcccatcatttcagggcagtaaaatctaatgcgaaggaacaaggatggtcagttggtggggt

SEQ ID NO: 22631 - DNA, 600 bp, Chicken  19866894235169_2
ctcagtcgccgtgtcctggaagaccgctagcatgtcactcctcagctgccactgcagccctttgggactgctgatagcatcattcctgggagagctttgatttkacagttaaggatcagcagttctagggctactttccaagagaagacaaatcctttgaactacatagccaaagacactgcaaaaattcctttagccagaaaacaatcttggatttttattagttcccaaactttgacttatgaaagactatcatacaaaaacaagggaagaaataaacaaattttagtcggcagtacraagtgcaaatgagttccacataagctgcagtagaaaactgcrcccatcatttcagggcagtaaaatctaatgcgaaggaacaaggatggtcagttggtggggtaccctgggatcctggccataaaacccacacctctccaccttgggcctaytgtgggagaaaccaggaagacccagacctgcaaggtrccctattctcagactgtttttcagtaggaatgatgaattctcttaactcttgtgtctttgcttcacactggaacatgtaagggggaggctgcttcatgcacctcgtcacac

SEQ ID NO: 22632 - DNA, 569 bp, Chicken  19866894235169_3
cagctgccactgcagccctttgggactgctgatagcatcattcctgggagagctttgatttkacagttaaggatcagcagttctagggctactttccaagagaagacaaatcctttgaactacatagccaaagacactgcaaaaattcctttagccagaaaacaatcttggatttttattagttcccaaactttgacttatgaaagactatcatacaaaaacaagggaagaaataaacaaattttagtcggcagtacraagtgcaaatgagttccacataagctgcagtagaaaactgcrcccatcatttcagggcagtaaaatctaatgcgaaggaacaaggatggtcagttggtggggtaccctgggatcctggccataaaacccacacctctccaccttgggcctaytgtgggagaaaccaggaagacccagacctgcaaggtrccctattctcagactgtttttcagtaggaatgatgaattctcttaactcttgtgtctttgcttcacactggaacatgtaagggggaggctgcttcatgcacctcgtcacacaggtgtagcga

SEQ ID NO: 22633 - DNA, 459 bp, Chicken  19866894235169_4
tcctttgaactacatagccaaagacactgcaaaaattcctttagccagaaaacaatcttggatttttattagttcccaaactttgacttatgaaagactatcatacaaaaacaagggaagaaataaacaaattttagtcggcagtacraagtgcaaatgagttccacataagctgcagtagaaaactgcrcccatcatttcagggcagtaaaatctaatgcgaaggaacaaggatggtcagttggtggggtaccctgggatcctggccataaaacccacacctctccaccttgggcctaytgtgggagaaaccaggaagacccagacctgcaaggtrccctattctcagactgtttttcagtaggaatgatgaattctcttaactcttgtgtctttgcttcacactggaacatgtaagggggaggctgcttcatgcacctcgtcacacaggtgtagcga

SEQ ID NO: 22634 - DNA, 422 bp, Chicken  19866894235169_5
cctttagccagaaaacaatcttggatttttattagttcccaaactttgacttatgaaagactatcatacaaaaacaagggaagaaataaacaaattttagtcggcagtacraagtgcaaatgagttccacataagctgcagtagaaaactgcrcccatcatttcagggcagtaaaatctaatgcgaaggaacaaggatggtcagttggtggggtaccctgggatcctggccataaaacccacacctctccaccttgggcctaytgtgggagaaaccaggaagacccagacctgcaaggtrccctattctcagactgtttttcagtaggaatgatgaattctcttaactcttgtgtctttgcttcacactggaacatgtaagggggaggctgcttcatgcacctcgtcacacaggtgtagcga

SEQ ID NO: 22635 - DNA, 600 bp, Chicken  19866894235176_1
attcttatcagctttctttaaatgcagaatattatcatgaagatgtgttaaatttcattgtaccattgaagaaaaaaccccactttagctagctaagtgaaaataaatagaaagatatgcattatttacaggacaaaatgtgagtaagtaggctacatacagaaatagcagatgaaaaaacagcagataaaaggcttcaggcatacatgctgtatatatactttgctaaaaaccagacataattcaatttttaacaataattgtcgtctacagactgtactttgagaaactggtgacacyggcattctcttcctccagaattaagacwatattttgattaccatcttctttctttatgtaaacgggagaaagagattaacctgcttaattaagagattgctttccatgctggctaagctttttgcttgattttgctagttgctattttcatctgccccagaaaattatcagcagccagcatagtgtgcataattctggcaagcagggttcagccaggcaaactcttctttacactcatgtattaaacacctaagatgatatacaattatcttggctattgtggggttaatttggatcaga

SEQ ID NO: 22636 - DNA, 600 bp, Chicken  19866894235176_2
atattatcatgaagatgtgttaaatttcattgtaccattgaagaaaaaaccccactttagctagctaagtgaaaataaatagaaagatatgcattatttacaggacaaaatgtgagtaagtaggctacatacagaaatagcagatgaaaaaacagcagataaaaggcttcaggcatacatgctgtatatatactttgctaaaaaccagacataattcaatttttaacaataattgtcgtctacagactgtactttgagaaactggtgacacyggcattctcttcctccagaattaagacwatattttgattaccatcttctttctttatgtaaacgggagaaagagattaacctgcttaattaagagattgctttccatgctggctaagctttttgcttgattttgctagttgctattttcatctgccccagaaaattatcagcagccagcatagtgtgcataattctggcaagcagggttcagccaggcaaactcttctttacactcatgtattaaacacctaagatgatatacaattatcttggctattgtggggttaatttggatcagagttacatattttcttgatatggaattaa

SEQ ID NO: 22637 - DNA, 600 bp, Chicken  19866894235176_3
tgctggctaagctttttgcttgattttgctagttgctattttcatctgccccagaaaattatcagcagccagcatagtgtgcataattctggcaagcagggttcagccaggcaaactcttctttacactcatgtattaaacacctaagatgatatacaattatcttggctattgtggggttaatttggatcagagttacatattttcttgatatggaattaatgagttccaaaaatctccttacttgtatttagctttctagagataacccatgattctatcttcttagatgtagagtgyattatgtcattgtcarctgtctcaagttaattaggatggattaaatagggtgtgggaagttaccaacatttctgagatgctgaagagcaggagtcaaggaacaaaaggagagagctgctctgtgcaagggaaatcaagatggaaacaaggatgacaagtctgcacmtggatgaagtgtcctccttgacaaagggacaggcccacagcatgtgacacagaagagcaggggtcaggactggctgctggggtcaaccaagcatttcggtccttgatccacagtaataagacaggaccacttag

SEQ ID NO: 22638 - DNA, 600 bp, Chicken  19866894235176_4
tgcttgattttgctagttgctattttcatctgccccagaaaattatcagcagccagcatagtgtgcataattctggcaagcagggttcagccaggcaaactcttctttacactcatgtattaaacacctaagatgatatacaattatcttggctattgtggggttaatttggatcagagttacatattttcttgatatggaattaatgagttccaaaaatctccttacttgtatttagctttctagagataacccatgattctatcttcttagatgtagagtgyattatgtcattgtcarctgtctcaagttaattaggatggattaaatagggtgtgggaagttaccaacatttctgagatgctgaagagcaggagtcaaggaacaaaaggagagagctgctctgtgcaagggaaatcaagatggaaacaaggatgacaagtctgcacmtggatgaagtgtcctccttgacaaagggacaggcccacagcatgtgacacagaagagcaggggtcaggactggctgctggggtcaaccaagcatttcggtccttgatccacagtaataagacaggaccacttaggccaagaaggcaaatc

SEQ ID NO: 22639 - DNA, 496 bp, Chicken  19866894235176_5
ggctattgtggggttaatttggatcagagttacatattttcttgatatggaattaatgagttccaaaaatctccttacttgtatttagctttctagagataacccatgattctatcttcttagatgtagagtgyattatgtcattgtcarctgtctcaagttaattaggatggattaaatagggtgtgggaagttaccaacatttctgagatgctgaagagcaggagtcaaggaacaaaaggagagagctgctctgtgcaagggaaatcaagatggaaacaaggatgacaagtctgcacmtggatgaagtgtcctccttgacaaagggacaggcccacagcatgtgacacagaagagcaggggtcaggactggctgctggggtcaaccaagcatttcggtccttgatccacagtaataagacaggaccacttaggccaagaaggcaaatcaatgagccacaatcaacaaggggcaaggcaagggcaagtgcctgag

SEQ ID NO: 22640 - DNA, 477 bp, Chicken  19866894235178_1
gctcctgtttttggagattgcacagaggccttctatggctgcattgcactagtgtttctggagctatgactctgtgagtgcaaggaatggctggataaatcctcagaggctgctggtcccccagatccatacccgacatggaaaatgagaacactcccaggggtatctcgtgcctctccccagccatgcagtagctgtggctgccctctgtggtgactggttcttctcccagctcatccactgcctcctccatgtcctgcatcactgtcctcacaagaagagctgctctgaaatcgtgaytcctccttatgtccagggccttctcatgctctgcaatggcacgagckcaagacgtcttccaaggataacaacagctgttgagaggacataagattgaggctgctaaagcaagtaggaagaggaggctggagaggtgagtcacactgagcacacactttgctttggctaatagtaaaa

SEQ ID NO: 22641 - DNA, 430 bp, Chicken  19866894235178_2
actagtgtttctggagctatgactctgtgagtgcaaggaatggctggataaatcctcagaggctgctggtcccccagatccatacccgacatggaaaatgagaacactcccaggggtatctcgtgcctctccccagccatgcagtagctgtggctgccctctgtggtgactggttcttctcccagctcatccactgcctcctccatgtcctgcatcactgtcctcacaagaagagctgctctgaaatcgtgaytcctccttatgtccagggccttctcatgctctgcaatggcacgagckcaagacgtcttccaaggataacaacagctgttgagaggacataagattgaggctgctaaagcaagtaggaagaggaggctggagaggtgagtcacactgagcacacactttgctttggctaatagtaaaa

SEQ ID NO: 22642 - DNA, 600 bp, Chicken  19866894235180_1
tgcttgtctattttctgcagcacgtaatcaaaagtctcgtgcgagactacatgcaacaggattgctcttatattttcttgggagacagccatcattacattgggccaaagctatgagtcagggctgctgtttcctatcccaaagtgaggaatctctgtcaggaagtcctgtgttgtgctagagatcagagcaggtgataatggtctcatctggctttgaaatttatgagaaggagataggacatgtaatggagtcattattttgttttagaccattcttcacatcacaacacttggagaygtaaaagtcgtgtggtagccagatggaaggaggggaagagcttccccattgctagtaagaagatcctgaatagaggcataaaattttgggaaaatgtgtaactaattttatccatatagattactttaaaaagcagggcaggttatgagaatgtaggccccggcttgggaggagatggaaagggggggaagggtcagaatatactggctaaatagaagagaaaaactaagtggttgcaatcccctaaaatctgaatcaactttacttgaagcataaacagagatctccaacatctcaaat

SEQ ID NO: 22643 - DNA, 600 bp, Chicken  19866894235180_2
tttttagtggtttctaaatggagctggaaaagatactttctcccaccaactcctagacttcaaatctaccttattttgaggctttcagaggaaaacatagttttagataattctaaaactatacaaactctgcaaaataatatgttcgtttcattcctaacctaaaattaattttcagttgatattaaatcattgaaactttttcagcaaatcagtactaaagctttgctttatttgatgaggaaatgctgaatactgttgagttgcttaatctagtacaacttaggtggaaatgggatmtgatgagttttcataaagacatggaggcaaacttcaaagagaaaaagaattagttaaagaataatactggcatgagatcaagtgcatgcagtctgattattaatacattcaggctggaaatttagagaaaggtttccatccattcatccaagaagtgatattccggtaacaggagcagagaaactccctggtttaggctgcagttgggtatgctgatgcaaacgattgtatcgcagaattcttagggacagaaaatggggcttgtgatgtggatcagttggtatctgatgtttaggtgtc

SEQ ID NO: 22644 - DNA, 600 bp, Chicken  19866894235183_1
gaagacagagaaaaccagctataaatacttagtttttaatccaagccagcaccttgtgatctgaagccaagtgctacccactcattgtaattgcctgactgaggtcaaaggattatttactggtctaaactggtcccaaaaataactaagagacctaaatgatattcagagatagttccaaaacaacctaaacaaaaccagattgtctgtctcaccaattgttcacaaggagaaaagctatccacaacccaccaaattctctctttttattttcattgttgacaaactgtttttttcacraagacaagggcaggcaaaccaaccaccagatggtgagctcaagcaaacacatttaacagtacctgaaattaaaagtccttgacttctggaaaacagtaaaacaaaatcagtgaaatggacaactgcaaacaagatccacaaaggtgatcactgtgcaagctgagatcagaagaaagtggaaaaggcccaggatagttatttaggcagtgaattttgttataaattacatatgcaaagcaagtcctgaaaataggcagcttttcatgccaggggaactgtgagccggtatataaaatttat

SEQ ID NO: 22645 - DNA, 599 bp, Chicken  19866894235198_1
  misc_feature (1)..(69): n is any nucleotide
nnnnnnnnnnnnnnnnnnnnnnnnnnnnnnnnnnnnnnnnnnnnnnnnnnnnnnnnnnnnnnnnnnnnncagaacaacagctttgacccacaaaggcaagccaaggtctcacacctacaccttgcctctgtgttctaccacagtgacaacatctgttcctacagggcacacagcagaggtcaatacccagacaggaaaaggctccttgctcgcagttagggcacaacgctcctacagagaaggtgccaagcacactcacaccccagaaaggctttgagccgaagcctttattctgggcamtcagagccaggacaggcagaagctccatgatcccatccgctcaatcttcatgactcaaagcctaacatggccaagaactacaatccccaaaatatcttctcactccaaaagccttctctaccagatccgaagagtcacgcttggcttcacacaatgccaactcctctagcaatgccgggagctctcagagctgcactccagatgctctaagagcatccttcctattttgcccatcttggcaaggaagccttaggtttgggcccttcagagctttaccatacaccacttaaaaccatttt

SEQ ID NO: 22646 - DNA, 599 bp, Chicken  19866894235201_1
  misc_feature (1)..(103): n is any nucleotide
nnnnnnnnnnnnnnnnnnnnnnnnnnnnnnnnnnnnnnnnnnnnnnnnnnnnnnnnnnnnnnnnnnnnnnnnnnnnnnnnnnnnnnnnnnnnnnnnnnnnnnngatgggaggtggggtctctcctcctgggcagcccctgccagcctgcccagcacagaagtgtctgtagccccgtttcctcccatggccacgttggctctcgcagtggagatgcggttgcgtaacgtgagggtcaccgctgctgggatgggctagtctgagggagcagggagcagaccctgcagtgactgcccctcatkctgggggccggggctgtcccagagccgtcccctttgttgggctggaggagtccttggggccccgctctcagacgctctcccttctccatcggcagcccatgaagccgctgaaggccacagccactacatcacagcccgtcctcaccctgcagcagattgaaaccattttctacaagatccaggacatctatgaaatccacaaggagttctatgacaacctgtgccccaaggtgcagcagtgggacagcaacatcaccatgggccacctcttccagaagctggtatgcaccttgctcggc

SEQ ID NO: 22647 - DNA, 600 bp, Chicken  19866894235202_1
tattaatatactgtttgataccttgcatttagtttctgctgcttaggctctaggatatatttcttcctattcagcttaacagctatctcataccttgcagcatttggtaaggtcaggcatttcagtttcaggagttagtttttccactccacccaaaggagtggggtatgccctgttgttttcaacaatacatcattgcagtacatttgcaagtggttagctctatggtgatactatatatatactatgatacttcaagtccaaagaagggcaacaaggcttgtgaagggcttggagaaygtgcactatgagaggctgagggaactgggactgttcagtctggggaaaaggargctgaggggagaccttattgctctcttccaatacctgaaaggtgcttacagcgagagcggggttggtctcttctcattggtgacaggatgaggggaaatggcctgaagttgtgccaggataagtttaggctggatgtcaggaaacacttctttacagaaagggttgttaagcactggaatgggctgcccagggaggtggttgagtcaccatccctggatgtgtttaaaaactgtttggatgtggtgc

SEQ ID NO: 22648 - DNA, 600 bp, Chicken  19866894235202_2
gatatatttcttcctattcagcttaacagctatctcataccttgcagcatttggtaaggtcaggcatttcagtttcaggagttagtttttccactccacccaaaggagtggggtatgccctgttgttttcaacaatacatcattgcagtacatttgcaagtggttagctctatggtgatactatatatatactatgatacttcaagtccaaagaagggcaacaaggcttgtgaagggcttggagaaygtgcactatgagaggctgagggaactgggactgttcagtctggggaaaaggargctgaggggagaccttattgctctcttccaatacctgaaaggtgcttacagcgagagcggggttggtctcttctcattggtgacaggatgaggggaaatggcctgaagttgtgccaggataagtttaggctggatgtcaggaaacacttctttacagaaagggttgttaagcactggaatgggctgcccagggaggtggttgagtcaccatccctggatgtgtttaaaaactgtttggatgtggtgctcagggacatggtttagtggagggttgttagttagggtagtatggttaggtca

SEQ ID NO: 22649 - DNA, 600 bp, Chicken  19866894235202_3
cgagagcggggttggtctcttctcattggtgacaggatgaggggaaatggcctgaagttgtgccaggataagtttaggctggatgtcaggaaacacttctttacagaaagggttgttaagcactggaatgggctgcccagggaggtggttgagtcaccatccctggatgtgtttaaaaactgtttggatgtggtgctcagggacatggtttagtggagggttgttagttagggtagtatggttaggtcatggttggacttgatgacctctaaggtcttttccaacctgagtgattccacrattctatgattctgtagcatccgtgcttaccaatataaactgaccagaaatgaccatttttcaaggcaacacttctacccctctctcacatctccctcctttctgtgcaytgactatagcagatgcaaaatctgttgattctcttgaaggaaatctcctataccaatttggttagtctgcttcttattctctgcgtgaacacacaaagattggaaactaaggaagggctaacgagagtttcaccagacttggaggtgaaaacactgtagatgattcagctttgctcagtgctccatttga

SEQ ID NO: 22650 - DNA, 600 bp, Chicken  19866894235202_4
ggttgttaagcactggaatgggctgcccagggaggtggttgagtcaccatccctggatgtgtttaaaaactgtttggatgtggtgctcagggacatggtttagtggagggttgttagttagggtagtatggttaggtcatggttggacttgatgacctctaaggtcttttccaacctgagtgattccacrattctatgattctgtagcatccgtgcttaccaatataaactgaccagaaatgaccatttttcaaggcaacacttctacccctctctcacatctccctcctttctgtgcaytgactatagcagatgcaaaatctgttgattctcttgaaggaaatctcctataccaatttggttagtctgcttcttattctctgcgtgaacacacaaagattggaaactaaggaagggctaacgagagtttcaccagacttggaggtgaaaacactgtagatgattcagctttgctcagtgctccatttgacagacaagcctcttacagaggggtacagagaagatgcttccaagtgaagtttcagctagaagtaacaaaaggaaaaagtagaactgactaaatgacgtaggagttacctc

SEQ ID NO: 22651 - DNA, 558 bp, Chicken  19866894235210_1
tagtgctgttttgagatgaaagtctcctactctcactccactgagacagatgtagggaaattcactgtgatcagagccagatcggtacttactctcccaaaacaatgtacacaagagctctgagattaaggtaactcttaaaatatgtattatacttttatgtgctattggattttagcagtaaactgaataccttaaagctataatttttactggggcagtctctttaatgctggcattaaggcaaggctgtacagaaaaacaaagctgctgttttatgcttagcagttatttgtccayggtcttaagctgaggaaattattctcctgatgtgctgggtaggatgctgagatgagccctattctccatctgcatgaagtgactcctagaagacaatgttcagtgatggatgagtagctggacttcagtgtaaaaaaaaaataaaaataaaaataaaattacctgagtaatggcgcctttggcagctctgagtttctcctatatactattttttttgttttaactgcagcttccctgctaggaataagatggtgacat

SEQ ID NO: 22652 - DNA, 600 bp, Chicken  19866894235211_1
gaccccaatgaccatactaaacccaataagaacccaatggtccccataatggtccccataaggtccccataagggccacctcaattggaacacccaatggagacctccaaccccaccgagaccacctcgacggagaacccaagaagagctgattgttttggggctgttttgggtgtttttggaacgggggctttgtgtggggaaaggaaggggagagggccgttctgttcacctggaggtggtttgtccccaaatctccaaagtgagagcagataaatggggatgaacgatgctcccggsgggtggcagtggggcrgggacattctccatgcctggtggcatcacggtgacctcagtggccctggatggcatcatcagcatggggagaacatcccggtcggtggcaccgggatggggacagcagcacaggacagggacagccacagccagagagcatccccggcaatggggaacctgtggtgctgtgggctgctggtggtggtggcggtgacagcagtggtgcagccccgggatgggcagagttaaggccactctcattccttccacccgaattcctgagctgccttggatgcgtccctg

SEQ ID NO: 22653 - DNA, 600 bp, Chicken  19866894235211_2
ctaaacccaataagaacccaatggtccccataatggtccccataaggtccccataagggccacctcaattggaacacccaatggagacctccaaccccaccgagaccacctcgacggagaacccaagaagagctgattgttttggggctgttttgggtgtttttggaacgggggctttgtgtggggaaaggaaggggagagggccgttctgttcacctggaggtggtttgtccccaaatctccaaagtgagagcagataaatggggatgaacgatgctcccggsgggtggcagtggggcrgggacattctccatgcctggtggcatcacggtgacctcagtggccctggatggcatcatcagcatggggagaacatcccggtcggtggcaccgggatggggacagcagcacaggacagggacagccacagccagagagcatccccggcaatggggaacctgtggtgctgtgggctgctggtggtggtggcggtgacagcagtggtgcagccccgggatgggcagagttaaggccactctcattccttccacccgaattcctgagctgccttggatgcgtccctgcagccctgattgcctt

SEQ ID NO: 22654 - DNA, 600 bp, Chicken  19866894235213_1
attaatcttttttttatatatatgtattctagtttttcagtttctcctccactagagggttttccatgatttgttatttttaccatgcacattcacttacaccttcactgtaacattactcattaatttgttcaaaatgactaggatagattttcttgttagagcatggcattatttaagacagtgtactctagcagatcgtgttctagtatattttgtttctagaattctgccattttctcacctttgaggttcattttcttctatcttgtgagtatctagacccaaaattgcctgttkagggggttgtttgaaatattttctgaagtccaaataaattagtcacatatccttcactgactgataagctgaaacactacaagctttattgctctttataatgccacatgatattaaaataaatatataactttaattccagatgttttcaggcttcctgttcatasaatcatagaatcgctaaggttggaaaagacccacaggatcatccagtccaaccattcgttcgcccttcaccaatggttcttgctaaaccatgtccctcaacacaacatccaaatgctctttgaacaccttcag

SEQ ID NO: 22655 - DNA, 600 bp, Chicken  19866894235213_2
ggcattatttaagacagtgtactctagcagatcgtgttctagtatattttgtttctagaattctgccattttctcacctttgaggttcattttcttctatcttgtgagtatctagacccaaaattgcctgttkagggggttgtttgaaatattttctgaagtccaaataaattagtcacatatccttcactgactgataagctgaaacactacaagctttattgctctttataatgccacatgatattaaaataaatatataactttaattccagatgttttcaggcttcctgttcatasaatcatagaatcgctaaggttggaaaagacccacaggatcatccagtccaaccattcgttcgcccttcaccaatggttcttgctaaaccatgtccctcaacacaacatccaaatgctctttgaacaccttcagggtcgatgactccaccaaatggactctctgggcagcccattccagtgcctgaccaccctttcagagaagtagtatttcctaacatccagcctgaaccttccctggtgcagcttgaagccattccctctagtcctatcactagtcacacgagagaagaggctgacccc

SEQ ID NO: 22656 - DNA, 600 bp, Chicken  19866894235216_1
tcaaaactgatgtctttattactttaaagacattctcattgctagtctgacagacccttgaaaattcagggagatatgaacaattcttactcagaatacaagttctggatccctattttttatgatcaaataatcaggtcatattacctgggaaatttagatgaatcagacgagccatttactcccatgtgcttaaatcaatttacatttctatactctgcacttaagaatgaatcctcatcagcctgtgaaagaattattatttcatttgataggtgttccatagcttccacgctttcwcagactggtggccgacctaccaawgtgctgaaaaagaaacagctggaaaagaactggagcttcaggcactcagtcccatatttctcccttagtgtacaagcaccgatcaaccagttgtcagaagtaccaaactatctgatttgcattgaatttaacagcagttataagcctaagcatcttggatgattttttttaattgtctgctgattatacacagatgtcctgcatcatacttggaaacactgaacacatatttacatcttctagttcaactactgagatgagaatgagaaatggtaa

SEQ ID NO: 22657 - DNA, 581 bp, Chicken  19866894235216_2
taaagacattctcattgctagtctgacagacccttgaaaattcagggagatatgaacaattcttactcagaatacaagttctggatccctattttttatgatcaaataatcaggtcatattacctgggaaatttagatgaatcagacgagccatttactcccatgtgcttaaatcaatttacatttctatactctgcacttaagaatgaatcctcatcagcctgtgaaagaattattatttcatttgataggtgttccatagcttccacgctttcwcagactggtggccgacctaccaawgtgctgaaaaagaaacagctggaaaagaactggagcttcaggcactcagtcccatatttctcccttagtgtacaagcaccgatcaaccagttgtcagaagtaccaaactatctgatttgcattgaatttaacagcagttataagcctaagcatcttggatgattttttttaattgtctgctgattatacacagatgtcctgcatcatacttggaaacactgaacacatatttacatcttctagttcaactactgagatgagaatgagaaatggtaacagca

SEQ ID NO: 22658 - DNA, 600 bp, Chicken  19866894235218_1
tggccatcagcttttggtatgaagatgctcaaataagatgttaagtacacgtaataggaaacctgtgtgttgaaaaacgtggaattgtttagtcaactctttttatggatcattctgctcctttaaaagcataataatgattcatggaaggtgggagaagaccttgccagagctccatgtagcatttggcatttttcccaagctaaaagtttctttttgtggtttgctatgtataataaacacttaattagtatgatttggggactgataagatgaatggtgaggaacaagcggtagcaraactatatataaactgtttcaaaaaagaaaagagagaaaaagtttctctagtgacaggcagtctcccctccatttatatgaaattaacttctttcatagcatgaatccaaatrtattgatcctgttagaggtcacccataaaattcacagctttttggaaacatgcaaaatttagaatgtaaaacacctgttgcatgcagtgctgatgaatgattaatatttgatatcttagkctcttttggttatctaatcaatggtttctaatcaatgagaaacactttgattttgtaacttggatag

SEQ ID NO: 22659 - DNA, 600 bp, Chicken  19866894235218_2
tctgctcctttaaaagcataataatgattcatggaaggtgggagaagaccttgccagagctccatgtagcatttggcatttttcccaagctaaaagtttctttttgtggtttgctatgtataataaacacttaattagtatgatttggggactgataagatgaatggtgaggaacaagcggtagcaraactatatataaactgtttcaaaaaagaaaagagagaaaaagtttctctagtgacaggcagtctcccctccatttatatgaaattaacttctttcatagcatgaatccaaatrtattgatcctgttagaggtcacccataaaattcacagctttttggaaacatgcaaaatttagaatgtaaaacacctgttgcatgcagtgctgatgaatgattaatatttgatatcttagkctcttttggttatctaatcaatggtttctaatcaatgagaaacactttgattttgtaacttggataggcttggaagcctatcattaaccagtgactgtcttttgccaaatgaggacaacaaaaatatatatgaatctgtgttgttgctgttgttgttctaaacagaaacaacaaaaagaa

SEQ ID NO: 22660 - DNA, 600 bp, Chicken  19866894235218_3
taataaacacttaattagtatgatttggggactgataagatgaatggtgaggaacaagcggtagcaraactatatataaactgtttcaaaaaagaaaagagagaaaaagtttctctagtgacaggcagtctcccctccatttatatgaaattaacttctttcatagcatgaatccaaatrtattgatcctgttagaggtcacccataaaattcacagctttttggaaacatgcaaaatttagaatgtaaaacacctgttgcatgcagtgctgatgaatgattaatatttgatatcttagkctcttttggttatctaatcaatggtttctaatcaatgagaaacactttgattttgtaacttggataggcttggaagcctatcattaaccagtgactgtcttttgccaaatgaggacaacaaaaatatatatgaatctgtgttgttgctgttgttgttctaaacagaaacaacaaaaagaagactacaacttggaaacacattagttaggtgtagaaaagaggctgtttaaggcatgtggaggatgaattagctttcagaaggaatatgctgacaggcgcacactgggcggatgggcaaag

SEQ ID NO: 22661 - DNA, 600 bp, Chicken  19866894235219_1
cacaaggaataaaaataatcataaagtaatcaatatatgaaagactaacactaattagggcatgcagtgatcttacatgttcttatatcatattttgtttagttaatctgaatgtcactgcaaattcaactgctgaactatctcctgctgctttcacaccaaccgtgatgttttgcccatggtacatagtggtaaattatgccccttaactgcacagatgatagtcatcctaacaaatcccaaatagtttaaagacatttatattgtttacagtaaaaagaaaagtgatgtgggagtaaraaaggacacattacagagtcccagcaagcaacagaaatctccctcccatcgacaattctccccatggcacacagatcttcacaggagatttcgcactaaacaaatagtcagtgaagcatttgaggctctaagtgacaaaacctgaaaaacacaagcaatatatcatccacagcaatagcagaaaagtccttaagttcatcaaragtgcagtactagaagacaatacctagcacgctattcatgctcttctacacttggataaaggacaaacagaagtgtcgttcgtaagstgatttatct

SEQ ID NO: 22662 - DNA, 600 bp, Chicken  19866894235219_2
ccttaactgcacagatgatagtcatcctaacaaatcccaaatagtttaaagacatttatattgtttacagtaaaaagaaaagtgatgtgggagtaaraaaggacacattacagagtcccagcaagcaacagaaatctccctcccatcgacaattctccccatggcacacagatcttcacaggagatttcgcactaaacaaatagtcagtgaagcatttgaggctctaagtgacaaaacctgaaaaacacaagcaatatatcatccacagcaatagcagaaaagtccttaagttcatcaaragtgcagtactagaagacaatacctagcacgctattcatgctcttctacacttggataaaggacaaacagaagtgtcgttcgtaagstgatttatctacatttggacaaatttcatttgaaattgactaaggctacattttcaaatcaagtactcaaaatcccttgcatcacaaggattgtgcacagcatcctcaacacgttcaaaatatcactgagtgcctacaacaggagtcctgaacttgtaaagtgagggagacgcctgaaataaaacctccaacccttctgccggcagtgacttc

SEQ ID NO: 22663 - DNA, 597 bp, Chicken  19866894235219_3
tgggagtaaraaaggacacattacagagtcccagcaagcaacagaaatctccctcccatcgacaattctccccatggcacacagatcttcacaggagatttcgcactaaacaaatagtcagtgaagcatttgaggctctaagtgacaaaacctgaaaaacacaagcaatatatcatccacagcaatagcagaaaagtccttaagttcatcaaragtgcagtactagaagacaatacctagcacgctattcatgctcttctacacttggataaaggacaaacagaagtgtcgttcgtaagstgatttatctacatttggacaaatttcatttgaaattgactaaggctacattttcaaatcaagtactcaaaatcccttgcatcacaaggattgtgcacagcatcctcaacacgttcaaaatatcactgagtgcctacaacaggagtcctgaacttgtaaagtgagggagacgcctgaaataaaacctccaacccttctgccggcagtgacttcagctcagtagagtggctcaggtaaagcattagaagacagtaataccagcccctcagtaggagtaacaaattatctctgcagcag

SEQ ID NO: 22664 - DNA, 600 bp, Chicken  19866894235224_1
ctgtgcttcaaagatcaggtaggatttgtggagagatgtagaggcattaagtagtataacggaacaccctctgcccatttaatagaataatgtataaagtatgtcccaagatccattttccaggacagtatttattatcccgtttctcattctttcaagggagagaaaaagaaacaggaatgtgttggatcatactgaaatgatgaaatgaataaagtgtttattttaaaacgctggcagacaagctcaaaatattctcctctttggagaatgcaacttagggtggatataaactcatgytgctctaatttaggatttctgttaagtgaatacaaatattgggccttaaaaatgcagaaggttcctcctgaaatattttgaacctctccacttgattgagtgtcttgtcaaacaaaactggcagcagatctcttggaactgcctaaatctatgcagatgcgatttctatcatgcccttattatgtgtagtccataataaggatgagcacgtataaatcatttctggctggcacttaggatgcaatgctcaaaggagaaagacatttctgtcttcaaatgtctagcaatttctgatattat

SEQ ID NO: 22665 - DNA, 600 bp, Chicken  19866894235226_1
cactgaaatatttcggactggggattttgttgatggttggattgaaggggtttagaagcgaggtctcgaccctgtgcatttccgtacttttcttggcagatgcccatgctggctgcgttgcagattagatcccttcctaatggcaacgtttcctttaatttagaacgttaatgctgcagctgccaacagcacttgtgccagatcagagaaagtactctgccagacaggaaagattctgatgtttttattttctttgctccattcatataaaattgtcagtacaggaaaatgataccggtytggrtggtcttaaaatggcctgaaatattggctgcaaggctgcgaaacctaaaatataatctgtatctttccaactttgaccttttctcaagaatctatccggaggtagggtagaagacaaatgattactaactgcttatgtattgtgaatacgcaagggattttttccttcctagtgsatgcagttttctcctaactgcttaagctggagaaactggaagataatttaatgaactgttgaggagtggtgcatttgatgttcacgggtcatttcttcagaatgttttacaaaaactgaaa

SEQ ID NO: 22666 - DNA, 600 bp, Chicken  19866894235226_2
gaaatatttcggactggggattttgttgatggttggattgaaggggtttagaagcgaggtctcgaccctgtgcatttccgtacttttcttggcagatgcccatgctggctgcgttgcagattagatcccttcctaatggcaacgtttcctttaatttagaacgttaatgctgcagctgccaacagcacttgtgccagatcagagaaagtactctgccagacaggaaagattctgatgtttttattttctttgctccattcatataaaattgtcagtacaggaaaatgataccggtytggrtggtcttaaaatggcctgaaatattggctgcaaggctgcgaaacctaaaatataatctgtatctttccaactttgaccttttctcaagaatctatccggaggtagggtagaagacaaatgattactaactgcttatgtattgtgaatacgcaagggattttttccttcctagtgsatgcagttttctcctaactgcttaagctggagaaactggaagataatttaatgaactgttgaggagtggtgcatttgatgttcacgggtcatttcttcagaatgttttacaaaaactgaaactct

SEQ ID NO: 22667 - DNA, 598 bp, Chicken  19866894235226_3
ctgccaacagcacttgtgccagatcagagaaagtactctgccagacaggaaagattctgatgtttttattttctttgctccattcatataaaattgtcagtacaggaaaatgataccggtytggrtggtcttaaaatggcctgaaatattggctgcaaggctgcgaaacctaaaatataatctgtatctttccaactttgaccttttctcaagaatctatccggaggtagggtagaagacaaatgattactaactgcttatgtattgtgaatacgcaagggattttttccttcctagtgsatgcagttttctcctaactgcttaagctggagaaactggaagataatttaatgaactgttgaggagtggtgcatttgatgttcacgggtcatttcttcagaatgttttacaaaaactgaaactctgagtttacccatggctgagctttacccaaatcctctctcttttcaaaaggaggactatcgctgcacgttaatcatttaccacttgaatcccacatgcttttctgcttccctgccttagcacatgtgatctcccaacacgtgcactggctgcttggctgggctgggaactggaa

SEQ ID NO: 22668 - DNA, 600 bp, Chicken  19866894235229_1
gtttgcccgagtgcattactgcagaattttgtcttgctcttacgatcttttttttttttgagcaaagaagtgttttttaaatactggttgtgattgtgttgtaagaaacaagtgtaaaaaagtgatggaaatacctctgcgtagtacttctggcttttgggctcgcagcatttccaacaggaacaaaagctccaccaaaggctttccttgccatttctgcatgatgctgagcagcaatggtctgtggctctggtcaggataccagcaactgggggtcttaatctgtcattaattaaatgrttaatagcaaagtggaaagaaatgctgactatctgctggtagcagtcagtactgacttgcctccctccttatcttgtgttgtgtttgctaatttcctatacaagatttttctcagatgaaagaatctggaacttcatatttaatatcttacgttctctttgtcttgagagatgtttttttcccaaaatgcaaatatctaaaatttgttgaagagcaagacttttagctcaagatatgacacagtgatgctgtagtgcctttcagcagcgatgcttgtacattcctgagaactagacccag

SEQ ID NO: 22669 - DNA, 599 bp, Chicken  19866894235234_1
  misc_feature (1)..(235): n is any nucleotide
nnnnnnnnnnnnnnnnnnnnnnnnnnnnnnnnnnnnnnnnnnnnnnnnnnnnnnnnnnnnnnnnnnnnnnnnnnnnnnnnnnnnnnnnnnnnnnnnnnnnnnnnnnnnnnnnnnnnnnnnnnnnnnnnnnnnnnnnnnnnnnnnnnnnnnnnnnnnnnnnnnnnnnnnnnnnnnnnnnnnnnnnnnnnnnnnnnnnnnnnnnnnnnnnnnnnnnnnnnnnnnnnnnnnnnnnnnntaaaaaaaaaatcctgagcagtggttgtaattttagagaaaaagagtggaacaaagagaggaatygttttctatcatggtatatcctatggtgttgaaggggtttttgctggagcttgggcatcagcttgcttcgttcatcctctgtagtctggttcaagggttgttgacattctatctaatactgtttcaaactctagtcttccagtagaggtgttatgatccattaactttttggtggttgttggatttctgttgttagagccttgtcttgtttcagatgtatgtgtaggctgtggaaacacacccgaaggtctccttttgtgctctcacctgaggctatattgaattatttctgtaacaat

SEQ ID NO: 22670 - DNA, 600 bp, Chicken  19866894235240_1
tttaagttcctttcttgtttagaaagatcttgtttgcttcagatcaacctgacagtttaaatataaatctgctcactgatgctataatctgagtctttaatcatgtcctttgaagcagaacttacacactgagcactcttagttatatctccattacttcttacagcttaatttaaactcatagcttatacagcaatatggaagttttaaaatatgaaatttacatcctcgggtaatccactaaaaagtatatttacagtgatagcaacacagaaggggattacaaatagctttcctttyctaactgctgctgcaggcagcaaaacaatggaattaaatttggttttatgtrcagtctgatcagttgattccaggattactgactctctctggctcctatggctatgaatatataaacctgatcagtcctgcagtgctgcatttgtgctcctgacattgaattagctcagggcacgcttgatgaggtgggaagaaaatggctgaaagggaaggaattaggaattaagggaaggatagtgaacaaactgggttgactgggattggtacaattgtattggaatcaaaaagactctagttgat

SEQ ID NO: 22671 - DNA, 600 bp, Chicken  19866894235240_2
cagtttaaatataaatctgctcactgatgctataatctgagtctttaatcatgtcctttgaagcagaacttacacactgagcactcttagttatatctccattacttcttacagcttaatttaaactcatagcttatacagcaatatggaagttttaaaatatgaaatttacatcctcgggtaatccactaaaaagtatatttacagtgatagcaacacagaaggggattacaaatagctttcctttyctaactgctgctgcaggcagcaaaacaatggaattaaatttggttttatgtrcagtctgatcagttgattccaggattactgactctctctggctcctatggctatgaatatataaacctgatcagtcctgcagtgctgcatttgtgctcctgacattgaattagctcagggcacgcttgatgaggtgggaagaaaatggctgaaagggaaggaattaggaattaagggaaggatagtgaacaaactgggttgactgggattggtacaattgtattggaatcaaaaagactctagttgatgaatcaattcaaaatttggctataatattaagttctaaggaaaatattttca

SEQ ID NO: 22672 - DNA, 600 bp, Chicken  19866894235241_1
caaactcattaagatgcgtgtgctatgtattagagaaaacatgtttcatataaataaatatcccttatgacaatggaaagaaaaatgttttccacatcttcattatttcagcagatgtttcaagactcttgtaattgctctgtacttctaacacttcagcctatttctgacctggtattttatttcagcgttggattctagagcaaggggacccccagctgagttttacactacctgtggagtaagctgctactgccaccttggggaggattcttttcacgtacttcaaggaggctaagsaaatgtcatataaaacagtttgattttttccatcacacctttctgggaagatgacttcttaaaatcttttgtccatactgacataagacattccagatgcattctgtcacaggttatgctgcactaatagtaatggaaagawgctgcatgtttttggtggggaagaacgcttaggtaacttttagataacatttaatcactgccttgcttacagtgctcttaatttcatggcaattttgccagcgtaagagccctgatctacctaaagctaaacaaactgtattttacatacgagactcc

SEQ ID NO: 22673 - DNA, 600 bp, Chicken  19866894235241_2
tacttctaacacttcagcctatttctgacctggtattttatttcagcgttggattctagagcaaggggacccccagctgagttttacactacctgtggagtaagctgctactgccaccttggggaggattcttttcacgtacttcaaggaggctaagsaaatgtcatataaaacagtttgattttttccatcacacctttctgggaagatgacttcttaaaatcttttgtccatactgacataagacattccagatgcattctgtcacaggttatgctgcactaatagtaatggaaagawgctgcatgtttttggtggggaagaacgcttaggtaacttttagataacatttaatcactgccttgcttacagtgctcttaatttcatggcaattttgccagcgtaagagccctgatctacctaaagctaaacaaactgtattttacatacgagactccacttcttctgtaattctagctttcctggtattttgaatccttgctcatgcacagcttaaactgccccacaggcaggctactatgtggctgctaggatgatgtacactgtctcagctctaatgagaggcattactagacataa

SEQ ID NO: 22674 - DNA, 599 bp, Chicken  19866894235246_1
  misc_feature (1)..(177): n is any nucleotide
nnnnnnnnnnnnnnnnnnnnnnnnnnnnnnnnnnnnnnnnnnnnnnnnnnnnnnnnnnnnnnnnnnnnnnnnnnnnnnnnnnnnnnnnnnnnnnnnnnnnnnnnnnnnnnnnnnnnnnnnnnnnnnnnnnnnnnnnnnnnnnnnnnnnnnnnnnnnnnnnnnnnnnnnnnnnnnnnncagtcaggttgaaccttcccaccagtattcctttacattctgttgccacgtgacagatggcaacagaggggcagcctgacaagatagcatctgacatggaagtgcatataaagcaaaggtacrggatggaactcctttgttcagaaaaagtcacctactgatttttcacygatgcttgctaaacagtgatggagacccaacagtggatacgagcacaatgaggcagtggctatggtgacagggggttatctccattggcgcagataatattcggtgaggcacgcagggtctcattcattgctggtgaaaatgcatagctaatggtgactgtgctgaaaaagaatgttttgtagctgagaatttgctctatcaaatagtgtcgtgctctttgcgtctgttgtagtttccaagaaaacaaatag

SEQ ID NO: 22675 - DNA, 599 bp, Chicken  19866894235246_2
  misc_feature (1)..(130): n is any nucleotide
nnnnnnnnnnnnnnnnnnnnnnnnnnnnnnnnnnnnnnnnnnnnnnnnnnnnnnnnnnnnnnnnnnnnnnnnnnnnnnnnnnnnnnnnnnnnnnnnnnnnnnnnnnnnnnnnnnnnnnnnnnnnnnnnnncagtcaggttgaaccttcccaccagtattcctttacattctgttgccacgtgacagatggcaacagaggggcagcctgacaagatagcatctgacatggaagtgcatataaagcaaaggtacrggatggaactcctttgttcagaaaaagtcacctactgatttttcacygatgcttgctaaacagtgatggagacccaacagtggatacgagcacaatgaggcagtggctatggtgacagggggttatctccattggcgcagataatattcggtgaggcacgcagggtctcattcattgctggtgaaaatgcatagctaatggtgactgtgctgaaaaagaatgttttgtagctgagaatttgctctatcaaatagtgtcgtgctctttgcgtctgttgtagtttccaagaaaacaaatagatgttacttttggagcaatgtatagtattgttactttttggcaaaga

SEQ ID NO: 22676 - DNA, 600 bp, Chicken  19866894235248_1
tttgctggccttctgactgtggaaagaggaactttagtcaaaggttaaaactgtgaaatacccaatattcatttttcaggaattaaggcatttaggaatcttattctattgtctgtgcctacgtctagctaataagctttagctggttttctatattgtacttttgtaattgggtatctgagccttttgccctctagtccttcatgaagttgagtatccctgcaagcactactgcctgtggttatcagtgagcctgtgttaagccactctgttcccctgctgagccatctttccagaccragctccctgtgcaccagcgtgcagttagacaagctggaggtgtgaagatcaagtataggataacgggtggggcacaaacaggacttcatgatctgcattacttgccacagaccttattgaggaaaccccagatggctggctaaaatgggagcccacggtgaaaggtgcagtacagagattacaaaagtgcttagagcttctcaaaggcaagatagtgtaggaatgccaagcattggctgtttttaatagctgcatactgctgagatccctgcactgctttctctgaatgtttaatgattt

SEQ ID NO: 22677 - DNA, 600 bp, Chicken  19866894235252_1
aggcctgaggagctgggtagatggcaaactctagtttagacttctttccgtattccacagagaggcgctccatcaacaaagaggtaaatccagagccggtgccccctccaaagctgtggaagatgaggaatccctgcagtccggaacaggaatcagcctgaaagccaacaggaaaagggaaagagtaagtgaccatatcttcaaattgcactcagatagaaatagcaacccccacagccaatgcacagcaaagacataagcagtttttccaggaaaaactcccatcacctgtaaatctcmggctrgagtatcactaaaataatactggtgggttttttttcctgatagtttaagaatggtacatcagtatttgacattttccacttaagtcttcactcatttgaaacctaaggtaggacatcaaagaactgtgttgctctgttctgagcccataacagtagtaaaagcaaaattagagccactctcaaaattatgcattacatgtttctttcacttcccatccatcagtggacttgcttccaatgtgatattgcataccagtttgcggatgcgatctgagaccatgtcaactttgtcttt

SEQ ID NO: 22678 - DNA, 600 bp, Chicken  19866894235252_2
tgaggagctgggtagatggcaaactctagtttagacttctttccgtattccacagagaggcgctccatcaacaaagaggtaaatccagagccggtgccccctccaaagctgtggaagatgaggaatccctgcagtccggaacaggaatcagcctgaaagccaacaggaaaagggaaagagtaagtgaccatatcttcaaattgcactcagatagaaatagcaacccccacagccaatgcacagcaaagacataagcagtttttccaggaaaaactcccatcacctgtaaatctcmggctrgagtatcactaaaataatactggtgggttttttttcctgatagtttaagaatggtacatcagtatttgacattttccacttaagtcttcactcatttgaaacctaaggtaggacatcaaagaactgtgttgctctgttctgagcccataacagtagtaaaagcaaaattagagccactctcaaaattatgcattacatgtttctttcacttcccatccatcagtggacttgcttccaatgtgatattgcataccagtttgcggatgcgatctgagaccatgtcaactttgtctttgccaa

SEQ ID NO: 22679 - DNA, 600 bp, Chicken  19866894235255_1
taatgaactttccatgccaagcatgcctacatccatcactagaaatggaaatcaccagaaatcactgtctgcttatgcaggcactaagactagaaacaagcatgaaaggagcacggaaatgtctcactgctttctctctctgcagcaagtctgggcaaaggagtgtttggtgcacaagacatcaagacttggtgattcaccagtcagtcttactgctgctctcagcaaggcttttaacgccagctgagacaaacgttccaggctgagatctttgccagcctcggtattttgctgctcacygtgcttctacaaggcttttatgggcagtgattcattacctgtaatacagccagggaaccaattcagacaatacatctcaacraggtaattacaaagccattccatttctcaaggaaaaatacaactcccttccatgttttcatgacagtgagaactggggagtggtgactgtgcagcagcttatcagataatgctgtgtaaagtaaatcagttatctctgaaaaaccacacaagaaggacaccaacagccctggatgttctctaattccctgagcatatattggctgcaaacatgctctg

SEQ ID NO: 22680 - DNA, 600 bp, Chicken  19866894235255_2
actaagactagaaacaagcatgaaaggagcacggaaatgtctcactgctttctctctctgcagcaagtctgggcaaaggagtgtttggtgcacaagacatcaagacttggtgattcaccagtcagtcttactgctgctctcagcaaggcttttaacgccagctgagacaaacgttccaggctgagatctttgccagcctcggtattttgctgctcacygtgcttctacaaggcttttatgggcagtgattcattacctgtaatacagccagggaaccaattcagacaatacatctcaacraggtaattacaaagccattccatttctcaaggaaaaatacaactcccttccatgttttcatgacagtgagaactggggagtggtgactgtgcagcagcttatcagataatgctgtgtaaagtaaatcagttatctctgaaaaaccacacaagaaggacaccaacagccctggatgttctctaattccctgagcatatattggctgcaaacatgctctggtctccctagaaagttaccacagctgtgttccccttgctttaaactgccatcgttcagtccaaagactgaagatgaaggaac

SEQ ID NO: 22681 - DNA, 600 bp, Chicken  19866894235256_1
cacattaattatttaaaatttaatcattttgtcctaagaatcctacatgcaggactttgtcattgaggtacctgaatctattcaaggactccttatttggacttattgaaatatatgatatgcagattgtgctacaactcttttaattgattcagagcactttcctaaatgtcagctgcttcataccaggggaaatactgtaataataattatagttgtggaacacatccctctgaacagagactgtatttaatatttactggagagtagcagtacatactccattccaagaagaagccrtgactttttttcagggaaacagtacttctgacaattatagtaaggttatgtttatggagcttacacatttttatagtatacatgcttttatattcactgctaataataattattgagctatgctattaatattgtatcacttatttgaagaatcctgattgatacagtaaaaaaaatactggaaattatgctttcattgtgtgaatttttgtggttattataaacatttatccattcaacaggtacaaaagcatgctatggatttgtttagaaatcacttttacatatgttagctgtgac

SEQ ID NO: 22682 - DNA, 600 bp, Chicken  19866894235259_1
atgcttttaagtaccctgaatgctttatgtgccagccttttattgtactttatcactgggaggtcacagtcttgttcatctaattattttctgctgataattactgttagtattttatgcttactgttttatgctaccacatagggatagagtcctatggtgctaagcacaatgcagagcataataataaggagaaaatggtgcctacatgaaaaatttacaaatgtagtgtgaggcacagtgcatcattttattaggaaggtggagcatgtggcctttcggtgatgatcacatttaacrggcaagatgcagcctccaactcccagctctgaagcgagagcaaacatttacacctttaacaagagtacatagacarcagcaaacactggagcaccatttactatttcactcaaaatgaaarcatggttgtcaatttaaaattctgaggaaattaaaaaaaaaaaatgctgtaaaaaacaggagggttgtttaaggtctggttttaagtactacctgctttctttcctttcacaagatgaccatatatatcagatttatctggaaaggaaggctcatggtagtctgcgcagtacattgctc

SEQ ID NO: 22683 - DNA, 600 bp, Chicken  19866894235259_2
catctaattattttctgctgataattactgttagtattttatgcttactgttttatgctaccacatagggatagagtcctatggtgctaagcacaatgcagagcataataataaggagaaaatggtgcctacatgaaaaatttacaaatgtagtgtgaggcacagtgcatcattttattaggaaggtggagcatgtggcctttcggtgatgatcacatttaacrggcaagatgcagcctccaactcccagctctgaagcgagagcaaacatttacacctttaacaagagtacatagacarcagcaaacactggagcaccatttactatttcactcaaaatgaaarcatggttgtcaatttaaaattctgaggaaattaaaaaaaaaaaatgctgtaaaaaacaggagggttgtttaaggtctggttttaagtactacctgctttctttcctttcacaagatgaccatatatatcagatttatctggaaaggaaggctcatggtagtctgcgcagtacattgctcctaccaaaaaaaatggaacatgataaatacaaagagttagcaaatgcaaaggtgaaatcggtgagatatctttcaa

SEQ ID NO: 22684 - DNA, 600 bp, Chicken  19866894235259_3
tactgttttatgctaccacatagggatagagtcctatggtgctaagcacaatgcagagcataataataaggagaaaatggtgcctacatgaaaaatttacaaatgtagtgtgaggcacagtgcatcattttattaggaaggtggagcatgtggcctttcggtgatgatcacatttaacrggcaagatgcagcctccaactcccagctctgaagcgagagcaaacatttacacctttaacaagagtacatagacarcagcaaacactggagcaccatttactatttcactcaaaatgaaarcatggttgtcaatttaaaattctgaggaaattaaaaaaaaaaaatgctgtaaaaaacaggagggttgtttaaggtctggttttaagtactacctgctttctttcctttcacaagatgaccatatatatcagatttatctggaaaggaaggctcatggtagtctgcgcagtacattgctcctaccaaaaaaaatggaacatgataaatacaaagagttagcaaatgcaaaggtgaaatcggtgagatatctttcaaaacattaatagaaactgatgaatgcatatttgcttgtttatcatg

SEQ ID NO: 22685 - DNA, 600 bp, Chicken  19866894235264_1
agatctgggattagctcagctgtgttgtctcactgccctaggggagaccaccaagaagagaagggagtagcaagggaaggggctgctaaactggtggagagcaacatctcctgggtgctgcatggaggctgtcaatcctgagttagcaaagcacagtgatatgagcaagagagggtgaaagacccctctcttgagaggatggggggaggagggaactgacttgcaaactgcttcatctctgtttcatcaagccgtcttattcttggatgctccgattcaaaagtaatcattcatattttrtaaatgtgacagatgtgtagcacttggtgtacttactgtaaaaatgagtcgaagtttgttcactttaaagttttactaactatcacggactattcttggaaccacccaccacgaactgaagagactttctcagaagcgaatgagtttccagcagtactgctttctcccataagagggaggccaagaacattcagtgcccttcgtatgatttgagcgrcttaaaaatggratcgacatgaggtgaaaagttctcccttgttatacctctgggactttgctacttagccggtagaaacccaa

SEQ ID NO: 22686 - DNA, 600 bp, Chicken  19866894235264_2
gacttgcaaactgcttcatctctgtttcatcaagccgtcttattcttggatgctccgattcaaaagtaatcattcatattttrtaaatgtgacagatgtgtagcacttggtgtacttactgtaaaaatgagtcgaagtttgttcactttaaagttttactaactatcacggactattcttggaaccacccaccacgaactgaagagactttctcagaagcgaatgagtttccagcagtactgctttctcccataagagggaggccaagaacattcagtgcccttcgtatgatttgagcgrcttaaaaatggratcgacatgaggtgaaaagttctcccttgttatacctctgggactttgctacttagccggtagaaacccaagcttgccttcagctagggaactccatccgaaggacagaagttttcatgtaagagtgctggagggacagaccaaacagccaagctgtgatcctgggggtgccatgctgttgcccaagaacctgcaccagaggtgtcacttgtcacaaagctgacttgggacatttcataactgaggaagaagcaggacccaaggcagatttacaagggtttctctgaa

SEQ ID NO: 22687 - DNA, 600 bp, Chicken  19866894235264_3
gcttcatctctgtttcatcaagccgtcttattcttggatgctccgattcaaaagtaatcattcatattttrtaaatgtgacagatgtgtagcacttggtgtacttactgtaaaaatgagtcgaagtttgttcactttaaagttttactaactatcacggactattcttggaaccacccaccacgaactgaagagactttctcagaagcgaatgagtttccagcagtactgctttctcccataagagggaggccaagaacattcagtgcccttcgtatgatttgagcgrcttaaaaatggratcgacatgaggtgaaaagttctcccttgttatacctctgggactttgctacttagccggtagaaacccaagcttgccttcagctagggaactccatccgaaggacagaagttttcatgtaagagtgctggagggacagaccaaacagccaagctgtgatcctgggggtgccatgctgttgcccaagaacctgcaccagaggtgtcacttgtcacaaagctgacttgggacatttcataactgaggaagaagcaggacccaaggcagatttacaagggtttctctgaagttttcttatga

SEQ ID NO: 22688 - DNA, 555 bp, Chicken  19866894235264_4
catgaggtgaaaagttctcccttgttatacctctgggactttgctacttagccggtagaaacccaagcttgccttcagctagggaactccatccgaaggacagaagttttcatgtaagagtgctggagggacagaccaaacagccaagctgtgatcctgggggtgccatgctgttgcccaagaacctgcaccagaggtgtcacttgtcacaaagctgacttgggacatttcataactgaggaagaagcaggacccaaggcagatttacaagggtttctctgaagttttcttatgatcccragacctccctcctccattagggaaacaagggatgaccatgaatatttgtagaggtttatacacaatttgaaacaaagcacagtacagacacatctaatcacatcactacaccagtcctgactctgccactcatcttcctgtattgccatgcacagcagggccctggtgcatacctgaggttgtttcccagatcttgctcttctatggagtcaaatgagagttgtttgttgcttctcaaaacaagatttttggtgt

SEQ ID NO: 22689 - DNA, 600 bp, Chicken  19866894235274_1
acgtgcagcaccatctgctggatcagcatctctgccaaaaatttctgcacttaacagaagataattccacgggctaagaagaaaaaagccatacaaacaaaagtgcatcacagacatttatttagccagcaaccagcaagcaaaggagcacagaatttccatgaaaactgcataatgatgctttactcataaggcactttctacatctcagacgctatatataagtactgtgcttaaatatcagcagaccacatatggttacaaaaattcagaagtttggtatgtgttttaactgcattragatgattttgatctggcttctcaactgtacacatcacattacatgattataaattaatgtttttctgctgaatgcttatgaacagaactgctcacctaatgataaacagctacccagtaatttactttcttgtggtcaagcgctacgtggtctctcattatgagcacacaagctctgtttggatgacaacaggtcaccactgcactaccacattttatcacagatgttaatttaatatccctgcgagatgtgttgtgagatgtatttatctttcacattgcaagtagaagaaagttctt

SEQ ID NO: 22690 - DNA, 600 bp, Chicken  19866894235278_1
tttgtgaaggaagcaaattggcgagtgtttcttggtgcagaagctcttgtgaacccttttgtctttcggacctgaaatgaaataaaagtctgaaaaccttctgatactgctacattcatttcaattgtttatctgtgagaccagcctggaggaaggagagggaaaacggctttgtaaaaagtttgataaaacaaatttaaatatggcttcgtgtttggttggatggttgtttttctcctagaagatttttttttttctgttgcctttaattgcatctccatgggttcatttgcttggcamgctttgaaagagagtgaggagagctttcatgccaggatggattctccaagttcttactaatccatacttcataatagctttatcagtaattagtttgggtgtgttggcagggcttgatagctttcagctgggtttgtacagtcaaacgcattttcataatctacagaatattgttctcttagatcgtgtttgttcttcttgtccaatgaaactttttttcaaacatacttcgctgtaccattgtaataaaatgtatgtgcagyttaggtgatgcttagcagagcgcttgtagtgtgcttc

SEQ ID NO: 22691 - DNA, 600 bp, Chicken  19866894235278_2
ctttaattgcatctccatgggttcatttgcttggcamgctttgaaagagagtgaggagagctttcatgccaggatggattctccaagttcttactaatccatacttcataatagctttatcagtaattagtttgggtgtgttggcagggcttgatagctttcagctgggtttgtacagtcaaacgcattttcataatctacagaatattgttctcttagatcgtgtttgttcttcttgtccaatgaaactttttttcaaacatacttcgctgtaccattgtaataaaatgtatgtgcagyttaggtgatgcttagcagagcgcttgtagtgtgcttcttagtaattagaggaaactcagctcggtacctctgggacaaaacacagaagaaactaattaagacaggagaagtcatcatgaagatgatctgtgtttatgaatattatcccgataaaatggcatttgattaataatttctttgatccaacaacaagtgtaatgacactgaatcatgttatcagacatttcatcctgactgctggtaaggtgcttagccagcaggtctaaaaagtgctgtggcacagagtaataattgaatttt

SEQ ID NO: 22692 - DNA, 600 bp, Chicken  19866894235282_1
aacaaatcattgcatcctatttattcttctcaatctcttctctgtgtaataggacccaacagattggatttggagctctgtggtgctgagctgaaagagattccactggatttcagataaaagtcttcactgctggctttcccacagttctatgctcatcgtgttttgcttcccttatgatgtctgacaaacaagtctcatgaaacaagagagaaaaatgaaatgtctgtatctctcaagctttgcattttgatattgtctttcactttcaagaaactcacgatgtgctgaaaaattgakgcatttgccttacttttttatttgtttgcttcctcagaactatgctgttcctacttcaaacttctaaggaattatgaaaaaataaaaatctgaataatatcactgctggcaatgaatgcttcatctgttttgttcaaytgaagttcagaagctcaattgaattttagattcattcagactacttgtggttggasatctgcaaatmagaggtcaagtgcaaaaaagataggagtagagttatcatcttctacatcaaattaatagattgtacccaggaaagagtaatagattattttgtcc

SEQ ID NO: 22693 - DNA, 600 bp, Chicken  19866894235282_2
ttcccacagttctatgctcatcgtgttttgcttcccttatgatgtctgacaaacaagtctcatgaaacaagagagaaaaatgaaatgtctgtatctctcaagctttgcattttgatattgtctttcactttcaagaaactcacgatgtgctgaaaaattgakgcatttgccttacttttttatttgtttgcttcctcagaactatgctgttcctacttcaaacttctaaggaattatgaaaaaataaaaatctgaataatatcactgctggcaatgaatgcttcatctgttttgttcaaytgaagttcagaagctcaattgaattttagattcattcagactacttgtggttggasatctgcaaatmagaggtcaagtgcaaaaaagataggagtagagttatcatcttctacatcaaattaatagattgtacccaggaaagagtaatagattattttgtccaactgttatgcatatgaataattgtatgatctttcacaaagaagcctaaaaaacaggacagaaaatgcttctgaaaatttggagtatctctggaattgttctgaaacaatagggaaacaaattcaaagaaactggaaa

SEQ ID NO: 22694 - DNA, 600 bp, Chicken  19866894235282_3
gtctcatgaaacaagagagaaaaatgaaatgtctgtatctctcaagctttgcattttgatattgtctttcactttcaagaaactcacgatgtgctgaaaaattgakgcatttgccttacttttttatttgtttgcttcctcagaactatgctgttcctacttcaaacttctaaggaattatgaaaaaataaaaatctgaataatatcactgctggcaatgaatgcttcatctgttttgttcaaytgaagttcagaagctcaattgaattttagattcattcagactacttgtggttggasatctgcaaatmagaggtcaagtgcaaaaaagataggagtagagttatcatcttctacatcaaattaatagattgtacccaggaaagagtaatagattattttgtccaactgttatgcatatgaataattgtatgatctttcacaaagaagcctaaaaaacaggacagaaaatgcttctgaaaatttggagtatctctggaattgttctgaaacaatagggaaacaaattcaaagaaactggaaagatcacagttgcttatttagagggaagattagtaggagaggtacaggaaagtgact

SEQ ID NO: 22695 - DNA, 600 bp, Chicken  19866894235282_4
caagagagaaaaatgaaatgtctgtatctctcaagctttgcattttgatattgtctttcactttcaagaaactcacgatgtgctgaaaaattgakgcatttgccttacttttttatttgtttgcttcctcagaactatgctgttcctacttcaaacttctaaggaattatgaaaaaataaaaatctgaataatatcactgctggcaatgaatgcttcatctgttttgttcaaytgaagttcagaagctcaattgaattttagattcattcagactacttgtggttggasatctgcaaatmagaggtcaagtgcaaaaaagataggagtagagttatcatcttctacatcaaattaatagattgtacccaggaaagagtaatagattattttgtccaactgttatgcatatgaataattgtatgatctttcacaaagaagcctaaaaaacaggacagaaaatgcttctgaaaatttggagtatctctggaattgttctgaaacaatagggaaacaaattcaaagaaactggaaagatcacagttgcttatttagagggaagattagtaggagaggtacaggaaagtgactgaaaacattca

SEQ ID NO: 22696 - DNA, 599 bp, Chicken  19866894235285_1
  misc_feature (1)..(16): n is any nucleotide
nnnnnnnnnnnnnnnncttgctgctgcagaccgtggggatgttaacactgtgagagctgtttgctgctgtggtcactggctgcgtttgttctggaattaacagcactgctgatggatgtgtggtggttcatgtaacagtctgttaattgtaaatcttgtgatcaaagcattctgcaacgcatgggctgccacggaacttgaggaatgtggaagatctcagtgtctgcaaggaatgcaaatgtgtcatcagaaacacgacaaagaaatgagactggagatacaggaggggatagagaagtrctgaggggcttctgcaggyttggtaaattcaacctaagcttgttttgccaagagtttgtctgaattctgtgctgattcctggtgagagacctccttgtttgtggacaggctgcctttcatcgcagggagctgaataggatgcacgcgcttagggactcccctgcagccttatttttgaagtgcttatcacatgtctgtgaatgacacagcttctgtcacagacaggaggtgctyacacggagatgggaacatcgctgcctctcctcagaacatcccaaatctgctttttgttagctcag

SEQ ID NO: 22697 - DNA, 600 bp, Chicken  19866894235285_2
gctgctgcagaccgtggggatgttaacactgtgagagctgtttgctgctgtggtcactggctgcgtttgttctggaattaacagcactgctgatggatgtgtggtggttcatgtaacagtctgttaattgtaaatcttgtgatcaaagcattctgcaacgcatgggctgccacggaacttgaggaatgtggaagatctcagtgtctgcaaggaatgcaaatgtgtcatcagaaacacgacaaagaaatgagactggagatacaggaggggatagagaagtrctgaggggcttctgcaggyttggtaaattcaacctaagcttgttttgccaagagtttgtctgaattctgtgctgattcctggtgagagacctccttgtttgtggacaggctgcctttcatcgcagggagctgaataggatgcacgcgcttagggactcccctgcagccttatttttgaagtgcttatcacatgtctgtgaatgacacagcttctgtcacagacaggaggtgctyacacggagatgggaacatcgctgcctctcctcagaacatcccaaatctgctttttgttagctcagcatcacaggaggttggtttt

SEQ ID NO: 22698 - DNA, 561 bp, Chicken  19866894235285_3
gcaaatgtgtcatcagaaacacgacaaagaaatgagactggagatacaggaggggatagagaagtrctgaggggcttctgcaggyttggtaaattcaacctaagcttgttttgccaagagtttgtctgaattctgtgctgattcctggtgagagacctccttgtttgtggacaggctgcctttcatcgcagggagctgaataggatgcacgcgcttagggactcccctgcagccttatttttgaagtgcttatcacatgtctgtgaatgacacagcttctgtcacagacaggaggtgctyacacggagatgggaacatcgctgcctctcctcagaacatcccaaatctgctttttgttagctcagcatcacaggaggttggtttttttccctatgttagtgccactacctactaggtacactatgaggctctttactgtatgtcttgctttcataagcaggaatagcaataagttctttgcaatacagaatcacagacaattgctccatgactgtagcttgctccaaatttgagaccttaaagtctctgagggtgacatag

SEQ ID NO: 22699 - DNA, 586 bp, Chicken  19866894235287_1
ctaggcttcaggcaatgttttttcagcagctttaacctcaaagcatggagcagacagctttgtaggcaactgtaacaccaaggtgattatggcagtgactcacacttccctgtaaggcatccagctatcaacacacttggagagcgtggctttgtgcatgcatgcagggtgtcagtcagtgcccacttgccagccagctccaaactgcagagctcttaagtgctttgacagcgtgctgggatcgtggtgtgtcagagagcagctctggttccctcaggctcgagagaggctttagagatrgagcttaggaaggggaagtgcaagacaggtttaacttcccatccgttttccttccttaatccccgtggcactcatttagtctgctgaaatcttcctgtgagcagatggttggggctggggaggaagcaaggatctgactatctaaccactaagcaaggtagtggaaagggctgctactacactgtactgatgaaactctaggccagtgattatggaaagacagataataatcaaggtccttgggaagacagcgtgaacttgggaaagaaacctggtattgctgcag

SEQ ID NO: 22700 - DNA, 600 bp, Chicken  19866894235294_1
atactggtactgcagcagccagttcaggtgagttttctaaagcataatatgtacaagaagcttactagggaaccatgggttacaaaattctatttgcatccaagaactctgctaatgttgtgataaggtaaaagaaaactgagcctgttaccagcacccctgaggtggagtggtccagaacgtaacctgcaattatcagtgtctcacaaagttagttaaagataggaaaatcatgtacagtatttccttccattaccaatatgcttttttttttatgacactggcacttaattcccagtragcatgagagtcctattatggatattattgagtcctcattatggtaagcagtgtgaaaaacacaaagccaagagacgatattttcactaaaggacatccaaattaattaaatcaagatgcaacaagtggatgcagtaaacaacaggaaagaacagagggttaacagttgttctcattgctttgaggttaatgttatcaaatagcatgggaagaacactcttggtaacacaccagaagtgactcaaacactatcagaataaaatgtagcctgctgtctaattggccagatcacacggtagt

SEQ ID NO: 22701 - DNA, 600 bp, Chicken  19866894235298_1
aacatgtcgaagtattattttttgctgatattcttataacagttcaaaggccaagaatctgaaagatgcccttgttcattcaacagtgacgttaaataaccaggattgtgctgtgcttttgttcctcacctatgtagtgccttttagcaaactacaaatgtgtgaaaacagtgccagatcacaatgacaccattcacctccatcatcatactgtcgctggttggcaacatgtttcttgtgatccagaccaacgatatttctggctcaccttagtgtgaatgctttgctttttcagtcacrtcattctctagaagtaagctgtgtttttttggtgcagtggcatttctggggggatgtctggggacatttctggggatggaggagggtgttatgagacaagtcgctgcttttgtaagcaattgcagccaaattttcagcgctgttgatggaagggctggatgtgctcactggggtgaactgaaaagtagctgaatggctgaacccaaagaaaagtgatcagytgcacagaatttccttggaaaccagtaactagtggtgtactccagagatcaatactgggcccagtccagtgtaatatct

SEQ ID NO: 22702 - DNA, 559 bp, Chicken  19866894235298_2
tggcaacatgtttcttgtgatccagaccaacgatatttctggctcaccttagtgtgaatgctttgctttttcagtcacrtcattctctagaagtaagctgtgtttttttggtgcagtggcatttctggggggatgtctggggacatttctggggatggaggagggtgttatgagacaagtcgctgcttttgtaagcaattgcagccaaattttcagcgctgttgatggaagggctggatgtgctcactggggtgaactgaaaagtagctgaatggctgaacccaaagaaaagtgatcagytgcacagaatttccttggaaaccagtaactagtggtgtactccagagatcaatactgggcccagtccagtgtaatatctttactaatgatctggacagtggggcagaacataccctcagcaagcttgcagatgacaaataagtgaggggagtggtgaatataccagaggattgtggggaccatccaaaggtacttggacaggctggagaaatgggcagtaaagaacctcatggagttcagcaaggagaagtgcagagtc

SEQ ID NO: 22703 - DNA, 600 bp, Chicken  19866894235299_1
attcacgatatacagttgcagtctaactagtatttttaagggtttatggaaatacgaattaccaaactcaaagggaagtgactacagaataaacaaaaagcaggggggagacagtgtctaatgaaagaattgactattataaagtattaggcttgctctcctggctcatagtagacattattaaaatagaaaacttaatagaaaatttttaaggtttcacttgagattactcataattttgcactgagtaaggtgaggactaagtcatacttgcagcaggttcagctttgcagatttttyagattgcttctctgttgatcccaaaaatcaatctatttagaaaactagaatccagataagatgtccttcagttttgtgaaaacggcttttgctaactatagctacatttttctctatcatttgtgtctgtatagaaaaacattaaaaacagcaatttgaagggattattgttcttcccaaatataataaacgtgattctttagaataagagaagaaggacaatgagaagacagaggatataatgaccatgagtccctgtccaacatacacattgttcaaaaacacacagaagcaataaaa

SEQ ID NO: 22704 - DNA, 600 bp, Chicken  19866894235302_1
gccccgcccaccctgaccctgagtgtttccagggatagagcacccaccacctccctgggcctcacctgttccaaagagcagctgcagcctccggtgtcagtgctttttcacattttgtgagctgttctatctgctatgcattaggtagaaagcagcagtattaggaaagctgcagagggaatgtctgctgctcatctgggctctagcaaccctgctgcacaagacctgttgtagccaggtgagtgtttgccttaggtgttgtactgtgtttactctttagacagcattgaccctataagrcaggaagaggttgttttcctattaggaatggaagccctcagagcccctgcttgcagctctgcagactggggggattggcatgcagtgggagcaggcagcgagctgctacctgatggcacatgcttcatcaagaaagcacaaagccttcgtgccaccttgtggctgctagattacagctgacacagggcaatgccatccctcgttctgctccaggcctgcagaataaaagcactttgcctcttgcaagccatggggccacctacccctctctttatggcaggtgtaagccctctccccagg

SEQ ID NO: 22705 - DNA, 600 bp, Chicken  19866894235302_2
ttgcagctctgcagactggggggattggcatgcagtgggagcaggcagcgagctgctacctgatggcacatgcttcatcaagaaagcacaaagccttcgtgccaccttgtggctgctagattacagctgacacagggcaatgccatccctcgttctgctccaggcctgcagaataaaagcactttgcctcttgcaagccatggggccacctacccctctctttatggcaggtgtaagccctctccccaggtacctccttcagcacattaagggatctgagtcacctaggggagcacttcraactgtcacgtccccacatgagggcacatccacaagctcccatcctgaagctctgccctagacccatgcgggaaatcgcctcccagatcaggtacacaatgttcccagccagctccatggcyggccatggtgagaaaaacattttcttgttctgtcccagtgcattatgaaaacccacagaaagcagcttttcgcaccgcaaaaccttttaaaaggattctgtcaacacaaaagcaaacattgacagccattgcctttaaaagtacttgaggcttcaaactctggaagacacttcttagt

SEQ ID NO: 22706 - DNA, 598 bp, Chicken  19866894235302_3
acagctgacacagggcaatgccatccctcgttctgctccaggcctgcagaataaaagcactttgcctcttgcaagccatggggccacctacccctctctttatggcaggtgtaagccctctccccaggtacctccttcagcacattaagggatctgagtcacctaggggagcacttcraactgtcacgtccccacatgagggcacatccacaagctcccatcctgaagctctgccctagacccatgcgggaaatcgcctcccagatcaggtacacaatgttcccagccagctccatggcyggccatggtgagaaaaacattttcttgttctgtcccagtgcattatgaaaacccacagaaagcagcttttcgcaccgcaaaaccttttaaaaggattctgtcaacacaaaagcaaacattgacagccattgcctttaaaagtacttgaggcttcaaactctggaagacacttcttagttttattttctttttattttccagacgtggtctactctcaagcttcagagagatgtactctgtaatggcatgagtaagaaaacgtgtcatgagttttattcccttaacaatttcaaggcaa

SEQ ID NO: 22707 - DNA, 600 bp, Chicken  19866894235305_1
attgattgaagttattcactgctgcagatacgttcagcaagttgtgtagctgaatgcatcccctttcaggatagctgtcctgtgcttcactgtgtgcaagaggctgagcatgggggaaggagtgccatttagtttgacaagtaatgcttgttattccctgcgagacctcatgaaggagatcacaagatactaatgagaattcatcctgttggaaatgggcagggttcaataaggatttcctctttgagggaagaagtcacaggcttggccctacatgcagcggatccgtgaggggtctgragcacaagtgttacagggagtggctgagggaactggggttgtccagtctggaggaagcggaggctcaggggagaccttatggctctatacaacttcccaaaaaaaggttgtggtaagatgggagttggcctcttctcccaggtaacagcaataggactagagggaacagcctcaagttgtgatcgggaggttcaggttggatcttaggaagaacttcttctgagaaagtggtgatgcagtggcacaggctgcccagggagaggcggtggagtcaccatccctggaggtattcaagaaccg

SEQ ID NO: 22708 - DNA, 600 bp, Chicken  19866894235308_1
tagagaagggaaaactgtatttgcatctgtagtttattttaaagtaaacacttcaatgtgtttacaaagcagctggagaaacctcagcattgttaggtcagaaattaaacatggtttcaagggattcagttttgctaagctactgtaatattttgggcatcaaacagctgtacagtaccaaggaaaactcgggtaggatgctcctaggaatccccttctaacacttttctatgttctacaacaggataagagagaggtctacttttgtgattattttgagtgaaatagatttattatttwttttttttaccgtatccaaaggtttgacactcaaaaaaagattgttagctgtgttttagagaaggcagaagttgcccaaagctcataccataaccctctgtgaattgtgtatttctttattgatgttccggacaggaactaataggctgctttaatttagattagccagaagaagctgaagaaatatgagaaggagtatcataccatgagagagcagcaagctcagcaggaggatccaatagaaagattcgaggtaatgcttaccttctgtaatctgatttatcgtgcagcacctgcagg

SEQ ID NO: 22709 - DNA, 600 bp, Chicken  19866894235313_1
ttatctgagctcaccaaagctcttccctgtgtatgtgacccctatttgtgtcgtttccttaaggcaaacagagcatcagaagtgcctttattaacagtccttgctacatgctgggaacctgccaaggcgaatacacaaagccttcccctccccgcctcctgctttcgaaaaagtaacctgcatgaaagcgttattcaattgctacccagtcagaaacctcacgctgtcagttgttgctaagaaagcagtcgttactaatgatgcgctgagttgcacgcttcagcatatccttggagatgrtgcagatgtgtgtatgtccagatgacttgttaatttcgctttgaatcagtaagtagtctgcagagaacatatgtagcaagtagctgggtataattcattctttgctcctttaattattctgtttgtcttcattccatgttgtcaggttttcagctactgttggtaacagaagcaaactgaacgctcacgtgggtggagagataattttgttagcgttttccaaatggacaggggcttctgggtttttctggggggtggggaatgaattgatttactgcaaccgccgtctaatgcaatact

SEQ ID NO: 22710 - DNA, 600 bp, Chicken  19866894235317_1
aaaccttgctaaagaaaggagaagacctccaaactacacctgttttgtcagttggactcagttaaagatgggcacactattcatactatatctgtaccttacttccatttctcttcctcccccccttttatcaccatgttgctcctgtcagcagaatttagataatcaagtgaaggcaattgaataagggagaaggaattgagggtggaaatcattattaggacaatattttccatcttacacttcatgctgagagctatagttttgaactgtcacatagccaaaaaaagcctgcaagartacagttatttaaccgaatgccaaatgacacaaaacattcttccagatacgttaaaagtaaactgataaagaagaattactcaaaacagggcagagtcatttaaatcctaatttggaaaatataattaaatcaaaaatagtatattcatatgttaatctcgaacatttttctatgcagaagtaatactttgtctgcaaaattaactaaattaacataaatgcttacaagaagcaacaagarggctccacagggctgaagcacactgaagactgaaaactccagtgtatcaatcacaatgg

SEQ ID NO: 22711 - DNA, 600 bp, Chicken  19866894235317_2
acttcatgctgagagctatagttttgaactgtcacatagccaaaaaaagcctgcaagartacagttatttaaccgaatgccaaatgacacaaaacattcttccagatacgttaaaagtaaactgataaagaagaattactcaaaacagggcagagtcatttaaatcctaatttggaaaatataattaaatcaaaaatagtatattcatatgttaatctcgaacatttttctatgcagaagtaatactttgtctgcaaaattaactaaattaacataaatgcttacaagaagcaacaagarggctccacagggctgaagcacactgaagactgaaaactccagtgtatcaatcacaatggacagctcttcgtgcacacagtacattctacttgcaggcttattacatgagctctgaatagctctgtcttgtgttttatttgcctcacagcagctgaccaaccaagcatgaacacagtttattcagcatgtagccacttctccagaatctcaaggcagctcaggcttggatatctggaaaagtaaccgaaagctgcaaatatgcatgaaattgaatctgcctttcacatgggatgtaagatt

SEQ ID NO: 22712 - DNA, 600 bp, Chicken  19866894235320_1
agagtaaaatgggatcaaaaagttattttgatccaagaacaaggacttgaacctcagccattcctaacctaaggcagaaagtctctgaagcgtttcttaaaggtgactttttcatcttttgcatctggatcagtattcctttcaaaagtcaaaaccattaaacacaacaggaacatagtattttcaaaactgtctagacaatacagtgactttaatccagattggttcttacccaaaaacagcaagtctaccaatttttttcctgataagacaatctttaaacatcaaaacctgaaccaykgattgagtaaaatacacaataacacgtaaaaattaaaataagagaggttacttgtaagtaggaaaaggaactgctcgagccctgcagttcattgaaacttgtccatctgaagattcttctggatagatagtatcaatgggttgctcctcaaaaacgggtccataacctttgtttccttcctctgaaaaatgggtagagtctgaaaattaatcaattatttgttagtagccaaactgaayaggaatttccaacaaacctactgtattcaaagtatgaatacagctaaatagcaagcccag

SEQ ID NO: 22713 - DNA, 600 bp, Chicken  19866894235320_2
gagtaaaatgggatcaaaaagttattttgatccaagaacaaggacttgaacctcagccattcctaacctaaggcagaaagtctctgaagcgtttcttaaaggtgactttttcatcttttgcatctggatcagtattcctttcaaaagtcaaaaccattaaacacaacaggaacatagtattttcaaaactgtctagacaatacagtgactttaatccagattggttcttacccaaaaacagcaagtctaccaatttttttcctgataagacaatctttaaacatcaaaacctgaaccaykgattgagtaaaatacacaataacacgtaaaaattaaaataagagaggttacttgtaagtaggaaaaggaactgctcgagccctgcagttcattgaaacttgtccatctgaagattcttctggatagatagtatcaatgggttgctcctcaaaaacgggtccataacctttgtttccttcctctgaaaaatgggtagagtctgaaaattaatcaattatttgttagtagccaaactgaayaggaatttccaacaaacctactgtattcaaagtatgaatacagctaaatagcaagcccagc

SEQ ID NO: 22714 - DNA, 600 bp, Chicken  19866894235320_3
agcaagtctaccaatttttttcctgataagacaatctttaaacatcaaaacctgaaccaykgattgagtaaaatacacaataacacgtaaaaattaaaataagagaggttacttgtaagtaggaaaaggaactgctcgagccctgcagttcattgaaacttgtccatctgaagattcttctggatagatagtatcaatgggttgctcctcaaaaacgggtccataacctttgtttccttcctctgaaaaatgggtagagtctgaaaattaatcaattatttgttagtagccaaactgaayaggaatttccaacaaacctactgtattcaaagtatgaatacagctaaatagcaagcccagcaaaataaagtttaatttgcatcaggaaaactagaacagtatggataatagtgctgaccttccttcactgtcctctgagaatgagagtagtttaaactgcattcctgtataactaccttccttgcattctctgctgacatgataaattatttttcacaatttatgtgagacatgatgaagttaattatgaactgaagaaatgcccttcagaaacgcaggtaagaccaacttatctcacag

SEQ ID NO: 22715 - DNA, 436 bp, Chicken  19866894235324_1
atgtgcctctgtgctgttagaattgcattatgccatttctgttctgtgaagctttgtgacaaaacagggtgcagtgatgcttttccctgaggagagcccatggaccgtcagtcttgttcgtctgtgtttgtgaccacattccacatgaaaaagggtccaggtgactgtagggtgggagctgacccaaagaacctccaaagcaattttctaaattaatgctaaatgccaaagtcaaggagttattaaaaactgcaaatgagccttaattgtgattctgctagatttgaaactggaacagcyctttctggagagtggttggcagtctttcagtcacagcactggggatggcaggctgctcttgggcaactctgcttttcagcttctaccataattctgtagataaggaataatctttctgtgctgggccataggtcag

SEQ ID NO: 22716 - DNA, 600 bp, Chicken  19866894235327_1
tccatggaaaccacgctccacaatccagaacggggccctggggggagcattctgatcagattggtacatgcttaattgcagcccatgcgatcactcagcactacccgctattctgtgctagataaaagcaaactatttgtgatgtgaatccgaacacgtaatcgcttatttggaaagagatgtcatggaagaatttaggcagtattatttttcagcaatgtactcaggtggtaattccaaaaagagaaagacagctttctaaaaagcaatggtagctagctgaattcctacccaattgcygcaacttagggggaaaaagtgaaaagcaaaatcggtgtttcagtagatttacatatcaaagcattaaaagtcatgaaaaaccaatattccatagaagactatttactaatttaccacttggccctcacgatgacttcaacatgtaacagcctttctgaaaacactggttcaggtcttttagcgaatataaatttcagctcagaacacggcctgcagtcctcattcacagcactatggatgaggagcagctgctctggcatttctttatcccaggatgtagtagaactgacgtgtaagcac

SEQ ID NO: 22717 - DNA, 600 bp, Chicken  19866894235327_2
aatagtggatgctgcagcattaacagcgtaacatttggtcaccgtgaagcaaagggcttgagaacagaggtagcagatctcagaatttgagtcaggaagggttcagcagaaggacacagttctgagactgtacaaatcccttgacaaactgactttaggatgcagtaagtctaggaacctctaagacagcaagcagtacttagagatacccacattcccaggcaattcagataacgagcattcctgtatgcaagcagagaagctacagagaaaggacataatcttgaaacaattcagatrgcaaagacagagtattgaacccaacctcattgctcctttggcagcacccaggaagcgagtggagtcaggttggcattgtcaggtaggaaagcaaggaaagcccttggagctgatcttgggagagaagcagaattaaatttcaggcaatgccagagcatcacagaccccactcttctgacgctgatttgtctcacctggaccatctacctgccagcacagagcatgtgctgcctttccttccttctgactatttccataaacacctcagaaacctttcattcaccgatcatatatttgaca

SEQ ID NO: 22718 - DNA, 600 bp, Chicken  19866894235327_3
gtcatctcaaaagatctatgttttcccatttgctgttaaaatgatgtttaggacagaaggaatcccatacctgtctatttcagtgttctaaacttttaacgacagattacatctgacccacataagtttgaaatctacagtgtacctgaagttccacactgcagagagaggtcccttcctgagccaggaaggcaccactgaacagccccgttactgacaacagatttcattagttatcatcactattgctgattctattattggctcgtattcaaaatgtcttttaataagctcttgtgmctacactagactagtaactgttgccttgtcatcatgccaacctagccaaggatattacccatccagaacagctttgccagtctttctatcctattgcaaaactgaaggccacaggagaggaaagaaataccttccacctgccctcggggatgttggaggtcttggccacagtctttagacacatcattaggctctgaactttctgaaggcaaccttgggtcatcaggtgggagccttctccaacctgtagcctctgtggctgagttatcaggcacaaggaatgtattttgcctagaaact

SEQ ID NO: 22719 - DNA, 600 bp, Chicken  19866894235337_1
caactggatagtgaaaatctccttggatatctatctgataggtggctgatagaaccagacttatttgtaatgcactgcaaaagaaggctagtgtccaaggtcttcctgaagtccagtttgcagactgtaaaatagtaatttttagggtacttctaacaaataaatttaatatacactgaaagagagaacagaaaccaacttccttgttgttacacgctgagggagttgttcagtaactttggtttttactgttactattttttgccaaaaaaaaacccaaccaaaaacaaaccaaaaaamcaaaaccaaccaaacaaaaaaccccaaccaaccaaaaaacaataaagaagaacctgcaagtatcatagaaycattaagtctggaaaaggcttctaagatcatctagtccactgtccacctaccaccattattgcccattaaaccctaagtacaatatctgcccgttccttaaacacctccagggatgatgactccaccacttccctggtcagtctgttccaatgcctaaccactctatctgagaagttcttcctaatatctaatctgaacctcccctggttcaacttgaggccattccct

SEQ ID NO: 22720 - DNA, 600 bp, Chicken  19866894235337_2
gcactgcaaaagaaggctagtgtccaaggtcttcctgaagtccagtttgcagactgtaaaatagtaatttttagggtacttctaacaaataaatttaatatacactgaaagagagaacagaaaccaacttccttgttgttacacgctgagggagttgttcagtaactttggtttttactgttactattttttgccaaaaaaaaacccaaccaaaaacaaaccaaaaaamcaaaaccaaccaaacaaaaaaccccaaccaaccaaaaaacaataaagaagaacctgcaagtatcatagaaycattaagtctggaaaaggcttctaagatcatctagtccactgtccacctaccaccattattgcccattaaaccctaagtacaatatctgcccgttccttaaacacctccagggatgatgactccaccacttccctggtcagtctgttccaatgcctaaccactctatctgagaagttcttcctaatatctaatctgaacctcccctggttcaacttgaggccattccctcttgtcctgttgcagttacctgaagaagagactgacctccacctcactacagcctcctataagggagttgt

SEQ ID NO: 22721 - DNA, 600 bp, Chicken  19866894235347_1
aggtttttgtcacagaggttgcaaagcaattgtttcaacccattcacccacatattctcaagggatgttctgttttttaagattgctgttttgctaaaaacagttggatgtaaatcagtgtggttagaaattcctttcccccccaaaaaaatattagttggatctctgctaatctatctctccctacatacataaaaactagatgtttgcccatgtacacaagtcctcattcttcctggttcattccaatgaaaatccagagtcatttgatgaagccagtggaataatatctgtacagarttaatcccaaatccttccatcacctcctctatcagagttctgaagtagtagatagtgtaacagcatgagatgaggtcttcaaaccaaacaattcaaccaggtaagaattggactatattacaatccctatttcctaagattactttattttcatcatttgtagtgggttttgtaggaaagtatgcaattattttaaggaattcagtccaggtggtaatttaactgggaagaagatcagtaggtaagattttaattaaatgtcagctctacaggattttaattagatggcagctctacagc

SEQ ID NO: 22722 - DNA, 600 bp, Chicken  19866894235347_2
cctctatcagagttctgaagtagtagatagtgtaacagcatgagatgaggtcttcaaaccaaacaattcaaccaggtaagaattggactatattacaatccctatttcctaagattactttattttcatcatttgtagtgggttttgtaggaaagtatgcaattattttaaggaattcagtccaggtggtaatttaactgggaagaagatcagtaggtaagattttaattaaatgtcagctctacaggattttaattagatggcagctctacagctgagctatttgatggcccaggttargctatatttactctaacaggtaaataagttcatcacatctgctgaagggaagttaatacaaaaataaagtccaatctaacttagccaatccataaatcttttgtttttagtcttcagttccacgtgttttgctgaaattaagcttcacgtcttgaatccagtttactcataatttaatccataaatttaaaattagaagcataattagcacagagttttgcagcactgaaataatgcaaggagacagaagacacatggctcaacatgctcagcactgttgcactcagccacaagagtcct

SEQ ID NO: 22723 - DNA, 600 bp, Chicken  19866894235354_1
gggccatgacatgttcccagggaagcctgttccagtgctggacaatccggcaaccattaggctttcccaactaattgattcaaggagcatatatttgcataaaatcaatattttaaatgagtactgttttgtcttttgagatcctgttgggcatttgaattcaccccctacactgagataatttaagataagaatttatgttaacacagcggtatgaataattacactttaaagtgctcatctactgttcactcacatagtcataaccatgagagagaaataatgcttccttcttttatrcttgttagaggaattgtctacattgctggcaaatggtatggaatggagccgatcaacacatccagaacacttgaacacaggttttaccacttagaagatatgcagcatactccttttcattgtggtgtgctgaatgataaccttcatcgtcagatgcagatatttgtgaagcagtctgtgagatatgcattttcaccaaacaatacctctagtarggaagagcttttgagggtaaatacattttytgtttctctcctgagggctacagtccaaactatttcctcagtctgccccagtagc

SEQ ID NO: 22724 - DNA, 600 bp, Chicken  19866894235354_2
gaataattacactttaaagtgctcatctactgttcactcacatagtcataaccatgagagagaaataatgcttccttcttttatrcttgttagaggaattgtctacattgctggcaaatggtatggaatggagccgatcaacacatccagaacacttgaacacaggttttaccacttagaagatatgcagcatactccttttcattgtggtgtgctgaatgataaccttcatcgtcagatgcagatatttgtgaagcagtctgtgagatatgcattttcaccaaacaatacctctagtarggaagagcttttgagggtaaatacattttytgtttctctcctgagggctacagtccaaactatttcctcagtctgccccagtagctgagggtctgcagagccttgctttggcatggtatcactgcaggtgggtttggctgagcacttccttgttgctcacattttcatggaccccaaactgttgggagttctgataaattctgaaagagaagaatagcacaatgggagttaaacctaacttgaagcagccctttagcagaagagcagagctcagcctgagaccatcatgggtgtacgaaa

SEQ ID NO: 22725 - DNA, 600 bp, Chicken  19866894235354_3
tgttcactcacatagtcataaccatgagagagaaataatgcttccttcttttatrcttgttagaggaattgtctacattgctggcaaatggtatggaatggagccgatcaacacatccagaacacttgaacacaggttttaccacttagaagatatgcagcatactccttttcattgtggtgtgctgaatgataaccttcatcgtcagatgcagatatttgtgaagcagtctgtgagatatgcattttcaccaaacaatacctctagtarggaagagcttttgagggtaaatacattttytgtttctctcctgagggctacagtccaaactatttcctcagtctgccccagtagctgagggtctgcagagccttgctttggcatggtatcactgcaggtgggtttggctgagcacttccttgttgctcacattttcatggaccccaaactgttgggagttctgataaattctgaaagagaagaatagcacaatgggagttaaacctaacttgaagcagccctttagcagaagagcagagctcagcctgagaccatcatgggtgtacgaaaggcatgaagctgccattcagctcatgcatc

SEQ ID NO: 22726 - DNA, 600 bp, Chicken  19866894235355_1
agttaagaaacatggtgcagtcaccagtttggttaaaacttcctgctaaggctgctgttaattttagcttggatatgcaaccataaatcagcaggaaaacaatactttggaaaactagactacatcagcatctatcattagttctactacatcacagaaatagtagccaagcccagcttccttaagcagatccatcatcctgttaacaagttcccatgatactatcccacagcaaccagtgtctatccattgtgtcttgcacaaaatgtcaccagctcttcccttacccttatgctaatycctaagtgtttaaagccccaaaatctctggaacaagctgcccagatcaagaagagatactactggcatccgggcagcttttcaagtgccagagcaatcagctctggcttgtttcactctctcttctcttccaactcaattcataaattgggttggaagaggagagacattccttcctcccaggcaatcagcactgctaaagacatcaggggctgattggtagtgaatctgagactgtcctgacccttcaatttgcaaaacatttatcctatggtcacatctggccacttagggagtaagc

SEQ ID NO: 22727 - DNA, 600 bp, Chicken  19866894235356_1
ctaagatttgcaagtgcataagagtaactggaggaacatctaaggagaactgtatttgtctccaaaagaaagttaaatttaaaaaatctcagtaggtagggacaaactaaggtagaaagtcataacataacagagaaaatagcaccggtggtcttagtaccgtgcatcagttttaaaatgtaagattccttcattataggaacattgtgtgataattgcagtgtacttgtaggataatttatcttaattcattaactatgaagaagataaacagataatcccctaacaagaaatacagcrttattttgtccaactatcttgcccgtgttctttttttaatacatgatatcctttctcttgactcttctccgtgctacaataatttcatttaaaaggcaaaaatgataaatatttcttaccaggttgaaaaataaatgatttaacttagtccatttgcttaaaattagctctatattcattcaccttaaaacccccaaaaaagggggttttaatcacatgcaatggtttttattatttactattaaatgaagaaataaagtgattttcaaatgacttttctgggcatttttaacattgttt

SEQ ID NO: 22728 - DNA, 600 bp, Chicken  19866894235357_1
agcagcaaacttccttggctggagatgacttgttaggaacagaaacagtggttgtttctggctgctaaggctgtggatatctggaagagtgtaaggacaaggagttatacagagattggtttaccatctaaagggaaacagtacttgcctcttgttaaagccttcagctatttctttgctatatgatgttttatttcccgttataatttttgctttgagggtaagactaaacagaatgttaatgatttgccaattataccaattagcattttatagcactttacaaatgtcagtgaatcraggagatttctcaggaagaaacctttgtgttcaatgggcagaatctaatccaaacaaatgaatccctctaatgaagaggttttgtagtagcacagttagatctctgaatatattgtctgtgcatcttcacagaactgatatcagcatgctcccatgagtgttactcttttcatgaaatagttgttttatatcttttcaggagtaagaatccctgtaattccctttcaggcagcacatctaaactgtcatgttgagctgctggtagaaataatattagaatgtggagaaacaaagacaaaa

SEQ ID NO: 22729 - DNA, 600 bp, Chicken  19866894235361_1
ggaaactctttggttaaatagctgcttacaaccagctctacaacaatcctcttttaaaactcagctcttgctttagcttactaggatagaatcatagaatcattaaggctggaaaagtcctctaaaatcatctagtccatccgtccacctacaactaacactgctctctaaaccatgtccctctgggccacatctgcgtgtttcttgaacacctctggggattgtgactccaccacctccctgggcagcctgttccagattaatgatgattcctccttatttctgtaccttacctgacayatttgtataygttactgttcagtgcaatttcatgggccgactgaggaatgctttctatgatccccttgcacagacttcagagagcactgccccaaaatggaccagaactcagcatttgcatggcaagattgttttcaatttgctgcaaacatctggacattgtcggcaaactgttgagaatctgccgatgctggtagcctttccttaataaggaaaagtagaagcagcagacaggcatgaaaataaaggtatatgaatacatgatcctagatgcaaaaagttttcaaaatggctgcactg

SEQ ID NO: 22730 - DNA, 600 bp, Chicken  19866894235361_2
tggttaaatagctgcttacaaccagctctacaacaatcctcttttaaaactcagctcttgctttagcttactaggatagaatcatagaatcattaaggctggaaaagtcctctaaaatcatctagtccatccgtccacctacaactaacactgctctctaaaccatgtccctctgggccacatctgcgtgtttcttgaacacctctggggattgtgactccaccacctccctgggcagcctgttccagattaatgatgattcctccttatttctgtaccttacctgacayatttgtataygttactgttcagtgcaatttcatgggccgactgaggaatgctttctatgatccccttgcacagacttcagagagcactgccccaaaatggaccagaactcagcatttgcatggcaagattgttttcaatttgctgcaaacatctggacattgtcggcaaactgttgagaatctgccgatgctggtagcctttccttaataaggaaaagtagaagcagcagacaggcatgaaaataaaggtatatgaatacatgatcctagatgcaaaaagttttcaaaatggctgcactgacccagctgg

SEQ ID NO: 22731 - DNA, 600 bp, Chicken  19866894235364_1
tcgctgaacagtcatgaatctccaggaactggctggctttttggctgttgttaacttaagtgcatgtctgtcaattgtcccaagacattatctgcgttattagtgttttatttcctgttttaaaatcaactggttggaatatatttgttttctctcctctttatttgaaagggactattcacatgatctaattttagacatgtaatgtaggttataaatgtaggagcccaaatcccagattcattcaaacagctttcccaagagcaattcagataaccgatgtgaaatgccccttttccktcctgggataatattccccctgtccttcttactgtgttccctgcactcctgaagacatttgaacacattgtgaaatctgcccttgttcagtataatcctgcttaacttcgagcatgtgcttgggctctttgaagtcagtgagctttaaggttgtattcttaaacaccttccagatagagatgccttcctgaaactgcccacagggctgatattgggtcgaactcatctagatcccataactcatctgggcaaaagggtgaaggatctgctcacaatgaatacaacagggaagacaaacat

SEQ ID NO: 22732 - DNA, 600 bp, Chicken  19866894235372_1
gagggggagtttccagcctgggctgcagctgtgcatgtgtctgtgtatccagcagtgcatgtatcagcttccgacacacgcggtgtctttgaggaagctctggaaaacatctggaaaatcatgtcccagctctccaaggacagcagcgtctgtcaccttgctgtttgcctttgtgtcctgcctccctttggaccaccatcgccttctgctcccctctgaggtctgtgggtgggcaggaggcaaagcagccttagaaaggggccggggagggcaggggagagtcatgcctagggaacattygaaaagayctggctccggagggagagttccatttaaatatgaacgactgctaattatcaggaagaaccggtgccatctatcatcataatcagtgatctgccacgtgaagtgtctcaggaacggatgcagcatccctccttgtgttaatctccctctgttcccccacctctgccctctccggtgccgtggcacagctggggctgctgtgtgcmatggctggagcctgggctctgcaaacaggggagcagctctgggcattggctgcacacggggtgcatatcccacagctctgggatttgc

SEQ ID NO: 22733 - DNA, 600 bp, Chicken  19866894235372_2
gtttccagcctgggctgcagctgtgcatgtgtctgtgtatccagcagtgcatgtatcagcttccgacacacgcggtgtctttgaggaagctctggaaaacatctggaaaatcatgtcccagctctccaaggacagcagcgtctgtcaccttgctgtttgcctttgtgtcctgcctccctttggaccaccatcgccttctgctcccctctgaggtctgtgggtgggcaggaggcaaagcagccttagaaaggggccggggagggcaggggagagtcatgcctagggaacattygaaaagayctggctccggagggagagttccatttaaatatgaacgactgctaattatcaggaagaaccggtgccatctatcatcataatcagtgatctgccacgtgaagtgtctcaggaacggatgcagcatccctccttgtgttaatctccctctgttcccccacctctgccctctccggtgccgtggcacagctggggctgctgtgtgcmatggctggagcctgggctctgcaaacaggggagcagctctgggcattggctgcacacggggtgcatatcccacagctctgggatttgcctttagcg

SEQ ID NO: 22734 - DNA, 600 bp, Chicken  19866894235372_3
cctctgaggtctgtgggtgggcaggaggcaaagcagccttagaaaggggccggggagggcaggggagagtcatgcctagggaacattygaaaagayctggctccggagggagagttccatttaaatatgaacgactgctaattatcaggaagaaccggtgccatctatcatcataatcagtgatctgccacgtgaagtgtctcaggaacggatgcagcatccctccttgtgttaatctccctctgttcccccacctctgccctctccggtgccgtggcacagctggggctgctgtgtgcmatggctggagcctgggctctgcaaacaggggagcagctctgggcattggctgcacacggggtgcatatcccacagctctgggatttgcctttagcgggagctccgtgtgcccacctcctccctgcggcactttcagctgctgtgctctattctgctaattgcaaacgtagaaatcgcattgttaatgtattaacctcacagtcggtggagtcgtgttaagcgagtctaagagagagctgttaagagttctgttcagctgttcaggacttggtttagcatcagccccagccttttcctccc

SEQ ID NO: 22735 - DNA, 435 bp, Chicken  19866894235379_1
ccagtccgtccatccgcaaagagggaatgaagggaacgacgcattctctttggaagcgactgacgtcctgaggagcggtgtccctcagcgcaccctttgccatacggatggcagcaggagggacgaggacaatagtgctggccccgcagctcagctcacccccaaggtaggcaggaccctcaaaccggggtgcgctctcacgccgctctgtgttgcagaaggcgtttggcacccgcgcggtgatctgtgctgtccttctgcctcgcaatctgttcgcgcaggggatgggatgtggcggasggggagctttgtggggcgtcccatcgtccgctgctaccccgtgagccctggggtggggacgtgacactgggacccccccacacacacgcactgcgggggtaygcggggagcagcggggatgcggagcgcagagca

SEQ ID NO: 22736 - DNA, 333 bp, Chicken  19866894235379_2
tacggatggcagcaggagggacgaggacaatagtgctggccccgcagctcagctcacccccaaggtaggcaggaccctcaaaccggggtgcgctctcacgccgctctgtgttgcagaaggcgtttggcacccgcgcggtgatctgtgctgtccttctgcctcgcaatctgttcgcgcaggggatgggatgtggcggasggggagctttgtggggcgtcccatcgtccgctgctaccccgtgagccctggggtggggacgtgacactgggacccccccacacacacgcactgcgggggtaygcggggagcagcggggatgcggagcgcagagca

SEQ ID NO: 22737 - DNA, 600 bp, Chicken  19866894235391_1
ggtacctgcagccgtgctggctgtattgcagctcttgaagcggcttgagttaattactctgaaatggagattgatttgcagcatcacacccaaattaatcctccctctctctgaaattatcattacacagtcgttttgctgaggtccaatcaatcatcctgatgtacagcattaagactcaaatctgaaggactgccctgtacccgatctgttaggtgatgcaggaagcagcaggtggagggagaaatagcaaagaaaaaaatccttaagaaggcttcagtctggtgtcgagtatctgtkccctgttggggagggcacttgtaggagaagggaagcagatgtattctatttgatgtgcgagatcaaggcgtcagagcacttagctgctcatctggctatcttgcacatttttcctcttaattcctccctagtgtttaggaattgtttttccctctcctgtgaagcattcttatgcaaagcccaatctcctgcaactcaagcaagctgtttatagcataagaagaaagaggtgcagaagttcttgctttgtacaaaaccatttctttttttaatctcctctgacttgttattgagtgagca

SEQ ID NO: 22738 - DNA, 600 bp, Chicken  19866894235391_10
gatgtttgcataggtgatctgggaaactcagctttgtctggtgtggttttgccagccattggctggtactgctttctatctctttcagagcttatctggttttaattaatatttcttttctatctcattttcaaatatgctatcacattaaacatttttgaaacakagctggctgggtctacattctgaagtactgaaaatccttagtcatctgttattaaagagctgaaatgcaggtactttattcsgtggagaagtcacagatgccaaaaatttaaagcaatgaagaaatacagggarcctttgaatgtgcagtgtaagaagactctggtagcacaaataacaccatggtttattttttttctctttttaaggattcttcatatcccatgttgtgcaaacatgattgatgatatgttaaaatgtgccagaacaatgtttctagagattccgctgctctggatggggaatagagagcttgatacttacttggttgcaaattcatctatttataaaatataagtatgccccctttagacaggtagatgggtaatttatagtacctaagctcgcaatgtatggaagtcttatgtaaatgat

SEQ ID NO: 22739 - DNA, 600 bp, Chicken  19866894235391_11
ttgtaagctataaccctataagccttactatactaaatgagaagagtgaatgtgacttattaatagctcttgatgggtagcagccatggtagcaagtaacagcatgtggttggcagcgtgatgagagcaaggggccctcagcaggatttggtggccctgcaggatttgctttggctacgaggatggaggaggtctcaaaatgggataatgctggctgccaacctatgaaagcagaggttaaatatagccaggatgaccctggactggtaaaagatgcttgggtgagggaatggatcagtscaggtgcaaagtaacaccctgtggcatcatagtttaaagtctgcttggcccagagttgctgcgaaggtgtcagcctttcaagcagaaaaccctgacrtgcagaggagttgctgctgccctgggaactcagtagtttgaggtgaaaaataagtgctgttagrctgcaattactgtggctccaagccccatatttcacttgatgtgcagcaatagagagtggagggagtctatcagagtacttttcctggatgaaacctaggacagtgttttctctgtctcttcctgaatggaggcttagga

SEQ ID NO: 22740 - DNA, 600 bp, Chicken  19866894235391_12
aacagcatgtggttggcagcgtgatgagagcaaggggccctcagcaggatttggtggccctgcaggatttgctttggctacgaggatggaggaggtctcaaaatgggataatgctggctgccaacctatgaaagcagaggttaaatatagccaggatgaccctggactggtaaaagatgcttgggtgagggaatggatcagtscaggtgcaaagtaacaccctgtggcatcatagtttaaagtctgcttggcccagagttgctgcgaaggtgtcagcctttcaagcagaaaaccctgacrtgcagaggagttgctgctgccctgggaactcagtagtttgaggtgaaaaataagtgctgttagrctgcaattactgtggctccaagccccatatttcacttgatgtgcagcaatagagagtggagggagtctatcagagtacttttcctggatgaaacctaggacagtgttttctctgtctcttcctgaatggaggcttaggaatggggaagaagatgtggtgattgtatccatgttggggaaggtggtttcagtgcctttaatcaggtttgtaggccttcacttccacatcttgctcca

SEQ ID NO: 22741 - DNA, 600 bp, Chicken  19866894235391_13
ggatttgctttggctacgaggatggaggaggtctcaaaatgggataatgctggctgccaacctatgaaagcagaggttaaatatagccaggatgaccctggactggtaaaagatgcttgggtgagggaatggatcagtscaggtgcaaagtaacaccctgtggcatcatagtttaaagtctgcttggcccagagttgctgcgaaggtgtcagcctttcaagcagaaaaccctgacrtgcagaggagttgctgctgccctgggaactcagtagtttgaggtgaaaaataagtgctgttagrctgcaattactgtggctccaagccccatatttcacttgatgtgcagcaatagagagtggagggagtctatcagagtacttttcctggatgaaacctaggacagtgttttctctgtctcttcctgaatggaggcttaggaatggggaagaagatgtggtgattgtatccatgttggggaaggtggtttcagtgcctttaatcaggtttgtaggccttcacttccacatcttgctccaggcctagcaggccacrcacacacatggccatagggaacggggctcctgctgtatcacccctgtg

SEQ ID NO: 22742 - DNA, 489 bp, Chicken  19866894235391_14
ctgccctgggaactcagtagtttgaggtgaaaaataagtgctgttagrctgcaattactgtggctccaagccccatatttcacttgatgtgcagcaatagagagtggagggagtctatcagagtacttttcctggatgaaacctaggacagtgttttctctgtctcttcctgaatggaggcttaggaatggggaagaagatgtggtgattgtatccatgttggggaaggtggtttcagtgcctttaatcaggtttgtaggccttcacttccacatcttgctccaggcctagcaggccacrcacacacatggccatagggaacggggctcctgctgtatcacccctgtgttgctggtgaacactattggaacagagtgtttagctgtcctgtcctgggactttgcatagactgtgggatgcagctcaccaagtgcatctgctatgatgaacgacacaggtaaaatttacccagccattgtctttccagtg

SEQ ID NO: 22743 - DNA, 600 bp, Chicken  19866894235391_2
taagaagaaagaggtgcagaagttcttgctttgtacaaaaccatttctttttttaatctcctctgacttgttattgagtgagcagttctttaatgaagcatttcatggaggggaaaaaaaatcatttttttttttcatgtagatcttttccagatccacgagggaaagattatttacagattaaagccctcactgtttcctgtgtcactgcaaagcaaataatgagcagaacttgaaaagccctgctatctcctggcttggaatgccagcccctctcagaacattagaaatgccagcacrcttttgtggtaccagatgactgtgtttcatagtggattctttcctgatttaatgctgctaatgatygtgtgagctggattgaaaatgtatgtrcacatttaaaatctcagcttttgtatttgaatttaagtcttacaggaagagcccatttggaacagaagcatgagtttaaaatctctttttttgttgttgtttttctttyttcttttttttaattgtgattccttcaaagccatgcaatccatgtaggattacagatcaggaatgaagttcttgctgtaagcatggatgtgtggtgtg

SEQ ID NO: 22744 - DNA, 600 bp, Chicken  19866894235391_3
cttgttattgagtgagcagttctttaatgaagcatttcatggaggggaaaaaaaatcatttttttttttcatgtagatcttttccagatccacgagggaaagattatttacagattaaagccctcactgtttcctgtgtcactgcaaagcaaataatgagcagaacttgaaaagccctgctatctcctggcttggaatgccagcccctctcagaacattagaaatgccagcacrcttttgtggtaccagatgactgtgtttcatagtggattctttcctgatttaatgctgctaatgatygtgtgagctggattgaaaatgtatgtrcacatttaaaatctcagcttttgtatttgaatttaagtcttacaggaagagcccatttggaacagaagcatgagtttaaaatctctttttttgttgttgtttttctttyttcttttttttaattgtgattccttcaaagccatgcaatccatgtaggattacagatcaggaatgaagttcttgctgtaagcatggatgtgtggtgtgctggcacgtgacagacagccagcagtctttccacagaagctgagtcactggggtaattggggagtt

SEQ ID NO: 22745 - DNA, 600 bp, Chicken  19866894235391_4
tgaagcatttcatggaggggaaaaaaaatcatttttttttttcatgtagatcttttccagatccacgagggaaagattatttacagattaaagccctcactgtttcctgtgtcactgcaaagcaaataatgagcagaacttgaaaagccctgctatctcctggcttggaatgccagcccctctcagaacattagaaatgccagcacrcttttgtggtaccagatgactgtgtttcatagtggattctttcctgatttaatgctgctaatgatygtgtgagctggattgaaaatgtatgtrcacatttaaaatctcagcttttgtatttgaatttaagtcttacaggaagagcccatttggaacagaagcatgagtttaaaatctctttttttgttgttgtttttctttyttcttttttttaattgtgattccttcaaagccatgcaatccatgtaggattacagatcaggaatgaagttcttgctgtaagcatggatgtgtggtgtgctggcacgtgacagacagccagcagtctttccacagaagctgagtcactggggtaattggggagtttcttttttaaacagcagcagtgaattc

SEQ ID NO: 22746 - DNA, 600 bp, Chicken  19866894235391_5
tgtcactgcaaagcaaataatgagcagaacttgaaaagccctgctatctcctggcttggaatgccagcccctctcagaacattagaaatgccagcacrcttttgtggtaccagatgactgtgtttcatagtggattctttcctgatttaatgctgctaatgatygtgtgagctggattgaaaatgtatgtrcacatttaaaatctcagcttttgtatttgaatttaagtcttacaggaagagcccatttggaacagaagcatgagtttaaaatctctttttttgttgttgtttttctttyttcttttttttaattgtgattccttcaaagccatgcaatccatgtaggattacagatcaggaatgaagttcttgctgtaagcatggatgtgtggtgtgctggcacgtgacagacagccagcagtctttccacagaagctgagtcactggggtaattggggagtttcttttttaaacagcagcagtgaattcatgcttgaagcagcctcaaacaggaaaagaagaataaactttaagtgtaaatcttctgctttgtgtcattactttctccttcccttttcccatgcagtgacaatgtatc

SEQ ID NO: 22747 - DNA, 600 bp, Chicken  19866894235391_6
ttctccttcccttttcccatgcagtgacaatgtatcaggtaacaaaggaaaagtgaactatgtcatagatgggaataataagaagtagcaagatctgtgggataaaggtcccaaactaaaacaagaaatatagaagcatctaacttctaacataatggaaagaaaaatagatacaagtatatatagaacatttgggcaaactgagtacagttttcttctatacaagatagagcaggtgagaagattatccagctacccatccttgactaaaggaaaaacacttctagctagctgacatasgttatttgtgaaatacccagcatatatctgtaacacattctgctcccaaactgcrctttacaacaaaatctggcaacacttggcccttctgcttgcagtgctggtattgccactgctttgaaaagattggtttcagtgacagggttgatctgagcgtgtcttatctgctgtatagccatgggatggagacttgtgacctgcagtctcaggtacaaaagataacatttgctttgtctttgttccagcagaagcctgtgatacaatctctgactccagcccttgaaagagtttgtagagatt

SEQ ID NO: 22748 - DNA, 600 bp, Chicken  19866894235391_7
aactatgtcatagatgggaataataagaagtagcaagatctgtgggataaaggtcccaaactaaaacaagaaatatagaagcatctaacttctaacataatggaaagaaaaatagatacaagtatatatagaacatttgggcaaactgagtacagttttcttctatacaagatagagcaggtgagaagattatccagctacccatccttgactaaaggaaaaacacttctagctagctgacatasgttatttgtgaaatacccagcatatatctgtaacacattctgctcccaaactgcrctttacaacaaaatctggcaacacttggcccttctgcttgcagtgctggtattgccactgctttgaaaagattggtttcagtgacagggttgatctgagcgtgtcttatctgctgtatagccatgggatggagacttgtgacctgcagtctcaggtacaaaagataacatttgctttgtctttgttccagcagaagcctgtgatacaatctctgactccagcccttgaaagagtttgtagagattaggtaaatagagacattgatcatttttagaacaagtgaaatgggatagattttta

SEQ ID NO: 22749 - DNA, 600 bp, Chicken  19866894235391_8
tccagcagaagcctgtgatacaatctctgactccagcccttgaaagagtttgtagagattaggtaaatagagacattgatcatttttagaacaagtgaaatgggatagatttttagataggacagtggcttgaagatgtttgcataggtgatctgggaaactcagctttgtctggtgtggttttgccagccattggctggtactgctttctatctctttcagagcttatctggttttaattaatatttcttttctatctcattttcaaatatgctatcacattaaacatttttgaaacakagctggctgggtctacattctgaagtactgaaaatccttagtcatctgttattaaagagctgaaatgcaggtactttattcsgtggagaagtcacagatgccaaaaatttaaagcaatgaagaaatacagggarcctttgaatgtgcagtgtaagaagactctggtagcacaaataacaccatggtttattttttttctctttttaaggattcttcatatcccatgttgtgcaaacatgattgatgatatgttaaaatgtgccagaacaatgtttctagagattccgctgctctggatgg

SEQ ID NO: 22750 - DNA, 600 bp, Chicken  19866894235391_9
tttttagaacaagtgaaatgggatagatttttagataggacagtggcttgaagatgtttgcataggtgatctgggaaactcagctttgtctggtgtggttttgccagccattggctggtactgctttctatctctttcagagcttatctggttttaattaatatttcttttctatctcattttcaaatatgctatcacattaaacatttttgaaacakagctggctgggtctacattctgaagtactgaaaatccttagtcatctgttattaaagagctgaaatgcaggtactttattcsgtggagaagtcacagatgccaaaaatttaaagcaatgaagaaatacagggarcctttgaatgtgcagtgtaagaagactctggtagcacaaataacaccatggtttattttttttctctttttaaggattcttcatatcccatgttgtgcaaacatgattgatgatatgttaaaatgtgccagaacaatgtttctagagattccgctgctctggatggggaatagagagcttgatacttacttggttgcaaattcatctatttataaaatataagtatgccccctttagacaggtagatg

SEQ ID NO: 22751 - DNA, 600 bp, Chicken  19866894235398_1
tgtgatttgcggggactgggtaggctagccacagggcctccaaggagagagcagtctcttaatcaagatgtgcacaaggctctgccgagcacctgaaggctacatcactgtaagaagcagcagggagcaacaggagctaaaggaaatctgcaatgctgtgctttctgtaacagctaaaacaagaattaaaaaaataaaaaaaatgcctacttgctactagaacatttggtggggcgtgcaacaccttttattcctttcattaaatgtattgtgattttttctgtccattctccaaaggtyctggcttgcttgcctgtcctctgcaatgcccaaagccctggggcagctgccccatctcaccctgcacagagtgggagcagttgctgcctcaggtgtctatgaggcagagtagagaggactagaagggcagtgttactaaatgtgacaaaaattgatgagacgtgtggatgtgcatgtacagatgagtccaccacaggtaggtcactgttctgctaattggtgttaccagggcttgggctgggagagctgctgcacagttgtgcctgcagggccagtctgtttctcctacataattactgt

SEQ ID NO: 22752 - DNA, 599 bp, Chicken  19866894235402_1
  misc_feature (1)..(173): n is any nucleotide
nnnnnnnnnnnnnnnnnnnnnnnnnnnnnnnnnnnnnnnnnnnnnnnnnnnnnnnnnnnnnnnnnnnnnnnnnnnnnnnnnnnnnnnnnnnnnnnnnnnnnnnnnnnnnnnnnnnnnnnnnnnnnnnnnnnnnnnnnnnnnnnnnnnnnnnnnnnnnnnnnnnnnnnnnnnnnaatgccgtggtttgcacagtggtttctggatgcaggctgacagatgctagattttctgggaactttatctggggtcatcatagaacttctggaacaatttgaggagcttcaggatgcctcctgctcyggggaagggacagctacagaatgctgtgatggctagcaagctgtagcagcttctcacaagccttattgtcaactttccttgattaaaaaaaaaaggagtctttcagctttttgtttccagctgacttctcataagggagaaccaagcattcattcagaacgtgcaagagagggcatatgttaccagtggtcctagagcacagccaacagagacagcagtgtagcagggggccagaaattctgtcagagactccatatgcttagcaatggtagcaaggtgctgcagggttcaatccccaa

SEQ ID NO: 22753 - DNA, 599 bp, Chicken  19866894235418_1
  misc_feature (1)..(30): n is any nucleotide
nnnnnnnnnnnnnnnnnnnnnnnnnnnnnnaaaagaattttggaaccgtgaaagagcgttacactctgccagtaaatctgcaacgatgaaaactgaactctggcataataacttctgagcagagatacagatctggcacaaatatcagattgtaaaagaaaatgtgagatctcagagtgtgagttgagatcagcagcagcgccattggctgaggaagtgaaaataagctttccaaatatgcttagaaacaagtatcagaagatgcattgtttcaggaccttgaaaccaaatagttgtctwtagtgcacaatggaagaaccctcctaaattattgaagcctgttaaacacatgcaggaaaatgtataatgacttacatgtatcatctgcatggtgccctgggtttgcagatgatgggagttgatgactgaagcaatctctggaaataagaaccatgctgatcgcacagatggacacaaatctcacacatctgacattttacactcagagacaatctgctttaaaagcaaagcaagattaatgccctatttgcacagtcctaaaaatagaatcactatgacatctttacaataatggagag

SEQ ID NO: 22754 - DNA, 567 bp, Chicken  19866894235427_1
caaccaagtaagaagctaaacatccctagaacgcttgagtatttaggtaccctaatggaaactatatagttacctgctgtatgtatgagccccccctgaaccgcagtggttgggaagacagaatgtagaaatagaagaagcccaagctgttctggcaatttgtagtttggaagtggttttctcacaagttttacatggtcattgtggtgggcggtggttgaaagaatttgctctgggtttgggagttgcactttgtagcacctacagtttctacagtgtaatgatttctgagcttgacgktagtacatgtgtgtgtgtagagcttgttgtagagctctacattggttgttaaacagagaatcagaatttgatggcaaaactgtggtttgagagactcagagctagtgctctgggtatcttctagttctcatcctgtttcatgtttctcacttggcatcttacatgcagtggggaaaaaaagcccaacaaaacaaaacaaaacaaacaaacaaaaaaacaacaactacaaaaaaaaccccacaacccaaaccaacaacaccaaaccca

SEQ ID NO: 22755 - DNA, 599 bp, Chicken  19866894235431_1
  misc_feature (1)..(198): n is any nucleotide
nnnnnnnnnnnnnnnnnnnnnnnnnnnnnnnnnnnnnnnnnnnnnnnnnnnnnnnnnnnnnnnnnnnnnnnnnnnnnnnnnnnnnnnnnnnnnnnnnnnnnnnnnnnnnnnnnnnnnnnnnnnnnnnnnnnnnnnnnnnnnnnnnnnnnnnnnnnnnnnnnnnnnnnnnnnnnnnnnnnnnnnnnnnnnnnnnnnnnnctactcctaaagcctcaagaatgcatgaggaaggcatttctctgcgatggtttttttccattattgttcttcctcgtgagtaagctcgaggccatgttccgstgcctctggagaaaatggcttctcacattcaccccgtcttctagaaacgctcatttctgcggctctggcgacagcgcaggcacacctgtagcacctcggccacgggctgctgcgtgccggggagccagaaagaggacctgaggcactagatcccgtgtaacctcgagccgcgctcagggaccctcccrccccacagccacactcggcgcccctcgccccctccttccacctccacagggcgcagcctctctccggccgcaggaggagcagcaagaacaacgcccgcggcagcaccacag

SEQ ID NO: 22756 - DNA, 584 bp, Chicken  19866894235431_2
  misc_feature (1)..(10): n is any nucleotide
nnnnnnnnnnctactcctaaagcctcaagaatgcatgaggaaggcatttctctgcgatggtttttttccattattgttcttcctcgtgagtaagctcgaggccatgttccgstgcctctggagaaaatggcttctcacattcaccccgtcttctagaaacgctcatttctgcggctctggcgacagcgcaggcacacctgtagcacctcggccacgggctgctgcgtgccggggagccagaaagaggacctgaggcactagatcccgtgtaacctcgagccgcgctcagggaccctcccrccccacagccacactcggcgcccctcgccccctccttccacctccacagggcgcagcctctctccggccgcaggaggagcagcaagaacaacgcccgcggcagcaccacagccacgcaacgctgccacttacggacgcggtctcgcgccgccgcggtggcgcctggggcggccgccaaccaaccgctcagttacaggtgctgttcgcggggactacgcgccccagcatgcaccgcgccaggccccgcgcggcaggccgccaggcagggaccgcggggcgcgatg

SEQ ID NO: 22757 - DNA, 600 bp, Chicken  19866894235434_1
ttgaaatgggaaatcacacctgaaccattgcaggggattacgctttttcactaattgatttgttttcaggagaacttaacggagcaggagagagattcctggcagctcggggaggtctcggtggctctttggccacaaacttcttgccttgcaaaggccagaggcgaattgttcatcttgatttgaaacttatagccgacgtgggcttagttgggtgagtactgctgtcctgtgctgtggtttgagaactgacatcaaaaacaaagcagtaaatttctaaaaggatctgaaagaaattamagagctggagtttgagtgtygttataactttgccacttcagttacttcaagtttgtaaaaataaggacttaaaacctattaaaattaattctaaaatatggcaaatgttggttatacctcgttaattgtggtcatcrgtttaacatacatgaatttagcaactgcagtgattctcaaagtactgatagcgaagatttgtacgttaagtagtcagtacaaaacaaagctaagagcagtatccatattggctcttctaccttatggtactggcamaagtggatcctttcagtagtagtctta

SEQ ID NO: 22758 - DNA, 600 bp, Chicken  19866894235434_10
taaaataaataaataaataaatctgtaaagactgtaaagtaaaagcaactggttttaggctgaagtgctttaatttgtatatcccctcacagaatggaaccctgaatacagctaggtttttttctttgttatttattacaaataactcggtagctctgttaataacagaaatattagttatatcattttcaactgatttccaggagtatgttatacaraatattttggttttagagttgygcataatacaggagttctgtggtgcttctttagccctacgttttagcttgtgttttatcygatagttccccttcagaaatcattaaataaagatcgattaatttgaggagatgattattttcttgttgagagtatgaatcaacctctgataatttgygattgtactttgatcttgtagagtgtattatttttacttcagtagatttgtaagtggtttgctattaaatcaggtctgaaaacatctaggctttaggaagggccctcaagtttgggtacrggttgtgatgtatagtgtaggttgcaatttaaacttcaaagaggatattgtgcctcagtggaagcaaaatacgtgcttgagga

SEQ ID NO: 22759 - DNA, 600 bp, Chicken  19866894235434_11
aaccctgaatacagctaggtttttttctttgttatttattacaaataactcggtagctctgttaataacagaaatattagttatatcattttcaactgatttccaggagtatgttatacaraatattttggttttagagttgygcataatacaggagttctgtggtgcttctttagccctacgttttagcttgtgttttatcygatagttccccttcagaaatcattaaataaagatcgattaatttgaggagatgattattttcttgttgagagtatgaatcaacctctgataatttgygattgtactttgatcttgtagagtgtattatttttacttcagtagatttgtaagtggtttgctattaaatcaggtctgaaaacatctaggctttaggaagggccctcaagtttgggtacrggttgtgatgtatagtgtaggttgcaatttaaacttcaaagaggatattgtgcctcagtggaagcaaaatacgtgcttgaggagatgaccagagtaatgttccaggctgtctttaaggcacctttcaatatcagagagcattaaaattaccctgaataattttctgttctaacagagtct

SEQ ID NO: 22760 - DNA, 600 bp, Chicken  19866894235434_12
raatattttggttttagagttgygcataatacaggagttctgtggtgcttctttagccctacgttttagcttgtgttttatcygatagttccccttcagaaatcattaaataaagatcgattaatttgaggagatgattattttcttgttgagagtatgaatcaacctctgataatttgygattgtactttgatcttgtagagtgtattatttttacttcagtagatttgtaagtggtttgctattaaatcaggtctgaaaacatctaggctttaggaagggccctcaagtttgggtacrggttgtgatgtatagtgtaggttgcaatttaaacttcaaagaggatattgtgcctcagtggaagcaaaatacgtgcttgaggagatgaccagagtaatgttccaggctgtctttaaggcacctttcaatatcagagagcattaaaattaccctgaataattttctgttctaacagagtctttgtgtctctgatctttttgaagaaagcctttacaagcctatcataactgcccctttataaagccccttaakttaatattagtcttatttttccgtattggttgtccttgctaacaggtt

SEQ ID NO: 22761 - DNA, 445 bp, Chicken  19866894235434_13
ggtctgaaaacatctaggctttaggaagggccctcaagtttgggtacrggttgtgatgtatagtgtaggttgcaatttaaacttcaaagaggatattgtgcctcagtggaagcaaaatacgtgcttgaggagatgaccagagtaatgttccaggctgtctttaaggcacctttcaatatcagagagcattaaaattaccctgaataattttctgttctaacagagtctttgtgtctctgatctttttgaagaaagcctttacaagcctatcataactgcccctttataaagccccttaakttaatattagtcttatttttccgtattggttgtccttgctaacaggttatgattgtgtgtgttttaggtggagagtaccagagttttttgtctggcacattctgatgtacccccacctttatggccaataatcagttgcatgcag

SEQ ID NO: 22762 - DNA, 600 bp, Chicken  19866894235434_2
tgaaccattgcaggggattacgctttttcactaattgatttgttttcaggagaacttaacggagcaggagagagattcctggcagctcggggaggtctcggtggctctttggccacaaacttcttgccttgcaaaggccagaggcgaattgttcatcttgatttgaaacttatagccgacgtgggcttagttgggtgagtactgctgtcctgtgctgtggtttgagaactgacatcaaaaacaaagcagtaaatttctaaaaggatctgaaagaaattamagagctggagtttgagtgtygttataactttgccacttcagttacttcaagtttgtaaaaataaggacttaaaacctattaaaattaattctaaaatatggcaaatgttggttatacctcgttaattgtggtcatcrgtttaacatacatgaatttagcaactgcagtgattctcaaagtactgatagcgaagatttgtacgttaagtagtcagtacaaaacaaagctaagagcagtatccatattggctcttctaccttatggtactggcamaagtggatcctttcagtagtagtcttaaagaaagtgctgaaggctac

SEQ ID NO: 22763 - DNA, 600 bp, Chicken  19866894235434_3
aacttcttgccttgcaaaggccagaggcgaattgttcatcttgatttgaaacttatagccgacgtgggcttagttgggtgagtactgctgtcctgtgctgtggtttgagaactgacatcaaaaacaaagcagtaaatttctaaaaggatctgaaagaaattamagagctggagtttgagtgtygttataactttgccacttcagttacttcaagtttgtaaaaataaggacttaaaacctattaaaattaattctaaaatatggcaaatgttggttatacctcgttaattgtggtcatcrgtttaacatacatgaatttagcaactgcagtgattctcaaagtactgatagcgaagatttgtacgttaagtagtcagtacaaaacaaagctaagagcagtatccatattggctcttctaccttatggtactggcamaagtggatcctttcagtagtagtcttaaagaaagtgctgaaggctacgtagcctgctctcccartaaacagcatgraatgtgggaaggaagaaattacaagctagaayggtagggtttgtatttgttttgcgctgatgcttttcagttttgctgcttattaaca

SEQ ID NO: 22764 - DNA, 600 bp, Chicken  19866894235434_4
tttctaaaaggatctgaaagaaattamagagctggagtttgagtgtygttataactttgccacttcagttacttcaagtttgtaaaaataaggacttaaaacctattaaaattaattctaaaatatggcaaatgttggttatacctcgttaattgtggtcatcrgtttaacatacatgaatttagcaactgcagtgattctcaaagtactgatagcgaagatttgtacgttaagtagtcagtacaaaacaaagctaagagcagtatccatattggctcttctaccttatggtactggcamaagtggatcctttcagtagtagtcttaaagaaagtgctgaaggctacgtagcctgctctcccartaaacagcatgraatgtgggaaggaagaaattacaagctagaayggtagggtttgtatttgttttgcgctgatgcttttcagttttgctgcttattaacaacacaggtaaacatttatttggacagagcttctaacaaactacaattgtgtaagtgttggtctgcttggcattatttttccctttcagtccctattcataaaataaataaataaataaatctgtaaagactgtaaa

SEQ ID NO: 22765 - DNA, 600 bp, Chicken  19866894235434_5
tcagttacttcaagtttgtaaaaataaggacttaaaacctattaaaattaattctaaaatatggcaaatgttggttatacctcgttaattgtggtcatcrgtttaacatacatgaatttagcaactgcagtgattctcaaagtactgatagcgaagatttgtacgttaagtagtcagtacaaaacaaagctaagagcagtatccatattggctcttctaccttatggtactggcamaagtggatcctttcagtagtagtcttaaagaaagtgctgaaggctacgtagcctgctctcccartaaacagcatgraatgtgggaaggaagaaattacaagctagaayggtagggtttgtatttgttttgcgctgatgcttttcagttttgctgcttattaacaacacaggtaaacatttatttggacagagcttctaacaaactacaattgtgtaagtgttggtctgcttggcattatttttccctttcagtccctattcataaaataaataaataaataaatctgtaaagactgtaaagtaaaagcaactggttttaggctgaagtgctttaatttgtatatcccctcacagaatggaaccc

SEQ ID NO: 22766 - DNA, 600 bp, Chicken  19866894235434_6
agtttgtaaaaataaggacttaaaacctattaaaattaattctaaaatatggcaaatgttggttatacctcgttaattgtggtcatcrgtttaacatacatgaatttagcaactgcagtgattctcaaagtactgatagcgaagatttgtacgttaagtagtcagtacaaaacaaagctaagagcagtatccatattggctcttctaccttatggtactggcamaagtggatcctttcagtagtagtcttaaagaaagtgctgaaggctacgtagcctgctctcccartaaacagcatgraatgtgggaaggaagaaattacaagctagaayggtagggtttgtatttgttttgcgctgatgcttttcagttttgctgcttattaacaacacaggtaaacatttatttggacagagcttctaacaaactacaattgtgtaagtgttggtctgcttggcattatttttccctttcagtccctattcataaaataaataaataaataaatctgtaaagactgtaaagtaaaagcaactggttttaggctgaagtgctttaatttgtatatcccctcacagaatggaaccctgaatacagcta

SEQ ID NO: 22767 - DNA, 600 bp, Chicken  19866894235434_7
aaattaattctaaaatatggcaaatgttggttatacctcgttaattgtggtcatcrgtttaacatacatgaatttagcaactgcagtgattctcaaagtactgatagcgaagatttgtacgttaagtagtcagtacaaaacaaagctaagagcagtatccatattggctcttctaccttatggtactggcamaagtggatcctttcagtagtagtcttaaagaaagtgctgaaggctacgtagcctgctctcccartaaacagcatgraatgtgggaaggaagaaattacaagctagaayggtagggtttgtatttgttttgcgctgatgcttttcagttttgctgcttattaacaacacaggtaaacatttatttggacagagcttctaacaaactacaattgtgtaagtgttggtctgcttggcattatttttccctttcagtccctattcataaaataaataaataaataaatctgtaaagactgtaaagtaaaagcaactggttttaggctgaagtgctttaatttgtatatcccctcacagaatggaaccctgaatacagctaggtttttttctttgttatttattacaaataac

SEQ ID NO: 22768 - DNA, 600 bp, Chicken  19866894235434_8
atttggacagagcttctaacaaactacaattgtgtaagtgttggtctgcttggcattatttttccctttcagtccctattcataaaataaataaataaataaatctgtaaagactgtaaagtaaaagcaactggttttaggctgaagtgctttaatttgtatatcccctcacagaatggaaccctgaatacagctaggtttttttctttgttatttattacaaataactcggtagctctgttaataacagaaatattagttatatcattttcaactgatttccaggagtatgttatacaraatattttggttttagagttgygcataatacaggagttctgtggtgcttctttagccctacgttttagcttgtgttttatcygatagttccccttcagaaatcattaaataaagatcgattaatttgaggagatgattattttcttgttgagagtatgaatcaacctctgataatttgygattgtactttgatcttgtagagtgtattatttttacttcagtagatttgtaagtggtttgctattaaatcaggtctgaaaacatctaggctttaggaagggccctcaagtttgggtacrg

SEQ ID NO: 22769 - DNA, 600 bp, Chicken  19866894235434_9
actacaattgtgtaagtgttggtctgcttggcattatttttccctttcagtccctattcataaaataaataaataaataaatctgtaaagactgtaaagtaaaagcaactggttttaggctgaagtgctttaatttgtatatcccctcacagaatggaaccctgaatacagctaggtttttttctttgttatttattacaaataactcggtagctctgttaataacagaaatattagttatatcattttcaactgatttccaggagtatgttatacaraatattttggttttagagttgygcataatacaggagttctgtggtgcttctttagccctacgttttagcttgtgttttatcygatagttccccttcagaaatcattaaataaagatcgattaatttgaggagatgattattttcttgttgagagtatgaatcaacctctgataatttgygattgtactttgatcttgtagagtgtattatttttacttcagtagatttgtaagtggtttgctattaaatcaggtctgaaaacatctaggctttaggaagggccctcaagtttgggtacrggttgtgatgtatagtgtaggtt

SEQ ID NO: 22770 - DNA, 600 bp, Chicken  19866894235441_1
ctgggcttttccagcctagagaagagaaggctccacagagaccctcactgtggctttccagtgcttaaagtgagcttacaagcaggaggacaacccagcaatttacactgtctaatagtgacagggccaggggaatagctataaactaaaagatgggaaaactacatttgattttaggaaaaatttttttactcagagggcagtgtggcactggcattgctgcccagagaagctgtggatgttccattcctggaggtgctcaaggccaggttcaatggggccctgggcagcctgagctgrtggggagcaattagtccagggcaggaagctggactcagtagactttatggtcccttccaacccaagccattctggtttatatgtttcaagccagatgagatgtttgggaaacactaattataagtgaaatatgattgttcaactctttttattttcatttatttaaaaaaaaaaaaaagccttagacataaaatatcatatagcacccaacatccaaactgccttatattaactgtattttcttttagtgggcattggtaatcaaaggaaaaaaatctgttctgttatatagggaaagga

SEQ ID NO: 22771 - DNA, 600 bp, Chicken  19866894235441_2
gactcagtagactttatggtcccttccaacccaagccattctggtttatatgtttcaagccagatgagatgtttgggaaacactaattataagtgaaatatgattgttcaactctttttattttcatttatttaaaaaaaaaaaaaagccttagacataaaatatcatatagcacccaacatccaaactgccttatattaactgtattttcttttagtgggcattggtaatcaaaggaaaaaaatctgttctgttatatagggaaaggatatctactttgaggaccgtgcagtttggcaraacaaccttttagagtatttttgtaggttagtatacctaaagggaaaaaagagtgcaatatgtaagtgaacagaaatacatttggtatttaactatagttcacagtcatttaattactcattttcttcatcagccttttccatttctggattgaacctgcttcacaatctcaagagcttgctcactgcttgaataaaaatttgagatgcacctgcttcttcaatgggccatgaaaaacttaatttgagcagaaactgtaaatttgtgaacaacctcaattctcattgctcagggaagtag

SEQ ID NO: 22772 - DNA, 600 bp, Chicken  19866894235441_3
ttaatactaattttggcaagaacttatactttagatgtgaaattcactctttggaaagagctaataaaaattaagaggaaaacaccaagatcaagtccctagagtaaactcatcaatttgtgttaggcttttttttccattcaggtgccttgcaaactggtttcattctcataaataatgacttgttggtaaatctgagggcatcttttagttgcatctggcacactgcattactcatttaaatctctgcagatatgtgcaagtctttgcttctcccttatagtcttcttgcacacatcstcctcagaggtctatgttttggtcttactcttccatgccctgttttctaataatgggcaaaagcaacaggccaagcaagggtgtacagacactttcagtcacagattctaaatctaaatcagctaacasagtctttacgcagggactgtgtaatgttgaaggagtttcacagccaggctcagtctgggaaacatgggtcttcccatgttactaagagctgggacacttccttacactgaactagaacacccttggaagggttgggtgtttcagctcctcatttacacctacacacagtca

SEQ ID NO: 22773 - DNA, 600 bp, Chicken  19866894235441_4
tttttttccattcaggtgccttgcaaactggtttcattctcataaataatgacttgttggtaaatctgagggcatcttttagttgcatctggcacactgcattactcatttaaatctctgcagatatgtgcaagtctttgcttctcccttatagtcttcttgcacacatcstcctcagaggtctatgttttggtcttactcttccatgccctgttttctaataatgggcaaaagcaacaggccaagcaagggtgtacagacactttcagtcacagattctaaatctaaatcagctaacasagtctttacgcagggactgtgtaatgttgaaggagtttcacagccaggctcagtctgggaaacatgggtcttcccatgttactaagagctgggacacttccttacactgaactagaacacccttggaagggttgggtgtttcagctcctcatttacacctacacacagtcaacagccataaattactcgtaggttccttaaatgcacatcagtatagcatagataatcctaagaggaacaggtacacttcagaatccattaagagaagtgggcacatcttaatacctcttccttcatcat

SEQ ID NO: 22774 - DNA, 600 bp, Chicken  19866894235445_1
ttttatttgtttcatggacttttatacttcctttttagaaagataaatgagatttatctgagcctctgtatctcttctgcttcttgcagatattttacttttgaaatctgaatgagataaattttactacatttatgattctatttttggaggggatgaagctgacaaatcatatggagccatgtgaaatttgtccaggaaaaaaaaaaagagcttctttagaaaagcaggagttttttaggaagtagtggctatttgtcattcaccatttcagtagaggaggtcaagtgatggccacayttgccaacaaagaagggcaacagaactgaagggtctggggcacaaatgttatggggagcagctgagagaactggagttgttgagtctggagaggaggaggctcaggggagactgctctgcaactccctgaaaggaggttgtagtgaggyggtggttggcctcttctgccagggcacagcaataggatgagaggtaatggccttaagttgcacaaggcttaggttgggtattgtaaaaaatgtattctctgaaagagtggtcaagtaytgaaacaggatgcccaaggtrgtggtcgaatca

SEQ ID NO: 22775 - DNA, 600 bp, Chicken  19866894235445_2
gaggggatgaagctgacaaatcatatggagccatgtgaaatttgtccaggaaaaaaaaaaagagcttctttagaaaagcaggagttttttaggaagtagtggctatttgtcattcaccatttcagtagaggaggtcaagtgatggccacayttgccaacaaagaagggcaacagaactgaagggtctggggcacaaatgttatggggagcagctgagagaactggagttgttgagtctggagaggaggaggctcaggggagactgctctgcaactccctgaaaggaggttgtagtgaggyggtggttggcctcttctgccagggcacagcaataggatgagaggtaatggccttaagttgcacaaggcttaggttgggtattgtaaaaaatgtattctctgaaagagtggtcaagtaytgaaacaggatgcccaaggtrgtggtcgaatcactgtccctggaggtgttcaagaaatgtgtggatgtggcagtgtggagcgtgggttagtgggcaagattgagggatgggctggaggttggactagatgtggtctttactaaccttaatattctatgattctataccaattacgtccagct

SEQ ID NO: 22776 - DNA, 505 bp, Chicken  19866894235445_3
atttcagtagaggaggtcaagtgatggccacayttgccaacaaagaagggcaacagaactgaagggtctggggcacaaatgttatggggagcagctgagagaactggagttgttgagtctggagaggaggaggctcaggggagactgctctgcaactccctgaaaggaggttgtagtgaggyggtggttggcctcttctgccagggcacagcaataggatgagaggtaatggccttaagttgcacaaggcttaggttgggtattgtaaaaaatgtattctctgaaagagtggtcaagtaytgaaacaggatgcccaaggtrgtggtcgaatcactgtccctggaggtgttcaagaaatgtgtggatgtggcagtgtggagcgtgggttagtgggcaagattgagggatgggctggaggttggactagatgtggtctttactaaccttaatattctatgattctataccaattacgtccagctaaaccaagcacatgtgtacgata

SEQ ID NO: 22777 - DNA, 484 bp, Chicken  19866894235445_4
tgatggccacayttgccaacaaagaagggcaacagaactgaagggtctggggcacaaatgttatggggagcagctgagagaactggagttgttgagtctggagaggaggaggctcaggggagactgctctgcaactccctgaaaggaggttgtagtgaggyggtggttggcctcttctgccagggcacagcaataggatgagaggtaatggccttaagttgcacaaggcttaggttgggtattgtaaaaaatgtattctctgaaagagtggtcaagtaytgaaacaggatgcccaaggtrgtggtcgaatcactgtccctggaggtgttcaagaaatgtgtggatgtggcagtgtggagcgtgggttagtgggcaagattgagggatgggctggaggttggactagatgtggtctttactaaccttaatattctatgattctataccaattacgtccagctaaaccaagcacatgtgtacgata

SEQ ID NO: 22778 - DNA, 600 bp, Chicken  19866894235447_1
attttacaacatatttgtttgagaaatatctcagagaaacttagttttcattcaaacagcttttgtggatctaaaaaagtacactgatgtaagtactccaactgatgaagaagtagtagaaaattctatttagtagatgctatgcacctgagtgagggatactaacccatgttttgttgatgtcttaacctatctcatgaatatatttatacctacataatatatataaatatatttatattataaatctgtgaggaaggcatttatctatatacatatggaaagactatggaaagagtragggatttcacactaccacttgggcagatgcatttccaggccaactctctgccagctacttgaagatgctccacttacctgtagactctggagccctccataagcagtgaagagaagtaaaaatccaaaagcaatgaccaaaacattcttaagattcctttccatgttgattcaaacaagacaaaggtctcccagtgcacagaattgatccaactattccgggggatgctttgagatggagaaaagcagcttatgttttgttaggaaagatcacttctcactgtgtttgtagaggaaaga

SEQ ID NO: 22779 - DNA, 599 bp, Chicken  19866894235449_1
  misc_feature (1)..(69): n is any nucleotide
nnnnnnnnnnnnnnnnnnnnnnnnnnnnnnnnnnnnnnnnnnnnnnnnnnnnnnnnnnnnnnnnnnnnngagcacgctttattgcctcagtcaaaacaggtgaatgagtaatgactctgtatggagttttagtatcagaaaaagtaaagttcattggacaatcctcaaataattaacaactctttcctctacaaacacagtgagaagtgatctttcctaacaaaacataagctgcttttctccatctcaaagcatcccctggaatagttggatcaattctgtgcactgggagacctttgycttgtttgaatcaacatggaaaggaatcttaagaatgttttggtcattgcttttggatttttacttctcttcactgcttatggagggctccagagtctacaggtaagtggagcatcttcaagtagctggcagagagttggcctggaaatgcatctgcccaagtggtagtgtgaaatccctcagtctttccatagtctttccatatgtatgtagataaatgccttcctcacagatttataatataaatatatttatatatattaygtaggtatagatatattcatgagatatgttaagac

SEQ ID NO: 22780 - DNA, 600 bp, Chicken  19866894235449_2
tagttggatcaattctgtgcactgggagacctttgycttgtttgaatcaacatggaaaggaatcttaagaatgttttggtcattgcttttggatttttacttctcttcactgcttatggagggctccagagtctacaggtaagtggagcatcttcaagtagctggcagagagttggcctggaaatgcatctgcccaagtggtagtgtgaaatccctcagtctttccatagtctttccatatgtatgtagataaatgccttcctcacagatttataatataaatatatttatatatattaygtaggtatagatatattcatgagatatgttaagacatcaacataacatgggttagtatccctcactcaggtgcatagcatctactaaatagaattttctactacttcttcatcagttggaatacttacatcagtgtacttttttagatccacaaaagctgtttgaatgaaaactaagtttctctgagatatttctcaaacaaatatgttgtaaaattgcaaacaaatttcttttctggaaatgtttttggttttgaacacttcctaattgctataatttcattattttaaaacacagcaa

SEQ ID NO: 22781 - DNA, 600 bp, Chicken  19866894235457_1
tgaaacctctgccatttcagcatttgctccaatggaaacagaatttaggttgtgcttgtgacatttccactgacttgtatttgtgctgaaatctgtgtccttgtgctgaaatttgtgtcgtatgaattgaattgtagatgtaaaaaatgaacggaatgggagcatgctgtatccacacatgagcatgtgttcattttacttagtcatggagaaacagaaactgaaaatggttagaacagcccaaaaacagtgaagtatgagtgttatcagcttgttcccataagaaggggaaaagatccygtgtgacagaaaagttcttatttctatgtgataaagaaaactggtctgactcttcactgttgcgaaagcaatggcatgttcartgaaaatggcaggaaatcccacacaaatagggrttgctactgtatggagcacatacgcaatctgtggcaataactgctggaagatgtcatgaagatagataagtcagaagtacttcaggaactaccggttaattttatcagtattaataattgctgatagttcagcgacatcaaatgacaatctgtaccccagtttgcacctcacgattcaaatcat

SEQ ID NO: 22782 - DNA, 600 bp, Chicken  19866894235457_2
tgctgaaatctgtgtccttgtgctgaaatttgtgtcgtatgaattgaattgtagatgtaaaaaatgaacggaatgggagcatgctgtatccacacatgagcatgtgttcattttacttagtcatggagaaacagaaactgaaaatggttagaacagcccaaaaacagtgaagtatgagtgttatcagcttgttcccataagaaggggaaaagatccygtgtgacagaaaagttcttatttctatgtgataaagaaaactggtctgactcttcactgttgcgaaagcaatggcatgttcartgaaaatggcaggaaatcccacacaaatagggrttgctactgtatggagcacatacgcaatctgtggcaataactgctggaagatgtcatgaagatagataagtcagaagtacttcaggaactaccggttaattttatcagtattaataattgctgatagttcagcgacatcaaatgacaatctgtaccccagtttgcacctcacgattcaaatcataaagtaataatctgtgcagatgttccactttcctctcgtactgtcactgagtccaatggatagatgctttgatgcaaaatctg

SEQ ID NO: 22783 - DNA, 600 bp, Chicken  19866894235457_3
gtcgtatgaattgaattgtagatgtaaaaaatgaacggaatgggagcatgctgtatccacacatgagcatgtgttcattttacttagtcatggagaaacagaaactgaaaatggttagaacagcccaaaaacagtgaagtatgagtgttatcagcttgttcccataagaaggggaaaagatccygtgtgacagaaaagttcttatttctatgtgataaagaaaactggtctgactcttcactgttgcgaaagcaatggcatgttcartgaaaatggcaggaaatcccacacaaatagggrttgctactgtatggagcacatacgcaatctgtggcaataactgctggaagatgtcatgaagatagataagtcagaagtacttcaggaactaccggttaattttatcagtattaataattgctgatagttcagcgacatcaaatgacaatctgtaccccagtttgcacctcacgattcaaatcataaagtaataatctgtgcagatgttccactttcctctcgtactgtcactgagtccaatggatagatgctttgatgcaaaatctgctttccatttcccttgaatcgtggtcattgaac

SEQ ID NO: 22784 - DNA, 600 bp, Chicken  19866894235457_4
ttagaatcgtatttatggcatcacattgggtatctcttctttctgtctctcagaaagtatctttctctctgtctctgcttctcctgcatatagtatgtcctacatagttaagcataactataaagaatatcagctgtgtttctgttctcctttctcttacaattttgtgttaagagacaagaaaatcattctctgcaacctaaaaatattgctcattcctcaggatctggaaatagggtgaccattaagtgtcgcagtgctagacttgttttgtgaacgtgatttcagggttgctagtgytagggctaaccaggcctacagagattgctaggtctaaaaccatgtgttacagtggtcagagtactttctcatcagagacacgtgcagaggctctggtgctgtgtggggacagaggtgtggttctggggaatgtcactgctgacatcctgcagcacacgctgggacagctgcaccctaccgcagtcagtaacataatacccgaagaaagagtacgaacagtcattgttccttttctaaaccagatggagctttccagcagctgcacgttttcttacagccatatgtatgaatgtagaccgt

SEQ ID NO: 22785 - DNA, 600 bp, Chicken  19866894235457_5
acagtggtcagagtactttctcatcagagacacgtgcagaggctctggtgctgtgtggggacagaggtgtggttctggggaatgtcactgctgacatcctgcagcacacgctgggacagctgcaccctaccgcagtcagtaacataatacccgaagaaagagtacgaacagtcattgttccttttctaaaccagatggagctttccagcagctgcacgttttcttacagccatatgtatgaatgtagaccgtgtctgtcagtgttggttgagttcagagtttacatctcatttcaatacrccatgttgtstctcctgtgcaggaacgcccgatgcattttcccagctgctcacctgcccgtactgtgacagagggtacaaacgcttcacctctctgaaggaacacattaaataccgccatgaaaagaacgaggataacttcagttgctccctctgcagttacacgtttgcgtatagaacacagctggaccgccacatgacgtcgcacaagtcgggacgagatcaggtcagtggcagttggctgcaggccctgctgtcctctacagcagcatctggtgtgtgagcagagacctacagagca

SEQ ID NO: 22786 - DNA, 600 bp, Chicken  19866894235457_6
gagtactttctcatcagagacacgtgcagaggctctggtgctgtgtggggacagaggtgtggttctggggaatgtcactgctgacatcctgcagcacacgctgggacagctgcaccctaccgcagtcagtaacataatacccgaagaaagagtacgaacagtcattgttccttttctaaaccagatggagctttccagcagctgcacgttttcttacagccatatgtatgaatgtagaccgtgtctgtcagtgttggttgagttcagagtttacatctcatttcaatacrccatgttgtstctcctgtgcaggaacgcccgatgcattttcccagctgctcacctgcccgtactgtgacagagggtacaaacgcttcacctctctgaaggaacacattaaataccgccatgaaaagaacgaggataacttcagttgctccctctgcagttacacgtttgcgtatagaacacagctggaccgccacatgacgtcgcacaagtcgggacgagatcaggtcagtggcagttggctgcaggccctgctgtcctctacagcagcatctggtgtgtgagcagagacctacagagcatgctggacgt

SEQ ID NO: 22787 - DNA, 600 bp, Chicken  19866894235469_1
ccaaatgccttcattacatgccctactgtatgtatgccctacatgcccaattctgcgtctcttctacttttctaaaacactctcataatctttatatacaacaaggcgtcttttgaggggatgatattcaccgaagaaatgtgagttgcttcacttaacaattatcctaatacactttgtcagtgcagcagctttatgggcagcaacatttgaaagcaatttattagcaagatctatcctgggctacatacttcacttactgtttactacgtgaaaagatgcatttcagtgaatatctcygtagtgcgaagtctcaggaatgattgaagtacatgcattaatgcaatctagttctcagcaatttttctttatttgtcattctttttcacctcttctttcctttttttgctgctatctgaccactaacaaaagcatcatcccacagtacccctcatgtgtcagatgaagacagacacaacagaattgaaatcatgctttaaaaagctgttctggagaaggtgaggggggaatgggaagaggtttacctacttcatttaattgacttatatagctatgtaaatcaagcacagtgatgtaaaa

SEQ ID NO: 22788 - DNA, 434 bp, Chicken  19866894235475_1
catgctttgacttctggaggacattatagctgtactatcacaaacaagtagcatgaaggaactgtcactgcctctacagaccaacgagttgttgctaattagtatgacctggagaatggaagaagagattggaaaatgggaaataaatctcaggctcaatattgttagaaattcctcagaaaattttgtagtcaggccaacagcaaaccacaaaaggcagacccatcaacaagatactcttcttgtggtgctaaaatgtgtaaaacctcattaacagagaacacattaaaccgtatgtgyccaatctactcatttcagttacgcctttctcatcctctttttatgttttaacaaacaatataaaaataaaagttttgttaatcatctataaaatctatttggtatgcagtccaagacagtcgcacttcactcag

SEQ ID NO: 22789 - DNA, 600 bp, Chicken  19866894235478_1
ccttttgggggaaatgctctggctgatctttgaaattgcactttgcagtgtgacttaatgtatctgcaagtttgtatatgtaatactggttgtctttattgctttctgtcattgctcaccggatgggagaatgaggtttcaagtgaacaggatgagtaagagagctcataagaagttttcatgttgatgaaaacatttggaacacagattttatttcctagccaacaaggaagtgataatgtacatcgagtgatacatacttgtttggctttcatttctcttgaaagcagaagcggcccrttaaatcttgctttgccaacaaagaaaatggtataggcttaacccttgtctctttgagaatcagggatgatctatgtcaaagctggtgccctcttcgctcagtgaagtcaaccatttgtgtcgtcttgctgagagctgcaggctgaagaaaagagtaagaaagactacctgacacccagaaagaatggcaaacaggcttgtgagttaagtatgaacagtatcacagagcgtgctacctcactgtattatcttaaggattagctttaaattttcccttttgctttgcaagcagagctggag

SEQ ID NO: 22790 - DNA, 600 bp, Chicken  19866894235484_1
catatttttcttcatctcctactgagaacaatgatcaagcattcccccttgtctcattactaccagtccatgtaaaaagtcagtctccctcctcttataatcctcttatatctgtggccctcctctgcactcttcttctgctgggaaccccaggcctgaatgcaatactctagatgaagcctcatgagggtagagcagagctgggatagacacctacctctccctgctggccacccctcttttgatgcagtccagaatacagttggccttttgagctgcaagcacacactgccagctcayatccaggttttcatccctcagracccctaagtccttatctgcaggactgctctcagtaagctcttctcccaaactgtactaatatccaggactaccccaactaaagtgcaacaccttgcacttggtcttgttaaaactcattagtcccacttttcaagcctgtccaggtccctctggatggcatatctttcctctattgtatcaactgtactaatcagcttgttgtccataaacctgcggagtgtgccctccgttcttctatgtcattgataaagaagttgaagagcacggatcccaaga

SEQ ID NO: 22791 - DNA, 600 bp, Chicken  19866894235484_2
tgagaacaatgatcaagcattcccccttgtctcattactaccagtccatgtaaaaagtcagtctccctcctcttataatcctcttatatctgtggccctcctctgcactcttcttctgctgggaaccccaggcctgaatgcaatactctagatgaagcctcatgagggtagagcagagctgggatagacacctacctctccctgctggccacccctcttttgatgcagtccagaatacagttggccttttgagctgcaagcacacactgccagctcayatccaggttttcatccctcagracccctaagtccttatctgcaggactgctctcagtaagctcttctcccaaactgtactaatatccaggactaccccaactaaagtgcaacaccttgcacttggtcttgttaaaactcattagtcccacttttcaagcctgtccaggtccctctggatggcatatctttcctctattgtatcaactgtactaatcagcttgttgtccataaacctgcggagtgtgccctccgttcttctatgtcattgataaagaagttgaagagcacggatcccaagacagagcccttgcggacaccact

SEQ ID NO: 22792 - DNA, 600 bp, Chicken  19866894235487_1
atgatttcccatgtgctttccttgggccaagagatgatcttattttctgacagaggatatttaagagtatctctgtgttttctttgactaatcacactgtcttcaagagaaaaccacatcagggaaaatgaagaaatgcactcctttccaactccaacagccaaagtggcaaaatcaagtttgagccccatctctttgatagctggaatagctgctggtggaaatgcccaattcttacccctgctgtgagcacggattttgaaatgaaatgtcctggatgaagacatttttttttagtaygaggatgtccttagcatgagcttccagaatcaggtatctgtgactttttaaggcactaggagtgctttacaggagctgagcatcatgtctccatgaagtattttcttttggcaggtcttcttccttcccatgtgttgatggcaggagatgggaggcgtgttatttcaaaatatagcttgggaaatttagcaacttggactgacacgggattgagttaagcaagactaatgcttaaagagcccaaatttaaaagcagaagctgcttctcaagataattccttggagtttctccctttctct

SEQ ID NO: 22793 - DNA, 599 bp, Chicken  19866894235492_1
  misc_feature (1)..(16): n is any nucleotide
nnnnnnnnnnnnnnnnataatggatgtgttcaataagctttagttattgaatttaaatgcagagtctcagttcttagagtaattcaaggagttttgggcactgagacccaacaaatgccatttttgacctcttaataaattataaatacatgactctggggcttagagtgtggatgcattaagtttcctgtgtcttgaaaactgacgcagggaaggagtgttcagttgggcagcattgttctttgttactttcttgctctgtagtttcttttattgcctttggacatactgtaaaaaaaygccagtctctctcctctatcacattaactcacagactgctcaacaatcctcaaagtctcacaaaggtcatagcatttctttaatcatatacagattacttttcctgtggstgcccagcttccatgttgttgtctagaaaataagacatgatattaacctttggatattttatttgtaggtatccccaaaaggaagttgaaagcagacatgatcactggcccttgattttgtttgtggttatgaatttatgttgtatttaattattcccactctttgtctcatttgttattcacttgaaa

SEQ ID NO: 22794 - DNA, 600 bp, Chicken  19866894235492_2
acaaatgccatttttgacctcttaataaattataaatacatgactctggggcttagagtgtggatgcattaagtttcctgtgtcttgaaaactgacgcagggaaggagtgttcagttgggcagcattgttctttgttactttcttgctctgtagtttcttttattgcctttggacatactgtaaaaaaaygccagtctctctcctctatcacattaactcacagactgctcaacaatcctcaaagtctcacaaaggtcatagcatttctttaatcatatacagattacttttcctgtggstgcccagcttccatgttgttgtctagaaaataagacatgatattaacctttggatattttatttgtaggtatccccaaaaggaagttgaaagcagacatgatcactggcccttgattttgtttgtggttatgaatttatgttgtatttaattattcccactctttgtctcatttgttattcacttgaaaggacaagaaatatttttgactttgcaaggcaggtggttggggagcaagaccttcatctaaggtttcaaagtgtagtcatcttggggagcgctctctrtcatactgaaaagc

SEQ ID NO: 22795 - DNA, 600 bp, Chicken  19866894235492_3
acttttcctgtggstgcccagcttccatgttgttgtctagaaaataagacatgatattaacctttggatattttatttgtaggtatccccaaaaggaagttgaaagcagacatgatcactggcccttgattttgtttgtggttatgaatttatgttgtatttaattattcccactctttgtctcatttgttattcacttgaaaggacaagaaatatttttgactttgcaaggcaggtggttggggagcaagaccttcatctaaggtttcaaagtgtagtcatcttggggagcgctctctrtcatactgaaaagcatcgcttgtgtacctcacactcaaagtcagggataagctggacacccattctgaagtcaagatccttcttcctaatgtcataktggtagagacctacatatgaagggaaaaattttgttttatttatgaagtgaaatacagtcctcaaaggactgcctaggcatttcgtgtaaactcgtggtgatgacttcagtctatcttttcattgcacacaatgattttcacatacttttattctttgttaccaagagttataattttttcatgggatacttttcagcttttg

SEQ ID NO: 22796 - DNA, 600 bp, Chicken  19866894235492_4
agttgaaagcagacatgatcactggcccttgattttgtttgtggttatgaatttatgttgtatttaattattcccactctttgtctcatttgttattcacttgaaaggacaagaaatatttttgactttgcaaggcaggtggttggggagcaagaccttcatctaaggtttcaaagtgtagtcatcttggggagcgctctctrtcatactgaaaagcatcgcttgtgtacctcacactcaaagtcagggataagctggacacccattctgaagtcaagatccttcttcctaatgtcataktggtagagacctacatatgaagggaaaaattttgttttatttatgaagtgaaatacagtcctcaaaggactgcctaggcatttcgtgtaaactcgtggtgatgacttcagtctatcttttcattgcacacaatgattttcacatacttttattctttgttaccaagagttataattttttcatgggatacttttcagcttttgaggtgcttctggcaagagtatagaaaagggctcttctgaagtacagtcatgttaagcctgaggctagagagaatgggaactggtgggttctgctgac

SEQ ID NO: 22797 - DNA, 600 bp, Chicken  19866894235492_5
agacctacatatgaagggaaaaattttgttttatttatgaagtgaaatacagtcctcaaaggactgcctaggcatttcgtgtaaactcgtggtgatgacttcagtctatcttttcattgcacacaatgattttcacatacttttattctttgttaccaagagttataattttttcatgggatacttttcagcttttgaggtgcttctggcaagagtatagaaaagggctcttctgaagtacagtcatgttaagcctgaggctagagagaatgggaactggtgggttctgctgaccttccrctcctatgcaatactgagatgaacagcttccaaaaaggtacagctaccttcatgtacctgttgagttttcagactagaaacaaaaggacgccatgtataaaggttgtgatcttagaggtaagactttcattatttcgcggtgtactcaaaagtcaaatgaaacaaactttctattagcactctagttctcaagttttcatttcctctggtgactttttcttccactgcacacatgcaaaatttatccagactctcttctcattcttatatgttttttctcctctacttctgccttcagtt

SEQ ID NO: 22798 - DNA, 599 bp, Chicken  19866894235499_1
  misc_feature (1)..(93): n is any nucleotide
nnnnnnnnnnnnnnnnnnnnnnnnnnnnnnnnnnnnnnnnnnnnnnnnnnnnnnnnnnnnnnnnnnnnnnnnnnnnnnnnnnnnnnnnnnnnngttaagcagatagataatgtatcgttagagcccctctgaacccagatccatacactgctgaagtctctctctggctccagaatggcttaatcgattcctgtaattttttattaaagaaagatttcatccgggcagcgagatggatatttcctctgggatcacagcttatgtgccgagccgagagccaatctgatctgaaacagcccygttacaaaccctctgaaaaatagaaagcctccatcgctatgacagatgtgccactataattaacatctttggtaacagacattacgcagccaaaattgcctacttccagctgcagcaccgaccacatcccagcacccaccgcaaagcagccgcacctccggcctccaaagagcaccgcgctgcrgagcctcagtcaccgtcagtttgggaagcaccccctggccccgacccccccacacacaccccagagccgccccgaggccgcccgtcgctgcgccccgctcccaggagctcactga

SEQ ID NO: 22799 - DNA, 600 bp, Chicken  19866894235499_2
cgattcctgtaattttttattaaagaaagatttcatccgggcagcgagatggatatttcctctgggatcacagcttatgtgccgagccgagagccaatctgatctgaaacagcccygttacaaaccctctgaaaaatagaaagcctccatcgctatgacagatgtgccactataattaacatctttggtaacagacattacgcagccaaaattgcctacttccagctgcagcaccgaccacatcccagcacccaccgcaaagcagccgcacctccggcctccaaagagcaccgcgctgcrgagcctcagtcaccgtcagtttgggaagcaccccctggccccgacccccccacacacaccccagagccgccccgaggccgcccgtcgctgcgccccgctcccaggagctcactgatgatatccattaccggcagctatgaaagattcaggcggatgccagcactgcatttgcgatgaggcgctccatcagcactgygctccccgggaggtgatgggaggtgatgggcacagcgcagagcgttcccccaccagaaggaaatgcatcagccgacaagcgagccattcccacccgcactgcca

SEQ ID NO: 22800 - DNA, 600 bp, Chicken  19866894235499_3
attacgcagccaaaattgcctacttccagctgcagcaccgaccacatcccagcacccaccgcaaagcagccgcacctccggcctccaaagagcaccgcgctgcrgagcctcagtcaccgtcagtttgggaagcaccccctggccccgacccccccacacacaccccagagccgccccgaggccgcccgtcgctgcgccccgctcccaggagctcactgatgatatccattaccggcagctatgaaagattcaggcggatgccagcactgcatttgcgatgaggcgctccatcagcactgygctccccgggaggtgatgggaggtgatgggcacagcgcagagcgttcccccaccagaaggaaatgcatcagccgacaagcgagccattcccacccgcactgccacrgccagggcgcccagccccagtcccactgcagggagatcccgtcgcagagcggtgtggccgtcccggggcctcggtatgtagaagcgccccttctgccccgcagcacrgctcctgctgtcagcctgcacagctgctgctgctgccctggagcaaaggccgatcctgcccggcttcccccgctgcccctctgcagg

SEQ ID NO: 22801 - DNA, 599 bp, Chicken  19866894235499_4
gcctcagtcaccgtcagtttgggaagcaccccctggccccgacccccccacacacaccccagagccgccccgaggccgcccgtcgctgcgccccgctcccaggagctcactgatgatatccattaccggcagctatgaaagattcaggcggatgccagcactgcatttgcgatgaggcgctccatcagcactgygctccccgggaggtgatgggaggtgatgggcacagcgcagagcgttcccccaccagaaggaaatgcatcagccgacaagcgagccattcccacccgcactgccacrgccagggcgcccagccccagtcccactgcagggagatcccgtcgcagagcggtgtggccgtcccggggcctcggtatgtagaagcgccccttctgccccgcagcacrgctcctgctgtcagcctgcacagctgctgctgctgccctggagcaaaggccgatcctgcccggcttcccccgctgcccctctgcaggagtcacacacggcggcacaaagcagctccgctctgcacggcgcccgatgtgctgctgccaaagcaggcactgctgccagtgaaggtaattacacggactgtaatt

SEQ ID NO: 22802 - DNA, 492 bp, Chicken  19866894235499_5
cactgatgatatccattaccggcagctatgaaagattcaggcggatgccagcactgcatttgcgatgaggcgctccatcagcactgygctccccgggaggtgatgggaggtgatgggcacagcgcagagcgttcccccaccagaaggaaatgcatcagccgacaagcgagccattcccacccgcactgccacrgccagggcgcccagccccagtcccactgcagggagatcccgtcgcagagcggtgtggccgtcccggggcctcggtatgtagaagcgccccttctgccccgcagcacrgctcctgctgtcagcctgcacagctgctgctgctgccctggagcaaaggccgatcctgcccggcttcccccgctgcccctctgcaggagtcacacacggcggcacaaagcagctccgctctgcacggcgcccgatgtgctgctgccaaagcaggcactgctgccagtgaaggtaattacacggactgtaatt

SEQ ID NO: 22803 - DNA, 600 bp, Chicken  19866894235501_1
aacatggtctagtgggaggtgtctcctcctatagcagggggctggaactacatgatcttgagggtctcttccaacccaaaccattctatgaccctataagtcttgctgtcaatcttggccccacataggtaagttctgggcatgcagaattccatacaaggcatgctcaaggaaccagggtctctctgaatgtgatgatactcagctgccatgagaaacagaaaggcttctagttctaacatggcactcacaagaatcctgctggaacagcaagttcctgggggctttccaaaaacacarcagtggatattgttcattcaggttacagcttacattgagcatatgctatctacctcaaatctttctcaacctctatcgctgagtattcaccttaattgcctttagcaccaactggtgctctggggagaggttggcacctgcctcctttttgaaattgtttgatccacagagattaataagcaggaagaatgctatatccagcagatgcctakgaaaagctgaggacaagttgtgcaagtccggtgtcccagaacaaattagccaagaggagagcagctgtgaagtcaactgatctcacat

SEQ ID NO: 22804 - DNA, 600 bp, Chicken  19866894235501_2
gagaaacagaaaggcttctagttctaacatggcactcacaagaatcctgctggaacagcaagttcctgggggctttccaaaaacacarcagtggatattgttcattcaggttacagcttacattgagcatatgctatctacctcaaatctttctcaacctctatcgctgagtattcaccttaattgcctttagcaccaactggtgctctggggagaggttggcacctgcctcctttttgaaattgtttgatccacagagattaataagcaggaagaatgctatatccagcagatgcctakgaaaagctgaggacaagttgtgcaagtccggtgtcccagaacaaattagccaagaggagagcagctgtgaagtcaactgatctcacattgtcaagatgtcccagcaagagctgccagggaacacggcagctggagagcagcaatccagctttatccagcatggagtagatgagatggaagaatatgcagctttggtggggggttagaagtccacttctcaggggaggaaagaattcwctctgtcctcagtgaataattcaactgaagagttttgctttgggcaacttgtgaaagtagcag

SEQ ID NO: 22805 - DNA, 600 bp, Chicken  19866894235501_3
tgaaattgtttgatccacagagattaataagcaggaagaatgctatatccagcagatgcctakgaaaagctgaggacaagttgtgcaagtccggtgtcccagaacaaattagccaagaggagagcagctgtgaagtcaactgatctcacattgtcaagatgtcccagcaagagctgccagggaacacggcagctggagagcagcaatccagctttatccagcatggagtagatgagatggaagaatatgcagctttggtggggggttagaagtccacttctcaggggaggaaagaattcwctctgtcctcagtgaataattcaactgaagagttttgctttgggcaacttgtgaaagtagcagagattcatgtataaaattgtatttcagaaagctttacccattaatttaacatggcccaactcaatttcatccttccttatgcaatacagtccatctcctgctttgctagtcaggactgatgtattcctctgtggtgtgaagtttgccagcttcatgcagcaggcctcagtaactctcttccatggaaaagcaagaggggatctttagaactgcaaaggaagtcatacaaaatttcca

SEQ ID NO: 22806 - DNA, 600 bp, Chicken  19866894235507_1
ttatgtttacacatgctttttactttctctcctctagaggtgtgactgtagtatgtcttaactgtgattttctgactgatggttctggcttagataggatggccacacatctgagtgaaagccatactcatgcttgtcaagttattatagagaatggtgagtatgtgtagttttcttcttatatagtacatgtacaagtactcacatggggatgtctgtctgttatggtggtcttttttcaattacattgtaatgtctgtgtgcatagatttgaaagtgagttcttgtgtatttccacawttttttaagaagtatttytaacttaatcctttattcttattttcagtttctgtagatttaccaactgctgaacaagtatctgagtaagttttcttttgccactcagtatttcttcttttcctaytaattcagtgacagatggtcaaaaattgtactttgaacttggatttcttccaaattcattagaactgaaaatgtatggaatgtacacttaatgtgtttttactcttgactatgtccagaatcccaagaagggggagataaatggcctaggtcataaaacacaattcttgcagtatt

SEQ ID NO: 22807 - DNA, 600 bp, Chicken  19866894235507_2
tttactttctctcctctagaggtgtgactgtagtatgtcttaactgtgattttctgactgatggttctggcttagataggatggccacacatctgagtgaaagccatactcatgcttgtcaagttattatagagaatggtgagtatgtgtagttttcttcttatatagtacatgtacaagtactcacatggggatgtctgtctgttatggtggtcttttttcaattacattgtaatgtctgtgtgcatagatttgaaagtgagttcttgtgtatttccacatttttttaagaagtatttytaacttaatcctttattcttattttcagtttctgtagatttaccaactgctgaacaagtatctgagtaagttttcttttgccactcagtatttcttcttttcctaytaattcagtgacagatggtcaaaaattgtactttgaacttggatttcttccaaattcattagaactgaaaatgtatggaatgtacacttaatgtgtttttactcttgactatgtccagaatcccaagaagggggagataaatggcctaggtcataaaacacaattcttgcagtattaaaatttctcggttctaa

SEQ ID NO: 22808 - DNA, 600 bp, Chicken  19866894235507_3
tactcatgcttgtcaagttattatagagaatggtgagtatgtgtagttttcttcttatatagtacatgtacaagtactcacatggggatgtctgtctgttatggtggtcttttttcaattacattgtaatgtctgtgtgcatagatttgaaagtgagttcttgtgtatttccacatttttttaagaagtatttytaacttaatcctttattcttattttcagtttctgtagatttaccaactgctgaacaagtatctgagtaagttttcttttgccactcagtatttcttcttttcctaytaattcagtgacagatggtcaaaaattgtactttgaacttggatttcttccaaattcattagaactgaaaatgtatggaatgtacacttaatgtgtttttactcttgactatgtccagaatcccaagaagggggagataaatggcctaggtcataaaacacaattcttgcagtattaaaatttctcggttctaattacaaagtctaggcctagagagactgttatttcaagtcagttttaatattagcaatattaaatgagtgttgaatgttctttacacagtgttgatrtaaatacaaa

SEQ ID NO: 22809 - DNA, 600 bp, Chicken  19866894235507_4
cttttcctaytaattcagtgacagatggtcaaaaattgtactttgaacttggatttcttccaaattcattagaactgaaaatgtatggaatgtacacttaatgtgtttttactcttgactatgtccagaatcccaagaagggggagataaatggcctaggtcataaaacacaattcttgcagtattaaaatttctcggttctaattacaaagtctaggcctagagagactgttatttcaagtcagttttaatattagcaatattaaatgagtgttgaatgttctttacacagtgttgatrtaaatacaaaaagaaaataaaaacttttacttgacataggatacattatttagaaataattttccaagtaatgtcatttatttgacaaaattgtatactaattaatgtcgaattttttttaaatgcaaagaaaaatttgaaaagaaaaataagtatggaaatcttggctttyggtttaaagatttgaaaaagaacctgcaaaactgtagaggccatttttatagaatttgtgttttttttaaatactagactcaaatatgctaaaactttccctgattgtactagaacagtatctgagac

SEQ ID NO: 22810 - DNA, 576 bp, Chicken  19866894235507_5
attcttgcagtattaaaatttctcggttctaattacaaagtctaggcctagagagactgttatttcaagtcagttttaatattagcaatattaaatgagtgttgaatgttctttacacagtgttgatrtaaatacaaaaagaaaataaaaacttttacttgacataggatacattatttagaaataattttccaagtaatgtcatttatttgacaaaattgtatactaattaatgtcgaattttttttaaatgcaaagaaaaatttgaaaagaaaaataagtatggaaatcttggctttyggtttaaagatttgaaaaagaacctgcaaaactgtagaggccatttttatagaatttgtgttttttttaaatactagactcaaatatgctaaaactttccctgattgtactagaacagtatctgagactttacaatgtagtttataaacctacttgtgccttaactgaaggttctgaggtatgccagttgaaacaaacatttgagttctctctgaagctcatttgaaagtgggaataaagatgtcaattatactgcaaagaaggaagttttcagaa

SEQ ID NO: 22811 - DNA, 600 bp, Chicken  19866894235508_1
acagtaaatttggagaactgagagagttgggaatttccaccagctggcaacttaatattcattatgaaagcctagcaagagtttgtcattttgccttgcacttggaaactcgtttgctcaagacattgttggaatagtcacaaacatcagaaaatgtctgtgatgccaccagggagagattagttccaggggtggtatggctgggaggcagaagagccccatgaaacagctcaaaagaggcatccctctcctttgtaatggaggaagggaagacatagttgggtcagaaagtggggatgyctgaaggatgtgttttgggagagggmtgggggaacctgggaggtgtctgctgctgctcaaacccgagggagctccagcagagtatggctcactgcaggcttctgggttcatggggctgctgagtggcagagggcgtgttgggtgctccctcatgcgtgcctgcgttgactggcacattccccaggggaactttgtgttatgtgtcactgtgtgtgccacacttcagctggggctggcagggtggccaggaggtgtactccgcctgtataaatctgattgctcactgctgtatttccccac

SEQ ID NO: 22812 - DNA, 600 bp, Chicken  19866894235508_2
ttgggaatttccaccagctggcaacttaatattcattatgaaagcctagcaagagtttgtcattttgccttgcacttggaaactcgtttgctcaagacattgttggaatagtcacaaacatcagaaaatgtctgtgatgccaccagggagagattagttccaggggtggtatggctgggaggcagaagagccccatgaaacagctcaaaagaggcatccctctcctttgtaatggaggaagggaagacatagttgggtcagaaagtggggatgyctgaaggatgtgttttgggagagggmtgggggaacctgggaggtgtctgctgctgctcaaacccgagggagctccagcagagtatggctcactgcaggcttctgggttcatggggctgctgagtggcagagggcgtgttgggtgctccctcatgcgtgcctgcgttgactggcacattccccaggggaactttgtgttatgtgtcactgtgtgtgccacacttcagctggggctggcagggtggccaggaggtgtactccgcctgtataaatctgattgctcactgctgtatttccccaccaccacaaggaccaatccatttgttt

SEQ ID NO: 22813 - DNA, 600 bp, Chicken  19866894235515_1
gccatagcagtgttcacgcagcaaaccacggccgtgttggagctgtttggaagccgaaagttaaatgcaaaacaataatcgggctcttccatttgcccccgaagagtcgcctttcaggtttctttaatggcttgtgaatggtcgcttgaattttttaagaaggcgaggctggcattcataagacaaagttagcttccttaaagcgaaccctgcttcaaatagggacacacgttccacgctggcctccactacttatctcccatttgttttagccttaaggaagtggcagtgcctgtagarctgcacgaagagttgggagttacaatcgctgcctttctggctacgctactctacggcctccacttggtcagctgttcctcgkccggagcatttgctcctttgcgagaggctccggtgctcggctgcgggccggtgccggctgcgcgcagggagcgcggggcgcacccgaggactgagcccggcgcggagccgcggtgtggcggcggggacacggcagcagcgggaggggcgcagaacgcccgagagcagaaggctgctgggacggggcagggcgttccgagtgacccgatgccggaggag

SEQ ID NO: 22814 - DNA, 600 bp, Chicken  19866894235515_2
gctcttccatttgcccccgaagagtcgcctttcaggtttctttaatggcttgtgaatggtcgcttgaattttttaagaaggcgaggctggcattcataagacaaagttagcttccttaaagcgaaccctgcttcaaatagggacacacgttccacgctggcctccactacttatctcccatttgttttagccttaaggaagtggcagtgcctgtagarctgcacgaagagttgggagttacaatcgctgcctttctggctacgctactctacggcctccacttggtcagctgttcctcgkccggagcatttgctcctttgcgagaggctccggtgctcggctgcgggccggtgccggctgcgcgcagggagcgcggggcgcacccgaggactgagcccggcgcggagccgcggtgtggcggcggggacacggcagcagcgggaggggcgcagaacgcccgagagcagaaggctgctgggacggggcagggcgttccgagtgacccgatgccggaggaggcggtgtgcgtgttaccgctggagctcagagggcaaggaatttgcgagcgatatccccacgggcgaaggggtacctttatcg

SEQ ID NO: 22815 - DNA, 599 bp, Chicken  19866894235526_1
  misc_feature (1)..(125): n is any nucleotide
nnnnnnnnnnnnnnnnnnnnnnnnnnnnnnnnnnnnnnnnnnnnnnnnnnnnnnnnnnnnnnnnnnnnnnnnnnnnnnnnnnnnnnnnnnnnnnnnnnnnnnnnnnnnnnnnnnnnnnnnnnnnnccaccgatcacagagcagttgaacccccggactccctgcactcttggagcccatcatggtgagagctcagtgcaggctccagccctttgaagacagacctatacactaagcccagtggcaaagctctcacaggggctagaatttggcagtaagagccaaatccacattatccgastgcagccactccagttcccgatgacgcacgagccttagatctccactttgctcctttttaccaagtagaaagagcaaatcattggacaccccataatcctttgaggagcatccagcattggtttcacagccctatgacttaactgctaacattgctcgccactctctatgtctggaataaaaggacagacagaagaaaaaaaaaagcacctttggagcctttaagactaattaagaagtatatcaaaaggggaaaaaaaatgagagagagagaaagagagatacacttggctgactgtg

SEQ ID NO: 22816 - DNA, 600 bp, Chicken  19866894235526_2
acaggggctagaatttggcagtaagagccaaatccacattatccgastgcagccactccagttcccgatgacgcacgagccttagatctccactttgctcctttttaccaagtagaaagagcaaatcattggacaccccataatcctttgaggagcatccagcattggtttcacagccctatgacttaactgctaacattgctcgccactctctatgtctggaataaaaggacagacagaagaaaaaaaaaagcacctttggagcctttaagactaattaagaagtatatcaaaaggggsaaaaaaatgagagagagagaaagagagatacacttggctgactgtgaatgaatcttataaaatggaaatgggaaacatgtgcaaacactttaaatatttttgcctctgcaagatatttgaagacttcccttgtaaaacaaatagggaacaaaataaaaccaggtttccttcagtcagcacataatcattttcatgttaatttttatcttgttaacccaaaaatctattagaagagaattatctgcctgaaatctagcttgtgactcatgctaagtgggttctgatattttgagaaaataa

SEQ ID NO: 22817 - DNA, 600 bp, Chicken  19866894235529_1
cctttcactgaagaaggcaaagtgttttggtgatggatttcatggaacaggacaccagggagcaacagttatttgagtacagtgatgtgctttatggaaagattgtttttgtttaagcttgcttggttgtcagaatgacaactgtgtagagactgtatggacaaatgaagtgagagctgatgctcagcaagaggtatgcaaacttcccaggaggcatggatctgcaatacagcacaaaatcagatttcagagatcagccatgctgaaaaagtgttaactgaagataaaatgtggatactyacctgctcgcttcctgcagtactttattgctcacttttgtttccttttgcaataaggaaagggacctccttctcyctcaggtaaagctgccctttgcaggctcacagagctcatctttctttccttgtgtcagatgatctgccgatgaacactttctatgctgttgatgacaacagatatgcagaatctgaaggtggctgttagctatggaccaccaacctggcagaggcagaactgctgaggatgcagaaatgaggggagatagatgcagatgggcattggggagttcaggctcctacg

SEQ ID NO: 22818 - DNA, 600 bp, Chicken  19866894235529_2
agtacagtgatgtgctttatggaaagattgtttttgtttaagcttgcttggttgtcagaatgacaactgtgtagagactgtatggacaaatgaagtgagagctgatgctcagcaagaggtatgcaaacttcccaggaggcatggatctgcaatacagcacaaaatcagatttcagagatcagccatgctgaaaaagtgttaactgaagataaaatgtggatactyacctgctcgcttcctgcagtactttattgctcacttttgtttccttttgcaataaggaaagggacctccttctcyctcaggtaaagctgccctttgcaggctcacagagctcatctttctttccttgtgtcagatgatctgccgatgaacactttctatgctgttgatgacaacagatatgcagaatctgaaggtggctgttagctatggaccaccaacctggcagaggcagaactgctgaggatgcagaaatgaggggagatagatgcagatgggcattggggagttcaggctcctacgaactaagttaatcattaccgttcaggtgtgtgaaaaccagaaggtttttgagatcttacctgttcccattacatt

SEQ ID NO: 22819 - DNA, 600 bp, Chicken  19866894235530_1
tttttttattttccccatctggtaggtacacccttagagatgcttttgtaatttttgagaggtgctaaagggagaaggaagcaagagttggactgccagcagattttgtagggcactgcttcctcctggtttcgttactgtgtgtctcttctccactacctccctgcttagtttgatgttttcttctctggcccaaggagggttttttttgtaatttgcttttttatttcttatctgaggaaggtgagatagtaagctctgagttgcagctgaggggtgtgtcaggcttcaggctgtaayaggtagcctactgcagatctgtatgtgagctaagggagagaaatgcaggatgaagtcctgctacattcatttgaagcaggagaaatttgtctgtacatgcttttattgaatgactgtattatgtggaacatgcgaagtaacaactcctatccatttttagagccattgttaaacagggaattggcgttgaggaggagacagtgggggatttctctttctcctctcccttccatagtayggtgtctttattttctttatttctttttgtcttattggtgtactgctttcatttatattgaa

SEQ ID NO: 22820 - DNA, 600 bp, Chicken  19866894235530_2
ggaaggtgagatagtaagctctgagttgcagctgaggggtgtgtcaggcttcaggctgtaayaggtagcctactgcagatctgtatgtgagctaagggagagaaatgcaggatgaagtcctgctacattcatttgaagcaggagaaatttgtctgtacatgcttttattgaatgactgtattatgtggaacatgcgaagtaacaactcctatccatttttagagccattgttaaacagggaattggcgttgaggaggagacagtgggggatttctctttctcctctcccttccatagtayggtgtctttattttctttatttctttttgtcttattggtgtactgctttcatttatattgaaatcagctggcagaagataaagttcacagcatatatttagagccaatgtttttgagaccggtaattattattttyctccatctttcctgggaaactgctggtgatttgttttcaggttcatttcatgagtgtttactgtcatttactatgaactctggtcttttcctttctctgcctgtccctcaaaatgctgaccacatgctggctctgctttgcatttctgtatctgagtttgtatt

SEQ ID NO: 22821 - DNA, 600 bp, Chicken  19866894235530_3
agcaggagaaatttgtctgtacatgcttttattgaatgactgtattatgtggaacatgcgaagtaacaactcctatccatttttagagccattgttaaacagggaattggcgttgaggaggagacagtgggggatttctctttctcctctcccttccatagtayggtgtctttattttctttatttctttttgtcttattggtgtactgctttcatttatattgaaatcagctggcagaagataaagttcacagcatatatttagagccaatgtttttgagaccggtaattattattttyctccatctttcctgggaaactgctggtgatttgttttcaggttcatttcatgagtgtttactgtcatttactatgaactctggtcttttcctttctctgcctgtccctcaaaatgctgaccacatgctggctctgctttgcatttctgtatctgagtttgtattttaatattcattaggtatttgtactgacagcccatcaatacattaaattagtatatacgcagctaacaagtatggtacatgcctaactgacttataacaacattaaaacagacagaacagattgtctcagcagggt

SEQ ID NO: 22822 - DNA, 600 bp, Chicken  19866894235535_1
tttttcccaagtgagaacgtagcttctgcaattatgtttggataacgagttctttgtggcatgtgaaaatgagcattcccttctgagtaacgcgctgtgactcagtactattgcatggctgcttattttcattcaagagcttgttttcattcaagaacttttcccttcggaggattttcttttcctaaaatctgttgactttataaaaagaagtcgtcaaaagctctgtgggttccagcacttctttgacagctgagcaaaggaggagggatctcaggatgggaaccaccaatgcaaccyatgcctgtgagttggggtccgtgggaccaggagtgatgcctgcaggtagggaaacctcactgtgtcaggaggggttttgcacgagcagagttgttgctgcactctgcaagcaggttttggggggtgttctcacttgccagttttactgtctgcacttcacatttcttctctgtctgttccactgcggtggctaattattatagcagaataaatagcaggttcttaagtagattcaggaggggagggaatgggtattgaagtgcacagagaggaggaaaagagttagaaaatgttttgcca

SEQ ID NO: 22823 - DNA, 599 bp, Chicken  19866894235536_1
  misc_feature (1)..(186): n is any nucleotide
nnnnnnnnnnnnnnnnnnnnnnnnnnnnnnnnnnnnnnnnnnnnnnnnnnnnnnnnnnnnnnnnnnnnnnnnnnnnnnnnnnnnnnnnnnnnnnnnnnnnnnnnnnnnnnnnnnnnnnnnnnnnnnnnnnnnnnnnnnnnnnnnnnnnnnnnnnnnnnnnnnnnnnnnnnnnnnnnnnnnnnnnnnaatggaagtcctccaaagaacagaattctatcagcaaattttctagctccagaaggcatagggaagacccacaaggcaaaatcttcagtgtcttctgagtttcatagcagatgrgtggttgttttaagcatgttatggctgaataactgatgcccaggagaggaagagtaggacctgaatgtctggatagaggtaactagaaatgaaatatgaaataaccatgaygaagggataaaatttaaaaaattctccagatccacagctgggggccagaycttcagaagagtccagctccaaatcaagtaatgagatttgcaagagtcctcaaaacccaacagttaccactgagaccagtggtgcttttcataagtgcaaggatttcctcttgccaagctaagaggaactgaacccag

SEQ ID NO: 22824 - DNA, 599 bp, Chicken  19866894235536_2
  misc_feature (1)..(75): n is any nucleotide
nnnnnnnnnnnnnnnnnnnnnnnnnnnnnnnnnnnnnnnnnnnnnnnnnnnnnnnnnnnnnnnnnnnnnnnnnnnaatggaagtcctccaaagaacagaattctatcagcaaattttctagctccagaaggcatagggaagacccacaaggcaaaatcttcagtgtcttctgagtttcatagcagatgrgtggttgttttaagcatgttatggctgaataactgatgcccaggagaggaagagtaggacctgaatgtctggatagaggtaactagaaatgaaatatgaaataaccatgaygaagggataaaatttaaaaaattctccagatccacagctgggggccagaycttcagaagagtccagctccaaatcaagtaatgagatttgcaagagtcctcaaaacccaacagttaccactgagaccagtggtgcttttcataagtgcaaggatttcctcttgccaagctaagaggaactgaacccagtttgagctctgaagtggcaagcattacatggcaagtggggtgaggaaaagaaaaaagtatccacagcaacagtgcaattacagactttaaataactgtgaagcttcatagc

SEQ ID NO: 22825 - DNA, 599 bp, Chicken  19866894235536_3
  misc_feature (1)..(25): n is any nucleotide
nnnnnnnnnnnnnnnnnnnnnnnnnaatggaagtcctccaaagaacagaattctatcagcaaattttctagctccagaaggcatagggaagacccacaaggcaaaatcttcagtgtcttctgagtttcatagcagatgrgtggttgttttaagcatgttatggctgaataactgatgcccaggagaggaagagtaggacctgaatgtctggatagaggtaactagaaatgaaatatgaaataaccatgaygaagggataaaatttaaaaaattctccagatccacagctgggggccagaycttcagaagagtccagctccaaatcaagtaatgagatttgcaagagtcctcaaaacccaacagttaccactgagaccagtggtgcttttcataagtgcaaggatttcctcttgccaagctaagaggaactgaacccagtttgagctctgaagtggcaagcattacatggcaagtggggtgaggaaaagaaaaaagtatccacagcaacagtgcaattacagactttaaataactgtgaagcttcatagcttgaatgccaagcattttagaaaaataatgattatttattcactttctat

SEQ ID NO: 22826 - DNA, 599 bp, Chicken  19866894235541_1
  misc_feature (1)..(42): n is any nucleotide
nnnnnnnnnnnnnnnnnnnnnnnnnnnnnnnnnnnnnnnnnncttgagtaaggatatgggaaataaagctcatgctgtgggatggggagcacacaccacacagacccttactctgggtgcttttagtaccatcacagctacagtgcatgctgagcttcacacaccttccctgccctctaatatgtagaactacatttatgtcttcttctgggtcacgctgtacagttcagctacacagcccacgttgcagtttacccactgtccaaccgtggatgtggcaacaagcttaggtcagctttrtccatacgtgaaactctcccacggaacatctgaccagacagagattagagggattcagaacatcttcttaaaataaacaacaacaamaaaaaactaccatgcaagagtaaacctcctcctttacatacacaatcagactcaaaaataagccctaaaattcccaaaagtcctgcaagagatgctaactctactcaaagtagaatcctttcagtaatctcatttttatagtgaggtgaaagatcacagggacagaagtatttgcatctaatctctcacaagagggctcccaactacggtac

SEQ ID NO: 22827 - DNA, 600 bp, Chicken  19866894235541_2
agcacacaccacacagacccttactctgggtgcttttagtaccatcacagctacagtgcatgctgagcttcacacaccttccctgccctctaatatgtagaactacatttatgtcttcttctgggtcacgctgtacagttcagctacacagcccacgttgcagtttacccactgtccaaccgtggatgtggcaacaagcttaggtcagctttrtccatacgtgaaactctcccacggaacatctgaccagacagagattagagggattcagaacatcttcttaaaataaacaacaacaamaaaaaactaccatgcaagagtaaacctcctcctttacatacacaatcagactcaaaaataagccctaaaattcccaaaagtcctgcaagagatgctaactctactcaaagtagaatcctttcagtaatctcatttttatagtgaggtgaaagatcacagggacagaagtatttgcatctaatctctcacaagagggctcccaactacggtaccaagcacacagacattctcagaaatagccgagctacaaactgttaccgatatcagatctctcgctctggtttggctttttacagatca

SEQ ID NO: 22828 - DNA, 600 bp, Chicken  19866894235544_1
tctggtttgttctcctgaaggctccagagactgtgggggaagcatctgttctaacagcaaggaaatatctcagaggaaaacttttccaactgatgcatgcatctgtaattattttttgcataatttcattgttatgtatagttactgtatgcaaaatgtgctcactaaactctgacagatcatttcgtcttttttctttaggaaatcctccattttccaaacaatgattctttaaacccttctcaaacataaaggcaggccgtgaacatacacctgtttttaatgaaaattgtttaaaaygtatgtctgtctggatcaggcattagtaatttgcatttgtgtcgacggacacagagggaatcctccagaggccctgtccacatgccagtatctgcagggctgagccatcaggctcaccaaaattctgttctcaactctgtcctgcatcaggatgctatctggtagctaacaacagagcatcttggtattactgacaaacgttactgacaaagctggatgagcgcttccaccaagcagaattctgtctgcctcttaaatttatcccaatcgctattcaggagttataatgttatactcgaa

SEQ ID NO: 22829 - DNA, 600 bp, Chicken  19866894235545_1
ccatacaggaaccgggcaccacatagatcaagacataatcctgtaggcacactatgcgggacacttaaaatttgaggagtaaattgactcaaaaggcaagaactgactccaataagcagcaatctgtgatgctacaattctttaacattatgttttcatcaacacaagctatcttctcctgtctgaagaaaagtgcaggactgctcaagatgtacatcccgtttctactactctgccactccctattgctgctgcactgggttgaacaaagctctgtcctcggggtacaccgcctcctcscagcagcacagcggttacagctcgctattaccagccctacggttcattcttcacaacctctggcttatgttcttacactaggaaccacacacactaccacactaagctgaatagataaaaactcatttatttctgataaattatgctaattggtgtttttttttttttttggaataccagcaatgccagcaagttggcagccttatgtttaaatgaaaacttctctgtaatcaaatgtccagaaataccccaacagaccagctatgcacactgccattctgtatttaatagccttccaga

SEQ ID NO: 22830 - DNA, 600 bp, Chicken  19866894235551_1
ttgcaggtggtagaatttaactggcagtgttgttgctaaagaaaataggcataaagtgtgtactgttttgcagagtggctatcaaatatatagaaaggagagaatcaaatgaattgttaaaccgctctatagtaagtgattttattgatttaatgcaaatgcttatgaaaacgatcttccgtttatatcaattatgtatgggcaaaaattaatttattccttcggtcacctgtttggcgcactgactcagcaggactagcatccccctcccacagacccgcacccgccgaacaccgaacrttcacaaaatgggaattttaaagtttctgtgtgcaaaacaacaaaaaggccccaacgggagattctgccaactgctgaaaaagcagtgagcgggctgggggagggtgcgccaggctcgtcccaggcaagcctggaaaatacagcggctccgattttgccaatcctttcaccatgtggcggcacattttatatgtaccggatcatctgcgacatctgaataaaatcagggagacaaaattctgcatataaacattttggccaagtgccttaactcagtcttcttatctggggtttccacaa

SEQ ID NO: 22831 - DNA, 600 bp, Chicken  19866894235573_1
aaatactgttagaccagttggaccatgctgaacacagcactatttaggtttaaattcaaagagatatctggaatcctggagagctacctcagcatccctgtctgtacagctcggcttttactgctgcaatgcagggcctttagcaacagcctcaccctagtaagagtctccacctacttagcttaacgaggagacaactctgagaacacgacacaattgagcctagtctatatgcaatgttttcaatgcttaatttttctgagctgtttttttttaaaaaaaagtactgaaacaactttsgtgttcaatatcccttagcccagatccatcttgcaccatcaaaacacctgagaattgtctgtgtatttatttttctgtcctagaaaaatctgcatgtaataaaaaaatagtaaatgctggtggcaacagtatttcatcactctccacctacaatctatcgagactaaatttttgcttcctatgagctacctccctgcctcaaagccaattcacgtgcctctaaaaatgcttctgctgcagtctgcaaatcaccaagctcaggttagataggagaaattcctctgctgttaaatggactga

SEQ ID NO: 22832 - DNA, 600 bp, Chicken  19866894235580_1
gttcgcttccttccaagccattcactatttaagttcaccatgaaaagggagcccacagagtaataacaagctcaaacacaagacactgaacagacaaactgagactgtgcaagcatgcaatgaaacagtctctgaaattaaatgctgctctttaatgacaaaagcggttctgactctgttctggaatgtctttttatttcagttttattttctctccagagaaaagacagagccaaagcaaacctggagccatgtgtactcagagagacgagtcaaataggaaccacagcagatgcacartttgtaagtatatacaaggcagaacaaaaagaaagaatactattcttcaataggcaacaacgttgggcagcaagcacaaaagcagagaaacttcagaatatgtacaagaggaactgtaaagaaaaccctataatccctacttattttttgcaaacttggatcttgagcatacactaacaacaaattttctacatactgcaaaagcattgaccaataatggaaaactcacaagggtatcttttctccaccttcttctgcacatgaagacatttcagcactgtccagaaataagtccatgga

SEQ ID NO: 22833 - DNA, 600 bp, Chicken  19866894235580_2
actgcaaaagcattgaccaataatggaaaactcacaagggtatcttttctccaccttcttctgcacatgaagacatttcagcactgtccagaaataagtccatggattacctgatgaagtaggtaataattatcacctctgttttaactgagcaaaggaatttctcaatgtcagcagacaaatcagtgcaggaagcgaggccatcacacagctcactgtatcccacaaattacagcaggatgaatagatgcatccaacttcacacacatgaacgtaaaggcagtgctgccaataccatcrggggaaagtagcccattacaactcctttccttttcagttcttttcataagtcttaatctaacaagtcagccatcactattcttctgccttatcttttctacaaagcctgacacccagtacaggacagtcttcatacggtacagccaactcaaccccagactccctgccataatgcttctcaagcccttagtactgtgcaagtcatcaagagacgacttcattttgttatcaggcaaggtatgctatattaggaacaacaaaaagaattacccaccaggcttccaagaaacaagatttggt

SEQ ID NO: 22834 - DNA, 600 bp, Chicken  19866894235580_3
cttcatacggtacagccaactcaaccccagactccctgccataatgcttctcaagcccttagtactgtgcaagtcatcaagagacgacttcattttgttatcaggcaaggtatgctatattaggaacaacaaaaagaattacccaccaggcttccaagaaacaagatttggtaatgcgccgaagaaagtcacataatcacatgaatgttcttagagcggtggtgagccagtagaccttggatatttaactctttcattgtatgttcactgaataatgtaagaagaacactagcaatatcrttttttttagctgactgacaagtactacagctagtgcattatttcttgcaatttgccagcatttcacagcatccatatagttagacagtgatgggaccattcgaggtttgggggatttatatttgatatccccctccacatgattaatgctggtctacgcaccatgaaaatactaagccattaagctgccctaatgcagatgatacrgtcttcagatgtgcaaaagacgcagctaattttattactaagattgatttcttgtcactgcattagctttacacacatatataccatcacatt

SEQ ID NO: 22835 - DNA, 600 bp, Chicken  19866894235580_4; identical to SEQ ID NO: 22834

SEQ ID NO: 22836 - DNA, 600 bp, Chicken  19866894235580_5
ttcttagagcggtggtgagccagtagaccttggatatttaactctttcattgtatgttcactgaataatgtaagaagaacactagcaatatctttttttttagctgactgacaagtactacagctagtgcattatttcttgcaatttgccagcatttcacagcatccatatagttagacagtgatgggaccattcgaggtttgggggatttatatttgatatccccctccacatgattaatgctggtctacgcaccatgaaaatactaagccattaagctgccctaatgcagatgatacrgtcttcagatgtgcaaaagacgcagctaattttattactaagattgatttcttgtcactgcattagctttacacacatatataccatcacatttgcttttacctgtcaaccaagcagaagcagaaacacaagcatctggagtcagcctgagcagacaacaaaaatgagacattttggctttggaaggagagaggaaaagaagggcagcaagggaaaagtcacatttccagatcaccaaacatgacttgattcaaaagcaaccaaagccagcaacacaaaaacttgcaaagcaaaaaaccg

SEQ ID NO: 22837 - DNA, 580 bp, Chicken  19866894235584_1
tgtctgcctttattttaatgctcaggaatataaggtgtggcggagcagggggaaggaatgtttgcaatggctctaatctgcaaagatgggttccagctgcatttcacatatgatttggggtttggatgaagttttgacagaatttctccatgaattatgcaagaggctgctggaacgctgcaagtacacagagacttgctcaggcagcactcagacaacacgctgccatctaacacatgaaccaaatcaaaacccactctgaaaggcacagtcttacactggggagggaaagcaagcagmggacccccagtgctgtggggtgccaaggtggggacgggcaggctgcctgcaatgaggtgctgcaatgcagcactagatggtgctgtattttagaaatatctttgccttgtgggtccttttatatttggatgagggctcagatgtggcaaacacacacaaatacttcttttaagacacactgctttctctcaaggaaagtatggattttttgtttgctattttatagcataggatttaacatggattgatttcacaactgccgagtggccagttaaaatct

SEQ ID NO: 22838 - DNA, 600 bp, Chicken  19866894235589_1
acctaaaatgttaaaccggtagtgctttgtgagaagatgctttgttcttctaacacctcattttgaaattcatctgtgttcatgaaatagcattgtaactgccataaaaagcctcctaattaacttaccaaagtgacatttaaaaggcaaaacccattgcttccattcctagctaagtttattttgcaataaaataaaagacctgaaaattactttccaagttgcttttcctgaaggaatattgcatgaagtctttctgaaaagaaatttttattaacaaagcactgcagcagctttgaratgctttgcataaatgagagaggaaaattctattaaagtcttgttcccgttgcctttgatttggaagttttctttcctgtcttgcctctttctgttagaagtagagctgatagctgttgtcctgatggcttggcacatatcttccttagattgcatcagtagaaaatagcccaagcataaagaggtatcctgtaattttctaatgaagaaggatttgtttcaacattgccaaaatgaaaatacgaaaatcatttcagtgcacaatttaggctaatcactaaaagaagggttaggctttcc

SEQ ID NO: 22839 - DNA, 599 bp, Chicken  19866894235591_1
  misc_feature (1)..(55): n is any nucleotide
nnnnnnnnnnnnnnnnnnnnnnnnnnnnnnnnnnnnnnnnnnnnnnnnnnnnnnnttgctgtcaaatcttcctctggtttcttcagctcttcagtgctgccccaagtttcgctgtccgtaactgagcgcttctccaagtctgtcttcagctacaagagattcgtttgggaaacggtcagtttcagcaccttcagaacttgctgagttaagtcccaggaagggagaagaataagcgtgttgtgtttgaactgagggacatggaaaactctcctctaaaacgtctcctattttgggaaagaygtttttctttttacacttattttcagaagaattcaactcttcccctcataggtgagctggcatgaagtaaaacatctccactaacattatcagtgctacagctgatggcttttctccacatttgcctccactgagcttaatcattttgaacaagaaacctgctctaggcctatcagccagaagagcagcttttgcaacctgtaccccaccaggagggaaggtaaccacctgggctcatgcttgctcagaaactcagacccacatggaagatcccaggagacctaacagtgctgtggcag

SEQ ID NO: 22840 - DNA, 599 bp, Chicken  19866894235593_1
  misc_feature (1)..(140): n is any nucleotide
nnnnnnnnnnnnnnnnnnnnnnnnnnnnnnnnnnnnnnnnnnnnnnnnnnnnnnnnnnnnnnnnnnnnnnnnnnnnnnnnnnnnnnnnnnnnnnnnnnnnnnnnnnnnnnnnnnnnnnnnnnnnnnnnnnnnnnnnnnnntgcactcagggtgacctccggagaccaaggcaccaaggaaagggttctttcaggctgttctggatgtcttctcagtgatccaaaatccaagggacacaccaaccaaaatcccactgttgcaaagacttccacagacgctgaactttgcaacgcaggagcmgctgtactgacaccagtgggtatcacagtgcagctgaacacttgctctcaggaggtaattttgtacaaaaagcagccctgaaacagcagcttaggggaagcacaggcatggacacagacattaggaaggaaaagagagtgtttcaaacckggatgctaaggaagctctttgcagtgtggcragggtggcttggttgttgttaaagaagcaggtttgtcctcttgtttgggaaataggtagaagaagatctgggagttcaaatgaaaaccatctgaagggcaccagtgtgacttcaggtg

SEQ ID NO: 22841 - DNA, 600 bp, Chicken  19866894235593_2
gtgacctccggagaccaaggcaccaaggaaagggttctttcaggctgttctggatgtcttctcagtgatccaaaatccaagggacacaccaaccaaaatcccactgttgcaaagacttccacagacgctgaactttgcaacgcaggagcmgctgtactgacaccagtgggtatcacagtgcagctgaacacttgctctcaggaggtaattttgtacaaaaagcagccctgaaacagcagcttaggggaagcacaggcatggacacagacattaggaaggaaaagagagtgtttcaaacckggatgctaaggaagctctttgcagtgtggcragggtggcttggttgttgttaaagaagcaggtttgtcctcttgtttgggaaataggtagaagaagatctgggagttcaaatgaaaaccatctgaagggcaccagtgtgacttcaggtgggagagcgctcaggtagrggctgcagcccagcaggatgggccacttagcagagctctgtccttgtgtgggacagatcgtatctcgctccaggagacacagttctgtgtgtaaagagcctctgtgcaaaaaagccccattcactacctgcag

SEQ ID NO: 22842 - DNA, 600 bp, Chicken  19866894235593_3
gggttctttcaggctgttctggatgtcttctcagtgatccaaaatccaagggacacaccaaccaaaatcccactgttgcaaagacttccacagacgctgaactttgcaacgcaggagcmgctgtactgacaccagtgggtatcacagtgcagctgaacacttgctctcaggaggtaattttgtacaaaaagcagccctgaaacagcagcttaggggaagcacaggcatggacacagacattaggaaggaaaagagagtgtttcaaacckggatgctaaggaagctctttgcagtgtggcragggtggcttggttgttgttaaagaagcaggtttgtcctcttgtttgggaaataggtagaagaagatctgggagttcaaatgaaaaccatctgaagggcaccagtgtgacttcaggtgggagagcgctcaggtagrggctgcagcccagcaggatgggccacttagcagagctctgtccttgtgtgggacagatcgtatctcgctccaggagacacagttctgtgtgtaaagagcctctgtgcaaaaaagccccattcactacctgcagattggaatctacatcccgtggccctgttcca

SEQ ID NO: 22843 - DNA, 600 bp, Chicken  19866894235593_4
gggtatcacagtgcagctgaacacttgctctcaggaggtaattttgtacaaaaagcagccctgaaacagcagcttaggggaagcacaggcatggacacagacattaggaaggaaaagagagtgtttcaaacckggatgctaaggaagctctttgcagtgtggcragggtggcttggttgttgttaaagaagcaggtttgtcctcttgtttgggaaataggtagaagaagatctgggagttcaaatgaaaaccatctgaagggcaccagtgtgacttcaggtgggagagcgctcaggtagrggctgcagcccagcaggatgggccacttagcagagctctgtccttgtgtgggacagatcgtatctcgctccaggagacacagttctgtgtgtaaagagcctctgtgcaaaaaagccccattcactacctgcagattggaatctacatcccgtggccctgttccaccttgaaaggaaaggacagaggtacgagcatggtgggttcacacagagagcactgctggcacaggcaggacgaggatcatacctccaaaaatcaaccctgctcaattgcatggggcagctctgttgggttcagcat

SEQ ID NO: 22844 - DNA, 594 bp, Chicken  19866894235594_1
tcaaaatggtcaaatgcatgttttgtggtattcctatcctaagcaaaatgctatacttcacttagaaatatcaggacaaactgttgattaccttagctacatagcactgcacaagtacagtttattcaactataaatcaccagtgatagtttggacagcatttttttctgcagaggtgtaaacagaaggagatgcttgagtcacaaaaatcttgctaacacctgttagaactttctaacccacgccctttccttattgttcacttattcccccccccccccccaaaaaaaagaaaaaagragaaaagaaaaagagtccgtatgacacagtattaagacttagagtctgaagtggtcctatttcataaggtccatttttagcagctctactatggagttttgacaaattacaccaaagtccttatattattcaagaggatgagtatcagtagcagacttagttgtttcttatgcaatggctaatggaatcttactatttccttctgagtcatgacacaattcagaagaacatgcaactcctccacgttttcttgataaattaaaacaaacaaaaaaagcatacttgtgcaagttt

SEQ ID NO: 22845 - DNA, 548 bp, Chicken  19866894235604_1
gagtaagtctagagtcacaccagttcccagttgacaggaggctggcaaatgttgtctcattgtaagaaagggaaagaaagagggcatgggcaattatgaacctgacagtctcattccggtgcctggaaatatcatggagaaaatgatgcggggagttactgaaaaagccctgaaggacaattctgacattggtcgcagccaacacaagctcatgagtggaaggtcctgtttaacttaatgtcctttaatgacaagttcacccatgtagttgacccagtgaagccagtagatgttatcctygaggacttcagtagagcttttgatactgttcctcacagtatccgtctgaacaaaatgtatgcatacggcatagacagaaacataatgagtggatgggtggggccaaaaggcttatggtaaatggggttccatgcaggctataggacggtcactagcagggttccccacggctcaattttaaggccactactcttaaacgtatttgtgaatgacttgcatgtagtgctagaagacgttttagcaagttt

SEQ ID NO: 22846 - DNA, 599 bp, Chicken  19866894235607_1
  misc_feature (1)..(157): n is any nucleotide
nnnnnnnnnnnnnnnnnnnnnnnnnnnnnnnnnnnnnnnnnnnnnnnnnnnnnnnnnnnnnnnnnnnnnnnnnnnnnnnnnnnnnnnnnnnnnnnnnnnnnnnnnnnnnnnnnnnnnnnnnnnnnnnnnnnnnnnnnnnnnnnnnnnnnnnnnnnnntactaggaaaaagagaggaccaagccatctaaagacggtaaggcttttactatcccaaatagagttccgcacatggaccattgcctgtgctggaaaagttaaagagaaaagcagttacagagagggagaaggatgcctgatgytgatgacattatatatgtcatcttgaagagctgatgagggggcattaattgctttgacacataaaattgctgaaagctttcagatctgaaatgctggaattgggtgggaatccaaccagaagttgccgtgctttgggtttatttggatttcttccaaggagtatttcagaattttgcagtcaaagactttgaaatatctctcttcacacagtgatggcagccattctctctgtgagacgcaacgagcataaaaagcactgcaattctggattattcattaattatctcaaacaagctgc

SEQ ID NO: 22847 - DNA, 600 bp, Chicken  19866894235612_1
ttcttaacctgagagaacggtacataaaaatccccatcccttactcagtttctctttaggtgaatatttcccttttgatataaaggaaaaaaaaagttattccttgaagaaatattttagaccatgacaaaaacatgaaacattactgagaacctgtcagcagaaagatttgctctagagtgaagcctgaagaacacagagccaaagtaaggctaggacaataaagatcaactgcttgtttgttccattcaataacttactgaccaagcagcagagtctgtctcaggccaatatggaaayatctgcccagcaaagatggtctatgttaagttctcaattgaatgttttgaacttcatggcgtatatcaatgccttgcatgtctttagggttttctcccaacttagcatgtgcctccaggtgagctacaacctttaaaagtcatccttctgttctctgttgatgaaaggcacagaggcagaacataaggatgttcccagatgccagcctggagctccagccagggatcctaaccagcagagctcccagatctatacttcagttactttcaatgaatgttggacaataagctctaaaaatcc

SEQ ID NO: 22848 - DNA, 600 bp, Chicken  19866894235612_2
gcccagcaaagatggtctatgttaagttctcaattgaatgttttgaacttcatggcgtatatcaatgccttgcatgtctttagggttttctcccaacttagcatgtgcctccaggtgagctacaacctttaaaagtcatccttctgttctctgttgatgaaaggcacagaggcagaacataaggatgttcccagatgccagcctggagctccagccagggatcctaaccagcagagctcccagatctatacttcagttactttcaatgaatgttggacaataagctctaaaaatccataygaatttgtgaagttgcattatacataacraagaataatttagtataggcaaaatgaaggctcctgactttcacttcattaaaaaaaaatcaaagaataattttccagtgtctaaacccttgagcatgacctgcttgtcattagaccatcacctgaagtaaacagctaactcacttctctagttctgaactgtttatagtaaaacaattttaaaatagtccacatttactagaactgtttcctaaagtacaacaggaggctgatagagctgcagtgacacgatttgagtgctagtcaagcc

SEQ ID NO: 22849 - DNA, 600 bp, Chicken  19866894235612_3
tcaattgaatgttttgaacttcatggcgtatatcaatgccttgcatgtctttagggttttctcccaacttagcatgtgcctccaggtgagctacaacctttaaaagtcatccttctgttctctgttgatgaaaggcacagaggcagaacataaggatgttcccagatgccagcctggagctccagccagggatcctaaccagcagagctcccagatctatacttcagttactttcaatgaatgttggacaataagctctaaaaatccataygaatttgtgaagttgcattatacataacraagaataatttagtataggcaaaatgaaggctcctgactttcacttcattaaaaaaaaatcaaagaataattttccagtgtctaaacccttgagcatgacctgcttgtcattagaccatcacctgaagtaaacagctaactcacttctctagttctgaactgtttatagtaaaacaattttaaaatagtccacatttactagaactgtttcctaaagtacaacaggaggctgatagagctgcagtgacacgatttgagtgctagtcaagccagccaacagaataaatttagaatgtaaaa

SEQ ID NO: 22850 - DNA, 600 bp, Chicken  19866894235616_1
atccttttcatcgtgcccatctatgccttcgactcatggctcagcctcctgctcctcggcagccaccagtactatgtctacttcgactcggtgcgcgactgctatgagggtgagcacagggcagctacgtcagcagggatgctaacagcagagcagggctctcctcctctgccccgtgtctctgcagcatcctggcttgcacaccgtgctggatctccattgcttttgctttcagctctccccgccaccatttggagctttcccccttcctgctctaccagcagcagggagaggaggccyatggggcacctgcaggctytgggagcccagcatctggccacattcccaggggaaaggatttctgcctacctttgaggtagaaaaactgtttttccaaagaaaaaggcaggcttacctatgaaatcaggcagttgggatgttttgaggtgcagagagagcttgtgagttaatgtcctcccatgaaggtctttggccatcgccctcctcctgcacatgctcaaatgtgcatccttggttgctgctggtacatcctatgcccaccacattctctgcatgcaggggttgcgtgtgcacagtgga

SEQ ID NO: 22851 - DNA, 600 bp, Chicken  19866894235616_2
tctatgccttcgactcatggctcagcctcctgctcctcggcagccaccagtactatgtctacttcgactcggtgcgcgactgctatgagggtgagcacagggcagctacgtcagcagggatgctaacagcagagcagggctctcctcctctgccccgtgtctctgcagcatcctggcttgcacaccgtgctggatctccattgcttttgctttcagctctccccgccaccatttggagctttcccccttcctgctctaccagcagcagggagaggaggccyatggggcacctgcaggctytgggagcccagcatctggccacattcccaggggaaaggatttctgcctacctttgaggtagaaaaactgtttttccaaagaaaaaggcaggcttacctatgaaatcaggcagttgggatgttttgaggtgcagagagagcttgtgagttaatgtcctcccatgaaggtctttggccatcgccctcctcctgcacatgctcaaatgtgcatccttggttgctgctggtacatcctatgcccaccacattctctgcatgcaggggttgcgtgtgcacagtggagctgctgtgtctgcagtaa

SEQ ID NO: 22852 - DNA, 596 bp, Chicken  19866894235621_1
gtgcaaactgattttaagacaatctcagaaaacactattaacaacagctttgctagcatattcaccgacttcagaagctacacaaaattggagtaagaccttgtatcatctattcatttgtcctcattcttctagcagtaaaagaacataagattcaattgtcataagtattgcatagatatattgaaactacaaagcacctaagcagcccaggagttctgtgcactttgtacatatataaggaatagaacttactaccactctattatttgacaagaaataagaagtataaattgatgygatttcgttttaaaatctaaagtcctgataaagaaatatttcaaatctcctaagctccctaccctctgccttccttgggagaattgtacgaagcacgtacataattccaagcatcatttccacagccaaattcttttgacaacagaaaaagtctgtgtgacaaatagacgagtcgctcatattttaccaaccagcgatatgttaaacagatggaggaatataccaagtagaattctaatctctggagatgcatttcagacagtgacttaaaattaagtttcattaatcacagactt

SEQ ID NO: 22853 - DNA, 600 bp, Chicken  19866894235623_1
agctgtctgcttattctcattgagcctttctgcagacctatcaggactaaggatctcagtattaagttacattcaaatctagagtagtggtcaatagttcaatgtctggatggagatcagaggtagcctgggctgcagcaaccctgtcctggctgagtatatgatctcgaggaatgaggccctggcaaagagtggaataaggaccctgaacttcaggagagcagacttccagctatttaaggaatttttggatgggatcccctggaaaactctctttagggacaaaggacctgaacagartaggcaacaccttaaggatgcttttctaagagcaaaacaactttctatcsccagaataaaaaatgagacagacaagaccagcatagctaagcaaggacctgctggtcagactgaggggaaaaaagggaaaataataagcagtagaagcaggaatgagtgggatcaggagagccaagacacagatggaattaaaatcagtgaggtatgtgaaaaacaatcagcagggtttcttcagatgcatcgggcagaaaagtcaggcagaggacggtgtatcccctctgataaatgagaaaggagagc

SEQ ID NO: 22854 - DNA, 600 bp, Chicken  19866894235623_2
ggatctcagtattaagttacattcaaatctagagtagtggtcaatagttcaatgtctggatggagatcagaggtagcctgggctgcagcaaccctgtcctggctgagtatatgatctcgaggaatgaggccctggcaaagagtggaataaggaccctgaacttcaggagagcagacttccagctatttaaggaatttttggatgggatcccctggaaaactctctttagggacaaaggacctgaacagartaggcaacaccttaaggatgcttttctaagagcaaaacaactttctatcsccagaataaaaaatgagacagacaagaccagcatagctaagcaaggacctgctggtcagactgaggggaaaaaagggaaaataataagcagtagaagcaggaatgagtgggatcaggagagccaagacacagatggaattaaaatcagtgaggtatgtgaaaaacaatcagcagggtttcttcagatgcatcgggcagaaaagtcaggcagaggacggtgtatcccctctgataaatgagaaaggagagctggcctcctcagacttggagaaggctgagatacttactgagttttttgcc

SEQ ID NO: 22855 - DNA, 600 bp, Chicken  19866894235629_1
cagagaatgtatgaacgtagatcaccttcaccaaacctgaaaagaattcccatggaagatgcttacggtcataagccctacagaacacattcatcggaaagaactgaaggcaataggagatgtccgttaccaccaaaatactcggaaataccatataaagagcacgatcggtcattttaccagtacaaaatggaagaaagatacacgtttgaacactacaaagtcactggaaatgaaaaaggaattaaaccttttcacagaccgttaggggcttcatgtaaatttgaaagaaaatggcaygaagatgacttgaggcaccagaggttacacgaagagaagtatggtcagtcacccagaagagtttctgatgaatttacgtcaaggagctctttacagaagaggtataggaataaaataattaaaacctgggtattgtggtgtaaagcctcaagtgaaagtctgttttcattatagttgaagataaccaccttgaaacacgtttgccactttgtagtttaattatgggcgactggtaatagtgaagtatttgtcttttaagtaaatcatgttgatggctagagtatgaaaggataatatttc

SEQ ID NO: 22856 - DNA, 600 bp, Chicken  19866894235633_1
tattcttaacatcaagttgatatgatgtcacatgagagctacaagcagagatgaatacattaaaaaaagggtgacgtaatttataaaatgaagactacgcacttctgtggggagattaatggaaaggaatttttgaatagcaagaatctcacctctgaatgcacccagagtggaatttaaggtgtgatatgctgaaatttccttgagtggtggatatggaaaattaagtatcttaaaaagagattgggtaactgcacatgaaaaggaaaacgtagcacaaagttggaacacaaaagcatrgtttacatttggaactttgtctgagactacaggagaggtgtttgtttaggatccattacttggaaccttcccctgaaaagaggaaggactcactcttctaaaaatgagctgcagtcaactaccccatcctctcccatacaaaattccctcattcagatatattttctcctttctgaccacattttcccctattttcccctaatgtgccctaattgctatgcagatgatagtggcatgcttccgttaaagctatgctgtcgtacaaaaataatttgatgtaatgaaagcagatgagattgt

SEQ ID NO: 22857 - DNA, 599 bp, Chicken  19866894235635_1
  misc_feature (1)..(91): n is any nucleotide
nnnnnnnnnnnnnnnnnnnnnnnnnnnnnnnnnnnnnnnnnnnnnnnnnnnnnnnnnnnnnnnnnnnnnnnnnnnnnnnnnnnnnnnnnnnacccaccaatgtagctaagtaggtttaaccctacctacctcttccaaaaatagacagataaaactaaatccacatttgcacagaaaaccacaaatccctcatataaccctgactcagcgagaaacagaagaattttttaatacactcaagttcttcctttcttcctatcaaactgaacctcaagatttgattttatacacaaaattttststctaatgaagacagcaggaagtgaacttactctgtgacatctctcaaaagcttgtttggtttcttgcagaaggttaaccaccacttcttgtgagagaaaagtttctccatgggtgtcaatgcttggccccagtggcaagtttgtacgttgccttattctttccttgaggtcttgaatactagaacagagacaaagaaagatttcactgggtggraattttgaagctcacattcaacaatatcttacagtacttcagttgttaacttataaaaacagaacccaagacacagtttagga

SEQ ID NO: 22858 - DNA, 599 bp, Chicken  19866894235635_2
  misc_feature (1)..(89): n is any nucleotide
nnnnnnnnnnnnnnnnnnnnnnnnnnnnnnnnnnnnnnnnnnnnnnnnnnnnnnnnnnnnnnnnnnnnnnnnnnnnnnnnnnnnnnnnnacccaccaatgtagctaagtaggtttaaccctacctacctcttccaaaaatagacagataaaactaaatccacatttgcacagaaaaccacaaatccctcatataaccctgactcagcgagaaacagaagaattttttaatacactcaagttcttcctttcttcctatcaaactgaacctcaagatttgattttatacacaaaattttststctaatgaagacagcaggaagtgaacttactctgtgacatctctcaaaagcttgtttggtttcttgcagaaggttaaccaccacttcttgtgagagaaaagtttctccatgggtgtcaatgcttggccccagtggcaagtttgtacgttgccttattctttccttgaggtcttgaatactagaacagagacaaagaaagatttcactgggtggraattttgaagctcacattcaacaatatcttacagtacttcagttgttaacttataaaaacagaacccaagacacagtttaggata

SEQ ID NO: 22859 - DNA, 600 bp, Chicken  19866894235635_3
agaagaattttttaatacactcaagttcttcctttcttcctatcaaactgaacctcaagatttgattttatacacaaaattttststctaatgaagacagcaggaagtgaacttactctgtgacatctctcaaaagcttgtttggtttcttgcagaaggttaaccaccacttcttgtgagagaaaagtttctccatgggtgtcaatgcttggccccagtggcaagtttgtacgttgccttattctttccttgaggtcttgaatactagaacagagacaaagaaagatttcactgggtggraattttgaagctcacattcaacaatatcttacagtacttcagttgttaacttataaaaacagaacccaagacacagtttaggatatgcaagcgttaagacagtcttacaagcttaaaaaaattgctagtaaatgcaaaacaaccacctctgatcccacagtcagctgtgtcctaccatggcacattcataccacaggaacagctgttccccctctgggggtgtgtgctctgtggacaaagtttagcctccatacgttgtcacattttactttcaaaacactgaggtccacctctctcatc

SEQ ID NO: 22860 - DNA, 596 bp, Chicken  19866894235642_1
aggtgtagcaactcctaacaggactcctttcttcccttaatgcatgcctggtggctttacccttgaactgggtcttttctcctttgcttggtttcacgctctgtcttctctatcaggatgtgtttgctcagaccacgccaagtagtgcgcacagggcaacacaatgcttccctagatgaaatgagggggaaaaaactggaaaggggaagattaacttaactagtcgtgtgcacacagcactgcctattgcagcatatcaatgaggctggaggtggaggagacactgcaacaaatcaagcygaagggagaggaataagggaagaaaatgggtaggtggtaacgcagaaaaatgagtcagtgtatatctataaataaatcctctgtacaaagaggaggaggggactggtgcttgggaacagacctgaaaaggagacaggatagactggtgtggggaagggagtactaaaatgcaaaggagttgtcatacaagtatttgacatctatgctagcatctctgagaccatcttgatttcagtgttaacaaacctgaaagctacaaagctgaatttgcaacatatctgagttccaataagata

SEQ ID NO: 22861 - DNA, 467 bp, Chicken  19866894235654_1
ggaatttgtcgggtgtcacttcatgtttccaagacaaattggattggttgctcagagtggctctggggaagtctgctgtttgcaggctggtcctgcagcacttcctcatgaacaatgcagcagcctcgtgctatgaccacgcagaccttcagctgctggttgtcccctctgtgcacaaaacccagtgaaggaaaccctgacctccaagtgctgggagtaagcatttattccagttagaggttcccaaaactcattcataaaacgtggtgatttcagtctcacggctccagttcctcttgyacgatctgtgaggtacccaaacatacgatatccagacaatgtcaatacactgagaggaaaataaactttatagcacctcctttcatctctgtatctttgtatcacaggggctagaatcaagacgtcctgccacagccaaggcagcaagaggtggcaagcacaggctt

SEQ ID NO: 22862 - DNA, 516 bp, Chicken  19866894235656_1
tctcaaaggcagacattgcaggagatgaagttactaggcaggaaaaacagttgctaagtctgaatatttggttattctcagaacagggattagaagaggaagtgttgacaatgtaagcgcagttaccatgcggtccccagggctttggctgtccctgctgctccccagcacaggggagggctgcacggcagcactcacccgcagtgaccatgccagaaacaggctcatgggacacagagcacagcagacactgtcactaacaccaattcctccaaaccctctggaaggtcccgtggacamaaaccctcagttaaataatattggtgcacttgatgaygcagctcagggtgaatgttactgccccattcaccatcactgctgagacatgagcaagaaaagcagcacagcccctttttgtcagcaccatcatgtccatgtgacatggtggacacacacattagacctatggccttttaaacaacttggagcacaatctctttgatcccctcaagcaag

SEQ ID NO: 22863 - DNA, 479 bp, Chicken  19866894235656_2
gcaggaaaaacagttgctaagtctgaatatttggttattctcagaacagggattagaagaggaagtgttgacaatgtaagcgcagttaccatgcggtccccagggctttggctgtccctgctgctccccagcacaggggagggctgcacggcagcactcacccgcagtgaccatgccagaaacaggctcatgggacacagagcacagcagacactgtcactaacaccaattcctccaaaccctctggaaggtcccgtggacamaaaccctcagttaaataatattggtgcacttgatgaygcagctcagggtgaatgttactgccccattcaccatcactgctgagacatgagcaagaaaagcagcacagcccctttttgtcagcaccatcatgtccatgtgacatggtggacacacacattagacctatggccttttaaacaacttggagcacaatctctttgatcccctcaagcaag

SEQ ID NO: 22864 - DNA, 599 bp, Chicken  19866894235657_1
  misc_feature (1)..(49): n is any nucleotide
nnnnnnnnnnnnnnnnnnnnnnnnnnnnnnnnnnnnnnnnnnnnnnnnntctctcctacaaactatcagccgtaattcccattttaacaggttgattccattttcccttaccctcctctttgtggatcactaaggcatgttagcaaattgatggtttgccttttactgcagccagaaatttaaaacttttgctgtgtcaccatgagaaacaattgaaaaaaagagacagttctggtacctattattgattaatgtaagcaagattgaacataaaaagatcgtttccacattgtacttaaygtttcttgaaaagtgatgttcttcctgcatcactgtatttgatgcttcgtttccaaaatgcatggggccagggaaaacagtgcatgggaaggctcactaccaacactagggcagcaacagtaacacaaataacagcatcacctcctgctctctcctctcttcttcatgcatcacagatcagcagagaggattaaaaaacagtagacagtggaaaaacagtggctaaagcaggtggagtagcataaagcaaagccaacaaggcttcatgtcaaaaggcagtcaataaaataagtggatac

SEQ ID NO: 22865 - DNA, 572 bp, Chicken  19866894235662_1
ctttcagttgctagctatgtgtttgcacagatactacaaaggtcttcaaaatggctgttgaatcgtctttgaaaacctgcaaagacagtgcagcatctccctacttttaatcttctgtgaataaatgaatgttcataaattttagaggtctgcctgtgtcctgttgcatcattcaagaacagcagtggcacgcctcaggtcagggccaacaggaggggcaggcctcattgagagctgagcaaacacagctgccagccaaggaaggaaatccatgtcaggaatggaggtagcagagacacycactgcaactaggagcaggccatgcatgaataggaaatcccttccatgtctaggattgatgataactatttcccaagcaaacatgaacaggagtagttcaggcatgtagaattaacttggcacagtgatgctacacgttaccttcctgcatcatttgcacttttcctgccagtgaggtaaaagttggagtcatgactcctacagactttgctttagccgtatttcctcttacttagaaacgttaaaagtaaagtaaagtgtcatacaaggcg

SEQ ID NO: 22866 - DNA, 599 bp, Chicken  19866894235664_1
  misc_feature (1)..(84): n is any nucleotide
nnnnnnnnnnnnnnnnnnnnnnnnnnnnnnnnnnnnnnnnnnnnnnnnnnnnnnnnnnnnnnnnnnnnnnnnnnnnnnnnnnnnggtagatgtccctttgagtgacatagtttagtggtatggtggtaatgtgttggggtggcacttggtgatcttagtggtctttcttaccttaatgattctatgaaccttcactttgctggcatagagacaactgagatactggagtgtctgctctagtaggtgttctggtaagctgagtcacataggtcacaaaatttcagctttctatggatttgktcagctctgtccattgcacatacaaagtgcacttgggagcttrcagccagcaggggtggagatggggagggagcagagcaggttccattgatcactttcacctccaggctgctgtctccagctttttgaggacaccttgcagctcaccgctctgctgaagcaccaagtcaagcagcttggcagcagcaatcactcactcctatgctttaaaaccttccctaatgctttgtttcagtaagaaacactgaacgcaaagagggagattgtatccaaagtggatgctgaaggttcagcggtgg

SEQ ID NO: 22867 - DNA, 599 bp, Chicken  19866894235664_2
  misc_feature (1)..(41): n is any nucleotide
nnnnnnnnnnnnnnnnnnnnnnnnnnnnnnnnnnnnnnnnnggtagatgtccctttgagtgacatagtttagtggtatggtggtaatgtgttggggtggcacttggtgatcttagtggtctttcttaccttaatgattctatgaaccttcactttgctggcatagagacaactgagatactggagtgtctgctctagtaggtgttctggtaagctgagtcacataggtcacaaaatttcagctttctatggatttgktcagctctgtccattgcacatacaaagtgcacttgggagcttrcagccagcaggggtggagatggggagggagcagagcaggttccattgatcactttcacctccaggctgctgtctccagctttttgaggacaccttgcagctcaccgctctgctgaagcaccaagtcaagcagcttggcagcagcaatcactcactcctatgctttaaaaccttccctaatgctttgtttcagtaagaaacactgaacgcaaagagggagattgtatccaaagtggatgctgaaggttcagcggtggacagctactctatgcaactctgttagaaataaacagtgatctt

SEQ ID NO: 22868 - DNA, 351 bp, Chicken  19866894235667_1
gaggcatgaacccattacctgtagccattattatttcaaaccacttacacaaaggctcatttaagccttttgtactttttcaagccacacaacataagattttatttttttttagtttattaccatctgaggaatggattatctacaactctaggaagcacatctactgcatacatttctgacttgtttttgcttggcgtgctttttacatatctttaacacagtgtaggaggaacttgtatctgaaagactgattttttaataaaaaaattgtttcttggttactctatttttctcccmaaactaaatgctaaatcatgcaacactcactaagaattttatttctctctt

SEQ ID NO: 22869 - DNA, 599 bp, Chicken  19866894235670_1
  misc_feature (1)..(78): n is any nucleotide
nnnnnnnnnnnnnnnnnnnnnnnnnnnnnnnnnnnnnnnnnnnnnnnnnnnnnnnnnnnnnnnnnnnnnnnnnnnnnnaagtatgcatgatactgagcctcaagccggccctgtttgagcacacttgttccttttgtatgtgtgaaacacatgctgaaatacaaaagaaaaactgatgtgacgataatgcataccactaatggtcacagtctactgctcccttgacctctgcagcacttggcttcatcacccttgtggggctcacacgtcagatgcctcctggttgggctgggtgccatrgatggctgcatggtatgaccatcctcaggcctggtgtgaccatccagcaggcctcaccgctggctgaaactctcttcctcactctggtggtgtggacaagaggaaggcgaaggcctggggctgtcatggtgaacactgggacaaaagaaggcctgctgccctggggagaagctgtccccaagggtttctctcactgaagctgcccatagtggaggcagagcttcagggcagttgggattttccacatcaatagtgcagccccagctctgggtctcctcaagtgccctcatgccctgcaa

SEQ ID NO: 22870 - DNA, 600 bp, Chicken  19866894235670_2
ggcctggggctgtcatggtgaacactgggacaaaagaaggcctgctgccctggggagaagctgtccccaagggtttctctcactgaagctgcccatagtggaggcagagcttcagggcagttgggattttccacatcaatagtgcagccccagctctgggtctcctcaagtgccctcatgccctgcaaagggttcagtgcacctcaagcatgggttggtttttaataaatacctcacaaatctctggtgggggacattctgccaccaaaatggggttggggtggtgtggttccttctccrtcgcagagggatgtggtccttcccaccatgccatgaactgatcacctcagggtgggcgagattctgaagtcagcagcatgacacgggcaaagatgaagaaataacacatttaacaaaacattatgttgaatgcaacgagctattgctctgatttggcagggttgggttcagatgggaccgtttgggtaatttyccagaaaaggacttctaggaacagcattaccacgaggataacccaacacaagagacaccaagatggaagggccaccataagccgagatggcagactgcgtttataaa

SEQ ID NO: 22871 - DNA, 600 bp, Chicken  19866894235670_3
tcagtgcacctcaagcatgggttggtttttaataaatacctcacaaatctctggtgggggacattctgccaccaaaatggggttggggtggtgtggttccttctccrtcgcagagggatgtggtccttcccaccatgccatgaactgatcacctcagggtgggcgagattctgaagtcagcagcatgacacgggcaaagatgaagaaataacacatttaacaaaacattatgttgaatgcaacgagctattgctctgatttggcagggttgggttcagatgggaccgtttgggtaatttyccagaaaaggacttctaggaacagcattaccacgaggataacccaacacaagagacaccaagatggaagggccaccataagccgagatggcagactgcgtttataaacacagtcacgtttggtttaagctgtctttttatttacaaacagtttattgctgcctccgtgccgggctgacagcttaagccccccctgaggggtaactatgcagtcagtgcaaagcatttgctggagtcgcagacctgctgcctccatcctctgctctgaggttacagcaagtccctctactcacagggcttt

SEQ ID NO: 22872 - DNA, 600 bp, Chicken  19866894235683_1
gtagaaggctgaaatgcggtccatttacccaaactatgcatttattgtaagttatgtgccaacagcatatattttgttcaagttaattatatttaaaatttatgaagcagcttgaaagtgagccttaatggacatgagtgacccttgctgcaacatgtgggctctatctcatcttcctctgctggactgcacggacacaggctgtacccaaggtctgcttcaagcccgatccttcccgagtgcaaacagtcgtatgtgcatgtgggaatggcacagacgtgcctgctcagcctgtcatcstgcatcctggatctgcaggccttatttggactccgcaggattttctgggttagatctcacgttaccaccagctagagctgtgttgtgattgaaggagaagcgtgttgagatcagaacaacayaactgttttttcaaatactttctggtttcctttctcttgagaggaaaaaaaaaaaaaaaaaaaggaatgcagttcatcttttctcattatatctttttcttctctcattatacgtttgttcatctaggtgagcctcctgatgtctggagcacacactagattttcaactctgtgacct

SEQ ID NO: 22873 - DNA, 600 bp, Chicken  19866894235683_2
ccttaatggacatgagtgacccttgctgcaacatgtgggctctatctcatcttcctctgctggactgcacggacacaggctgtacccaaggtctgcttcaagcccgatccttcccgagtgcaaacagtcgtatgtgcatgtgggaatggcacagacgtgcctgctcagcctgtcatcstgcatcctggatctgcaggccttatttggactccgcaggattttctgggttagatctcacgttaccaccagctagagctgtgttgtgattgaaggagaagcgtgttgagatcagaacaacayaactgttttttcaaatactttctggtttcctttctcttgagaggaaaaaaaaaaaaaaaaaaaggaatgcagttcatcttttctcattatatctttttcttctctcattatacgtttgttcatctaggtgagcctcctgatgtctggagcacacactagattttcaactctgtgacctgcaaaccctcttttgtgaaagtggcaccctgaagcttcacattttttttcttcatgatggtgttcagtttttcagaatcaaagtaataacaacagaaatatttatgttgtgcttggatgcgg

SEQ ID NO: 22874 - DNA, 600 bp, Chicken  19866894235684_1
gttactgttcactagttgtatttttttatgacaatctcagataattcctaacacaattcacagatttttactcatcttttgacatagcaggtaatttgacagtagagtcctcttctctcacaatacagtttcatcctactcattctctgaagtcaaacacccttttctgaaacaggataggatgtggccctgttgagaactgtaacagaatacagtgcaatttaccagttgagcaactgatgaaagggaagtgaaagtgcgtcgttgcttatcactgttgctggagtctggttccacacwgcatctttttggtctgttaaaaaataagtattgaactgctcctttctctatagtaggatattgaaaagtggaaaactgtggcaaatgcagtgagcagcagatgtgtctactcttcccactgatttaatgtctgtaacagcaattttcttctcaagactgtgaagacctcacttttgcctcagcaaaagcaggattattcatttatttcaaaataatattatgaaataatccatacagtgccatggtggacttaattttaattttaaatttaattttaaaaataacacttttgatttcttc

SEQ ID NO: 22875 - DNA, 600 bp, Chicken  19866894235686_1
taaaaattcctagcaaagtggtattaatctaggtctgctaacattaagaaacaaattttattttaccacagcaagggatcaagactctttaagatccataaggataacaattattgtagaaaagttacaaaatatatgttcacaacttacatgtccttaaacccacgtgtctgcaccctatcaattagagaacaactgagtgtattacagagtggtgtgctgaccttgaccctcatacatatgtgtagttttccagcgaaaacaaaattcatttaccaaagtatggatctgggggggagkatttgcatttcatgtaaaccaatcatcaatcagtgcagtactgcaggatgacaaagcatttcaaatgaaggtcatgttactaggttgattataatctcagtccaattccccaaataaatgtgattgaaatgttcttgacatttattttaagagtaactcttacagtattaacagtgtaacaccctacaagctatcagctacttgcaccaagttccatcagatatgattaataagactctcatctaggctggatgggaaacttggccaaggtacattttgccctccagggcatacagtctc

SEQ ID NO: 22876 - DNA, 600 bp, Chicken  19866894235687_1
gacatcactttgctcctgcacacatcagattaaagccatctgcaaacacagaaccttgctcagaacaaatgcaaattgcaattagcccccaacaccatttattcattagaatgggaaaagattatctttgttgtgtgtcacgctgaggtcagtgctgtctgtgttacatggcagcgtgcagcagctgcctgggggctgctgtggggactgagctctgctcctgagagcttttcctcactccagcacaagcagaactgactgataggacatagcagcaagcagattgatgcaccttacagwcgtgccaktgtgtacagcccatgcaacttgtatgcagcacgatcctatggtgtgcaaacaccaccagaggtgagcagcactgagcaccccaacaagctgaacgccatggagttcaccccaccctgtgcaaaaccatgaggacttcaagccactcactgcaaaagaaccaaacgtggccgctacctttccsaatgcctgtgcagagcagttaaaccttcactcccaccagcactctgaagacgcgtggtacaaagcagcagttcacagcacagaagytctgtctttgtcactgctaccttt

SEQ ID NO: 22877 - DNA, 600 bp, Chicken  19866894235687_2
tttgctcctgcacacatcagattaaagccatctgcaaacacagaaccttgctcagaacaaatgcaaattgcaattagcccccaacaccatttattcattagaatgggaaaagattatctttgttgtgtgtcacgctgaggtcagtgctgtctgtgttacatggcagcgtgcagcagctgcctgggggctgctgtggggactgagctctgctcctgagagcttttcctcactccagcacaagcagaactgactgataggacatagcagcaagcagattgatgcaccttacagwcgtgccaktgtgtacagcccatgcaacttgtatgcagcacgatcctatggtgtgcaaacaccaccagaggtgagcagcactgagcaccccaacaagctgaacgccatggagttcaccccaccctgtgcaaaaccatgaggacttcaagccactcactgcaaaagaaccaaacgtggccgctacctttccsaatgcctgtgcagagcagttaaaccttcactcccaccagcactctgaagacgcgtggtacaaagcagcagttcacagcacagaagytctgtctttgtcactgctacctttctgcatta

SEQ ID NO: 22878 - DNA, 600 bp, Chicken  19866894235687_3
gggggctgctgtggggactgagctctgctcctgagagcttttcctcactccagcacaagcagaactgactgataggacatagcagcaagcagattgatgcaccttacagwcgtgccaktgtgtacagcccatgcaacttgtatgcagcacgatcctatggtgtgcaaacaccaccagaggtgagcagcactgagcaccccaacaagctgaacgccatggagttcaccccaccctgtgcaaaaccatgaggacttcaagccactcactgcaaaagaaccaaacgtggccgctacctttccsaatgcctgtgcagagcagttaaaccttcactcccaccagcactctgaagacgcgtggtacaaagcagcagttcacagcacagaagytctgtctttgtcactgctacctttctgcattaatttctcccacgttactgttcctgcagagagcctgcgagctttggattgcctctctccaaaarcactgagctgaggtttacccaaaatcaaatcagttttcctgtttgctgtccaaagttttaattctttctgttttccccttgtattgtactkctctgccttctttctgttatggcacata

SEQ ID NO: 22879 - DNA, 600 bp, Chicken  19866894235687_4
aagcagattgatgcaccttacagwcgtgccaktgtgtacagcccatgcaacttgtatgcagcacgatcctatggtgtgcaaacaccaccagaggtgagcagcactgagcaccccaacaagctgaacgccatggagttcaccccaccctgtgcaaaaccatgaggacttcaagccactcactgcaaaagaaccaaacgtggccgctacctttccsaatgcctgtgcagagcagttaaaccttcactcccaccagcactctgaagacgcgtggtacaaagcagcagttcacagcacagaagytctgtctttgtcactgctacctttctgcattaatttctcccacgttactgttcctgcagagagcctgcgagctttggattgcctctctccaaaarcactgagctgaggtttacccaaaatcaaatcagttttcctgtttgctgtccaaagttttaattctttctgttttccccttgtattgtactkctctgccttctttctgttatggcacataggcagcagcaagtgcaaattgctccgtaaggacaggaacagttcagcacaayagtaggaaactcactgaacttgaggcagtgacag

SEQ ID NO: 22880 - DNA, 600 bp, Chicken  19866894235687_5
gagcagcactgagcaccccaacaagctgaacgccatggagttcaccccaccctgtgcaaaaccatgaggacttcaagccactcactgcaaaagaaccaaacgtggccgctacctttccsaatgcctgtgcagagcagttaaaccttcactcccaccagcactctgaagacgcgtggtacaaagcagcagttcacagcacagaagytctgtctttgtcactgctacctttctgcattaatttctcccacgttactgttcctgcagagagcctgcgagctttggattgcctctctccaaaarcactgagctgaggtttacccaaaatcaaatcagttttcctgtttgctgtccaaagttttaattctttctgttttccccttgtattgtactkctctgccttctttctgttatggcacataggcagcagcaagtgcaaattgctccgtaaggacaggaacagttcagcacaayagtaggaaactcactgaacttgaggcagtgacagaagccatagcaatgatctattagcagacaataagatacttatgmtctgctaatgtaacatggggtgttacaacatgagattttggctgggctttt

SEQ ID NO: 22881 - DNA, 600 bp, Chicken  19866894235687_6
agaaccaaacgtggccgctacctttccsaatgcctgtgcagagcagttaaaccttcactcccaccagcactctgaagacgcgtggtacaaagcagcagttcacagcacagaagytctgtctttgtcactgctacctttctgcattaatttctcccacgttactgttcctgcagagagcctgcgagctttggattgcctctctccaaaarcactgagctgaggtttacccaaaatcaaatcagttttcctgtttgctgtccaaagttttaattctttctgttttccccttgtattgtactkctctgccttctttctgttatggcacataggcagcagcaagtgcaaattgctccgtaaggacaggaacagttcagcacaayagtaggaaactcactgaacttgaggcagtgacagaagccatagcaatgatctattagcagacaataagatacttatgmtctgctaatgtaacatggggtgttacaacatgagattttggctgggcttttcaattttttggaggaagacactctctttttatggtctgggacagctttttaagtgatggggagcatgctaaaaatccatgcacttcagtag

SEQ ID NO: 22882 - DNA, 528 bp, Chicken  19866894235687_7
cgtggtacaaagcagcagttcacagcacagaagytctgtctttgtcactgctacctttctgcattaatttctcccacgttactgttcctgcagagagcctgcgagctttggattgcctctctccaaaarcactgagctgaggtttacccaaaatcaaatcagttttcctgtttgctgtccaaagttttaattctttctgttttccccttgtattgtactkctctgccttctttctgttatggcacataggcagcagcaagtgcaaattgctccgtaaggacaggaacagttcagcacaayagtaggaaactcactgaacttgaggcagtgacagaagccatagcaatgatctattagcagacaataagatacttatgmtctgctaatgtaacatggggtgttacaacatgagattttggctgggcttttcaattttttggaggaagacactctctttttatggtctgggacagctttttaagtgatggggagcatgctaaaaatccatgcacttcagtagttagcttg

SEQ ID NO: 22883 - DNA, 450 bp, Chicken  19866894235687_8
ttactgttcctgcagagagcctgcgagctttggattgcctctctccaaaarcactgagctgaggtttacccaaaatcaaatcagttttcctgtttgctgtccaaagttttaattctttctgttttccccttgtattgtactkctctgccttctttctgttatggcacataggcagcagcaagtgcaaattgctccgtaaggacaggaacagttcagcacaayagtaggaaactcactgaacttgaggcagtgacagaagccatagcaatgatctattagcagacaataagatacttatgmtctgctaatgtaacatggggtgttacaacatgagattttggctgggcttttcaattttttggaggaagacactctctttttatggtctgggacagctttttaagtgatggggagcatgctaaaaatccatgcacttcagtagttagcttg

SEQ ID NO: 22884 - DNA, 600 bp, Chicken  19866894235688_1
aggcttatagtgtaacaactgacactcctcacactgtgtataaactctccttcgaagtctaaagatttataaaaagagagtgaggaaacacagatactggggggatggaaagctgtcagcgagagccctttggctgagcctgtcctgtcgccaggagggtctgtgctctcagaacacaagcaccagagaagagcagctccaaaacccaatggctgcattgctgcaggccaccggcattggtctctttaagcaagcagcgagggcagagggggtgaaagatggagcctgcccatcacctgygccatgtggctgagatggagccatggggaacccgagaagaaacaaaggcatggggatcattttaaaagctccctttcactgtctgagagtttacaagctcagcaaacaatcatttctctgtgggttttgctggagttaagtggaaggctgtaaggagtcctgccacctctcacagagccacagcttcaggggcttctgtgcttcagccctgcagtctcaagcccgtgttggaacaggaccagaatgaagccctgacatatgttgcagccaaagatttcccagggttcccaagacggttgc

SEQ ID NO: 22885 - DNA, 600 bp, Chicken  19866894235694_1
ggatttactggcgcgtgggtttgtgagctgccattagtgcacggggtggctgaaaggcaaatggcgcaggtgagcgggggacaaatcacacaagctaagaaaaaaagaataataaaggatacagatgggaagaggaacgttgacgctccgcagcacaacgtcctgcagcaggccaggcagagccccgctgtgtgacgcagggcggcgggcagagcgcagcaggcaggctcccttctctctctgcaatgacccgagctgctgtaatcgatcgagcagccatgagatgtgcagccacagccrgccctgcagcgcagcaggaagctgggcgacctgaccggcatcgctcagcaacgcagagtgcccagaaaccaaaccggcacctctccggctccctcgccccgtgcacggccctttggagatggaagcttcctgcagaacaggtctaataaacactgcgtgcaccctgctgggcccctcctgcaaagcctcctcttgggctgctccaaccatccagcccagcaaagcgccggtggcctcaggacagcgtttcccccctctgcatccaaaaccccacgtactgcatacagcactgcggcaccc

SEQ ID NO: 22886 - DNA, 599 bp, Chicken  19866894235696_1
  misc_feature (1)..(210): n is any nucleotide
nnnnnnnnnnnnnnnnnnnnnnnnnnnnnnnnnnnnnnnnnnnnnnnnnnnnnnnnnnnnnnnnnnnnnnnnnnnnnnnnnnnnnnnnnnnnnnnnnnnnnnnnnnnnnnnnnnnnnnnnnnnnnnnnnnnnnnnnnnnnnnnnnnnnnnnnnnnnnnnnnnnnnnnnnnnnnnnnnnnnnnnnnnnnnnnnnnnnnnnnnnnnnnnnnntgtatcacgagcaagagcaagcattgaaattgtgctctctggggctgggctgaggtggaaggtgcagtgagaatattccctttaacaggrgagcaagcggttgctcattttctcacagagaatttgcactcagcttatacactttcctttcagagtgtcacaatacacacagaagcttccttcttcctgggctaggtttgcccacaagtgacaggcggtgaccatgacagtttgtgacaagggagcaggacagacccaaactgagtgctggaggacagcatggcagtgttactggctaagtgaaaaagcagaaatcttggaatcataggttgacctgggttggaagggacctcaaagatcattgaagttycaacctcctgctgcagtca

SEQ ID NO: 22887 - DNA, 600 bp, Chicken  19866894235696_2
gaatattccctttaacaggrgagcaagcggttgctcattttctcacagagaatttgcactcagcttatacactttcctttcagagtgtcacaatacacacagaagcttccttcttcctgggctaggtttgcccacaagtgacaggcggtgaccatgacagtttgtgacaagggagcaggacagacccaaactgagtgctggaggacagcatggcagtgttactggctaagtgaaaaagcagaaatcttggaatcataggttgacctgggttggaagggacctcaaagatcattgaagttycaacctcctgctgcagtcagagttgccagccattaaattagacaccagctccggctgcccagggttccatccaacctggccttgaaagcctccagggatgggacatccgtaacttctttgggcagcttgttccagcaactcacttccttctaagtgaaaaatttcccagctttacctttgcttacaggtgaaaacctttcccttaaggctagaagatggccatctcaccctgcccatctgttctagggttactgaatggctctttctgagtgtaccttgcactcaatgtacagtaagcaa

SEQ ID NO: 22888 - DNA, 600 bp, Chicken  19866894235708_1
accagcaatactgagggtaactgttaaaagatgctgttaatgtaataacatgtcccaaaacaaaccgtgccattaagagcacaaacattccagttgaactgctcacatcacttacaggctttgtacacaaattaagaaatgggtcacactgctaactacctcagctctgccaataaaacttacaataccccaaaataaagtggcagcgatcttactttggctgatgaatcaaccagctaaattccagctgcctgatgtatgttttctgagataaaaaccaactgcatctggagagaaacragcaactccccatcctgaaaaaccctgatactctggaacttgtctgtactttcagagcttttaggagcacacaccctgcctacctgacagacctcacacatacaacacaaagctccatgaacgggctctgatggagcccatggaaaacatctatcagccccttaagtcagacagatcatacaaaaatcattatggcctgaagtgcctttgacagacatcgggcagacgaccgggatcagtaaaactcttcagttgtcccaacaccatcagattttttgctaagcaatttcagaaacaaar

SEQ ID NO: 22889 - DNA, 600 bp, Chicken  19866894235708_2
agcaactccccatcctgaaaaaccctgatactctggaacttgtctgtactttcagagcttttaggagcacacaccctgcctacctgacagacctcacacatacaacacaaagctccatgaacgggctctgatggagcccatggaaaacatctatcagccccttaagtcagacagatcatacaaaaatcattatggcctgaagtgcctttgacagacatcgggcagacgaccgggatcagtaaaactcttcagttgtcccaacaccatcagattttttgctaagcaatttcagaaacaaartacactttttaatcattggatacaatgctaaccccaaataaaccactgctgacagaaacttgacttacaataccttcacactgctttaaatcagcttagaagacagcacagtgactgtgtgggataaaaaagcctccgtgagaaagcctggttgaaggaaaccgacagatgaattctggccaattcagccctggtgaccgactactgagacaacctgcccacctccactcctctgatgccaaaagtccccgttcctgaggcagccagaaacagacattcaagctgtaacagctgcataaa

SEQ ID NO: 22890 - DNA, 600 bp, Chicken  19866894235711_1
gaatcactagaagactgcagtgagcaaaccattactaaagcaagcaccacaaatccactaacatgctgctcagagctattgctcaattgtgaaacactccaggatgttaaaaggaagaaggagcagcagcatgaaagcctcaagcagaaaaaaagactgtcaagcaaatccaatgcaacaacaaattttattacaaaaggataaacttgtaagatccgggttatgattaataagaatgaaacatcccaactggcattccattatgttgagggtctgcgtaatccatctggagaagagaaygagttaggagctattatggtctccacactcatcatcaacctcaactggcttctgtcatttgacctcctggacaacacatactacaaggcagttttcaatcatcacatcaccctttacaccatggacagcttttactctgccaccactgcaagagctacacaaagggctaacagtacatctcacttttcccagcacagacagacccacactaccattagaaaaagctgcttcatgtgtttctttcyttcctttctttactggaattctcaatgttgagttaccctgttaatacatataatg

SEQ ID NO: 22891 - DNA, 600 bp, Chicken  19866894235711_2
ccaactggcattccattatgttgagggtctgcgtaatccatctggagaagagaaygagttaggagctattatggtctccacactcatcatcaacctcaactggcttctgtcatttgacctcctggacaacacatactacaaggcagttttcaatcatcacatcaccctttacaccatggacagcttttactctgccaccactgcaagagctacacaaagggctaacagtacatctcacttttcccagcacagacagacccacactaccattagaaaaagctgcttcatgtgtttctttcyttcctttctttactggaattctcaatgttgagttaccctgttaatacatataatgccctgttaatatgctgaatcagaacctattgcaggctgaagaccatgtgggctgtaaaacaaggctgagaaagagcctgcaactttgagaggtaaggaaagcagctacaaggagagcataatacaaatatgtcaagaagaactagaattcattactcaagggatctttacttcaatgaaccattacttcaaaaagagcagatarattagaagccctaatagcacaaatctattaaactgttttag

SEQ ID NO: 22892 - DNA, 600 bp, Chicken  19866894235711_3
cacactaccattagaaaaagctgcttcatgtgtttctttcyttcctttctttactggaattctcaatgttgagttaccctgttaatacatataatgccctgttaatatgctgaatcagaacctattgcaggctgaagaccatgtgggctgtaaaacaaggctgagaaagagcctgcaactttgagaggtaaggaaagcagctacaaggagagcataatacaaatatgtcaagaagaactagaattcattactcaagggatctttacttcaatgaaccattacttcaaaaagagcagatarattagaagccctaatagcacaaatctattaaactgttttagatcttctgttgcttgttgggtgaaattatcaatttataactagattaaaacaaaagaacccgttaatcctggcagcaagacacccatctccctgcaaaagtttccatgcagttattaacaagggctctagttctagaatctaaatatagccacatacataacagaacacattaatgtgaattcttggttctaccatagcaaattactgcttcattaacactccatttaggacatttgtgacaggcaacacatactgctg

SEQ ID NO: 22893 - DNA, 600 bp, Chicken  19866894235720_1
ccgctgtggtgttcagagccctttttcattctgtaaaggttgtcgtacttgaattctgaattaaagtgaagaaatgcctggaaagcagttggaaacaaattgtttaggttccgctgtctgaattcttaagcaacagtgctaactttgttgaaatagaatcctattcaagacaaagatagtcctcaaaatttgtgtaagattaaagccagtgtaattgtttggcaggagtggctttctcctgaagtgggaagaacagatgtttttgtacactggagttttatagtttaaaataaaaaaaaraaggtgrtatttgatagagcatatccagacagagtgtgctgcagtgggtgatcrcttatgttctgggaagaaatggatcttacaatcacacagcaagtaccagccataagaaggagtacaaatggaatgggttctgggtcaagtcatctaaacgtgttagagattgatggcaatggtgaagaacattcaagtgtgtctcatccaacctagctcattgtttagagtgaattgctctaagggaagtgaagaaacatgtagagccaaaggaaaaaaaatatctcccaggttagctatgatcac

SEQ ID NO: 22894 - DNA, 600 bp, Chicken  19866894235720_2
ggtgttcagagccctttttcattctgtaaaggttgtcgtacttgaattctgaattaaagtgaagaaatgcctggaaagcagttggaaacaaattgtttaggttccgctgtctgaattcttaagcaacagtgctaactttgttgaaatagaatcctattcaagacaaagatagtcctcaaaatttgtgtaagattaaagccagtgtaattgtttggcaggagtggctttctcctgaagtgggaagaacagatgtttttgtacactggagttttatagtttaaaataaaaaaaaraaggtgrtatttgatagagcatatccagacagagtgtgctgcagtgggtgatcrcttatgttctgggaagaaatggatcttacaatcacacagcaagtaccagccataagaaggagtacaaatggaatgggttctgggtcaagtcatctaaacgtgttagagattgatggcaatggtgaagaacattcaagtgtgtctcatccaacctagctcattgtttagagtgaattgctctaagggaagtgaagaaacatgtagagccaaaggaaaaaaaatatctcccaggttagctatgatcaccatgtta

SEQ ID NO: 22895 - DNA, 600 bp, Chicken  19866894235720_3
tctgaattaaagtgaagaaatgcctggaaagcagttggaaacaaattgtttaggttccgctgtctgaattcttaagcaacagtgctaactttgttgaaatagaatcctattcaagacaaagatagtcctcaaaatttgtgtaagattaaagccagtgtaattgtttggcaggagtggctttctcctgaagtgggaagaacagatgtttttgtacactggagttttatagtttaaaataaaaaaaaraaggtgrtatttgatagagcatatccagacagagtgtgctgcagtgggtgatcrcttatgttctgggaagaaatggatcttacaatcacacagcaagtaccagccataagaaggagtacaaatggaatgggttctgggtcaagtcatctaaacgtgttagagattgatggcaatggtgaagaacattcaagtgtgtctcatccaacctagctcattgtttagagtgaattgctctaagggaagtgaagaaacatgtagagccaaaggaaaaaaaatatctcccaggttagctatgatcaccatgttacttatagcttgtagtaggtacagaggccatgactgagaagtattatc

SEQ ID NO: 22896 - DNA, 600 bp, Chicken  19866894235723_1
atatatatcagatcccttctcagtcttcttttccccaggctgaacagaccccgggttgctcagcctttcctcatataggagatgctccagatccatagtcatctttgtggctctctgctggactattcctaggagttccctgtctgttttgaactggggagcccagaactggacacagttgtctaaacattgcctcacaaaggtggagcagaaagggaggatcacctcccctcgacctactggctacactctttttaatgcaccccaggataccactagccttcttggccacactgctgkctcatggtaaacctgttgtccaccaggacctcagatccttctctgcacaaatcctcttcagcaggtcatccactaacctgcgctgattcatgcgattcatccaccccaggtgcaagactttacacttgctcttgataaatctcatcggactcctccctgcccaactctctggccatcctggtcttgttgaatagtgacagccttcaggtatgtcagccaatcctcccagctttgtataatcagcaaacttgctgaggatggactttatcccttcattcaaatcactgatgaagatgttga

SEQ ID NO: 22897 - DNA, 600 bp, Chicken  19866894235733_1
actgtgctttctgactataaggagtatagtctcattatcagccaatagacgttggcgaaatgtgttaaatatggctcaataatttcaggcatctattcatgtttatgagcctgaaatcaatacaagtagcatgatttatgcagatactgagtaaggcatagaattttagcatgcttatataagccacaagataaggatttttggacataatagaaatttccgaggcactttaaagctttaggcccttaagttgtttaggtgatttcaaaaattgtttcaacatttcgaagccatttgcgraaaatgaacttctgaagtcctcatttaggtacttacagataaggtattctaccctaagaaacactgwtcacccagcagggccactgagawgactgaaaacctggaagaactatggcttgccaagcacgttactttaaatgcatagaaattttgtcaggagtctcacatttgggacctaggtgctgaaagctgtactaatccttcttacagccatgttctattctttctatagttccaaaactttttgtggctgtccccacatcatcaggcactgaaacattatttgcctcttagcagtgc

SEQ ID NO: 22898 - DNA, 600 bp, Chicken  19866894235733_2
aatatggctcaataatttcaggcatctattcatgtttatgagcctgaaatcaatacaagtagcatgatttatgcagatactgagtaaggcatagaattttagcatgcttatataagccacaagataaggatttttggacataatagaaatttccgaggcactttaaagctttaggcccttaagttgtttaggtgatttcaaaaattgtttcaacatttcgaagccatttgcgraaaatgaacttctgaagtcctcatttaggtacttacagataaggtattctaccctaagaaacactgwtcacccagcagggccactgagawgactgaaaacctggaagaactatggcttgccaagcacgttactttaaatgcatagaaattttgtcaggagtctcacatttgggacctaggtgctgaaagctgtactaatccttcttacagccatgttctattctttctatagttccaaaactttttgtggctgtccccacatcatcaggcactgaaacattatttgcctcttagcagtgctggtctatgggatgctgaaggctgtgggagaggaaggaggatttctccccccagtgggatctttcaa

SEQ ID NO: 22899 - DNA, 600 bp, Chicken  19866894235733_3
atctattcatgtttatgagcctgaaatcaatacaagtagcatgatttatgcagatactgagtaaggcatagaattttagcatgcttatataagccacaagataaggatttttggacataatagaaatttccgaggcactttaaagctttaggcccttaagttgtttaggtgatttcaaaaattgtttcaacatttcgaagccatttgcgraaaatgaacttctgaagtcctcatttaggtacttacagataaggtattctaccctaagaaacactgwtcacccagcagggccactgagawgactgaaaacctggaagaactatggcttgccaagcacgttactttaaatgcatagaaattttgtcaggagtctcacatttgggacctaggtgctgaaagctgtactaatccttcttacagccatgttctattctttctatagttccaaaactttttgtggctgtccccacatcatcaggcactgaaacattatttgcctcttagcagtgctggtctatgggatgctgaaggctgtgggagaggaaggaggatttctccccccagtgggatctttcaaggaaccctgtgataagatgaagc

SEQ ID NO: 22900 - DNA, 600 bp, Chicken  19866894235742_1
aggactccacctgggagacgatgcctgtgccgttctccttgtctgcaggccactggtagacatagagagccgtgtgcgtggagccggcgtcgaacaccaggccgtactgcggagagaggctgatgggatgcagggtgccagggggtgaaaagcagatttagctggctgcagagctaggagagctccaggtgagcgggcagagctcccagtgggcagggagtggctcatatgaccaagccaagagtgtcactggagcagggaaagtgtgacattgcagtcaccagctgtactgaggccaargctctgtgtgagctagtaggtaggtttccttggttctctgcagtgaaaaggctgtatgtgctgtaagcaagaaaactgtgacagacccactcgatgtgccagcctgcacrgcagtttgtccccatcttggtgaataactgcacagactgcctaaagctggggaaaatctcagaatagaggttagccaacacccaagtgagagaaggcagatgcacttctgccaaagactttaccttcgtgccaggaggcagaaacacatccttcacatctacagcactcagaatgagggcaatgatgctg

SEQ ID NO: 22901 - DNA, 600 bp, Chicken  19866894235742_2
ggagagaggctgatgggatgcagggtgccagggggtgaaaagcagatttagctggctgcagagctaggagagctccaggtgagcgggcagagctcccagtgggcagggagtggctcatatgaccaagccaagagtgtcactggagcagggaaagtgtgacattgcagtcaccagctgtactgaggccaargctctgtgtgagctagtaggtaggtttccttggttctctgcagtgaaaaggctgtatgtgctgtaagcaagaaaactgtgacagacccactcgatgtgccagcctgcacrgcagtttgtccccatcttggtgaataactgcacagactgcctaaagctggggaaaatctcagaatagaggttagccaacacccaagtgagagaaggcagatgcacttctgccaaagactttaccttcgtgccaggaggcagaaacacatccttcacatctacagcactcagaatgagggcaatgatgctgaagacacaggtggctgtcaggagacctgcgacaaccttgcctttgtactccattcctcttcsaacctgcaagaataccccaaacccagcttagtgctcctgtatttgcaa

SEQ ID NO: 22902 - DNA, 600 bp, Chicken  19866894235742_3
gtaagcaagaaaactgtgacagacccactcgatgtgccagcctgcacrgcagtttgtccccatcttggtgaataactgcacagactgcctaaagctggggaaaatctcagaatagaggttagccaacacccaagtgagagaaggcagatgcacttctgccaaagactttaccttcgtgccaggaggcagaaacacatccttcacatctacagcactcagaatgagggcaatgatgctgaagacacaggtggctgtcaggagacctgcgacaaccttgcctttgtactccattcctcttcsaacctgcaagaataccccaaacccagcttagtgctcctgtatttgcaaggccagatttgaaatgcaaacctcatggatggagatgggacctgtcaagatggaccttctcccatgtctgaaaaaagggcttgaaaccattcttggaatcacagtcacagaatcccagcatggctgaggttggaagggacccttgkgtccatctggtccaacccctgcttaaggaggaacacccagagcagggccatgtcctggcaggttcccacaggggctgacctctttggggtgcagagcttaatccct

SEQ ID NO: 22903 - DNA, 468 bp, Chicken  19866894235742_4
catccttcacatctacagcactcagaatgagggcaatgatgctgaagacacaggtggctgtcaggagacctgcgacaaccttgcctttgtactccattcctcttcsaacctgcaagaataccccaaacccagcttagtgctcctgtatttgcaaggccagatttgaaatgcaaacctcatggatggagatgggacctgtcaagatggaccttctcccatgtctgaaaaaagggcttgaaaccattcttggaatcacagtcacagaatcccagcatggctgaggttggaagggacccttgkgtccatctggtccaacccctgcttaaggaggaacacccagagcagggccatgtcctggcaggttcccacaggggctgacctctttggggtgcagagcttaatccctctggcacctgcattctgccattataccctgcactacctcacacaacccatcccacagactcg

SEQ ID NO: 22904 - DNA, 581 bp, Chicken  19866894235743_1
atgggactgacaaaggccactgacctagggcagagtgcctgggcaaggggtgggagattgtagagcctgtcctcatgacaaatcacggctctgcagccacagcgtggcagttactggttaactgtgctccaaagcaaaggtctggtaaagggtgaagggtaagcgaaggtacacttgggctagtggcagggctggagtgcagagcttgggggaaaggtaaatagtgatattggctgtccccacccagtgcaggaccacagtgggagctcagatctagcaccagcctataaaaataaaagygtgtttgtgctgagctgcatggagagcgcctctgtgtgtgtatcagctccacacatcctctccaaaggagaaatgaaagaatctccctttgccagggaagtaaggaaccatgctatttgtcaacagattgctgggaaactgggattaaccacacactcagcatcacagcagctccccactccttggagagcaggagctcactgtctgctcctgcagcatgcatgtgccacctccaggcaagccagctctgagcagtgcccttctggggggatgcccttgga

SEQ ID NO: 22905 - DNA, 600 bp, Chicken  19866894235747_1
agacctcattcctgggtcctccccgtcccattggtacagcggggacatggcagctgtggcggtgatgggacatggcatgggctgatggcactagacgatcttagtagccttttccaaccttactgactctatgaccctatgacttgtcatgccttgacaaactctagtggtttgagagctctagtgatgattgcagaggggactgcaatgggaagagagctgccactgtccccatcaccctgtgccccatcacacccgtggtggcacctcccctcagctctgtcccctcccctccagccrgcagcatctcggagccctgatgtatatatagatccaacttggaagatctgagccatgactcacaacgagatcttatccccctaaaccacaracagcgtgtgcccagcgtgtgcgtgccctgtgctrtgcccactgccattattcctccccaccccttgcgtgctcctgccgatagggatctgagcgagctgggcaggcggttgtcccgccagccctcagctcccagcctggcacagcgcaatccgagaaacttacgccgcgaggctatcagattaaatccaagggtttctccgagcggcg

SEQ ID NO: 22906 - DNA, 600 bp, Chicken  19866894235747_2
tagacgatcttagtagccttttccaaccttactgactctatgaccctatgacttgtcatgccttgacaaactctagtggtttgagagctctagtgatgattgcagaggggactgcaatgggaagagagctgccactgtccccatcaccctgtgccccatcacacccgtggtggcacctcccctcagctctgtcccctcccctccagccrgcagcatctcggagccctgatgtatatatagatccaacttggaagatctgagccatgactcacaacgagatcttatccccctaaaccacaracagcgtgtgcccagcgtgtgcgtgccctgtgctrtgcccactgccattattcctccccaccccttgcgtgctcctgccgatagggatctgagcgagctgggcaggcggttgtcccgccagccctcagctcccagcctggcacagcgcaatccgagaaacttacgccgcgaggctatcagattaaatccaagggtttctccgagcggcggaatgggaaaagcccattgtttgctgattatcgtatcatcagccccggctgatacgcggatgctcaaggaaaacacacttcagttacagtt

SEQ ID NO: 22907 - DNA, 600 bp, Chicken  19866894235747_3
ctctatgaccctatgacttgtcatgccttgacaaactctagtggtttgagagctctagtgatgattgcagaggggactgcaatgggaagagagctgccactgtccccatcaccctgtgccccatcacacccgtggtggcacctcccctcagctctgtcccctcccctccagccrgcagcatctcggagccctgatgtatatatagatccaacttggaagatctgagccatgactcacaacgagatcttatccccctaaaccacaracagcgtgtgcccagcgtgtgcgtgccctgtgctrtgcccactgccattattcctccccaccccttgcgtgctcctgccgatagggatctgagcgagctgggcaggcggttgtcccgccagccctcagctcccagcctggcacagcgcaatccgagaaacttacgccgcgaggctatcagattaaatccaagggtttctccgagcggcggaatgggaaaagcccattgtttgctgattatcgtatcatcagccccggctgatacgcggatgctcaaggaaaacacacttcagttacagttgattttcagattccaaaatggtgctgcaaagtctg

SEQ ID NO: 22908 - DNA, 600 bp, Chicken  19866894235751_1
tgaagtacaaaaggaaatcagtgtctttcagcacattttgctcacacctccaaatgagagcagcccagtctgctcaatcctctatccaagatcaaacctgaaggccagcagctgacagagcctcctacaggatttggtctctgagatgggaagctatgcacttagaaggcactattaattattacacagctggacagtcagaatataagcctgagttatttgggctatttctttcagaggcatggcaccactttaaggctcctgaagtccacaccagcaacatgactgaggtcacttccmacatctaccatgagcccaactcctgccgagctagctgcatctttgaaagatgtttcacccggttatttctgcagacatctgaagttttcacttctctgcctatctctcagcagctgaggacttccataaagccttacctgcagcttgttagctttctccgccagctccaccctcagtctttcgccttctgtgaccttagcagtcagttcttgtacctgagcatcaagcttcttcctcttatgctcagactctgccttgacctgctgcaacaccttcacttcacaggccaactccttgttg

SEQ ID NO: 22909 - DNA, 563 bp, Chicken  19866894235754_1
ctgctggctccttcagcctattgagtcactgctccttttgatcctctgaaagtgaggggggaaggactatttttaagacaggtgatgattttattcagaaaggaaccaggtcactgccacctggatttgttttcccagttctgcctgagtttggtttggacccccaggtcctttcacagagatgtaggagacagcaggaagagttttccagaggtagcttgagaactaattaattcaatgttcattgtagctccagcatttaattcagagagtacttttctactctcacttatttaaaayggctatgattgaagttcctgcaatgtaattttttgaggggttggtattgtcagagcttgcctttatccatgcttattttttcatctccgtgtgagatgaagtctttaaactgagagcctaagattagaataaagctcaggctgtttctgtcagtctttttaaaatatataggtactggtatttaagcagtataggcaagggaaaatctctcaattaacaatttgcagatttggggtgaaaataagacatacttctgatttgtg

SEQ ID NO: 22910 - DNA, 599 bp, Chicken  19866894235755_1
  misc_feature (1)..(59): n is any nucleotide
nnnnnnnnnnnnnnnnnnnnnnnnnnnnnnnnnnnnnnnnnnnnnnnnnnnnnnnnnnngtgctcagcttgggtttgattccttcagatggtgtagctggtattggaactgagctgtccctcctacaaaatggaaacagagcttacagagctaatgggaaaccaaccacccaggtgcacagaaggacatacccctactgctcttcttaacaggttctgctattcgccgctaacatttgtagaccactgttatcatggtaacagtgcagaaagttgtatggcagctacgtccaagatgacrtataacaaataagtaatagaataaattctaggaagcttaagatggactctacctttggagaagcaacatgcattttaataacagcattcagggattggaatttatgtttatctaaagcatcaattacaagataataactaattatgacaacagtagtacaaatcaccttcattaatatactttgaagcactgaagtcttttcttggcaagttacacttaactacagcttgtatttcttcaaataaagtttgtgttacagtaaaataaataccatccctccctgaactgagaattctcag

SEQ ID NO: 22911 - DNA, 600 bp, Chicken  19866894235758_1
atagatgtgaaactgaaatgggaacttttcactttaaaacaccagattatctgggggaaatatttaaaatatacagaatgccatgtgatgaagtgggaatttctaaaagctgggcttcgaagtggagccatttctgaagtatttatgttgggttttgtgagtccaaatgaaaccggtgtgtgaggaaatccttagctctttaaagtaaatagagtttgaagattgataccagtaggtctagaaattttagaacaattttgtaagagcttctagatgtctgtaagctcctgagagaactgrgggaaagatatcctgaaggaacatccatatttgttgagaaaaaatgcaccacattctatctttcattatttgaatttgagtagataaagctagtctcaggatgaatgtttgtagtagtaaaatggtgtaggagctgcaactgcttgagttttgtacacaataggagtaaagaaagcttagcaatatamaaaccagtcatctgacaactgtatttttatcccactatagtattcaggcactctcctgagaaaaacaagtttatcctgagaagtaatagctaaagctatgaatcagctgcta

SEQ ID NO: 22912 - DNA, 600 bp, Chicken  19866894235758_2
tccttagctctttaaagtaaatagagtttgaagattgataccagtaggtctagaaattttagaacaattttgtaagagcttctagatgtctgtaagctcctgagagaactgrgggaaagatatcctgaaggaacatccatatttgttgagaaaaaatgcaccacattctatctttcattatttgaatttgagtagataaagctagtctcaggatgaatgtttgtagtagtaaaatggtgtaggagctgcaactgcttgagttttgtacacaataggagtaaagaaagcttagcaatatamaaaccagtcatctgacaactgtatttttatcccactatagtattcaggcactctcctgagaaaaacaagtttatcctgagaagtaatagctaaagctatgaatcagctgctaatatttttatccaaggaaaatattgtctcttagattttttgctccaactatacttgtaatttgaatcaactgtgattaaagctttttgaacatatagctaaagaaagaaatctgctcagcatatgtatctccagaatttatagacttgcagtaggataagtaaaataccattatttgcttcaacatca

SEQ ID NO: 22913 - DNA, 600 bp, Chicken  19866894235761_1
aatagttccgttctcttcttgcttatcaaggtgagcatgcattccaccagcctatttaccaatccatatgcaatagaagtcctaagaactaaaagagaagagctaatagaaggcattaatgaccccgaccaccttctaagctgcctcatagacaatggcatttttgccccagaaaaaaggatggtcatgagtttctacaggacgcgaacagaaaagaacgctcgagttttagacaccctaatttctcaaggtgaacgagcctgcaggctctttttctatccgtgtttaaagcaagcggarccaaaactttataacaagatgagaaattatgtcagtgaagtaaatgaaagcgtcagagatgccagaagacaactgataggatacttacttgaaagagacaaagtctggtttgaaaagagctatgaacagtgccaagaagaaagagagagtcctggaagaaaaagacacgaaggggatactaagaagaagggaaaagaaactcagctttcaggagcagcaaaacctagagaacatcattctgatattggcatctttgacacagctgctaagggttatctgtcagagttagagaaaacactg

SEQ ID NO: 22914 - DNA, 600 bp, Chicken  19866894235765_1
ttaatatttctcaagtaatattccagttgttcttcagatgtgtcaggaaaaaagtgtctttcattagaattcctttacaaaagcaccagacagaaagattttaatgaattcattaccagttgtatttctaaatcacaatgaaatcaaaggccttgcagaaatctttgccaatgaaatcataagcttaatcaagaagtacaaacgtatttcacagtgtttattttcagttaagctgttttgattgctaacctatatattgccataattttaactctttgttgatttcatcccatgtaactytgacttagttgctctgtatcctgttaaccagcttacagtttattaaaatcaaattattcatccttcctatacagtgatgcaacaatctcttttgtccagaacctgagaaatttgtcattcttccaagctttacccactagtccaacattcctctgaatatttttgcaacttatcatgtctcaagtatgtcaatataattaactttaaactattttttcttaatattgttaatttttcctttcttctcagtacaccagtaaaaaaaacaaaaaacaaacaaaaaaaacccctgttgttaac

SEQ ID NO: 22915 - DNA, 600 bp, Chicken  19866894235786_1
agcatgcttcataaatccctaaattcttcttaaataattagataaacaaattctgaagggggttacaagagatttaaatatgtgattagacacaagtttacatggctagaaatacactctaagcaaatactgcttggtatctcacagccccttcttagagggacaagtgttgcctttgtaattggcgtgtgttcctttccacagcccattgaagtgctccagagacttattaccgtacatcccttgtcctgcccataatcgccctgtaggtacaatccttctcacaacagagatgtcctrtgcgcagccaggtgctcaccagggcactgccatatttccacggggtgaggaccaaagccctgggcacgtcctggtcccragaacaccagaggggacagaactaacaccgcttgcattattcaaatctttgattcttgattaacttattgtacatgatctcgagaaggggtcaaatacattttcctctcagaggactaactcctttatcaaatcatgtggctacaacaaaaagctaaacatacaagaaagctgagattttacatttatcatctaaaacactcagttctgtaactgaaaaaa

SEQ ID NO: 22916 - DNA, 592 bp, Chicken  19866894235786_2
atgtgattagacacaagtttacatggctagaaatacactctaagcaaatactgcttggtatctcacagccccttcttagagggacaagtgttgcctttgtaattggcgtgtgttcctttccacagcccattgaagtgctccagagacttattaccgtacatcccttgtcctgcccataatcgccctgtaggtacaatccttctcacaacagagatgtcctrtgcgcagccaggtgctcaccagggcactgccatatttccacggggtgaggaccaaagccctgggcacgtcctggtcccragaacaccagaggggacagaactaacaccgcttgcattattcaaatctttgattcttgattaacttattgtacatgatctcgagaaggggtcaaatacattttcctctcagaggactaactcctttatcaaatcatgtggctacaacaaaaagctaaacatacaagaaagctgagattttacatttatcatctaaaacactcagttctgtaactgaaaaaatacacagcattcatttattttccacaatactctactcagttttaaatattttgcaaacaaattaaatcttg

SEQ ID NO: 22917 - DNA, 599 bp, Chicken  19866894235788_1
  misc_feature (1)..(71): n is any nucleotide
nnnnnnnnnnnnnnnnnnnnnnnnnnnnnnnnnnnnnnnnnnnnnnnnnnnnnnnnnnnnnnnnnnnnnnnaataacggatttctaaagattcctctgtataatcctgcttacaatttccaactgctcagcaagacaccaaacaccattttatatcttgtctattaatcactttgatagaatgtgatcttgacattcttctaagcatttatccaacatctatatgtttgaatcacatcgaactaatagccaacaggaaaccggtgagtgagctttctttaaacagtactataaaggcatsgttacagcaggaattctgcatttsttgagataaatgctagcacacataaggtttgctatatgctcttycacagtagctggcttccatagcataaggttttgaaccttgctttrgtactcgattcacataaagaaatcggggatatttatcaccttacactggagacagatggagcaccacagtcgggggaggatgcagcgctgccacccgcagctgattgtggtgctgggacaccccctgccggccccactgccacctcccgacctcaacatccacaggcaaaaacagcttttcttctc

SEQ ID NO: 22918 - DNA, 599 bp, Chicken  19866894235788_2
  misc_feature (1)..(47): n is any nucleotide
nnnnnnnnnnnnnnnnnnnnnnnnnnnnnnnnnnnnnnnnnnnnnnnaataacggatttctaaagattcctctgtataatcctgcttacaatttccaactgctcagcaagacaccaaacaccattttatatcttgtctattaatcactttgatagaatgtgatcttgacattcttctaagcatttatccaacatctatatgtttgaatcacatcgaactaatagccaacaggaaaccggtgagtgagctttctttaaacagtactataaaggcatsgttacagcaggaattctgcatttsttgagataaatgctagcacacataaggtttgctatatgctcttycacagtagctggcttccatagcataaggttttgaaccttgctttrgtactcgattcacataaagaaatcggggatatttatcaccttacactggagacagatggagcaccacagtcgggggaggatgcagcgctgccacccgcagctgattgtggtgctgggacaccccctgccggccccactgccacctcccgacctcaacatccacaggcaaaaacagcttttcttctctgtaggttgcaattttaaactcaa

SEQ ID NO: 22919 - DNA, 599 bp, Chicken  19866894235788_3
  misc_feature (1)..(3): n is any nucleotide
nnnaataacggatttctaaagattcctctgtataatcctgcttacaatttccaactgctcagcaagacaccaaacaccattttatatcttgtctattaatcactttgatagaatgtgatcttgacattcttctaagcatttatccaacatctatatgtttgaatcacatcgaactaatagccaacaggaaaccggtgagtgagctttctttaaacagtactataaaggcatsgttacagcaggaattctgcatttsttgagataaatgctagcacacataaggtttgctatatgctcttycacagtagctggcttccatagcataaggttttgaaccttgctttrgtactcgattcacataaagaaatcggggatatttatcaccttacactggagacagatggagcaccacagtcgggggaggatgcagcgctgccacccgcagctgattgtggtgctgggacaccccctgccggccccactgccacctcccgacctcaacatccacaggcaaaaacagcttttcttctctgtaggttgcaattttaaactcaaaaaaaaaaaaaaaagaaaaaagacgttaaagcagctctaccaaa

SEQ ID NO: 22920 - DNA, 600 bp, Chicken  19866894235788_4
aatttccaactgctcagcaagacaccaaacaccattttatatcttgtctattaatcactttgatagaatgtgatcttgacattcttctaagcatttatccaacatctatatgtttgaatcacatcgaactaatagccaacaggaaaccggtgagtgagctttctttaaacagtactataaaggcatsgttacagcaggaattctgcatttsttgagataaatgctagcacacataaggtttgctatatgctcttycacagtagctggcttccatagcataaggttttgaaccttgctttrgtactcgattcacataaagaaatcggggatatttatcaccttacactggagacagatggagcaccacagtcgggggaggatgcagcgctgccacccgcagctgattgtggtgctgggacaccccctgccggccccactgccacctcccgacctcaacatccacaggcaaaaacagcttttcttctctgtaggttgcaattttaaactcaaaaaaaaaaaaaaaagaaaaaagacgttaaagcagctctaccaaaaagcttaaattacaaataaagcacacgttcaggagttgtgtggctg

SEQ ID NO: 22921 - DNA, 600 bp, Chicken  19866894235800_1
gtgcaagaaatctgaagcttactttaccactacaccaatttttaacaaatagagaactttcagcagaagtttcagaccttttatgtccttgatgcatttattcttactctgcaaaacaatgtgttaggaataactctggtaaaaatgcagtgtttctttggtattttcattgttactactttcttgctgtgggagactttagatgtttgtttatattcatgataacctatttatgacttcatttactggcagtgcatgtagttaatagcatatcggaactctttccatagactgtccatrggatggcatcatgcctatttcttaagccagagctttaattctcacagaattagttttggtagtttctcagggaaggagacagaaaaaaaatscatctttccttaattattttctttgaaattatttactgttttgtaataaaatgtggaatacttgtcaggtctccttcagccatcatgcacttccttttcctcagaccatgggcacacagaagtatgcaagcaacataggccaaaattgatcatcactgcaattatayatatggaccaagtattgcatgtaaatatggatgttggttta

SEQ ID NO: 22922 - DNA, 600 bp, Chicken  19866894235800_2
tgcatttattcttactctgcaaaacaatgtgttaggaataactctggtaaaaatgcagtgtttctttggtattttcattgttactactttcttgctgtgggagactttagatgtttgtttatattcatgataacctatttatgacttcatttactggcagtgcatgtagttaatagcatatcggaactctttccatagactgtccatrggatggcatcatgcctatttcttaagccagagctttaattctcacagaattagttttggtagtttctcagggaaggagacagaaaaaaaatscatctttccttaattattttctttgaaattatttactgttttgtaataaaatgtggaatacttgtcaggtctccttcagccatcatgcacttccttttcctcagaccatgggcacacagaagtatgcaagcaacataggccaaaattgatcatcactgcaattatayatatggaccaagtattgcatgtaaatatggatgttggtttaaataactgagmaaactttgggctcttacaagctgcaaacttctacatgctggatagcaaggtcttgacaccacaaactcagattttagtggc

SEQ ID NO: 22923 - DNA, 600 bp, Chicken  19866894235800_3
agttaatagcatatcggaactctttccatagactgtccatrggatggcatcatgcctatttcttaagccagagctttaattctcacagaattagttttggtagtttctcagggaaggagacagaaaaaaaatscatctttccttaattattttctttgaaattatttactgttttgtaataaaatgtggaatacttgtcaggtctccttcagccatcatgcacttccttttcctcagaccatgggcacacagaagtatgcaagcaacataggccaaaattgatcatcactgcaattatayatatggaccaagtattgcatgtaaatatggatgttggtttaaataactgagmaaactttgggctcttacaagctgcaaacttctacatgctggatagcaaggtcttgacaccacaaactcagattttagtggcagctttgactaatttcattgcaagttagcatgctgagcastttaaacctgcagaggttagacatacatacttatctttcctgactgtggccagttcccctgcctaggccctcctcagagtgcacacggttacacaaatcctgctgtatggcaggaatgagaacaccc

SEQ ID NO: 22924 - DNA, 600 bp, Chicken  19866894235800_4
tgcctatttcttaagccagagctttaattctcacagaattagttttggtagtttctcagggaaggagacagaaaaaaaatscatctttccttaattattttctttgaaattatttactgttttgtaataaaatgtggaatacttgtcaggtctccttcagccatcatgcacttccttttcctcagaccatgggcacacagaagtatgcaagcaacataggccaaaattgatcatcactgcaattatayatatggaccaagtattgcatgtaaatatggatgttggtttaaataactgagmaaactttgggctcttacaagctgcaaacttctacatgctggatagcaaggtcttgacaccacaaactcagattttagtggcagctttgactaatttcattgcaagttagcatgctgagcastttaaacctgcagaggttagacatacatacttatctttcctgactgtggccagttcccctgcctaggccctcctcagagtgcacacggttacacaaatcctgctgtatggcaggaatgagaacacccagtagcatctctgtgccacggccattcatacaccagactctgtgcattgctc

SEQ ID NO: 22925 - DNA, 600 bp, Chicken  19866894235800_5
ttgtaataaaatgtggaatacttgtcaggtctccttcagccatcatgcacttccttttcctcagaccatgggcacacagaagtatgcaagcaacataggccaaaattgatcatcactgcaattatayatatggaccaagtattgcatgtaaatatggatgttggtttaaataactgagmaaactttgggctcttacaagctgcaaacttctacatgctggatagcaaggtcttgacaccacaaactcagattttagtggcagctttgactaatttcattgcaagttagcatgctgagcastttaaacctgcagaggttagacatacatacttatctttcctgactgtggccagttcccctgcctaggccctcctcagagtgcacacggttacacaaatcctgctgtatggcaggaatgagaacacccagtagcatctctgtgccacggccattcatacaccagactctgtgcattgctcatttgatctctctttgcagtccagttgcccctcagctgagagctgctccattgcagacagcctcacagacagacagaaggtgcttctcactgggttctgctagcttttcctctcagctgac

SEQ ID NO: 22926 - DNA, 600 bp, Chicken  19866894235803_1
ttgcctacaggtcccacgtgaggttgggtaccaaaaaccattggttcccaatttgcatctcccagaggtcccatatggggttgggtaccaaaactcccctaaactgctgtgagagggatgctcaccctcaatccccattattggtgctcatatctgtggggttttggaaccgtgcacaaaaagccctcctggtgttggggtcacctgtgctgcaccccatgcacaccccaccggatgcagagaatccgggaggtccaccatgcagctctcagtgctccaaaatacagcagaggggttccratccgatggggtcacttctaaggcatttcaacccccatggaaagtcaacgggaagcrccggtgcccgcataaatcccaatgtgggaagagtggggaaaccctcatgggtcaccgagcggctgctgcaggaagcagtgccagaccccctccccrctgctgaaccggagtgggacgggatctgaaatcagaaattaaggatttgctgggcatgcaaaggagcggaatgaagagaatgtgaggtgggagcaaagcgtgcccggatggagcagggagctgccagagctcgtttccgcgggagaa

SEQ ID NO: 22927 - DNA, 600 bp, Chicken  19866894235803_2
tctcccagaggtcccatatggggttgggtaccaaaactcccctaaactgctgtgagagggatgctcaccctcaatccccattattggtgctcatatctgtggggttttggaaccgtgcacaaaaagccctcctggtgttggggtcacctgtgctgcaccccatgcacaccccaccggatgcagagaatccgggaggtccaccatgcagctctcagtgctccaaaatacagcagaggggttccratccgatggggtcacttctaaggcatttcaacccccatggaaagtcaacgggaagcrccggtgcccgcataaatcccaatgtgggaagagtggggaaaccctcatgggtcaccgagcggctgctgcaggaagcagtgccagaccccctccccrctgctgaaccggagtgggacgggatctgaaatcagaaattaaggatttgctgggcatgcaaaggagcggaatgaagagaatgtgaggtgggagcaaagcgtgcccggatggagcagggagctgccagagctcgtttccgcgggagaatggcgaaaccccaattagtgctttgtgtcggccctcctgcggggtcccggcccattg

SEQ ID NO: 22928 - DNA, 600 bp, Chicken  19866894235803_3
ctgtggggttttggaaccgtgcacaaaaagccctcctggtgttggggtcacctgtgctgcaccccatgcacaccccaccggatgcagagaatccgggaggtccaccatgcagctctcagtgctccaaaatacagcagaggggttccratccgatggggtcacttctaaggcatttcaacccccatggaaagtcaacgggaagcrccggtgcccgcataaatcccaatgtgggaagagtggggaaaccctcatgggtcaccgagcggctgctgcaggaagcagtgccagaccccctccccrctgctgaaccggagtgggacgggatctgaaatcagaaattaaggatttgctgggcatgcaaaggagcggaatgaagagaatgtgaggtgggagcaaagcgtgcccggatggagcagggagctgccagagctcgtttccgcgggagaatggcgaaaccccaattagtgctttgtgtcggccctcctgcggggtcccggcccattgcggtgccccaccgccctcccrtccctctgtgcacatcgttctgctcatcccccggggaaaaaaatcccattaattggtcgtgttggggttttgctt

SEQ ID NO: 22929 - DNA, 482 bp, Chicken  19866894235803_4
atgtgggaagagtggggaaaccctcatgggtcaccgagcggctgctgcaggaagcagtgccagaccccctccccrctgctgaaccggagtgggacgggatctgaaatcagaaattaaggatttgctgggcatgcaaaggagcggaatgaagagaatgtgaggtgggagcaaagcgtgcccggatggagcagggagctgccagagctcgtttccgcgggagaatggcgaaaccccaattagtgctttgtgtcggccctcctgcggggtcccggcccattgcggtgccccaccgccctcccrtccctctgtgcacatcgttctgctcatcccccggggaaaaaaatcccattaattggtcgtgttggggttttgctttgtcagcaatattcccctgcatgggttgcaaatggagcaggcaatattcccatgtacagattgcaaatggggtaggcagtattcccatacacggattgcaaaagggg

SEQ ID NO: 22930 - DNA, 600 bp, Chicken  19866894235812_1
gagaaaccaactgtgccctcagctgcacctcagcagcccagccccagcctgcctgcagcccctggcccccggcagcacggagaacccttcctggcgaccccagacacggaggaggtgctgggggccatgccatgcagcagcgagacatgcaacctgcgtggggagtgtgccatcgaggctgggcgggtgatgtgccactgcgccctgggctaccgtggggactactgtgaggaggcagaggtgcaaccattggcaggacccatcgccctgggggtggctgtgcttctgttgctggctgcrgcagctgtgggggccctggcctacatgcggaagcgggataggaggaggaggtgagttgtagggctggggatggctacatggagagctgcaacagcccagcggggagatgctgtgggttgtggcaggacctgagggatctgttctgtctctaagaaatggttctgctatcctgtgggtaccttttttttttttcccccaggacctcaagcactgcttccacccgagtgctgacrctgtaccaccgtgaaagtgaccctgaggaagaagatgaggaggaggaagagcttccacccaagagtg

SEQ ID NO: 22931 - DNA, 600 bp, Chicken  19866894235812_2
ggcagaggtgcaaccattggcaggacccatcgccctgggggtggctgtgcttctgttgctggctgcrgcagctgtgggggccctggcctacatgcggaagcgggataggaggaggaggtgagttgtagggctggggatggctacatggagagctgcaacagcccagcggggagatgctgtgggttgtggcaggacctgagggatctgttctgtctctaagaaatggttctgctatcctgtgggtaccttttttttttttcccccaggacctcaagcactgcttccacccgagtgctgacrctgtaccaccgtgaaagtgaccctgaggaagaagatgaggaggaggaagagcttccacccaagagtgatacctttgtgaacgaagcctatgatgggaaagaggtgagcaggccctgctcaggaccctccttgtaaaatcacagaatggcttgggttgtaagggacattaaggcacacccagctccaaccacctgccatgggctggttgtcccccactggatcaggctacccagggtcccatccagcctggctgctctgtccatgacctctgtgccagggtgcaagctgggcccagggagg

SEQ ID NO: 22932 - DNA, 600 bp, Chicken  19866894235813_1
ttcaggaagtaatgtttcttgaatgttaatgttatagagcatttacccagcacaataaaagttcaaatgttctctccaggtttcattatctctcaggtttactcagtaaaggaagaaatgaaatacatgggcatcatggttgtttacaattagcaggaaattgcccttttattgtagctgagcactcctgtttatgctgcctatctccctttggagagatggtcccttgccagaggatgctcctgaggttctcctcttggagagatcagttggaacagctgaaggctgtcagtctgaggrgaccctcacctcaaccatctgttatttgggagcatggtgtcattgggactgtacatttgttatatcaaatagaaactgtaggggaggtggtgggaagatcttgcatgcactgagacttrttttcctggtaacatatacaatargaaaggaatggttttgggacagggtctaattgatctgtctggtgyctttcccttaaagttaagggtggttttgttgtgtgcaagctgatcttctggtgggtagtgcagcttacctgtttgagcagcactgcctgaaggtctgtactgrcagggcaag

SEQ ID NO: 22933 - DNA, 600 bp, Chicken  19866894235813_2
gaaatacatgggcatcatggttgtttacaattagcaggaaattgcccttttattgtagctgagcactcctgtttatgctgcctatctccctttggagagatggtcccttgccagaggatgctcctgaggttctcctcttggagagatcagttggaacagctgaaggctgtcagtctgaggrgaccctcacctcaaccatctgttatttgggagcatggtgtcattgggactgtacatttgttatatcaaatagaaactgtaggggaggtggtgggaagatcttgcatgcactgagacttrttttcctggtaacatatacaatargaaaggaatggttttgggacagggtctaattgatctgtctggtgyctttcccttaaagttaagggtggttttgttgtgtgcaagctgatcttctggtgggtagtgcagcttacctgtttgagcagcactgcctgaaggtctgtactgrcagggcaaggctttggccaattggcactgtggctgctgggagcaaagaactcactacagagagattgctgatatctgggaggcatctgactggatgcttgcctggaaatgggccccttttccctctct

SEQ ID NO: 22934 - DNA, 600 bp, Chicken  19866894235813_3
ttacaattagcaggaaattgcccttttattgtagctgagcactcctgtttatgctgcctatctccctttggagagatggtcccttgccagaggatgctcctgaggttctcctcttggagagatcagttggaacagctgaaggctgtcagtctgaggrgaccctcacctcaaccatctgttatttgggagcatggtgtcattgggactgtacatttgttatatcaaatagaaactgtaggggaggtggtgggaagatcttgcatgcactgagacttrttttcctggtaacatatacaatargaaaggaatggttttgggacagggtctaattgatctgtctggtgyctttcccttaaagttaagggtggttttgttgtgtgcaagctgatcttctggtgggtagtgcagcttacctgtttgagcagcactgcctgaaggtctgtactgrcagggcaaggctttggccaattggcactgtggctgctgggagcaaagaactcactacagagagattgctgatatctgggaggcatctgactggatgcttgcctggaaatgggccccttttccctctctctagctagccagaaaattgattct

SEQ ID NO: 22935 - DNA, 600 bp, Chicken  19866894235813_4
tgtttatgctgcctatctccctttggagagatggtcccttgccagaggatgctcctgaggttctcctcttggagagatcagttggaacagctgaaggctgtcagtctgaggrgaccctcacctcaaccatctgttatttgggagcatggtgtcattgggactgtacatttgttatatcaaatagaaactgtaggggaggtggtgggaagatcttgcatgcactgagacttrttttcctggtaacatatacaatargaaaggaatggttttgggacagggtctaattgatctgtctggtgyctttcccttaaagttaagggtggttttgttgtgtgcaagctgatcttctggtgggtagtgcagcttacctgtttgagcagcactgcctgaaggtctgtactgrcagggcaaggctttggccaattggcactgtggctgctgggagcaaagaactcactacagagagattgctgatatctgggaggcatctgactggatgcttgcctggaaatgggccccttttccctctctctagctagccagaaaattgattcttgggtcaaatggttcagagttgagctcatgttgcttgtgactatg

SEQ ID NO: 22936 - DNA, 600 bp, Chicken  19866894235813_5
gtctgaggrgaccctcacctcaaccatctgttatttgggagcatggtgtcattgggactgtacatttgttatatcaaatagaaactgtaggggaggtggtgggaagatcttgcatgcactgagacttrttttcctggtaacatatacaatargaaaggaatggttttgggacagggtctaattgatctgtctggtgyctttcccttaaagttaagggtggttttgttgtgtgcaagctgatcttctggtgggtagtgcagcttacctgtttgagcagcactgcctgaaggtctgtactgrcagggcaaggctttggccaattggcactgtggctgctgggagcaaagaactcactacagagagattgctgatatctgggaggcatctgactggatgcttgcctggaaatgggccccttttccctctctctagctagccagaaaattgattcttgggtcaaatggttcagagttgagctcatgttgcttgtgactatgctggaggcagtggtgactgtaagggtgcccttagagctggccttgggtcctgtggtggcaagtgcgagagaaacatcacaggtgttgaagggattgctgctac

SEQ ID NO: 22937 - DNA, 600 bp, Chicken  19866894235816_1
ctacctatatgttggtctgagatctccacaaccttcccaatctccttttccttcaattttgcttggtgtatgtctaggaggtctttggttgaatcttctgaagtacttagttctaacgttgagttctgaactttcacactttcccttgaaatgtcttcaggagtagtcacaaagtcagaattctgacttggtccatcttccagcacctcagaagttaatagcacgtcttttgctttttctacagctgcatgaatatctgcagatgctgttaatgtaacatgtttgtttagtcgggactgmtggagctcttgctctttacttgatacctcttcttcttttactaccctgtgtactctccaaaagttcaggtaaagtcgtgtctgatgggcttttccctctggactcagtgtgctgttctgactctaaggcagctgcctcttctgtttctgtaagtttgttaacagcagtctggatgacgttcaatacgatttttgtactctgggactctatagtcccagacggaacaacatccgcctcagattctgtgtgggggagtgtgagaccgtcacttaaaggagcagcattttgttcaggctgatc

SEQ ID NO: 22938 - DNA, 600 bp, Chicken  19866894235819_1
tgatggagcccaggataccatttgctttccgagctgcaagagcacactgctggctcatgttaagtttgtcatccatcaggacccccaggtccttctctgcagagctgctctcaaggactgctccttccagtctgtatagatgcctggggttcctccgggcccaagtgcaaaaccctgcactttgtcatgttgaacctcattaggttcacccaggcccacctttcaagtctgtaaaggtccctctgaatggcatcccttccttcctttgtgtcaaccgcaccactcagcttggaatataaygttttagttagaaggctgaaggtgcttacgtatattactcacacacacacaaagagaagtccctttgacaaactggacttgtaaaatcaccactaagaccattcttatctagatggtcctttggcaaagagctaattttgacgggaggaaaaatttacactattttctgccataatattaaaagcagtyagttaagactgttctaaagatacaacatcaaacttgtgttttttccaacgaacccagtaattgtgttgccaatgagactaagataatgctctatgcagctttttagtgagc

SEQ ID NO: 22939 - DNA, 480 bp, Chicken  19866894235819_2
ttgaacctcattaggttcacccaggcccacctttcaagtctgtaaaggtccctctgaatggcatcccttccttcctttgtgtcaaccgcaccactcagcttggaatataaygttttagttagaaggctgaaggtgcttacgtatattactcacacacacacaaagagaagtccctttgacaaactggacttgtaaaatcaccactaagaccattcttatctagatggtcctttggcaaagagctaattttgacgggaggaaaaatttacactattttctgccataatattaaaagcagtyagttaagactgttctaaagatacaacatcaaacttgtgttttttccaacgaacccagtaattgtgttgccaatgagactaagataatgctctatgcagctttttagtgagctaaacactaaatgtgattttttgcaaagatatctttgcatatgtagatttttaacttaaagggattttt

SEQ ID NO: 22940 - DNA, 514 bp, Chicken  19866894235830_1
aatgcagacttgggccaggaagcagtgtttacatcaactgctctgctttttaccatgggtattaactcaatgtgttgtgagcttctgcttctagcactatcactgcaatggaagcaactctgcacctgcattgctttcccacgttttgggcagtttggtggtgttctggtttttcctccttttgaggatgattataggaggaacacatgaattcctctcttttctgaagttcagactccacacacaatccacaaccagccttctccatcccttgcattactattctgtctcttcccagtrtactgagtgcctaagagcagagacaatgagtgcagcctcaaagccaattaggtgggattaccctgtctgttagacagctggggctcagcgtgtgcccgccctccctgttagccaagaattcccatggcacagaccccaccgaccttgtcagcccataacggctgcctacaacaggcactcaggtaagcctgggtggtgccaaaaggagctgaag

SEQ ID NO: 22941 - DNA, 566 bp, Chicken  19866894235831_1
cgcagacgggaggacacgactctctggtcgcttctatggggcaaggttataatgccatgagtctagaggggctcccaaaggatctgcactggatctagaggctgcaggacagcccgctcatagggcaccatgtgctcactgtagagacgaagagaaaagggaaaaggtgtgcagagaagggaggagaagaggagggcacaggacaatgctgatagctgctgtttcccactaaccttcacctttgatttcggcaggtttgtgacaaagaacgggaccaaggtctgttcaaaaccaaacgcrccttgggtgaaaaaagcagttaagtatcttcagaaaaagaacaaccctcaagctgtgtgatgcagagcagacacccaaattgaggattgcagcttcctgatgggaagatttacactcagcctcctgcggaggtccctgatgctgacagacagcagcgactccccagagccctgcatggcaccacatcccgaggtgctacagccctgccagctcccccctgcaggacacagttccaaaataaaggttattttgcacactacagaggg

SEQ ID NO: 22942 - DNA, 600 bp, Chicken  19866894235832_1
cttgtactgaaaccagcttccaagttcacagctctggggctagttgagacccatctgtaagaaaatcactcatagctcacacaggctgggaaagagtatcttcgttctgctagacacatcaacatatctaaattaggttctgttacagaatggaaatagaaatcaaaatactataaaaatataaaagtcccaaaacaaaatttcagcatagtagcatacaaacaaaacaagcaaacaaaaaacccttggataacatcaaatggttgttttcaaacttctgaaatgtaaaaatcagcattytgtggtaaatggcaaacccaaatccatttttgttctgaatcccataaatgagaagatctgaacctgccatctgaagtagagttccctgaagaaaaacatgtatgcacacaacactctctagtgtgtcctccacaaaatatcagcacagccctgccttgtggtcagtggggatattttgattaaaggcatttcagccagcttgacctattgtacaagggaaggactcctctgtgcatctgctgcttcattagtatttgccaatcacctgctgtgcctggggactttgttctttgggtggac

SEQ ID NO: 22943 - DNA, 600 bp, Chicken  19866894235834_1
cagggaagtatcttcccttccagttatgtaattaagaacgtgaatgcagagactcgagggaaagcaggagccaaggtgagtgccctgctgtcaagggacactttgcatacacagtgcagtaaaatcagttagaggaccagtgcacaaagggtcacaaaggcaaaagcagtttgcttgcgtgacacatctgctgcggctctactcagcaactgcttttgtatctctgtccatgcttaaggcaaaggaaagaattacaagacagcattcccttttttagtatcagagaccaacgttcacatytgttactatgctccaccacctaaaagcaaagcccaaactgactttatgagcctttccagtcctatcattactccatgctgtaggaggaatgaaaagcactgaccatgtacacaaatatcttctcagcagggaaaacaaggagtatgccctgcctaagtccaaccccaagtaagcagaatctttttggcatcaaatgctatcaagtacatactgaaatctgctgttaacgatacttctgagatcagatgacgtataacgacaggcagcaagacaatatacacaatacacaaagtaaaatcc

SEQ ID NO: 22944 - DNA, 600 bp, Chicken  19866894235837_1
ggaaatctctgcagtctgggaaatggcatttaagtgtaaagggaggatatgtgttaaacagggccaaagagaacaatttcatgtgtggcattatctctagaccatggctattttgtggaaagggcaccagcactgtgcggcacttttgtccatctcttccttcctggagaacactgcttggaataacatgcacatggtgacaccagcccatggcttactgaggctccctgtgctcagtactcccagggagcaatggacactacaggggctcagaccccagctgggatcctgcgcttcccygctcccaggcctggttgcccttctgcaatggaagcagctggaaacaacaagccgtttcatttcctcctggagacagctgcattctctaactttgtacatgcctgcttcctaatgcaaagctacagagatgtataattatgcatgtagcataaggagcagacaagctgaattaagcttccgatcgcatgtctaatttatgtacaactgcagcaattacagatgcaaattaaataactgtgcagaaaatgggttttattagccagaactaaagcccggtaaaactcactacctcatgcacat

SEQ ID NO: 22945 - DNA, 600 bp, Chicken  19866894235840_1
ggaattcaatcagtgtgtccatgaatcactaaaatcaggacttaaggatgaaggctgggcttgatccctaggagcaaactagggcagaatcataggatactccaaaaaatgcatctgaactgcagaataggggcaattatagagagctcttttccagcatatctaaacattgagttatctatagacatgcacttgtgacatattcaagcttccccaaagtcaacaataaaactcttgttgtttagataattcataatttcatgataataaaaaacttgttaatcactttaattttaattwaaaaaataatttaagattctaatttagaaaattaaaaatttaaaacttaaaaatttaatctaaaagaatatatttgtaattttaacttttatatacatatatttgattattattgtaaacagagagagtcatgttggatatcaggaaaaggttcttcaccagagggtggtggaacaggtttcccatggtagtggtcacagcaycaagctgctggaattcaaggagtgtttggacaatggtctgggtaatatggtctgattttggggtggttccgtgtggagccaggaattggacttgatg

SEQ ID NO: 22946 - DNA, 600 bp, Chicken  19866894235840_2
tcaagcttccccaaagtcaacaataaaactcttgttgtttagataattcataatttcatgataataaaaaacttgttaatcactttaattttaattwaaaaaataatttaagattctaatttagaaaattaaaaatttaaaacttaaaaatttaatctaaaagaatatatttgtaattttaacttttatatacatatatttgattattattgtaaacagagagagtcatgttggatatcaggaaaaggttcttcaccagagggtggtggaacaggtttcccatggtagtggtcacagcaycaagctgctggaattcaaggagtgtttggacaatggtctgggtaatatggtctgattttggggtggttccgtgtggagccaggaattggacttgatgatctttatgggtccctcaggatattctatgattctatgattctatatatttttattaaacaacaacggcagcaacaacaaaactttatactaagaagtatagaacagagtttttctacacagagaaaaatacactttacaagattgtgataaaacattgtaaactatgaccacaatgccacataagaccagggctgtcatttg

SEQ ID NO: 22947 - DNA, 600 bp, Chicken  19866894235847_1
caggatctcatgataccattgctcatctgtaactgagaaaatcccggagtgcaaaattcatgcacattttaaattcaattcctaaaaataactcatgtgaaaagtattttatcccatacaattcaattgcttaaggcagtccaaaaatcagaaacatacaataccaagaaattgctaatatttttaataaagtgcttttatattactgatctatctgttataattgctgcattgaacacacttggaactggcctgtatccagagtaataactttcatcctcagttttaggttcttttcastattcaagaaaagctctayggaaataatacaaataggataatagtcaggatgaaacttttacatcaaactgcagcagagtttactgtgagtatccacagaatctaataggcggttgcacctctcccactgattttttttctcattctcacaggaaaaaaawatatatattttttttaagtaaacactgtmactgtactctttcatgaaactaccctcgacatcactggttttcttccacttgtctgttttctgaagtaaaatacaagatcaaaaatgctatcaaccastgcccttccctg

SEQ ID NO: 22948 - DNA, 600 bp, Chicken  19866894235847_2
tgctcatctgtaactgagaaaatcccggagtgcaaaattcatgcacattttaaattcaattcctaaaaataactcatgtgaaaagtattttatcccatacaattcaattgcttaaggcagtccaaaaatcagaaacatacaataccaagaaattgctaatatttttaataaagtgcttttatattactgatctatctgttataattgctgcattgaacacacttggaactggcctgtatccagagtaataactttcatcctcagttttaggttcttttcastattcaagaaaagctctayggaaataatacaaataggataatagtcaggatgaaacttttacatcaaactgcagcagagtttactgtgagtatccacagaatctaataggcggttgcacctctcccactgattttttttctcattctcacaggaaaaaaawatatatattttttttaagtaaacactgtmactgtactctttcatgaaactaccctcgacatcactggttttcttccacttgtctgttttctgaagtaaaatacaagatcaaaaatgctatcaaccastgcccttccctgatgctttaagtacatgctt

SEQ ID NO: 22949 - DNA, 600 bp, Chicken  19866894235847_3
taccaagaaattgctaatatttttaataaagtgcttttatattactgatctatctgttataattgctgcattgaacacacttggaactggcctgtatccagagtaataactttcatcctcagttttaggttcttttcastattcaagaaaagctctayggaaataatacaaataggataatagtcaggatgaaacttttacatcaaactgcagcagagtttactgtgagtatccacagaatctaataggcggttgcacctctcccactgattttttttctcattctcacaggaaaaaaawatatatattttttttaagtaaacactgtmactgtactctttcatgaaactaccctcgacatcactggttttcttccacttgtctgttttctgaagtaaaatacaagatcaaaaatgctatcaaccastgcccttccctgatgctttaagtacatgcttatgttttatacatcttgctgactttgcggggaaagttaggacatttttgcaagattagaatttgtttcctgcaaagctaaggaaatgatacttaatcattgaaatatagcatataaatgaatcctttctactaaattcctgc

SEQ ID NO: 22950 - DNA, 600 bp, Chicken  19866894235847_4
agtgcttttatattactgatctatctgttataattgctgcattgaacacacttggaactggcctgtatccagagtaataactttcatcctcagttttaggttcttttcastattcaagaaaagctctayggaaataatacaaataggataatagtcaggatgaaacttttacatcaaactgcagcagagtttactgtgagtatccacagaatctaataggcggttgcacctctcccactgattttttttctcattctcacaggaaaaaaawatatatattttttttaagtaaacactgtmactgtactctttcatgaaactaccctcgacatcactggttttcttccacttgtctgttttctgaagtaaaatacaagatcaaaaatgctatcaaccastgcccttccctgatgctttaagtacatgcttatgttttatacatcttgctgactttgcggggaaagttaggacatttttgcaagattagaatttgtttcctgcaaagctaaggaaatgatacttaatcattgaaatatagcatataaatgaatcctttctactaaattcctgcataaaactcaaatcctgcttccactttag

SEQ ID NO: 22951 - DNA, 600 bp, Chicken  19866894235847_5
ggttcttttcastattcaagaaaagctctayggaaataatacaaataggataatagtcaggatgaaacttttacatcaaactgcagcagagtttactgtgagtatccacagaatctaataggcggttgcacctctcccactgattttttttctcattctcacaggaaaaaaawatatatattttttttaagtaaacactgtmactgtactctttcatgaaactaccctcgacatcactggttttcttccacttgtctgttttctgaagtaaaatacaagatcaaaaatgctatcaaccastgcccttccctgatgctttaagtacatgcttatgttttatacatcttgctgactttgcggggaaagttaggacatttttgcaagattagaatttgtttcctgcaaagctaaggaaatgatacttaatcattgaaatatagcatataaatgaatcctttctactaaattcctgcataaaactcaaatcctgcttccactttagtaaataataaacactaattaacttctagcaggcaagatcagcacttaaatgttataggaggtgctacagcagagaaaagctgaaaaatgttatagact

SEQ ID NO: 22952 - DNA, 600 bp, Chicken  19866894235847_6
tactaaattcctgcataaaactcaaatcctgcttccactttagtaaataataaacactaattaacttctagcaggcaagatcagcacttaaatgttataggaggtgctacagcagagaaaagctgaaaaatgttatagactacagagtaggaaaactaggcaaagcaacagaacaaaggcaattcatattctgatctcccatctctttcaagcggacatttgtttgctttataagaacttgctgtctgtaacaaaagaccttcctactgaaaaccttaatattttgatatgttaaggaaraaaggccttgtttcataaaaaaatccagatatgtcaatcagtcttactgttcgtaagaaaacaaacgtcacttaaaaattaggtcttttaaagatcgctaagcagtacgttgtttgaatgaattagccaaatctacactacttacctactttgtgggggtctgttcttggaacaaacattccccgagctcagcgcacacagtgcttgaggaaccactcaggaacttggaactatatctgaaaatagtctgtatctgtaactgctattaaatgaaaagcagaacatcgctggttgggcagc

SEQ ID NO: 22953 - DNA, 600 bp, Chicken  19866894235848_1
acttccatatggattgcacccataaactggacatatgtcataagagaactgtccatccatctaaggggaaaagaatactttgaacttcaaaaaagataacaaaagattgaaaatatcctatgccctggacagatttactgaatggaattatattcacaacaagcatttacaaataggatatttttttttacccgtaagtcagctaactgcatgtaaagtaggcaatctcagctgaaggagaaaaaaaaaaaaggaaaaaaaagaaagacattaattaaatttttagtggctatctcaccstggctgaacatttcaacagaatctgttaaattccaaatgagcaacatgtgctttgaggtttacaaacaaagtgctggatatagaaccagtgagatgaaatgtactgtgttgattatcatatcaattgataattcataagtgctcacawttcttccagtatttgaaaacatataattaacctagaactttatgatttgaataacttggaattgacatgggaaagtgactgtacaaaatgagttcaaacaattcttaattagtttttgttggtggttattaactatgagatttgcacagata

SEQ ID NO: 22954 - DNA, 600 bp, Chicken  19866894235848_2
tatattcacaacaagcatttacaaataggatatttttttttacccgtaagtcagctaactgcatgtaaagtaggcaatctcagctgaaggagaaaaaaaaaaaaggaaaaaaaagaaagacattaattaaatttttagtggctatctcaccstggctgaacatttcaacagaatctgttaaattccaaatgagcaacatgtgctttgaggtttacaaacaaagtgctggatatagaaccagtgagatgaaatgtactgtgttgattatcatatcaattgataattcataagtgctcacawttcttccagtatttgaaaacatataattaacctagaactttatgatttgaataacttggaattgacatgggaaagtgactgtacaaaatgagttcaaacaattcttaattagtttttgttggtggttattaactatgagatttgcacagatatagtataaatttatttaaaggatgaattgattaatgtatcctgataatttttttctggaatttttccatctgatgcaaaaggcaattgaatgctttttgaataactaattttaaaaataagcatcaaacttcaccccgatatcttctg

SEQ ID NO: 22955 - DNA, 600 bp, Chicken  19866894235858_1
aacaaattcaatgagcatctattatcagcctgattacacactgcaccatacagagtcctaatgatttcactgaggctccatgcagcataaggagtctcccatgcagattagtttacaagatcagggtctccatatggaacacctcctccctccgccccttcccgttctgcagagaacagtgtaaaacaaaggtctgccttcttgcttatatgcaaggttttagtggtctgtagtcacgtgcgatgatttaaacagtgataactaagcaaaaatatctcagtgctatttcaaacctgtcgktttttcttagctgggtcactcactgtagcctcctctgtccagtcacctctccagtagtcattttgatgcwctctgccacagtgctcrgtatagatgcttaaactcatattgctccgttcccaggaatagcttcacggagtgaaagctctgagtgtgtaatayggcgtgaaaaaaaatcaaatgtcagaaacttcatattgatactttgatcagaagcaacatgagcctgaaagtttttgaacaacaaaccatttgagagtgtgtaacatgcttgtgaaaatattcatagcataattagat

SEQ ID NO: 22956 - DNA, 600 bp, Chicken  19866894235858_2
tgaggctccatgcagcataaggagtctcccatgcagattagtttacaagatcagggtctccatatggaacacctcctccctccgccccttcccgttctgcagagaacagtgtaaaacaaaggtctgccttcttgcttatatgcaaggttttagtggtctgtagtcacgtgcgatgatttaaacagtgataactaagcaaaaatatctcagtgctatttcaaacctgtcgktttttcttagctgggtcactcactgtagcctcctctgtccagtcacctctccagtagtcattttgatgcwctctgccacagtgctcrgtatagatgcttaaactcatattgctccgttcccaggaatagcttcacggagtgaaagctctgagtgtgtaatayggcgtgaaaaaaaatcaaatgtcagaaacttcatattgatactttgatcagaagcaacatgagcctgaaagtttttgaacaacaaaccatttgagagtgtgtaacatgcttgtgaaaatattcatagcataattagataaataacagatccagtgtctatttttactttcccttgatgagaagctttgcaggagagactgctggtagt

SEQ ID NO: 22957 - DNA, 600 bp, Chicken  19866894235858_3
taaggagtctcccatgcagattagtttacaagatcagggtctccatatggaacacctcctccctccgccccttcccgttctgcagagaacagtgtaaaacaaaggtctgccttcttgcttatatgcaaggttttagtggtctgtagtcacgtgcgatgatttaaacagtgataactaagcaaaaatatctcagtgctatttcaaacctgtcgktttttcttagctgggtcactcactgtagcctcctctgtccagtcacctctccagtagtcattttgatgcwctctgccacagtgctcrgtatagatgcttaaactcatattgctccgttcccaggaatagcttcacggagtgaaagctctgagtgtgtaatayggcgtgaaaaaaaatcaaatgtcagaaacttcatattgatactttgatcagaagcaacatgagcctgaaagtttttgaacaacaaaccatttgagagtgtgtaacatgcttgtgaaaatattcatagcataattagataaataacagatccagtgtctatttttactttcccttgatgagaagctttgcaggagagactgctggtagttaattctccctaacaac

SEQ ID NO: 22958 - DNA, 600 bp, Chicken  19866894235858_4
cgttctgcagagaacagtgtaaaacaaaggtctgccttcttgcttatatgcaaggttttagtggtctgtagtcacgtgcgatgatttaaacagtgataactaagcaaaaatatctcagtgctatttcaaacctgtcgktttttcttagctgggtcactcactgtagcctcctctgtccagtcacctctccagtagtcattttgatgcwctctgccacagtgctcrgtatagatgcttaaactcatattgctccgttcccaggaatagcttcacggagtgaaagctctgagtgtgtaatayggcgtgaaaaaaaatcaaatgtcagaaacttcatattgatactttgatcagaagcaacatgagcctgaaagtttttgaacaacaaaccatttgagagtgtgtaacatgcttgtgaaaatattcatagcataattagataaataacagatccagtgtctatttttactttcccttgatgagaagctttgcaggagagactgctggtagttaattctccctaacaacaatctgtgtaatcacaaaccccaattagctgtgcctgttctatgctatacaaactatttccttagcgcttcacat

SEQ ID NO: 22959 - DNA, 599 bp, Chicken  19866894235862_1
  misc_feature (1)..(28): n is any nucleotide
nnnnnnnnnnnnnnnnnnnnnnnnnnnncaggacctcctctggtccttctccagagcagctcagccccaacccacattgatgtgtggggctgcaaggagcaacaccctacactcggccttgtagaaccccattaggtccttccctctccaccccatgaggtcccaccccaccccatagggtccccctcagccgacccttttgcccagacccacactgaggaccaccatgatggacccacctcccccaactcgcggatctttttcaggtaacgcttctggaagacggtggggtcggacacrgggaggtcagggttgacggaggagacgtccacgaggcctggaagggacagaggttatggggggaggtgggatttgagcactctgtgccccccaccaacgccatacagacaccatttttgctccagtttcacaccccgggtcccggaattaaggagcaacgggaatggtgctggaccaccaccaccccatgggagaagcttctatggggcagagggggtgtggggcagggcctcactgtggggctgcagctgggtcaggtcccgcaggatggtacggaaggacggccgctcggcaggcgt

SEQ ID NO: 22960 - DNA, 600 bp, Chicken  19866894235865_1
tattttaaaaatgagggcttcatctctttctctgaaaatgatgcttgaaatccgtaggagagtgaaacaagcaatttcagtcactaaagataaggtctgtgttttttaaataaaagagagtgaaagagctgttgttctaatttagcaaaattgtgtcagctcagttttctatttatttatggtaaaattctgtttccagattttgaatgcacatatttaacaagatatggtcagtcagtatggtggtgattagtccaaaatttgatcaggttgtcacttgacgctcactgggcactttcrtaaaggccttcattgagagatcatgaycagtacaaaggcatttaatgaatattccataattgggaaaaagcctcttaagrtctagaatttcagaaatactgaagtttaaacatataaaaatatctttgggccaactgttactgtcacgttcaggtgcagacaattttatagctttttcttgagattgctaccccctaatgaatttgttgacattcctagtgaaatttgtaagtatattctatwcatttcatatttaaaagtatattttctacttagataaatattaatgtaagccacaca

SEQ ID NO: 22961 - DNA, 600 bp, Chicken  19866894235865_2
ttctctgaaaatgatgcttgaaatccgtaggagagtgaaacaagcaatttcagtcactaaagataaggtctgtgttttttaaataaaagagagtgaaagagctgttgttctaatttagcaaaattgtgtcagctcagttttctatttatttatggtaaaattctgtttccagattttgaatgcacatatttaacaagatatggtcagtcagtatggtggtgattagtccaaaatttgatcaggttgtcacttgacgctcactgggcactttcrtaaaggccttcattgagagatcatgaycagtacaaaggcatttaatgaatattccataattgggaaaaagcctcttaagrtctagaatttcagaaatactgaagtttaaacatataaaaatatctttgggccaactgttactgtcacgttcaggtgcagacaattttatagctttttcttgagattgctaccccctaatgaatttgttgacattcctagtgaaatttgtaagtatattctatwcatttcatatttaaaagtatattttctacttagataaatattaatgtaagccacacacatatttaaaacaatttggaatgatca

SEQ ID NO: 22962 - DNA, 600 bp, Chicken  19866894235865_3
tcactaaagataaggtctgtgttttttaaataaaagagagtgaaagagctgttgttctaatttagcaaaattgtgtcagctcagttttctatttatttatggtaaaattctgtttccagattttgaatgcacatatttaacaagatatggtcagtcagtatggtggtgattagtccaaaatttgatcaggttgtcacttgacgctcactgggcactttcrtaaaggccttcattgagagatcatgaycagtacaaaggcatttaatgaatattccataattgggaaaaagcctcttaagrtctagaatttcagaaatactgaagtttaaacatataaaaatatctttgggccaactgttactgtcacgttcaggtgcagacaattttatagctttttcttgagattgctaccccctaatgaatttgttgacattcctagtgaaatttgtaagtatattctatwcatttcatatttaaaagtatattttctacttagataaatattaatgtaagccacacacatatttaaaacaatttggaatgatcatatactcatgtagataatgtagatataccttaagaawgttttatttttgtatg

SEQ ID NO: 22963 - DNA, 600 bp, Chicken  19866894235865_4
tggtgattagtccaaaatttgatcaggttgtcacttgacgctcactgggcactttcrtaaaggccttcattgagagatcatgaycagtacaaaggcatttaatgaatattccataattgggaaaaagcctcttaagrtctagaatttcagaaatactgaagtttaaacatataaaaatatctttgggccaactgttactgtcacgttcaggtgcagacaattttatagctttttcttgagattgctaccccctaatgaatttgttgacattcctagtgaaatttgtaagtatattctatwcatttcatatttaaaagtatattttctacttagataaatattaatgtaagccacacacatatttaaaacaatttggaatgatcatatactcatgtagataatgtagatataccttaagaawgttttatttttgtatgaaattcctgaattttgattcactactgtagaagacttcatgaaamtcacaagagccgagtgttcttggacatttgtgctctaccactctcaatgttcttttcttctttgacttaacaatttctgtgcaagatcactgttcaaatatatcctagaggcaagcac

SEQ ID NO: 22964 - DNA, 483 bp, Chicken  19866894235865_5
aaaaagcctcttaagrtctagaatttcagaaatactgaagtttaaacatataaaaatatctttgggccaactgttactgtcacgttcaggtgcagacaattttatagctttttcttgagattgctaccccctaatgaatttgttgacattcctagtgaaatttgtaagtatattctatwcatttcatatttaaaagtatattttctacttagataaatattaatgtaagccacacacatatttaaaacaatttggaatgatcatatactcatgtagataatgtagatataccttaagaawgttttatttttgtatgaaattcctgaattttgattcactactgtagaagacttcatgaaamtcacaagagccgagtgttcttggacatttgtgctctaccactctcaatgttcttttcttctttgacttaacaatttctgtgcaagatcactgttcaaatatatcctagaggcaagcacagct

SEQ ID NO: 22965 - DNA, 422 bp, Chicken  19866894235865_6
ttgggccaactgttactgtcacgttcaggtgcagacaattttatagctttttcttgagattgctaccccctaatgaatttgttgacattcctagtgaaatttgtaagtatattctatwcatttcatatttaaaagtatattttctacttagataaatattaatgtaagccacacacatatttaaaacaatttggaatgatcatatactcatgtagataatgtagatataccttaagaawgttttatttttgtatgaaattcctgaattttgattcactactgtagaagacttcatgaaamtcacaagagccgagtgttcttggacatttgtgctctaccactctcaatgttcttttcttctttgacttaacaatttctgtgcaagatcactgttcaaatatatcctagaggcaagcacagct

SEQ ID NO: 22966 - DNA, 600 bp, Chicken  19866894235868_1
ttaagtgaagaaacccagactctcataaaatctagtgaaatgcgttttaaaacacagaaatttgtaaacgtgcaatgtaatgataataggagtttttttaaataggtttgcagctgtgggacatggtccactatgtcctgcagttaagtttaaatgattgccccagcaaaatccctttgtaataacggttgaataaatatttgataattaaatctatgtaaagatctgaaaaaatactgaattttggtaattctgttttactgccacaagctttaattttaaaaatggtatattctctcrtattgatttttccttttccctacttctagctgctatttcctgttgctacaataaaacactgttttatttacctctatttacaaaaataagtccctcatcgggttgaatcactgtctatttgacgatgtccatggcataccaacaggcatatcytcttggccatgtttgtatcagttgagcatgttcaatatagttaatacggtttccaatgctccagctacccaccctccaaaaaacaaaaacaaaaacaaaaaaaaacctcaaaacaacaagtctagaaaggctgcaattccaataata

SEQ ID NO: 22967 - DNA, 572 bp, Chicken  19866894235868_2
atgattgccccagcaaaatccctttgtaataacggttgaataaatatttgataattaaatctatgtaaagatctgaaaaaatactgaattttggtaattctgttttactgccacaagctttaattttaaaaatggtatattctctcrtattgatttttccttttccctacttctagctgctatttcctgttgctacaataaaacactgttttatttacctctatttacaaaaataagtccctcatcgggttgaatcactgtctatttgacgatgtccatggcataccaacaggcatatcytcttggccatgtttgtatcagttgagcatgttcaatatagttaatacggtttccaatgctccagctacccaccctccaaaaaacaaaaacaaaaacaaaaaaaaacctcaaaacaacaagtctagaaaggctgcaattccaataataaattcatgttattggttttatttctattagactgacaagtgaaactttcccacacactgaatgctaaaataatttccattattgtaaaaaatattgtccgaagtatactgcaactaaggaaaata

SEQ ID NO: 22968 - DNA, 600 bp, Chicken  19866894235870_1
gcaagcacattgcaaacaaatgacaaagcacttggggaggaaggcttggccacagcgagcctgccaacgagccggttcctacttgctgccgaggcacaataaaacagtctgcccgagcacgaggaggctttaagagcctaagaacaaggctgttcaaaaaggctttgaggcaaacaggaatgagcagaatcttctttccctccttcactttctctcgagaacttcctgggaaaaaaaaaagtttctgcaaccaggaagggcgggcagcgagcagaagctgagccccatttccctcggggyttttgaagggtctgggtgtgcttgttcataaagcaaggatttgaagaccggaatgggctcagtgaggttgagtgttcttgtttctttggttcttactgtgctggtatgcctgcggagctgcgtgcccatggtgtgcagtgagtgctgcygagcgcgctctgccacccgcactgtgcactgagcagtcagttccctcaccgtcctcatggaacgtgtttaaaatggatgtatgagggctgttctggatgagcaagttccaagttcacaccaaaaccaacrtgctgctgtgtgcgctccttg

SEQ ID NO: 22969 - DNA, 600 bp, Chicken  19866894235870_2
ctgttcaaaaaggctttgaggcaaacaggaatgagcagaatcttctttccctccttcactttctctcgagaacttcctgggaaaaaaaaaagtttctgcaaccaggaagggcgggcagcgagcagaagctgagccccatttccctcggggyttttgaagggtctgggtgtgcttgttcataaagcaaggatttgaagaccggaatgggctcagtgaggttgagtgttcttgtttctttggttcttactgtgctggtatgcctgcggagctgcgtgcccatggtgtgcagtgagtgctgcygagcgcgctctgccacccgcactgtgcactgagcagtcagttccctcaccgtcctcatggaacgtgtttaaaatggatgtatgagggctgttctggatgagcaagttccaagttcacaccaaaaccaacrtgctgctgtgtgcgctccttggcagggcagagctgctgtagcggtgggctggacctgctgatccccagaggactcttccagcccctacagttctgtggttcattacatggggaaatatggaagggaaaaarcaatagaaattcagatgcaaaccagttaccgatttatat

SEQ ID NO: 22970 - DNA, 600 bp, Chicken  19866894235870_3
gagccccatttccctcggggyttttgaagggtctgggtgtgcttgttcataaagcaaggatttgaagaccggaatgggctcagtgaggttgagtgttcttgtttctttggttcttactgtgctggtatgcctgcggagctgcgtgcccatggtgtgcagtgagtgctgcygagcgcgctctgccacccgcactgtgcactgagcagtcagttccctcaccgtcctcatggaacgtgtttaaaatggatgtatgagggctgttctggatgagcaagttccaagttcacaccaaaaccaacrtgctgctgtgtgcgctccttggcagggcagagctgctgtagcggtgggctggacctgctgatccccagaggactcttccagcccctacagttctgtggttcattacatggggaaatatggaagggaaaaarcaatagaaattcagatgcaaaccagttaccgatttatatttagtcaactccakctattcatggtgcttactaccttactgttgtttggagaaggaagtagcgatatcctgttgtaatgctggatgtgaaccatgactgcggctgttggaagcactgagctatcaacagg

SEQ ID NO: 22971 - DNA, 600 bp, Chicken  19866894235870_4
tgcggagctgcgtgcccatggtgtgcagtgagtgctgcygagcgcgctctgccacccgcactgtgcactgagcagtcagttccctcaccgtcctcatggaacgtgtttaaaatggatgtatgagggctgttctggatgagcaagttccaagttcacaccaaaaccaacrtgctgctgtgtgcgctccttggcagggcagagctgctgtagcggtgggctggacctgctgatccccagaggactcttccagcccctacagttctgtggttcattacatggggaaatatggaagggaaaaarcaatagaaattcagatgcaaaccagttaccgatttatatttagtcaactccakctattcatggtgcttactaccttactgttgtttggagaaggaagtagcgatatcctgttgtaatgctggatgtgaaccatgactgcggctgttggaagcactgagctatcaacaggttgagttcattcttggcctcacagccagaacatttgcaaactgacaaggccaaaccaaatggtaaatttcctcagcctttttttgtcagcgggattttttggcagggggttggttcttcatgaagcagtct

SEQ ID NO: 22972 - DNA, 600 bp, Chicken  19866894235870_5
acccgcactgtgcactgagcagtcagttccctcaccgtcctcatggaacgtgtttaaaatggatgtatgagggctgttctggatgagcaagttccaagttcacaccaaaaccaacrtgctgctgtgtgcgctccttggcagggcagagctgctgtagcggtgggctggacctgctgatccccagaggactcttccagcccctacagttctgtggttcattacatggggaaatatggaagggaaaaarcaatagaaattcagatgcaaaccagttaccgatttatatttagtcaactccakctattcatggtgcttactaccttactgttgtttggagaaggaagtagcgatatcctgttgtaatgctggatgtgaaccatgactgcggctgttggaagcactgagctatcaacaggttgagttcattcttggcctcacagccagaacatttgcaaactgacaaggccaaaccaaatggtaaatttcctcagcctttttttgtcagcgggattttttggcagggggttggttcttcatgaagcagtcttttttaccagtgcctcttcgttaaagggaaactgctgcttttttactaccagg

SEQ ID NO: 22973 - DNA, 600 bp, Chicken  19866894235873_1
tccatagaaaaattcttcttcctgtctttctggtcttcccacttcccacataatgactaaaatgaatgttcttttcatgtatgttcttgttgattttccgaaatggtggtctagttaaaaactgaatcagagaaaaattccgagtgaagtacaggatacgcagtaataatctgcagggcctgacaaaccagcaaatcacagctaacagaacccaaatctctttccagtttataatgagatgtgacttgaagcaattacactgatgattactgtaactgccaatatggggtaggtgggagrcctctcaaaatgatcattttccatccttttctgaggcaaatctagttcagctgaattgagttcagaagtgttacagctgtggcacctggcactctgggggattggctgtatttcccacatcaggatttcacatttttagcacccacttgttttccaatctcaatttgcaaatagttcattcatcatttggagctatcattataaagcagtgctcccatctgttggtcacggtttgtttaataagcagttgatatcagtccaaccacgcttgcatctgctacttagagcagctgtgtgttg

SEQ ID NO: 22974 - DNA, 599 bp, Chicken  19866894235874_1
  misc_feature (1)..(58): n is any nucleotide
nnnnnnnnnnnnnnnnnnnnnnnnnnnnnnnnnnnnnnnnnnnnnnnnnnnnnnnnnngccatcgggacaactcccacctgttacagctggctacagagagcactgttaaaactgactgatggtctccagccttccttctgcacgtggctcacacacatacagattttcaaccattcccaaagggagattttccctttccccttatgtaactccactacacactgcagtgctcgtggtaaggacctctggcccgcttgcccttacccaaacctcttgaggttttctccactactacaaaraagtacgtaactgtacccagaacagactgagaaagcagctagaaaggatccaaaaagaaacatgatacatgtaaatagtgttgaatagaaaggaagaaacagatttgtctgttccgctgctctttgaagcctccagcccatcactgctgggagtatttctgctcaaataggattgtttgcttatcttaatcccaaaaagagacagaagagytcttagctttctttctgcgaataaaggtagtctactggatgcatttcccagaaggatctctcaacctgtcagaggccacagcatcatt

SEQ ID NO: 22975 - DNA, 600 bp, Chicken  19866894235874_2
tccactacacactgcagtgctcgtggtaaggacctctggcccgcttgcccttacccaaacctcttgaggttttctccactactacaaaraagtacgtaactgtacccagaacagactgagaaagcagctagaaaggatccaaaaagaaacatgatacatgtaaatagtgttgaatagaaaggaagaaacagatttgtctgttccgctgctctttgaagcctccagcccatcactgctgggagtatttctgctcaaataggattgtttgcttatcttaatcccaaaaagagacagaagagytcttagctttctttctgcgaataaaggtagtctactggatgcatttcccagaaggatctctcaacctgtcagaggccacagcatcattttactccacactacagygagcctttccccattgcctaaggtactcggggttcacactcttctcagttcacctactacacgctcaccccctcccaacagttactcccccttcatttgcttcattcatacctccttcgtaatacagattcagacttggtctttctgccaaagtagtgctatctttgtattccatttgacaaagtccatccctct

SEQ ID NO: 22976 - DNA, 600 bp, Chicken  19866894235874_3
ccagaacagactgagaaagcagctagaaaggatccaaaaagaaacatgatacatgtaaatagtgttgaatagaaaggaagaaacagatttgtctgttccgctgctctttgaagcctccagcccatcactgctgggagtatttctgctcaaataggattgtttgcttatcttaatcccaaaaagagacagaagagytcttagctttctttctgcgaataaaggtagtctactggatgcatttcccagaaggatctctcaacctgtcagaggccacagcatcattttactccacactacagygagcctttccccattgcctaaggtactcggggttcacactcttctcagttcacctactacacgctcaccccctcccaacagttactcccccttcatttgcttcattcatacctccttcgtaatacagattcagacttggtctttctgccaaagtagtgctatctttgtattccatttgacaaagtccatccctcttcgttctgtcaagcatgcaagatttacaaacaggtgcaaagctaccatctcctgccatatatctgcaagacaagtttgttttaccagttcttcttctcagtctcc

SEQ ID NO: 22977 - DNA, 599 bp, Chicken  19866894235877_1
  misc_feature (1)..(119): n is any nucleotide
nnnnnnnnnnnnnnnnnnnnnnnnnnnnnnnnnnnnnnnnnnnnnnnnnnnnnnnnnnnnnnnnnnnnnnnnnnnnnnnnnnnnnnnnnnnnnnnnnnnnnnnnnnnnnnnnnnnnnnnctaatatctctttccttcgatgtcgttatttttccttccagtcttgcacttctaactaacaatcctgagcacgtccttaacttctcagtcattatctctgcatttcattccatgtgccacaacgcacaagtgctgtaacactttctctctttctaagttagcgttttttactaacagcacrtagagcttcatttctgctttttttaataacccacacatttctcttgtccaaggactgggctctactctgttaccactcacccaacttgtatagcattttatctggcacttccctgaattgcgtgtcctgcacaggaaacttgttcccattgtcaagcagcaccctcatctgaagctttcatgatttctgccagtcttttctgaaattatgttaaattgagtatataatttttctctgactgctttacaggagctactggtaacacaggttcctcctttgccttcctttccccccytttt

SEQ ID NO: 22978 - DNA, 600 bp, Chicken  19866894235877_2
gcacrtagagcttcatttctgctttttttaataacccacacatttctcttgtccaaggactgggctctactctgttaccactcacccaacttgtatagcattttatctggcacttccctgaattgcgtgtcctgcacaggaaacttgttcccattgtcaagcagcaccctcatctgaagctttcatgatttctgccagtcttttctgaaattatgttaaattgagtatataatttttctctgactgctttacaggagctactggtaacacaggttcctcctttgccttcctttccccccytttttccctttccaaacccattcttttcaattattcgctcgtaatagttttttttagcacagtgtgcagatttacaaattcactgcttttgctataggacaccttcccagctaacacactgcaarataagtttaccaatattaccactgcagaagttgtgtaagtgatctatcaggtgtaaacccaagagcttccttcactgcccagcattttggaggggtaggtacccagtctgaacaagggcgcattgaagccccctaaagacagctagtcccagaactgcaaaagcaaaccagcact

SEQ ID NO: 22979 - DNA, 600 bp, Chicken  19866894235877_3
cgtgtcctgcacaggaaacttgttcccattgtcaagcagcaccctcatctgaagctttcatgatttctgccagtcttttctgaaattatgttaaattgagtatataatttttctctgactgctttacaggagctactggtaacacaggttcctcctttgccttcctttccccccytttttccctttccaaacccattcttttcaattattcgctcgtaatagttttttttagcacagtgtgcagatttacaaattcactgcttttgctataggacaccttcccagctaacacactgcaarataagtttaccaatattaccactgcagaagttgtgtaagtgatctatcaggtgtaaacccaagagcttccttcactgcccagcattttggaggggtaggtacccagtctgaacaagggcgcattgaagccccctaaagacagctagtcccagaactgcaaaagcaaaccagcactcatccaaggcgagccagctctgcatgcagagctgagcacagcacacaggaggaaaacagccttgtgtatatccaaaatcagagggggaacggtgttaatgcctaactcagcatgggctttgtgtt

SEQ ID NO: 22980 - DNA, 599 bp, Chicken  19866894235878_1
  misc_feature (1)..(122): n is any nucleotide
nnnnnnnnnnnnnnnnnnnnnnnnnnnnnnnnnnnnnnnnnnnnnnnnnnnnnnnnnnnnnnnnnnnnnnnnnnnnnnnnnnnnnnnnnnnnnnnnnnnnnnnnnnnnnnnnnnnnnnnnnnatcagggagcatgttaaggcttatgctatgtcccttctatcctaccagtatacatccttttcatccttcctctgacaatagcaccacactgtaaagcccacttagtgctccttttctgcatctgcaaagggatgtcagggtggaaagcacggaaaggtcttcctcaccaagcagcacrtcaggaccacagggaaggacagatgcaacaaggagaccgctttgttgctcacacagcactcagaacagctccaggagttgagcaaccccaacaaaaagatgagcgttctcaaagtcccatcagaacactggtggttccccatcaccagcaccctgaagcacttycaccacctactgcatcacttgtatccaaagtctgagctgygtttggcttcccagaagaaattcttgctgcaggtgtaagctgccggtaggcctttccaccaagctgtgcaatacatctcccagatagacagggaa

SEQ ID NO: 22981 - DNA, 600 bp, Chicken  19866894235878_2
taccagtatacatccttttcatccttcctctgacaatagcaccacactgtaaagcccacttagtgctccttttctgcatctgcaaagggatgtcagggtggaaagcacggaaaggtcttcctcaccaagcagcacrtcaggaccacagggaaggacagatgcaacaaggagaccgctttgttgctcacacagcactcagaacagctccaggagttgagcaaccccaacaaaaagatgagcgttctcaaagtcccatcagaacactggtggttccccatcaccagcaccctgaagcacttycaccacctactgcatcacttgtatccaaagtctgagctgygtttggcttcccagaagaaattcttgctgcaggtgtaagctgccggtaggcctttccaccaagctgtgcaatacatctcccagatagacagggaacaaggggagggagttccatcaccrcagcacacttcacagtaagcactacaatttatagcacataaatactgtatatatacactrcagagtttcggagacaacattatcatctcaaagggtaagtaggaggcgggagtaacagcttgtaacaactgtagcatagac

SEQ ID NO: 22982 - DNA, 600 bp, Chicken  19866894235878_3
accacactgtaaagcccacttagtgctccttttctgcatctgcaaagggatgtcagggtggaaagcacggaaaggtcttcctcaccaagcagcacrtcaggaccacagggaaggacagatgcaacaaggagaccgctttgttgctcacacagcactcagaacagctccaggagttgagcaaccccaacaaaaagatgagcgttctcaaagtcccatcagaacactggtggttccccatcaccagcaccctgaagcacttycaccacctactgcatcacttgtatccaaagtctgagctgygtttggcttcccagaagaaattcttgctgcaggtgtaagctgccggtaggcctttccaccaagctgtgcaatacatctcccagatagacagggaacaaggggagggagttccatcaccrcagcacacttcacagtaagcactacaatttatagcacataaatactgtatatatacactrcagagtttcggagacaacattatcatctcaaagggtaagtaggaggcgggagtaacagcttgtaacaactgtagcatagacagctgctttctttgctgtatctaatgctgcttagggaggt

SEQ ID NO: 22983 - DNA, 600 bp, Chicken  19866894235878_4
tgcaacaaggagaccgctttgttgctcacacagcactcagaacagctccaggagttgagcaaccccaacaaaaagatgagcgttctcaaagtcccatcagaacactggtggttccccatcaccagcaccctgaagcacttycaccacctactgcatcacttgtatccaaagtctgagctgygtttggcttcccagaagaaattcttgctgcaggtgtaagctgccggtaggcctttccaccaagctgtgcaatacatctcccagatagacagggaacaaggggagggagttccatcaccrcagcacacttcacagtaagcactacaatttatagcacataaatactgtatatatacactrcagagtttcggagacaacattatcatctcaaagggtaagtaggaggcgggagtaacagcttgtaacaactgtagcatagacagctgctttctttgctgtatctaatgctgcttagggaggtaaaatagctgtaccagcagtgcctctgttagcatacccgcagctctgtgtgaggcttctgctgaataattacgttaaaaaaaatgcaaccatgtaaacaatcttgcagaggcttctggg

SEQ ID NO: 22984 - DNA, 594 bp, Chicken  19866894235878_5
aaccccaacaaaaagatgagcgttctcaaagtcccatcagaacactggtggttccccatcaccagcaccctgaagcacttycaccacctactgcatcacttgtatccaaagtctgagctgygtttggcttcccagaagaaattcttgctgcaggtgtaagctgccggtaggcctttccaccaagctgtgcaatacatctcccagatagacagggaacaaggggagggagttccatcaccrcagcacacttcacagtaagcactacaatttatagcacataaatactgtatatatacactrcagagtttcggagacaacattatcatctcaaagggtaagtaggaggcgggagtaacagcttgtaacaactgtagcatagacagctgctttctttgctgtatctaatgctgcttagggaggtaaaatagctgtaccagcagtgcctctgttagcatacccgcagctctgtgtgaggcttctgctgaataattacgttaaaaaaaatgcaaccatgtaaacaatcttgcagaggcttctggggagaaattgcagacaaaaatcattcatgactctgggtgcatccattccccggaa

SEQ ID NO: 22985 - DNA, 561 bp, Chicken  19866894235878_6
ccatcagaacactggtggttccccatcaccagcaccctgaagcacttycaccacctactgcatcacttgtatccaaagtctgagctgygtttggcttcccagaagaaattcttgctgcaggtgtaagctgccggtaggcctttccaccaagctgtgcaatacatctcccagatagacagggaacaaggggagggagttccatcaccrcagcacacttcacagtaagcactacaatttatagcacataaatactgtatatatacactrcagagtttcggagacaacattatcatctcaaarggtaagtaggaggcgggagtaacagcttgtaacaactgtagcatagacagctgctttctttgctgtatctaatgctgcttagggaggtaaaatagctgtaccagcagtgcctctgttagcatacccgcagctctgtgtgaggcttctgctgaataattacgttaaaaaaaatgcaaccatgtaaacaatcttgcagaggcttctggggagaaattgcagacaaaaatcattcatgactctgggtgcatccattccccggaa

SEQ ID NO: 22986 - DNA, 600 bp, Chicken  19866894235881_1
cttctgttctgactccttaattatttctactgattcacacctcatctgctgagatgaccagaatacgtggccacttaagggtaaattgacaagatatccagtggattctagacttttatgtatgaaaagaccagggacaggagaaaacgaccatgtatgattaggctgccagagtgtcttggcataaacctattaaaaaaaccagcaagatggttttctatatagttctgatattaatagtaatctgtaaaaattgatggacaggaaagaactgtaaactggacaaccatttagaacaakttaataacatggccaatgaattgtgctactgtacgattaacatctgcattttagtaagttttaattaaaaatggaggatcctgtgtttgtactctgggagtttcgaaggccttctgtcccaggctgcagttctaataggcctgaatagtttaatttgaagttgacacctgggcttttgaaagtttattctaacaaatcaagcttctcactatgcattgctagaaaaagataaggtgacaacttcacttaaacactggttatgtattattattaattttcctgttgaggaaaaaaaaatgc

SEQ ID NO: 22987 - DNA, 600 bp, Chicken  19866894235881_2
catctgcattttagtaagttttaattaaaaatggaggatcctgtgtttgtactctgggagtttcgaaggccttctgtcccaggctgcagttctaataggcctgaatagtttaatttgaagttgacacctgggcttttgaaagtttattctaacaaatcaagcttctcactatgcattgctagaaaaagataaggtgacaacttcacttaaacactggttatgtattattattaattttcctgttgaggaaaaaaaaatgcgtgaatggcttaagctgtcaacaacaaactgttaagctgycagactctgccggagtatagtgtcatcttttactactgaaggctgtactttcccacattactcctctttttatagttttcctttctttcttctgcattttctgtgcatgcctcatttggttcggattgatgatcttcacctttcctcagacagatctcttctttgcccttgtagcctcttttcttctctccattgtcaacctacctaaggrtagctgatctagtgttttgtcgttcatgcaattttattctggttctggaataaacttcagtgatcctattctgtgtctaactttgtctg

SEQ ID NO: 22988 - DNA, 600 bp, Chicken  19866894235881_3
cactggttatgtattattattaattttcctgttgaggaaaaaaaaatgcgtgaatggcttaagctgtcaacaacaaactgttaagctgycagactctgccggagtatagtgtcatcttttactactgaaggctgtactttcccacattactcctctttttatagttttcctttctttcttctgcattttctgtgcatgcctcatttggttcggattgatgatcttcacctttcctcagacagatctcttctttgcccttgtagcctcttttcttctctccattgtcaacctacctaaggrtagctgatctagtgttttgtcgttcatgcaattttattctggttctggaataaacttcagtgatcctattctgtgtctaactttgtctgaaatattttatcatagtatttagtacgggaaggtgtgaatactgcttttattttcatctgtggtaacacgtgaaactttagatgtttcaccatagtgcaactttgctgatgtcatagtgccttctaatttacagttgtgtaaaaagaactgacatatggaactaaaacaaggaaaatagttgaaatatctgttaggagacatgggcagaga

SEQ ID NO: 22989 - DNA, 600 bp, Chicken  19866894235888_1
actcaaatgatacagagggagaggcaaagcagttcttttcaggaagcatactgctcctgtcaaatgcaggtctggtacggtgcaaagaaaagggaagaaaaatccatcacacagatcttccaaacactgtatttaacacttcatgcaaaatcaaaacaggcaccgcctatgctacgctccctgcctactaaccagccccagatgaatgtatcccctgctgctattcaaagacacgtcaagattctcttatcataaaagacaatgcagtagaactcgactagattttcattctctatttgsaattctttatcctgtctcctaggtaaaatattttgcctagcctgcagttaagaggatgcttaycccgctacatacatatgaaacattttatggaaaaatcaatgccagggttacatggctggaaatttacacagcacagagataatgscaggcaatctataaccatcaaggcaaagactcaacaaacagattctgcagcagaccaactcactgcattaaataactacgtactgtgtagtaactggctgaagtgacctgacagtcctactctgaaacagagaagaggtggagccagtggct

SEQ ID NO: 22990 - DNA, 600 bp, Chicken  19866894235888_2
atgcaggtctggtacggtgcaaagaaaagggaagaaaaatccatcacacagatcttccaaacactgtatttaacacttcatgcaaaatcaaaacaggcaccgcctatgctacgctccctgcctactaaccagccccagatgaatgtatcccctgctgctattcaaagacacgtcaagattctcttatcataaaagacaatgcagtagaactcgactagattttcattctctatttgsaattctttatcctgtctcctaggtaaaatattttgcctagcctgcagttaagaggatgcttaycccgctacatacatatgaaacattttatggaaaaatcaatgccagggttacatggctggaaatttacacagcacagagataatgscaggcaatctataaccatcaaggcaaagactcaacaaacagattctgcagcagaccaactcactgcattaaataactacgtactgtgtagtaactggctgaagtgacctgacagtcctactctgaaacagagaagaggtggagccagtggctcagttttgatctggaacaagcctagtgctaaacagtatmtcagaaaaggatttgctcctgggg

SEQ ID NO: 22991 - DNA, 600 bp, Chicken  19866894235888_3
aatcaaaacaggcaccgcctatgctacgctccctgcctactaaccagccccagatgaatgtatcccctgctgctattcaaagacacgtcaagattctcttatcataaaagacaatgcagtagaactcgactagattttcattctctatttgsaattctttatcctgtctcctaggtaaaatattttgcctagcctgcagttaagaggatgcttaycccgctacatacatatgaaacattttatggaaaaatcaatgccagggttacatggctggaaatttacacagcacagagataatgscaggcaatctataaccatcaaggcaaagactcaacaaacagattctgcagcagaccaactcactgcattaaataactacgtactgtgtagtaactggctgaagtgacctgacagtcctactctgaaacagagaagaggtggagccagtggctcagttttgatctggaacaagcctagtgctaaacagtatmtcagaaaaggatttgctcctggggctgctgacagagcacacagctgtgacaatttgtcagtacttgggctgtaagtctacaggcagcaaacagacacacctgtgctgay

SEQ ID NO: 22992 - DNA, 600 bp, Chicken  19866894235888_4
gcctgcagttaagaggatgcttaycccgctacatacatatgaaacattttatggaaaaatcaatgccagggttacatggctggaaatttacacagcacagagataatgscaggcaatctataaccatcaaggcaaagactcaacaaacagattctgcagcagaccaactcactgcattaaataactacgtactgtgtagtaactggctgaagtgacctgacagtcctactctgaaacagagaagaggtggagccagtggctcagttttgatctggaacaagcctagtgctaaacagtatmtcagaaaaggatttgctcctggggctgctgacagagcacacagctgtgacaatttgtcagtacttgggctgtaagtctacaggcagcaaacagacacacctgtgctgaygagctcyaacaggtctgtgtgtcctggacacacaaggcacacactcactgatgtttccaagcgcccacaaagttgccagataaggctacctgtccagtggaactcttctgacaagcatgacccatccatttgcagaccccactgcttccctccaagctcctatgtctaaatatttataggagtgtttactg

SEQ ID NO: 22993 - DNA, 600 bp, Chicken  19866894235888_5
caggcaatctataaccatcaaggcaaagactcaacaaacagattctgcagcagaccaactcactgcattaaataactacgtactgtgtagtaactggctgaagtgacctgacagtcctactctgaaacagagaagaggtggagccagtggctcagttttgatctggaacaagcctagtgctaaacagtatmtcagaaaaggatttgctcctggggctgctgacagagcacacagctgtgacaatttgtcagtacttgggctgtaagtctacaggcagcaaacagacacacctgtgctgaygagctcyaacaggtctgtgtgtcctggacacacaaggcacacactcactgatgtttccaagcgcccacaaagttgccagataaggctacctgtccagtggaactcttctgacaagcatgacccatccatttgcagaccccactgcttccctccaagctcctatgtctaaatatttataggagtgtttactggaagagtgtgaaaggctctcaacagataacgcactcttccagattctatacctacccttcaagaaaagtgtttgaatacagttacttttacaaccagaggaaatagcat

SEQ ID NO: 22994 - DNA, 600 bp, Chicken  19866894235888_6
tctataaccatcaaggcaaagactcaacaaacagattctgcagcagaccaactcactgcattaaataactacgtactgtgtagtaactggctgaagtgacctgacagtcctactctgaaacagagaagaggtggagccagtggctcagttttgatctggaacaagcctagtgctaaacagtatmtcagaaaaggatttgctcctggggctgctgacagagcacacagctgtgacaatttgtcagtacttgggctgtaagtctacaggcagcaaacagacacacctgtgctgaygagctcyaacaggtctgtgtgtcctggacacacaaggcacacactcactgatgtttccaagcgcccacaaagttgccagataaggctacctgtccagtggaactcttctgacaagcatgacccatccatttgcagaccccactgcttccctccaagctcctatgtctaaatatttataggagtgtttactggaagagtgtgaaaggctctcaacagataacgcactcttccagattctatacctacccttcaagaaaagtgtttgaatacagttacttttacaaccagaggaaatagcatttgctca

SEQ ID NO: 22995 - DNA, 600 bp, Chicken  19866894235892_1
gtaccaacgaaaacaatgtagcagacaaaacaactgcttgctgctcagtttctcacataaagccattccgttagcatctgacctgacttttctgtaagggtatatccttcacagaaaccacgtcagaaataaattttccaaacacacaggcagatctgttggcatcatctgcatcacgagacagtaattccacagatcaaaatagtgacccaaaaagaaataattaaggcttataaggctggacaaggtaatttgcagccacaatgctcattggctgttgagatgctagcctgcagtagwgctccacagactgagcaggaagatggagaattgttatggatccaccaaactgtaagattccaccacaggcagcactagcaaccaccctttttacattcctcgtgctgtcattccactgtaaagaaaagaaaaagtatgtatggctgctaagtagcttctcagcacatgcacatctctcttgacccatagccaggtaatactgaaagacacacaatattatgaagacaaaaactttggaactaaatttggtaacaactaacgcaagttccaagcattaatctattttcctctggggagaaa

SEQ ID NO: 22996 - DNA, 507 bp, Chicken  19866894235896_1
ctggcttctcttatccgctcggtggttgccctgcacaatctcatcaacaacaagattgccaatagggatgcagagaagaaggaaggacaggaaaaagaagagagtaaaaaggagaggaaagatgagaaggagaaagacaaggagaagagcgatgtcaagaaagaggagaaaaaagagaaaaagtaaaatgtgtagtttttttatttgtaaattaaaaaatcttgtaaactaagtcactttgctgctgggttcttttcctttgtactggtaagtgctcagctttttgctgctttgatactygttgcattcattataacaaggctgtatggatggactcaaagtggcagaagctgccacaaggagagagttgctgtggtctggctgtagctggtggtgtatgggatacatcgagggtgggctgagctgtgtcagtgcctggggccaggagacagcaatgcatccatagcaaatgaatttgtgggggtgggctgtgccgtactggcagca

SEQ ID NO: 22997 - DNA, 600 bp, Chicken  19866894235897_1
caaagtggcctcctgagatctctccctcagtgagcctttcaaaaattggaaagggtagaaatcctctaacgttcctctaactttaattgtcttctgaggtagttcccaatattctctatttaaaaacttgcaactgaaaaaaaagcatcgagggtcataaagatgttcaaaggttgttgcaaacatagatgaattatgccaagcttctgtttggatgaaatacactgcacatctgttttccttttaaagtactgtgggtcaggttagcaacacatctcttgtgataaacttcttgccgtsagtcaaattctggtccacctaagcagtgagcagtcacagagccactgcacattgatgaggatgcgcccagtagagcaggcatcctgcagcaccatatgtttttggtttttggctggagagctgaggcctggctctcctcagagatgctttttcttwactccgcagtgaactgggaactggccacctcctgcaagggaaaagaggttgccctctgcatttttctttcccctcaagttggcaggacttacagwagctgttttctcagccttttgacacagggattgacctgactgttccact

SEQ ID NO: 22998 - DNA, 600 bp, Chicken  19866894235897_2
ataaagatgttcaaaggttgttgcaaacatagatgaattatgccaagcttctgtttggatgaaatacactgcacatctgttttccttttaaagtactgtgggtcaggttagcaacacatctcttgtgataaacttcttgccgtsagtcaaattctggtccacctaagcagtgagcagtcacagagccactgcacattgatgaggatgcgcccagtagagcaggcatcctgcagcaccatatgtttttggtttttggctggagagctgaggcctggctctcctcagagatgctttttcttwactccgcagtgaactgggaactggccacctcctgcaagggaaaagaggttgccctctgcatttttctttcccctcaagttggcaggacttacagwagctgttttctcagccttttgacacagggattgacctgactgttccacttttactgaaactcctgttgcttaataaaggaggatatcctcaatacagacctgtatagrcaggaaagggaagagcaagttagaagaactttccaaataagacgattttaggcaacactgagctaactcaccagctattctgtgctatgctgtgttg

SEQ ID NO: 22999 - DNA, 600 bp, Chicken  19866894235897_3
ctgtgggtcaggttagcaacacatctcttgtgataaacttcttgccgtsagtcaaattctggtccacctaagcagtgagcagtcacagagccactgcacattgatgaggatgcgcccagtagagcaggcatcctgcagcaccatatgtttttggtttttggctggagagctgaggcctggctctcctcagagatgctttttcttwactccgcagtgaactgggaactggccacctcctgcaagggaaaagaggttgccctctgcatttttctttcccctcaagttggcaggacttacagwagctgttttctcagccttttgacacagggattgacctgactgttccacttttactgaaactcctgttgcttaataaaggaggatatcctcaatacagacctgtatagrcaggaaagggaagagcaagttagaagaactttccaaataagacgattttaggcaacactgagctaactcaccagctattctgtgctatgctgtgttgagttttgttgcacctaacttgcagaaggtctcttcctggcaatgtctgttggagccagacccaccaggaagcgtggtgttctcagaactgcttgg

SEQ ID NO: 23000 - DNA, 600 bp, Chicken  19866894235897_4
gatgcgcccagtagagcaggcatcctgcagcaccatatgtttttggtttttggctggagagctgaggcctggctctcctcagagatgctttttcttwactccgcagtgaactgggaactggccacctcctgcaagggaaaagaggttgccctctgcatttttctttcccctcaagttggcaggacttacagwagctgttttctcagccttttgacacagggattgacctgactgttccacttttactgaaactcctgttgcttaataaaggaggatatcctcaatacagacctgtatagrcaggaaagggaagagcaagttagaagaactttccaaataagacgattttaggcaacactgagctaactcaccagctattctgtgctatgctgtgttgagttttgttgcacctaacttgcagaaggtctcttcctggcaatgtctgttggagccagacccaccaggaagcgtggtgttctcagaactgcttggaattcagaagactttgttttgtttattgaaagggatggcactgggagagcaaggactccaatcatgagacctctgtaggagtctggtctcaaaatccttctgctccaa

SEQ ID NO: 23001 - DNA, 600 bp, Chicken  19866894235900_1
tgcccccgctcccattaggagggactcacctctcccttcttcccaatctcactgtacgcctcgcccatcttgtccttctgcagggactgcaagaaagagggagaaggtatcagtgtcacagaaaaagctaacccagtccccacgtgcccgcgctccactcctgcatgtctggggctgccgcgtatgacccagcctcagtgcagaactatgaccccatctggaggagggacagtcagtggtggtcttggctgacgtgcagggaagcgtaagcgaggcaccatcagctctgttcagcagcascacattgtttccaacaatttaaatgaagaataatgaccaagccatttagctacatcggtgccacgtactgcactgcaccaaaactctctgaagaaaacccctaagcagagtttgctcaggagacaaaacccaatgcactgctgaggcccagggacagggcagtcttgtaacacagtagggcgaggggtaagagagaggggttctcctccctccatcccacaggctcacaaccagcactgatcagagactgtgaatcagccatgggaaccaaagcccacttctcagcgagtactgagcacc

SEQ ID NO: 23002 - DNA, 599 bp, Chicken  19866894235906_1
  misc_feature (1)..(18): n is any nucleotide
nnnnnnnnnnnnnnnnnntgtacgcctccagacagctgacttcaccaaagcactgctggttgcggtcctagaaagccttcatgtctgaagtcagtgcccctttgccttgctgcgtgctgctgaaccacagggctaacctacaccagtgtgagatttatattgctgttagtgccctactggtaactttctgtagctcttgcagcttagcaaaggagagagacattgacttattttaaatggctcttgagatgccttgtgctgaaagagtgagccactgtccctgcgagatgtcctcacttkgagggaatggggcttgctggctcctttaacgtctgatctaagaggcgagcctcagtctcttgtctttaaagtaaatggagtacattctcatggaaagataaaggatgtagacacacagaaatacttcttttttttaatacctgtctttctggttgggtttcaagaaattctttgcatttctgtatccaagcagatcttcaggttgagccaattactgagacttttttgctttgttttggagatggattattctgtccttttagatggcccctcctatcccttttggagaggatgaagct

SEQ ID NO: 23003 - DNA, 599 bp, Chicken  19866894235909_1
  misc_feature (1)..(49): n is any nucleotide
nnnnnnnnnnnnnnnnnnnnnnnnnnnnnnnnnnnnnnnnnnnnnnnnnctaaatgtagactcataggatctctaggtctcttccctcagcatcagtaacctctaaatgctgcagttcattcctcactctttctgacactctatactggctggctggttataccacagcaagtgaccttcttttttctcaatcctcaacagtttgcagagaaaaacgtaatattctcctccctctatcacaaactcatttaggttcaacatggttctcaaatcacttccagttttcaaaagcaagtttgmatcaatagcaatcacagtttctccatactacttccaaggaacttccttcagtaactttgccttastgtgttaaccaaaacatcctcactaaactcaattttaacatgagaattttgttttcatttgctagattttaaaatgcacagtaaaaacaagtggcagaaaaatcactgaaaaatttgtgtaaaatactccatcctttccacagtgttccctatcagctgtttaagtaaccagcagtagcaagagaaaagtccctcaagtccatgacccaagttaaacccacttaaaactttaag

SEQ ID NO: 23004 - DNA, 600 bp, Chicken  19866894235909_2
aggatctctaggtctcttccctcagcatcagtaacctctaaatgctgcagttcattcctcactctttctgacactctatactggctggctggttataccacagcaagtgaccttcttttttctcaatcctcaacagtttgcagagaaaaacgtaatattctcctccctctatcacaaactcatttaggttcaacatggttctcaaatcacttccagttttcaaaagcaagtttgmatcaatagcaatcacagtttctccatactacttccaaggaacttccttcagtaactttgccttastgtgttaaccaaaacatcctcactaaactcaattttaacatgagaattttgttttcatttgctagattttaaaatgcacagtaaaaacaagtggcagaaaaatcactgaaaaatttgtgtaaaatactccatcctttccacagtgttccctatcagctgtttaagtaaccagcagtagcaagagaaaagtccctcaagtccatgacccaagttaaacccacttaaaactttaaggtattaattgtcttgacgcaattaccgttgaaacctgctgtctatttgttagctcaaacatgagtg

SEQ ID NO: 23005 - DNA, 600 bp, Chicken  19866894235913_1
gggccaattgaagtggtggttcaagcagcccagacgtttcaaatcattttcttctcacttgtggtttcagaaaccagttgaccaggtcagaaacctcacgagcaccgtgatgtcagtgcctgacagtcatggttgtctgctgtcactgttctcctgtttggtcaggctgggagcaatagatgaagctttgatttgtactttgttttaggacaaaccaccatgctcccaagcctgctggcatcccagagctctctcccaaggcactgctgagcatccagaaggtgattcaggctcaggacrgagctgaatcatagctaaggagatggccatgattgggattgttgcatgggccctatttgccgtgatccatacargaccccacagcamgtcctggatttgcttttgttgtgaacatgggctcattacctgggtgatgctcactgcaaatggggagcaaagtgaagagtctgggatagccaacaagggggcagagacagcagtgtgtacttaaggcccagcagggtaccttctccatatagacttaatcccatagcagctcgggaagcagacctaaccactgaaacgagcagtccaaacaga

SEQ ID NO: 23006 - DNA, 561 bp, Chicken  19866894235913_2
cagttgaccaggtcagaaacctcacgagcaccgtgatgtcagtgcctgacagtcatggttgtctgctgtcactgttctcctgtttggtcaggctgggagcaatagatgaagctttgatttgtactttgttttaggacaaaccaccatgctcccaagcctgctggcatcccagagctctctcccaaggcactgctgagcatccagaaggtgattcaggctcaggacrgagctgaatcatagctaaggagatggccatgattgggattgttgcatgggccctatttgccgtgatccatacargaccccacagcamgtcctggatttgcttttgttgtgaacatgggctcattacctgggtgatgctcactgcaaatggggagcaaagtgaagagtctgggatagccaacaagggggcagagacagcagtgtgtacttaaggcccagcagggtaccttctccatatagacttaatcccatagcagctcgggaagcagacctaaccactgaaacgagcagtccaaacagatgcaccaacctggacttgatctgaagggacaccag

SEQ ID NO: 23007 - DNA, 548 bp, Chicken  19866894235913_3
cagaaacctcacgagcaccgtgatgtcagtgcctgacagtcatggttgtctgctgtcactgttctcctgtttggtcaggctgggagcaatagatgaagctttgatttgtactttgttttaggacaaaccaccatgctcccaagcctgctggcatcccagagctctctcccaaggcactgctgagcatccagaaggtgattcaggctcaggacrgagctgaatcatagctaaggagatggccatgattgggattgttgcatgggccctatttgccgtgatccatacargaccccacagcamgtcctggatttgcttttgttgtgaacatgggctcattacctgggtgatgctcactgcaaatggggagcaaagtgaagagtctgggatagccaacaagggggcagagacagcagtgtgtacttaaggcccagcagggtaccttctccatatagacttaatcccatagcagctcgggaagcagacctaaccactgaaacgagcagtccaaacagatgcaccaacctggacttgatctgaagggacaccag

SEQ ID NO: 23008 - DNA, 599 bp, Chicken  19866894235915_1
  misc_feature (1)..(136): n is any nucleotide
nnnnnnnnnnnnnnnnnnnnnnnnnnnnnnnnnnnnnnnnnnnnnnnnnnnnnnnnnnnnnnnnnnnnnnnnnnnnnnnnnnnnnnnnnnnnnnnnnnnnnnnnnnnnnnnnnnnnnnnnnnnnnnnnnnnnnnnntgtatttcatatttgcaactattacattttcattttagttaggaagaaacatgctggaattacatcttgcatgttcagttggtgtttgattctccataaaatttgtcacccctttggaaacataagtggaacaagtgcctcaaactacatcttaatgctttgtrattacggtgagctgatataaagaacacgcttcaaagaggaaaaaaaacacaaaacaggattatcacagttataaaccagagtgtaaactgaggggtaggagaggatttggatttttcttattctgtgcctacactaatggaatcaaagtccttaagtcctaaaccatcaccagaatctttaggatgattgttttcaagtgcaaatttaaagtttgatctagttaagatgtaatattggaaacattgctggtagttagaaggatcaaaagagacatctgactctgttgctggaacttgat

SEQ ID NO: 23009 - DNA, 599 bp, Chicken  19866894235929_1
  misc_feature (1)..(156): n is any nucleotide
nnnnnnnnnnnnnnnnnnnnnnnnnnnnnnnnnnnnnnnnnnnnnnnnnnnnnnnnnnnnnnnnnnnnnnnnnnnnnnnnnnnnnnnnnnnnnnnnnnnnnnnnnnnnnnnnnnnnnnnnnnnnnnnnnnnnnnnnnnnnnnnnnnnnnnnnnnnnattgagttaattcatgaaatttttaaagaataccaaagaaggcaatgtaactctagattaagcactcaaaggtgagacaaacagctactgtaacacagtatattcctacatttgataaagatacaatgtcaaattcagtacttrtgtagaaatatttcaaggctacttagtacatcccacatgcaataagcagcccctaaactctgccaatactcaggtcttcaaggtgacttgcagcaggctcctagaaaagccatcaggatgcccacagctaaaccagctctcaaaacaaacgcagacatttttaatactgagtccttgctgtgttcaccaccttcccttcattgctttagtagggacaagtctgtctggcacagccgtgccccactccagccctgagtccaacctccccaaaactttctcactcagcatagcccatgact

SEQ ID NO: 23010 - DNA, 600 bp, Chicken  19866894235931_1
ctcactgttgaacagaaatgatattttcccaatggataagttaatagatggcattaaggatgagaggagaggatgaatcagaaccctttatattctgaaatgtcatggagggatcacatctgtctcccacaccaccacgtgtgctatcagttgtaaatcagtattagcccatgtgaggaattatgcctgatagtaatgaaagtactcttataacttctgcttccttaaatgatagtgcaatatgactgtttcagcagccttagggacttgtttagctgctggagggagaaagcatggccmctggttggtttctttgcttggttgggtttggttgtgctagtgtgcagcattgctgttaacccagtggtgatctctgcagtctaaatgcacttccttaacacactgcctttacaatgggaggtgcagtgactgaatttagaagaaaaacatatggcgctctgaaaagccttttttcttcccttgtaggtaagaaggaaggcagctgttcctaggctggccgagagtcaggaaggagcttttgctgctgatcgttggggaagtgaatgctgcgtgctttgtggttcagtgtgtgctctaata

SEQ ID NO: 23011 - DNA, 600 bp, Chicken  19866894235939_1
agtctctctgggcagcctgtaccagcacctcaccattctctctgtaaagaacttgcccctgacatccaatctaaatcttccttccttgagcttaaaaccattcttccttgttttatcactatctactcttgttaaaagttcattcccctcctgtttataatcccctttcgggtactggaaggctgcagtgagatctccccacagccttctcttctctaggctgaacaagcccagctccctcatcctgtcttcataagagaagtgctccagccctccaatcatctttgtgtccctcctctrgaccctctccaacagctccacatccctcctgtattgcgggccccagacctggacgcattactgcagatggggcctcatgagggcagagtagagacggacaattgcctccctgtccctgctggccacccctctgctgatggagcccaggattctgctggccttctgagatacaagagcacactgctggctcacgttcagttttttatcccttctctgcagggctgctctcaaggagttcttctcccagtctgtatgtgtatctgggatcactctaacccaagtgcaaaaccttgcactttg

SEQ ID NO: 23012 - DNA, 600 bp, Chicken  19866894235942_1
cccatttcctgcagtctcctgcagtcatgatttgtgaatgcctgagaatacccctgctgaattctaattgtttgtgacagtcggcacatgatttcaagtgtttggtcacagcagtgttcgttttctgctcttttaatctttgatggatgttgcgcctggcttcactgatgtggttcacgacacagtaggcagtgatttcctataagatgttttgtctcaactacagaggtgcggagttcctatacgatggccagtatttattaatgatgtcccaaggtttctaaagagaaagctctgccrtagaccattagaacctaatctactccaaaatgtcagatgcagttaagcaagagttatctagactgcactgagactttcctcattagttcagactctgattaggagactgattaaaggctttctttctgtaaaggttcactctttatctttgcagatttcgttactatgtaagacgtgatagagctagcttaaggctcacgcaaatagtaaaactaaaaagcatttgtgcgtatgcatctgcacagtgattcaagcccttgcagcacgcatgcatgctttttaaaatgcccttaactagta

SEQ ID NO: 23013 - DNA, 600 bp, Chicken  19866894235949_1
taccaatcgatcttcagtttctcatcctgatagtcaagaaataatggttgccttgacattaacatctctctgctgctgtagtagtagccactagtgtaaagagtgttgttaacacaaattagtgaacttttgccgtaacacatataaggcctttaaaggagaactagcaatgtagctctgagaaaatgaacgactctaggaggatagtaataattccttctttgtagcaagatgtaaattgtgtgctgtaggtaatgtgtggagtcacatgttgaacatctaaaataaaagaaaatattrgattagtagctagttaagaaggcactgtccatcagaaaccataaataaggttgatattatacaaaaatgaattaaaaagaatggcatacaaagacatattcatactgaatttgcaaaaaggtctatttgaaagttgcagtcagcctctgtaattgcctcacatttgagtactcaaccttgcaacgattgtaatgttcttcgattagaattttgcttcataaaaactcatttgtgcataaatctatgtatatttctgcatgaatgtttattacactgattctaattggatgattacatttg

SEQ ID NO: 23014 - DNA, 600 bp, Chicken  19866894235955_1
tatcttcacagtaaattgtgaagcatgcccatgtcacaaacatctctagagactggatgtgggcaacagctgaatttattgcatctccctacatacccacaagatgctcttttcttccagagatatttctgttgtgggacctttggcttgactgacctccaaaccaactcatagcaatagatattgggacaatgaatcaattcctgcagttctggcagttgtttcatcttcataactgaacctgaagagtcatggaggttcagatttcatgggatgtttcacaagcatgaattgggatartattttctcttgcagctgttcaggtttcctgtaytaaagctacttctttctggggttgccatgatcttagagrggaagaagactccagatcctatggcagggaatgaatcttgttccayacccaaatgctctgaatyggagtaccgttctgaccaattaggttaacaaggtagcatctgctggatccagaacaggactatgtgtattttgtttttctgaaagctgactgaattttgagatagattagttctttctatttgtgctaaaaccagacatgacctatgctcttctgatcaaagg

SEQ ID NO: 23015 - DNA, 600 bp, Chicken  19866894235955_2
cacaaacatctctagagactggatgtgggcaacagctgaatttattgcatctccctacatacccacaagatgctcttttcttccagagatatttctgttgtgggacctttggcttgactgacctccaaaccaactcatagcaatagatattgggacaatgaatcaattcctgcagttctggcagttgtttcatcttcataactgaacctgaagagtcatggaggttcagatttcatgggatgtttcacaagcatgaattgggatartattttctcttgcagctgttcaggtttcctgtaytaaagctacttctttctggggttgccatgatcttagagrggaagaagactccagatcctatggcagggaatgaatcttgttccayacccaaatgctctgaatyggagtaccgttctgaccaattaggttaacaaggtagcatctgctggatccagaacaggactatgtgtattttgtttttctgaaagctgactgaattttgagatagattagttctttctatttgtgctaaaaccagacatgacctatgctcttctgatcaaaggacatttcaaaagaataattattctttttatgata

SEQ ID NO: 23016 - DNA, 600 bp, Chicken  19866894235955_3
atttattgcatctccctacatacccacaagatgctcttttcttccagagatatttctgttgtgggacctttggcttgactgacctccaaaccaactcatagcaatagatattgggacaatgaatcaattcctgcagttctggcagttgtttcatcttcataactgaacctgaagagtcatggaggttcagatttcatgggatgtttcacaagcatgaattgggatartattttctcttgcagctgttcaggtttcctgtaytaaagctacttctttctggggttgccatgatcttagagrggaagaagactccagatcctatggcagggaatgaatcttgttccayacccaaatgctctgaatyggagtaccgttctgaccaattaggttaacaaggtagcatctgctggatccagaacaggactatgtgtattttgtttttctgaaagctgactgaattttgagatagattagttctttctatttgtgctaaaaccagacatgacctatgctcttctgatcaaaggacatttcaaaagaataattattctttttatgatacacttacctsttgttctgaagttatttctgtcacctctt

SEQ ID NO: 23017 - DNA, 600 bp, Chicken  19866894235955_4
gagatatttctgttgtgggacctttggcttgactgacctccaaaccaactcatagcaatagatattgggacaatgaatcaattcctgcagttctggcagttgtttcatcttcataactgaacctgaagagtcatggaggttcagatttcatgggatgtttcacaagcatgaattgggatartattttctcttgcagctgttcaggtttcctgtaytaaagctacttctttctggggttgccatgatcttagagrggaagaagactccagatcctatggcagggaatgaatcttgttccayacccaaatgctctgaatyggagtaccgttctgaccaattaggttaacaaggtagcatctgctggatccagaacaggactatgtgtattttgtttttctgaaagctgactgaattttgagatagattagttctttctatttgtgctaaaaccagacatgacctatgctcttctgatcaaaggacatttcaaaagaataattattctttttatgatacacttacctsttgttctgaagttatttctgtcacctcttccccctcttatctggagtttatccttttcacttcctttcttaacaa

SEQ ID NO: 23018 - DNA, 600 bp, Chicken  19866894235955_5
gacctttggcttgactgacctccaaaccaactcatagcaatagatattgggacaatgaatcaattcctgcagttctggcagttgtttcatcttcataactgaacctgaagagtcatggaggttcagatttcatgggatgtttcacaagcatgaattgggatartattttctcttgcagctgttcaggtttcctgtaytaaagctacttctttctggggttgccatgatcttagagrggaagaagactccagatcctatggcagggaatgaatcttgttccayacccaaatgctctgaatyggagtaccgttctgaccaattaggttaacaaggtagcatctgctggatccagaacaggactatgtgtattttgtttttctgaaagctgactgaattttgagatagattagttctttctatttgtgctaaaaccagacatgacctatgctcttctgatcaaaggacatttcaaaagaataattattctttttatgatacacttacctsttgttctgaagttatttctgtcacctcttccccctcttatctggagtttatccttttcacttcctttcttaacaatacttgtgtagataggtg

SEQ ID NO: 23019 - DNA, 410 bp, Chicken  19866894235955_6
tctttctggggttgccatgatcttagagrggaagaagactccagatcctatggcagggaatgaatcttgttccayacccaaatgctctgaatyggagtaccgttctgaccaattaggttaacaaggtagcatctgctggatccagaacaggactatgtgtattttgtttttctgaaagctgactgaattttgagatagattagttctttctatttgtgctaaaaccagacatgacctatgctcttctgatcaaaggacatttcaaaagaataattattctttttatgatacacttacctsttgttctgaagttatttctgtcacctcttccccctcttatctggagtttatccttttcacttcctttcttaacaatacttgtgtagataggtgagctgataaatttctca

SEQ ID NO: 23020 - DNA, 600 bp, Chicken  19866894235956_1
gctgactttgatgtctttttaattagcgattctcaatagatgtcattgattcttcagaactatttagaggtaaagcaaaggcaagaatttttttttttttttttttttgattagcagatcttttccttttagaagttagtttaatatactaactaaatggaagtgtattgcttttaagatatcctaagaaacaaaagccaaaagttttttaactttgatatctgatcatttgatgtctaaatccatttattagtgcttgtagaagttgaactgatttcttttgcagcagatccttattcwtatcaatgggatcagagagctctcaggcattcagagagttattcgtttgcttaagtgttactgtctttcatacacagtagagttggaagcccttgatattttttatgagctgaaaccagccttactatgtgcactgtatgctactagtaagacttaaagaactttttcatttctgtatctgaatatgctttttagtaaatcagccacatatatgcagatgggtttcctgacaccatctttagagtccttctgcttgctctctttcttatcctcattcgtgttcaacacaggctattactg

SEQ ID NO: 23021 - DNA, 599 bp, Chicken  19866894235966_1
  misc_feature (1)..(177): n is any nucleotide
nnnnnnnnnnnnnnnnnnnnnnnnnnnnnnnnnnnnnnnnnnnnnnnnnnnnnnnnnnnnnnnnnnnnnnnnnnnnnnnnnnnnnnnnnnnnnnnnnnnnnnnnnnnnnnnnnnnnnnnnnnnnnnnnnnnnnnnnnnnnnnnnnnnnnnnnnnnnnnnnnnnnnnnnnnnnnnnnncagatagtttttctgtgtgttaacagtagttcagtctgctggccaatagtcatcctcactttgaggactttttcttagttatcttcccaagacagcaaatgtcagaaaagcaataaaaacagstttcttstgactgtcaatgtgaaacccaaccaccctcaaggagggaaagtggggaatttctgtatcttcaaaacaaaaccarttagccagattaaggctcttagaatctgacaattctgaaagaaaaatcgtatgtggagtggtaggaagtaataaagaacacttaatcgtgtgagcagctgcaggatttgcactagyttttacaggtactgtgtaagcagcccattgagaaactccctgtatttgctcacatagatgtacaaatgtttttgagttgccttcaagctctgcagactgcc

SEQ ID NO: 23022 - DNA, 599 bp, Chicken  19866894235966_2
  misc_feature (1)..(170): n is any nucleotide
nnnnnnnnnnnnnnnnnnnnnnnnnnnnnnnnnnnnnnnnnnnnnnnnnnnnnnnnnnnnnnnnnnnnnnnnnnnnnnnnnnnnnnnnnnnnnnnnnnnnnnnnnnnnnnnnnnnnnnnnnnnnnnnnnnnnnnnnnnnnnnnnnnnnnnnnnnnnnnnnnnnnnnnnnncagatagtttttctgtgtgttaacagtagttcagtctgctggccaatagtcatcctcactttgaggactttttcttagttatcttcccaagacagcaaatgtcagaaaagcaataaaaacagstttcttstgactgtcaatgtgaaacccaaccaccctcaaggagggaaagtggggaatttctgtatcttcaaaacaaaaccarttagccagattaaggctcttagaatctgacaattctgaaagaaaaatcgtatgtggagtggtaggaagtaataaagaacacttaatcgtgtgagcagctgcaggatttgcactagyttttacaggtactgtgtaagcagcccattgagaaactccctgtatttgctcacatagatgtacaaatgtttttgagttgccttcaagctctgcagactgcctgggggt

SEQ ID NO: 23023 - DNA, 599 bp, Chicken  19866894235966_3
  misc_feature (1)..(95): n is any nucleotide
nnnnnnnnnnnnnnnnnnnnnnnnnnnnnnnnnnnnnnnnnnnnnnnnnnnnnnnnnnnnnnnnnnnnnnnnnnnnnnnnnnnnnnnnnnnnnnncagatagtttttctgtgtgttaacagtagttcagtctgctggccaatagtcatcctcactttgaggactttttcttagttatcttcccaagacagcaaatgtcagaaaagcaataaaaacagstttcttstgactgtcaatgtgaaacccaaccaccctcaaggagggaaagtggggaatttctgtatcttcaaaacaaaaccarttagccagattaaggctcttagaatctgacaattctgaaagaaaaatcgtatgtggagtggtaggaagtaataaagaacacttaatcgtgtgagcagctgcaggatttgcactagyttttacaggtactgtgtaagcagcccattgagaaactccctgtatttgctcacatagatgtacaaatgtttttgagttgccttcaagctctgcagactgcctgggggtgcttttaatttgttgcttttacacaaaaaggacaagtgatttctttccacttctgctcttgatctcaaagcccct

SEQ ID NO: 23024 - DNA, 600 bp, Chicken  19866894235966_4
aacagtagttcagtctgctggccaatagtcatcctcactttgaggactttttcttagttatcttcccaagacagcaaatgtcagaaaagcaataaaaacagstttcttstgactgtcaatgtgaaacccaaccaccctcaaggagggaaagtggggaatttctgtatcttcaaaacaaaaccarttagccagattaaggctcttagaatctgacaattctgaaagaaaaatcgtatgtggagtggtaggaagtaataaagaacacttaatcgtgtgagcagctgcaggatttgcactagyttttacaggtactgtgtaagcagcccattgagaaactccctgtatttgctcacatagatgtacaaatgtttttgagttgccttcaagctctgcagactgcctgggggtgcttttaatttgttgcttttacacaaaaaggacaagtgatttctttccacttctgctcttgatctcaaagccccttgtgtcctcctgttaactcttctctttcatcttcttcctctcctgttttctccatgtttaagtttagtttctcacctaccaaacacagcacatttggttaccctgtccacagtatat

SEQ ID NO: 23025 - DNA, 600 bp, Chicken  19866894235972_1
gtctctgctgattttaattaatctcatttatctttcttgtattgaaggtaattttcccatgatcagtgatgacttggtcaattcctatcatctcttgttgtgcgctttggatctagtgtatggaaatgctctccagtgccctaaccacaaagaacttctgaatcccaattttaaaggtgtgttgggaaaaaaaagtctttatctaaaatctgccaaaaccttaaggctgttgaaatggatatgaacatatgtagtaggcagaattattattttctctgtctggctacacagttactatgmcacgttggtagaaatataacacattattgaattctgtaactagtatactgaagtcaggaactccatgtactatggaaataccactgaaggacttccaaaggagatgttctgttaatgatatgttaatggcagtgaaactgtgtaatgacccagtcactgtgggacaggtcacgttgtagagatcccaggcagcagtttgggaagatcctgtgctcagatacaaagcaggcaccctgactgtttctctctcccttttgggctgttccttatgaaaagaatggaaacataggtggacttggt

SEQ ID NO: 23026 - DNA, 599 bp, Chicken  19866894235973_1
  misc_feature (1)..(84): n is any nucleotide
nnnnnnnnnnnnnnnnnnnnnnnnnnnnnnnnnnnnnnnnnnnnnnnnnnnnnnnnnnnnnnnnnnnnnnnnnnnnnnnnnnnntcctgatttatggtccaaaacctgttaaatagaatatgcaactgttccaaagaacaatttgtagctacccagtatagttttgtatttaaattatcataatgcaaaagtcaaaacgtaatgcttagaatcatagaatcaccaaagttggacaagacccacaggatcacccagtccaaccatccacccatcaccaatagttctcattaaaccatgttrctcaacacaacgtccaaatgttccttgaacacctccagggtcggtgactccaccacctccctgggcaggccattccagtgcctgaccattcttttggagaagtagtatttcctaaagtccagtctgaatctcccctggcacagctagaagccattccctctagtcctatcactagttacatcaacatcaaactgaaataaatcagttatgatgcaatgccaacacatacacgcaaacacaaaaacaaaacaaaacaaaacaaaacaaaaaaacccaccacaattaaatcacaaaagaac

SEQ ID NO: 23027 - DNA, 600 bp, Chicken  19866894235974_1
tcatttttgatcatacagactggatttttaacaaggttttcacttggcttagcttactcctgcacaattgctggggaacacacagcagccacaggcaaagagtactgatgaggataagagcacagtgccagctatggttaattactgctaatcatccataagacaatataccttgatattcccctcacctccaaccagcagtaggggcagcttctgttgatatcccagtctgaattcctctctaatctccaaaggaaaatgggggagaataacgtgacaggattgaaatgaggctgtgaygtggtgtgctgcaaatttttgttatgggatctcactctttgcacaggaccatgcttcttctaatacatccttcctgtttgcagacaacatcctcagattaatgccagatgaaagaaccctatactaacagagaaaactggtcgtggtgttctgttaatcatggaacatctattcaaaactccacaggcttcttactgaaagaaatattagacaatgtgatgtgccttattgaaatacacaaccatatacaagatgacatattatcagaactattattaacaataaattgttattaatatc

SEQ ID NO: 23028 - DNA, 600 bp, Chicken  19866894235975_1
tggtggttgagtcttatgggagttgggaagagcgtggcatcccccagttccttgtttcttacagaaactgagcagtggggtctaactagaaatacacatttctcatatgataggaaatatttttaggagataaagtaagcaaactgttaaaaattgtcagaactgttataaaaataaactcctggcttatcctgaggattttgttacctgaaaaatgtcagcagcagatttcataagtctgtcctatttctgtatggtacctctgaagtgtgttggtagtgtttccttctgcattgccartcggtgccttacatgaagctgaacctgagcagcacagaggtctgttgggtgccctggaggatgagaaagtgccatcccagctctgtgagcttctttcagctgcacccacagttatcagcacagctcttacctgcagcatttcttggtgtgttatgaaaacattccctttaggtgtttactcatacactaaatttcagttctgccattccagagagcagaagtccttgcacttgacatttcatgytctctcttacagtgcgtgagttagggaggacaaaggaggtggatgcttgcaagtca

SEQ ID NO: 23029 - DNA, 600 bp, Chicken  19866894235975_2
tatttctgtatggtacctctgaagtgtgttggtagtgtttccttctgcattgccartcggtgccttacatgaagctgaacctgagcagcacagaggtctgttgggtgccctggaggatgagaaagtgccatcccagctctgtgagcttctttcagctgcacccacagttatcagcacagctcttacctgcagcatttcttggtgtgttatgaaaacattccctttaggtgtttactcatacactaaatttcagttctgccattccagagagcagaagtccttgcacttgacatttcatgytctctcttacagtgcgtgagttagggaggacaaaggaggtggatgcttgcaagtcagatgaatcatggctcagtatttgggttcagatgctcggaagagacactgtcattggtggatccattataaatacgggcttatgactaaaactgaatacaatcatcatttttgctcccaagaaacggcagcattttcacatgtgatttgagcaggtgaactttgtgcttgtttcttggaaatctagcatgattttgatgaaatcccttgttgtgccctccctggtgtcttttctaagaaacttca

SEQ ID NO: 23030 - DNA, 599 bp, Chicken  19866894235976_1
  misc_feature (1)..(36): n is any nucleotide
nnnnnnnnnnnnnnnnnnnnnnnnnnnnnnnnnnnnctggctgtgaaatggtgccacacagctgttggcacagaactggcaaacagccatgaccttggggtaaacttgtacagccctggtcttcttcctttgtctggaggtaatggaaccaaaggtacccaggaagcaaggcaaggccaggtctgctgggcaccagtcccatggcaccaccagaccaatgaacagaatgagttcctgttcttttcctttgcagcccttcactgtgactctctaaggtaaataattcagtatttcccactygcatatggagcctttgggactgggagagggcaagggcagcttggtggaaagagaaactctttggtaggattccaaaaataaccagtttgctagcaggacataacttctgtccttcgtttaatgactgagctgggaacaaacactgatagataaaaagggattaattgtgtttttaatgagctcaacattccacttgcagagagcaatgcttgctgcagaccacgtggagatgaaagtgtcccatgttcctccagcatcatcctgcaggatgcagttccagggaactaggggaggtggaa

SEQ ID NO: 23031 - DNA, 600 bp, Chicken  19866894235977_1
ttatttctggggtccctgcacagtgggacttgcccttttgtgctgggcagcccccgtgctgagggcaggagggatgtgagcgtgtccctgctctgctcctgtgcctggcatgatgacgttgcagtgctcccacacctgaggtgccaaatgggaatccctagaacaaagcaagcatcttatccttgaatggtgtccagaaacaaccactgctgccaggaaggcttaaactgccccagatatcatcatgcaacactatcagtaaaagaaatacttttcctgaccctgttgataacctgcccrtgtcctatagcaaggcagtgtgatttactccatgaagctgtaggtgtccactcccaccctggaaaataacccacctttctttaataaataataaatagactcaggagctgtttcaattagaaaatacacttgtggcaggaaaagaaaactaaggagtaaaagtttatctctgtgcatgatggagataggatatggggagcgccatgaaagcagagggaaaggggctgagctgtgcatgcagcacttgctttgcttggtacatagtgcaccacaagcacctcacagaccatgcttgtattg

SEQ ID NO: 23032 - DNA, 600 bp, Chicken  19866894235978_1
gactccagtgctgactcactgctcagctctctgtgagacaagtctccttctcagccttggccatagcaagcagaactaaggacaaagagtaactgttgtccccaaaatagcacaggcaccctatggccagtccaaggagagaaagcatcatttgaacagtgctcttcacttcccagttgtttctatacaaaagacgtttgtgattcaacagcagacatagtagatgcatgtcactgatggcgcttaatttcagggaaagctgtccctgtcttctgtgtcagctgagaaagcaggaagctygggcgcctgccccctcttgctgcatcagaaatggaaagaactaggcaggcagcagatcccagcaccaggatgtgtggtatgtatttcccttaaaggtataacgagctggcaccctcagctctgtctgttccttatattatcacccccgcagccctgacctgagctgttagggctacatttgctatgcctctcactcaaaaaaaaaacattttgggctccattttgagactcagatttctaacatggtattgataggccacagctaacccgaaggaagacagaaaggctcagttagggcaa

SEQ ID NO: 23033 - DNA, 600 bp, Chicken  19866894235978_2
gataaggcaagttattcaatgttccaacaagcatgactttcaacatgtttgtgcccctgcactcattagaccaaggctttacaaggggttaaagcctttggacatgccagccatgcatagtgcttcagcatagaaagcattcaggggcttttaaattccttcctgttttaacacttcacacaggaaaaccttgaattcagtgtgatagctgtgtcaatggcagcaaggactgtttgtaaacacatgacagggaaagattatttaaggggcaataactctgtggacttcccttttgtagckgcaggtctgcttaagccaccacaggcagctaatgggtaaaataaattaaacccaggaactcttctggcccttatggtccaggcagggggctgacaaacccttttctctttctcagaaggcactctgtctgcaaggctgtgaagccagcctctctcttttcccggcttgctttcctcacctcctccctgctgcccagtcccagctgcagatcccagggctggaaatgccgagaaggacaagcaggcttcccttcacagcatgaagaggaaaaggcctctcagacaacaaacaacaaaaaaa

SEQ ID NO: 23034 - DNA, 600 bp, Chicken  19866894235978_3
caggcagccagattgattggggaatggcaggacatcaggtagcagaaggaaaagggcagttgtagagggcttcagcactggcctctccgtgccctgccatcagctcagggtgagagagaagggatcttgtcacaaggagagccatagaacttctctgaggtcctattattagtaagcactcttcagccttccaaagcatccagcagcccaaagcgtcacaaaacctctaccccagctgttagattacatggataattataatctgcagatgctaatgtgaggaacggttgtcactttcartgcatcrtgagaagggatgaaaggyttttttgggctacaacgtggcaaattgttagtctttctttcctcattgatttttatcctttggggtagcaagcaaactccattcatcactttggactgaattaagttttaaagagggatggtgttcagaggctatctgaggataaacagacattttgcatgtggctgttgcgtgagcaggcagttgagaaagaaagcacctgaatcaaacctaatgtggcctctcagggacacctcttatatttgccatcttttgtagggtcgggcatggccaag

SEQ ID NO: 23035 - DNA, 600 bp, Chicken  19866894235978_4
ccagattgattggggaatggcaggacatcaggtagcagaaggaaaagggcagttgtagagggcttcagcactggcctctccgtgccctgccatcagctcagggtgagagagaagggatcttgtcacaaggagagccatagaacttctctgaggtcctattattagtaagcactcttcagccttccaaagcatccagcagcccaaagcgtcacaaaacctctaccccagctgttagattacatggataattataatctgcagatgctaatgtgaggaacggttgtcactttcartgcatcrtgagaagggatgaaaggyttttttgggctacaacgtggcaaattgttagtctttctttcctcattgatttttatcctttggggtagcaagcaaactccattcatcactttggactgaattaagttttaaagagggatggtgttcagaggctatctgaggataaacagacattttgcatgtggctgttgcgtgagcaggcagttgagaaagaaagcacctgaatcaaacctaatgtggcctctcagggacacctcttatatttgccatcttttgtagggtcgggcatggccaagctacagc

SEQ ID NO: 23036 - DNA, 600 bp, Chicken  19866894235978_5
ggcaggacatcaggtagcagaaggaaaagggcagttgtagagggcttcagcactggcctctccgtgccctgccatcagctcagggtgagagagaagggatcttgtcacaaggagagccatagaacttctctgaggtcctattattagtaagcactcttcagccttccaaagcatccagcagcccaaagcgtcacaaaacctctaccccagctgttagattacatggataattataatctgcagatgctaatgtgaggaacggttgtcactttcartgcatcrtgagaagggatgaaaggyttttttgggctacaacgtggcaaattgttagtctttctttcctcattgatttttatcctttggggtagcaagcaaactccattcatcactttggactgaattaagttttaaagagggatggtgttcagaggctatctgaggataaacagacattttgcatgtggctgttgcgtgagcaggcagttgagaaagaaagcacctgaatcaaacctaatgtggcctctcagggacacctcttatatttgccatcttttgtagggtcgggcatggccaagctacagcagctcagaaattcccgtg

SEQ ID NO: 23037 - DNA, 600 bp, Chicken  19866894235980_1
ttctccttttgacctgtccagaaacattagggtatcagctttccagcattgctactcctggtagcattgagagcaaggaaatgcagagcagaccaaacaacaacaacaaaataaccagcctttcctagattctcagaaggggtttgtttcaaatccattttgagatgtagacaagagtccagcctgttcattttattagtttgtttacttacatataatgtcattttaacttattttcctttttttcacccattttgtagctatcccttgcaacaaataaaggaggtgaagccattatargaatagtratcggaggcaacttagccccacaggcgagtccagcccaaaccaagcacaagcaagcctattctgtgtcctaagggttcaagtgagaggtccaagccagcagcacagcctgggcagacagcagcattcccacgagcagggcaggacacaggcccatgacccctgcttgacgctgtgatgcaagggtggctggtgcagcccccagagacratgctcgctggaaaggggaagggtgaggattgccccaagttccaaaaattcagcccagtcctggagagctttgtcagaacaact

SEQ ID NO: 23038 - DNA, 600 bp, Chicken  19866894235980_2
ttgacctgtccagaaacattagggtatcagctttccagcattgctactcctggtagcattgagagcaaggaaatgcagagcagaccaaacaacaacaacaaaataaccagcctttcctagattctcagaaggggtttgtttcaaatccattttgagatgtagacaagagtccagcctgttcattttattagtttgtttacttacatataatgtcattttaacttattttcctttttttcacccattttgtagctatcccttgcaacaaataaaggaggtgaagccattatargaatagtratcggaggcaacttagccccacaggcgagtccagcccaaaccaagcacaagcaagcctattctgtgtcctaagggttcaagtgagaggtccaagccagcagcacagcctgggcagacagcagcattcccacgagcagggcaggacacaggcccatgacccctgcttgacgctgtgatgcaagggtggctggtgcagcccccagagacratgctcgctggaaaggggaagggtgaggattgccccaagttccaaaaattcagcccagtcctggagagctttgtcagaacaacttgtgccaa

SEQ ID NO: 23039 - DNA, 600 bp, Chicken  19866894235980_3
aatgtcattttaacttattttcctttttttcacccattttgtagctatcccttgcaacaaataaaggaggtgaagccattatargaatagtratcggaggcaacttagccccacaggcgagtccagcccaaaccaagcacaagcaagcctattctgtgtcctaagggttcaagtgagaggtccaagccagcagcacagcctgggcagacagcagcattcccacgagcagggcaggacacaggcccatgacccctgcttgacgctgtgatgcaagggtggctggtgcagcccccagagacratgctcgctggaaaggggaagggtgaggattgccccaagttccaaaaattcagcccagtcctggagagctttgtcagaacaacttgtgccaaacctgaccaggtgtacagttgttctatggcatgagtcctcagtgtttgtaggaactgctgcaatgcccacagcagtaggattcagaatataaacgccactaaatgttatttaaaaacrtaacacaacttcttcctcatccggtttggtaccttggaagctccatagcttccatctccaccctttcggtgctgcagggaactaatacta

SEQ ID NO: 23040 - DNA, 600 bp, Chicken  19866894235980_4
gcagcattcccacgagcagggcaggacacaggcccatgacccctgcttgacgctgtgatgcaagggtggctggtgcagcccccagagacratgctcgctggaaaggggaagggtgaggattgccccaagttccaaaaattcagcccagtcctggagagctttgtcagaacaacttgtgccaaacctgaccaggtgtacagttgttctatggcatgagtcctcagtgtttgtaggaactgctgcaatgcccacagcagtaggattcagaatataaacgccactaaatgttatttaaaaacrtaacacaacttcttcctcatccggtttggtaccttggaagctccatagcttccatctccaccctttcggtgctgcagggaactaatactaagcattaaataatattatttgcataagaaatctactagccactgtgccacacagctgaatattgcgcctgttctgttcaatggcttcacaatgtccacctcagaagcacgcactgcaccgaatatgtgctgaaatattcagcagatatttggatactttttcaagttcccaaagattaaaccttttccttctgctgcgggtccctttcaa

SEQ ID NO: 23041 - DNA, 600 bp, Chicken  19866894235983_1
tgtctattacaggccactgaatcaagacaaggaagttgatgaggccttcttcaggcagttgatagcagcctcacatctggttattgtggggggattttaactaccctgatatttgctggaaggtctactcagctggccatccacagtccaggaggctcctgcagtgcgttgatcataacttcctgatgcaaatggtggatgagccaactaggagaggagcactgctgggtcttgttctcactgacaaggagggtctggtagaagcagagaaggttgagggcagccttgtttgcagtgacraggaggtggtggagttcaggatattatgtggccggaacagaatactgaacagaatcacagccctggatttcagtagggacaaccttggccttttcaatcaattgctaggggaaatcctgtgggacagggtacttgaaggtaaaggggcccaagatggtaagttagcattcaaggaccacttcttccaagctcaagatcagagcaccctaacgggtaggaagtcgagaaagggagccaggagacctgcatggttaaacagcaaactgctgggcaagctcaagtggaagaggagagtttaca

SEQ ID NO: 23042 - DNA, 600 bp, Chicken  19866894235999_1
ctgtcagctgaattggggtagctcaattcctgaaagatgggagggatgaccacattcagtgtgagaaccactggtttagattttttgagtacctgagtatgtgctattgcactttaatacataaagtgataaccatcatttttgaaagtgacagcaactgaagatggtgagaactgcttgatttctataccttgagaattaaggttgcatacctagactcctaaatcttggtttagaagctgaacataagaaatcagtcttgcgtgtttttggcagatggttatgaggtaggtgtccatyttttcactgggctttgcaaattcatgctgttgatgaaagacaagcatgcaatttaaatgcatttcttcttatattgaaattagcaggggcacgcaattatcaatcgatgtcatgagtaaaagtaaagtcataatttgcaggaaggcaaattttctcagtctactgctatagtgaacttaagttttcttctttcctttcacttaccctcctttctgttattcttttcttgaattttcacagtaataaattcatttcactggtattcaatgtctaatattgtgaattcagcagaattctaca

SEQ ID NO: 23043 - DNA, 600 bp, Chicken  19866894236002_1
aaatgttgcaaagtaaaaaatggttatgagctatctcaaataagttaaaaataagtatttaaacaaaaatatatgaatggtaactgtgaattcctgaaaaaccatagtagatatttagtgagtcactgccccaaaatgccaagggcaaccattccttcccccgtgaagggaatgtgcaggcagatattaaacaaactgttctgaaggaaaaagcaggatggcaatatttggtaccaaccagataatacggactgatagaggaaaaaaacaaaacaaaacaaaacaaacaaacaaacaaamaaaaacccaacaacccagtgagtttttaaaacatgttayggacaagaaaattcttcttaatgaatagattctacaattcctctataacatataatgaaaatgataaatgtatcagtaatgatatgcaagaggcaaaagtgttaactacatctttctatgctgcactgggaactacaccaattggtatacagtcatataaggtggcgatgaaaggcgaagccttgaagctctctcagtcctactgtttggcagaacaacaaaatccaagcgccaaactctcatttgtatctcaaaatctca

SEQ ID NO: 23044 - DNA, 600 bp, Chicken  19866894236002_2
ataagttaaaaataagtatttaaacaaaaatatatgaatggtaactgtgaattcctgaaaaaccatagtagatatttagtgagtcactgccccaaaatgccaagggcaaccattccttcccccgtgaagggaatgtgcaggcagatattaaacaaactgttctgaaggaaaaagcaggatggcaatatttggtaccaaccagataatacggactgatagaggaaaaaaacaaaacaaaacaaaacaaacaaacaaacaaamaaaaacccaacaacccagtgagtttttaaaacatgttayggacaagaaaattcttcttaatgaatagattctacaattcctctataacatataatgaaaatgataaatgtatcagtaatgatatgcaagaggcaaaagtgttaactacatctttctatgctgcactgggaactacaccaattggtatacagtcatataaggtggcgatgaaaggcgaagccttgaagctctctcagtcctactgtttggcagaacaacaaaatccaagcgccaaactctcatttgtatctcaaaatctcatggattaattcaaagattcaaagattatgaacctgttgt

SEQ ID NO: 23045 - DNA, 600 bp, Chicken  19866894236003_1
catcttgagctaaagaggaaaaaggtgcaactgcatttactttcttcattcatcttatcttttactctgcttcatgtttgacaggaccttctgacagcttttaccatcaagcagatatataacactgctcaaactacctatattctcatagctgaacccaatgtttggaaatgaactttacggttatggtggacatttaattaaatacagtgtcgttctgccagtagagtctagcaattgcttgaggtgctctgcttttacgccagagaatctgcagtggcatgttgagcaggaaggccycagcttggttttcttttaaaattgcatttaaatgtacactagatacacattcatcactttaatctaaactctactgtaaattaacatgtatagcctctgagatcatacactttcacagaagtactctaatgaaacttggcagctttcacccagtaacatcatttgttccattcactagcaaaagcagacctcaaacaagtcaaaactgttttcagtaatgagttccattatttttctttatgtttttggagtctcaaaagcctcctgtcctgtgtctttattttacaataagtcaaaaaa

SEQ ID NO: 23046 - DNA, 600 bp, Chicken  19866894236008_1
ttttatatttgtatttatttggaagctgtagtaaagttaatgagttaacacatgctaaaaacgtttctaggattaggactcaactactgaatagaaaaaaaaacacttgacccaattccttttccttagcttaaatctggacacatcccaaaatgttgtgatttaaataatttacactcagccaatctgacttgcatacaaatgcttctgaaggaatttcaatgggaaattaacacgtccgactactgtctgacagtggcatgtgtttcacagtaagcaccattcaaaactgaaaatcamaaaaatcacacctatttgctgaagtgacagagaactctacttagttatttttaaaagcatagtgaatctgcaaaaattgagattcatatgatcacctcagttaattactctcccaagagaatatcggataaataatcagagccaactatactgattcacaatttaaacacttacgtaagatgaagaggaaagcccacattacagatggcaaaattatacgatgcaaggaaggtgacaaattcaggtttaccaaacctaaaattatgctgaatggctttaaatttgaactccttttggaac

SEQ ID NO: 23047 - DNA, 599 bp, Chicken  19866894236011_1
  misc_feature (1)..(63): n is any nucleotide
nnnnnnnnnnnnnnnnnnnnnnnnnnnnnnnnnnnnnnnnnnnnnnnnnnnnnnnnnnnnnnnccagtttaaaatttgcccaaacagactagacagcactaaagtaatgctacgcttttgcgtagcaaactgttactctgacatgattgcttacacttcagtgattatactgccaacacacccagagaacgactcttatacttaggtggaatccctttactgaatagaatcatagagttgcttgggttggaaggtactttaaagatcatcttcttccaatccccctgagatgggcagggrgaatttgaaaaggattgagrtgaggggagagaaaaagtccagattcctcaagtaaatatactactatggacaaaagttctggttagaccaaacatttcmttcttcctagttatgatcagtgtttcacaatgaatagacgatattatatcaaagaaagatttcattgaagaaacaaatcactttataagccaagaatctcttagaaagagaactacctggaattttcttcagaaagaaatgataatttcaagagttggctattctgaattgctaacatattttcaaaataatagcatatt

SEQ ID NO: 23048 - DNA, 599 bp, Chicken  19866894236011_2
  misc_feature (1)..(43): n is any nucleotide
nnnnnnnnnnnnnnnnnnnnnnnnnnnnnnnnnnnnnnnnnnnccagtttaaaatttgcccaaacagactagacagcactaaagtaatgctacgcttttgcgtagcaaactgttactctgacatgattgcttacacttcagtgattatactgccaacacacccagagaacgactcttatacttaggtggaatccctttactgaatagaatcatagagttgcttgggttggaaggtactttaaagatcatcttcttccaatccccctgagatgggcagggrgaatttgaaaaggattgagrtgaggggagagaaaaagtccagattcctcaagtaaatatactactatggacaaaagttctggttagaccaaacatttcmttcttcctagttatgatcagtgtttcacaatgaatagacgatattatatcaaagaaagatttcattgaagaaacaaatcactttataagccaagaatctcttagaaagagaactacctggaattttcttcagaaagaaatgataatttcaagagttggctattctgaattgctaacatattttcaaaataatagcatatttttcaaaataatgtaatgca

SEQ ID NO: 23049 - DNA, 600 bp, Chicken  19866894236011_3
taaagtaatgctacgcttttgcgtagcaaactgttactctgacatgattgcttacacttcagtgattatactgccaacacacccagagaacgactcttatacttaggtggaatccctttactgaatagaatcatagagttgcttgggttggaaggtactttaaagatcatcttcttccaatccccctgagatgggcagggrgaatttgaaaaggattgagrtgaggggagagaaaaagtccagattcctcaagtaaatatactactatggacaaaagttctggttagaccaaacatttcmttcttcctagttatgatcagtgtttcacaatgaatagacgatattatatcaaagaaagatttcattgaagaaacaaatcactttataagccaagaatctcttagaaagagaactacctggaattttcttcagaaagaaatgataatttcaagagttggctattctgaattgctaacatattttcaaaataatagcatatttttcaaaataatgtaatgcagatsacctagtctatctctcattaactctaattttaacaactcttcaggctttcataaagtttgattaaaaaaatagaga

SEQ ID NO: 23050 - DNA, 600 bp, Chicken  19866894236011_4
ggggagagaaaaagtccagattcctcaagtaaatatactactatggacaaaagttctggttagaccaaacatttcmttcttcctagttatgatcagtgtttcacaatgaatagacgatattatatcaaagaaagatttcattgaagaaacaaatcactttataagccaagaatctcttagaaagagaactacctggaattttcttcagaaagaaatgataatttcaagagttggctattctgaattgctaacatattttcaaaataatagcatatttttcaaaataatgtaatgcagatsacctagtctatctctcattaactctaattttaacaactcttcaggctttcataaagtttgattaaaaaaatagagaagcaagttatgatttgacaaagtccaacagctgatgtctgaattagcatggggatagtaaataatgtcccattcaaccaactgtcaaactgttgtcaataggcaactcatattccaccaacagccaagaacatttacagataggaaaaaaaaattgccttgtgttacagccaagcagaggaattcctcaactgattgcactgcgctgagaacgaagactaaaac

SEQ ID NO: 23051 - DNA, 556 bp, Chicken  19866894236011_5
tttcaagagttggctattctgaattgctaacatattttcaaaataatagcatatttttcaaaataatgtaatgcagatsacctagtctatctctcattaactctaattttaacaactcttcaggctttcataaagtttgattaaaaaaatagagaagcaagttatgatttgacaaagtccaacagctgatgtctgaattagcatggggatagtaaataatgtcccattcaaccaactgtcaaactgttgtcaataggcaactcatattccaccaacagccaagaacatttacagataggsaaaaaaaattgccttgtgttacagccaagcagaggaattcctcaactgattgcactgcgctgagaacgaagactaaaacacagagtggttcctgatatccaagtatcttaaaatgcaacagtttctacaaacaccattaaaattcatttcaaaacttgaaacaaagaaaacattagtttccacaggtcaaagtacagcttctgctaaatacacatatcttaaggagcgaattaagcctgttataaaagcattcctg

SEQ ID NO: 23052 - DNA, 600 bp, Chicken  19866894236014_1
gaggggactgatacgaatcctcactttaccaaatgaacatcattaatatgagacttgaaatgtggtgagatttcatgttgtacttagcaggatctgaaggttaattagctcagggcaaccttgtgactgccagcttctatgctgggaagggaggtggaggtatatggccaatcttccagggagtaactgaaccatcactttcggcaacagtctatacaatatggttttttaatttttctctctggtctgtgtcgatatttaataaccaattttgccagaggcaatgctgcaagaatctcrttctagggcgtagctactgaactctaatggcattatccttgtaacactgagaacgtttcttctaatacaagagcttggcctaaaaaatgcacatacgtttgctgtgcatctgctacattcagattcttgttccaaagcrtgaaagtcctagagcttcttcacagaaaacagcgcaacctgccaagtcatgtttgtgtagcttggcactagaaaaccacaaatcaagaaatgtctgaaaataagttcgcatggcaagaaggattggggaaccttattcctgggtagctggtaattcctttg

SEQ ID NO: 23053 - DNA, 600 bp, Chicken  19866894236014_2
tgctgggaagggaggtggaggtatatggccaatcttccagggagtaactgaaccatcactttcggcaacagtctatacaatatggttttttaatttttctctctggtctgtgtcgatatttaataaccaattttgccagaggcaatgctgcaagaatctcrttctagggcgtagctactgaactctaatggcattatccttgtaacactgagaacgtttcttctaatacaagagcttggcctaaaaaatgcacatacgtttgctgtgcatctgctacattcagattcttgttccaaagcrtgaaagtcctagagcttcttcacagaaaacagcgcaacctgccaagtcatgtttgtgtagcttggcactagaaaaccacaaatcaagaaatgtctgaaaataagttcgcatggcaagaaggattggggaaccttattcctgggtagctggtaattcctttgcatccctgagctgctgtctgggctcacagaagtaagcagcgagctcatgatttgcaacgcgctaaagctgagctgcaggggctggatggaagctgttgtatggtaatagcatctcagtgtgtgggagatcttttggcat

SEQ ID NO: 23054 - DNA, 600 bp, Chicken  19866894236014_3
tctcagtgtgtgggagatcttttggcatctccctgaaactttctatttctgtccaaattgggaaaggagggagggaggaaacagggcaggcctgtgtgatgtgtgttgctgctctccatgaacacagcttgtgcacttttgtgccagctgcattttcttttaccatcttgatcaaatgctagggatagcctcttcaatgtcttactcaattttcatgcaggccccgatgcagatttctcagtgagatgattcttatttgtacaaagattcttttatagtttccttggaaatagtaaatarcttttttttctttttaatgacatgaatctgtcatgaaggctgctgtggttatttcacctgcgtaagaatcccaaatgcattgaaatggcagcataatgttttgcttacrttgtatattttgctacagacctctttagggttcagtggctagggggatgacttgtttggcttctgctgtcttcaggctaaatcctactgaagtcctgaagaaataatttgccttttccatacttagaagagggagagagagatttgaggaagatggcatgggggtggagcagcagaactaaactgctgatc

SEQ ID NO: 23055 - DNA, 600 bp, Chicken  19866894236014_4
tgctctccatgaacacagcttgtgcacttttgtgccagctgcattttcttttaccatcttgatcaaatgctagggatagcctcttcaatgtcttactcaattttcatgcaggccccgatgcagatttctcagtgagatgattcttatttgtacaaagattcttttatagtttccttggaaatagtaaatarcttttttttctttttaatgacatgaatctgtcatgaaggctgctgtggttatttcacctgcgtaagaatcccaaatgcattgaaatggcagcataatgttttgcttacrttgtatattttgctacagacctctttagggttcagtggctagggggatgacttgtttggcttctgctgtcttcaggctaaatcctactgaagtcctgaagaaataatttgccttttccatacttagaagagggagagagagatttgaggaagatggcatgggggtggagcagcagaactaaactgctgatctgagataaatcattacgctctagtttacctcctttgtaaaaacaagttactggtgctgtttctagtatatttcctggaaacaaacaaacaagaagccagcaccaccaaa

SEQ ID NO: 23056 - DNA, 599 bp, Chicken  19866894236020_1
  misc_feature (1)..(41): n is any nucleotide
nnnnnnnnnnnnnnnnnnnnnnnnnnnnnnnnnnnnnnnnntgtactatgcaccaagagaagtaggattcctgtggggaaaaataatatgtaattatgtaattaattaaagacttacttcttaatgatttaatgcaaagggacagaactaagtccgcctgagaatatttaaaattggcatttgcttactttttaaggagtttactcagcagcttaaacatatctttaagtataaattttatatgaaaatccaaggtttttgtttcaaaccagaagaaatgtttatatattgagctgcaaycacatccctatcagagattagcagcaagctttattttgtgaacaaaagcatagagaataaggaaatgggtttgagtggcctccatttaacacatcacttctatcagtatgatctcagtaactttagtagacatctaacagaataatgctgataattttaacttaatgtcgccatttagagcaagataggctaggataaatagatcgatagatagatcaatcaatagatagatagataaaagcctttaagtctgcatggtctttcatccttcattactgtataagtaaataactccttta

SEQ ID NO: 23057 - DNA, 600 bp, Chicken  19866894236028_1
actgctagaaaaaaatggggcaaatccatggagttctgagaaagtatttctgctttcaacagcagaggctttgctgcaaaaaaaacatggaagtaggtgcaatctcaattgtttctatgcttctatccagagcttcagaggctgggaaacttaattgcttttcaggatcatctcttatcaagtgcctgcagaaatctaacagcacttctagaaaaatctgcaaagccttcaatatttcccctcctactgcaacaactctgcaaaaatgtaccttttcactccatagcctgaatgaatttmaatcagttcagtctaatagtatgcaaattacaataattagcattaatgaaaaatgaaaacactaggaactttctgggaaaaaaaaaaaaagcataaagtcaaaagcaaacacaaaaggaagcagaggccctaaatgagccatccaatatgcacagcattaagcacatgcttgagtctcagtattcgattaaaaacatgcctagctgtctctctacagcaggactggagagactgttggtactaaagcagaagaaagcacttggtttgcaagcattaacaaaaaaatttaactatgcacac

SEQ ID NO: 23058 - DNA, 599 bp, Chicken  19866894236034_1
  misc_feature (1)..(219): n is any nucleotide
nnnnnnnnnnnnnnnnnnnnnnnnnnnnnnnnnnnnnnnnnnnnnnnnnnnnnnnnnnnnnnnnnnnnnnnnnnnnnnnnnnnnnnnnnnnnnnnnnnnnnnnnnnnnnnnnnnnnnnnnnnnnnnnnnnnnnnnnnnnnnnnnnnnnnnnnnnnnnnnnnnnnnnnnnnnnnnnnnnnnnnnnnnnnnnnnnnnnnnnnnnnnnnnnnnnnnnnnnnnctactggtaacgtggagaggcatgcttttataaactctttttcctttgctgccactagttgtatttctgactttgaaaggyaatgcatttagaaaactgaatgagctagaaactactggcactggaaatgacacccttctctgtccttcatatattcacatagctgcaagtttgctcctgttgtgttgctttgtgtagggtgtcccagtattcccatgggtactgtctgggctctgagctcgagtgacatttctggtgaaacctcttgtcctcaaatgggtatgaagtgaaagctggttgcaagtgcaagcttgtaaacattaggttttatgacttgatttttaaaaaataaawttaatgagacatgttagagtgatcac

SEQ ID NO: 23059 - DNA, 600 bp, Chicken  19866894236034_2
ctagttgtatttctgactttgaaaggyaatgcatttagaaaactgaatgagctagaaactactggcactggaaatgacacccttctctgtccttcatatattcacatagctgcaagtttgctcctgttgtgttgctttgtgtagggtgtcccagtattcccatgggtactgtctgggctctgagctcgagtgacatttctggtgaaacctcttgtcctcaaatgggtatgaagtgaaagctggttgcaagtgcaagcttgtaaacattaggttttatgacttgatttttaaaaaataaawttaatgagacatgttagagtgatcacttagtttgtttttactttttacttatttattttacctggattcaagagaaattctaaactgttcatattacaaacttgaggtggcttgcttcaaaacgtgcttggcaggtgcagcatcttgccagtagtggaaaccagctgtgggcactccagtgmcactcctttctcccagctgggttgtctgcaggctcctggggaagagcagctagctgtctgacctggagagccccttctggaggtctgtcaggagcagaattccccagcagcctttgcc

SEQ ID NO: 23060 - DNA, 600 bp, Chicken  19866894236034_3
agctcgagtgacatttctggtgaaacctcttgtcctcaaatgggtatgaagtgaaagctggttgcaagtgcaagcttgtaaacattaggttttatgacttgatttttaaaaaataaawttaatgagacatgttagagtgatcacttagtttgtttttactttttacttatttattttacctggattcaagagaaattctaaactgttcatattacaaacttgaggtggcttgcttcaaaacgtgcttggcaggtgcagcatcttgccagtagtggaaaccagctgtgggcactccagtgmcactcctttctcccagctgggttgtctgcaggctcctggggaagagcagctagctgtctgacctggagagccccttctggaggtctgtcaggagcagaattccccagcagcctttgccatttgctattcccttggcttgtgccttcrcttttctgtaggtgaggaaggcaaatagcccctatccctgactcctgttttttgcatggcttctgttctttaaatgtttctctttcttttcacattttatttttttctctccctatcctttcattaaaacaaacattttttttttttcagtgt

SEQ ID NO: 23061 - DNA, 600 bp, Chicken  19866894236034_4
gtttgtttttactttttacttatttattttacctggattcaagagaaattctaaactgttcatattacaaacttgaggtggcttgcttcaaaacgtgcttggcaggtgcagcatcttgccagtagtggaaaccagctgtgggcactccagtgmcactcctttctcccagctgggttgtctgcaggctcctggggaagagcagctagctgtctgacctggagagccccttctggaggtctgtcaggagcagaattccccagcagcctttgccatttgctattcccttggcttgtgccttcrcttttctgtaggtgaggaaggcaaatagcccctatccctgactcctgttttttgcatggcttctgttctttaaatgtttctctttcttttcacattttatttttttctctccctatcctttcattaaaacaaacattttttttttttcagtgttcagtctgccaggagcacttgttgctttgacaacgagtcctaatggatgtgggagtttctgctttctgcaaaatgcactctacacycttttgtttctctgtgtggctttcctcacacctgttttggagtaccttctgtcttttcttc

SEQ ID NO: 23062 - DNA, 600 bp, Chicken  19866894236034_5
gtcaggagcagaattccccagcagcctttgccatttgctattcccttggcttgtgccttcrcttttctgtaggtgaggaaggcaaatagcccctatccctgactcctgttttttgcatggcttctgttctttaaatgtttctctttcttttcacattttatttttttctctccctatcctttcattaaaacaaacattttttttttttcagtgttcagtctgccaggagcacttgttgctttgacaacgagtcctaatggatgtgggagtttctgctttctgcaaaatgcactctacacycttttgtttctctgtgtggctttcctcacacctgttttggagtaccttctgtcttttcttctctgctttctctttgacttgtcacttgccagaagaaaagatattgctattatgacaccgctgacttggctggctgaactgatcactgggagcagagtagccagtattagtaagtgggctgtttcctgagcctgcagccctgtcaaatcgagcagcaggtggaaagctgctggctttcaaggagtcagtctgcctctagtgctgtgatcctgtgtgcagactgggagagcccaacgcaac

SEQ ID NO: 23063 - DNA, 600 bp, Chicken  19866894236034_6
agccaggtgcttgaaaagaagggtgctccttccttgaatttggctaacacttagtgaactcttatcacacctatttgatagcagcggctaacagaaatacaaacagcagggggcaaatcttagcaaacatagcacaaaaataaaataccaggaagtcctttggaaagctgtcagccctcttgtcactcttttagttcccaaaaataattgttctcgcctgtccgggacttacaggattgtgctttctaagtactttatgcttgttttcattttggttgatctctttgttccaggatttcrgcagctcttcatcttacctgtatttgagactttgtaatgcctagcaagaatgtgttttgcattgtaaaggttttactacttcattatctttagaatagtttttgggtcttttatgtcacttttcaggccatatttctattaattaagaagtaaaatttccatttataataatggtacatctgaaatcttagctaagccagagccagttgagcaaaaagaccttatcagtgactaaagtgatgtttgaaaagtacacgacgcctcagcaaagccactaacttgttaggaggtgtggagaaa

SEQ ID NO: 23064 - DNA, 600 bp, Chicken  19866894236036_1
tctagacaggtgtaaaattggcatcgtcgggagctgagcacatgaaaccattctctgcagctctatgtatgagaattgctctgacatcgggaatgaactatggccaacttgtaaggatctcatgcttgcttactttctatgtttttatgttgattttaaaatcacaatttttcttcttaatacgtatgtggctttagaagcagaaaaactaaagaatgcctcactgtcctatgaatcttcttctgtgcttgctaacacttcacctgttgttaatataagtcccttgttccataactctgyatgtatttttaattttcagctgtgtgaatatggctgtcacgagaagaatgcaaaatccacattcccgaagtttacacatttctttaggatagtctgaaacaaatcccacagtgtcctggatttaaaaggcccaagagaccaaaagcttgtcatttgttatttctgacaaacaaaatctcccaggtttccacaaatcaaagaaacagtttccttacaatgtcgagttggaaaaggatgggcagagaggcgagaaatgagcttctctgtaggaagctggcagaggttctattcatgctctgg

SEQ ID NO: 23065 - DNA, 600 bp, Chicken  19866894236038_1
ttttagcaggtacattatgcggaagatgtccattttcacagttcatctgctgcccttgattttggggtggaggcagcgaggatagaacctaaccccctgggcacatggcttcttttgtgctcctcagagcagtcaccactggggcactgttgctgggtggaagcagacaagtgctgccccttctgcccattaccctacctgcctgcatgagctgcctatcaaattctttatctggttgagggccgccaaggccctgcctgccctagtggggtggagtgagggtgaaagagtgccaagggrgtatttcctctcaggatgtggtggtggctccttgggtgtcttgtgattcctgtacaggagaggtctgttytgggtgtgcagaatgatctcttggaggccaccaccatgctcactttaaaagcttctttctcccgtaggtatcagattatggctggaggtgccaaaggttccagtttctgttatgttttacttgaagcactggaggtttttttgygttctgggtttttagcccttagagcaaacttcaatagcatatccaggtttctcttttcaaggctaaaatctcaygctcaggaggtt

SEQ ID NO: 23066 - DNA, 600 bp, Chicken  19866894236038_2
aggcagcgaggatagaacctaaccccctgggcacatggcttcttttgtgctcctcagagcagtcaccactggggcactgttgctgggtggaagcagacaagtgctgccccttctgcccattaccctacctgcctgcatgagctgcctatcaaattctttatctggttgagggccgccaaggccctgcctgccctagtggggtggagtgagggtgaaagagtgccaagggrgtatttcctctcaggatgtggtggtggctccttgggtgtcttgtgattcctgtacaggagaggtctgttytgggtgtgcagaatgatctcttggaggccaccaccatgctcactttaaaagcttctttctcccgtaggtatcagattatggctggaggtgccaaaggttccagtttctgttatgttttacttgaagcactggaggtttttttgygttctgggtttttagcccttagagcaaacttcaatagcatatccaggtttctcttttcaaggctaaaatctcaygctcaggaggttttagagaatttaaaaaaaaaaaaaaaaaaaaaaagcagttgatattatgtcacttggcattaaaatggtg

SEQ ID NO: 23067 - DNA, 600 bp, Chicken  19866894236038_3
cctatcaaattctttatctggttgagggccgccaaggccctgcctgccctagtggggtggagtgagggtgaaagagtgccaagggrgtatttcctctcaggatgtggtggtggctccttgggtgtcttgtgattcctgtacaggagaggtctgttytgggtgtgcagaatgatctcttggaggccaccaccatgctcactttaaaagcttctttctcccgtaggtatcagattatggctggaggtgccaaaggttccagtttctgttatgttttacttgaagcactggaggtttttttgygttctgggtttttagcccttagagcaaacttcaatagcatatccaggtttctcttttcaaggctaaaatctcaygctcaggaggttttagagaatttaaaaaaaaaaaaaaaaaaaaaaagcagttgatattatgtcacttggcattaaaatggtggcaggtaagttaatatgcattctaaattctgcctggagtgagcccatgtgaattctcagttatctgttaaaggtcaccgtgttacggtatgagtcattggcttatgatagtattatagtttactcatactttgtccttctggaa

SEQ ID NO: 23068 - DNA, 600 bp, Chicken  19866894236038_4
agtgccaagggrgtatttcctctcaggatgtggtggtggctccttgggtgtcttgtgattcctgtacaggagaggtctgttytgggtgtgcagaatgatctcttggaggccaccaccatgctcactttaaaagcttctttctcccgtaggtatcagattatggctggaggtgccaaaggttccagtttctgttatgttttacttgaagcactggaggtttttttgygttctgggtttttagcccttagagcaaacttcaatagcatatccaggtttctcttttcaaggctaaaatctcaygctcaggaggttttagagaatttaaaaaaaaaaaaaaaaaaaaaaagcagttgatattatgtcacttggcattaaaatggtggcaggtaagttaatatgcattctaaattctgcctggagtgagcccatgtgaattctcagttatctgttaaaggtcaccgtgttacggtatgagtcattggcttatgatagtattatagtttactcatactttgtccttctggaagttctagcattgcaacaggaaattaatgttttcatatctgaaattagaaaaaaaaaacaaaacaaaacagctca

SEQ ID NO: 23069 - DNA, 600 bp, Chicken  19866894236048_1
tgctaatattccactacattttgttgctgtgcaacagatggcagcagaagtctgaaaaaaatggtgtctgacatggaagtgcatatgaagcaaaaacatttaactgaatatctccatataggaaaaaattgcacccattgacattcatcaacacttgctggacactgaccaaacagtggatgtgagcagggtgaggtggtggatactgtttttcagcagtggcaacagtgatgtgaaagacaagcaatgttctgcatagccatacacatctgtcacactacaaaatgaagagcatctatrttcagctcatccattcaaatcagcagataacaaccatgaaactgagtacagagctgagtataagcttcagtgcattggaaactgtggcaacattggaatatcacagtttgaacaagatggctacatgaatactcacacagaaaaaaaacactagttgcaagcctgcctggacctattgaacaaatacaggatgaaggtaaccgtttcctagacagtttcacattgttaccagtgacaagccatcaaatctgaccaaagtgatgctaacaaaaattcaaacttccagagtcagggcaaaga

SEQ ID NO: 23070 - DNA, 600 bp, Chicken  19866894236048_2
gctgagtataagcttcagtgcattggaaactgtggcaacattggaatatcacagtttgaacaagatggctacatgaatactcacacagaaaaaaaacactagttgcaagcctgcctggacctattgaacaaatacaggatgaaggtaaccgtttcctagacagtttcacattgttaccagtgacaagccatcaaatctgaccaaagtgatgctaacaaaaattcaaacttccagagtcagggcaaagaagacaatctatttcttgcaccacagtaacaccagggcccgtgttgatttgamgattgtagagcacattgtttatcttgtctgaactgtcctaccaaacccaccatayagtcagtatttggctccttctggattgcrtctgtttgatggagggctgatgaaggatggactgcattggcaacactttcctagaaacaatgccctcaaagcagctgtgaagctgtcagtcatttccactggtgcagatttttatgagcattacatgcaggctcttgttcaaatccggtgaaagtgcgtagctaatgatgattaaacattgaaaaatagtgttttgtagctgagaatttgctctat

SEQ ID NO: 23071 - DNA, 600 bp, Chicken  19866894236048_3
ttgaacaagatggctacatgaatactcacacagaaaaaaaacactagttgcaagcctgcctggacctattgaacaaatacaggatgaaggtaaccgtttcctagacagtttcacattgttaccagtgacaagccatcaaatctgaccaaagtgatgctaacaaaaattcaaacttccagagtcagggcaaagaagacaatctatttcttgcaccacagtaacaccagggcccgtgttgatttgamgattgtagagcacattgtttatcttgtctgaactgtcctaccaaacccaccatayagtcagtatttggctccttctggattgcrtctgtttgatggagggctgatgaaggatggactgcattggcaacactttcctagaaacaatgccctcaaagcagctgtgaagctgtcagtcatttccactggtgcagatttttatgagcattacatgcaggctcttgttcaaatccggtgaaagtgcgtagctaatgatgattaaacattgaaaaatagtgttttgtagctgagaatttgctctatcaaatggagtaattgtgctccctgtgtctatcgtagtttccgtggaaatcaatag

SEQ ID NO: 23072 - DNA, 600 bp, Chicken  19866894236048_4
acagaaaaaaaacactagttgcaagcctgcctggacctattgaacaaatacaggatgaaggtaaccgtttcctagacagtttcacattgttaccagtgacaagccatcaaatctgaccaaagtgatgctaacaaaaattcaaacttccagagtcagggcaaagaagacaatctatttcttgcaccacagtaacaccagggcccgtgttgatttgamgattgtagagcacattgtttatcttgtctgaactgtcctaccaaacccaccatayagtcagtatttggctccttctggattgcrtctgtttgatggagggctgatgaaggatggactgcattggcaacactttcctagaaacaatgccctcaaagcagctgtgaagctgtcagtcatttccactggtgcagatttttatgagcattacatgcaggctcttgttcaaatccggtgaaagtgcgtagctaatgatgattaaacattgaaaaatagtgttttgtagctgagaatttgctctatcaaatggagtaattgtgctccctgtgtctatcgtagtttccgtggaaatcaataggaggcattacttttcaagtgatctgccta

SEQ ID NO: 23073 - DNA, 599 bp, Chicken  19866894236053_1
  misc_feature (1)..(26): n is any nucleotide
nnnnnnnnnnnnnnnnnnnnnnnnnnctgctgccccaaacagtcctttcggtagaaaggtgtgtggtggaggtgttaaagttgtatgctgttgcgtagaaaagttattggtaagaagtgactccgtagtaggtgcacttacgctgccttggggtagaggtgcactttcactttaaaaatacatatatatctgaaaccagtctgtagggggaaacacattgcccttactgcctggatggctccggtccgaagggaaagccttgccaaaggaaacatggggggggaaaaggtctgcctgatmacctgtatggaagggctcaccgatgaagtacaaataatgaattttctgatcttggtgtgctattgcactgtcttgtggcacaagtaccttggtgtacaggtgacaggtctgatagtgacaaggctttggtgttactggtgcatgacaatatggatatcagccagcagtgtgccctcgcagccctgataacaaactgcatcctgggaagcgtggccagcagggagagggaggtgatcctgccatctgctctgtgctggtgaggcgtcacctggagtactgcatccaggtgcggagtcctc

SEQ ID NO: 23074 - DNA, 600 bp, Chicken  19866894236054_1
tagctttactctgcacttctcacacaaccttggcaagttgttttatctttctgcatcataaatttcccatatgtaaaacaaatagcaaagttcttaccctacaggaatcctcgtggtttagttcattaatgtgtgtaaagcagtaaatagaaaaaggcactgcaaaaatctagaatattgccgttgataaagctatgagtctattggcatcccctttttacagtccaggtgatgataggattcacatcaaagctgcagtgcaaatttgtacaaatgtgatctacatctggagtgagaacygatgcatgtgttgtgytccccaaagaaatatttactcagctgcagaataagtattgttttagcaaacatcaaaatggtgggagtttaagacactcgactggcagtaacctaattaactcttgatcaaatatttcagatgctggaatcaagctgattacatccgcagttccagctgaagacagtatgctgggaactaacgtagggtcaactgttggactagagttaaatagcacagagttgttgatttcagaggagccatgctgattaactgcagatgaggctttggctcatgctctttta

SEQ ID NO: 23075 - DNA, 600 bp, Chicken  19866894236054_2
ttctcacacaaccttggcaagttgttttatctttctgcatcataaatttcccatatgtaaaacaaatagcaaagttcttaccctacaggaatcctcgtggtttagttcattaatgtgtgtaaagcagtaaatagaaaaaggcactgcaaaaatctagaatattgccgttgataaagctatgagtctattggcatcccctttttacagtccaggtgatgataggattcacatcaaagctgcagtgcaaatttgtacaaatgtgatctacatctggagtgagaacygatgcatgtgttgtgytccccaaagaaatatttactcagctgcagaataagtattgttttagcaaacatcaaaatggtgggagtttaagacactcgactggcagtaacctaattaactcttgatcaaatatttcagatgctggaatcaagctgattacatccgcagttccagctgaagacagtatgctgggaactaacgtagggtcaactgttggactagagttaaatagcacagagttgttgatttcagaggagccatgctgattaactgcagatgaggctttggctcatgctcttttaactggaagctaaagaa

SEQ ID NO: 23076 - DNA, 600 bp, Chicken  19866894236064_1
tggactcaggacttctaagctaagcaaagttctttcagtctcttaccacaagatatgctttctgtcatcccgatcattgcacatgctcttttgtaaaacctttattttaaaaggtcactgttttttatctgcaacttgcacttatttccaagtatcagcacatttaaaaaagtaaatgacataaaaacagatcatgctggagaaagagtagtagcctgaagttataaaaagctctagctgtaaaaaggttaagggagagaagcacctgcagtaaagaaagaagattctgaagtcaccagsctgtgatttagtgstgcctttcaaaaacaaacatatgatctgtaatgataatgacaaaggcatttgtgcttgttacgttttattggytttgtttgttgtctttttgttttgtttttaaccagatgaattatacgcataaaagcttgctggtatttttgaaatatgattggccaatatttcaccaagaccttttacaatggtgcaaacactttcccagtctctgaatgttcrcattctaggaagacttcagtctttttcagagctacatcacataattattctatgattaactgtgtctct

SEQ ID NO: 23077 - DNA, 600 bp, Chicken  19866894236064_2
ctaagctaagcaaagttctttcagtctcttaccacaagatatgctttctgtcatcccgatcattgcacatgctcttttgtaaaacctttattttaaaaggtcactgttttttatctgcaacttgcacttatttccaagtatcagcacatttaaaaaagtaaatgacataaaaacagatcatgctggagaaagagtagtagcctgaagttataaaaagctctagctgtaaaaaggttaagggagagaagcacctgcagtaaagaaagaagattctgaagtcaccagsctgtgatttagtgstgcctttcaaaaacaaacatatgatctgtaatgataatgacaaaggcatttgtgcttgttacgttttattggytttgtttgttgtctttttgttttgtttttaaccagatgaattatacgcataaaagcttgctggtatttttgaaatatgattggccaatatttcaccaagaccttttacaatggtgcaaacactttcccagtctctgaatgttcrcattctaggaagacttcagtctttttcagagctacatcacataattattctatgattaactgtgtctctgtctttatcaccca

SEQ ID NO: 23078 - DNA, 600 bp, Chicken  19866894236064_3
cttttgtaaaacctttattttaaaaggtcactgttttttatctgcaacttgcacttatttccaagtatcagcacatttaaaaaagtaaatgacataaaaacagatcatgctggagaaagagtagtagcctgaagttataaaaagctctagctgtaaaaaggttaagggagagaagcacctgcagtaaagaaagaagattctgaagtcaccagsctgtgatttagtgstgcctttcaaaaacaaacatatgatctgtaatgataatgacaaaggcatttgtgcttgttacgttttattggytttgtttgttgtctttttgttttgtttttaaccagatgaattatacgcataaaagcttgctggtatttttgaaatatgattggccaatatttcaccaagaccttttacaatggtgcaaacactttcccagtctctgaatgttcrcattctaggaagacttcagtctttttcagagctacatcacataattattctatgattaactgtgtctctgtctttatcacccattttcaatttacagtagacttcttattagcagttcttaagtacctgacattgtactagaacatttcattccat

SEQ ID NO: 23079 - DNA, 600 bp, Chicken  19866894236064_4
ctctagctgtaaaaaggttaagggagagaagcacctgcagtaaagaaagaagattctgaagtcaccagsctgtgatttagtgstgcctttcaaaaacaaacatatgatctgtaatgataatgacaaaggcatttgtgcttgttacgttttattggytttgtttgttgtctttttgttttgtttttaaccagatgaattatacgcataaaagcttgctggtatttttgaaatatgattggccaatatttcaccaagaccttttacaatggtgcaaacactttcccagtctctgaatgttcrcattctaggaagacttcagtctttttcagagctacatcacataattattctatgattaactgtgtctctgtctttatcacccattttcaatttacagtagacttcttattagcagttcttaagtacctgacattgtactagaacatttcattccatttctattaatgctgctttaaggtcaccttgaacttccagtatattattctcatcatcttatgcattgtcattgtatctcaaatttgaatcttgagtttgtttttgtggcccataatatcttcatgatttaacagttcaggacaa

SEQ ID NO: 23080 - DNA, 599 bp, Chicken  19866894236068_1
  misc_feature (1)..(220): n is any nucleotide
nnnnnnnnnnnnnnnnnnnnnnnnnnnnnnnnnnnnnnnnnnnnnnnnnnnnnnnnnnnnnnnnnnnnnnnnnnnnnnnnnnnnnnnnnnnnnnnnnnnnnnnnnnnnnnnnnnnnnnnnnnnnnnnnnnnnnnnnnnnnnnnnnnnnnnnnnnnnnnnnnnnnnnnnnnnnnnnnnnnnnnnnnnnnnnnnnnnnnnnnnnnnnnnnnnnnnnnnnnnnctgagctgcagtctgccatggttgtagacacggcctttcatttccactggcatttgaggaaacatttccagacaagcagrgtgtccacatgatgcacattatctttccctcgcagaaagctgcatgccaggcccatgcagtcaagaagagaaatgggaagtattcacagattaactgcagggaggtcaataaacagacgttgggccgggaaacaactggaaaactcccaagatagttcttgacatgacaaccacacctgctgtatcggatcggtcacacaggttgtgaactttggcagtaaatggcttatttcatgtgcatctgtgcagcacgtggcacagtgaaggtcttggctttagggaatatagctgtatcttgg

SEQ ID NO: 23081 - DNA, 600 bp, Chicken  19866894236068_2
acaactggaaaactcccaagatagttcttgacatgacaaccacacctgctgtatcggatcggtcacacaggttgtgaactttggcagtaaatggcttatttcatgtgcatctgtgcagcacgtggcacagtgaaggtcttggctttagggaatatagctgtatcttggaaactcagagcaacctgaagataaactaatgaaatcccctcagcctatttatatgcagaagagacaagaatgtgtgtaccacatgctggctttgaaaaaaccttggaaatttaataaagctgttatttaagrggttagagaagtagcaaccatgagctgacaaggaacaatagaacaggcagctgttaacaccaccttatgtgtgtggcagacatgcccctttcctgaggatgttatgagctaaaatgatattttaatcagctaaaactgttgaggtgactgtagaaaaacatgattttgctatcaaaactcttctgacaaggctggaatgaaaaattagtgttgctacataaaaagtcataggtttcataaaacaaaacaaaacaaaacaaaacaaaaacagttttggaatgtatgttttctggttgtcct

SEQ ID NO: 23082 - DNA, 497 bp, Chicken  19866894236070_1
ttttgtgagtaaaatttaagcaaagataggaatgataaaattaaagaatatattgtgcacatttcaagatgctgacagaaagtatttggccttgcatacaagaagtgctcgatgaaaacagaaacagagatttcctttacctttctcaagaccggtacctcatttgatcatttgtgatgaaaactctttttctgcttatctaaggattttgtttactacaatggtattttttggtcttttgtttccaaagttgattggagccaaacaaaattattaaaaataccaatatttcatcagttytactgttactaacaaatacccagatctcacaggtactctcagagccacattttgcagatgcactatacttgtgtcagactagacagcaagatgaaagaaatccactaatacaaatacactgagattgtcctattgttttctcactgaaaattaacattttaacatagacaaaaagaaataaaaatagtaatagtaaa

SEQ ID NO: 23083 - DNA, 600 bp, Chicken  19866894236071_1
tcagacctgcaacaaaaccagaggaacaaaaatcaaaatcacgctggcctgctgaatccctccttatcttttccgaaatgccactgtctccgttccaaaactaataacgataaaaacagatggaattaaaaataggacccgatgaagaagtgaagggattggcttttttcagatcatcccagacaaaagttcaccaggaattaaatgcacttcctgtccagctccacagccacgttacttagcctagcaaggagatcatctgaacaatctcaggggctcgggtgttaattggcttcattyctattagcaggtattgacacagagttatatctaacaatgcttcagcacagggtggtttccagcagacrctgaaggaggtaggtgtgggaagaactggccataaacgaagaccttacattggtcttayagaagagaaaatttattttgatctttgtactatgctttagggctcatactgaacaaaaaaagcttaccttgattcagagaacaaaatgaaatacactccagagagagttcccttaggccttatctcactgtggatcaaaactcagcggatccaagaatgccgatttcgatgtg

SEQ ID NO: 23084 - DNA, 600 bp, Chicken  19866894236071_2
ttttccgaaatgccactgtctccgttccaaaactaataacgataaaaacagatggaattaaaaataggacccgatgaagaagtgaagggattggcttttttcagatcatcccagacaaaagttcaccaggaattaaatgcacttcctgtccagctccacagccacgttacttagcctagcaaggagatcatctgaacaatctcaggggctcgggtgttaattggcttcattyctattagcaggtattgacacagagttatatctaacaatgcttcagcacagggtggtttccagcagacrctgaaggaggtaggtgtgggaagaactggccataaacgaagaccttacattggtcttayagaagagaaaatttattttgatctttgtactatgctttagggctcatactgaacaaaaaaagcttaccttgattcagagaacaaaatgaaatacactccagagagagttcccttaggccttatctcactgtggatcaaaactcagcggatccaagaatgccgatttcgatgtgggagatgtgtgagcctgtataagtgctggtcgctaagaggcctcctggcacagctaagagctacttca

SEQ ID NO: 23085 - DNA, 600 bp, Chicken  19866894236071_3
aaaaataggacccgatgaagaagtgaagggattggcttttttcagatcatcccagacaaaagttcaccaggaattaaatgcacttcctgtccagctccacagccacgttacttagcctagcaaggagatcatctgaacaatctcaggggctcgggtgttaattggcttcattyctattagcaggtattgacacagagttatatctaacaatgcttcagcacagggtggtttccagcagacrctgaaggaggtaggtgtgggaagaactggccataaacgaagaccttacattggtcttayagaagagaaaatttattttgatctttgtactatgctttagggctcatactgaacaaaaaaagcttaccttgattcagagaacaaaatgaaatacactccagagagagttcccttaggccttatctcactgtggatcaaaactcagcggatccaagaatgccgatttcgatgtgggagatgtgtgagcctgtataagtgctggtcgctaagaggcctcctggcacagctaagagctacttcagcatccactgattccagccccacgaaaaccttcagacaggtttggttttgaggtcacct

SEQ ID NO: 23086 - DNA, 600 bp, Chicken  19866894236079_1
tcaaagtgggaccggagtaaacgtgaaaatgtagtcaataacccagtagaaatataaatgctccaagtacagacaccctcattaaaatgtttttgaaaccataaactgccagaaatacacttttgaagaaccctttcaggcaggtatttttccggccaattttgagtaacaatcttcaagaaccacatttaaatctcagccttagcttcggactgtgggctgccgctccattgaagtggaacggccgccactttgcaagtggtaaaactgcaagcatcactgccaccgcgtcactccacratgcttctcgagggcctctgcaaacagctgrtgctgtggggcatggcaactcagcctgctgcagctctgtcaccaggtacaaggacaacctcgcacttcagttttgtacgcatatacacgcagcatttggagcttcagcttctgctcaactaattaactaatgggctacctgcttaattacaactccagcagagatagtactttctaaatgagtgaaagtgcaaagcatctccgtagctgctaatataatcagagtggtataaacaacgctgagtagttatgtgtaaaagacccactttg

SEQ ID NO: 23087 - DNA, 600 bp, Chicken  19866894236079_2
tagtcaataacccagtagaaatataaatgctccaagtacagacaccctcattaaaatgtttttgaaaccataaactgccagaaatacacttttgaagaaccctttcaggcaggtatttttccggccaattttgagtaacaatcttcaagaaccacatttaaatctcagccttagcttcggactgtgggctgccgctccattgaagtggaacggccgccactttgcaagtggtaaaactgcaagcatcactgccaccgcgtcactccacratgcttctcgagggcctctgcaaacagctgrtgctgtggggcatggcaactcagcctgctgcagctctgtcaccaggtacaaggacaacctcgcacttcagttttgtacgcatatacacgcagcatttggagcttcagcttctgctcaactaattaactaatgggctacctgcttaattacaactccagcagagatagtactttctaaatgagtgaaagtgcaaagcatctccgtagctgctaatataatcagagtggtataaacaacgctgagtagttatgtgtaaaagacccactttggccatatgctataactagaatagccaattgc

SEQ ID NO: 23088 - DNA, 600 bp, Chicken  19866894236083_1
aattagctttatatttgcatttttattagggaagatgacattgaaagcaagcttctgtgtaatccacaagtgctccactgaattgctttacacctattgtgtgcagcccatttaacaccagaaagcagcctagcaaggtttctcactcatttaggtgaaagtctcaagtattgtagtatttatgtgtaagagttaaaacccttgctcagaagttagagaagctttctcatatacaagattgcttccactttcttgatctcttttttccatcagtggcctcaaaggatggctttttgtgartgttagagagcccacacccgatataccattaagatattaagcagattgtattattcattcactcttgagtattttgatggtatttgtgtgtactttgtcagattaaatatttcaaactctgctcatcttcatttataagtcaactcacacagttcttgtccaattcatttgtactcggtgagacagtactcagaagcaataacatatctgccctccacctccaaaaatactgcagtgtggtaaaggaaagaaggcaggatgatcaattctgtcaaacacagtccttttgtatattagtcc

SEQ ID NO: 23089 - DNA, 600 bp, Chicken  19866894236083_2
tagagagcccacacccgatataccattaagatattaagcagattgtattattcattcactcttgagtattttgatggtatttgtgtgtactttgtcagattaaatatttcaaactctgctcatcttcatttataagtcaactcacacagttcttgtccaattcatttgtactcggtgagacagtactcagaagcaataacatatctgccctccacctccaaaaatactgcagtgtggtaaaggaaagaaggcaggatgatcaattctgtcaaacacagtccttttgtatattagtccagwtctggaaggaagaagcagtataggagttctgcttccactcctgggatccttgtcccaccagtcagtggacaaaagactccaatgatagatgaggtggctgtgctgtccaccttactgagtccagtcccatgacccagacagcccatgactaaacctcacragtgcagctgctgatctatccattcatttcaggcaattcctcttcacagacctgcatctcctttctgggatggtgaaatcctgtgggctccacttcaagggattttcaaagaggagaaagcaatgaaagcaggatcttgg

SEQ ID NO: 23090 - DNA, 600 bp, Chicken  19866894236083_3
ttcatttgtactcggtgagacagtactcagaagcaataacatatctgccctccacctccaaaaatactgcagtgtggtaaaggaaagaaggcaggatgatcaattctgtcaaacacagtccttttgtatattagtccagwtctggaaggaagaagcagtataggagttctgcttccactcctgggatccttgtcccaccagtcagtggacaaaagactccaatgatagatgaggtggctgtgctgtccaccttactgagtccagtcccatgacccagacagcccatgactaaacctcacragtgcagctgctgatctatccattcatttcaggcaattcctcttcacagacctgcatctcctttctgggatggtgaaatcctgtgggctccacttcaagggattttcaaagaggagaaagcaatgaaagcaggatcttggagggagccccaggtgcagtagcagatgctcaggcagctgcatctcctgtcccatccttctctccatctggagcatatgtatttttagaaggacatactttttcccttccctttcaatcattcagaaatgttattatacaattaaacctaaatacacagtt

SEQ ID NO: 23091 - DNA, 600 bp, Chicken  19866894236089_1
cattataggacactgaaataattacagaatgccagatgtaacaaaaaaaatgtaatcatcctgatttcaaccccatttgtaatcttgtgttagctttttatttaagatacacttaggactgatgtcaaacaagtgggttttgtactggcatgacagaatgagtatatattgtgccaccaaatctcataactagaatatgggatcagatgaatacataaaacttaatttaagctctgtattaaaaggttgtctcattttaagtctcctcgtctgacctattatctgtgaatatctcattcratctttctgcaaagtgaaggatagattatyttaataggtttgtagtacttctgatttaatcagcattttaaagaagtacgaatgtcatttgtattttctaagcatattagagaatatctattctatttccatgcctaaaatgttgtgaagttttgaactgtatttgacataaattccctactgaaatagcaggtaatgctgctggaggatggtcttctttgtaaatgacaacaacgctgattgtgcaaggtacccaaaggtaatttattacagctttaagcccccccatggcagtttttc

SEQ ID NO: 23092 - DNA, 600 bp, Chicken  19866894236089_2
gccagatgtaacaaaaaaaatgtaatcatcctgatttcaaccccatttgtaatcttgtgttagctttttatttaagatacacttaggactgatgtcaaacaagtgggttttgtactggcatgacagaatgagtatatattgtgccaccaaatctcataactagaatatgggatcagatgaatacataaaacttaatttaagctctgtattaaaaggttgtctcattttaagtctcctcgtctgacctattatctgtgaatatctcattcratctttctgcaaagtgaaggatagattatyttaataggtttgtagtacttctgatttaatcagcattttaaagaagtacgaatgtcatttgtattttctaagcatattagagaatatctattctatttccatgcctaaaatgttgtgaagttttgaactgtatttgacataaattccctactgaaatagcaggtaatgctgctggaggatggtcttctttgtaaatgacaacaacgctgattgtgcaaggtacccaaaggtaatttattacagctttaagcccccccatggcagtttttccattcaaaagactgtcaaattcctctamtg

SEQ ID NO: 23093 - DNA, 600 bp, Chicken  19866894236089_3
tyttaataggtttgtagtacttctgatttaatcagcattttaaagaagtacgaatgtcatttgtattttctaagcatattagagaatatctattctatttccatgcctaaaatgttgtgaagttttgaactgtatttgacataaattccctactgaaatagcaggtaatgctgctggaggatggtcttctttgtaaatgacaacaacgctgattgtgcaaggtacccaaaggtaatttattacagctttaagcccccccatggcagtttttccattcaaaagactgtcaaattcctctamtgtgtctagtatatcacatataaaacagctgctgtgattcctgtttgaataataggcgtgggaggtgattgtacccccacctggtgtactgcatccaagtgtggggcctccagcacaagaaagacgtggagttattggagcagatccagagaagggtcacaaagatgatcagaagrctggagcacctcgcctatgaagaaaggttgagggagctgggcttgttttgtttggagaagagaagactctggggagacctcactgtagcattctggtacttgaagagagcgtatcagaaggacg

SEQ ID NO: 23094 - DNA, 600 bp, Chicken  19866894236089_4
gaggatggtcttctttgtaaatgacaacaacgctgattgtgcaaggtacccaaaggtaatttattacagctttaagcccccccatggcagtttttccattcaaaagactgtcaaattcctctamtgtgtctagtatatcacatataaaacagctgctgtgattcctgtttgaataataggcgtgggaggtgattgtacccccacctggtgtactgcatccaagtgtggggcctccagcacaagaaagacgtggagttattggagcagatccagagaagggtcacaaagatgatcagaagrctggagcacctcgcctatgaagaaaggttgagggagctgggcttgttttgtttggagaagagaagactctggggagacctcactgtagcattctggtacttgaagagagcgtatcagaaggacggagactgactttttacacagccaggtagtgayaggacaaaggggaatggctttaaactaaaagaggggagatttagtttggctacaaggaagaaattctttgcrcagaggcactggagcaggcttcccagagaagttgtggataccctattcccagrtgtgttcaagggcatgttg

SEQ ID NO: 23095 - DNA, 600 bp, Chicken  19866894236089_5
tgtgattcctgtttgaataataggcgtgggaggtgattgtacccccacctggtgtactgcatccaagtgtggggcctccagcacaagaaagacgtggagttattggagcagatccagagaagggtcacaaagatgatcagaagrctggagcacctcgcctatgaagaaaggttgagggagctgggcttgttttgtttggagaagagaagactctggggagacctcactgtagcattctggtacttgaagagagcgtatcagaaggacggagactgactttttacacagccaggtagtgayaggacaaaggggaatggctttaaactaaaagaggggagatttagtttggctacaaggaagaaattctttgcrcagaggcactggagcaggcttcccagagaagttgtggataccctattcccagrtgtgttcaagggcatgttggatggaaccctgggcagctgcatctagtggttggcaactctgcccatgacagaggggttggaattaggtaatcttgaagaactctttgaacttaagccattctatgattctataattctgttggagatctctcagatgtgaacatttgttacattt

SEQ ID NO: 23096 - DNA, 600 bp, Chicken  19866894236089_6
ggcctccagcacaagaaagacgtggagttattggagcagatccagagaagggtcacaaagatgatcagaagrctggagcacctcgcctatgaagaaaggttgagggagctgggcttgttttgtttggagaagagaagactctggggagacctcactgtagcattctggtacttgaagagagcgtatcagaaggacggagactgactttttacacagccaggtagtgayaggacaaaggggaatggctttaaactaaaagaggggagatttagtttggctacaaggaagaaattctttgcrcagaggcactggagcaggcttcccagagaagttgtggataccctattcccagrtgtgttcaagggcatgttggatggaaccctgggcagctgcatctagtggttggcaactctgcccatgacagaggggttggaattaggtaatcttgaagaactctttgaacttaagccattctatgattctataattctgttggagatctctcagatgtgaacatttgttacatttggaataaaacacagcccatctttgttttaaactcacttttttyccccaatactagaggaaaatattgttcag

SEQ ID NO: 23097 - DNA, 600 bp, Chicken  19866894236089_7
cacaaagatgatcagaagrctggagcacctcgcctatgaagaaaggttgagggagctgggcttgttttgtttggagaagagaagactctggggagacctcactgtagcattctggtacttgaagagagcgtatcagaaggacggagactgactttttacacagccaggtagtgayaggacaaaggggaatggctttaaactaaaagaggggagatttagtttggctacaaggaagaaattctttgcrcagaggcactggagcaggcttcccagagaagttgtggataccctattcccagrtgtgttcaagggcatgttggatggaaccctgggcagctgcatctagtggttggcaactctgcccatgacagaggggttggaattaggtaatcttgaagaactctttgaacttaagccattctatgattctataattctgttggagatctctcagatgtgaacatttgttacatttggaataaaacacagcccatctttgttttaaactcacttttttyccccaatactagaggaaaatattgttcagctgctcattagtgtgatttagtaacagtaacaggtacacattccatcctccct

SEQ ID NO: 23098 - DNA, 439 bp, Chicken  19866894236089_8
gtttggctacaaggaagaaattctttgcrcagaggcactggagcaggcttcccagagaagttgtggataccctattcccagrtgtgttcaagggcatgttggatggaaccctgggcagctgcatctagtggttggcaactctgcccatgacagaggggttggaattaggtaatcttgaagaactctttgaacttaagccattctatgattctataattctgttggagatctctcagatgtgaacatttgttacatttggaataaaacacagcccatctttgttttaaactcacttttttyccccaatactagaggaaaatattgttcagctgctcattagtgtgatttagtaacagtaacaggtacacattccatcctccctatattccacatgaaagatagtctatcgcaatcatatctgaaacaaacaaaaaaagat

SEQ ID NO: 23099 - DNA, 599 bp, Chicken  19866894236097_1
  misc_feature (1)..(170): n is any nucleotide
nnnnnnnnnnnnnnnnnnnnnnnnnnnnnnnnnnnnnnnnnnnnnnnnnnnnnnnnnnnnnnnnnnnnnnnnnnnnnnnnnnnnnnnnnnnnnnnnnnnnnnnnnnnnnnnnnnnnnnnnnnnnnnnnnnnnnnnnnnnnnnnnnnnnnnnnnnnnnnnnnnnnnnnnnnacgcctatcgttttaaaacacatcttttttaacgttatcattttaggatatcaaagtatacatttctgaagtatatttcacttagaactgcagccatttgtctagtcaaagcatctgtgtgttacatatkgactggaaactttccactgcagtgactgygctctgccaaaaagccagcaaaagaaaatgttctgatgtcagtataagctgacatccaaactcttcacaggttttgaatctttaaccacctaactaaaggaggctttattatgactgcaattttactgaaaaccaaaataaaataataataataaaaaattgcaaaagcaggccttgtgtattgcaaatccccattttggaagcccaaagagggaatataagcttaaaggcctgaatttaacaaacctaattatcaaggcttaattagta

SEQ ID NO: 23100 - DNA, 599 bp, Chicken  19866894236097_2
  misc_feature (1)..(141): n is any nucleotide
nnnnnnnnnnnnnnnnnnnnnnnnnnnnnnnnnnnnnnnnnnnnnnnnnnnnnnnnnnnnnnnnnnnnnnnnnnnnnnnnnnnnnnnnnnnnnnnnnnnnnnnnnnnnnnnnnnnnnnnnnnnnnnnnnnnnnnnnnnnnnacgcctatcgttttaaaacacatcttttttaacgttatcattttaggatatcaaagtatacatttctgaagtatatttcacttagaactgcagccatttgtctagtcaaagcatctgtgtgttacatatkgactggaaactttccactgcagtgactgygctctgccaaaaagccagcaaaagaaaatgttctgatgtcagtataagctgacatccaaactcttcacaggttttgaatctttaaccacctaactaaaggaggctttattatgactgcaattttactgaaaaccaaaataaaataataataataaaaaattgcaaaagcaggccttgtgtattgcaaatccccattttggaagcccaaagagggaatataagcttaaaggcctgaatttaacaaacctaattatcaaggcttaattagtaccaagggtaaagcttcatggaacacctgc

SEQ ID NO: 23101 - DNA, 600 bp, Chicken  19866894236098_1
gcagtgatgagaagcgttggctctggggaaggaattctcctccaggtctgaagaggatgaggagcgcaggacttggcaagcagcagcccagggcagctcactttctcttgacatctgccttgtttttttttccctaggtgatgttacaacacaagtattgtcacaacatagcttggtaacatcacaagattcaagtctgcagtgctggaatttatttgtgcatatttaaacggggctgaatggagaaaggcattttttttccacttacttcatccaactgttgttctaagccaactactygctctaaaagtagcaaaatgaccgggctatcaacatccaaagagctcaaggakcttaaaaaaggaaacctgtgtctgttcaagcaaaacacacatttcagaggctgcaaaagtgacagcacctcagtgctggcaggaagaatgggatggattctccatccatcttaaatcgacttaaatagcagcgggagcttttcacctacaygaaayatgcactattcctgaagctttgaaggcacagcccaagaaaaacaccccctgctatgtaattacacccttttttgctcatcttattttggga

SEQ ID NO: 23102 - DNA, 600 bp, Chicken  19866894236098_2
aggatgaggagcgcaggacttggcaagcagcagcccagggcagctcactttctcttgacatctgccttgtttttttttccctaggtgatgttacaacacaagtattgtcacaacatagcttggtaacatcacaagattcaagtctgcagtgctggaatttatttgtgcatatttaaacggggctgaatggagaaaggcattttttttccacttacttcatccaactgttgttctaagccaactactygctctaaaagtagcaaaatgaccgggctatcaacatccaaagagctcaaggakcttaaaaaaggaaacctgtgtctgttcaagcaaaacacacatttcagaggctgcaaaagtgacagcacctcagtgctggcaggaagaatgggatggattctccatccatcttaaatcgacttaaatagcagcgggagcttttcacctacaygaaayatgcactattcctgaagctttgaaggcacagcccaagaaaaacaccccctgctatgtaattacacccttttttgctcatcttattttgggaaaacttgtggatgatttgcagtctttcaatctyggggtccacgcaccttttga

SEQ ID NO: 23103 - DNA, 600 bp, Chicken  19866894236098_3
ctggaatttatttgtgcatatttaaacggggctgaatggagaaaggcattttttttccacttacttcatccaactgttgttctaagccaactactygctctaaaagtagcaaaatgaccgggctatcaacatccaaagagctcaaggakcttaaaaaaggaaacctgtgtctgttcaagcaaaacacacatttcagaggctgcaaaagtgacagcacctcagtgctggcaggaagaatgggatggattctccatccatcttaaatcgacttaaatagcagcgggagcttttcacctacaygaaayatgcactattcctgaagctttgaaggcacagcccaagaaaaacaccccctgctatgtaattacacccttttttgctcatcttattttgggaaaacttgtggatgatttgcagtctttcaatctyggggtccacgcaccttttgagtaaggggaggtgtgagtagctcagcgtctgccatggagctcatcctggcttcagttatacccttctatgtgaaatattctttccatgcctattttatacacatacaggttgaaagttaatagaggcagtgccttactctgttccttcccc

SEQ ID NO: 23104 - DNA, 600 bp, Chicken  19866894236098_4
atttatttgtgcatatttaaacggggctgaatggagaaaggcattttttttccacttacttcatccaactgttgttctaagccaactactygctctaaaagtagcaaaatgaccgggctatcaacatccaaagagctcaaggakcttaaaaaaggaaacctgtgtctgttcaagcaaaacacacatttcagaggctgcaaaagtgacagcacctcagtgctggcaggaagaatgggatggattctccatccatcttaaatcgacttaaatagcagcgggagcttttcacctacaygaaayatgcactattcctgaagctttgaaggcacagcccaagaaaaacaccccctgctatgtaattacacccttttttgctcatcttattttgggaaaacttgtggatgatttgcagtctttcaatctyggggtccacgcaccttttgagtaaggggaggtgtgagtagctcagcgtctgccatggagctcatcctggcttcagttatacccttctatgtgaaatattctttccatgcctattttatacacatacaggttgaaagttaatagaggcagtgccttactctgttccttccccttaaa

SEQ ID NO: 23105 - DNA, 600 bp, Chicken  19866894236098_5
catccaaagagctcaaggakcttaaaaaaggaaacctgtgtctgttcaagcaaaacacacatttcagaggctgcaaaagtgacagcacctcagtgctggcaggaagaatgggatggattctccatccatcttaaatcgacttaaatagcagcgggagcttttcacctacaygaaayatgcactattcctgaagctttgaaggcacagcccaagaaaaacaccccctgctatgtaattacacccttttttgctcatcttattttgggaaaacttgtggatgatttgcagtctttcaatctyggggtccacgcaccttttgagtaaggggaggtgtgagtagctcagcgtctgccatggagctcatcctggcttcagttatacccttctatgtgaaatattctttccatgcctattttatacacatacaggttgaaagttaatagaggcagtgccttactctgttccttccccttaaaataaaacatcacggatgagcactgttcagacacagaaagggaagataaagagaaatcagtttcagaactctcaacagaagtcgggaagaaaagaagcagcagtatcccaaaccaacacaaaatt

SEQ ID NO: 23106 - DNA, 599 bp, Chicken  19866894236102_1
  misc_feature (1)..(4): n is any nucleotide
nnnntaggaagtaataagccaatgcccaggattggagagtatattggaatctgatctagctattgtgagagagcagctgtcaagttactcctgcctcatagcattctccaaagagaaaagagtatgactaagtccctcatttgcatgacgaggatcacagcacagtttctgtatgatctcaagcctcacttcaccctctgtttacccttttctcattatgggatgttagaagcaaagaactgcttcttctattttcttttattagaccctttcagtgcccagggactgcatccattcccwcagccaaactgagttgtgcatggatggcgtagcatgggcatggtgtctgatttttcacttgctaaaaggagctggtaaaaacagtggatgaggcatagtgagagtagtattcctgggaggaggctaagagcccyatgctgcctcttcactggaaaagctgaggactggagtttctagagctactggtaagatcttccacaacactttgtaaagaagaagctccccagttttccataataaatcagaagttttcttgcttattctttctagtctaaaagtatattaagagttttaagaga

SEQ ID NO: 23107 - DNA, 600 bp, Chicken  19866894236102_2
cctcatttgcatgacgaggatcacagcacagtttctgtatgatctcaagcctcacttcaccctctgtttacccttttctcattatgggatgttagaagcaaagaactgcttcttctattttcttttattagaccctttcagtgcccagggactgcatccattcccwcagccaaactgagttgtgcatggatggcgtagcatgggcatggtgtctgatttttcacttgctaaaaggagctggtaaaaacagtggatgaggcatagtgagagtagtattcctgggaggaggctaagagcccyatgctgcctcttcactggaaaagctgaggactggagtttctagagctactggtaagatcttccacaacactttgtaaagaagaagctccccagttttccataataaatcagaagttttcttgcttattctttctagtctaaaagtatattaagagttttaagagaaaataatgttatcttcccacaagccaaacagaagggacagttcctctgcctgccagactttgctgttcatcagaaataatcaactctaaagacttggtaagttgttattcagcatgtgcacatgtattctttatg

SEQ ID NO: 23108 - DNA, 600 bp, Chicken  19866894236102_3
acatcagcaaaaaaaaaaagtttattccatgttttgtttgttaaatcagttctgcacgctttcctgccctgccccatgtctaaatcccacagtgcacagtgtgctggcgaatggctggtgctggctggcatctccacgtgcctgcacagaggaaagggcagcccctcccctgcatagcaaaggcattctgtttttatggcatctgggctgctgcagctgttattaggaggggtttgctctttttagaatttattagcaaattaagcatgacatttagtaaaatatgcagtctacattgtkaacgtgtagctattgtgcaaaaatatcagtatttgattgttacagtttattgaaaactccttcttgcccctatcccagtggaaggtggaaattacattctgactgaacgtgcaacttaaaagtacattttttcacttttttttgttttgcctttagaattcaaagtagtaatcaaatttaagttaggatttcacattaaaagcaatatctaaatattggggaaaactgattgtcattagcccttcatatatgccccgttttgatgatatcaccacatcacatttaacacaagggaactag

SEQ ID NO: 23109 - DNA, 600 bp, Chicken  19866894236102_4
cgtgcctgcacagaggaaagggcagcccctcccctgcatagcaaaggcattctgtttttatggcatctgggctgctgcagctgttattaggaggggtttgctctttttagaatttattagcaaattaagcatgacatttagtaaaatatgcagtctacattgtkaacgtgtagctattgtgcaaaaatatcagtatttgattgttacagtttattgaaaactccttcttgcccctatcccagtggaaggtggaaattacattctgactgaacgtgcaacttaaaagtacattttttcacktttttttgttttgcctttagaattcaaagtagtaatcaaatttaagttaggatttcacattaaaagcaatatctaaatattggggaaaactgattgtcattagcccttcatatatgccccgttttgatgatatcaccacatcacatttaacacaagggaactagtgatcactatgagcagagatagtcttatgcttcctgaagagtgctcttcgtgaacaaatgcattgttaactcaacatgctagtgcatatgtaaataaracctagaaaaaacgagatgctagcaatacaagattaga

SEQ ID NO: 23110 - DNA, 473 bp, Chicken  19866894236102_5
ctgactgaacgtgcaacttaaaagtacattttttcacttttttttgttttgcctttagaattcaaagtagtaatcaaatttaagttaggatttcacattaaaagcaatatctaaatattggggaaaactgattgtcattagcccttcatatatgccccgttttgatgatatcaccacatcacatttaacacaagggaactagtgatcactatgagcagagatagtcttatgcttcctgaagagtgctcttcgtgaacaaatgcattgttaactcaacatgctagtgcatatgtaaataaracctagaaaaaacgagatgctagcaatacaagattagaagcacatatggctatatgagggaacagccttcatataaatactgaaggtgctttcttaaggatgacaatttattcattgtactggttttttttttttcttaataaataaaatgttctcagcctgttaagcctaaa

SEQ ID NO: 23111 - DNA, 600 bp, Chicken  19866894236109_1
tgtttgattttgtgaatcatcaataaaaatgtacactgggttgttttgtaactcttcatggctccttatattgttataaaaccgtggcacgcagcatcatagcatttcctccggtctctagtagatgtttctgcatatacacagattagttacacaacttctgcaggagatacctgttctctgtgcccacattttcatagcagaaatgttcagttacatccatgtctctgaagccaacatgcacttttctggtgtttgttgttgttgctttgcttttttttgttgttgaaaaaatactartatctgatgtgttcatttggcccaaacagttttgtatgtattttgaaacaaccaccatccactgccagccattgcatgtgtattaagtaattgcttatcgctgtaggatctgaactccatgcagyctttaatgggtttgtgctctcagcctccctgccaggtaaagaaatattcatttctgttttgaaaacaggattaagggcagatcaagtgacttgcccaaggccattggaaaccagtggtttatttgggacttgaactgagggtttccagcatccctcttcccttctaaattatcat

SEQ ID NO: 23112 - DNA, 600 bp, Chicken  19866894236109_2
tgtttctgcatatacacagattagttacacaacttctgcaggagatacctgttctctgtgcccacattttcatagcagaaatgttcagttacatccatgtctctgaagccaacatgcacttttctggtgtttgttgttgttgctttgcttttttttgttgttgaaaaaatactartatctgatgtgttcatttggcccaaacagttttgtatgtattttgaaacaaccaccatccactgccagccattgcatgtgtattaagtaattgcttatcgctgtaggatctgaactccatgcagyctttaatgggtttgtgctctcagcctccctgccaggtaaagaaatattcatttctgttttgaaaacaggattaagggcagatcaagtgacttgcccaaggccattggaaaccagtggtttatttgggacttgaactgagggtttccagcatccctcttcccttctaaattatcataatccagcaatttgtcgtttgcatagtgcttactactctggagttcaagatgtcttcagtaaaaacaatttatgtaaagagaaaaagcaaggtaacagccttattactaatgaaccccatgtaaa

SEQ ID NO: 23113 - DNA, 600 bp, Chicken  19866894236109_3
gtttatttgggacttgaactgagggtttccagcatccctcttcccttctaaattatcataatccagcaatttgtcgtttgcatagtgcttactactctggagttcaagatgtcttcagtaaaaacaatttatgtaaagagaaaaagcaaggtaacagccttattactaatgaaccccatgtaaattggcacatagaacgtgaagtggctgcggaacagccccgaagactttccttccaagtaaatcaaagagattgaaaaatagtaatcaaatagcattgcactagtgatgttgcaggcmcgtcttctctgtagtagggctctgtaatgctgcacctgcagtatctaaaaatacatgtttatgttatgtggcacctgccacgttttggtttggttcatggctgggactcgtacgtatcatgatcatacaccacaagatcattgctttggggtgcttggtgcatgcactgggacatttcctgcatatcaagattgttgtcatatttctttttggttaggcaggtgttaactgtgcacttgctgatttgtagctcccggtactgcctcagctcacagagtcatcatagaatacttagagttg

SEQ ID NO: 23114 - DNA, 600 bp, Chicken  19866894236112_1
taataaacatggtggtttgttggtttttctcctctaccataatgaacaatgctacctagaattggtatatgacatctgtatacacacctgcaacaccttcatttctttcagtgtaataattttataaaaattatatataagagtatacataagagctgaaagtgaatctcatatatgatctctttttggtataggaccatagcattagagagggaatagcgcaacattccaattgtatctgtgggagtttgtgaccattctattgttggcagtttattggaacacacagagtttgagttsattacacttaatttcaagtggtttaagcagagggcaaatactgtcaaccttctgtcacttctctagtatcttcgcatgattttacttctytgctgcagaaatcatgtgtggcctctgctgggaagacaggcaaggatagggagagtttgaatgtatstaaaatggagtctttttctgaatgcaaacatttggcagaacagtattttggcaaactgtagatacagtgctgtgtttcttctaattggtcacatgcagggaatgaaaacytggatgctggatgaactttctgttgagtgtgca

SEQ ID NO: 23115 - DNA, 600 bp, Chicken  19866894236112_2
caacaccttcatttctttcagtgtaataattttataaaaattatatataagagtatacataagagctgaaagtgaatctcatatatgatctctttttggtataggaccatagcattagagagggaatagcgcaacattccaattgtatctgtgggagtttgtgaccattctattgttggcagtttattggaacacacagagtttgagttsattacacttaatttcaagtggtttaagcagagggcaaatactgtcaaccttctgtcacttctctagtatcttcgcatgattttacttctytgctgcagaaatcatgtgtggcctctgctgggaagacaggcaaggatagggagagtttgaatgtatstaaaatggagtctttttctgaatgcaaacatttggcagaacagtattttggcaaactgtagatacagtgctgtgtttcttctaattggtcacatgcagggaatgaaaacytggatgctggatgaactttctgttgagtgtgcacaggagcctttartgctagtgcagcgttcaytcagtttctgttcccctgtacatagaacaagtagcatgaaacttaattcttgagaggag

SEQ ID NO: 23116 - DNA, 600 bp, Chicken  19866894236112_3
gaaagtgaatctcatatatgatctctttttggtataggaccatagcattagagagggaatagcgcaacattccaattgtatctgtgggagtttgtgaccattctattgttggcagtttattggaacacacagagtttgagttsattacacttaatttcaagtggtttaagcagagggcaaatactgtcaaccttctgtcacttctctagtatcttcgcatgattttacttctytgctgcagaaatcatgtgtggcctctgctgggaagacaggcaaggatagggagagtttgaatgtatstaaaatggagtctttttctgaatgcaaacatttggcagaacagtattttggcaaactgtagatacagtgctgtgtttcttctaattggtcacatgcagggaatgaaaacytggatgctggatgaactttctgttgagtgtgcacaggagcctttartgctagtgcagcgttcaytcagtttctgttcccctgtacatagaacaagtagcatgaaacttaattcttgagaggaggatgtttatgcagaattcaaggatgctagctgcgatattgttcactgaggaacactgagaagggctg

SEQ ID NO: 23117 - DNA, 600 bp, Chicken  19866894236112_4
ggcagtttattggaacacacagagtttgagttsattacacttaatttcaagtggtttaagcagagggcaaatactgtcaaccttctgtcacttctctagtatcttcgcatgattttacttctytgctgcagaaatcatgtgtggcctctgctgggaagacaggcaaggatagggagagtttgaatgtatstaaaatggagtctttttctgaatgcaaacatttggcagaacagtattttggcaaactgtagatacagtgctgtgtttcttctaattggtcacatgcagggaatgaaaacytggatgctggatgaactttctgttgagtgtgcacaggagcctttartgctagtgcagcgttcaytcagtttctgttcccctgtacatagaacaagtagcatgaaacttaattcttgagaggaggatgtttatgcagaattcaaggatgctagctgcgatattgttcactgaggaacactgagaagggctgaaatctccctgggagcaggtggctgaaaaattaagatatcaaactccacattaatttgagctaatcaactgattgggtgtctgatcagcacagcttatctgaccctgtaa

SEQ ID NO: 23118 - DNA, 600 bp, Chicken  19866894236112_5
tcaagtggtttaagcagagggcaaatactgtcaaccttctgtcacttctctagtatcttcgcatgattttacttctytgctgcagaaatcatgtgtggcctctgctgggaagacaggcaaggatagggagagtttgaatgtatstaaaatggagtctttttctgaatgcaaacatttggcagaacagtattttggcaaactgtagatacagtgctgtgtttcttctaattggtcacatgcagggaatgaaaacytggatgctggatgaactttctgttgagtgtgcacaggagcctttartgctagtgcagcgttcaytcagtttctgttcccctgtacatagaacaagtagcatgaaacttaattcttgagaggaggatgtttatgcagaattcaaggatgctagctgcgatattgttcactgaggaacactgagaagggctgaaatctccctgggagcaggtggctgaaaaattaagatatcaaactccacattaatttgagctaatcaactgattgggtgtctgatcagcacagcttatctgaccctgtaattttcatggttgctaggtagctagtttccaacattcctgaaaatgc

SEQ ID NO: 23119 - DNA, 600 bp, Chicken  19866894236112_6
gggcaaatactgtcaaccttctgtcacttctctagtatcttcgcatgattttacttctytgctgcagaaatcatgtgtggcctctgctgggaagacaggcaaggatagggagagtttgaatgtatstaaaatggagtctttttctgaatgcaaacatttggcagaacagtattttggcaaactgtagatacagtgctgtgtttcttctaattggtcacatgcagggaatgaaaacytggatgctggatgaactttctgttgagtgtgcacaggagcctttartgctagtgcagcgttcaytcagtttctgttcccctgtacatagaacaagtagcatgaaacttaattcttgagaggaggatgtttatgcagaattcaaggatgctagctgcgatattgttcactgaggaacactgagaagggctgaaatctccctgggagcaggtggctgaaaaattaagatatcaaactccacattaatttgagctaatcaactgattgggtgtctgatcagcacagcttatctgaccctgtaattttcatggttgctaggtagctagtttccaacattcctgaaaatgcagcatgatacaatgaata

SEQ ID NO: 23120 - DNA, 456 bp, Chicken  19866894236127_1
atctcaaatacttagatcaggtgccgatgaaaatatagcaataaaccacacgctactaactctgtggtgcttgtgtagctttcatgacgttgtttctttcacatggaaatggggatcttctttaaaataggcagtgatagatgataaaaatttacaagaacagtgtgggacacagagatgcaattctggaaatgttttgtgtttgcagcttacttgccccagtctctattaaacgttaagctcttcttaagtccttttgacttcatctctccacgtacctcttactgtctgcttgtctckgctgctgaatcaacgcattcagttcagagaactttcctgtcaattttgacatagatggtagggaagcaattgcatcctgtatcttaggtagatactctcacatttgctgggttctgtagttagcagcaggcaagggaatgatcccactctccataa

SEQ ID NO: 23121 - DNA, 600 bp, Chicken  19866894236131_1
taggcttttattctgaatgataaagccattgtgttttattatacagaaaattttagtgactctttttgagtatctgattcatagtgaagtgaaacaggataatcctagactacgtttttctgtggtaataattcagttttcctatacactcacctagtttgattttccctgtcttgtttttcataagaaatcatcaattactgaaaaagtttgttattttcacactgcagtgtgtgcctatcaccttagagacacattcttcttttgttgttccctgttaattctgattttcttcagacytgtcagctatttataggtaaatgcatgttcatgaggaacagaacaaacctctacagaaaatttctataacaaacttygatttgggtgcatctaaaggcaatttaattaatatttagaccatatgaagcagtataaagttaatctccattgtatttttgacataaccagttaacactgagccagtacatactttttctctctctataccattacttttaattagcttaacaatcaacttgtatcattcagtgtatgcctgctattaatgccatttataacttcttggctacccttgtgttt

SEQ ID NO: 23122 - DNA, 600 bp, Chicken  19866894236131_2
ttcatagtgaagtgaaacaggataatcctagactacgtttttctgtggtaataattcagttttcctatacactcacctagtttgattttccctgtcttgtttttcataagaaatcatcaattactgaaaaagtttgttattttcacactgcagtgtgtgcctatcaccttagagacacattcttcttttgttgttccctgttaattctgattttcttcagacytgtcagctatttataggtaaatgcatgttcatgaggaacagaacaaacctctacagaaaatttctataacaaacttygatttgggtgcatctaaaggcaatttaattaatatttagaccatatgaagcagtataaagttaatctccattgtatttttgacataaccagttaacactgagccagtacatactttttctctctctataccattacttttaattagcttaacaatcaacttgtatcattcagtgtatgcctgctattaatgccatttataacttcttggctacccttgtgttttctgtgccaattattcttccctctgagtgatcagcaacagaaatgatcaggcattaagaaaacatgacctattagta

SEQ ID NO: 23123 - DNA, 600 bp, Chicken  19866894236131_3
tctctcagaagataattggatgtatattaggagatttaagggctggacaaatattggccagagatcatttaaatgaagttgatcttgacattagtaaagatacaaaagcatatcaggacacataaaagtatggttcattaaccgtagagaaatctatgagaggagcaagagcagtagctatttaaccaaaattaatagcactggtagatgtgaaataagttacaccgctgttaatttcagtttgcctaagtgtgttgcttcaacaaatgaaactcagacatttcaaagcaggctaaccaytacggcatttttctgggaagattcaagtccttgctacagatcatggaatatcatgtgttccagtaagtacctcagttactgagcaatttgttttaccaacccacccaattgttgtggtttaacgtgacagttagctagctaaacaccacacagtccttttctcacttcccccatcccagtgggatgagggagggcaacaggaaaaaacaacaaaatagaactcgtgggttgtgataaaactatttactaagatagagaaaaagaaaaggataatagttatgactatatacgtatataaat

SEQ ID NO: 23124 - DNA, 600 bp, Chicken  19866894236131_4
cccaggaaaaggcaaaatggaaagtgttgctgtagtaagtgttgtggggacagatggactgtggtgatgtacaacaggctgtgatgtcactgagcaatggattgtgaacctaccaccctcactgcttatttttgggtgctggcagcgcatggcccagtctgtcttgtgcctggactcctgttgagtgtatgtgcaatgcttggatgtggagagagcaaatgatttgggtgctgggttgtgcttcggggtctgctggaagtagctcttggtatccatacgtatagccattacctgcacttscctggactgcctggctcaggcagctaggatcccacagggcacatatccagcagcagaagygagctgtgtggggatgtgtcccttggggtggcaatggggtgagcactagaatgcagagagctgccaggactagggctaaacagaactggggctgttgcatgcacagtgctgctttctccccctccgtcaatctatcaccaccaaatcatcatatttatacaacttattttgtccttaagtatcacagaacatttaaatgtcttggtttggctgaggagaggttttgaatacattaatgat

SEQ ID NO: 23125 - DNA, 600 bp, Chicken  19866894236131_5
gtggtgatgtacaacaggctgtgatgtcactgagcaatggattgtgaacctaccaccctcactgcttatttttgggtgctggcagcgcatggcccagtctgtcttgtgcctggactcctgttgagtgtatgtgcaatgcttggatgtggagagagcaaatgatttgggtgctgggttgtgcttcggggtctgctggaagtagctcttggtatccatacgtatagccattacctgcacttscctggactgcctggctcaggcagctaggatcccacagggcacatatccagcagcagaagygagctgtgtggggatgtgtcccttggggtggcaatggggtgagcactagaatgcagagagctgccaggactagggctaaacagaactggggctgttgcatgcacagtgctgctttctccccctccgtcaatctatcaccaccaaatcatcatatttatacaacttattttgtccttaagtatcacagaacatttaaatgtcttggtttggctgaggagaggttttgaatacattaatgatgaacactgacctcaacaagaataaggaaaataagctgactttagaagcactcacaaagat

SEQ ID NO: 23126 - DNA, 600 bp, Chicken  19866894236133_1
agccatgcatcaccatgaagctattttggtatgcttgtgaagtgcctacatcctatggtgacaggaccattcctcacatgctcgctgagcatccccatggggaaacagagcagagggatgggagctgctgccctatggggttttgcccatggaccagccctggctcaccccacacagccacagcttgcacaggggcacaaggaagatgttcattatcaggcatgttggaccgcatctgtatgaagagccttatctattgggaaatgctttcagctcatgttgaaatgataaagcaatgtmttttcctttttctttctgccctatcaatacatttctaatgacaaaggtgacaggtaggactcctctttctcctggcattcatccccagcaggactcattgtttcagcatggctttgttctggatccattggaagcatccaccttagtaaacaaggtgtgcatgtccgctgtgatgtcagcactttgctttcagcacctgtctgagcattttattgtgatattcagtcccagagacacaacccacgccctacttcttcaatcagaacatgtaggattttcttttcccccatcctttcccat

SEQ ID NO: 23127 - DNA, 412 bp, Chicken  19866894236133_2
tatcaatacatttctaatgacaaaggtgacaggtaggactcctctttctcctggcattcatccccagcaggactcattgtttcagcatggctttgttctggatccattggaagcatccaccttagtaaacaaggtgtgcatgtccgctgtgatgtcagcactttgctttcagcacctgtctgagcattttattgtgatattcagtcccagagacacaacccacgccctacttcttcaatcagaacatgtaggattttcttttcccccatcctttcccatgatctattttttccccctctyctctttcttctttcatcgattattcatttgtttctcactccagcgtgggagtgtgcaccaaaatctgggccaccctgggagcgagggctgcctgacccatttgcagctccct

SEQ ID NO: 23128 - DNA, 600 bp, Chicken  19866894236135_1
tacttctgcaatgctgaagagctatcaggatgctaataaggcgtttccttgtttccttgctgctgtcaatacacgttgtacgtgtaattgcaaagtgcggctatttatgttttaattgtgacttttgcttgaaattgggcgtcaacagtgtctgcagtttgaaactggtacttgtgtgtgagtgaagatgagtaggttgggtgctctgcttttgcttgtgaacttaagagctgaggacagccagggagaacaagagtgtttggaatagaaccacctaaatacgatacacttttgtctgtrtgattgagatgctgtttcttacgttgaatgcattagtgtggtcagacaccttcacagctcaagttccattggtttgagatcccaaccaaatttaatttgacattttagtattccgtgctcctgagcctggcccattcgatttttgtttggttatttattttttgggtaatcttacttgaacaagttggatgaaggtagttagactgatctccctgctgtatggccagcgtaggcattttattttacagttttacaatgtattgcagttctattgcaatctattttcatcatcaaaaataa

SEQ ID NO: 23129 - DNA, 600 bp, Chicken  19866894236137_1
ttggaggtgctgcacatgctggatctgcctggctccctgatgtgtcccggcatggcagctaggtgacagtggttgaggatgaccctgactgaaaagctgcgtgagaggatatcgcgggccttctacaaccacgggctgctgtgtgcttcctaccccatccccatcatcctcttcactggcctctgcattttggcctgctggtgagtcctgccaagtgctgcttgtcctgggctgctgctgtggggagcattcatagccaggtttcatctttctgtgtgggataaaagaagagagggaacraagcatctccatctgatttcctaactaaataggaagtgaggctgcacctgaagtgctgggtgcagctgtggaccacacaagatctgaacatactgaggagaatccagcacagggccaccgaggtgctgcagggcctggggtagctctgctgggaggagaggytgagagggctggggctgcccagcgtggagcaggggaggctcaggggatccaccgtggctgtaaatctctgcaggagctgcaaggggatagagccaggttctgctcagtggtgctggtgtcagactcagtggcaatggg

SEQ ID NO: 23130 - DNA, 551 bp, Chicken  19866894236137_2
atcatcctcttcactggcctctgcattttggcctgctggtgagtcctgccaagtgctgcttgtcctgggctgctgctgtggggagcattcatagccaggtttcatctttctgtgtgggataaaagaagagagggaacraagcatctccatctgatttcctaactaaataggaagtgaggctgcacctgaagtgctgggtgcagctgtggaccacacaagatctgaacatactgaggagaatccagcacagggccaccgaggtgctgcagggcctggggtagctctgctgggaggagaggytgagagggctggggctgcccagcgtggagcaggggaggctcaggggatccaccgtggctgtaaatctctgcaggagctgcaaggggatagagccaggttctgctcagtggtgctggtgtcagactcagtggcaatgggcatgtactggagcacaaatggttctgtttaaacataagaaaatgctttcactgtgaatatattgaaccattgagaaggtattccagattgtggagtctcctcctggaatcaca

SEQ ID NO: 23131 - DNA, 599 bp, Chicken  19866894236141_1
  misc_feature (1)..(89): n is any nucleotide
nnnnnnnnnnnnnnnnnnnnnnnnnnnnnnnnnnnnnnnnnnnnnnnnnnnnnnnnnnnnnnnnnnnnnnnnnnnnnnnnnnnnnnnnnagacagtattacttcattttataagagttataaaagaggctttccaccctgtattccctgctggaatctttgtggccaacttattttctacctgcagcctagggtcgacattgtatgatgcaaaccaaatactgcatgccttacatcacaaacagtatttccagaagcttccaaaggccacttgcaatgcaaaatataaaatctaattctycattttcttaaatgtcacagtactgtaaaatgacaaaaatacaagcatctatttgtttaataaagaaatactgcatgaaaaaacagcagagcaatatagtctgcattgatccacatatcccaagctacagacacttcatgttgataacagtggctgttgcactcatgcactgttaaaaataaaacctttagaattgttgcatcatactgttggtgacttttctgcaagtgggatcagataaatacaaaaataaatctttgctaaatacaccatatagcaaaatatgctagaaaaattct

SEQ ID NO: 23132 - DNA, 600 bp, Chicken  19866894236147_1
tatatgcaaacctaaggcattacaaagcaatctaaaatgtcatatttacactacttctttcaatatgactgcattgtacttctattaatttaatgcaaagtaaaaatactcaagcttttggatgctccctaatgtggggcagatttgggaacttaccatgatacatgagacaggggatcctagaagcagtaagggtcatttctactcaccgagttcaccctactctaccttacctcccctggagttccatgtaggcagagaaggtgcccaagtgaatatgttcaggcaactaccctcctsgcgttcctaacaagggtgtgtgtgtgtgtgcgtgcattttccaactccagcaatgtcacttcatgttcatcttcactgtgtcactctctgccatctaaaaactggagcaccagatccaccatctaggactgcattgacattggcatgattcaacagaagggctcaaacctccggctgcgctcaggagattgtagtcatttcagctaatggaataatggatagcaatctcaggttgtcattctcagtgtgaatcagcgcaggagaggaatggactctttgcaagcattttttcccatatat

SEQ ID NO: 23133 - DNA, 599 bp, Chicken  19866894236148_1
  misc_feature (1)..(7): n is any nucleotide
nnnnnnnaaaagacattagcttgtatgaggctcagtctttttctcagtggagtgcaagttagaaagtttagcaagtaaaaaaacataattcctaagtagattttcagctttgacctcatattgttcccatcgtattaacctttgtatcacctaatgagtaacactttgaactcacatatttcctttcacctagacattacacagaaatggaaataattatccacagcaagaatggcaactatttaacatagttgctggcctaatttacatataatttccctagcacattaagtgctgctrcggaattttgccaccattttgactggagcagtaaccagggtcagctaaagagagtcaattccatcatcactatttccctttttcctttctttttttcttttgtttccattttcctttcctctaaagttctgcacytcctcttttcttttcccttccttccttccttccttcttttcttcctacttttcttcctttcttccttccttcattcctttgttcctccctccctcccttcttttcagacagactatatgccttccatttccatataaaaatacaggatagagtcatattaatct

SEQ ID NO: 23134 - DNA, 600 bp, Chicken  19866894236148_2
taacctttgtatcacctaatgagtaacactttgaactcacatatttcctttcacctagacattacacagaaatggaaataattatccacagcaagaatggcaactatttaacatagttgctggcctaatttacatataatttccctagcacattaagtgctgctrcggaattttgccaccattttgactggagcagtaaccagggtcagctaaagagagtcaattccatcatcactatttccctttttcctttctttttttcttttgtttccattttcctttcctctaaagttctgcacytcctcttttcttttcccttccttccttccttccttcttttcttcctacttttcttcctttcttccttccttcattcctttgttcctccctccctcccttcttttcagacagactatatgccttccatttccatataaaaatacaggatagagtcatattaatctctgcaaagcatccaaaaacaaactgtcatatgttcaactggaaaggttcatattcatatctattagctgtatattcacaattactcagagtattcctttgcagcccatgttgtggcatatggattttatgagtaga

SEQ ID NO: 23135 - DNA, 600 bp, Chicken  19866894236148_3
atgagtaacactttgaactcacatatttcctttcacctagacattacacagaaatggaaataattatccacagcaagaatggcaactatttaacatagttgctggcctaatttacatataatttccctagcacattaagtgctgctrcggaattttgccaccattttgactggagcagtaaccagggtcagctaaagagagtcaattccatcatcactatttccctttttcctttctttttttcttttgtttccattttcctttcctctaaagttctgcacytcctcttttcttttcccytccttccttccttccttcttttcttcctacttttcttcctttcttccttccttcattcctttgttcctccctccctcccttcttttcagacagactatatgccttccatttccatataaaaatacaggatagagtcatattaatctctgcaaagcatccaaaaacaaactgtcatatgttcaactggaaaggttcatattcatatctattagctgtatattcacaattactcagagtattcctttgcagcccatgttgtggcatatggattttatgagtagatcctcctacactgatgga

SEQ ID NO: 23136 - DNA, 600 bp, Chicken  19866894236148_4; identical to SEQ ID NO: 23135

SEQ ID NO: 23137 - DNA, 600 bp, Chicken  19866894236148_5; identical to SEQ ID NO: 23135

SEQ ID NO: 23138 - DNA, 600 bp, Chicken  19866894236148_6; identical to SEQ ID NO: 23135

SEQ ID NO: 23139 - DNA, 600 bp, Chicken  19866894236148_7
catttccatataaaaatacaggatagagtcatattaatctctgcaaagcatccaaaaacaaactgtcatatgttcaactggaaaggttcatattcatatctattagctgtatattcacaattactcagagtattcctttgcagcccatgttgtggcatatggattttatgagtagatcctcctacactgatggagttatggtcaagattgtggtaagaaaatgcagaggttcagtcagatggaaagttaaaccatgcattatggattcagcagaatatggaagcatattagaagataatycttccaactgaacgccagtggtttataagccaatttagaatgtcagtcaccagctatggctgggggttatcagtctgtctgcttctgttgaagatgaggagataggagttcatttcccagcaacctttaattggctttagtcaagtaacacggagtgctgataagttatcaacaattcctaatcaaacactagttcagctcaccaatatcgtatctagatccctttggacaatggtcatctgcctctggctggaagcacctattgacaaaggcagaagttttgtttaaaaataggccagt

SEQ ID NO: 23140 - DNA, 600 bp, Chicken  19866894236152_1
gtacatacaggctttaaaactcaaatagcaacaaagaaataagcaatgggcatggagagaaaatcagaaaagaatgaaataggagttgtatctttgatcacctgatgttctgttgatctatttgatcatggtgtatcagaagagctttgtatgttatactagattgtatctactacttactgctcaatgacagcttatttgctgtggtggcgtctgtcacagaacgtgcttcacttgccttgccatccttaacaaacatttatctttgttgcctcattctgacttgtatttctttccacrtcttraaaaatctaaattctttgcctactrcctctgcatttctggaattgctgctcatatgagctgcttcttagcccagtctgcttctccacaattccttttgagttcagtgtctagaatcccgtaacagagcacagatgtagagcttattgatacattctccaacacacgcagcctttgtgggactcacagtccttctaactgtggcatgttcctgagactgaaacctacccagtaaaagaaaaaaagttgacttttctgtccacacaattttctcttagtgcaatcaggaactgccac

SEQ ID NO: 23141 - DNA, 600 bp, Chicken  19866894236152_2
tacaggctttaaaactcaaatagcaacaaagaaataagcaatgggcatggagagaaaatcagaaaagaatgaaataggagttgtatctttgatcacctgatgttctgttgatctatttgatcatggtgtatcagaagagctttgtatgttatactagattgtatctactacttactgctcaatgacagcttatttgctgtggtggcgtctgtcacagaacgtgcttcacttgccttgccatccttaacaaacatttatctttgttgcctcattctgacttgtatttctttccacrtcttraaaaatctaaattctttgcctactrcctctgcatttctggaattgctgctcatatgagctgcttcttagcccagtctgcttctccacaattccttttgagttcagtgtctagaatcccgtaacagagcacagatgtagagcttattgatacattctccaacacacgcagcctttgtgggactcacagtccttctaactgtggcatgttcctgagactgaaacctacccagtaaaagaaaaaaagttgacttttctgtccacacaattttctcttagtgcaatcaggaactgccacaggcc

SEQ ID NO: 23142 - DNA, 600 bp, Chicken  19866894236152_3
acaaagaaataagcaatgggcatggagagaaaatcagaaaagaatgaaataggagttgtatctttgatcacctgatgttctgttgatctatttgatcatggtgtatcagaagagctttgtatgttatactagattgtatctactacttactgctcaatgacagcttatttgctgtggtggcgtctgtcacagaacgtgcttcacttgccttgccatccttaacaaacatttatctttgttgcctcattctgacttgtatttctttccacrtcttraaaaatctaaattctttgcctactrcctctgcatttctggaattgctgctcatatgagctgcttcttagcccagtctgcttctccacaattccttttgagttcagtgtctagaatcccgtaacagagcacagatgtagagcttattgatacattctccaacacacgcagcctttgtgggactcacagtccttctaactgtggcatgttcctgagactgaaacctacccagtaaaagaaaaaaagttgacttttctgtccacacaattttctcttagtgcaatcaggaactgccacaggccagcaacaagtgagtgaacctgtagg

SEQ ID NO: 23143 - DNA, 599 bp, Chicken  19866894236154_1
  misc_feature (1)..(11): n is any nucleotide
nnnnnnnnnnncttctttattactaccagtggaggctgaaggcactgctgagctctagtctagctgcacttacagtccttcaaattggctcagatcagaaatgaaattcaaacgttgctctaaatctcatgttgttgctataaatccttgggctttttccccattcagtctcttttgggtggactcctggcaagtgtgacaggagcacagggcatttttgatatatggcatcaggtccgttagttcagaaaccccacacagaagcttgtttttagaaagagagaaaataagattaaacargacagggaatgctgttatgaaggaatgaaaatattttcattaccagagtatttgtatgtcaacagctgataggggatgatgtgagacattcccagaaggactcctgaagatttttccttgtgcaatagaccgattagcagagcccagattaaatgagcaatgtcattaatgcttcttgcactaagaagtgtgacattcaggctctttatctggtaaatatttgctcttttttagccttgtgactttcattatactgctttcaacagctctactttctcaagtaatagaggggaaaatat

SEQ ID NO: 23144 - DNA, 599 bp, Chicken  19866894236155_1
  misc_feature (1)..(62): n is any nucleotide
nnnnnnnnnnnnnnnnnnnnnnnnnnnnnnnnnnnnnnnnnnnnnnnnnnnnnnnnnnnnnnatgcactgtgccctcataactggctcacactgcggctcctccatgtgatgtcttctcaccctctttgcagcctgtgctctgactcaggtgtggaaataagcatcctcaaaagaggaatcattggctgatcagaaatgcatattatatgtaactttattgagcccttaggcattgttttcctgggtcacatttgatttcctaaatgttcagaggactgatgcatcctcttttcagacaygggatgcaagcatgcctggctcagtgtgctccctagcacctgtactgcacaattaacacttgccagggcaccttgctttccctcttcagactctgctcagacatgcatgtcttcagcttcttccagccaccctgtgttagtcataacctcattcctgttcctgtctgcttctgaagtggctggcagcagtaggcacaggctccttatcagggtaaacagagagcagttacgtcttcagatcctccctgcttgggtaaatgatgggttgatggtgagcaaaggccgcagggcttgtccta

SEQ ID NO: 23145 - DNA, 600 bp, Chicken  19866894236162_1
aaaggggctggtttcatttcatctgtcagcatgtcatgggcagctggctttgctgatggatttcttctttttgttatagaatggcttagtttggaaaggagcttacagcccacccagccccaacctcctgctgagggcagggatgcctcccagcagctcaggccacccagggccccatccagcctggccttgagtgcctgcagggatggggcacccacagctctctgggctgctgtgccagggcctcaccaccctctgagtgaagaatttcactctaacatctgaactaactctttcctyttttaatttataaccattccccaccatcccgtcactgtttgctcacgtaaaaaagttggtctccctcctatttataagctaccctcagttactggaaggctgtgggtgaggtccctctggagcttctcttctgcaagctaaatgagcccatctctctcagcctgccttcwtagtagtggtgctccagccctctgatcatcactgtggccttcctctggacccgtttcaagagctccatgagytctcttctcttgcacatgaatgtgtgaatgtgtgtggcacagagggtagagtaaaaga

SEQ ID NO: 23146 - DNA, 553 bp, Chicken  19866894236162_2
ggccccatccagcctggccttgagtgcctgcagggatggggcacccacagctctctgggctgctgtgccagggcctcaccaccctctgagtgaagaatttcactctaacatctgaactaactctttcctyttttaatttataaccattccccaccatcccgtcactgtttgctcacgtaaaaaagttggtctccctcctatttataagctaccctcagttactggaaggctgtgggtgaggtccctctggagcttctcttctgcaagctaaatgagcccatctctctcagcctgccttcwtagtagtggtgctccagccctctgatcatcactgtggccttcctctggacccgtttcaagagctccatgagytctcttctcttgcacatgaatgtgtgaatgtgtgtggcacagagggtagagtaaaagaaaaaaaaacctaaaaaaacaactcgggaaggtttttgtatgcaactaaggtcgaaaagaaggtttaggacttctcaagagtcttagttttgggagcagtgtatataattgtcattggtgttgt

SEQ ID NO: 23147 - DNA, 481 bp, Chicken  19866894236162_3
gcctcaccaccctctgagtgaagaatttcactctaacatctgaactaactctttcctyttttaatttataaccattccccaccatcccgtcactgtttgctcacgtaaaaaagttggtctccctcctatttataagctaccctcagttactggaaggctgtgggtgaggtccctctggagcttctcttctgcaagctaaatgagcccatctctctcagcctgccttcwtagtagtggtgctccagccctctgatcatcactgtggccttcctctggacccgtttcaagagctccatgagytctcttctcttgcacatgaatgtgtgaatgtgtgtggcacagagggtagagtaaaagaaaaaaaaacctaaaaaaacaactcgggaaggtttttgtatgcaactaaggtcgaaaagaaggtttaggacttctcaagagtcttagttttgggagcagtgtatataattgtcattggtgttgt

SEQ ID NO: 23148 - DNA, 599 bp, Chicken  19866894236170_1
  misc_feature (1)..(246): n is any nucleotide
nnnnnnnnnnnnnnnnnnnnnnnnnnnnnnnnnnnnnnnnnnnnnnnnnnnnnnnnnnnnnnnnnnnnnnnnnnnnnnnnnnnnnnnnnnnnnnnnnnnnnnnnnnnnnnnnnnnnnnnnnnnnnnnnnnnnnnnnnnnnnnnnnnnnnnnnnnnnnnnnnnnnnnnnnnnnnnnnnnnnnnnnnnnnnnnnnnnnnnnnnnnnnnnnnnnnnnnnnnnnnnnnnnnnnnnnnnnnnnnnnnnnnngctatcaactggcagactgaggatatcccccactgacactgctcaacctaaagygtcaagatggacacttttcacatacaaaaaaactgcttcctactggcttttctgaatgatcactttgactaccagcataaagcccagagcagtgtgatggcttttgtgttyctacagtggctgggaaccaaaggactttgcagttaaccctcacaagaagcagggaatattctgcaattacattaaggtgagcagaaccctttgagacracacaagcaatcagtgtcaaagctggaaagaggacttgggaagccctgagcacctgacaggactccaccatcactctacccccaagcaga

SEQ ID NO: 23149 - DNA, 599 bp, Chicken  19866894236170_2
  misc_feature (1)..(135): n is any nucleotide
nnnnnnnnnnnnnnnnnnnnnnnnnnnnnnnnnnnnnnnnnnnnnnnnnnnnnnnnnnnnnnnnnnnnnnnnnnnnnnnnnnnnnnnnnnnnnnnnnnnnnnnnnnnnnnnnnnnnnnnnnnnnnnnnnnnnnnngctatcaactggcagactgaggatatcccccactgacactgctcaacctaaagygtcaagatggacacttttcacatacaaaaaaactgcttcctactggcttttctgaatgatcactttgactaccagcataaagcccagagcagtgtgatggcttttgtgttyctacagtggctgggaaccaaaggactttgcagttaaccctcacaagaagcagggaatattctgcaattacattaaggtgagcagaaccctttgagacracacaagcaatcagtgtcaaagctggaaagaggacttgggaagccctgagcacctgacaggactccaccatcactctacccccaagcagagcaacatttcattccaccttcccctaccaaaacaagataataataatagtaataataataacaaataaaaataccataaacgtatctggtctttatggaaatttaacaaac

SEQ ID NO: 23150 - DNA, 599 bp, Chicken  19866894236170_3
  misc_feature (1)..(37): n is any nucleotide
nnnnnnnnnnnnnnnnnnnnnnnnnnnnnnnnnnnnngctatcaactggcagactgaggatatcccccactgacactgctcaacctaaagygtcaagatggacacttttcacatacaaaaaaactgcttcctactggcttttctgaatgatcactttgactaccagcataaagcccagagcagtgtgatggcttttgtgttyctacagtggctgggaaccaaaggactttgcagttaaccctcacaagaagcagggaatattctgcaattacattaaggtgagcagaaccctttgagacracacaagcaatcagtgtcaaagctggaaagaggacttgggaagccctgagcacctgacaggactccaccatcactctacccccaagcagagcaacatttcattccaccttcccctaccaaaacaagataataataatagtaataataataacaaataaaaataccataaacgtatctggtctttatggaaatttaacaaacctgccccttaaaactgagactgggagggaagaaataaacaatcacaaactctagttctgaagagcaccggtgtcttggaaaccatgaggagcagtgga

SEQ ID NO: 23151 - DNA, 600 bp, Chicken  19866894236171_1
gaaacatgcttccttgtacccaaacacatcgattttctcatgtactagaagtccaaaagcaagcccaatttcaaaggctgcactggaatattttgcagcaatgcataacagtggcagccacattctatatgtaacgctttggggaatgctactcaaatatgcctcctcatcacatccgggttctgattgctttttgctctgaacctactgtgtgtgtatgcatttgaatgcatcttttcctttctatgcactccgtatcttctttaaaaaagatcattcagatctcacagctgtgttgargggctctggcgtgtaccaaaaaaagcacgtctgcactgattcacacagaaatatagaagacagtatcagattgacagctcaaggaggtctcgcccgctggcccacatgcagcttgcagtgctcccgggaggactaaggctgggtttctcaggctccaagctgattaaaacaagaggtaatgctaaggccatatcaagtctcgatgttggggttagggaaagaagctgacagctgtcttgcaactggaggtaaaaggggcacagatagcagccgcaagtatgggaaactcagctttaggga

SEQ ID NO: 23152 - DNA, 600 bp, Chicken  19866894236175_1
aaggcaaaaatgatttctagattcactaaagttcattaaaagacagaaaatgaaaacgtagtgaatctttctttcactcacttcgggccattgaagtatgtgcactgtacagaaagttactttctcaactggaacctggctaggtactagagtgtttatacgacagtgtctttgttctaaatagaaaaggtggtccaattttaaaatgcatctgtctcattaaggatcaacagatttacaaagtaattagctgtctagtcctcatgtttaggtccttgaatgatacctgcagtatagaartacctttttgagctagacttttcaattcaggcttcataattgatgcagatgagtcctgcaccgcactggagtcctaagagattattcatctaatactaaagcaaaaagctggagtaaaagagttgaattgccagatttttccccrctaataacaggaagagttcaagatttgaactttaactatagtaatttatatcacaggtctgacagaaggtgagatgggtgctaccccaagtcttcacrctaacagaacaaatagcagcttcaaggaatatatgagcgtttaacctgactctgaga

SEQ ID NO: 23153 - DNA, 600 bp, Chicken  19866894236175_2
actagagtgtttatacgacagtgtctttgttctaaatagaaaaggtggtccaattttaaaatgcatctgtctcattaaggatcaacagatttacaaagtaattagctgtctagtcctcatgtttaggtccttgaatgatacctgcagtatagaartacctttttgagctagacttttcaattcaggcttcataattgatgcagatgagtcctgcaccgcactggagtcctaagagattattcatctaatactaaagcaaaaagctggagtaaaagagttgaattgccagatttttccccrctaataacaggaagagttcaagatttgaactttaactatagtaatttatatcacaggtctgacagaaggtgagatgggtgctaccccaagtcttcacrctaacagaacaaatagcagcttcaaggaatatatgagcgtttaacctgactctgagaaactctggaaacagtcaagaaatatagcacattgggaatagcagaaggggagttatactgaagctactacacatgatgtaggtaaaactcaacttcttgaaatgctctctcaaactattaatagacctaattttcgtaatacagc

SEQ ID NO: 23154 - DNA, 590 bp, Chicken  19866894236175_3
taattagctgtctagtcctcatgtttaggtccttgaatgatacctgcagtatagaartacctttttgagctagacttttcaattcaggcttcataattgatgcagatgagtcctgcaccgcactggagtcctaagagattattcatctaatactaaagcaaaaagctggagtaaaagagttgaattgccagatttttccccrctaataacaggaagagttcaagatttgaactttaactatagtaatttatatcacaggtctgacagaaggtgagatgggtgctaccccaagtcttcacrctaacagaacaaatagcagcttcaaggaatatatgagcgtttaacctgactctgagaaactctggaaacagtcaagaaatatagcacattgggaatagcagaaggggagttatactgaagctactacacatgatgtaggtaaaactcaacttcttgaaatgctctctcaaactattaatagacctaattttcgtaatacagctacaacttgtaggacatttagagatccagaggtctaagcaattcagaactagtattattctacacaattacttataaaacttctccaa

SEQ ID NO: 23155 - DNA, 600 bp, Chicken  19866894236177_1
aaaaatcttgtatgataaagttgctgtcttctcctggaagatattgcactccgttttattacactcattccctctagactgcagaaagagtttcttgttcccaagagcagtgtctgcaggttatctaattgctgattacatctaatgctggagcaggccctggagccaggggcaggtcccagatgagctgttgtgaacaccaggcacagagccagtgcttgcttcctggtcctcctgcaccagaactgaacttcttttcatgcacgatgaacctcattgtgcatggtgacagtgctttgmgtggtgttcaggggtttacctgggtgacaaatcagctgaaaaaggagaaatcgttatctcattcgtattatgcagagctgtgtcagcaagtctagtgcttgtactgctgatgctgggaaccctggaagtgttctggaattgaacatcctttggagtgatctttctacgtgatgtcaatggaagggcatttttgggtcacatttggcactgtaaagcaaagtcaagcctgaatagcacaacataattatgctttaatgaagaaatcataggatcacagaatcatcaaggttggaaaagact

SEQ ID NO: 23156 - DNA, 600 bp, Chicken  19866894236177_2
tgtgtcagcaagtctagtgcttgtactgctgatgctgggaaccctggaagtgttctggaattgaacatcctttggagtgatctttctacgtgatgtcaatggaagggcatttttgggtcacatttggcactgtaaagcaaagtcaagcctgaatagcacaacataattatgctttaatgaagaaatcataggatcacagaatcatcaaggttggaaaagacttccaaagatcattcagccatccacctaccaatatttccccaccaaaccattccctttagtacaatatctaagcatttytggggtagggraggaaaggtagccagagccctcaacagctacatgagaataaacgataggagggagagaagggagatggaggggaccagtaaaggtgtccaagttcattctccttccccagtagacaccaawgagatgctgaggacagtatttctatcatgcatctggataatgatgttcaagctgctgatgctggaggcagttctcccagcaatcaactccagctcttcttcccttagatgctaggaacctttctgatcctatctaaaagctcctttgtggccatgtgaaccaacccta

SEQ ID NO: 23157 - DNA, 600 bp, Chicken  19866894236177_3
gtctagtgcttgtactgctgatgctgggaaccctggaagtgttctggaattgaacatcctttggagtgatctttctacgtgatgtcaatggaagggcatttttgggtcacatttggcactgtaaagcaaagtcaagcctgaatagcacaacataattatgctttaatgaagaaatcataggatcacagaatcatcaaggttggaaaagacttccaaagatcattcagccatccacctaccaatatttccccaccaaaccattccctttagtacaatatctaagcatttytggggtagggraggaaaggtagccagagccctcaacagctacatgagaataaacgataggagggagagaagggagatggaggggaccagtaaaggtgtccaagttcattctccttccccagtagacaccaawgagatgctgaggacagtatttctatcatgcatctggataatgatgttcaagctgctgatgctggaggcagttctcccagcaatcaactccagctcttcttcccttagatgctaggaacctttctgatcctatctaaaagctcctttgtggccatgtgaaccaaccctaaagcagaaagt

SEQ ID NO: 23158 - DNA, 600 bp, Chicken  19866894236177_4
taaagcaaagtcaagcctgaatagcacaacataattatgctttaatgaagaaatcataggatcacagaatcatcaaggttggaaaagacttccaaagatcattcagccatccacctaccaatatttccccaccaaaccattccctttagtacaatatctaagcatttytggggtagggraggaaaggtagccagagccctcaacagctacatgagaataaacgataggagggagagaagggagatggaggggaccagtaaaggtgtccaagttcattctccttccccagtagacaccaawgagatgctgaggacagtatttctatcatgcatctggataatgatgttcaagctgctgatgctggaggcagttctcccagcaatcaactccagctcttcttcccttagatgctaggaacctttctgatcctatctaaaagctcctttgtggccatgtgaaccaaccctaaagcagaaagtggagagaatgcagcagctcaagctttcccactggggaagagattggaaggatctcatcctatcacacatcagtttacactgcccagcatgaagtgttcagcttttcaatagatgtagagtt

SEQ ID NO: 23159 - DNA, 600 bp, Chicken  19866894236179_1
caaacacatccgaagggctgtaattctgctggttcacgaggtgctccctggtgttgactgcaacaaagtcacgcacccacttcttcagctccttcacagtttccctctgctccttgtccaggactgtactgatatccaggtagtgcttttccagcctgttgatcagcgggatgggggaagtgcttatacaccacgtctttctcctcaatgacgatcaaacggaacttggggtgcacccggcacttcacccggtgggtgcccagccccaggtcaacgtacttctggccagcaaggtacacrtagtattggttaagggcatcgtagaggctttcatagaggttctgcaagttgaggagcacraccatttggccggtttccatgcagactttcacacggttgatgtttctgcatatctgggtgtactcctggtccttaggaaaactggagccaaagataatttckggctgctgccgggcagtgaagaaagcttgctggaggatctgcagcgctgcgtagttctcagtcaacacaagcaggtacctgcaatcaccatcctcactgctgctgtaaatgttctgtcgtatcagctcaattcgactg

SEQ ID NO: 23160 - DNA, 600 bp, Chicken  19866894236179_2
caacaaagtcacgcacccacttcttcagctccttcacagtttccctctgctccttgtccaggactgtactgatatccaggtagtgcttttccagcctgttgatcagcgggatgggggaagtgcttatacaccacgtctttctcctcaatgacgatcaaacggaacttggggtgcacccggcacttcacccggtgggtgcccagccccaggtcaacgtacttctggccagcaaggtacacrtagtattggttaagggcatcgtagaggctttcatagaggttctgcaagttgaggagcacraccatttggccggtttccatgcagactttcacacggttgatgtttctgcatatctgggtgtactcctggtccttaggaaaactggagccaaagataatttckggctgctgccgggcagtgaagaaagcttgctggaggatctgcagcgctgcgtagttctcagtcaacacaagcaggtacctgcaatcaccatcctcactgctgctgtaaatgttctgtcgtatcagctcaattcgactgatatcgtgagcattcacctctcctttttctggtaactgcgaggtgaatatttccaaggca

SEQ ID NO: 23161 - DNA, 600 bp, Chicken  19866894236179_3
tcagcgggatgggggaagtgcttatacaccacgtctttctcctcaatgacgatcaaacggaacttggggtgcacccggcacttcacccggtgggtgcccagccccaggtcaacgtacttctggccagcaaggtacacrtagtattggttaagggcatcgtagaggctttcatagaggttctgcaagttgaggagcacraccatttggccggtttccatgcagactttcacacggttgatgtttctgcatatctgggtgtactcctggtccttaggaaaactggagccaaagataatttckggctgctgccgggcagtgaagaaagcttgctggaggatctgcagcgctgcgtagttctcagtcaacacaagcaggtacctgcaatcaccatcctcactgctgctgtaaatgttctgtcgtatcagctcaattcgactgatatcgtgagcattcacctctcctttttctggtaactgcgaggtgaatatttccaaggcattgatatcatctttgccactgaagttacggaggacaacttcagctatgtctcgaggcgtgggctcactcttagagctcttaaccaaggcaaaaaacatcttt

SEQ ID NO: 23162 - DNA, 600 bp, Chicken  19866894236179_4
atctttataagactgtagtagtcacgcagaccaaagaactccctgtcctgggccttgcagatgatttcatatgcattggcaaagtgatggaagtactgttcgaccttgtgcaaagccccccgtgctgagcaacaaattcccttcgcactttctatgagctcctctttgctggggtcaccacgggagacaaagatgcctcgattcattttagcagggtccaaagcccagttggaaatcccaatgaagccaaccttcttgtgaggaagagggtcatcatctatgcagccatcttccagaagygggtgyaragtcttcagaggcattttgggagagtcttctgccagcccaatctcatccaaaaccaccacagagacatactcctccaggttcttcccatcctggaaccgagcacagtgcttgaaagtgcctatgataccctcgggagtagagagagggctgcactggaaagacaccagatggatttgcttcaggtccttgaacagatccgagtgagcagcttggccctgcatcgcatctgccactatggtttttgcaagggatttggagctgccaggcttcccaacaagaaaaagagggatt

SEQ ID NO: 23163 - DNA, 600 bp, Chicken  19866894236179_5
ataagactgtagtagtcacgcagaccaaagaactccctgtcctgggccttgcagatgatttcatatgcattggcaaagtgatggaagtactgttcgaccttgtgcaaagccccccgtgctgagcaacaaattcccttcgcactttctatgagctcctctttgctggggtcaccacgggagacaaagatgcctcgattcattttagcagggtccaaagcccagttggaaatcccaatgaagccaaccttcttgtgaggaagagggtcatcatctatgcagccatcttccagaagygggtgyaragtcttcagaggcattttgggagagtcttctgccagcccaatctcatccaaaaccaccacagagacatactcctccaggttcttcccatcctggaaccgagcacagtgcttgaaagtgcctatgataccctcgggagtagagagagggctgcactggaaagacaccagatggatttgcttcaggtccttgaacagatccgagtgagcagcttggccctgcatcgcatctgccactatggtttttgcaagggatttggagctgccaggcttcccaacaagaaaaagagggattttcagc

SEQ ID NO: 23164 - DNA, 600 bp, Chicken  19866894236179_6
aagactgtagtagtcacgcagaccaaagaactccctgtcctgggccttgcagatgatttcatatgcattggcaaagtgatggaagtactgttcgaccttgtgcaaagccccccgtgctgagcaacaaattcccttcgcactttctatgagctcctctttgctggggtcaccacgggagacaaagatgcctcgattcattttagcagggtccaaagcccagttggaaatcccaatgaagccaaccttcttgtgaggaagagggtcatcatctatgcagccatcttccagaagygggtgyaragtcttcagaggcattttgggagagtcttctgccagcccaatctcatccaaaaccaccacagagacatactcctccaggttcttcccatcctggaaccgagcacagtgcttgaaagtgcctatgataccctcgggagtagagagagggctgcactggaaagacaccagatggatttgcttcaggtccttgaacagatccgagtgagcagcttggccctgcatcgcatctgccactatggtttttgcaagggatttggagctgccaggcttcccaacaagaaaaagagggattttcagctc

SEQ ID NO: 23165 - DNA, 599 bp, Chicken  19866894236180_1
  misc_feature (1)..(253): n is any nucleotide
nnnnnnnnnnnnnnnnnnnnnnnnnnnnnnnnnnnnnnnnnnnnnnnnnnnnnnnnnnnnnnnnnnnnnnnnnnnnnnnnnnnnnnnnnnnnnnnnnnnnnnnnnnnnnnnnnnnnnnnnnnnnnnnnnnnnnnnnnnnnnnnnnnnnnnnnnnnnnnnnnnnnnnnnnnnnnnnnnnnnnnnnnnnnnnnnnnnnnnnnnnnnnnnnnnnnnnnnnnnnnnnnnnnnnnnnnnnnnnnnnnnnnnnnnnnnntgggtttgttctagcttaggaaggcagtacagactcacatgcctgcrcccccagatgctgctatctcactgtagagccagactgtaccccaaaagccatttacctgacccacaagcaggcgtgctgtcaacatgggctgctacaccaacccagggccagcactgtgtagctagatgcagtgcacttagaatgaaccatagaacggcctgggttgaaaaggaccacaatgcccatcagttccaacccccygctacrtgcagggttgccaaccagcagcccaggctgcccagagccacatccagcctggccttgagtgcctccagggatgrggcatccacagcctcct

SEQ ID NO: 23166 - DNA, 599 bp, Chicken  19866894236180_2
  misc_feature (1)..(51): n is any nucleotide
nnnnnnnnnnnnnnnnnnnnnnnnnnnnnnnnnnnnnnnnnnnnnnnnnnntgggtttgttctagcttaggaaggcagtacagactcacatgcctgcrcccccagatgctgctatctcactgtagagccagactgtaccccaaaagccatttacctgacccacaagcaggcgtgctgtcaacatgggctgctacaccaacccagggccagcactgtgtagctagatgcagtgcacttagaatgaaccatagaacggcctgggttgaaaaggaccacaatgcccatcagttccaacccccygctacrtgcagggttgccaaccagcagcccaggctgcccagagccacatccagcctggccttgagtgcctccagggatgrggcatccacagcctccttgggcaacctgttcagtgcggcagagagcattttgagaggaccctgcaggatgctcacctctgtaaagaccgtctggcactccgacccagagcggatgtgagctcggagaaagtctgcaaaagacgagtgctgctgctgcttgaagtacacgttggccagggaatcagttctaaacaacccccccgagttgcagagacggat

SEQ ID NO: 23167 - DNA, 599 bp, Chicken  19866894236180_3
  misc_feature (1)..(45): n is any nucleotide
nnnnnnnnnnnnnnnnnnnnnnnnnnnnnnnnnnnnnnnnnnnnntgggtttgttctagcttaggaaggcagtacagactcacatgcctgcrcccccagatgctgctatctcactgtagagccagactgtaccccaaaagccatttacctgacccacaagcaggcgtgctgtcaacatgggctgctacaccaacccagggccagcactgtgtagctagatgcagtgcacttagaatgaaccatagaacggcctgggttgaaaaggaccacaatgcccatcagttccaacccccygctacrtgcagggttgccaaccagcagcccaggctgcccagagccacatccagcctggccttgagtgcctccagggatgrggcatccacagcctccttgggcaacctgttcagtgcggcagagagcattttgagaggaccctgcaggatgctcacctctgtaaagaccgtctggcactccgacccagagcggatgtgagctcggagaaagtctgcaaaagacgagtgctgctgctgcttgaagtacacgttggccagggaatcagttctaaacaacccccccgagttgcagagacggatcacgga

SEQ ID NO: 23168 - DNA, 600 bp, Chicken  19866894236180_4
cagactcacatgcctgcrcccccagatgctgctatctcactgtagagccagactgtaccccaaaagccatttacctgacccacaagcaggcgtgctgtcaacatgggctgctacaccaacccagggccagcactgtgtagctagatgcagtgcacttagaatgaaccatagaacggcctgggttgaaaaggaccacaatgcccatcagttccaacccccygctacrtgcagggttgccaaccagcagcccaggctgcccagagccacatccagcctggccttgagtgcctccagggatgrggcatccacagcctccttgggcaacctgttcagtgcggcagagagcattttgagaggaccctgcaggatgctcacctctgtaaagaccgtctggcactccgacccagagcggatgtgagctcggagaaagtctgcaaaagacgagtgctgctgctgcttgaagtacacgttggccagggaatcagttctaaacaacccccccgagttgcagagacggatcacggagtcaggggtggcacagttgagcagcgccagctgcgcttcagccttgacacgtgccatgagctggctgggaggaca

SEQ ID NO: 23169 - DNA, 600 bp, Chicken  19866894236185_1
ttacctgtttataatcaaggacagaggccacttaacaatgtagtcaaaggaaaatgcttccagaccactgagagtgagctctgtgggatctgcaccaataatggccttttcctgtttcgtttctatggccaacactctcaagagctgcgtaatgaggtcatggggcatcaagtcaatctataaggaaagagcaggaaaacaatgaagccacggggtactcacaaacaccagggaacagcagttaagtggcagaagaactgcaaatcatcggtcaccctcaagtcactagatcaacctagrgagcgatgaggaatgccaccatctggacagtgctgcagcagacagcagagcagtgctgctgtgctgtttataaagtcatctcagtctccccaggcacagcctgtgtgctggctcacatttgtgaaggctttcgactgagtcgcaacaataattagtagtcagaacttataatcaatttcttgtaccccaaaatgagcatctaagcttgagaacacgggtgagagataaattactgctttcacctcatcctgatgccactcaaaagcactttctctgtgctcagacatcaacaagaaaatg
